United States Patent Application Publication US 2024/0026002 A1 - sequence listing, part 2

SEQ ID NO: 13554 - protein, 9 aa, synthetic construct
  REGION 1..9: note = Description of Artificial Sequence: Synthetic peptide
  REGION 1..9: note = XENP018784 vlCDR3
QQDYSSPRT

SEQ ID NO: 13555 - protein, 249 aa, synthetic construct
  REGION 1..249: note = Description of Artificial Sequence: Synthetic polypeptide
  REGION 1..249: note = XENP018785 1G6_H1_L1.43_scFv(GKPGS)4
EVQLVESGGGLVKPGGSLRLSCAASGFTFSNYWMNWVRQAPGKGLEWVGEIRLKSNNYATHYAEPVKGRFTISRDDSKSTVYLQMNSLKTEDTAVYYCTRYYGNYGGYFDVWGAGTLVTVSSGKPGSGKPGSGKPGSGKPGSSIVMTQSPATLSVSPGERATLSCRASQSVSNLVAWYQQKPGQSPRLLINYASHRYTGVPDRFTGSGYGTEFTLTISSLQSEDFAVYFCQQDYSSPRTFGGGTKVEIK

SEQ ID NO: 13556 - protein, 122 aa, synthetic construct; identical to SEQ ID NO: 10922
  REGION 1..122: note = Description of Artificial Sequence: Synthetic polypeptide
  REGION 1..122: note = VH of XENP018785

SEQ ID NO: 13557 - protein, 107 aa, synthetic construct
  REGION 1..107: note = Description of Artificial Sequence: Synthetic polypeptide
  REGION 1..107: note = VL of XENP018785
SIVMTQSPATLSVSPGERATLSCRASQSVSNLVAWYQQKPGQSPRLLINYASHRYTGVPDRFTGSGYGTEFTLTISSLQSEDFAVYFCQQDYSSPRTFGGGTKVEIK

SEQ ID NO: 13558 - protein, 5 aa, synthetic construct
  REGION 1..5: note = Description of Artificial Sequence: Synthetic peptide
  REGION 1..5: note = XENP018785 vhCDR1
NYWMN

SEQ ID NO: 13559 - protein, 19 aa, synthetic construct
  REGION 1..19: note = Description of Artificial Sequence: Synthetic peptide
  REGION 1..19: note = XENP018785 vhCDR2
EIRLKSNNYATHYAEPVKG

SEQ ID NO: 13560 - protein, 11 aa, synthetic construct
  REGION 1..11: note = Description of Artificial Sequence: Synthetic peptide
  REGION 1..11: note = XENP018785 vhCDR3
YYGNYGGYFDV

SEQ ID NO: 13561 - protein, 11 aa, synthetic construct
  REGION 1..11: note = Description of Artificial Sequence: Synthetic peptide
  REGION 1..11: note = XENP018785 vlCDR1
RASQSVSNLVA

SEQ ID NO: 13562 - protein, 7 aa, synthetic construct
  REGION 1..7: note = Description of Artificial Sequence: Synthetic peptide
  REGION 1..7: note = XENP018785 vlCDR2
YASHRYT

SEQ ID NO: 13563 - protein, 9 aa, synthetic construct
  REGION 1..9: note = Description of Artificial Sequence: Synthetic peptide
  REGION 1..9: note = XENP018785 vlCDR3
QQDYSSPRT

SEQ ID NO: 13564 - protein, 249 aa, synthetic construct
  REGION 1..249: note = Description of Artificial Sequence: Synthetic polypeptide
  REGION 1..249: note = XENP018786 1G6_H1_L1.44_scFv(GKPGS)4
EVQLVESGGGLVKPGGSLRLSCAASGFTFSNYWMNWVRQAPGKGLEWVGEIRLKSNNYATHYAEPVKGRFTISRDDSKSTVYLQMNSLKTEDTAVYYCTRYYGNYGGYFDVWGAGTLVTVSSGKPGSGKPGSGKPGSGKPGSSIVMTQSPATLSVSPGERATLSCRASQSVSNTVAWYQQKPGQSPRLLINYASHRYTGVPDRFTGSGYGTEFTLTISSLQSEDFAVYFCQQDYSSPRTFGGGTKVEIK

SEQ ID NO: 13565 - protein, 122 aa, synthetic construct; identical to SEQ ID NO: 10922
  REGION 1..122: note = Description of Artificial Sequence: Synthetic polypeptide
  REGION 1..122: note = VH of XENP018786

SEQ ID NO: 13566 - protein, 107 aa, synthetic construct
  REGION 1..107: note = Description of Artificial Sequence: Synthetic polypeptide
  REGION 1..107: note = VL of XENP018786
SIVMTQSPATLSVSPGERATLSCRASQSVSNTVAWYQQKPGQSPRLLINYASHRYTGVPDRFTGSGYGTEFTLTISSLQSEDFAVYFCQQDYSSPRTFGGGTKVEIK

SEQ ID NO: 13567 - protein, 5 aa, synthetic construct
  REGION 1..5: note = Description of Artificial Sequence: Synthetic peptide
  REGION 1..5: note = XENP018786 vhCDR1
NYWMN

SEQ ID NO: 13568 - protein, 19 aa, synthetic construct
  REGION 1..19: note = Description of Artificial Sequence: Synthetic peptide
  REGION 1..19: note = XENP018786 vhCDR2
EIRLKSNNYATHYAEPVKG

SEQ ID NO: 13569 - protein, 11 aa, synthetic construct
  REGION 1..11: note = Description of Artificial Sequence: Synthetic peptide
  REGION 1..11: note = XENP018786 vhCDR3
YYGNYGGYFDV

SEQ ID NO: 13570 - protein, 11 aa, synthetic construct
  REGION 1..11: note = Description of Artificial Sequence: Synthetic peptide
  REGION 1..11: note = XENP018786 vlCDR1
RASQSVSNTVA

SEQ ID NO: 13571 - protein, 7 aa, synthetic construct
  REGION 1..7: note = Description of Artificial Sequence: Synthetic peptide
  REGION 1..7: note = XENP018786 vlCDR2
YASHRYT

SEQ ID NO: 13572 - protein, 9 aa, synthetic construct
  REGION 1..9: note = Description of Artificial Sequence: Synthetic peptide
  REGION 1..9: note = XENP018786 vlCDR3
QQDYSSPRT

SEQ ID NO: 13573 - protein, 249 aa, synthetic construct
  REGION 1..249: note = Description of Artificial Sequence: Synthetic polypeptide
  REGION 1..249: note = XENP018787 1G6_H1_L1.45_scFv(GKPGS)4
EVQLVESGGGLVKPGGSLRLSCAASGFTFSNYWMNWVRQAPGKGLEWVGEIRLKSNNYATHYAEPVKGRFTISRDDSKSTVYLQMNSLKTEDTAVYYCTRYYGNYGGYFDVWGAGTLVTVSSGKPGSGKPGSGKPGSGKPGSSIVMTQSPATLSVSPGERATLSCRASQSVSNGVAWYQQKPGQSPRLLINYASHRYTGVPDRFTGSGYGTEFTLTISSLQSEDFAVYFCQQDYSSPRTFGGGTKVEIK

SEQ ID NO: 13574 - protein, 122 aa, synthetic construct; identical to SEQ ID NO: 10922
  REGION 1..122: note = Description of Artificial Sequence: Synthetic polypeptide
  REGION 1..122: note = VH of XENP018787

SEQ ID NO: 13575 - protein, 107 aa, synthetic construct
  REGION 1..107: note = Description of Artificial Sequence: Synthetic polypeptide
  REGION 1..107: note = VL of XENP018787
SIVMTQSPATLSVSPGERATLSCRASQSVSNGVAWYQQKPGQSPRLLINYASHRYTGVPDRFTGSGYGTEFTLTISSLQSEDFAVYFCQQDYSSPRTFGGGTKVEIK

SEQ ID NO: 13576 - protein, 5 aa, synthetic construct
  REGION 1..5: note = Description of Artificial Sequence: Synthetic peptide
  REGION 1..5: note = XENP018787 vhCDR1
NYWMN

SEQ ID NO: 13577 - protein, 19 aa, synthetic construct
  REGION 1..19: note = Description of Artificial Sequence: Synthetic peptide
  REGION 1..19: note = XENP018787 vhCDR2
EIRLKSNNYATHYAEPVKG

SEQ ID NO: 13578 - protein, 11 aa, synthetic construct
  REGION 1..11: note = Description of Artificial Sequence: Synthetic peptide
  REGION 1..11: note = XENP018787 vhCDR3
YYGNYGGYFDV

SEQ ID NO: 13579 - protein, 11 aa, synthetic construct
  REGION 1..11: note = Description of Artificial Sequence: Synthetic peptide
  REGION 1..11: note = XENP018787 vlCDR1
RASQSVSNGVA

SEQ ID NO: 13580 - protein, 7 aa, synthetic construct
  REGION 1..7: note = Description of Artificial Sequence: Synthetic peptide
  REGION 1..7: note = XENP018787 vlCDR2
YASHRYT

SEQ ID NO: 13581 - protein, 9 aa, synthetic construct
  REGION 1..9: note = Description of Artificial Sequence: Synthetic peptide
  REGION 1..9: note = XENP018787 vlCDR3
QQDYSSPRT

SEQ ID NO: 13582 - protein, 249 aa, synthetic construct
  REGION 1..249: note = Description of Artificial Sequence: Synthetic polypeptide
  REGION 1..249: note = XENP018788 1G6_H1_L1.46_scFv(GKPGS)4
EVQLVESGGGLVKPGGSLRLSCAASGFTFSNYWMNWVRQAPGKGLEWVGEIRLKSNNYATHYAEPVKGRFTISRDDSKSTVYLQMNSLKTEDTAVYYCTRYYGNYGGYFDVWGAGTLVTVSSGKPGSGKPGSGKPGSGKPGSSIVMTQSPATLSVSPGERATLSCRASQSVSNYVAWYQQKPGQSPRLLINYASHRYTGVPDRFTGSGYGTEFTLTISSLQSEDFAVYFCQQDYSSPRTFGGGTKVEIK

SEQ ID NO: 13583 - protein, 122 aa, synthetic construct; identical to SEQ ID NO: 10922
  REGION 1..122: note = Description of Artificial Sequence: Synthetic polypeptide
  REGION 1..122: note = VH of XENP018788

SEQ ID NO: 13584 - protein, 107 aa, synthetic construct
  REGION 1..107: note = Description of Artificial Sequence: Synthetic polypeptide
  REGION 1..107: note = VL of XENP018788
SIVMTQSPATLSVSPGERATLSCRASQSVSNYVAWYQQKPGQSPRLLINYASHRYTGVPDRFTGSGYGTEFTLTISSLQSEDFAVYFCQQDYSSPRTFGGGTKVEIK

SEQ ID NO: 13585 - protein, 5 aa, synthetic construct
  REGION 1..5: note = Description of Artificial Sequence: Synthetic peptide
  REGION 1..5: note = XENP018788 vhCDR1
NYWMN

SEQ ID NO: 13586 - protein, 19 aa, synthetic construct
  REGION 1..19: note = Description of Artificial Sequence: Synthetic peptide
  REGION 1..19: note = XENP018788 vhCDR2
EIRLKSNNYATHYAEPVKG

SEQ ID NO: 13587 - protein, 11 aa, synthetic construct
  REGION 1..11: note = Description of Artificial Sequence: Synthetic peptide
  REGION 1..11: note = XENP018788 vhCDR3
YYGNYGGYFDV

SEQ ID NO: 13588 - protein, 11 aa, synthetic construct
  REGION 1..11: note = Description of Artificial Sequence: Synthetic peptide
  REGION 1..11: note = XENP018788 vlCDR1
RASQSVSNYVA

SEQ ID NO: 13589 - protein, 7 aa, synthetic construct
  REGION 1..7: note = Description of Artificial Sequence: Synthetic peptide
  REGION 1..7: note = XENP018788 vlCDR2
YASHRYT

SEQ ID NO: 13590 - protein, 9 aa, synthetic construct
  REGION 1..9: note = Description of Artificial Sequence: Synthetic peptide
  REGION 1..9: note = XENP018788 vlCDR3
QQDYSSPRT

SEQ ID NO: 13591 - protein, 249 aa, synthetic construct
  REGION 1..249: note = Description of Artificial Sequence: Synthetic polypeptide
  REGION 1..249: note = XENP018789 1G6_H1_L1.47_scFv(GKPGS)4
EVQLVESGGGLVKPGGSLRLSCAASGFTFSNYWMNWVRQAPGKGLEWVGEIRLKSNNYATHYAEPVKGRFTISRDDSKSTVYLQMNSLKTEDTAVYYCTRYYGNYGGYFDVWGAGTLVTVSSGKPGSGKPGSGKPGSGKPGSSIVMTQSPATLSVSPGERATLSCRASQSVSNDLAWYQQKPGQSPRLLINYASHRYTGVPDRFTGSGYGTEFTLTISSLQSEDFAVYFCQQDYSSPRTFGGGTKVEIK

SEQ ID NO: 13592 - protein, 122 aa, synthetic construct; identical to SEQ ID NO: 10922
  REGION 1..122: note = Description of Artificial Sequence: Synthetic polypeptide
  REGION 1..122: note = VH of XENP018789

SEQ ID NO: 13593 - protein, 107 aa, synthetic construct
  REGION 1..107: note = Description of Artificial Sequence: Synthetic polypeptide
  REGION 1..107: note = VL of XENP018789
SIVMTQSPATLSVSPGERATLSCRASQSVSNDLAWYQQKPGQSPRLLINYASHRYTGVPDRFTGSGYGTEFTLTISSLQSEDFAVYFCQQDYSSPRTFGGGTKVEIK

SEQ ID NO: 13594 - protein, 5 aa, synthetic construct
  REGION 1..5: note = Description of Artificial Sequence: Synthetic peptide
  REGION 1..5: note = XENP018789 vhCDR1
NYWMN

SEQ ID NO: 13595 - protein, 19 aa, synthetic construct
  REGION 1..19: note = Description of Artificial Sequence: Synthetic peptide
  REGION 1..19: note = XENP018789 vhCDR2
EIRLKSNNYATHYAEPVKG

SEQ ID NO: 13596 - protein, 11 aa, synthetic construct
  REGION 1..11: note = Description of Artificial Sequence: Synthetic peptide
  REGION 1..11: note = XENP018789 vhCDR3
YYGNYGGYFDV

SEQ ID NO: 13597 - protein, 11 aa, synthetic construct
  REGION 1..11: note = Description of Artificial Sequence: Synthetic peptide
  REGION 1..11: note = XENP018789 vlCDR1
RASQSVSNDLA

SEQ ID NO: 13598 - protein, 7 aa, synthetic construct
  REGION 1..7: note = Description of Artificial Sequence: Synthetic peptide
  REGION 1..7: note = XENP018789 vlCDR2
YASHRYT

SEQ ID NO: 13599 - protein, 9 aa, synthetic construct
  REGION 1..9: note = Description of Artificial Sequence: Synthetic peptide
  REGION 1..9: note = XENP018789 vlCDR3
QQDYSSPRT

SEQ ID NO: 13600 - protein, 249 aa, synthetic construct
  REGION 1..249: note = Description of Artificial Sequence: Synthetic polypeptide
  REGION 1..249: note = XENP018790 1G6_H1_L1.48_scFv(GKPGS)4
EVQLVESGGGLVKPGGSLRLSCAASGFTFSNYWMNWVRQAPGKGLEWVGEIRLKSNNYATHYAEPVKGRFTISRDDSKSTVYLQMNSLKTEDTAVYYCTRYYGNYGGYFDVWGAGTLVTVSSGKPGSGKPGSGKPGSGKPGSSIVMTQSPATLSVSPGERATLSCRASQSVSNDVSWYQQKPGQSPRLLINYASHRYTGVPDRFTGSGYGTEFTLTISSLQSEDFAVYFCQQDYSSPRTFGGGTKVEIK

SEQ ID NO: 13601 - protein, 122 aa, synthetic construct; identical to SEQ ID NO: 10922
  REGION 1..122: note = Description of Artificial Sequence: Synthetic polypeptide
  REGION 1..122: note = VH of XENP018790

SEQ ID NO: 13602 - protein, 107 aa, synthetic construct
  REGION 1..107: note = Description of Artificial Sequence: Synthetic polypeptide
  REGION 1..107: note = VL of XENP018790
SIVMTQSPATLSVSPGERATLSCRASQSVSNDVSWYQQKPGQSPRLLINYASHRYTGVPDRFTGSGYGTEFTLTISSLQSEDFAVYFCQQDYSSPRTFGGGTKVEIK

SEQ ID NO: 13603 - protein, 5 aa, synthetic construct
  REGION 1..5: note = Description of Artificial Sequence: Synthetic peptide
  REGION 1..5: note = XENP018790 vhCDR1
NYWMN

SEQ ID NO: 13604 - protein, 19 aa, synthetic construct
  REGION 1..19: note = Description of Artificial Sequence: Synthetic peptide
  REGION 1..19: note = XENP018790 vhCDR2
EIRLKSNNYATHYAEPVKG

SEQ ID NO: 13605 - protein, 11 aa, synthetic construct
  REGION 1..11: note = Description of Artificial Sequence: Synthetic peptide
  REGION 1..11: note = XENP018790 vhCDR3
YYGNYGGYFDV

SEQ ID NO: 13606 - protein, 11 aa, synthetic construct
  REGION 1..11: note = Description of Artificial Sequence: Synthetic peptide
  REGION 1..11: note = XENP018790 vlCDR1
RASQSVSNDVS

SEQ ID NO: 13607 - protein, 7 aa, synthetic construct
  REGION 1..7: note = Description of Artificial Sequence: Synthetic peptide
  REGION 1..7: note = XENP018790 vlCDR2
YASHRYT

SEQ ID NO: 13608 - protein, 9 aa, synthetic construct
  REGION 1..9: note = Description of Artificial Sequence: Synthetic peptide
  REGION 1..9: note = XENP018790 vlCDR3
QQDYSSPRT

SEQ ID NO: 13609 - protein, 249 aa, synthetic construct
  REGION 1..249: note = Description of Artificial Sequence: Synthetic polypeptide
  REGION 1..249: note = XENP018791 1G6_H1_L1.49_scFv(GKPGS)4
EVQLVESGGGLVKPGGSLRLSCAASGFTFSNYWMNWVRQAPGKGLEWVGEIRLKSNNYATHYAEPVKGRFTISRDDSKSTVYLQMNSLKTEDTAVYYCTRYYGNYGGYFDVWGAGTLVTVSSGKPGSGKPGSGKPGSGKPGSSIVMTQSPATLSVSPGERATLSCRASQSVSNDVTWYQQKPGQSPRLLINYASHRYTGVPDRFTGSGYGTEFTLTISSLQSEDFAVYFCQQDYSSPRTFGGGTKVEIK

SEQ ID NO: 13610 - protein, 122 aa, synthetic construct; identical to SEQ ID NO: 10922
  REGION 1..122: note = Description of Artificial Sequence: Synthetic polypeptide
  REGION 1..122: note = VH of XENP018791

SEQ ID NO: 13611 - protein, 107 aa, synthetic construct
  REGION 1..107: note = Description of Artificial Sequence: Synthetic polypeptide
  REGION 1..107: note = VL of XENP018791
SIVMTQSPATLSVSPGERATLSCRASQSVSNDVTWYQQKPGQSPRLLINYASHRYTGVPDRFTGSGYGTEFTLTISSLQSEDFAVYFCQQDYSSPRTFGGGTKVEIK

SEQ ID NO: 13612 - protein, 5 aa, synthetic construct
  REGION 1..5: note = Description of Artificial Sequence: Synthetic peptide
  REGION 1..5: note = XENP018791 vhCDR1
NYWMN

SEQ ID NO: 13613 - protein, 19 aa, synthetic construct
  REGION 1..19: note = Description of Artificial Sequence: Synthetic peptide
  REGION 1..19: note = XENP018791 vhCDR2
EIRLKSNNYATHYAEPVKG

SEQ ID NO: 13614 - protein, 11 aa, synthetic construct
  REGION 1..11: note = Description of Artificial Sequence: Synthetic peptide
  REGION 1..11: note = XENP018791 vhCDR3
YYGNYGGYFDV

SEQ ID NO: 13615 - protein, 11 aa, synthetic construct
  REGION 1..11: note = Description of Artificial Sequence: Synthetic peptide
  REGION 1..11: note = XENP018791 vlCDR1
RASQSVSNDVT

SEQ ID NO: 13616 - protein, 7 aa, synthetic construct
  REGION 1..7: note = Description of Artificial Sequence: Synthetic peptide
  REGION 1..7: note = XENP018791 vlCDR2
YASHRYT

SEQ ID NO: 13617 - protein, 9 aa, synthetic construct
  REGION 1..9: note = Description of Artificial Sequence: Synthetic peptide
  REGION 1..9: note = XENP018791 vlCDR3
QQDYSSPRT

SEQ ID NO: 13618 - protein, 249 aa, synthetic construct
  REGION 1..249: note = Description of Artificial Sequence: Synthetic polypeptide
  REGION 1..249: note = XENP018792 1G6_H1_L1.50_scFv(GKPGS)4
EVQLVESGGGLVKPGGSLRLSCAASGFTFSNYWMNWVRQAPGKGLEWVGEIRLKSNNYATHYAEPVKGRFTISRDDSKSTVYLQMNSLKTEDTAVYYCTRYYGNYGGYFDVWGAGTLVTVSSGKPGSGKPGSGKPGSGKPGSSIVMTQSPATLSVSPGERATLSCRASQSVSNDVAWYQQKPGQAPRLLINYASHRYTGVPDRFTGSGYGTEFTLTISSLQSEDFAVYFCQQDYSSPRTFGGGTKVEIK

SEQ ID NO: 13619 - protein, 122 aa, synthetic construct; identical to SEQ ID NO: 10922
  REGION 1..122: note = Description of Artificial Sequence: Synthetic polypeptide
  REGION 1..122: note = VH of XENP018792

SEQ ID NO: 13620 - protein, 107 aa, synthetic construct
  REGION 1..107: note = Description of Artificial Sequence: Synthetic polypeptide
  REGION 1..107: note = VL of XENP018792
SIVMTQSPATLSVSPGERATLSCRASQSVSNDVAWYQQKPGQAPRLLINYASHRYTGVPDRFTGSGYGTEFTLTISSLQSEDFAVYFCQQDYSSPRTFGGGTKVEIK

SEQ ID NO: 13621 - protein, 5 aa, synthetic construct
  REGION 1..5: note = Description of Artificial Sequence: Synthetic peptide
  REGION 1..5: note = XENP018792 vhCDR1
NYWMN

SEQ ID NO: 13622 - protein, 19 aa, synthetic construct
  REGION 1..19: note = Description of Artificial Sequence: Synthetic peptide
  REGION 1..19: note = XENP018792 vhCDR2
EIRLKSNNYATHYAEPVKG

SEQ ID NO: 13623 - protein, 11 aa, synthetic construct
  REGION 1..11: note = Description of Artificial Sequence: Synthetic peptide
  REGION 1..11: note = XENP018792 vhCDR3
YYGNYGGYFDV

SEQ ID NO: 13624 - protein, 11 aa, synthetic construct
  REGION 1..11: note = Description of Artificial Sequence: Synthetic peptide
  REGION 1..11: note = XENP018792 vlCDR1
RASQSVSNDVA

SEQ ID NO: 13625 - protein, 7 aa, synthetic construct
  REGION 1..7: note = Description of Artificial Sequence: Synthetic peptide
  REGION 1..7: note = XENP018792 vlCDR2
YASHRYT

SEQ ID NO: 13626 - protein, 9 aa, synthetic construct
  REGION 1..9: note = Description of Artificial Sequence: Synthetic peptide
  REGION 1..9: note = XENP018792 vlCDR3
QQDYSSPRT

SEQ ID NO: 13627 - protein, 249 aa, synthetic construct
  REGION 1..249: note = Description of Artificial Sequence: Synthetic polypeptide
  REGION 1..249: note = XENP018793 1G6_H1_L1.51_scFv(GKPGS)4
EVQLVESGGGLVKPGGSLRLSCAASGFTFSNYWMNWVRQAPGKGLEWVGEIRLKSNNYATHYAEPVKGRFTISRDDSKSTVYLQMNSLKTEDTAVYYCTRYYGNYGGYFDVWGAGTLVTVSSGKPGSGKPGSGKPGSGKPGSSIVMTQSPATLSVSPGERATLSCRASQSVSNDVAWYQQKPGQSPKLLINYASHRYTGVPDRFTGSGYGTEFTLTISSLQSEDFAVYFCQQDYSSPRTFGGGTKVEIK

SEQ ID NO: 13628 - protein, 122 aa, synthetic construct; identical to SEQ ID NO: 10922
  REGION 1..122: note = Description of Artificial Sequence: Synthetic polypeptide
  REGION 1..122: note = VH of XENP018793

SEQ ID NO: 13629 - protein, 107 aa, synthetic construct
  REGION 1..107: note = Description of Artificial Sequence: Synthetic polypeptide
  REGION 1..107: note = VL of XENP018793
SIVMTQSPATLSVSPGERATLSCRASQSVSNDVAWYQQKPGQSPKLLINYASHRYTGVPDRFTGSGYGTEFTLTISSLQSEDFAVYFCQQDYSSPRTFGGGTKVEIK

SEQ ID NO: 13630 - protein, 5 aa, synthetic construct
  REGION 1..5: note = Description of Artificial Sequence: Synthetic peptide
  REGION 1..5: note = XENP018793 vhCDR1
NYWMN

SEQ ID NO: 13631 - protein, 19 aa, synthetic construct
  REGION 1..19: note = Description of Artificial Sequence: Synthetic peptide
  REGION 1..19: note = XENP018793 vhCDR2
EIRLKSNNYATHYAEPVKG

SEQ ID NO: 13632 - protein, 11 aa, synthetic construct
  REGION 1..11: note = Description of Artificial Sequence: Synthetic peptide
  REGION 1..11: note = XENP018793 vhCDR3
YYGNYGGYFDV

SEQ ID NO: 13633 - protein, 11 aa, synthetic construct
  REGION 1..11: note = Description of Artificial Sequence: Synthetic peptide
  REGION 1..11: note = XENP018793 vlCDR1
RASQSVSNDVA

SEQ ID NO: 13634 - protein, 7 aa, synthetic construct
  REGION 1..7: note = Description of Artificial Sequence: Synthetic peptide
  REGION 1..7: note = XENP018793 vlCDR2
YASHRYT

SEQ ID NO: 13635 - protein, 9 aa, synthetic construct
  REGION 1..9: note = Description of Artificial Sequence: Synthetic peptide
  REGION 1..9: note = XENP018793 vlCDR3
QQDYSSPRT

SEQ ID NO: 13636 - protein, 249 aa, synthetic construct
  REGION 1..249: note = Description of Artificial Sequence: Synthetic polypeptide
  REGION 1..249: note = XENP018794 1G6_H1_L1.52_scFv(GKPGS)4
EVQLVESGGGLVKPGGSLRLSCAASGFTFSNYWMNWVRQAPGKGLEWVGEIRLKSNNYATHYAEPVKGRFTISRDDSKSTVYLQMNSLKTEDTAVYYCTRYYGNYGGYFDVWGAGTLVTVSSGKPGSGKPGSGKPGSGKPGSSIVMTQSPATLSVSPGERATLSCRASQSVSNDVAWYQQKPGQSPQLLINYASHRYTGVPDRFTGSGYGTEFTLTISSLQSEDFAVYFCQQDYSSPRTFGGGTKVEIK

SEQ ID NO: 13637 - protein, 122 aa, synthetic construct; identical to SEQ ID NO: 10922
  REGION 1..122: note = Description of Artificial Sequence: Synthetic polypeptide
  REGION 1..122: note = VH of XENP018794

SEQ ID NO: 13638 - protein, 107 aa, synthetic construct
  REGION 1..107: note = Description of Artificial Sequence: Synthetic polypeptide
  REGION 1..107: note = VL of XENP018794
SIVMTQSPATLSVSPGERATLSCRASQSVSNDVAWYQQKPGQSPQLLINYASHRYTGVPDRFTGSGYGTEFTLTISSLQSEDFAVYFCQQDYSSPRTFGGGTKVEIK

SEQ ID NO: 13639 - protein, 5 aa, synthetic construct
  REGION 1..5: note = Description of Artificial Sequence: Synthetic peptide
  REGION 1..5: note = XENP018794 vhCDR1
NYWMN

SEQ ID NO: 13640 - protein, 19 aa, synthetic construct
  REGION 1..19: note = Description of Artificial Sequence: Synthetic peptide
  REGION 1..19: note = XENP018794 vhCDR2
EIRLKSNNYATHYAEPVKG

SEQ ID NO: 13641 - protein, 11 aa, synthetic construct
  REGION 1..11: note = Description of Artificial Sequence: Synthetic peptide
  REGION 1..11: note = XENP018794 vhCDR3
YYGNYGGYFDV

SEQ ID NO: 13642 - protein, 11 aa, synthetic construct
  REGION 1..11: note = Description of Artificial Sequence: Synthetic peptide
  REGION 1..11: note = XENP018794 vlCDR1
RASQSVSNDVA

SEQ ID NO: 13643 - protein, 7 aa, synthetic construct
  REGION 1..7: note = Description of Artificial Sequence: Synthetic peptide
  REGION 1..7: note = XENP018794 vlCDR2
YASHRYT

SEQ ID NO: 13644 - protein, 9 aa, synthetic construct
  REGION 1..9: note = Description of Artificial Sequence: Synthetic peptide
  REGION 1..9: note = XENP018794 vlCDR3
QQDYSSPRT

SEQ ID NO: 13645 - protein, 249 aa, synthetic construct
  REGION 1..249: note = Description of Artificial Sequence: Synthetic polypeptide
  REGION 1..249: note = XENP018795 1G6_H1_L1.53_scFv(GKPGS)4
EVQLVESGGGLVKPGGSLRLSCAASGFTFSNYWMNWVRQAPGKGLEWVGEIRLKSNNYATHYAEPVKGRFTISRDDSKSTVYLQMNSLKTEDTAVYYCTRYYGNYGGYFDVWGAGTLVTVSSGKPGSGKPGSGKPGSGKPGSSIVMTQSPATLSVSPGERATLSCRASQSVSNDVAWYQQKPGQSPILLINYASHRYTGVPDRFTGSGYGTEFTLTISSLQSEDFAVYFCQQDYSSPRTFGGGTKVEIK

SEQ ID NO: 13646 - protein, 122 aa, synthetic construct; identical to SEQ ID NO: 10922
  REGION 1..122: note = Description of Artificial Sequence: Synthetic polypeptide
  REGION 1..122: note = VH of XENP018795

SEQ ID NO: 13647 - protein, 107 aa, synthetic construct
  REGION 1..107: note = Description of Artificial Sequence: Synthetic polypeptide
  REGION 1..107: note = VL of XENP018795
SIVMTQSPATLSVSPGERATLSCRASQSVSNDVAWYQQKPGQSPILLINYASHRYTGVPDRFTGSGYGTEFTLTISSLQSEDFAVYFCQQDYSSPRTFGGGTKVEIK

SEQ ID NO: 13648 - protein, 5 aa, synthetic construct
  REGION 1..5: note = Description of Artificial Sequence: Synthetic peptide
  REGION 1..5: note = XENP018795 vhCDR1
NYWMN

SEQ ID NO: 13649 - protein, 19 aa, synthetic construct
  REGION 1..19: note = Description of Artificial Sequence: Synthetic peptide
  REGION 1..19: note = XENP018795 vhCDR2
EIRLKSNNYATHYAEPVKG

SEQ ID NO: 13650 - protein, 11 aa, synthetic construct
  REGION 1..11: note = Description of Artificial Sequence: Synthetic peptide
  REGION 1..11: note = XENP018795 vhCDR3
YYGNYGGYFDV

SEQ ID NO: 13651 - protein, 11 aa, synthetic construct
  REGION 1..11: note = Description of Artificial Sequence: Synthetic peptide
  REGION 1..11: note = XENP018795 vlCDR1
RASQSVSNDVA

SEQ ID NO: 13652 - protein, 7 aa, synthetic construct
  REGION 1..7: note = Description of Artificial Sequence: Synthetic peptide
  REGION 1..7: note = XENP018795 vlCDR2
YASHRYT

SEQ ID NO: 13653 - protein, 9 aa, synthetic construct
  REGION 1..9: note = Description of Artificial Sequence: Synthetic peptide
  REGION 1..9: note = XENP018795 vlCDR3
QQDYSSPRT

SEQ ID NO: 13654 - protein, 249 aa, synthetic construct
  REGION 1..249: note = Description of Artificial Sequence: Synthetic polypeptide
  REGION 1..249: note = XENP018796 1G6_H1_L1.54_scFv(GKPGS)4
EVQLVESGGGLVKPGGSLRLSCAASGFTFSNYWMNWVRQAPGKGLEWVGEIRLKSNNYATHYAEPVKGRFTISRDDSKSTVYLQMNSLKTEDTAVYYCTRYYGNYGGYFDVWGAGTLVTVSSGKPGSGKPGSGKPGSGKPGSSIVMTQSPATLSVSPGERATLSCRASQSVSNDVAWYQQKPGQSPRLLIYYASHRYTGVPDRFTGSGYGTEFTLTISSLQSEDFAVYFCQQDYSSPRTFGGGTKVEIK

SEQ ID NO: 13655 - protein, 122 aa, synthetic construct; identical to SEQ ID NO: 10922
  REGION 1..122: note = Description of Artificial Sequence: Synthetic polypeptide
  REGION 1..122: note = VH of XENP018796

SEQ ID NO: 13656 - protein, 107 aa, synthetic construct
  REGION 1..107: note = Description of Artificial Sequence: Synthetic polypeptide
  REGION 1..107: note = VL of XENP018796
SIVMTQSPATLSVSPGERATLSCRASQSVSNDVAWYQQKPGQSPRLLIYYASHRYTGVPDRFTGSGYGTEFTLTISSLQSEDFAVYFCQQDYSSPRTFGGGTKVEIK

SEQ ID NO: 13657 - protein, 5 aa, synthetic construct
  REGION 1..5: note = Description of Artificial Sequence: Synthetic peptide
  REGION 1..5: note = XENP018796 vhCDR1
NYWMN

SEQ ID NO: 13658 - protein, 19 aa, synthetic construct
  REGION 1..19: note = Description of Artificial Sequence: Synthetic peptide
  REGION 1..19: note = XENP018796 vhCDR2
EIRLKSNNYATHYAEPVKG

SEQ ID NO: 13659 - protein, 11 aa, synthetic construct
  REGION 1..11: note = Description of Artificial Sequence: Synthetic peptide
  REGION 1..11: note = XENP018796 vhCDR3
YYGNYGGYFDV

SEQ ID NO: 13660 - protein, 11 aa, synthetic construct
  REGION 1..11: note = Description of Artificial Sequence: Synthetic peptide
  REGION 1..11: note = XENP018796 vlCDR1
RASQSVSNDVA

SEQ ID NO: 13661 - protein, 7 aa, synthetic construct
  REGION 1..7: note = Description of Artificial Sequence: Synthetic peptide
  REGION 1..7: note = XENP018796 vlCDR2
YASHRYT

SEQ ID NO: 13662 - protein, 9 aa, synthetic construct
  REGION 1..9: note = Description of Artificial Sequence: Synthetic peptide
  REGION 1..9: note = XENP018796 vlCDR3
QQDYSSPRT

SEQ ID NO: 13663 - protein, 249 aa, synthetic construct
  REGION 1..249: note = Description of Artificial Sequence: Synthetic polypeptide
  REGION 1..249: note = XENP018801 1G6_H1_L1.55_scFv(GKPGS)4
EVQLVESGGGLVKPGGSLRLSCAASGFTFSNYWMNWVRQAPGKGLEWVGEIRLKSNNYATHYAEPVKGRFTISRDDSKSTVYLQMNSLKTEDTAVYYCTRYYGNYGGYFDVWGAGTLVTVSSGKPGSGKPGSGKPGSGKPGSSIVMTQSPATLSVSPGERATLSCRASQSVSNDVAWYQQKPGQSPRLLINFASHRYTGVPDRFTGSGYGTEFTLTISSLQSEDFAVYFCQQDYSSPRTFGGGTKVEIK

SEQ ID NO: 13664 - protein, 122 aa, synthetic construct; identical to SEQ ID NO: 10922
  REGION 1..122: note = Description of Artificial Sequence: Synthetic polypeptide
  REGION 1..122: note = VH of XENP018801

SEQ ID NO: 13665 - protein, 107 aa, synthetic construct
  REGION 1..107: note = Description of Artificial Sequence: Synthetic polypeptide
  REGION 1..107: note = VL of XENP018801
SIVMTQSPATLSVSPGERATLSCRASQSVSNDVAWYQQKPGQSPRLLINFASHRYTGVPDRFTGSGYGTEFTLTISSLQSEDFAVYFCQQDYSSPRTFGGGTKVEIK

SEQ ID NO: 13666 - protein, 5 aa, synthetic construct
  REGION 1..5: note = Description of Artificial Sequence: Synthetic peptide
  REGION 1..5: note = XENP018801 vhCDR1
NYWMN

SEQ ID NO: 13667 - protein, 19 aa, synthetic construct
  REGION 1..19: note = Description of Artificial Sequence: Synthetic peptide
  REGION 1..19: note = XENP018801 vhCDR2
EIRLKSNNYATHYAEPVKG

SEQ ID NO: 13668 - protein, 11 aa, synthetic construct
  REGION 1..11: note = Description of Artificial Sequence: Synthetic peptide
  REGION 1..11: note = XENP018801 vhCDR3
YYGNYGGYFDV

SEQ ID NO: 13669 - protein, 11 aa, synthetic construct
  REGION 1..11: note = Description of Artificial Sequence: Synthetic peptide
  REGION 1..11: note = XENP018801 vlCDR1
RASQSVSNDVA

SEQ ID NO: 13670 - protein, 7 aa, synthetic construct
  REGION 1..7: note = Description of Artificial Sequence: Synthetic peptide
  REGION 1..7: note = XENP018801 vlCDR2
FASHRYT

SEQ ID NO: 13671 - protein, 9 aa, synthetic construct
  REGION 1..9: note = Description of Artificial Sequence: Synthetic peptide
  REGION 1..9: note = XENP018801 vlCDR3
QQDYSSPRT

SEQ ID NO: 13672 - protein, 249 aa, synthetic construct
  REGION 1..249: note = Description of Artificial Sequence: Synthetic polypeptide
  REGION 1..249: note = XENP018802 1G6_H1_L1.56_scFv(GKPGS)4
EVQLVESGGGLVKPGGSLRLSCAASGFTFSNYWMNWVRQAPGKGLEWVGEIRLKSNNYATHYAEPVKGRFTISRDDSKSTVYLQMNSLKTEDTAVYYCTRYYGNYGGYFDVWGAGTLVTVSSGKPGSGKPGSGKPGSGKPGSSIVMTQSPATLSVSPGERATLSCRASQSVSNDVAWYQQKPGQSPRLLINHASHRYTGVPDRFTGSGYGTEFTLTISSLQSEDFAVYFCQQDYSSPRTFGGGTKVEIK

SEQ ID NO: 13673 - protein, 122 aa, synthetic construct; identical to SEQ ID NO: 10922
  REGION 1..122: note = Description of Artificial Sequence: Synthetic polypeptide
  REGION 1..122: note = VH of XENP018802

SEQ ID NO: 13674 - protein, 107 aa, synthetic construct
  REGION 1..107: note = Description of Artificial Sequence: Synthetic polypeptide
  REGION 1..107: note = VL of XENP018802
SIVMTQSPATLSVSPGERATLSCRASQSVSNDVAWYQQKPGQSPRLLINHASHRYTGVPDRFTGSGYGTEFTLTISSLQSEDFAVYFCQQDYSSPRTFGGGTKVEIK

SEQ ID NO: 13675 - protein, 5 aa, synthetic construct
  REGION 1..5: note = Description of Artificial Sequence: Synthetic peptide
  REGION 1..5: note = XENP018802 vhCDR1
NYWMN

SEQ ID NO: 13676 - protein, 19 aa, synthetic construct
  REGION 1..19: note = Description of Artificial Sequence: Synthetic peptide
  REGION 1..19: note = XENP018802 vhCDR2
EIRLKSNNYATHYAEPVKG

SEQ ID NO: 13677 - protein, 11 aa, synthetic construct
  REGION 1..11: note = Description of Artificial Sequence: Synthetic peptide
  REGION 1..11: note = XENP018802 vhCDR3
YYGNYGGYFDV

SEQ ID NO: 13678 - protein, 11 aa, synthetic construct
  REGION 1..11: note = Description of Artificial Sequence: Synthetic peptide
  REGION 1..11: note = XENP018802 vlCDR1
RASQSVSNDVA

SEQ ID NO: 13679 - protein, 7 aa, synthetic construct
  REGION 1..7: note = Description of Artificial Sequence: Synthetic peptide
  REGION 1..7: note = XENP018802 vlCDR2
HASHRYT

SEQ ID NO: 13680 - protein, 9 aa, synthetic construct
  REGION 1..9: note = Description of Artificial Sequence: Synthetic peptide
  REGION 1..9: note = XENP018802 vlCDR3
QQDYSSPRT

SEQ ID NO: 13681 - protein, 249 aa, synthetic construct
  REGION 1..249: note = Description of Artificial Sequence: Synthetic polypeptide
  REGION 1..249: note = XENP018803 1G6_H1_L1.57_scFv(GKPGS)4
EVQLVESGGGLVKPGGSLRLSCAASGFTFSNYWMNWVRQAPGKGLEWVGEIRLKSNNYATHYAEPVKGRFTISRDDSKSTVYLQMNSLKTEDTAVYYCTRYYGNYGGYFDVWGAGTLVTVSSGKPGSGKPGSGKPGSGKPGSSIVMTQSPATLSVSPGERATLSCRASQSVSNDVAWYQQKPGQSPRLLINLASHRYTGVPDRFTGSGYGTEFTLTISSLQSEDFAVYFCQQDYSSPRTFGGGTKVEIK

SEQ ID NO: 13682 - protein, 122 aa, synthetic construct; identical to SEQ ID NO: 10922
  REGION 1..122: note = Description of Artificial Sequence: Synthetic polypeptide
  REGION 1..122: note = VH of XENP018803

SEQ ID NO: 13683 - protein, 107 aa, synthetic construct
  REGION 1..107: note = Description of Artificial Sequence: Synthetic polypeptide
  REGION 1..107: note = VL of XENP018803
SIVMTQSPATLSVSPGERATLSCRASQSVSNDVAWYQQKPGQSPRLLINLASHRYTGVPDRFTGSGYGTEFTLTISSLQSEDFAVYFCQQDYSSPRTFGGGTKVEIK

SEQ ID NO: 13684 - protein, 5 aa, synthetic construct
  REGION 1..5: note = Description of Artificial Sequence: Synthetic peptide
  REGION 1..5: note = XENP018803 vhCDR1
NYWMN

SEQ ID NO: 13685 - protein, 19 aa, synthetic construct
  REGION 1..19: note = Description of Artificial Sequence: Synthetic peptide
  REGION 1..19: note = XENP018803 vhCDR2
EIRLKSNNYATHYAEPVKG

SEQ ID NO: 13686 - protein, 11 aa, synthetic construct
  REGION 1..11: note = Description of Artificial Sequence: Synthetic peptide
  REGION 1..11: note = XENP018803 vhCDR3
YYGNYGGYFDV

SEQ ID NO: 13687 - protein, 11 aa, synthetic construct
  REGION 1..11: note = Description of Artificial Sequence: Synthetic peptide
  REGION 1..11: note = XENP018803 vlCDR1
RASQSVSNDVA

SEQ ID NO: 13688 - protein, 7 aa, synthetic construct
  REGION 1..7: note = Description of Artificial Sequence: Synthetic peptide
  REGION 1..7: note = XENP018803 vlCDR2
LASHRYT

SEQ ID NO: 13689 - protein, 9 aa, synthetic construct
  REGION 1..9: note = Description of Artificial Sequence: Synthetic peptide
  REGION 1..9: note = XENP018803 vlCDR3
QQDYSSPRT

SEQ ID NO: 13690 - protein, 249 aa, synthetic construct
  REGION 1..249: note = Description of Artificial Sequence: Synthetic polypeptide
  REGION 1..249: note = XENP018804 1G6_H1_L1.58_scFv(GKPGS)4
EVQLVESGGGLVKPGGSLRLSCAASGFTFSNYWMNWVRQAPGKGLEWVGEIRLKSNNYATHYAEPVKGRFTISRDDSKSTVYLQMNSLKTEDTAVYYCTRYYGNYGGYFDVWGAGTLVTVSSGKPGSGKPGSGKPGSGKPGSSIVMTQSPATLSVSPGERATLSCRASQSVSNDVAWYQQKPGQSPRLLINWASHRYTGVPDRFTGSGYGTEFTLTISSLQSEDFAVYFCQQDYSSPRTFGGGTKVEIK

SEQ ID NO: 13691 - protein, 122 aa, synthetic construct; identical to SEQ ID NO: 10922
  REGION 1..122: note = Description of Artificial Sequence: Synthetic polypeptide
  REGION 1..122: note = VH of XENP018804

SEQ ID NO: 13692 - protein, 107 aa, synthetic construct
  REGION 1..107: note = Description of Artificial Sequence: Synthetic polypeptide
  REGION 1..107: note = VL of XENP018804
SIVMTQSPATLSVSPGERATLSCRASQSVSNDVAWYQQKPGQSPRLLINWASHRYTGVPDRFTGSGYGTEFTLTISSLQSEDFAVYFCQQDYSSPRTFGGGTKVEIK

SEQ ID NO: 13693 - protein, 5 aa, synthetic construct
  REGION 1..5: note = Description of Artificial Sequence: Synthetic peptide
  REGION 1..5: note = XENP018804 vhCDR1
NYWMN

SEQ ID NO: 13694 - protein, 19 aa, synthetic construct
  REGION 1..19: note = Description of Artificial Sequence: Synthetic peptide
  REGION 1..19: note = XENP018804 vhCDR2
EIRLKSNNYATHYAEPVKG

SEQ ID NO: 13695 - protein, 11 aa, synthetic construct
  REGION 1..11: note = Description of Artificial Sequence: Synthetic peptide
  REGION 1..11: note = XENP018804 vhCDR3
YYGNYGGYFDV

SEQ ID NO: 13696 - protein, 11 aa, synthetic construct
  REGION 1..11: note = Description of Artificial Sequence: Synthetic peptide
  REGION 1..11: note = XENP018804 vlCDR1
RASQSVSNDVA

SEQ ID NO: 13697 - protein, 7 aa, synthetic construct
  REGION 1..7: note = Description of Artificial Sequence: Synthetic peptide
  REGION 1..7: note = XENP018804 vlCDR2
WASHRYT

SEQ ID NO: 13698 - protein, 9 aa, synthetic construct
  REGION 1..9: note = Description of Artificial Sequence: Synthetic peptide
  REGION 1..9: note = XENP018804 vlCDR3
QQDYSSPRT

SEQ ID NO: 13699 - protein, 249 aa, synthetic construct
  REGION 1..249: note = Description of Artificial Sequence: Synthetic polypeptide
  REGION 1..249: note = XENP018805 1G6_H1_L1.59_scFv(GKPGS)4
EVQLVESGGGLVKPGGSLRLSCAASGFTFSNYWMNWVRQAPGKGLEWVGEIRLKSNNYATHYAEPVKGRFTISRDDSKSTVYLQMNSLKTEDTAVYYCTRYYGNYGGYFDVWGAGTLVTVSSGKPGSGKPGSGKPGSGKPGSSIVMTQSPATLSVSPGERATLSCRASQSVSNDVAWYQQKPGQSPRLLINVASHRYTGVPDRFTGSGYGTEFTLTISSLQSEDFAVYFCQQDYSSPRTFGGGTKVEIK

SEQ ID NO: 13700 - protein, 122 aa, synthetic construct; identical to SEQ ID NO: 10922
  REGION 1..122: note = Description of Artificial Sequence: Synthetic polypeptide
  REGION 1..122: note = VH of XENP018805

SEQ ID NO: 13701 - protein, 107 aa, synthetic construct
  REGION 1..107: note = Description of Artificial Sequence: Synthetic polypeptide
  REGION 1..107: note = VL of XENP018805
SIVMTQSPATLSVSPGERATLSCRASQSVSNDVAWYQQKPGQSPRLLINVASHRYTGVPDRFTGSGYGTEFTLTISSLQSEDFAVYFCQQDYSSPRTFGGGTKVEIK

SEQ ID NO: 13702 - protein, 5 aa, synthetic construct
  REGION 1..5: note = Description of Artificial Sequence: Synthetic peptide
  REGION 1..5: note = XENP018805 vhCDR1
NYWMN

SEQ ID NO: 13703 - protein, 19 aa, synthetic construct
  REGION 1..19: note = Description of Artificial Sequence: Synthetic peptide
  REGION 1..19: note = XENP018805 vhCDR2
EIRLKSNNYATHYAEPVKG

SEQ ID NO: 13704 - protein, 11 aa, synthetic construct
  REGION 1..11: note = Description of Artificial Sequence: Synthetic peptide
  REGION 1..11: note = XENP018805 vhCDR3
YYGNYGGYFDV

SEQ ID NO: 13705 - protein, 11 aa, synthetic construct
  REGION 1..11: note = Description of Artificial Sequence: Synthetic peptide
  REGION 1..11: note = XENP018805 vlCDR1
RASQSVSNDVA

SEQ ID NO: 13706 - protein, 7 aa, synthetic construct
  REGION 1..7: note = Description of Artificial Sequence: Synthetic peptide
  REGION 1..7: note = XENP018805 vlCDR2
VASHRYT

SEQ ID NO: 13707 - protein, 9 aa, synthetic construct
  REGION 1..9: note = Description of Artificial Sequence: Synthetic peptide
  REGION 1..9: note = XENP018805 vlCDR3
QQDYSSPRT

SEQ ID NO: 13708 - protein, 249 aa, synthetic construct
  REGION 1..249: note = Description of Artificial Sequence: Synthetic polypeptide
  REGION 1..249: note = XENP018806 1G6_H1_L1.60_scFv(GKPGS)4
EVQLVESGGGLVKPGGSLRLSCAASGFTFSNYWMNWVRQAPGKGLEWVGEIRLKSNNYATHYAEPVKGRFTISRDDSKSTVYLQMNSLKTEDTAVYYCTRYYGNYGGYFDVWGAGTLVTVSSGKPGSGKPGSGKPGSGKPGSSIVMTQSPATLSVSPGERATLSCRASQSVSNDVAWYQQKPGQSPRLLINAASHRYTGVPDRFTGSGYGTEFTLTISSLQSEDFAVYFCQQDYSSPRTFGGGTKVEIK

SEQ ID NO: 13709 - protein, 122 aa, synthetic construct; identical to SEQ ID NO: 10922
  REGION 1..122: note = Description of Artificial Sequence: Synthetic polypeptide
  REGION 1..122: note = VH of XENP018806

SEQ ID NO: 13710 - protein, 107 aa, synthetic construct
  REGION 1..107: note = Description of Artificial Sequence: Synthetic polypeptide
  REGION 1..107: note = VL of XENP018806
SIVMTQSPATLSVSPGERATLSCRASQSVSNDVAWYQQKPGQSPRLLINAASHRYTGVPDRFTGSGYGTEFTLTISSLQSEDFAVYFCQQDYSSPRTFGGGTKVEIK

SEQ ID NO: 13711 - protein, 5 aa, synthetic construct
  REGION 1..5: note = Description of Artificial Sequence: Synthetic peptide
  REGION 1..5: note = XENP018806 vhCDR1
NYWMN

SEQ ID NO: 13712 - protein, 19 aa, synthetic construct
  REGION 1..19: note = Description of Artificial Sequence: Synthetic peptide
  REGION 1..19: note = XENP018806 vhCDR2
EIRLKSNNYATHYAEPVKG

SEQ ID NO: 13713 - protein, 11 aa, synthetic construct
  REGION 1..11: note = Description of Artificial Sequence: Synthetic peptide
  REGION 1..11: note = XENP018806 vhCDR3
YYGNYGGYFDV

SEQ ID NO: 13714 - protein, 11 aa, synthetic construct
  REGION 1..11: note = Description of Artificial Sequence: Synthetic peptide
  REGION 1..11: note = XENP018806 vlCDR1
RASQSVSNDVA

SEQ ID NO: 13715 - protein, 7 aa, synthetic construct
  REGION 1..7: note = Description of Artificial Sequence: Synthetic peptide
  REGION 1..7: note = XENP018806 vlCDR2
AASHRYT

SEQ ID NO: 13716 - protein, 9 aa, synthetic construct
  REGION 1..9: note = Description of Artificial Sequence: Synthetic peptide
  REGION 1..9: note = XENP018806 vlCDR3
QQDYSSPRT

SEQ ID NO: 13717 - protein, 249 aa, synthetic construct
  REGION 1..249: note = Description of Artificial Sequence: Synthetic polypeptide
  REGION 1..249: note = XENP018807 1G6_H1_L1.61_scFv(GKPGS)4
EVQLVESGGGLVKPGGSLRLSCAASGFTFSNYWMNWVRQAPGKGLEWVGEIRLKSNNYATHYAEPVKGRFTISRDDSKSTVYLQMNSLKTEDTAVYYCTRYYGNYGGYFDVWGAGTLVTVSSGKPGSGKPGSGKPGSGKPGSSIVMTQSPATLSVSPGERATLSCRASQSVSNDVAWYQQKPGQSPRLLINQASHRYTGVPDRFTGSGYGTEFTLTISSLQSEDFAVYFCQQDYSSPRTFGGGTKVEIK

SEQ ID NO: 13718 - protein, 122 aa, synthetic construct; identical to SEQ ID NO: 10922
  REGION 1..122: note = Description of Artificial Sequence: Synthetic polypeptide
  REGION 1..122: note = VH of XENP018807

SEQ ID NO: 13719 - protein, 107 aa, synthetic construct
  REGION 1..107: note = Description of Artificial Sequence: Synthetic polypeptide
  REGION 1..107: note = VL of XENP018807
SIVMTQSPATLSVSPGERATLSCRASQSVSNDVAWYQQKPGQSPRLLINQASHRYTGVPDRFTGSGYGTEFTLTISSLQSEDFAVYFCQQDYSSPRTFGGGTKVEIK

SEQ ID NO: 13720 - protein, 5 aa, synthetic construct
  REGION 1..5: note = Description of Artificial Sequence: Synthetic peptide
  REGION 1..5: note = XENP018807 vhCDR1
NYWMN

SEQ ID NO: 13721 - protein, 19 aa, synthetic construct
  REGION 1..19: note = Description of Artificial Sequence: Synthetic peptide
  REGION 1..19: note = XENP018807 vhCDR2
EIRLKSNNYATHYAEPVKG

SEQ ID NO: 13722 - protein, 11 aa, synthetic construct
  REGION 1..11: note = Description of Artificial Sequence: Synthetic peptide
  REGION 1..11: note = XENP018807 vhCDR3
YYGNYGGYFDV

SEQ ID NO: 13723 - protein, 11 aa, synthetic construct
  REGION 1..11: note = Description of Artificial Sequence: Synthetic peptide
  REGION 1..11: note = XENP018807 vlCDR1
RASQSVSNDVA

SEQ ID NO: 13724 - protein, 7 aa, synthetic construct
  REGION 1..7: note = Description of Artificial Sequence: Synthetic peptide
  REGION 1..7: note = XENP018807 vlCDR2
QASHRYT

SEQ ID NO: 13725 - protein, 9 aa, synthetic construct
  REGION 1..9: note = Description of Artificial Sequence: Synthetic peptide
  REGION 1..9: note = XENP018807 vlCDR3
QQDYSSPRT

SEQ ID NO: 13726 - protein, 249 aa, synthetic construct
  REGION 1..249: note = Description of Artificial Sequence: Synthetic polypeptide
  REGION 1..249: note = XENP018808 1G6_H1_L1.62_scFv(GKPGS)4
EVQLVESGGGLVKPGGSLRLSCAASGFTFSNYWMNWVRQAPGKGLEWVGEIRLKSNNYATHYAEPVKGRFTISRDDSKSTVYLQMNSLKTEDTAVYYCTRYYGNYGGYFDVWGAGTLVTVSSGKPGSGKPGSGKPGSGKPGSSIVMTQSPATLSVSPGERATLSCRASQSVSNDVAWYQQKPGQSPRLLINDASHRYTGVPDRFTGSGYGTEFTLTISSLQSEDFAVYFCQQDYSSPRTFGGGTKVEIK

SEQ ID NO: 13727 - protein, 122 aa, synthetic construct; identical to SEQ ID NO: 10922
  REGION 1..122: note = Description of Artificial Sequence: Synthetic polypeptide
  REGION 1..122: note = VH of XENP018808

SEQ ID NO: 13728 - protein, 107 aa, synthetic construct
  REGION 1..107: note = Description of Artificial Sequence: Synthetic polypeptide
  REGION 1..107: note = VL of XENP018808
SIVMTQSPATLSVSPGERATLSCRASQSVSNDVAWYQQKPGQSPRLLINDASHRYTGVPDRFTGSGYGTEFTLTISSLQSEDFAVYFCQQDYSSPRTFGGGTKVEIK

SEQ ID NO: 13729 - protein, 5 aa, synthetic construct
  REGION 1..5: note = Description of Artificial Sequence: Synthetic peptide
  REGION 1..5: note = XENP018808 vhCDR1
NYWMN

SEQ ID NO: 13730 - protein, 19 aa, synthetic construct
  REGION 1..19: note = Description of Artificial Sequence: Synthetic peptide
  REGION 1..19: note = XENP018808 vhCDR2
EIRLKSNNYATHYAEPVKG

SEQ ID NO: 13731 - protein, 11 aa, synthetic construct
  REGION 1..11: note = Description of Artificial Sequence: Synthetic peptide
  REGION 1..11: note = XENP018808 vhCDR3
YYGNYGGYFDV

SEQ ID NO: 13732 - protein, 11 aa, synthetic construct
  REGION 1..11: note = Description of Artificial Sequence: Synthetic peptide
  REGION 1..11: note = XENP018808 vlCDR1
RASQSVSNDVA

SEQ ID NO: 13733 - protein, 7 aa, synthetic construct
  REGION 1..7: note = Description of Artificial Sequence: Synthetic peptide
  REGION 1..7: note = XENP018808 vlCDR2
DASHRYT

SEQ ID NO: 13734 - protein, 9 aa, synthetic construct
  REGION 1..9: note = Description of Artificial Sequence: Synthetic peptide
  REGION 1..9: note = XENP018808 vlCDR3
QQDYSSPRT

SEQ ID NO: 13735 - protein, 249 aa, synthetic construct
  REGION 1..249: note = Description of Artificial Sequence: Synthetic polypeptide
  REGION 1..249: note = XENP018809 1G6_H1_L1.63_scFv(GKPGS)4
EVQLVESGGGLVKPGGSLRLSCAASGFTFSNYWMNWVRQAPGKGLEWVGEIRLKSNNYATHYAEPVKGRFTISRDDSKSTVYLQMNSLKTEDTAVYYCTRYYGNYGGYFDVWGAGTLVTVSSGKPGSGKPGSGKPGSGKPGSSIVMTQSPATLSVSPGERATLSCRASQSVSNDVAWYQQKPGQSPRLLINKASHRYTGVPDRFTGSGYGTEFTLTISSLQSEDFAVYFCQQDYSSPRTFGGGTKVEIK

SEQ ID NO: 13736 - protein, 122 aa, synthetic construct; identical to SEQ ID NO: 10922
  REGION 1..122: note = Description of Artificial Sequence: Synthetic polypeptide
  REGION 1..122: note = VH of XENP018809

SEQ ID NO: 13737 - protein, 107 aa, synthetic construct
  REGION 1..107: note = Description of Artificial Sequence: Synthetic polypeptide
  REGION 1..107: note = VL of XENP018809
SIVMTQSPATLSVSPGERATLSCRASQSVSNDVAWYQQKPGQSPRLLINKASHRYTGVPDRFTGSGYGTEFTLTISSLQSEDFAVYFCQQDYSSPRTFGGGTKVEIK

SEQ ID NO: 13738 - protein, 5 aa, synthetic construct
  REGION 1..5: note = Description of Artificial Sequence: Synthetic peptide
  REGION 1..5: note = XENP018809 vhCDR1
NYWMN

SEQ ID NO: 13739 - protein, 19 aa, synthetic construct
  REGION 1..19: note = Description of Artificial Sequence: Synthetic peptide
  REGION 1..19: note = XENP018809 vhCDR2
EIRLKSNNYATHYAEPVKG

SEQ ID NO: 13740 - protein, 11 aa, synthetic construct
  REGION 1..11: note = Description of Artificial Sequence: Synthetic peptide
  REGION 1..11: note = XENP018809 vhCDR3
YYGNYGGYFDV

SEQ ID NO: 13741 - protein, 11 aa, synthetic construct
  REGION 1..11: note = Description of Artificial Sequence: Synthetic peptide
  REGION 1..11: note = XENP018809 vlCDR1
RASQSVSNDVA

SEQ ID NO: 13742 - protein, 7 aa, synthetic construct
  REGION 1..7: note = Description of Artificial Sequence: Synthetic peptide
  REGION 1..7: note = XENP018809 vlCDR2
KASHRYT

SEQ ID NO: 13743 - protein, 9 aa, synthetic construct
  REGION 1..9: note = Description of Artificial Sequence: Synthetic peptide
  REGION 1..9: note = XENP018809 vlCDR3
QQDYSSPRT

SEQ ID NO: 13744 - protein, 249 aa, synthetic construct
  REGION 1..249: note = Description of Artificial Sequence: Synthetic polypeptide
  REGION 1..249: note = XENP018810 1G6_H1_L1.64_scFv(GKPGS)4
EVQLVESGGGLVKPGGSLRLSCAASGFTFSNYWMNWVRQAPGKGLEWVGEIRLKSNNYATHYAEPVKGRFTISRDDSKSTVYLQMNSLKTEDTAVYYCTRYYGNYGGYFDVWGAGTLVTVSSGKPGSGKPGSGKPGSGKPGSSIVMTQSPATLSVSPGERATLSCRASQSVSNDVAWYQQKPGQSPRLLINYASYRYTGVPDRFTGSGYGTEFTLTISSLQSEDFAVYFCQQDYSSPRTFGGGTKVEIK

SEQ ID NO: 13745 - protein, 122 aa, synthetic construct; identical to SEQ ID NO: 10922
  REGION 1..122: note = Description of Artificial Sequence: Synthetic polypeptide
  REGION 1..122: note = VH of XENP018810

SEQ ID NO: 13746 - protein, 107 aa, synthetic construct
  REGION 1..107: note = Description of Artificial Sequence: Synthetic polypeptide
  REGION 1..107: note = VL of XENP018810
SIVMTQSPATLSVSPGERATLSCRASQSVSNDVAWYQQKPGQSPRLLINYASYRYTGVPDRFTGSGYGTEFTLTISSLQSEDFAVYFCQQDYSSPRTFGGGTKVEIK

SEQ ID NO: 13747 - protein, 5 aa, synthetic construct
  REGION 1..5: note = Description of Artificial Sequence: Synthetic peptide
  REGION 1..5: note = XENP018810 vhCDR1
NYWMN

SEQ ID NO: 13748 - protein, 19 aa, synthetic construct
  REGION 1..19: note = Description of Artificial Sequence: Synthetic peptide
  REGION 1..19: note = XENP018810 vhCDR2
EIRLKSNNYATHYAEPVKG

SEQ ID NO: 13749 - protein, 11 aa, synthetic construct
  REGION 1..11: note = Description of Artificial Sequence: Synthetic peptide
  REGION 1..11: note = XENP018810 vhCDR3
YYGNYGGYFDV

SEQ ID NO: 13750 - protein, 11 aa, synthetic construct
  REGION 1..11: note = Description of Artificial Sequence: Synthetic peptide
  REGION 1..11: note = XENP018810 vlCDR1
RASQSVSNDVA

SEQ ID NO: 13751 - protein, 7 aa, synthetic construct
  REGION 1..7: note = Description of Artificial Sequence: Synthetic peptide
  REGION 1..7: note = XENP018810 vlCDR2
YASYRYT

SEQ ID NO: 13752 - protein, 9 aa, synthetic construct
  REGION 1..9: note = Description of Artificial Sequence: Synthetic peptide
  REGION 1..9: note = XENP018810 vlCDR3
QQDYSSPRT

SEQ ID NO: 13753 - protein, 249 aa, synthetic construct
  REGION 1..249: note = Description of Artificial Sequence: Synthetic polypeptide
  REGION 1..249: note = XENP018811 1G6_H1_L1.65_scFv(GKPGS)4
EVQLVESGGGLVKPGGSLRLSCAASGFTFSNYWMNWVRQAPGKGLEWVGEIRLKSNNYATHYAEPVKGRFTISRDDSKSTVYLQMNSLKTEDTAVYYCTRYYGNYGGYFDVWGAGTLVTVSSGKPGSGKPGSGKPGSGKPGSSIVMTQSPATLSVSPGERATLSCRASQSVSNDVAWYQQKPGQSPRLLINYASQRYTGVPDRFTGSGYGTEFTLTISSLQSEDFAVYFCQQDYSSPRTFGGGTKVEIK

SEQ ID NO: 13754 - protein, 122 aa, synthetic construct; identical to SEQ ID NO: 10922
  REGION 1..122: note = Description of Artificial Sequence: Synthetic polypeptide
  REGION 1..122: note = VH of XENP018811

SEQ ID NO: 13755 - protein, 107 aa, synthetic construct
  REGION 1..107: note = Description of Artificial Sequence: Synthetic polypeptide
  REGION 1..107: note = VL of XENP018811
SIVMTQSPATLSVSPGERATLSCRASQSVSNDVAWYQQKPGQSPRLLINYASQRYTGVPDRFTGSGYGTEFTLTISSLQSEDFAVYFCQQDYSSPRTFGGGTKVEIK

SEQ ID NO: 13756 - protein, 5 aa, synthetic construct
  REGION 1..5: note = Description of Artificial Sequence: Synthetic peptide
  REGION 1..5: note = XENP018811 vhCDR1
NYWMN

SEQ ID NO: 13757 - protein, 19 aa, synthetic construct
  REGION 1..19: note = Description of Artificial Sequence: Synthetic peptide
  REGION 1..19: note = XENP018811 vhCDR2
EIRLKSNNYATHYAEPVKG

SEQ ID NO: 13758 - protein, 11 aa, synthetic construct
  REGION 1..11: note = Description of Artificial Sequence: Synthetic peptide
  REGION 1..11: note = XENP018811 vhCDR3
YYGNYGGYFDV

SEQ ID NO: 13759 - protein, 11 aa, synthetic construct
  REGION 1..11: note = Description of Artificial Sequence: Synthetic peptide
  REGION 1..11: note = XENP018811 vlCDR1
RASQSVSNDVA

SEQ ID NO: 13760 - protein, 7 aa, synthetic construct
  REGION 1..7: note = Description of Artificial Sequence: Synthetic peptide
  REGION 1..7: note = XENP018811 vlCDR2
YASQRYT

SEQ ID NO: 13761 - protein, 9 aa, synthetic construct
  REGION 1..9: note = Description of Artificial Sequence: Synthetic peptide
  REGION 1..9: note = XENP018811 vlCDR3
QQDYSSPRT

SEQ ID NO: 13762 - protein, 249 aa, synthetic construct
  REGION 1..249: note = Description of Artificial Sequence: Synthetic polypeptide
  REGION 1..249: note = XENP018812 1G6_H1_L1.66_scFv(GKPGS)4
EVQLVESGGGLVKPGGSLRLSCAASGFTFSNYWMNWVRQAPGKGLEWVGEIRLKSNNYATHYAEPVKGRFTISRDDSKSTVYLQMNSLKTEDTAVYYCTRYYGNYGGYFDVWGAGTLVTVSSGKPGSGKPGSGKPGSGKPGSSIVMTQSPATLSVSPGERATLSCRASQSVSNDVAWYQQKPGQSPRLLINYASDRYTGVPDRFTGSGYGTEFTLTISSLQSEDFAVYFCQQDYSSPRTFGGGTKVEIK

SEQ ID NO: 13763 - protein, 122 aa, synthetic construct; identical to SEQ ID NO: 10922
  REGION 1..122: note = Description of Artificial Sequence: Synthetic polypeptide
  REGION 1..122: note = VH of XENP018812

SEQ ID NO: 13764 - protein, 107 aa, synthetic construct
  REGION 1..107: note = Description of Artificial Sequence: Synthetic polypeptide
  REGION 1..107: note = VL of XENP018812
SIVMTQSPATLSVSPGERATLSCRASQSVSNDVAWYQQKPGQSPRLLINYASDRYTGVPDRFTGSGYGTEFTLTISSLQSEDFAVYFCQQDYSSPRTFGGGTKVEIK

SEQ ID NO: 13765 - protein, 5 aa, synthetic construct
  REGION 1..5: note = Description of Artificial Sequence: Synthetic peptide
  REGION 1..5: note = XENP018812 vhCDR1
NYWMN

SEQ ID NO: 13766 - protein, 19 aa, synthetic construct
  REGION 1..19: note = Description of Artificial Sequence: Synthetic peptide
  REGION 1..19: note = XENP018812 vhCDR2
EIRLKSNNYATHYAEPVKG

SEQ ID NO: 13767 - protein, 11 aa, synthetic construct
  REGION 1..11: note = Description of Artificial Sequence: Synthetic peptide
  REGION 1..11: note = XENP018812 vhCDR3
YYGNYGGYFDV

SEQ ID NO: 13768 - protein, 11 aa, synthetic construct
  REGION 1..11: note = Description of Artificial Sequence: Synthetic peptide
  REGION 1..11: note = XENP018812 vlCDR1
RASQSVSNDVA

SEQ ID NO: 13769 - protein, 7 aa, synthetic construct
  REGION 1..7: note = Description of Artificial Sequence: Synthetic peptide
  REGION 1..7: note = XENP018812 vlCDR2
YASDRYT

SEQ ID NO: 13770 - protein, 9 aa, synthetic construct
  REGION 1..9: note = Description of Artificial Sequence: Synthetic peptide
  REGION 1..9: note = XENP018812 vlCDR3
QQDYSSPRT

SEQ ID NO: 13771 - protein, 249 aa, synthetic construct
  REGION 1..249: note = Description of Artificial Sequence: Synthetic polypeptide
  REGION 1..249: note = XENP018813 1G6_H1_L1.67_scFv(GKPGS)4
EVQLVESGGGLVKPGGSLRLSCAASGFTFSNYWMNWVRQAPGKGLEWVGEIRLKSNNYATHYAEPVKGRFTISRDDSKSTVYLQMNSLKTEDTAVYYCTRYYGNYGGYFDVWGAGTLVTVSSGKPGSGKPGSGKPGSGKPGSSIVMTQSPATLSVSPGERATLSCRASQSVSNDVAWYQQKPGQSPRLLINYASWRYTGVPDRFTGSGYGTEFTLTISSLQSEDFAVYFCQQDYSSPRTFGGGTKVEIK

SEQ ID NO: 13772 - protein, 122 aa, synthetic construct; identical to SEQ ID NO: 10922
  REGION 1..122: note = Description of Artificial Sequence: Synthetic polypeptide
  REGION 1..122: note = VH of XENP018813

SEQ ID NO: 13773 - protein, 107 aa, synthetic construct
  REGION 1..107: note = Description of Artificial Sequence: Synthetic polypeptide
  REGION 1..107: note = VL of XENP018813
SIVMTQSPATLSVSPGERATLSCRASQSVSNDVAWYQQKPGQSPRLLINYASWRYTGVPDRFTGSGYGTEFTLTISSLQSEDFAVYFCQQDYSSPRTFGGGTKVEIK

SEQ ID NO: 13774 - protein, 5 aa, synthetic construct
  REGION 1..5: note = Description of Artificial Sequence: Synthetic peptide
  REGION 1..5: note = XENP018813 vhCDR1
NYWMN

SEQ ID NO: 13775 - protein, 19 aa, synthetic construct
  REGION 1..19: note = Description of Artificial Sequence: Synthetic peptide
  REGION 1..19: note = XENP018813 vhCDR2
EIRLKSNNYATHYAEPVKG

SEQ ID NO: 13776 - protein, 11 aa, synthetic construct
  REGION 1..11: note = Description of Artificial Sequence: Synthetic peptide
  REGION 1..11: note = XENP018813 vhCDR3
YYGNYGGYFDV

SEQ ID NO: 13777 - protein, 11 aa, synthetic construct
  REGION 1..11: note = Description of Artificial Sequence: Synthetic peptide
  REGION 1..11: note = XENP018813 vlCDR1
RASQSVSNDVA

SEQ ID NO: 13778 - protein, 7 aa, synthetic construct
  REGION 1..7: note = Description of Artificial Sequence: Synthetic peptide
  REGION 1..7: note = XENP018813 vlCDR2
YASWRYT

SEQ ID NO: 13779 - protein, 9 aa, synthetic construct
  REGION 1..9: note = Description of Artificial Sequence: Synthetic peptide
  REGION 1..9: note = XENP018813 vlCDR3
QQDYSSPRT

SEQ ID NO: 13780 - protein, 249 aa, synthetic construct
  REGION 1..249: note = Description of Artificial Sequence: Synthetic polypeptide
  REGION 1..249: note = XENP018814 1G6_H1_L1.68_scFv(GKPGS)4
EVQLVESGGGLVKPGGSLRLSCAASGFTFSNYWMNWVRQAPGKGLEWVGEIRLKSNNYATHYAEPVKGRFTISRDDSKSTVYLQMNSLKTEDTAVYYCTRYYGNYGGYFDVWGAGTLVTVSSGKPGSGKPGSGKPGSGKPGSSIVMTQSPATLSVSPGERATLSCRASQSVSNDVAWYQQKPGQSPRLLINYASARYTGVPDRFTGSGYGTEFTLTISSLQSEDFAVYFCQQDYSSPRTFGGGTKVEIK

SEQ ID NO: 13781 - protein, 122 aa, synthetic construct; identical to SEQ ID NO: 10922
  REGION 1..122: note = Description of Artificial Sequence: Synthetic polypeptide
  REGION 1..122: note = VH of XENP018814

SEQ ID NO: 13782 - protein, 107 aa, synthetic construct
  REGION 1..107: note = Description of Artificial Sequence: Synthetic polypeptide
  REGION 1..107: note = VL of XENP018814
SIVMTQSPATLSVSPGERATLSCRASQSVSNDVAWYQQKPGQSPRLLINYASARYTGVPDRFTGSGYGTEFTLTISSLQSEDFAVYFCQQDYSSPRTFGGGTKVEIK

SEQ ID NO: 13783 - protein, 5 aa, synthetic construct
  REGION 1..5: note = Description of Artificial Sequence: Synthetic peptide
  REGION 1..5: note = XENP018814 vhCDR1
NYWMN

SEQ ID NO: 13784 - protein, 19 aa, synthetic construct
  REGION 1..19: note = Description of Artificial Sequence: Synthetic peptide
  REGION 1..19: note = XENP018814 vhCDR2
EIRLKSNNYATHYAEPVKG

SEQ ID NO: 13785 - protein, 11 aa, synthetic construct
  REGION 1..11: note = Description of Artificial Sequence: Synthetic peptide
  REGION 1..11: note = XENP018814 vhCDR3
YYGNYGGYFDV

SEQ ID NO: 13786 - protein, 11 aa, synthetic construct
  REGION 1..11: note = Description of Artificial Sequence: Synthetic peptide
  REGION 1..11: note = XENP018814 vlCDR1
RASQSVSNDVA

SEQ ID NO: 13787 - protein, 7 aa, synthetic construct
  REGION 1..7: note = Description of Artificial Sequence: Synthetic peptide
  REGION 1..7: note = XENP018814 vlCDR2
YASARYT

SEQ ID NO: 13788 - protein, 9 aa, synthetic construct
  REGION 1..9: note = Description of Artificial Sequence: Synthetic peptide
  REGION 1..9: note = XENP018814 vlCDR3
QQDYSSPRT

SEQ ID NO: 13789 - protein, 249 aa, synthetic construct
  REGION 1..249: note = Description of Artificial Sequence: Synthetic polypeptide
  REGION 1..249: note = XENP018815 1G6_H1_L1.69_scFv(GKPGS)4
EVQLVESGGGLVKPGGSLRLSCAASGFTFSNYWMNWVRQAPGKGLEWVGEIRLKSNNYATHYAEPVKGRFTISRDDSKSTVYLQMNSLKTEDTAVYYCTRYYGNYGGYFDVWGAGTLVTVSSGKPGSGKPGSGKPGSGKPGSSIVMTQSPATLSVSPGERATLSCRASQSVSNDVAWYQQKPGQSPRLLINYASTRYTGVPDRFTGSGYGTEFTLTISSLQSEDFAVYFCQQDYSSPRTFGGGTKVEIK

SEQ ID NO: 13790 - protein, 122 aa, synthetic construct; identical to SEQ ID NO: 10922
  REGION 1..122: note = Description of Artificial Sequence: Synthetic polypeptide
  REGION 1..122: note = VH of XENP018815

SEQ ID NO: 13791 - protein, 107 aa, synthetic construct
  REGION 1..107: note = Description of Artificial Sequence: Synthetic polypeptide
  REGION 1..107: note = VL of XENP018815
SIVMTQSPATLSVSPGERATLSCRASQSVSNDVAWYQQKPGQSPRLLINYASTRYTGVPDRFTGSGYGTEFTLTISSLQSEDFAVYFCQQDYSSPRTFGGGTKVEIK

SEQ ID NO: 13792 - protein, 5 aa, synthetic construct
  REGION 1..5: note = Description of Artificial Sequence: Synthetic peptide
  REGION 1..5: note = XENP018815 vhCDR1
NYWMN

SEQ ID NO: 13793 - protein, 19 aa, synthetic construct
  REGION 1..19: note = Description of Artificial Sequence: Synthetic peptide
  REGION 1..19: note = XENP018815 vhCDR2
EIRLKSNNYATHYAEPVKG

SEQ ID NO: 13794 - protein, 11 aa, synthetic construct
  REGION 1..11: note = Description of Artificial Sequence: Synthetic peptide
  REGION 1..11: note = XENP018815 vhCDR3
YYGNYGGYFDV

SEQ ID NO: 13795 - protein, 11 aa, synthetic construct
  REGION 1..11: note = Description of Artificial Sequence: Synthetic peptide
  REGION 1..11: note = XENP018815 vlCDR1
RASQSVSNDVA

SEQ ID NO: 13796 - protein, 7 aa, synthetic construct
  REGION 1..7: note = Description of Artificial Sequence: Synthetic peptide
  REGION 1..7: note = XENP018815 vlCDR2
YASTRYT

SEQ ID NO: 13797 - protein, 9 aa, synthetic construct
  REGION 1..9: note = Description of Artificial Sequence: Synthetic peptide
  REGION 1..9: note = XENP018815 vlCDR3
QQDYSSPRT

SEQ ID NO: 13798 - protein, 249 aa, synthetic construct
  REGION 1..249: note = Description of Artificial Sequence: Synthetic polypeptide
  REGION 1..249: note = XENP018816 1G6_H1_L1.70_scFv(GKPGS)4
EVQLVESGGGLVKPGGSLRLSCAASGFTFSNYWMNWVRQAPGKGLEWVGEIRLKSNNYATHYAEPVKGRFTISRDDSKSTVYLQMNSLKTEDTAVYYCTRYYGNYGGYFDVWGAGTLVTVSSGKPGSGKPGSGKPGSGKPGSSIVMTQSPATLSVSPGERATLSCRASQSVSNDVAWYQQKPGQSPRLLINYASKRYTGVPDRFTGSGYGTEFTLTISSLQSEDFAVYFCQQDYSSPRTFGGGTKVEIK

SEQ ID NO: 13799 - protein, 122 aa, synthetic construct; identical to SEQ ID NO: 10922
  REGION 1..122: note = Description of Artificial Sequence: Synthetic polypeptide
  REGION 1..122: note = VH of XENP018816

SEQ ID NO: 13800 - protein, 107 aa, synthetic construct
  REGION 1..107: note = Description of Artificial Sequence: Synthetic polypeptide
  REGION 1..107: note = VL of XENP018816
SIVMTQSPATLSVSPGERATLSCRASQSVSNDVAWYQQKPGQSPRLLINYASKRYTGVPDRFTGSGYGTEFTLTISSLQSEDFAVYFCQQDYSSPRTFGGGTKVEIK

SEQ ID NO: 13801 - protein, 5 aa, synthetic construct
  REGION 1..5: note = Description of Artificial Sequence: Synthetic peptide
  REGION 1..5: note = XENP018816 vhCDR1
NYWMN

SEQ ID NO: 13802 - protein, 19 aa, synthetic construct
  REGION 1..19: note = Description of Artificial Sequence: Synthetic peptide
  REGION 1..19: note = XENP018816 vhCDR2
EIRLKSNNYATHYAEPVKG

SEQ ID NO: 13803 - protein, 11 aa, synthetic construct
  REGION 1..11: note = Description of Artificial Sequence: Synthetic peptide
  REGION 1..11: note = XENP018816 vhCDR3
YYGNYGGYFDV

SEQ ID NO: 13804 - protein, 11 aa, synthetic construct
  REGION 1..11: note = Description of Artificial Sequence: Synthetic peptide
  REGION 1..11: note = XENP018816 vlCDR1
RASQSVSNDVA

SEQ ID NO: 13805 - protein, 7 aa, synthetic construct
  REGION 1..7: note = Description of Artificial Sequence: Synthetic peptide
  REGION 1..7: note = XENP018816 vlCDR2
YASKRYT

SEQ ID NO: 13806 - protein, 9 aa, synthetic construct
  REGION 1..9: note = Description of Artificial Sequence: Synthetic peptide
  REGION 1..9: note = XENP018816 vlCDR3
QQDYSSPRT

SEQ ID NO: 13807 - protein, 249 aa, synthetic construct
  REGION 1..249: note = Description of Artificial Sequence: Synthetic polypeptide
  REGION 1..249: note = XENP018817 1G6_H1_L1.71_scFv(GKPGS)4
EVQLVESGGGLVKPGGSLRLSCAASGFTFSNYWMNWVRQAPGKGLEWVGEIRLKSNNYATHYAEPVKGRFTISRDDSKSTVYLQMNSLKTEDTAVYYCTRYYGNYGGYFDVWGAGTLVTVSSGKPGSGKPGSGKPGSGKPGSSIVMTQSPATLSVSPGERATLSCRASQSVSNDVAWYQQKPGQSPRLLINYASGRYTGVPDRFTGSGYGTEFTLTISSLQSEDFAVYFCQQDYSSPRTFGGGTKVEIK

SEQ ID NO: 13808 - protein, 122 aa, synthetic construct; identical to SEQ ID NO: 10922
  REGION 1..122: note = Description of Artificial Sequence: Synthetic polypeptide
  REGION 1..122: note = VH of XENP018817

SEQ ID NO: 13809 - protein, 107 aa, synthetic construct
  REGION 1..107: note = Description of Artificial Sequence: Synthetic polypeptide
  REGION 1..107: note = VL of XENP018817
SIVMTQSPATLSVSPGERATLSCRASQSVSNDVAWYQQKPGQSPRLLINYASGRYTGVPDRFTGSGYGTEFTLTISSLQSEDFAVYFCQQDYSSPRTFGGGTKVEIK

SEQ ID NO: 13810 - protein, 5 aa, synthetic construct
  REGION 1..5: note = Description of Artificial Sequence: Synthetic peptide
  REGION 1..5: note = XENP018817 vhCDR1
NYWMN

SEQ ID NO: 13811 - protein, 19 aa, synthetic construct
  REGION 1..19: note = Description of Artificial Sequence: Synthetic peptide
  REGION 1..19: note = XENP018817 vhCDR2
EIRLKSNNYATHYAEPVKG

SEQ ID NO: 13812 - protein, 11 aa, synthetic construct
  REGION 1..11: note = Description of Artificial Sequence: Synthetic peptide
  REGION 1..11: note = XENP018817 vhCDR3
YYGNYGGYFDV

SEQ ID NO: 13813 - protein, 11 aa, synthetic construct
  REGION 1..11: note = Description of Artificial Sequence: Synthetic peptide
  REGION 1..11: note = XENP018817 vlCDR1
RASQSVSNDVA

SEQ ID NO: 13814 - protein, 7 aa, synthetic construct
  REGION 1..7: note = Description of Artificial Sequence: Synthetic peptide
  REGION 1..7: note = XENP018817 vlCDR2
YASGRYT

SEQ ID NO: 13815 - protein, 9 aa, synthetic construct
  REGION 1..9: note = Description of Artificial Sequence: Synthetic peptide
  REGION 1..9: note = XENP018817 vlCDR3
QQDYSSPRT

SEQ ID NO: 13816 - protein, 249 aa, synthetic construct
  REGION 1..249: note = Description of Artificial Sequence: Synthetic polypeptide
  REGION 1..249: note = XENP018818 1G6_H1_L1.72_scFv(GKPGS)4
EVQLVESGGGLVKPGGSLRLSCAASGFTFSNYWMNWVRQAPGKGLEWVGEIRLKSNNYATHYAEPVKGRFTISRDDSKSTVYLQMNSLKTEDTAVYYCTRYYGNYGGYFDVWGAGTLVTVSSGKPGSGKPGSGKPGSGKPGSSIVMTQSPATLSVSPGERATLSCRASQSVSNDVAWYQQKPGQSPRLLINYASLRYTGVPDRFTGSGYGTEFTLTISSLQSEDFAVYFCQQDYSSPRTFGGGTKVEIK

SEQ ID NO: 13817 - protein, 122 aa, synthetic construct; identical to SEQ ID NO: 10922
  REGION 1..122: note = Description of Artificial Sequence: Synthetic polypeptide
  REGION 1..122: note = VH of XENP018818

SEQ ID NO: 13818 - protein, 107 aa, synthetic construct
  REGION 1..107: note = Description of Artificial Sequence: Synthetic polypeptide
  REGION 1..107: note = VL of XENP018818
SIVMTQSPATLSVSPGERATLSCRASQSVSNDVAWYQQKPGQSPRLLINYASLRYTGVPDRFTGSGYGTEFTLTISSLQSEDFAVYFCQQDYSSPRTFGGGTKVEIK

SEQ ID NO: 13819 - protein, 5 aa, synthetic construct
  REGION 1..5: note = Description of Artificial Sequence: Synthetic peptide
  REGION 1..5: note = XENP018818 vhCDR1
NYWMN

SEQ ID NO: 13820 - protein, 19 aa, synthetic construct
  REGION 1..19: note = Description of Artificial Sequence: Synthetic peptide
  REGION 1..19: note = XENP018818 vhCDR2
EIRLKSNNYATHYAEPVKG

SEQ ID NO: 13821 - protein, 11 aa, synthetic construct
  REGION 1..11: note = Description of Artificial Sequence: Synthetic peptide
  REGION 1..11: note = XENP018818 vhCDR3
YYGNYGGYFDV

SEQ ID NO: 13822 - protein, 11 aa, synthetic construct
  REGION 1..11: note = Description of Artificial Sequence: Synthetic peptide
  REGION 1..11: note = XENP018818 vlCDR1
RASQSVSNDVA

SEQ ID NO: 13823 - protein, 7 aa, synthetic construct
  REGION 1..7: note = Description of Artificial Sequence: Synthetic peptide
  REGION 1..7: note = XENP018818 vlCDR2
YASLRYT

SEQ ID NO: 13824 - protein, 9 aa, synthetic construct
  REGION 1..9: note = Description of Artificial Sequence: Synthetic peptide
  REGION 1..9: note = XENP018818 vlCDR3
QQDYSSPRT

SEQ ID NO: 13825 - protein, 249 aa, synthetic construct
  REGION 1..249: note = Description of Artificial Sequence: Synthetic polypeptide
  REGION 1..249: note = XENP018819 1G6_H1_L1.73_scFv(GKPGS)4
EVQLVESGGGLVKPGGSLRLSCAASGFTFSNYWMNWVRQAPGKGLEWVGEIRLKSNNYATHYAEPVKGRFTISRDDSKSTVYLQMNSLKTEDTAVYYCTRYYGNYGGYFDVWGAGTLVTVSSGKPGSGKPGSGKPGSGKPGSSIVMTQSPATLSVSPGERATLSCRASQSVSNDVAWYQQKPGQSPRLLINYASHLYTGVPDRFTGSGYGTEFTLTISSLQSEDFAVYFCQQDYSSPRTFGGGTKVEIK

SEQ ID NO: 13826 - protein, 122 aa, synthetic construct; identical to SEQ ID NO: 10922
  REGION 1..122: note = Description of Artificial Sequence: Synthetic polypeptide
  REGION 1..122: note = VH of XENP018819

SEQ ID NO: 13827 - protein, 107 aa, synthetic construct
  REGION 1..107: note = Description of Artificial Sequence: Synthetic polypeptide
  REGION 1..107: note = VL of XENP018819
SIVMTQSPATLSVSPGERATLSCRASQSVSNDVAWYQQKPGQSPRLLINYASHLYTGVPDRFTGSGYGTEFTLTISSLQSEDFAVYFCQQDYSSPRTFGGGTKVEIK

SEQ ID NO: 13828 - protein, 5 aa, synthetic construct
  REGION 1..5: note = Description of Artificial Sequence: Synthetic peptide
  REGION 1..5: note = XENP018819 vhCDR1
NYWMN

SEQ ID NO: 13829 - protein, 19 aa, synthetic construct
  REGION 1..19: note = Description of Artificial Sequence: Synthetic peptide
  REGION 1..19: note = XENP018819 vhCDR2
EIRLKSNNYATHYAEPVKG

SEQ ID NO: 13830 - protein, 11 aa, synthetic construct
  REGION 1..11: note = Description of Artificial Sequence: Synthetic peptide
  REGION 1..11: note = XENP018819 vhCDR3
YYGNYGGYFDV

SEQ ID NO: 13831 - protein, 11 aa, synthetic construct
  REGION 1..11: note = Description of Artificial Sequence: Synthetic peptide
  REGION 1..11: note = XENP018819 vlCDR1
RASQSVSNDVA

SEQ ID NO: 13832 - protein, 7 aa, synthetic construct
  REGION 1..7: note = Description of Artificial Sequence: Synthetic peptide
  REGION 1..7: note = XENP018819 vlCDR2
YASHLYT

SEQ ID NO: 13833 - protein, 9 aa, synthetic construct
  REGION 1..9: note = Description of Artificial Sequence: Synthetic peptide
  REGION 1..9: note = XENP018819 vlCDR3
QQDYSSPRT

SEQ ID NO: 13834 - protein, 249 aa, synthetic construct
  REGION 1..249: note = Description of Artificial Sequence: Synthetic polypeptide
  REGION 1..249: note = XENP018820 1G6_H1_L1.74_scFv(GKPGS)4
EVQLVESGGGLVKPGGSLRLSCAASGFTFSNYWMNWVRQAPGKGLEWVGEIRLKSNNYATHYAEPVKGRFTISRDDSKSTVYLQMNSLKTEDTAVYYCTRYYGNYGGYFDVWGAGTLVTVSSGKPGSGKPGSGKPGSGKPGSSIVMTQSPATLSVSPGERATLSCRASQSVSNDVAWYQQKPGQSPRLLINYASHWYTGVPDRFTGSGYGTEFTLTISSLQSEDFAVYFCQQDYSSPRTFGGGTKVEIK

SEQ ID NO: 13835 - protein, 122 aa, synthetic construct; identical to SEQ ID NO: 10922
  REGION 1..122: note = Description of Artificial Sequence: Synthetic polypeptide
  REGION 1..122: note = VH of XENP018820

SEQ ID NO: 13836 - protein, 107 aa, synthetic construct
  REGION 1..107: note = Description of Artificial Sequence: Synthetic polypeptide
  REGION 1..107: note = VL of XENP018820
SIVMTQSPATLSVSPGERATLSCRASQSVSNDVAWYQQKPGQSPRLLINYASHWYTGVPDRFTGSGYGTEFTLTISSLQSEDFAVYFCQQDYSSPRTFGGGTKVEIK

SEQ ID NO: 13837 - protein, 5 aa, synthetic construct
  REGION 1..5: note = Description of Artificial Sequence: Synthetic peptide
  REGION 1..5: note = XENP018820 vhCDR1
NYWMN

SEQ ID NO: 13838 - protein, 19 aa, synthetic construct
  REGION 1..19: note = Description of Artificial Sequence: Synthetic peptide
  REGION 1..19: note = XENP018820 vhCDR2
EIRLKSNNYATHYAEPVKG

SEQ ID NO: 13839 - protein, 11 aa, synthetic construct
  REGION 1..11: note = Description of Artificial Sequence: Synthetic peptide
  REGION 1..11: note = XENP018820 vhCDR3
YYGNYGGYFDV

SEQ ID NO: 13840 - protein, 11 aa, synthetic construct
  REGION 1..11: note = Description of Artificial Sequence: Synthetic peptide
  REGION 1..11: note = XENP018820 vlCDR1
RASQSVSNDVA

SEQ ID NO: 13841 - protein, 7 aa, synthetic construct
  REGION 1..7: note = Description of Artificial Sequence: Synthetic peptide
  REGION 1..7: note = XENP018820 vlCDR2
YASHWYT

SEQ ID NO: 13842 - protein, 9 aa, synthetic construct
  REGION 1..9: note = Description of Artificial Sequence: Synthetic peptide
  REGION 1..9: note = XENP018820 vlCDR3
QQDYSSPRT

SEQ ID NO: 13843 - protein, 249 aa, synthetic construct
  REGION 1..249: note = Description of Artificial Sequence: Synthetic polypeptide
  REGION 1..249: note = XENP018821 1G6_H1_L1.75_scFv(GKPGS)4
EVQLVESGGGLVKPGGSLRLSCAASGFTFSNYWMNWVRQAPGKGLEWVGEIRLKSNNYATHYAEPVKGRFTISRDDSKSTVYLQMNSLKTEDTAVYYCTRYYGNYGGYFDVWGAGTLVTVSSGKPGSGKPGSGKPGSGKPGSSIVMTQSPATLSVSPGERATLSCRASQSVSNDVAWYQQKPGQSPRLLINYASHSYTGVPDRFTGSGYGTEFTLTISSLQSEDFAVYFCQQDYSSPRTFGGGTKVEIK

SEQ ID NO: 13844 - protein, 122 aa, synthetic construct; identical to SEQ ID NO: 10922
  REGION 1..122: note = Description of Artificial Sequence: Synthetic polypeptide
  REGION 1..122: note = VH of XENP018821

SEQ ID NO: 13845 - protein, 107 aa, synthetic construct
  REGION 1..107: note = Description of Artificial Sequence: Synthetic polypeptide
  REGION 1..107: note = VL of XENP018821
SIVMTQSPATLSVSPGERATLSCRASQSVSNDVAWYQQKPGQSPRLLINYASHSYTGVPDRFTGSGYGTEFTLTISSLQSEDFAVYFCQQDYSSPRTFGGGTKVEIK

SEQ ID NO: 13846 - protein, 5 aa, synthetic construct
  REGION 1..5: note = Description of Artificial Sequence: Synthetic peptide
  REGION 1..5: note = XENP018821 vhCDR1
NYWMN

SEQ ID NO: 13847 - protein, 19 aa, synthetic construct
  REGION 1..19: note = Description of Artificial Sequence: Synthetic peptide
  REGION 1..19: note = XENP018821 vhCDR2
EIRLKSNNYATHYAEPVKG

SEQ ID NO: 13848 - protein, 11 aa, synthetic construct
  REGION 1..11: note = Description of Artificial Sequence: Synthetic peptide
  REGION 1..11: note = XENP018821 vhCDR3
YYGNYGGYFDV

SEQ ID NO: 13849 - protein, 11 aa, synthetic construct
  REGION 1..11: note = Description of Artificial Sequence: Synthetic peptide
  REGION 1..11: note = XENP018821 vlCDR1
RASQSVSNDVA

SEQ ID NO: 13850 - protein, 7 aa, synthetic construct
  REGION 1..7: note = Description of Artificial Sequence: Synthetic peptide
  REGION 1..7: note = XENP018821 vlCDR2
YASHSYT

SEQ ID NO: 13851 - protein, 9 aa, synthetic construct
  REGION 1..9: note = Description of Artificial Sequence: Synthetic peptide
  REGION 1..9: note = XENP018821 vlCDR3
QQDYSSPRT

SEQ ID NO: 13852 - protein, 249 aa, synthetic construct
  REGION 1..249: note = Description of Artificial Sequence: Synthetic polypeptide
  REGION 1..249: note = XENP018822 1G6_H1_L1.76_scFv(GKPGS)4
EVQLVESGGGLVKPGGSLRLSCAASGFTFSNYWMNWVRQAPGKGLEWVGEIRLKSNNYATHYAEPVKGRFTISRDDSKSTVYLQMNSLKTEDTAVYYCTRYYGNYGGYFDVWGAGTLVTVSSGKPGSGKPGSGKPGSGKPGSSIVMTQSPATLSVSPGERATLSCRASQSVSNDVAWYQQKPGQSPRLLINYASHRFTGVPDRFTGSGYGTEFTLTISSLQSEDFAVYFCQQDYSSPRTFGGGTKVEIK

SEQ ID NO: 13853 - protein, 122 aa, synthetic construct; identical to SEQ ID NO: 10922
  REGION 1..122: note = Description of Artificial Sequence: Synthetic polypeptide
  REGION 1..122: note = VH of XENP018822

SEQ ID NO: 13854 - protein, 107 aa, synthetic construct
  REGION 1..107: note = Description of Artificial Sequence: Synthetic polypeptide
  REGION 1..107: note = VL of XENP018822
SIVMTQSPATLSVSPGERATLSCRASQSVSNDVAWYQQKPGQSPRLLINYASHRFTGVPDRFTGSGYGTEFTLTISSLQSEDFAVYFCQQDYSSPRTFGGGTKVEIK

SEQ ID NO: 13855 - protein, 5 aa, synthetic construct
  REGION 1..5: note = Description of Artificial Sequence: Synthetic peptide
  REGION 1..5: note = XENP018822 vhCDR1
NYWMN

SEQ ID NO: 13856 - protein, 19 aa, synthetic construct
  REGION 1..19: note = Description of Artificial Sequence: Synthetic peptide
  REGION 1..19: note = XENP018822 vhCDR2
EIRLKSNNYATHYAEPVKG

SEQ ID NO: 13857 - protein, 11 aa, synthetic construct
  REGION 1..11: note = Description of Artificial Sequence: Synthetic peptide
  REGION 1..11: note = XENP018822 vhCDR3
YYGNYGGYFDV

SEQ ID NO: 13858 - protein, 11 aa, synthetic construct
  REGION 1..11: note = Description of Artificial Sequence: Synthetic peptide
  REGION 1..11: note = XENP018822 vlCDR1
RASQSVSNDVA

SEQ ID NO: 13859 - protein, 7 aa, synthetic construct
  REGION 1..7: note = Description of Artificial Sequence: Synthetic peptide
  REGION 1..7: note = XENP018822 vlCDR2
YASHRFT

SEQ ID NO: 13860 - protein, 9 aa, synthetic construct
  REGION 1..9: note = Description of Artificial Sequence: Synthetic peptide
  REGION 1..9: note = XENP018822 vlCDR3
QQDYSSPRT

SEQ ID NO: 13861 - protein, 249 aa, synthetic construct
  REGION 1..249: note = Description of Artificial Sequence: Synthetic polypeptide
  REGION 1..249: note = XENP018823 1G6_H1_L1.77_scFv(GKPGS)4
EVQLVESGGGLVKPGGSLRLSCAASGFTFSNYWMNWVRQAPGKGLEWVGEIRLKSNNYATHYAEPVKGRFTISRDDSKSTVYLQMNSLKTEDTAVYYCTRYYGNYGGYFDVWGAGTLVTVSSGKPGSGKPGSGKPGSGKPGSSIVMTQSPATLSVSPGERATLSCRASQSVSNDVAWYQQKPGQSPRLLINYASHRHTGVPDRFTGSGYGTEFTLTISSLQSEDFAVYFCQQDYSSPRTFGGGTKVEIK

SEQ ID NO: 13862 - protein, 122 aa, synthetic construct; identical to SEQ ID NO: 10922
  REGION 1..122: note = Description of Artificial Sequence: Synthetic polypeptide
  REGION 1..122: note = VH of XENP018823

SEQ ID NO: 13863 - protein, 107 aa, synthetic construct
  REGION 1..107: note = Description of Artificial Sequence: Synthetic polypeptide
  REGION 1..107: note = VL of XENP018823
SIVMTQSPATLSVSPGERATLSCRASQSVSNDVAWYQQKPGQSPRLLINYASHRHTGVPDRFTGSGYGTEFTLTISSLQSEDFAVYFCQQDYSSPRTFGGGTKVEIK

SEQ ID NO: 13864 - protein, 5 aa, synthetic construct
  REGION 1..5: note = Description of Artificial Sequence: Synthetic peptide
  REGION 1..5: note = XENP018823 vhCDR1
NYWMN

SEQ ID NO: 13865 - protein, 19 aa, synthetic construct
  REGION 1..19: note = Description of Artificial Sequence: Synthetic peptide
  REGION 1..19: note = XENP018823 vhCDR2
EIRLKSNNYATHYAEPVKG

SEQ ID NO: 13866 - protein, 11 aa, synthetic construct
  REGION 1..11: note = Description of Artificial Sequence: Synthetic peptide
  REGION 1..11: note = XENP018823 vhCDR3
YYGNYGGYFDV

SEQ ID NO: 13867 - protein, 11 aa, synthetic construct
  REGION 1..11: note = Description of Artificial Sequence: Synthetic peptide
  REGION 1..11: note = XENP018823 vlCDR1
RASQSVSNDVA

SEQ ID NO: 13868 - protein, 7 aa, synthetic construct
  REGION 1..7: note = Description of Artificial Sequence: Synthetic peptide
  REGION 1..7: note = XENP018823 vlCDR2
YASHRHT

SEQ ID NO: 13869 - protein, 9 aa, synthetic construct
  REGION 1..9: note = Description of Artificial Sequence: Synthetic peptide
  REGION 1..9: note = XENP018823 vlCDR3
QQDYSSPRT

SEQ ID NO: 13870 - protein, 249 aa, synthetic construct
  REGION 1..249: note = Description of Artificial Sequence: Synthetic polypeptide
  REGION 1..249: note = XENP018824 1G6_H1_L1.78_scFv(GKPGS)4
EVQLVESGGGLVKPGGSLRLSCAASGFTFSNYWMNWVRQAPGKGLEWVGEIRLKSNNYATHYAEPVKGRFTISRDDSKSTVYLQMNSLKTEDTAVYYCTRYYGNYGGYFDVWGAGTLVTVSSGKPGSGKPGSGKPGSGKPGSSIVMTQSPATLSVSPGERATLSCRASQSVSNDVAWYQQKPGQSPRLLINYASHRLTGVPDRFTGSGYGTEFTLTISSLQSEDFAVYFCQQDYSSPRTFGGGTKVEIK

SEQ ID NO: 13871 - protein, 122 aa, synthetic construct; identical to SEQ ID NO: 10922
  REGION 1..122: note = Description of Artificial Sequence: Synthetic polypeptide
  REGION 1..122: note = VH of XENP018824

SEQ ID NO: 13872 - protein, 107 aa, synthetic construct
  REGION 1..107: note = Description of Artificial Sequence: Synthetic polypeptide
  REGION 1..107: note = VL of XENP018824
SIVMTQSPATLSVSPGERATLSCRASQSVSNDVAWYQQKPGQSPRLLINYASHRLTGVPDRFTGSGYGTEFTLTISSLQSEDFAVYFCQQDYSSPRTFGGGTKVEIK

SEQ ID NO: 13873 - protein, 5 aa, synthetic construct
  REGION 1..5: note = Description of Artificial Sequence: Synthetic peptide
  REGION 1..5: note = XENP018824 vhCDR1
NYWMN

SEQ ID NO: 13874 - protein, 19 aa, synthetic construct
  REGION 1..19: note = Description of Artificial Sequence: Synthetic peptide
  REGION 1..19: note = XENP018824 vhCDR2
EIRLKSNNYATHYAEPVKG

SEQ ID NO: 13875 - protein, 11 aa, synthetic construct
  REGION 1..11: note = Description of Artificial Sequence: Synthetic peptide
  REGION 1..11: note = XENP018824 vhCDR3
YYGNYGGYFDV

SEQ ID NO: 13876 - protein, 11 aa, synthetic construct
  REGION 1..11: note = Description of Artificial Sequence: Synthetic peptide
  REGION 1..11: note = XENP018824 vlCDR1
RASQSVSNDVA

SEQ ID NO: 13877 - protein, 7 aa, synthetic construct
  REGION 1..7: note = Description of Artificial Sequence: Synthetic peptide
  REGION 1..7: note = XENP018824 vlCDR2
YASHRLT

SEQ ID NO: 13878 - protein, 9 aa, synthetic construct
  REGION 1..9: note = Description of Artificial Sequence: Synthetic peptide
  REGION 1..9: note = XENP018824 vlCDR3
QQDYSSPRT

SEQ ID NO: 13879 - protein, 249 aa, synthetic construct
  REGION 1..249: note = Description of Artificial Sequence: Synthetic polypeptide
  REGION 1..249: note = XENP018825 1G6_H1_L1.79_scFv(GKPGS)4
EVQLVESGGGLVKPGGSLRLSCAASGFTFSNYWMNWVRQAPGKGLEWVGEIRLKSNNYATHYAEPVKGRFTISRDDSKSTVYLQMNSLKTEDTAVYYCTRYYGNYGGYFDVWGAGTLVTVSSGKPGSGKPGSGKPGSGKPGSSIVMTQSPATLSVSPGERATLSCRASQSVSNDVAWYQQKPGQSPRLLINYASHRWTGVPDRFTGSGYGTEFTLTISSLQSEDFAVYFCQQDYSSPRTFGGGTKVEIK

SEQ ID NO: 13880 - protein, 122 aa, synthetic construct; identical to SEQ ID NO: 10922
  REGION 1..122: note = Description of Artificial Sequence: Synthetic polypeptide
  REGION 1..122: note = VH of XENP018825

SEQ ID NO: 13881 - protein, 107 aa, synthetic construct
  REGION 1..107: note = Description of Artificial Sequence: Synthetic polypeptide
  REGION 1..107: note = VL of XENP018825
SIVMTQSPATLSVSPGERATLSCRASQSVSNDVAWYQQKPGQSPRLLINYASHRWTGVPDRFTGSGYGTEFTLTISSLQSEDFAVYFCQQDYSSPRTFGGGTKVEIK

SEQ ID NO: 13882 - protein, 5 aa, synthetic construct
  REGION 1..5: note = Description of Artificial Sequence: Synthetic peptide
  REGION 1..5: note = XENP018825 vhCDR1
NYWMN

SEQ ID NO: 13883 - protein, 19 aa, synthetic construct
  REGION 1..19: note = Description of Artificial Sequence: Synthetic peptide
  REGION 1..19: note = XENP018825 vhCDR2
EIRLKSNNYATHYAEPVKG

SEQ ID NO: 13884 - protein, 11 aa, synthetic construct
  REGION 1..11: note = Description of Artificial Sequence: Synthetic peptide
  REGION 1..11: note = XENP018825 vhCDR3
YYGNYGGYFDV

SEQ ID NO: 13885 - protein, 11 aa, synthetic construct
  REGION 1..11: note = Description of Artificial Sequence: Synthetic peptide
  REGION 1..11: note = XENP018825 vlCDR1
RASQSVSNDVA

SEQ ID NO: 13886 - protein, 7 aa, synthetic construct
  REGION 1..7: note = Description of Artificial Sequence: Synthetic peptide
  REGION 1..7: note = XENP018825 vlCDR2
YASHRWT

SEQ ID NO: 13887 - protein, 9 aa, synthetic construct
  REGION 1..9: note = Description of Artificial Sequence: Synthetic peptide
  REGION 1..9: note = XENP018825 vlCDR3
QQDYSSPRT

SEQ ID NO: 13888 - protein, 249 aa, synthetic construct
  REGION 1..249: note = Description of Artificial Sequence: Synthetic polypeptide
  REGION 1..249: note = XENP018826 1G6_H1_L1.80_scFv(GKPGS)4
EVQLVESGGGLVKPGGSLRLSCAASGFTFSNYWMNWVRQAPGKGLEWVGEIRLKSNNYATHYAEPVKGRFTISRDDSKSTVYLQMNSLKTEDTAVYYCTRYYGNYGGYFDVWGAGTLVTVSSGKPGSGKPGSGKPGSGKPGSSIVMTQSPATLSVSPGERATLSCRASQSVSNDVAWYQQKPGQSPRLLINYASHRVTGVPDRFTGSGYGTEFTLTISSLQSEDFAVYFCQQDYSSPRTFGGGTKVEIK

SEQ ID NO: 13889 - protein, 122 aa, synthetic construct; identical to SEQ ID NO: 10922
  REGION 1..122: note = Description of Artificial Sequence: Synthetic polypeptide
  REGION 1..122: note = VH of XENP018826

SEQ ID NO: 13890 - protein, 107 aa, synthetic construct
  REGION 1..107: note = Description of Artificial Sequence: Synthetic polypeptide
  REGION 1..107: note = VL of XENP018826
SIVMTQSPATLSVSPGERATLSCRASQSVSNDVAWYQQKPGQSPRLLINYASHRVTGVPDRFTGSGYGTEFTLTISSLQSEDFAVYFCQQDYSSPRTFGGGTKVEIK

SEQ ID NO: 13891 - protein, 5 aa, synthetic construct
  REGION 1..5: note = Description of Artificial Sequence: Synthetic peptide
  REGION 1..5: note = XENP018826 vhCDR1
NYWMN

SEQ ID NO: 13892 - protein, 19 aa, synthetic construct
  REGION 1..19: note = Description of Artificial Sequence: Synthetic peptide
  REGION 1..19: note = XENP018826 vhCDR2
EIRLKSNNYATHYAEPVKG

SEQ ID NO: 13893 - protein, 11 aa, synthetic construct
  REGION 1..11: note = Description of Artificial Sequence: Synthetic peptide
  REGION 1..11: note = XENP018826 vhCDR3
YYGNYGGYFDV

SEQ ID NO: 13894 - protein, 11 aa, synthetic construct
  REGION 1..11: note = Description of Artificial Sequence: Synthetic peptide
  REGION 1..11: note = XENP018826 vlCDR1
RASQSVSNDVA

SEQ ID NO: 13895 - protein, 7 aa, synthetic construct
  REGION 1..7: note = Description of Artificial Sequence: Synthetic peptide
  REGION 1..7: note = XENP018826 vlCDR2
YASHRVT

SEQ ID NO: 13896 - protein, 9 aa, synthetic construct
  REGION 1..9: note = Description of Artificial Sequence: Synthetic peptide
  REGION 1..9: note = XENP018826 vlCDR3
QQDYSSPRT

SEQ ID NO: 13897 - protein, 249 aa, synthetic construct
  REGION 1..249: note = Description of Artificial Sequence: Synthetic polypeptide
  REGION 1..249: note = XENP018827 1G6_H1_L1.81_scFv(GKPGS)4
EVQLVESGGGLVKPGGSLRLSCAASGFTFSNYWMNWVRQAPGKGLEWVGEIRLKSNNYATHYAEPVKGRFTISRDDSKSTVYLQMNSLKTEDTAVYYCTRYYGNYGGYFDVWGAGTLVTVSSGKPGSGKPGSGKPGSGKPGSSIVMTQSPATLSVSPGERATLSCRASQSVSNDVAWYQQKPGQSPRLLINYASHRATGVPDRFTGSGYGTEFTLTISSLQSEDFAVYFCQQDYSSPRTFGGGTKVEIK

SEQ ID NO: 13898 - protein, 122 aa, synthetic construct; identical to SEQ ID NO: 10922
  REGION 1..122: note = Description of Artificial Sequence: Synthetic polypeptide
  REGION 1..122: note = VH of XENP018827

SEQ ID NO: 13899 - protein, 107 aa, synthetic construct
  REGION 1..107: note = Description of Artificial Sequence: Synthetic polypeptide
  REGION 1..107: note = VL of XENP018827
SIVMTQSPATLSVSPGERATLSCRASQSVSNDVAWYQQKPGQSPRLLINYASHRATGVPDRFTGSGYGTEFTLTISSLQSEDFAVYFCQQDYSSPRTFGGGTKVEIK

SEQ ID NO: 13900 - protein, 5 aa, synthetic construct
  REGION 1..5: note = Description of Artificial Sequence: Synthetic peptide
  REGION 1..5: note = XENP018827 vhCDR1
NYWMN

SEQ ID NO: 13901 - protein, 19 aa, synthetic construct
  REGION 1..19: note = Description of Artificial Sequence: Synthetic peptide
  REGION 1..19: note = XENP018827 vhCDR2
EIRLKSNNYATHYAEPVKG

SEQ ID NO: 13902 - protein, 11 aa, synthetic construct
  REGION 1..11: note = Description of Artificial Sequence: Synthetic peptide
  REGION 1..11: note = XENP018827 vhCDR3
YYGNYGGYFDV

SEQ ID NO: 13903 - protein, 11 aa, synthetic construct
  REGION 1..11: note = Description of Artificial Sequence: Synthetic peptide
  REGION 1..11: note = XENP018827 vlCDR1
RASQSVSNDVA

SEQ ID NO: 13904 - protein, 7 aa, synthetic construct
  REGION 1..7: note = Description of Artificial Sequence: Synthetic peptide
  REGION 1..7: note = XENP018827 vlCDR2
YASHRAT

SEQ ID NO: 13905 - protein, 9 aa, synthetic construct
  REGION 1..9: note = Description of Artificial Sequence: Synthetic peptide
  REGION 1..9: note = XENP018827 vlCDR3
QQDYSSPRT

SEQ ID NO: 13906 - protein, 249 aa, synthetic construct
  REGION 1..249: note = Description of Artificial Sequence: Synthetic polypeptide
  REGION 1..249: note = XENP018828 1G6_H1_L1.82_scFv(GKPGS)4
EVQLVESGGGLVKPGGSLRLSCAASGFTFSNYWMNWVRQAPGKGLEWVGEIRLKSNNYATHYAEPVKGRFTISRDDSKSTVYLQMNSLKTEDTAVYYCTRYYGNYGGYFDVWGAGTLVTVSSGKPGSGKPGSGKPGSGKPGSSIVMTQSPATLSVSPGERATLSCRASQSVSNDVAWYQQKPGQSPRLLINYASHRQTGVPDRFTGSGYGTEFTLTISSLQSEDFAVYFCQQDYSSPRTFGGGTKVEIK

SEQ ID NO: 13907 - protein, 122 aa, synthetic construct; identical to SEQ ID NO: 10922
  REGION 1..122: note = Description of Artificial Sequence: Synthetic polypeptide
  REGION 1..122: note = VH of XENP018828

SEQ ID NO: 13908 - protein, 107 aa, synthetic construct
  REGION 1..107: note = Description of Artificial Sequence: Synthetic polypeptide
  REGION 1..107: note = VL of XENP018828
SIVMTQSPATLSVSPGERATLSCRASQSVSNDVAWYQQKPGQSPRLLINYASHRQTGVPDRFTGSGYGTEFTLTISSLQSEDFAVYFCQQDYSSPRTFGGGTKVEIK

SEQ ID NO: 13909 - protein, 5 aa, synthetic construct
  REGION 1..5: note = Description of Artificial Sequence: Synthetic peptide
  REGION 1..5: note = XENP018828 vhCDR1
NYWMN

SEQ ID NO: 13910 - protein, 19 aa, synthetic construct
  REGION 1..19: note = Description of Artificial Sequence: Synthetic peptide
  REGION 1..19: note = XENP018828 vhCDR2
EIRLKSNNYATHYAEPVKG

SEQ ID NO: 13911 - protein, 11 aa, synthetic construct
  REGION 1..11: note = Description of Artificial Sequence: Synthetic peptide
  REGION 1..11: note = XENP018828 vhCDR3
YYGNYGGYFDV

SEQ ID NO: 13912 - protein, 11 aa, synthetic construct
  REGION 1..11: note = Description of Artificial Sequence: Synthetic peptide
  REGION 1..11: note = XENP018828 vlCDR1
RASQSVSNDVA

SEQ ID NO: 13913 - protein, 7 aa, synthetic construct
  REGION 1..7: note = Description of Artificial Sequence: Synthetic peptide
  REGION 1..7: note = XENP018828 vlCDR2
YASHRQT

SEQ ID NO: 13914 - protein, 9 aa, synthetic construct
  REGION 1..9: note = Description of Artificial Sequence: Synthetic peptide
  REGION 1..9: note = XENP018828 vlCDR3
QQDYSSPRT

SEQ ID NO: 13915 - protein, 249 aa, synthetic construct
  REGION 1..249: note = Description of Artificial Sequence: Synthetic polypeptide
  REGION 1..249: note = XENP018829 1G6_H1_L1.83_scFv(GKPGS)4
EVQLVESGGGLVKPGGSLRLSCAASGFTFSNYWMNWVRQAPGKGLEWVGEIRLKSNNYATHYAEPVKGRFTISRDDSKSTVYLQMNSLKTEDTAVYYCTRYYGNYGGYFDVWGAGTLVTVSSGKPGSGKPGSGKPGSGKPGSSIVMTQSPATLSVSPGERATLSCRASQSVSNDVAWYQQKPGQSPRLLINYASHRDTGVPDRFTGSGYGTEFTLTISSLQSEDFAVYFCQQDYSSPRTFGGGTKVEIK

SEQ ID NO: 13916 - protein, 122 aa, synthetic construct; identical to SEQ ID NO: 10922
  REGION 1..122: note = Description of Artificial Sequence: Synthetic polypeptide
  REGION 1..122: note = VH of XENP018829

SEQ ID NO: 13917 - protein, 107 aa, synthetic construct
  REGION 1..107: note = Description of Artificial Sequence: Synthetic polypeptide
  REGION 1..107: note = VL of XENP018829
SIVMTQSPATLSVSPGERATLSCRASQSVSNDVAWYQQKPGQSPRLLINYASHRDTGVPDRFTGSGYGTEFTLTISSLQSEDFAVYFCQQDYSSPRTFGGGTKVEIK

SEQ ID NO: 13918 - protein, 5 aa, synthetic construct
  REGION 1..5: note = Description of Artificial Sequence: Synthetic peptide
  REGION 1..5: note = XENP018829 vhCDR1
NYWMN

SEQ ID NO: 13919 - protein, 19 aa, synthetic construct
  REGION 1..19: note = Description of Artificial Sequence: Synthetic peptide
  REGION 1..19: note = XENP018829 vhCDR2
EIRLKSNNYATHYAEPVKG

SEQ ID NO: 13920 - protein, 11 aa, synthetic construct
  REGION 1..11: note = Description of Artificial Sequence: Synthetic peptide
  REGION 1..11: note = XENP018829 vhCDR3
YYGNYGGYFDV

SEQ ID NO: 13921 - protein, 11 aa, synthetic construct
  REGION 1..11: note = Description of Artificial Sequence: Synthetic peptide
  REGION 1..11: note = XENP018829 vlCDR1
RASQSVSNDVA

SEQ ID NO: 13922 - protein, 7 aa, synthetic construct
  REGION 1..7: note = Description of Artificial Sequence: Synthetic peptide
  REGION 1..7: note = XENP018829 vlCDR2
YASHRDT

SEQ ID NO: 13923 - protein, 9 aa, synthetic construct
  REGION 1..9: note = Description of Artificial Sequence: Synthetic peptide
  REGION 1..9: note = XENP018829 vlCDR3
QQDYSSPRT

SEQ ID NO: 13924 - protein, 249 aa, synthetic construct
  REGION 1..249: note = Description of Artificial Sequence: Synthetic polypeptide
  REGION 1..249: note = XENP018830 1G6_H1_L1.84_scFv(GKPGS)4
EVQLVESGGGLVKPGGSLRLSCAASGFTFSNYWMNWVRQAPGKGLEWVGEIRLKSNNYATHYAEPVKGRFTISRDDSKSTVYLQMNSLKTEDTAVYYCTRYYGNYGGYFDVWGAGTLVTVSSGKPGSGKPGSGKPGSGKPGSSIVMTQSPATLSVSPGERATLSCRASQSVSNDVAWYQQKPGQSPRLLINYASHRKTGVPDRFTGSGYGTEFTLTISSLQSEDFAVYFCQQDYSSPRTFGGGTKVEIK

SEQ ID NO: 13925 - protein, 122 aa, synthetic construct; identical to SEQ ID NO: 10922
  REGION 1..122: note = Description of Artificial Sequence: Synthetic polypeptide
  REGION 1..122: note = VH of XENP018830

SEQ ID NO: 13926 - protein, 107 aa, synthetic construct
  REGION 1..107: note = Description of Artificial Sequence: Synthetic polypeptide
  REGION 1..107: note = VL of XENP018830
SIVMTQSPATLSVSPGERATLSCRASQSVSNDVAWYQQKPGQSPRLLINYASHRKTGVPDRFTGSGYGTEFTLTISSLQSEDFAVYFCQQDYSSPRTFGGGTKVEIK

SEQ ID NO: 13927 - protein, 5 aa, synthetic construct
  REGION 1..5: note = Description of Artificial Sequence: Synthetic peptide
  REGION 1..5: note = XENP018830 vhCDR1
NYWMN

SEQ ID NO: 13928 - protein, 19 aa, synthetic construct
  REGION 1..19: note = Description of Artificial Sequence: Synthetic peptide
  REGION 1..19: note = XENP018830 vhCDR2
EIRLKSNNYATHYAEPVKG

SEQ ID NO: 13929 - protein, 11 aa, synthetic construct
  REGION 1..11: note = Description of Artificial Sequence: Synthetic peptide
  REGION 1..11: note = XENP018830 vhCDR3
YYGNYGGYFDV

SEQ ID NO: 13930 - protein, 11 aa, synthetic construct
  REGION 1..11: note = Description of Artificial Sequence: Synthetic peptide
  REGION 1..11: note = XENP018830 vlCDR1
RASQSVSNDVA

SEQ ID NO: 13931 - protein, 7 aa, synthetic construct
  REGION 1..7: note = Description of Artificial Sequence: Synthetic peptide
  REGION 1..7: note = XENP018830 vlCDR2
YASHRKT

SEQ ID NO: 13932 - protein, 9 aa, synthetic construct
  REGION 1..9: note = Description of Artificial Sequence: Synthetic peptide
  REGION 1..9: note = XENP018830 vlCDR3
QQDYSSPRT

SEQ ID NO: 13933 - protein, 249 aa, synthetic construct
  REGION 1..249: note = Description of Artificial Sequence: Synthetic polypeptide
  REGION 1..249: note = XENP018831 1G6_H1_L1.85_scFv(GKPGS)4
EVQLVESGGGLVKPGGSLRLSCAASGFTFSNYWMNWVRQAPGKGLEWVGEIRLKSNNYATHYAEPVKGRFTISRDDSKSTVYLQMNSLKTEDTAVYYCTRYYGNYGGYFDVWGAGTLVTVSSGKPGSGKPGSGKPGSGKPGSSIVMTQSPATLSVSPGERATLSCRASQSVSNDVAWYQQKPGQSPRLLINYASHRYVGVPDRFTGSGYGTEFTLTISSLQSEDFAVYFCQQDYSSPRTFGGGTKVEIK

SEQ ID NO: 13934 - protein, 122 aa, synthetic construct; identical to SEQ ID NO: 10922
  REGION 1..122: note = Description of Artificial Sequence: Synthetic polypeptide
  REGION 1..122: note = VH of XENP018831

SEQ ID NO: 13935 - protein, 107 aa, synthetic construct
  REGION 1..107: note = Description of Artificial Sequence: Synthetic polypeptide
  REGION 1..107: note = VL of XENP018831
SIVMTQSPATLSVSPGERATLSCRASQSVSNDVAWYQQKPGQSPRLLINYASHRYVGVPDRFTGSGYGTEFTLTISSLQSEDFAVYFCQQDYSSPRTFGGGTKVEIK

SEQ ID NO: 13936 - protein, 5 aa, synthetic construct
  REGION 1..5: note = Description of Artificial Sequence: Synthetic peptide
  REGION 1..5: note = XENP018831 vhCDR1
NYWMN

SEQ ID NO: 13937 - protein, 19 aa, synthetic construct
  REGION 1..19: note = Description of Artificial Sequence: Synthetic peptide
  REGION 1..19: note = XENP018831 vhCDR2
EIRLKSNNYATHYAEPVKG

SEQ ID NO: 13938 - protein, 11 aa, synthetic construct
  REGION 1..11: note = Description of Artificial Sequence: Synthetic peptide
  REGION 1..11: note = XENP018831 vhCDR3
YYGNYGGYFDV

SEQ ID NO: 13939 - protein, 11 aa, synthetic construct
  REGION 1..11: note = Description of Artificial Sequence: Synthetic peptide
  REGION 1..11: note = XENP018831 vlCDR1
RASQSVSNDVA

SEQ ID NO: 13940 - protein, 7 aa, synthetic construct
  REGION 1..7: note = Description of Artificial Sequence: Synthetic peptide
  REGION 1..7: note = XENP018831 vlCDR2
YASHRYV

SEQ ID NO: 13941 - protein, 9 aa, synthetic construct
  REGION 1..9: note = Description of Artificial Sequence: Synthetic peptide
  REGION 1..9: note = XENP018831 vlCDR3
QQDYSSPRT

SEQ ID NO: 13942 - protein, 249 aa, synthetic construct
  REGION 1..249: note = Description of Artificial Sequence: Synthetic polypeptide
  REGION 1..249: note = XENP018832 1G6_H1_L1.86_scFv(GKPGS)4
EVQLVESGGGLVKPGGSLRLSCAASGFTFSNYWMNWVRQAPGKGLEWVGEIRLKSNNYATHYAEPVKGRFTISRDDSKSTVYLQMNSLKTEDTAVYYCTRYYGNYGGYFDVWGAGTLVTVSSGKPGSGKPGSGKPGSGKPGSSIVMTQSPATLSVSPGERATLSCRASQSVSNDVAWYQQKPGQSPRLLINYASHRYSGVPDRFTGSGYGTEFTLTISSLQSEDFAVYFCQQDYSSPRTFGGGTKVEIK

SEQ ID NO: 13943 - protein, 122 aa, synthetic construct; identical to SEQ ID NO: 10922
  REGION 1..122: note = Description of Artificial Sequence: Synthetic polypeptide
  REGION 1..122: note = VH of XENP018832

SEQ ID NO: 13944 - protein, 107 aa, synthetic construct
  REGION 1..107: note = Description of Artificial Sequence: Synthetic polypeptide
  REGION 1..107: note = VL of XENP018832
SIVMTQSPATLSVSPGERATLSCRASQSVSNDVAWYQQKPGQSPRLLINYASHRYSGVPDRFTGSGYGTEFTLTISSLQSEDFAVYFCQQDYSSPRTFGGGTKVEIK

SEQ ID NO: 13945 - protein, 5 aa, synthetic construct
  REGION 1..5: note = Description of Artificial Sequence: Synthetic peptide
  REGION 1..5: note = XENP018832 vhCDR1
NYWMN

SEQ ID NO: 13946 - protein, 19 aa, synthetic construct
  REGION 1..19: note = Description of Artificial Sequence: Synthetic peptide
  REGION 1..19: note = XENP018832 vhCDR2
EIRLKSNNYATHYAEPVKG

SEQ ID NO: 13947 - protein, 11 aa, synthetic construct
  REGION 1..11: note = Description of Artificial Sequence: Synthetic peptide
  REGION 1..11: note = XENP018832 vhCDR3
YYGNYGGYFDV

SEQ ID NO: 13948 - protein, 11 aa, synthetic construct
  REGION 1..11: note = Description of Artificial Sequence: Synthetic peptide
  REGION 1..11: note = XENP018832 vlCDR1
RASQSVSNDVA

SEQ ID NO: 13949 - protein, 7 aa, synthetic construct
  REGION 1..7: note = Description of Artificial Sequence: Synthetic peptide
  REGION 1..7: note = XENP018832 vlCDR2
YASHRYS

SEQ ID NO: 13950 - protein, 9 aa, synthetic construct
  REGION 1..9: note = Description of Artificial Sequence: Synthetic peptide
  REGION 1..9: note = XENP018832 vlCDR3
QQDYSSPRT

SEQ ID NO: 13951 - protein, 249 aa, synthetic construct
  REGION 1..249: note = Description of Artificial Sequence: Synthetic polypeptide
  REGION 1..249: note = XENP018833 1G6_H1_L1.87_scFv(GKPGS)4
EVQLVESGGGLVKPGGSLRLSCAASGFTFSNYWMNWVRQAPGKGLEWVGEIRLKSNNYATHYAEPVKGRFTISRDDSKSTVYLQMNSLKTEDTAVYYCTRYYGNYGGYFDVWGAGTLVTVSSGKPGSGKPGSGKPGSGKPGSSIVMTQSPATLSVSPGERATLSCRASQSVSNDVAWYQQKPGQSPRLLINYASHRYAGVPDRFTGSGYGTEFTLTISSLQSEDFAVYFCQQDYSSPRTFGGGTKVEIK

SEQ ID NO: 13952 - protein, 122 aa, synthetic construct; identical to SEQ ID NO: 10922
  REGION 1..122: note = Description of Artificial Sequence: Synthetic polypeptide
  REGION 1..122: note = VH of XENP018833

SEQ ID NO: 13953 - protein, 107 aa, synthetic construct
  REGION 1..107: note = Description of Artificial Sequence: Synthetic polypeptide
  REGION 1..107: note = VL of XENP018833
SIVMTQSPATLSVSPGERATLSCRASQSVSNDVAWYQQKPGQSPRLLINYASHRYAGVPDRFTGSGYGTEFTLTISSLQSEDFAVYFCQQDYSSPRTFGGGTKVEIK

SEQ ID NO: 13954 - protein, 5 aa, synthetic construct
  REGION 1..5: note = Description of Artificial Sequence: Synthetic peptide
  REGION 1..5: note = XENP018833 vhCDR1
NYWMN

SEQ ID NO: 13955 - protein, 19 aa, synthetic construct
  REGION 1..19: note = Description of Artificial Sequence: Synthetic peptide
  REGION 1..19: note = XENP018833 vhCDR2
EIRLKSNNYATHYAEPVKG

SEQ ID NO: 13956 - protein, 11 aa, synthetic construct
  REGION 1..11: note = Description of Artificial Sequence: Synthetic peptide
  REGION 1..11: note = XENP018833 vhCDR3
YYGNYGGYFDV

SEQ ID NO: 13957 - protein, 11 aa, synthetic construct
  REGION 1..11: note = Description of Artificial Sequence: Synthetic peptide
  REGION 1..11: note = XENP018833 vlCDR1
RASQSVSNDVA

SEQ ID NO: 13958 - protein, 7 aa, synthetic construct
  REGION 1..7: note = Description of Artificial Sequence: Synthetic peptide
  REGION 1..7: note = XENP018833 vlCDR2
YASHRYA

SEQ ID NO: 13959 - protein, 9 aa, synthetic construct
  REGION 1..9: note = Description of Artificial Sequence: Synthetic peptide
  REGION 1..9: note = XENP018833 vlCDR3
QQDYSSPRT

SEQ ID NO: 13960 - protein, 249 aa, synthetic construct
  REGION 1..249: note = Description of Artificial Sequence: Synthetic polypeptide
  REGION 1..249: note = XENP018834 1G6_H1_L1.88_scFv(GKPGS)4
EVQLVESGGGLVKPGGSLRLSCAASGFTFSNYWMNWVRQAPGKGLEWVGEIRLKSNNYATHYAEPVKGRFTISRDDSKSTVYLQMNSLKTEDTAVYYCTRYYGNYGGYFDVWGAGTLVTVSSGKPGSGKPGSGKPGSGKPGSSIVMTQSPATLSVSPGERATLSCRASQSVSNDVAWYQQKPGQSPRLLINYASHRYIGVPDRFTGSGYGTEFTLTISSLQSEDFAVYFCQQDYSSPRTFGGGTKVEIK

SEQ ID NO: 13961 - protein, 122 aa, synthetic construct; identical to SEQ ID NO: 10922
  REGION 1..122: note = Description of Artificial Sequence: Synthetic polypeptide
  REGION 1..122: note = VH of XENP018834

SEQ ID NO: 13962 - protein, 107 aa, synthetic construct
  REGION 1..107: note = Description of Artificial Sequence: Synthetic polypeptide
  REGION 1..107: note = VL of XENP018834
SIVMTQSPATLSVSPGERATLSCRASQSVSNDVAWYQQKPGQSPRLLINYASHRYIGVPDRFTGSGYGTEFTLTISSLQSEDFAVYFCQQDYSSPRTFGGGTKVEIK

SEQ ID NO: 13963 - protein, 5 aa, synthetic construct
  REGION 1..5: note = Description of Artificial Sequence: Synthetic peptide
  REGION 1..5: note = XENP018834 vhCDR1
NYWMN

SEQ ID NO: 13964 - protein, 19 aa, synthetic construct
  REGION 1..19: note = Description of Artificial Sequence: Synthetic peptide
  REGION 1..19: note = XENP018834 vhCDR2
EIRLKSNNYATHYAEPVKG

SEQ ID NO: 13965 - protein, 11 aa, synthetic construct
  REGION 1..11: note = Description of Artificial Sequence: Synthetic peptide
  REGION 1..11: note = XENP018834 vhCDR3
YYGNYGGYFDV

SEQ ID NO: 13966 - protein, 11 aa, synthetic construct
  REGION 1..11: note = Description of Artificial Sequence: Synthetic peptide
  REGION 1..11: note = XENP018834 vlCDR1
RASQSVSNDVA

SEQ ID NO: 13967 - protein, 7 aa, synthetic construct
  REGION 1..7: note = Description of Artificial Sequence: Synthetic peptide
  REGION 1..7: note = XENP018834 vlCDR2
YASHRYI

SEQ ID NO: 13968 - protein, 9 aa, synthetic construct
  REGION 1..9: note = Description of Artificial Sequence: Synthetic peptide
  REGION 1..9: note = XENP018834 vlCDR3
QQDYSSPRT

SEQ ID NO: 13969 - protein, 249 aa, synthetic construct
  REGION 1..249: note = Description of Artificial Sequence: Synthetic polypeptide
  REGION 1..249: note = XENP018835 1G6_H1_L1.89_scFv(GKPGS)4
EVQLVESGGGLVKPGGSLRLSCAASGFTFSNYWMNWVRQAPGKGLEWVGEIRLKSNNYATHYAEPVKGRFTISRDDSKSTVYLQMNSLKTEDTAVYYCTRYYGNYGGYFDVWGAGTLVTVSSGKPGSGKPGSGKPGSGKPGSSIVMTQSPATLSVSPGERATLSCRASQSVSNDVAWYQQKPGQSPRLLINYASHRYQGVPDRFTGSGYGTEFTLTISSLQSEDFAVYFCQQDYSSPRTFGGGTKVEIK

SEQ ID NO: 13970 - protein, 122 aa, synthetic construct; identical to SEQ ID NO: 10922
  REGION 1..122: note = Description of Artificial Sequence: Synthetic polypeptide
  REGION 1..122: note = VH of XENP018835

SEQ ID NO: 13971 - protein, 107 aa, synthetic construct
  REGION 1..107: note = Description of Artificial Sequence: Synthetic polypeptide
  REGION 1..107: note = VL of XENP018835
SIVMTQSPATLSVSPGERATLSCRASQSVSNDVAWYQQKPGQSPRLLINYASHRYQGVPDRFTGSGYGTEFTLTISSLQSEDFAVYFCQQDYSSPRTFGGGTKVEIK

SEQ ID NO: 13972 - protein, 5 aa, synthetic construct
  REGION 1..5: note = Description of Artificial Sequence: Synthetic peptide
  REGION 1..5: note = XENP018835 vhCDR1
NYWMN

SEQ ID NO: 13973 - protein, 19 aa, synthetic construct
  REGION 1..19: note = Description of Artificial Sequence: Synthetic peptide
  REGION 1..19: note = XENP018835 vhCDR2
EIRLKSNNYATHYAEPVKG

SEQ ID NO: 13974 - protein, 11 aa, synthetic construct
  REGION 1..11: note = Description of Artificial Sequence: Synthetic peptide
  REGION 1..11: note = XENP018835 vhCDR3
YYGNYGGYFDV

SEQ ID NO: 13975 - protein, 11 aa, synthetic construct
  REGION 1..11: note = Description of Artificial Sequence: Synthetic peptide
  REGION 1..11: note = XENP018835 vlCDR1
RASQSVSNDVA

SEQ ID NO: 13976 - protein, 7 aa, synthetic construct
  REGION 1..7: note = Description of Artificial Sequence: Synthetic peptide
  REGION 1..7: note = XENP018835 vlCDR2
YASHRYQ

SEQ ID NO: 13977 - protein, 9 aa, synthetic construct
  REGION 1..9: note = Description of Artificial Sequence: Synthetic peptide
  REGION 1..9: note = XENP018835 vlCDR3
QQDYSSPRT

SEQ ID NO: 13978 - protein, 249 aa, synthetic construct
  REGION 1..249: note = Description of Artificial Sequence: Synthetic polypeptide
  REGION 1..249: note = XENP018836 1G6_H1_L1.90_scFv(GKPGS)4
EVQLVESGGGLVKPGGSLRLSCAASGFTFSNYWMNWVRQAPGKGLEWVGEIRLKSNNYATHYAEPVKGRFTISRDDSKSTVYLQMNSLKTEDTAVYYCTRYYGNYGGYFDVWGAGTLVTVSSGKPGSGKPGSGKPGSGKPGSSIVMTQSPATLSVSPGERATLSCRASQSVSNDVAWYQQKPGQSPRLLINYASHRYHGVPDRFTGSGYGTEFTLTISSLQSEDFAVYFCQQDYSSPRTFGGGTKVEIK

SEQ ID NO: 13979 - protein, 122 aa, synthetic construct; identical to SEQ ID NO: 10922
  REGION 1..122: note = Description of Artificial Sequence: Synthetic polypeptide
  REGION 1..122: note = VH of XENP018836

SEQ ID NO: 13980 - protein, 107 aa, synthetic construct
  REGION 1..107: note = Description of Artificial Sequence: Synthetic polypeptide
  REGION 1..107: note = VL of XENP018836
SIVMTQSPATLSVSPGERATLSCRASQSVSNDVAWYQQKPGQSPRLLINYASHRYHGVPDRFTGSGYGTEFTLTISSLQSEDFAVYFCQQDYSSPRTFGGGTKVEIK

SEQ ID NO: 13981 - protein, 5 aa, synthetic construct
  REGION 1..5: note = Description of Artificial Sequence: Synthetic peptide
  REGION 1..5: note = XENP018836 vhCDR1
NYWMN

SEQ ID NO: 13982 - protein, 19 aa, synthetic construct
  REGION 1..19: note = Description of Artificial Sequence: Synthetic peptide
  REGION 1..19: note = XENP018836 vhCDR2
EIRLKSNNYATHYAEPVKG

SEQ ID NO: 13983 - protein, 11 aa, synthetic construct
  REGION 1..11: note = Description of Artificial Sequence: Synthetic peptide
  REGION 1..11: note = XENP018836 vhCDR3
YYGNYGGYFDV

SEQ ID NO: 13984 - protein, 11 aa, synthetic construct
  REGION 1..11: note = Description of Artificial Sequence: Synthetic peptide
  REGION 1..11: note = XENP018836 vlCDR1
RASQSVSNDVA

SEQ ID NO: 13985 - protein, 7 aa, synthetic construct
  REGION 1..7: note = Description of Artificial Sequence: Synthetic peptide
  REGION 1..7: note = XENP018836 vlCDR2
YASHRYH

SEQ ID NO: 13986 - protein, 9 aa, synthetic construct
  REGION 1..9: note = Description of Artificial Sequence: Synthetic peptide
  REGION 1..9: note = XENP018836 vlCDR3
QQDYSSPRT

SEQ ID NO: 13987 - protein, 249 aa, synthetic construct
  REGION 1..249: note = Description of Artificial Sequence: Synthetic polypeptide
  REGION 1..249: note = XENP018837 1G6_H1_L1.91_scFv(GKPGS)4
EVQLVESGGGLVKPGGSLRLSCAASGFTFSNYWMNWVRQAPGKGLEWVGEIRLKSNNYATHYAEPVKGRFTISRDDSKSTVYLQMNSLKTEDTAVYYCTRYYGNYGGYFDVWGAGTLVTVSSGKPGSGKPGSGKPGSGKPGSSIVMTQSPATLSVSPGERATLSCRASQSVSNDVAWYQQKPGQSPRLLINYASHRYDGVPDRFTGSGYGTEFTLTISSLQSEDFAVYFCQQDYSSPRTFGGGTKVEIK

SEQ ID NO: 13988 - protein, 122 aa, synthetic construct; identical to SEQ ID NO: 10922
  REGION 1..122: note = Description of Artificial Sequence: Synthetic polypeptide
  REGION 1..122: note = VH of XENP018837

SEQ ID NO: 13989 - protein, 107 aa, synthetic construct
  REGION 1..107: note = Description of Artificial Sequence: Synthetic polypeptide
  REGION 1..107: note = VL of XENP018837
SIVMTQSPATLSVSPGERATLSCRASQSVSNDVAWYQQKPGQSPRLLINYASHRYDGVPDRFTGSGYGTEFTLTISSLQSEDFAVYFCQQDYSSPRTFGGGTKVEIK

SEQ ID NO: 13990 - protein, 5 aa, synthetic construct
  REGION 1..5: note = Description of Artificial Sequence: Synthetic peptide
  REGION 1..5: note = XENP018837 vhCDR1
NYWMN

SEQ ID NO: 13991 - protein, 19 aa, synthetic construct
  REGION 1..19: note = Description of Artificial Sequence: Synthetic peptide
  REGION 1..19: note = XENP018837 vhCDR2
EIRLKSNNYATHYAEPVKG

SEQ ID NO: 13992 - protein, 11 aa, synthetic construct
  REGION 1..11: note = Description of Artificial Sequence: Synthetic peptide
  REGION 1..11: note = XENP018837 vhCDR3
YYGNYGGYFDV

SEQ ID NO: 13993 - protein, 11 aa, synthetic construct
  REGION 1..11: note = Description of Artificial Sequence: Synthetic peptide
  REGION 1..11: note = XENP018837 vlCDR1
RASQSVSNDVA

SEQ ID NO: 13994 - protein, 7 aa, synthetic construct
  REGION 1..7: note = Description of Artificial Sequence: Synthetic peptide
  REGION 1..7: note = XENP018837 vlCDR2
YASHRYD

SEQ ID NO: 13995 - protein, 9 aa, synthetic construct
  REGION 1..9: note = Description of Artificial Sequence: Synthetic peptide
  REGION 1..9: note = XENP018837 vlCDR3
QQDYSSPRT

SEQ ID NO: 13996 - protein, 249 aa, synthetic construct
  REGION 1..249: note = Description of Artificial Sequence: Synthetic polypeptide
  REGION 1..249: note = XENP018838 1G6_H1_L1.92_scFv(GKPGS)4
EVQLVESGGGLVKPGGSLRLSCAASGFTFSNYWMNWVRQAPGKGLEWVGEIRLKSNNYATHYAEPVKGRFTISRDDSKSTVYLQMNSLKTEDTAVYYCTRYYGNYGGYFDVWGAGTLVTVSSGKPGSGKPGSGKPGSGKPGSSIVMTQSPATLSVSPGERATLSCRASQSVSNDVAWYQQKPGQSPRLLINYASHRYKGVPDRFTGSGYGTEFTLTISSLQSEDFAVYFCQQDYSSPRTFGGGTKVEIK

SEQ ID NO: 13997 - protein, 122 aa, synthetic construct; identical to SEQ ID NO: 10922
  REGION 1..122: note = Description of Artificial Sequence: Synthetic polypeptide
  REGION 1..122: note = VH of XENP018838

SEQ ID NO: 13998 - protein, 107 aa, synthetic construct
  REGION 1..107: note = Description of Artificial Sequence: Synthetic polypeptide
  REGION 1..107: note = VL of XENP018838
SIVMTQSPATLSVSPGERATLSCRASQSVSNDVAWYQQKPGQSPRLLINYASHRYKGVPDRFTGSGYGTEFTLTISSLQSEDFAVYFCQQDYSSPRTFGGGTKVEIK

SEQ ID NO: 13999 - protein, 5 aa, synthetic construct
  REGION 1..5: note = Description of Artificial Sequence: Synthetic peptide
  REGION 1..5: note = XENP018838 vhCDR1
NYWMN

SEQ ID NO: 14000 - protein, 19 aa, synthetic construct
  REGION 1..19: note = Description of Artificial Sequence: Synthetic peptide
  REGION 1..19: note = XENP018838 vhCDR2
EIRLKSNNYATHYAEPVKG

SEQ ID NO: 14001 - protein, 11 aa, synthetic construct
  REGION 1..11: note = Description of Artificial Sequence: Synthetic peptide
  REGION 1..11: note = XENP018838 vhCDR3
YYGNYGGYFDV

SEQ ID NO: 14002 - protein, 11 aa, synthetic construct
  REGION 1..11: note = Description of Artificial Sequence: Synthetic peptide
  REGION 1..11: note = XENP018838 vlCDR1
RASQSVSNDVA

SEQ ID NO: 14003 - protein, 7 aa, synthetic construct
  REGION 1..7: note = Description of Artificial Sequence: Synthetic peptide
  REGION 1..7: note = XENP018838 vlCDR2
YASHRYK

SEQ ID NO: 14004 - protein, 9 aa, synthetic construct
  REGION 1..9: note = Description of Artificial Sequence: Synthetic peptide
  REGION 1..9: note = XENP018838 vlCDR3
QQDYSSPRT

SEQ ID NO: 14005 - protein, 249 aa, synthetic construct
  REGION 1..249: note = Description of Artificial Sequence: Synthetic polypeptide
  REGION 1..249: note = XENP018839 1G6_H1_L1.93_scFv(GKPGS)4
EVQLVESGGGLVKPGGSLRLSCAASGFTFSNYWMNWVRQAPGKGLEWVGEIRLKSNNYATHYAEPVKGRFTISRDDSKSTVYLQMNSLKTEDTAVYYCTRYYGNYGGYFDVWGAGTLVTVSSGKPGSGKPGSGKPGSGKPGSSIVMTQSPATLSVSPGERATLSCRASQSVSNDVAWYQQKPGQSPRLLINYASHRYYGVPDRFTGSGYGTEFTLTISSLQSEDFAVYFCQQDYSSPRTFGGGTKVEIK

SEQ ID NO: 14006 - protein, 122 aa, synthetic construct; identical to SEQ ID NO: 10922
  REGION 1..122: note = Description of Artificial Sequence: Synthetic polypeptide
  REGION 1..122: note = VH of XENP018839

SEQ ID NO: 14007 - protein, 107 aa, synthetic construct
  REGION 1..107: note = Description of Artificial Sequence: Synthetic polypeptide
  REGION 1..107: note = VL of XENP018839
SIVMTQSPATLSVSPGERATLSCRASQSVSNDVAWYQQKPGQSPRLLINYASHRYYGVPDRFTGSGYGTEFTLTISSLQSEDFAVYFCQQDYSSPRTFGGGTKVEIK

SEQ ID NO: 14008 - protein, 5 aa, synthetic construct
  REGION 1..5: note = Description of Artificial Sequence: Synthetic peptide
  REGION 1..5: note = XENP018839 vhCDR1
NYWMN

SEQ ID NO: 14009 - protein, 19 aa, synthetic construct
  REGION 1..19: note = Description of Artificial Sequence: Synthetic peptide
  REGION 1..19: note = XENP018839 vhCDR2
EIRLKSNNYATHYAEPVKG

SEQ ID NO: 14010 - protein, 11 aa, synthetic construct
  REGION 1..11: note = Description of Artificial Sequence: Synthetic peptide
  REGION 1..11: note = XENP018839 vhCDR3
YYGNYGGYFDV

SEQ ID NO: 14011 - protein, 11 aa, synthetic construct
  REGION 1..11: note = Description of Artificial Sequence: Synthetic peptide
  REGION 1..11: note = XENP018839 vlCDR1
RASQSVSNDVA

SEQ ID NO: 14012 - protein, 7 aa, synthetic construct
  REGION 1..7: note = Description of Artificial Sequence: Synthetic peptide
  REGION 1..7: note = XENP018839 vlCDR2
YASHRYY

SEQ ID NO: 14013 - protein, 9 aa, synthetic construct
  REGION 1..9: note = Description of Artificial Sequence: Synthetic peptide
  REGION 1..9: note = XENP018839 vlCDR3
QQDYSSPRT

SEQ ID NO: 14014 - protein, 249 aa, synthetic construct
  REGION 1..249: note = Description of Artificial Sequence: Synthetic polypeptide
  REGION 1..249: note = XENP018840 1G6_H1_L1.94_scFv(GKPGS)4
EVQLVESGGGLVKPGGSLRLSCAASGFTFSNYWMNWVRQAPGKGLEWVGEIRLKSNNYATHYAEPVKGRFTISRDDSKSTVYLQMNSLKTEDTAVYYCTRYYGNYGGYFDVWGAGTLVTVSSGKPGSGKPGSGKPGSGKPGSSIVMTQSPATLSVSPGERATLSCRASQSVSNDVAWYQQKPGQSPRLLINYASHRYTSVPDRFTGSGYGTEFTLTISSLQSEDFAVYFCQQDYSSPRTFGGGTKVEIK

SEQ ID NO: 14015 - protein, 122 aa, synthetic construct; identical to SEQ ID NO: 10922
  REGION 1..122: note = Description of Artificial Sequence: Synthetic polypeptide
  REGION 1..122: note = VH of XENP018840

SEQ ID NO: 14016 - protein, 107 aa, synthetic construct
  REGION 1..107: note = Description of Artificial Sequence: Synthetic polypeptide
  REGION 1..107: note = VL of XENP018840
SIVMTQSPATLSVSPGERATLSCRASQSVSNDVAWYQQKPGQSPRLLINYASHRYTSVPDRFTGSGYGTEFTLTISSLQSEDFAVYFCQQDYSSPRTFGGGTKVEIK

SEQ ID NO: 14017 - protein, 5 aa, synthetic construct
  REGION 1..5: note = Description of Artificial Sequence: Synthetic peptide
  REGION 1..5: note = XENP018840 vhCDR1
NYWMN

SEQ ID NO: 14018 - protein, 19 aa, synthetic construct
  REGION 1..19: note = Description of Artificial Sequence: Synthetic peptide
  REGION 1..19: note = XENP018840 vhCDR2
EIRLKSNNYATHYAEPVKG

SEQ ID NO: 14019 - protein, 11 aa, synthetic construct
  REGION 1..11: note = Description of Artificial Sequence: Synthetic peptide
  REGION 1..11: note = XENP018840 vhCDR3
YYGNYGGYFDV

SEQ ID NO: 14020 - protein, 11 aa, synthetic construct
  REGION 1..11: note = Description of Artificial Sequence: Synthetic peptide
  REGION 1..11: note = XENP018840 vlCDR1
RASQSVSNDVA

SEQ ID NO: 14021 - protein, 7 aa, synthetic construct
  REGION 1..7: note = Description of Artificial Sequence: Synthetic peptide
  REGION 1..7: note = XENP018840 vlCDR2
YASHRYT

SEQ ID NO: 14022 - protein, 9 aa, synthetic construct
  REGION 1..9: note = Description of Artificial Sequence: Synthetic peptide
  REGION 1..9: note = XENP018840 vlCDR3
QQDYSSPRT

SEQ ID NO: 14023 - protein, 249 aa, synthetic construct
  REGION 1..249: note = Description of Artificial Sequence: Synthetic polypeptide
  REGION 1..249: note = XENP018841 1G6_H1_L1.95_scFv(GKPGS)4
EVQLVESGGGLVKPGGSLRLSCAASGFTFSNYWMNWVRQAPGKGLEWVGEIRLKSNNYATHYAEPVKGRFTISRDDSKSTVYLQMNSLKTEDTAVYYCTRYYGNYGGYFDVWGAGTLVTVSSGKPGSGKPGSGKPGSGKPGSSIVMTQSPATLSVSPGERATLSCRASQSVSNDVAWYQQKPGQSPRLLINYASHRYTGIPDRFTGSGYGTEFTLTISSLQSEDFAVYFCQQDYSSPRTFGGGTKVEIK

SEQ ID NO: 14024 - protein, 122 aa, synthetic construct; identical to SEQ ID NO: 10922
  REGION 1..122: note = Description of Artificial Sequence: Synthetic polypeptide
  REGION 1..122: note = VH of XENP018841

SEQ ID NO: 14025 - protein, 107 aa, synthetic construct
  REGION 1..107: note = Description of Artificial Sequence: Synthetic polypeptide
  REGION 1..107: note = VL of XENP018841
SIVMTQSPATLSVSPGERATLSCRASQSVSNDVAWYQQKPGQSPRLLINYASHRYTGIPDRFTGSGYGTEFTLTISSLQSEDFAVYFCQQDYSSPRTFGGGTKVEIK

SEQ ID NO: 14026 - protein, 5 aa, synthetic construct
  REGION 1..5: note = Description of Artificial Sequence: Synthetic peptide
  REGION 1..5: note = XENP018841 vhCDR1
NYWMN

SEQ ID NO: 14027 - protein, 19 aa, synthetic construct
  REGION 1..19: note = Description of Artificial Sequence: Synthetic peptide
  REGION 1..19: note = XENP018841 vhCDR2
EIRLKSNNYATHYAEPVKG

SEQ ID NO: 14028 - protein, 11 aa, synthetic construct
  REGION 1..11: note = Description of Artificial Sequence: Synthetic peptide
  REGION 1..11: note = XENP018841 vhCDR3
YYGNYGGYFDV

SEQ ID NO: 14029 - protein, 11 aa, synthetic construct
  REGION 1..11: note = Description of Artificial Sequence: Synthetic peptide
  REGION 1..11: note = XENP018841 vlCDR1
RASQSVSNDVA

SEQ ID NO: 14030 - protein, 7 aa, synthetic construct
  REGION 1..7: note = Description of Artificial Sequence: Synthetic peptide
  REGION 1..7: note = XENP018841 vlCDR2
YASHRYT

SEQ ID NO: 14031 - protein, 9 aa, synthetic construct
  REGION 1..9: note = Description of Artificial Sequence: Synthetic peptide
  REGION 1..9: note = XENP018841 vlCDR3
QQDYSSPRT

SEQ ID NO: 14032 - protein, 249 aa, synthetic construct
  REGION 1..249: note = Description of Artificial Sequence: Synthetic polypeptide
  REGION 1..249: note = XENP018842 1G6_H1_L1.96_scFv(GKPGS)4
EVQLVESGGGLVKPGGSLRLSCAASGFTFSNYWMNWVRQAPGKGLEWVGEIRLKSNNYATHYAEPVKGRFTISRDDSKSTVYLQMNSLKTEDTAVYYCTRYYGNYGGYFDVWGAGTLVTVSSGKPGSGKPGSGKPGSGKPGSSIVMTQSPATLSVSPGERATLSCRASQSVSNDVAWYQQKPGQSPRLLINYASHRYTGVPARFTGSGYGTEFTLTISSLQSEDFAVYFCQQDYSSPRTFGGGTKVEIK

SEQ ID NO: 14033 - protein, 122 aa, synthetic construct; identical to SEQ ID NO: 10922
  REGION 1..122: note = Description of Artificial Sequence: Synthetic polypeptide
  REGION 1..122: note = VH of XENP018842

SEQ ID NO: 14034 - protein, 107 aa, synthetic construct
  REGION 1..107: note = Description of Artificial Sequence: Synthetic polypeptide
  REGION 1..107: note = VL of XENP018842
SIVMTQSPATLSVSPGERATLSCRASQSVSNDVAWYQQKPGQSPRLLINYASHRYTGVPARFTGSGYGTEFTLTISSLQSEDFAVYFCQQDYSSPRTFGGGTKVEIK

SEQ ID NO: 14035 - protein, 5 aa, synthetic construct
  REGION 1..5: note = Description of Artificial Sequence: Synthetic peptide
  REGION 1..5: note = XENP018842 vhCDR1
NYWMN

SEQ ID NO: 14036 - protein, 19 aa, synthetic construct
  REGION 1..19: note = Description of Artificial Sequence: Synthetic peptide
  REGION 1..19: note = XENP018842 vhCDR2
EIRLKSNNYATHYAEPVKG

SEQ ID NO: 14037 - protein, 11 aa, synthetic construct
  REGION 1..11: note = Description of Artificial Sequence: Synthetic peptide
  REGION 1..11: note = XENP018842 vhCDR3
YYGNYGGYFDV

SEQ ID NO: 14038 - protein, 11 aa, synthetic construct
  REGION 1..11: note = Description of Artificial Sequence: Synthetic peptide
  REGION 1..11: note = XENP018842 vlCDR1
RASQSVSNDVA

SEQ ID NO: 14039 - protein, 7 aa, synthetic construct
  REGION 1..7: note = Description of Artificial Sequence: Synthetic peptide
  REGION 1..7: note = XENP018842 vlCDR2
YASHRYT

SEQ ID NO: 14040 - protein, 9 aa, synthetic construct
  REGION 1..9: note = Description of Artificial Sequence: Synthetic peptide
  REGION 1..9: note = XENP018842 vlCDR3
QQDYSSPRT

SEQ ID NO: 14041 - protein, 249 aa, synthetic construct
  REGION 1..249: note = Description of Artificial Sequence: Synthetic polypeptide
  REGION 1..249: note = XENP018843 1G6_H1_L1.97_scFv(GKPGS)4
EVQLVESGGGLVKPGGSLRLSCAASGFTFSNYWMNWVRQAPGKGLEWVGEIRLKSNNYATHYAEPVKGRFTISRDDSKSTVYLQMNSLKTEDTAVYYCTRYYGNYGGYFDVWGAGTLVTVSSGKPGSGKPGSGKPGSGKPGSSIVMTQSPATLSVSPGERATLSCRASQSVSNDVAWYQQKPGQSPRLLINYASHRYTGVPDRFSGSGYGTEFTLTISSLQSEDFAVYFCQQDYSSPRTFGGGTKVEIK

SEQ ID NO: 14042 - protein, 122 aa, synthetic construct; identical to SEQ ID NO: 10922
  REGION 1..122: note = Description of Artificial Sequence: Synthetic polypeptide
  REGION 1..122: note = VH of XENP018843

SEQ ID NO: 14043 - protein, 107 aa, synthetic construct
  REGION 1..107: note = Description of Artificial Sequence: Synthetic polypeptide
  REGION 1..107: note = VL of XENP018843
SIVMTQSPATLSVSPGERATLSCRASQSVSNDVAWYQQKPGQSPRLLINYASHRYTGVPDRFSGSGYGTEFTLTISSLQSEDFAVYFCQQDYSSPRTFGGGTKVEIK

SEQ ID NO: 14044 - protein, 5 aa, synthetic construct
  REGION 1..5: note = Description of Artificial Sequence: Synthetic peptide
  REGION 1..5: note = XENP018843 vhCDR1
NYWMN

SEQ ID NO: 14045 - protein, 19 aa, synthetic construct
  REGION 1..19: note = Description of Artificial Sequence: Synthetic peptide
  REGION 1..19: note = XENP018843 vhCDR2
EIRLKSNNYATHYAEPVKG

SEQ ID NO: 14046 - protein, 11 aa, synthetic construct
  REGION 1..11: note = Description of Artificial Sequence: Synthetic peptide
  REGION 1..11: note = XENP018843 vhCDR3
YYGNYGGYFDV

SEQ ID NO: 14047 - protein, 11 aa, synthetic construct
  REGION 1..11: note = Description of Artificial Sequence: Synthetic peptide
  REGION 1..11: note = XENP018843 vlCDR1
RASQSVSNDVA

SEQ ID NO: 14048 - protein, 7 aa, synthetic construct
  REGION 1..7: note = Description of Artificial Sequence: Synthetic peptide
  REGION 1..7: note = XENP018843 vlCDR2
YASHRYT

SEQ ID NO: 14049 - protein, 9 aa, synthetic construct
  REGION 1..9: note = Description of Artificial Sequence: Synthetic peptide
  REGION 1..9: note = XENP018843 vlCDR3
QQDYSSPRT

SEQ ID NO: 14050 - protein, 249 aa, synthetic construct
  REGION 1..249: note = Description of Artificial Sequence: Synthetic polypeptide
  REGION 1..249: note = XENP018844 1G6_H1_L1.98_scFv(GKPGS)4
EVQLVESGGGLVKPGGSLRLSCAASGFTFSNYWMNWVRQAPGKGLEWVGEIRLKSNNYATHYAEPVKGRFTISRDDSKSTVYLQMNSLKTEDTAVYYCTRYYGNYGGYFDVWGAGTLVTVSSGKPGSGKPGSGKPGSGKPGSSIVMTQSPATLSVSPGERATLSCRASQSVSNDVAWYQQKPGQSPRLLINYASHRYTGVPDRFTGSGSGTEFTLTISSLQSEDFAVYFCQQDYSSPRTFGGGTKVEIK

SEQ ID NO: 14051 - protein, 122 aa, synthetic construct; identical to SEQ ID NO: 10922
  REGION 1..122: note = Description of Artificial Sequence: Synthetic polypeptide
  REGION 1..122: note = VH of XENP018844

SEQ ID NO: 14052 - protein, 107 aa, synthetic construct
  REGION 1..107: note = Description of Artificial Sequence: Synthetic polypeptide
  REGION 1..107: note = VL of XENP018844
SIVMTQSPATLSVSPGERATLSCRASQSVSNDVAWYQQKPGQSPRLLINYASHRYTGVPDRFTGSGSGTEFTLTISSLQSEDFAVYFCQQDYSSPRTFGGGTKVEIK

SEQ ID NO: 14053 - protein, 5 aa, synthetic construct
  REGION 1..5: note = Description of Artificial Sequence: Synthetic peptide
  REGION 1..5: note = XENP018844 vhCDR1
NYWMN

SEQ ID NO: 14054 - protein, 19 aa, synthetic construct
  REGION 1..19: note = Description of Artificial Sequence: Synthetic peptide
  REGION 1..19: note = XENP018844 vhCDR2
EIRLKSNNYATHYAEPVKG

SEQ ID NO: 14055 - protein, 11 aa, synthetic construct
  REGION 1..11: note = Description of Artificial Sequence: Synthetic peptide
  REGION 1..11: note = XENP018844 vhCDR3
YYGNYGGYFDV

SEQ ID NO: 14056 - protein, 11 aa, synthetic construct
  REGION 1..11: note = Description of Artificial Sequence: Synthetic peptide
  REGION 1..11: note = XENP018844 vlCDR1
RASQSVSNDVA

SEQ ID NO: 14057 - protein, 7 aa, synthetic construct
  REGION 1..7: note = Description of Artificial Sequence: Synthetic peptide
  REGION 1..7: note = XENP018844 vlCDR2
YASHRYT

SEQ ID NO: 14058 - protein, 9 aa, synthetic construct
  REGION 1..9: note = Description of Artificial Sequence: Synthetic peptide
  REGION 1..9: note = XENP018844 vlCDR3
QQDYSSPRT

SEQ ID NO: 14059 - protein, 249 aa, synthetic construct
  REGION 1..249: note = Description of Artificial Sequence: Synthetic polypeptide
  REGION 1..249: note = XENP018845 1G6_H1_L1.99_scFv(GKPGS)4
EVQLVESGGGLVKPGGSLRLSCAASGFTFSNYWMNWVRQAPGKGLEWVGEIRLKSNNYATHYAEPVKGRFTISRDDSKSTVYLQMNSLKTEDTAVYYCTRYYGNYGGYFDVWGAGTLVTVSSGKPGSGKPGSGKPGSGKPGSSIVMTQSPATLSVSPGERATLSCRASQSVSNDVAWYQQKPGQSPRLLINYASHRYTGVPDRFTGSGPGTEFTLTISSLQSEDFAVYFCQQDYSSPRTFGGGTKVEIK

SEQ ID NO: 14060 - protein, 122 aa, synthetic construct; identical to SEQ ID NO: 10922
  REGION 1..122: note = Description of Artificial Sequence: Synthetic polypeptide
  REGION 1..122: note = VH of XENP018845

SEQ ID NO: 14061 - protein, 107 aa, synthetic construct
  REGION 1..107: note = Description of Artificial Sequence: Synthetic polypeptide
  REGION 1..107: note = VL of XENP018845
SIVMTQSPATLSVSPGERATLSCRASQSVSNDVAWYQQKPGQSPRLLINYASHRYTGVPDRFTGSGPGTEFTLTISSLQSEDFAVYFCQQDYSSPRTFGGGTKVEIK

SEQ ID NO: 14062 - protein, 5 aa, synthetic construct
  REGION 1..5: note = Description of Artificial Sequence: Synthetic peptide
  REGION 1..5: note = XENP018845 vhCDR1
NYWMN

SEQ ID NO: 14063 - protein, 19 aa, synthetic construct
  REGION 1..19: note = Description of Artificial Sequence: Synthetic peptide
  REGION 1..19: note = XENP018845 vhCDR2
EIRLKSNNYATHYAEPVKG

SEQ ID NO: 14064 - protein, 11 aa, synthetic construct
  REGION 1..11: note = Description of Artificial Sequence: Synthetic peptide
  REGION 1..11: note = XENP018845 vhCDR3
YYGNYGGYFDV

SEQ ID NO: 14065 - protein, 11 aa, synthetic construct
  REGION 1..11: note = Description of Artificial Sequence: Synthetic peptide
  REGION 1..11: note = XENP018845 vlCDR1
RASQSVSNDVA

SEQ ID NO: 14066 - protein, 7 aa, synthetic construct
  REGION 1..7: note = Description of Artificial Sequence: Synthetic peptide
  REGION 1..7: note = XENP018845 vlCDR2
YASHRYT

SEQ ID NO: 14067 - protein, 9 aa, synthetic construct
  REGION 1..9: note = Description of Artificial Sequence: Synthetic peptide
  REGION 1..9: note = XENP018845 vlCDR3
QQDYSSPRT

SEQ ID NO: 14068 - protein, 249 aa, synthetic construct
  REGION 1..249: note = Description of Artificial Sequence: Synthetic polypeptide
  REGION 1..249: note = XENP018846 1G6_H1_L1.100_scFv(GKPGS)4
EVQLVESGGGLVKPGGSLRLSCAASGFTFSNYWMNWVRQAPGKGLEWVGEIRLKSNNYATHYAEPVKGRFTISRDDSKSTVYLQMNSLKTEDTAVYYCTRYYGNYGGYFDVWGAGTLVTVSSGKPGSGKPGSGKPGSGKPGSSIVMTQSPATLSVSPGERATLSCRASQSVSNDVAWYQQKPGQSPRLLINYASHRYTGVPDRFTGSGYGTDFTLTISSLQSEDFAVYFCQQDYSSPRTFGGGTKVEIK

SEQ ID NO: 14069 - protein, 122 aa, synthetic construct; identical to SEQ ID NO: 10922
  REGION 1..122: note = Description of Artificial Sequence: Synthetic polypeptide
  REGION 1..122: note = VH of XENP018846

SEQ ID NO: 14070 - protein, 107 aa, synthetic construct
  REGION 1..107: note = Description of Artificial Sequence: Synthetic polypeptide
  REGION 1..107: note = VL of XENP018846
SIVMTQSPATLSVSPGERATLSCRASQSVSNDVAWYQQKPGQSPRLLINYASHRYTGVPDRFTGSGYGTDFTLTISSLQSEDFAVYFCQQDYSSPRTFGGGTKVEIK

SEQ ID NO: 14071 - protein, 5 aa, synthetic construct
  REGION 1..5: note = Description of Artificial Sequence: Synthetic peptide
  REGION 1..5: note = XENP018846 vhCDR1
NYWMN

SEQ ID NO: 14072 - protein, 19 aa, synthetic construct
  REGION 1..19: note = Description of Artificial Sequence: Synthetic peptide
  REGION 1..19: note = XENP018846 vhCDR2
EIRLKSNNYATHYAEPVKG

SEQ ID NO: 14073 - protein, 11 aa, synthetic construct
  REGION 1..11: note = Description of Artificial Sequence: Synthetic peptide
  REGION 1..11: note = XENP018846 vhCDR3
YYGNYGGYFDV

SEQ ID NO: 14074 - protein, 11 aa, synthetic construct
  REGION 1..11: note = Description of Artificial Sequence: Synthetic peptide
  REGION 1..11: note = XENP018846 vlCDR1
RASQSVSNDVA

SEQ ID NO: 14075 - protein, 7 aa, synthetic construct
  REGION 1..7: note = Description of Artificial Sequence: Synthetic peptide
  REGION 1..7: note = XENP018846 vlCDR2
YASHRYT

SEQ ID NO: 14076 - protein, 9 aa, synthetic construct
  REGION 1..9: note = Description of Artificial Sequence: Synthetic peptide
  REGION 1..9: note = XENP018846 vlCDR3
QQDYSSPRT

SEQ ID NO: 14077 - protein, 249 aa, synthetic construct
  REGION 1..249: note = Description of Artificial Sequence: Synthetic polypeptide
  REGION 1..249: note = XENP018847 1G6_H1_L1.101_scFv(GKPGS)4
EVQLVESGGGLVKPGGSLRLSCAASGFTFSNYWMNWVRQAPGKGLEWVGEIRLKSNNYATHYAEPVKGRFTISRDDSKSTVYLQMNSLKTEDTAVYYCTRYYGNYGGYFDVWGAGTLVTVSSGKPGSGKPGSGKPGSGKPGSSIVMTQSPATLSVSPGERATLSCRASQSVSNDVAWYQQKPGQSPRLLINYASHRYTGVPDRFTGSGYGTEFTFTISSLQSEDFAVYFCQQDYSSPRTFGGGTKVEIK

SEQ ID NO: 14078 - protein, 122 aa, synthetic construct; identical to SEQ ID NO: 10922
  REGION 1..122: note = Description of Artificial Sequence: Synthetic polypeptide
  REGION 1..122: note = VH of XENP018847

SEQ ID NO: 14079 - protein, 107 aa, synthetic construct
  REGION 1..107: note = Description of Artificial Sequence: Synthetic polypeptide
  REGION 1..107: note = VL of XENP018847
SIVMTQSPATLSVSPGERATLSCRASQSVSNDVAWYQQKPGQSPRLLINYASHRYTGVPDRFTGSGYGTEFTFTISSLQSEDFAVYFCQQDYSSPRTFGGGTKVEIK

SEQ ID NO: 14080 - protein, 5 aa, synthetic construct
  REGION 1..5: note = Description of Artificial Sequence: Synthetic peptide
  REGION 1..5: note = XENP018847 vhCDR1
NYWMN

SEQ ID NO: 14081 - protein, 19 aa, synthetic construct
  REGION 1..19: note = Description of Artificial Sequence: Synthetic peptide
  REGION 1..19: note = XENP018847 vhCDR2
EIRLKSNNYATHYAEPVKG

SEQ ID NO: 14082 - protein, 11 aa, synthetic construct
  REGION 1..11: note = Description of Artificial Sequence: Synthetic peptide
  REGION 1..11: note = XENP018847 vhCDR3
YYGNYGGYFDV

SEQ ID NO: 14083 - protein, 11 aa, synthetic construct
  REGION 1..11: note = Description of Artificial Sequence: Synthetic peptide
  REGION 1..11: note = XENP018847 vlCDR1
RASQSVSNDVA

SEQ ID NO: 14084 - protein, 7 aa, synthetic construct
  REGION 1..7: note = Description of Artificial Sequence: Synthetic peptide
  REGION 1..7: note = XENP018847 vlCDR2
YASHRYT

SEQ ID NO: 14085 - protein, 9 aa, synthetic construct
  REGION 1..9: note = Description of Artificial Sequence: Synthetic peptide
  REGION 1..9: note = XENP018847 vlCDR3
QQDYSSPRT

SEQ ID NO: 14086 - protein, 249 aa, synthetic construct
  REGION 1..249: note = Description of Artificial Sequence: Synthetic polypeptide
  REGION 1..249: note = XENP018848 1G6_H1_L1.102_scFv(GKPGS)4
EVQLVESGGGLVKPGGSLRLSCAASGFTFSNYWMNWVRQAPGKGLEWVGEIRLKSNNYATHYAEPVKGRFTISRDDSKSTVYLQMNSLKTEDTAVYYCTRYYGNYGGYFDVWGAGTLVTVSSGKPGSGKPGSGKPGSGKPGSSIVMTQSPATLSVSPGERATLSCRASQSVSNDVAWYQQKPGQSPRLLINYASHRYTGVPDRFTGSGYGTEFTLTISTLQSEDFAVYFCQQDYSSPRTFGGGTKVEIK

SEQ ID NO: 14087 - protein, 122 aa, synthetic construct; identical to SEQ ID NO: 10922
  REGION 1..122: note = Description of Artificial Sequence: Synthetic polypeptide
  REGION 1..122: note = VH of XENP018848

SEQ ID NO: 14088 - protein, 107 aa, synthetic construct
  REGION 1..107: note = Description of Artificial Sequence: Synthetic polypeptide
  REGION 1..107: note = VL of XENP018848
SIVMTQSPATLSVSPGERATLSCRASQSVSNDVAWYQQKPGQSPRLLINYASHRYTGVPDRFTGSGYGTEFTLTISTLQSEDFAVYFCQQDYSSPRTFGGGTKVEIK

SEQ ID NO: 14089 - protein, 5 aa, synthetic construct
  REGION 1..5: note = Description of Artificial Sequence: Synthetic peptide
  REGION 1..5: note = XENP018848 vhCDR1
NYWMN

SEQ ID NO: 14090 - protein, 19 aa, synthetic construct
  REGION 1..19: note = Description of Artificial Sequence: Synthetic peptide
  REGION 1..19: note = XENP018848 vhCDR2
EIRLKSNNYATHYAEPVKG

SEQ ID NO: 14091 - protein, 11 aa, synthetic construct
  REGION 1..11: note = Description of Artificial Sequence: Synthetic peptide
  REGION 1..11: note = XENP018848 vhCDR3
YYGNYGGYFDV

SEQ ID NO: 14092 - protein, 11 aa, synthetic construct
  REGION 1..11: note = Description of Artificial Sequence: Synthetic peptide
  REGION 1..11: note = XENP018848 vlCDR1
RASQSVSNDVA

SEQ ID NO: 14093 - protein, 7 aa, synthetic construct
  REGION 1..7: note = Description of Artificial Sequence: Synthetic peptide
  REGION 1..7: note = XENP018848 vlCDR2
YASHRYT

SEQ ID NO: 14094 - protein, 9 aa, synthetic construct
  REGION 1..9: note = Description of Artificial Sequence: Synthetic peptide
  REGION 1..9: note = XENP018848 vlCDR3
QQDYSSPRT

SEQ ID NO: 14095 - protein, 249 aa, synthetic construct
  REGION 1..249: note = Description of Artificial Sequence: Synthetic polypeptide
  REGION 1..249: note = XENP018849 1G6_H1_L1.103_scFv(GKPGS)4
EVQLVESGGGLVKPGGSLRLSCAASGFTFSNYWMNWVRQAPGKGLEWVGEIRLKSNNYATHYAEPVKGRFTISRDDSKSTVYLQMNSLKTEDTAVYYCTRYYGNYGGYFDVWGAGTLVTVSSGKPGSGKPGSGKPGSGKPGSSIVMTQSPATLSVSPGERATLSCRASQSVSNDVAWYQQKPGQSPRLLINYASHRYTGVPDRFTGSGYGTEFTLTISSVQSEDFAVYFCQQDYSSPRTFGGGTKVEIK

SEQ ID NO: 14096 - protein, 122 aa, synthetic construct; identical to SEQ ID NO: 10922
  REGION 1..122: note = Description of Artificial Sequence: Synthetic polypeptide
  REGION 1..122: note = VH of XENP018849

SEQ ID NO: 14097 - protein, 107 aa, synthetic construct
  REGION 1..107: note = Description of Artificial Sequence: Synthetic polypeptide
  REGION 1..107: note = VL of XENP018849
SIVMTQSPATLSVSPGERATLSCRASQSVSNDVAWYQQKPGQSPRLLINYASHRYTGVPDRFTGSGYGTEFTLTISSVQSEDFAVYFCQQDYSSPRTFGGGTKVEIK

SEQ ID NO: 14098 - protein, 5 aa, synthetic construct
  REGION 1..5: note = Description of Artificial Sequence: Synthetic peptide
  REGION 1..5: note = XENP018849 vhCDR1
NYWMN

SEQ ID NO: 14099 - protein, 19 aa, synthetic construct
  REGION 1..19: note = Description of Artificial Sequence: Synthetic peptide
  REGION 1..19: note = XENP018849 vhCDR2
EIRLKSNNYATHYAEPVKG

SEQ ID NO: 14100 - protein, 11 aa, synthetic construct
  REGION 1..11: note = Description of Artificial Sequence: Synthetic peptide
  REGION 1..11: note = XENP018849 vhCDR3
YYGNYGGYFDV

SEQ ID NO: 14101 - protein, 11 aa, synthetic construct
  REGION 1..11: note = Description of Artificial Sequence: Synthetic peptide
  REGION 1..11: note = XENP018849 vlCDR1
RASQSVSNDVA

SEQ ID NO: 14102 - protein, 7 aa, synthetic construct
  REGION 1..7: note = Description of Artificial Sequence: Synthetic peptide
  REGION 1..7: note = XENP018849 vlCDR2
YASHRYT

SEQ ID NO: 14103 - protein, 9 aa, synthetic construct
  REGION 1..9: note = Description of Artificial Sequence: Synthetic peptide
  REGION 1..9: note = XENP018849 vlCDR3
QQDYSSPRT

SEQ ID NO: 14104 - protein, 249 aa, synthetic construct
  REGION 1..249: note = Description of Artificial Sequence: Synthetic polypeptide
  REGION 1..249: note = XENP018850 1G6_H1_L1.104_scFv(GKPGS)4
EVQLVESGGGLVKPGGSLRLSCAASGFTFSNYWMNWVRQAPGKGLEWVGEIRLKSNNYATHYAEPVKGRFTISRDDSKSTVYLQMNSLKTEDTAVYYCTRYYGNYGGYFDVWGAGTLVTVSSGKPGSGKPGSGKPGSGKPGSSIVMTQSPATLSVSPGERATLSCRASQSVSNDVAWYQQKPGQSPRLLINYASHRYTGVPDRFTGSGYGTEFTLTISSLQAEDFAVYFCQQDYSSPRTFGGGTKVEIK

SEQ ID NO: 14105 - protein, 122 aa, synthetic construct; identical to SEQ ID NO: 10922
  REGION 1..122: note = Description of Artificial Sequence: Synthetic polypeptide
  REGION 1..122: note = VH of XENP018850

SEQ ID NO: 14106 - protein, 107 aa, synthetic construct
  REGION 1..107: note = Description of Artificial Sequence: Synthetic polypeptide
  REGION 1..107: note = VL of XENP018850
SIVMTQSPATLSVSPGERATLSCRASQSVSNDVAWYQQKPGQSPRLLINYASHRYTGVPDRFTGSGYGTEFTLTISSLQAEDFAVYFCQQDYSSPRTFGGGTKVEIK

SEQ ID NO: 14107 - protein, 5 aa, synthetic construct
  REGION 1..5: note = Description of Artificial Sequence: Synthetic peptide
  REGION 1..5: note = XENP018850 vhCDR1
NYWMN

SEQ ID NO: 14108 - protein, 19 aa, synthetic construct
  REGION 1..19: note = Description of Artificial Sequence: Synthetic peptide
  REGION 1..19: note = XENP018850 vhCDR2
EIRLKSNNYATHYAEPVKG

SEQ ID NO: 14109 - protein, 11 aa, synthetic construct
  REGION 1..11: note = Description of Artificial Sequence: Synthetic peptide
  REGION 1..11: note = XENP018850 vhCDR3
YYGNYGGYFDV

SEQ ID NO: 14110 - protein, 11 aa, synthetic construct
  REGION 1..11: note = Description of Artificial Sequence: Synthetic peptide
  REGION 1..11: note = XENP018850 vlCDR1
RASQSVSNDVA

SEQ ID NO: 14111 - protein, 7 aa, synthetic construct
  REGION 1..7: note = Description of Artificial Sequence: Synthetic peptide
  REGION 1..7: note = XENP018850 vlCDR2
YASHRYT

SEQ ID NO: 14112 - protein, 9 aa, synthetic construct
  REGION 1..9: note = Description of Artificial Sequence: Synthetic peptide
  REGION 1..9: note = XENP018850 vlCDR3
QQDYSSPRT

SEQ ID NO: 14113 - protein, 249 aa, synthetic construct
  REGION 1..249: note = Description of Artificial Sequence: Synthetic polypeptide
  REGION 1..249: note = XENP018851 1G6_H1_L1.105_scFv(GKPGS)4
EVQLVESGGGLVKPGGSLRLSCAASGFTFSNYWMNWVRQAPGKGLEWVGEIRLKSNNYATHYAEPVKGRFTISRDDSKSTVYLQMNSLKTEDTAVYYCTRYYGNYGGYFDVWGAGTLVTVSSGKPGSGKPGSGKPGSGKPGSSIVMTQSPATLSVSPGERATLSCRASQSVSNDVAWYQQKPGQSPRLLINYASHRYTGVPDRFTGSGYGTEFTLTISSLQSEDLAVYFCQQDYSSPRTFGGGTKVEIK

SEQ ID NO: 14114 - protein, 122 aa, synthetic construct; identical to SEQ ID NO: 10922
  REGION 1..122: note = Description of Artificial Sequence: Synthetic polypeptide
  REGION 1..122: note = VH of XENP018851

SEQ ID NO: 14115 - protein, 107 aa, synthetic construct
  REGION 1..107: note = Description of Artificial Sequence: Synthetic polypeptide
  REGION 1..107: note = VL of XENP018851
SIVMTQSPATLSVSPGERATLSCRASQSVSNDVAWYQQKPGQSPRLLINYASHRYTGVPDRFTGSGYGTEFTLTISSLQSEDLAVYFCQQDYSSPRTFGGGTKVEIK

SEQ ID NO: 14116 - protein, 5 aa, synthetic construct
  REGION 1..5: note = Description of Artificial Sequence: Synthetic peptide
  REGION 1..5: note = XENP018851 vhCDR1
NYWMN

SEQ ID NO: 14117 - protein, 19 aa, synthetic construct
  REGION 1..19: note = Description of Artificial Sequence: Synthetic peptide
  REGION 1..19: note = XENP018851 vhCDR2
EIRLKSNNYATHYAEPVKG

SEQ ID NO: 14118 - protein, 11 aa, synthetic construct
  REGION 1..11: note = Description of Artificial Sequence: Synthetic peptide
  REGION 1..11: note = XENP018851 vhCDR3
YYGNYGGYFDV

SEQ ID NO: 14119 - protein, 11 aa, synthetic construct
  REGION 1..11: note = Description of Artificial Sequence: Synthetic peptide
  REGION 1..11: note = XENP018851 vlCDR1
RASQSVSNDVA

SEQ ID NO: 14120 - protein, 7 aa, synthetic construct
  REGION 1..7: note = Description of Artificial Sequence: Synthetic peptide
  REGION 1..7: note = XENP018851 vlCDR2
YASHRYT

SEQ ID NO: 14121 - protein, 9 aa, synthetic construct
  REGION 1..9: note = Description of Artificial Sequence: Synthetic peptide
  REGION 1..9: note = XENP018851 vlCDR3
QQDYSSPRT

SEQ ID NO: 14122 - protein, 249 aa, synthetic construct
  REGION 1..249: note = Description of Artificial Sequence: Synthetic polypeptide
  REGION 1..249: note = XENP018852 1G6_H1_L1.106_scFv(GKPGS)4
EVQLVESGGGLVKPGGSLRLSCAASGFTFSNYWMNWVRQAPGKGLEWVGEIRLKSNNYATHYAEPVKGRFTISRDDSKSTVYLQMNSLKTEDTAVYYCTRYYGNYGGYFDVWGAGTLVTVSSGKPGSGKPGSGKPGSGKPGSSIVMTQSPATLSVSPGERATLSCRASQSVSNDVAWYQQKPGQSPRLLINYASHRYTGVPDRFTGSGYGTEFTLTISSLQSEDFAVYYCQQDYSSPRTFGGGTKVEIK

SEQ ID NO: 14123 - protein, 122 aa, synthetic construct; identical to SEQ ID NO: 10922
  REGION 1..122: note = Description of Artificial Sequence: Synthetic polypeptide
  REGION 1..122: note = VH of XENP018852

SEQ ID NO: 14124 - protein, 107 aa, synthetic construct
  REGION 1..107: note = Description of Artificial Sequence: Synthetic polypeptide
  REGION 1..107: note = VL of XENP018852
SIVMTQSPATLSVSPGERATLSCRASQSVSNDVAWYQQKPGQSPRLLINYASHRYTGVPDRFTGSGYGTEFTLTISSLQSEDFAVYYCQQDYSSPRTFGGGTKVEIK

SEQ ID NO: 14125 - protein, 5 aa, synthetic construct
  REGION 1..5: note = Description of Artificial Sequence: Synthetic peptide
  REGION 1..5: note = XENP018852 vhCDR1
NYWMN

SEQ ID NO: 14126 - protein, 19 aa, synthetic construct
  REGION 1..19: note = Description of Artificial Sequence: Synthetic peptide
  REGION 1..19: note = XENP018852 vhCDR2
EIRLKSNNYATHYAEPVKG

SEQ ID NO: 14127 - protein, 11 aa, synthetic construct
  REGION 1..11: note = Description of Artificial Sequence: Synthetic peptide
  REGION 1..11: note = XENP018852 vhCDR3
YYGNYGGYFDV

SEQ ID NO: 14128 - protein, 11 aa, synthetic construct
  REGION 1..11: note = Description of Artificial Sequence: Synthetic peptide
  REGION 1..11: note = XENP018852 vlCDR1
RASQSVSNDVA

SEQ ID NO: 14129 - protein, 7 aa, synthetic construct
  REGION 1..7: note = Description of Artificial Sequence: Synthetic peptide
  REGION 1..7: note = XENP018852 vlCDR2
YASHRYT

SEQ ID NO: 14130 - protein, 9 aa, synthetic construct
  REGION 1..9: note = Description of Artificial Sequence: Synthetic peptide
  REGION 1..9: note = XENP018852 vlCDR3
QQDYSSPRT

SEQ ID NO: 14131 - protein, 249 aa, synthetic construct
  REGION 1..249: note = Description of Artificial Sequence: Synthetic polypeptide
  REGION 1..249: note = XENP018853 1G6_H1_L1.107_scFv(GKPGS)4
EVQLVESGGGLVKPGGSLRLSCAASGFTFSNYWMNWVRQAPGKGLEWVGEIRLKSNNYATHYAEPVKGRFTISRDDSKSTVYLQMNSLKTEDTAVYYCTRYYGNYGGYFDVWGAGTLVTVSSGKPGSGKPGSGKPGSGKPGSSIVMTQSPATLSVSPGERATLSCRASQSVSNDVAWYQQKPGQSPRLLINYASHRYTGVPDRFTGSGYGTEFTLTISSLQSEDFAVYFCQQQYSSPRTFGGGTKVEIK

SEQ ID NO: 14132 - protein, 122 aa, synthetic construct; identical to SEQ ID NO: 10922
  REGION 1..122: note = Description of Artificial Sequence: Synthetic polypeptide
  REGION 1..122: note = VH of XENP018853

SEQ ID NO: 14133 - protein, 107 aa, synthetic construct
  REGION 1..107: note = Description of Artificial Sequence: Synthetic polypeptide
  REGION 1..107: note = VL of XENP018853
SIVMTQSPATLSVSPGERATLSCRASQSVSNDVAWYQQKPGQSPRLLINYASHRYTGVPDRFTGSGYGTEFTLTISSLQSEDFAVYFCQQQYSSPRTFGGGTKVEIK

SEQ ID NO: 14134 - protein, 5 aa, synthetic construct
  REGION 1..5: note = Description of Artificial Sequence: Synthetic peptide
  REGION 1..5: note = XENP018853 vhCDR1
NYWMN

SEQ ID NO: 14135 - protein, 19 aa, synthetic construct
  REGION 1..19: note = Description of Artificial Sequence: Synthetic peptide
  REGION 1..19: note = XENP018853 vhCDR2
EIRLKSNNYATHYAEPVKG

SEQ ID NO: 14136 - protein, 11 aa, synthetic construct
  REGION 1..11: note = Description of Artificial Sequence: Synthetic peptide
  REGION 1..11: note = XENP018853 vhCDR3
YYGNYGGYFDV

SEQ ID NO: 14137 - protein, 11 aa, synthetic construct
  REGION 1..11: note = Description of Artificial Sequence: Synthetic peptide
  REGION 1..11: note = XENP018853 vlCDR1
RASQSVSNDVA

SEQ ID NO: 14138 - protein, 7 aa, synthetic construct
  REGION 1..7: note = Description of Artificial Sequence: Synthetic peptide
  REGION 1..7: note = XENP018853 vlCDR2
YASHRYT

SEQ ID NO: 14139 - protein, 9 aa, synthetic construct
  REGION 1..9: note = Description of Artificial Sequence: Synthetic peptide
  REGION 1..9: note = XENP018853 vlCDR3
QQQYSSPRT

SEQ ID NO: 14140 - protein, 249 aa, synthetic construct
  REGION 1..249: note = Description of Artificial Sequence: Synthetic polypeptide
  REGION 1..249: note = XENP018854 1G6_H1_L1.108_scFv(GKPGS)4
EVQLVESGGGLVKPGGSLRLSCAASGFTFSNYWMNWVRQAPGKGLEWVGEIRLKSNNYATHYAEPVKGRFTISRDDSKSTVYLQMNSLKTEDTAVYYCTRYYGNYGGYFDVWGAGTLVTVSSGKPGSGKPGSGKPGSGKPGSSIVMTQSPATLSVSPGERATLSCRASQSVSNDVAWYQQKPGQSPRLLINYASHRYTGVPDRFTGSGYGTEFTLTISSLQSEDFAVYFCQQEYSSPRTFGGGTKVEIK

SEQ ID NO: 14141 - protein, 122 aa, synthetic construct; identical to SEQ ID NO: 10922
  REGION 1..122: note = Description of Artificial Sequence: Synthetic polypeptide
  REGION 1..122: note = VH of XENP018854

SEQ ID NO: 14142 - protein, 107 aa, synthetic construct
  REGION 1..107: note = Description of Artificial Sequence: Synthetic polypeptide
  REGION 1..107: note = VL of XENP018854
SIVMTQSPATLSVSPGERATLSCRASQSVSNDVAWYQQKPGQSPRLLINYASHRYTGVPDRFTGSGYGTEFTLTISSLQSEDFAVYFCQQEYSSPRTFGGGTKVEIK

SEQ ID NO: 14143 - protein, 5 aa, synthetic construct
  REGION 1..5: note = Description of Artificial Sequence: Synthetic peptide
  REGION 1..5: note = XENP018854 vhCDR1
NYWMN

SEQ ID NO: 14144 - protein, 19 aa, synthetic construct
  REGION 1..19: note = Description of Artificial Sequence: Synthetic peptide
  REGION 1..19: note = XENP018854 vhCDR2
EIRLKSNNYATHYAEPVKG

SEQ ID NO: 14145 - protein, 11 aa, synthetic construct
  REGION 1..11: note = Description of Artificial Sequence: Synthetic peptide
  REGION 1..11: note = XENP018854 vhCDR3
YYGNYGGYFDV

SEQ ID NO: 14146 - protein, 11 aa, synthetic construct
  REGION 1..11: note = Description of Artificial Sequence: Synthetic peptide
  REGION 1..11: note = XENP018854 vlCDR1
RASQSVSNDVA

SEQ ID NO: 14147 - protein, 7 aa, synthetic construct
  REGION 1..7: note = Description of Artificial Sequence: Synthetic peptide
  REGION 1..7: note = XENP018854 vlCDR2
YASHRYT

SEQ ID NO: 14148 - protein, 9 aa, synthetic construct
  REGION 1..9: note = Description of Artificial Sequence: Synthetic peptide
  REGION 1..9: note = XENP018854 vlCDR3
QQEYSSPRT

SEQ ID NO: 14149 - protein, 249 aa, synthetic construct
  REGION 1..249: note = Description of Artificial Sequence: Synthetic polypeptide
  REGION 1..249: note = XENP018855 1G6_H1_L1.109_scFv(GKPGS)4
EVQLVESGGGLVKPGGSLRLSCAASGFTFSNYWMNWVRQAPGKGLEWVGEIRLKSNNYATHYAEPVKGRFTISRDDSKSTVYLQMNSLKTEDTAVYYCTRYYGNYGGYFDVWGAGTLVTVSSGKPGSGKPGSGKPGSGKPGSSIVMTQSPATLSVSPGERATLSCRASQSVSNDVAWYQQKPGQSPRLLINYASHRYTGVPDRFTGSGYGTEFTLTISSLQSEDFAVYFCQQHYSSPRTFGGGTKVEIK

SEQ ID NO: 14150 - protein, 122 aa, synthetic construct; identical to SEQ ID NO: 10922
  REGION 1..122: note = Description of Artificial Sequence: Synthetic polypeptide
  REGION 1..122: note = VH of XENP018855

SEQ ID NO: 14151 - protein, 107 aa, synthetic construct
  REGION 1..107: note = Description of Artificial Sequence: Synthetic polypeptide
  REGION 1..107: note = VL of XENP018855
SIVMTQSPATLSVSPGERATLSCRASQSVSNDVAWYQQKPGQSPRLLINYASHRYTGVPDRFTGSGYGTEFTLTISSLQSEDFAVYFCQQHYSSPRTFGGGTKVEIK

SEQ ID NO: 14152 - protein, 5 aa, synthetic construct
  REGION 1..5: note = Description of Artificial Sequence: Synthetic peptide
  REGION 1..5: note = XENP018855 vhCDR1
NYWMN

SEQ ID NO: 14153 - protein, 19 aa, synthetic construct
  REGION 1..19: note = Description of Artificial Sequence: Synthetic peptide
  REGION 1..19: note = XENP018855 vhCDR2
EIRLKSNNYATHYAEPVKG

SEQ ID NO: 14154 - protein, 11 aa, synthetic construct
  REGION 1..11: note = Description of Artificial Sequence: Synthetic peptide
  REGION 1..11: note = XENP018855 vhCDR3
YYGNYGGYFDV

SEQ ID NO: 14155 - protein, 11 aa, synthetic construct
  REGION 1..11: note = Description of Artificial Sequence: Synthetic peptide
  REGION 1..11: note = XENP018855 vlCDR1
RASQSVSNDVA

SEQ ID NO: 14156 - protein, 7 aa, synthetic construct
  REGION 1..7: note = Description of Artificial Sequence: Synthetic peptide
  REGION 1..7: note = XENP018855 vlCDR2
YASHRYT

SEQ ID NO: 14157 - protein, 9 aa, synthetic construct
  REGION 1..9: note = Description of Artificial Sequence: Synthetic peptide
  REGION 1..9: note = XENP018855 vlCDR3
QQHYSSPRT

SEQ ID NO: 14158 - protein, 249 aa, synthetic construct
  REGION 1..249: note = Description of Artificial Sequence: Synthetic polypeptide
  REGION 1..249: note = XENP018856 1G6_H1_L1.110_scFv(GKPGS)4
EVQLVESGGGLVKPGGSLRLSCAASGFTFSNYWMNWVRQAPGKGLEWVGEIRLKSNNYATHYAEPVKGRFTISRDDSKSTVYLQMNSLKTEDTAVYYCTRYYGNYGGYFDVWGAGTLVTVSSGKPGSGKPGSGKPGSGKPGSSIVMTQSPATLSVSPGERATLSCRASQSVSNDVAWYQQKPGQSPRLLINYASHRYTGVPDRFTGSGYGTEFTLTISSLQSEDFAVYFCQQSYSSPRTFGGGTKVEIK

SEQ ID NO: 14159 - protein, 122 aa, synthetic construct; identical to SEQ ID NO: 10922
  REGION 1..122: note = Description of Artificial Sequence: Synthetic polypeptide
  REGION 1..122: note = VH of XENP018856

SEQ ID NO: 14160 - protein, 107 aa, synthetic construct
  REGION 1..107: note = Description of Artificial Sequence: Synthetic polypeptide
  REGION 1..107: note = VL of XENP018856
SIVMTQSPATLSVSPGERATLSCRASQSVSNDVAWYQQKPGQSPRLLINYASHRYTGVPDRFTGSGYGTEFTLTISSLQSEDFAVYFCQQSYSSPRTFGGGTKVEIK

SEQ ID NO: 14161 - protein, 5 aa, synthetic construct
  REGION 1..5: note = Description of Artificial Sequence: Synthetic peptide
  REGION 1..5: note = XENP018856 vhCDR1
NYWMN

SEQ ID NO: 14162 - protein, 19 aa, synthetic construct
  REGION 1..19: note = Description of Artificial Sequence: Synthetic peptide
  REGION 1..19: note = XENP018856 vhCDR2
EIRLKSNNYATHYAEPVKG

SEQ ID NO: 14163 - protein, 11 aa, synthetic construct
  REGION 1..11: note = Description of Artificial Sequence: Synthetic peptide
  REGION 1..11: note = XENP018856 vhCDR3
YYGNYGGYFDV

SEQ ID NO: 14164 - protein, 11 aa, synthetic construct
  REGION 1..11: note = Description of Artificial Sequence: Synthetic peptide
  REGION 1..11: note = XENP018856 vlCDR1
RASQSVSNDVA

SEQ ID NO: 14165 - protein, 7 aa, synthetic construct
  REGION 1..7: note = Description of Artificial Sequence: Synthetic peptide
  REGION 1..7: note = XENP018856 vlCDR2
YASHRYT

SEQ ID NO: 14166 - protein, 9 aa, synthetic construct
  REGION 1..9: note = Description of Artificial Sequence: Synthetic peptide
  REGION 1..9: note = XENP018856 vlCDR3
QQSYSSPRT

SEQ ID NO: 14167 - protein, 249 aa, synthetic construct
  REGION 1..249: note = Description of Artificial Sequence: Synthetic polypeptide
  REGION 1..249: note = XENP018857 1G6_H1_L1.111_scFv(GKPGS)4
EVQLVESGGGLVKPGGSLRLSCAASGFTFSNYWMNWVRQAPGKGLEWVGEIRLKSNNYATHYAEPVKGRFTISRDDSKSTVYLQMNSLKTEDTAVYYCTRYYGNYGGYFDVWGAGTLVTVSSGKPGSGKPGSGKPGSGKPGSSIVMTQSPATLSVSPGERATLSCRASQSVSNDVAWYQQKPGQSPRLLINYASHRYTGVPDRFTGSGYGTEFTLTISSLQSEDFAVYFCQQRYSSPRTFGGGTKVEIK

SEQ ID NO: 14168 - protein, 122 aa, synthetic construct; identical to SEQ ID NO: 10922
  REGION 1..122: note = Description of Artificial Sequence: Synthetic polypeptide
  REGION 1..122: note = VH of XENP018857

SEQ ID NO: 14169 - protein, 107 aa, synthetic construct
  REGION 1..107: note = Description of Artificial Sequence: Synthetic polypeptide
  REGION 1..107: note = VL of XENP018857
SIVMTQSPATLSVSPGERATLSCRASQSVSNDVAWYQQKPGQSPRLLINYASHRYTGVPDRFTGSGYGTEFTLTISSLQSEDFAVYFCQQRYSSPRTFGGGTKVEIK

SEQ ID NO: 14170 - protein, 5 aa, synthetic construct
  REGION 1..5: note = Description of Artificial Sequence: Synthetic peptide
  REGION 1..5: note = XENP018857 vhCDR1
NYWMN

SEQ ID NO: 14171 - protein, 19 aa, synthetic construct
  REGION 1..19: note = Description of Artificial Sequence: Synthetic peptide
  REGION 1..19: note = XENP018857 vhCDR2
EIRLKSNNYATHYAEPVKG

SEQ ID NO: 14172 - protein, 11 aa, synthetic construct
  REGION 1..11: note = Description of Artificial Sequence: Synthetic peptide
  REGION 1..11: note = XENP018857 vhCDR3
YYGNYGGYFDV

SEQ ID NO: 14173 - protein, 11 aa, synthetic construct
  REGION 1..11: note = Description of Artificial Sequence: Synthetic peptide
  REGION 1..11: note = XENP018857 vlCDR1
RASQSVSNDVA

SEQ ID NO: 14174 - protein, 7 aa, synthetic construct
  REGION 1..7: note = Description of Artificial Sequence: Synthetic peptide
  REGION 1..7: note = XENP018857 vlCDR2
YASHRYT

SEQ ID NO: 14175 - protein, 9 aa, synthetic construct
  REGION 1..9: note = Description of Artificial Sequence: Synthetic peptide
  REGION 1..9: note = XENP018857 vlCDR3
QQRYSSPRT

SEQ ID NO: 14176 - protein, 249 aa, synthetic construct
  REGION 1..249: note = Description of Artificial Sequence: Synthetic polypeptide
  REGION 1..249: note = XENP018858 1G6_H1_L1.112_scFv(GKPGS)4
EVQLVESGGGLVKPGGSLRLSCAASGFTFSNYWMNWVRQAPGKGLEWVGEIRLKSNNYATHYAEPVKGRFTISRDDSKSTVYLQMNSLKTEDTAVYYCTRYYGNYGGYFDVWGAGTLVTVSSGKPGSGKPGSGKPGSGKPGSSIVMTQSPATLSVSPGERATLSCRASQSVSNDVAWYQQKPGQSPRLLINYASHRYTGVPDRFTGSGYGTEFTLTISSLQSEDFAVYFCQQLYSSPRTFGGGTKVEIK

SEQ ID NO: 14177 - protein, 122 aa, synthetic construct; identical to SEQ ID NO: 10922
  REGION 1..122: note = Description of Artificial Sequence: Synthetic polypeptide
  REGION 1..122: note = VH of XENP018858

SEQ ID NO: 14178 - protein, 107 aa, synthetic construct
  REGION 1..107: note = Description of Artificial Sequence: Synthetic polypeptide
  REGION 1..107: note = VL of XENP018858
SIVMTQSPATLSVSPGERATLSCRASQSVSNDVAWYQQKPGQSPRLLINYASHRYTGVPDRFTGSGYGTEFTLTISSLQSEDFAVYFCQQLYSSPRTFGGGTKVEIK

SEQ ID NO: 14179 - protein, 5 aa, synthetic construct
  REGION 1..5: note = Description of Artificial Sequence: Synthetic peptide
  REGION 1..5: note = XENP018858 vhCDR1
NYWMN

SEQ ID NO: 14180 - protein, 19 aa, synthetic construct
  REGION 1..19: note = Description of Artificial Sequence: Synthetic peptide
  REGION 1..19: note = XENP018858 vhCDR2
EIRLKSNNYATHYAEPVKG

SEQ ID NO: 14181 - protein, 11 aa, synthetic construct
  REGION 1..11: note = Description of Artificial Sequence: Synthetic peptide
  REGION 1..11: note = XENP018858 vhCDR3
YYGNYGGYFDV

SEQ ID NO: 14182 - protein, 11 aa, synthetic construct
  REGION 1..11: note = Description of Artificial Sequence: Synthetic peptide
  REGION 1..11: note = XENP018858 vlCDR1
RASQSVSNDVA

SEQ ID NO: 14183 - protein, 7 aa, synthetic construct
  REGION 1..7: note = Description of Artificial Sequence: Synthetic peptide
  REGION 1..7: note = XENP018858 vlCDR2
YASHRYT

SEQ ID NO: 14184 - protein, 9 aa, synthetic construct
  REGION 1..9: note = Description of Artificial Sequence: Synthetic peptide
  REGION 1..9: note = XENP018858 vlCDR3
QQLYSSPRT

SEQ ID NO: 14185 - protein, 249 aa, synthetic construct
  REGION 1..249: note = Description of Artificial Sequence: Synthetic polypeptide
  REGION 1..249: note = XENP018859 1G6_H1_L1.113_scFv(GKPGS)4
EVQLVESGGGLVKPGGSLRLSCAASGFTFSNYWMNWVRQAPGKGLEWVGEIRLKSNNYATHYAEPVKGRFTISRDDSKSTVYLQMNSLKTEDTAVYYCTRYYGNYGGYFDVWGAGTLVTVSSGKPGSGKPGSGKPGSGKPGSSIVMTQSPATLSVSPGERATLSCRASQSVSNDVAWYQQKPGQSPRLLINYASHRYTGVPDRFTGSGYGTEFTLTISSLQSEDFAVYFCQQTYSSPRTFGGGTKVEIK

SEQ ID NO: 14186 - protein, 122 aa, synthetic construct; identical to SEQ ID NO: 10922
  REGION 1..122: note = Description of Artificial Sequence: Synthetic polypeptide
  REGION 1..122: note = VH of XENP018859

SEQ ID NO: 14187 - protein, 107 aa, synthetic construct
  REGION 1..107: note = Description of Artificial Sequence: Synthetic polypeptide
  REGION 1..107: note = VL of XENP018859
SIVMTQSPATLSVSPGERATLSCRASQSVSNDVAWYQQKPGQSPRLLINYASHRYTGVPDRFTGSGYGTEFTLTISSLQSEDFAVYFCQQTYSSPRTFGGGTKVEIK

SEQ ID NO: 14188 - protein, 5 aa, synthetic construct
  REGION 1..5: note = Description of Artificial Sequence: Synthetic peptide
  REGION 1..5: note = XENP018859 vhCDR1
NYWMN

SEQ ID NO: 14189 - protein, 19 aa, synthetic construct
  REGION 1..19: note = Description of Artificial Sequence: Synthetic peptide
  REGION 1..19: note = XENP018859 vhCDR2
EIRLKSNNYATHYAEPVKG

SEQ ID NO: 14190 - protein, 11 aa, synthetic construct
  REGION 1..11: note = Description of Artificial Sequence: Synthetic peptide
  REGION 1..11: note = XENP018859 vhCDR3
YYGNYGGYFDV

SEQ ID NO: 14191 - protein, 11 aa, synthetic construct
  REGION 1..11: note = Description of Artificial Sequence: Synthetic peptide
  REGION 1..11: note = XENP018859 vlCDR1
RASQSVSNDVA

SEQ ID NO: 14192 - protein, 7 aa, synthetic construct
  REGION 1..7: note = Description of Artificial Sequence: Synthetic peptide
  REGION 1..7: note = XENP018859 vlCDR2
YASHRYT

SEQ ID NO: 14193 - protein, 9 aa, synthetic construct
  REGION 1..9: note = Description of Artificial Sequence: Synthetic peptide
  REGION 1..9: note = XENP018859 vlCDR3
QQTYSSPRT

SEQ ID NO: 14194 - protein, 249 aa, synthetic construct
  REGION 1..249: note = Description of Artificial Sequence: Synthetic polypeptide
  REGION 1..249: note = XENP018860 1G6_H1_L1.114_scFv(GKPGS)4
EVQLVESGGGLVKPGGSLRLSCAASGFTFSNYWMNWVRQAPGKGLEWVGEIRLKSNNYATHYAEPVKGRFTISRDDSKSTVYLQMNSLKTEDTAVYYCTRYYGNYGGYFDVWGAGTLVTVSSGKPGSGKPGSGKPGSGKPGSSIVMTQSPATLSVSPGERATLSCRASQSVSNDVAWYQQKPGQSPRLLINYASHRYTGVPDRFTGSGYGTEFTLTISSLQSEDFAVYFCQQGYSSPRTFGGGTKVEIK

SEQ ID NO: 14195 - protein, 122 aa, synthetic construct; identical to SEQ ID NO: 10922
  REGION 1..122: note = Description of Artificial Sequence: Synthetic polypeptide
  REGION 1..122: note = VH of XENP018860

SEQ ID NO: 14196 - protein, 107 aa, synthetic construct
  REGION 1..107: note = Description of Artificial Sequence: Synthetic polypeptide
  REGION 1..107: note = VL of XENP018860
SIVMTQSPATLSVSPGERATLSCRASQSVSNDVAWYQQKPGQSPRLLINYASHRYTGVPDRFTGSGYGTEFTLTISSLQSEDFAVYFCQQGYSSPRTFGGGTKVEIK

SEQ ID NO: 14197 - protein, 5 aa, synthetic construct
  REGION 1..5: note = Description of Artificial Sequence: Synthetic peptide
  REGION 1..5: note = XENP018860 vhCDR1
NYWMN

SEQ ID NO: 14198 - protein, 19 aa, synthetic construct
  REGION 1..19: note = Description of Artificial Sequence: Synthetic peptide
  REGION 1..19: note = XENP018860 vhCDR2
EIRLKSNNYATHYAEPVKG

SEQ ID NO: 14199 - protein, 11 aa, synthetic construct
  REGION 1..11: note = Description of Artificial Sequence: Synthetic peptide
  REGION 1..11: note = XENP018860 vhCDR3
YYGNYGGYFDV

SEQ ID NO: 14200 - protein, 11 aa, synthetic construct
  REGION 1..11: note = Description of Artificial Sequence: Synthetic peptide
  REGION 1..11: note = XENP018860 vlCDR1
RASQSVSNDVA

SEQ ID NO: 14201 - protein, 7 aa, synthetic construct
  REGION 1..7: note = Description of Artificial Sequence: Synthetic peptide
  REGION 1..7: note = XENP018860 vlCDR2
YASHRYT

SEQ ID NO: 14202 - protein, 9 aa, synthetic construct
  REGION 1..9: note = Description of Artificial Sequence: Synthetic peptide
  REGION 1..9: note = XENP018860 vlCDR3
QQGYSSPRT

SEQ ID NO: 14203 - protein, 249 aa, synthetic construct
  REGION 1..249: note = Description of Artificial Sequence: Synthetic polypeptide
  REGION 1..249: note = XENP018861 1G6_H1_L1.115_scFv(GKPGS)4
EVQLVESGGGLVKPGGSLRLSCAASGFTFSNYWMNWVRQAPGKGLEWVGEIRLKSNNYATHYAEPVKGRFTISRDDSKSTVYLQMNSLKTEDTAVYYCTRYYGNYGGYFDVWGAGTLVTVSSGKPGSGKPGSGKPGSGKPGSSIVMTQSPATLSVSPGERATLSCRASQSVSNDVAWYQQKPGQSPRLLINYASHRYTGVPDRFTGSGYGTEFTLTISSLQSEDFAVYFCQQYYSSPRTFGGGTKVEIK

SEQ ID NO: 14204 - protein, 122 aa, synthetic construct; identical to SEQ ID NO: 10922
  REGION 1..122: note = Description of Artificial Sequence: Synthetic polypeptide
  REGION 1..122: note = VH of XENP018861

SEQ ID NO: 14205 - protein, 107 aa, synthetic construct
  REGION 1..107: note = Description of Artificial Sequence: Synthetic polypeptide
  REGION 1..107: note = VL of XENP018861
SIVMTQSPATLSVSPGERATLSCRASQSVSNDVAWYQQKPGQSPRLLINYASHRYTGVPDRFTGSGYGTEFTLTISSLQSEDFAVYFCQQYYSSPRTFGGGTKVEIK

SEQ ID NO: 14206 - protein, 5 aa, synthetic construct
  REGION 1..5: note = Description of Artificial Sequence: Synthetic peptide
  REGION 1..5: note = XENP018861 vhCDR1
NYWMN

SEQ ID NO: 14207 - protein, 19 aa, synthetic construct
  REGION 1..19: note = Description of Artificial Sequence: Synthetic peptide
  REGION 1..19: note = XENP018861 vhCDR2
EIRLKSNNYATHYAEPVKG

SEQ ID NO: 14208 - protein, 11 aa, synthetic construct
  REGION 1..11: note = Description of Artificial Sequence: Synthetic peptide
  REGION 1..11: note = XENP018861 vhCDR3
YYGNYGGYFDV

SEQ ID NO: 14209 - protein, 11 aa, synthetic construct
  REGION 1..11: note = Description of Artificial Sequence: Synthetic peptide
  REGION 1..11: note = XENP018861 vlCDR1
RASQSVSNDVA

SEQ ID NO: 14210 - protein, 7 aa, synthetic construct
  REGION 1..7: note = Description of Artificial Sequence: Synthetic peptide
  REGION 1..7: note = XENP018861 vlCDR2
YASHRYT

SEQ ID NO: 14211 - protein, 9 aa, synthetic construct
  REGION 1..9: note = Description of Artificial Sequence: Synthetic peptide
  REGION 1..9: note = XENP018861 vlCDR3
QQYYSSPRT

SEQ ID NO: 14212 - protein, 249 aa, synthetic construct
  REGION 1..249: note = Description of Artificial Sequence: Synthetic polypeptide
  REGION 1..249: note = XENP018862 1G6_H1_L1.116_scFv(GKPGS)4
EVQLVESGGGLVKPGGSLRLSCAASGFTFSNYWMNWVRQAPGKGLEWVGEIRLKSNNYATHYAEPVKGRFTISRDDSKSTVYLQMNSLKTEDTAVYYCTRYYGNYGGYFDVWGAGTLVTVSSGKPGSGKPGSGKPGSGKPGSSIVMTQSPATLSVSPGERATLSCRASQSVSNDVAWYQQKPGQSPRLLINYASHRYTGVPDRFTGSGYGTEFTLTISSLQSEDFAVYFCQQDFSSPRTFGGGTKVEIK

SEQ ID NO: 14213 - protein, 122 aa, synthetic construct; identical to SEQ ID NO: 10922
  REGION 1..122: note = Description of Artificial Sequence: Synthetic polypeptide
  REGION 1..122: note = VH of XENP018862

SEQ ID NO: 14214 - protein, 107 aa, synthetic construct
  REGION 1..107: note = Description of Artificial Sequence: Synthetic polypeptide
  REGION 1..107: note = VL of XENP018862
SIVMTQSPATLSVSPGERATLSCRASQSVSNDVAWYQQKPGQSPRLLINYASHRYTGVPDRFTGSGYGTEFTLTISSLQSEDFAVYFCQQDFSSPRTFGGGTKVEIK

SEQ ID NO: 14215 - protein, 5 aa, synthetic construct
  REGION 1..5: note = Description of Artificial Sequence: Synthetic peptide
  REGION 1..5: note = XENP018862 vhCDR1
NYWMN

SEQ ID NO: 14216 - protein, 19 aa, synthetic construct
  REGION 1..19: note = Description of Artificial Sequence: Synthetic peptide
  REGION 1..19: note = XENP018862 vhCDR2
EIRLKSNNYATHYAEPVKG

SEQ ID NO: 14217 - protein, 11 aa, synthetic construct
  REGION 1..11: note = Description of Artificial Sequence: Synthetic peptide
  REGION 1..11: note = XENP018862 vhCDR3
YYGNYGGYFDV

SEQ ID NO: 14218 - protein, 11 aa, synthetic construct
  REGION 1..11: note = Description of Artificial Sequence: Synthetic peptide
  REGION 1..11: note = XENP018862 vlCDR1
RASQSVSNDVA

SEQ ID NO: 14219 - protein, 7 aa, synthetic construct
  REGION 1..7: note = Description of Artificial Sequence: Synthetic peptide
  REGION 1..7: note = XENP018862 vlCDR2
YASHRYT

SEQ ID NO: 14220 - protein, 9 aa, synthetic construct
  REGION 1..9: note = Description of Artificial Sequence: Synthetic peptide
  REGION 1..9: note = XENP018862 vlCDR3
QQDFSSPRT

SEQ ID NO: 14221 - protein, 249 aa, synthetic construct
  REGION 1..249: note = Description of Artificial Sequence: Synthetic polypeptide
  REGION 1..249: note = XENP018863 1G6_H1_L1.117_scFv(GKPGS)4
EVQLVESGGGLVKPGGSLRLSCAASGFTFSNYWMNWVRQAPGKGLEWVGEIRLKSNNYATHYAEPVKGRFTISRDDSKSTVYLQMNSLKTEDTAVYYCTRYYGNYGGYFDVWGAGTLVTVSSGKPGSGKPGSGKPGSGKPGSSIVMTQSPATLSVSPGERATLSCRASQSVSNDVAWYQQKPGQSPRLLINYASHRYTGVPDRFTGSGYGTEFTLTISSLQSEDFAVYFCQQDHSSPRTFGGGTKVEIK

SEQ ID NO: 14222 - protein, 122 aa, synthetic construct; identical to SEQ ID NO: 10922
  REGION 1..122: note = Description of Artificial Sequence: Synthetic polypeptide
  REGION 1..122: note = VH of XENP018863

SEQ ID NO: 14223 - protein, 107 aa, synthetic construct
  REGION 1..107: note = Description of Artificial Sequence: Synthetic polypeptide
  REGION 1..107: note = VL of XENP018863
SIVMTQSPATLSVSPGERATLSCRASQSVSNDVAWYQQKPGQSPRLLINYASHRYTGVPDRFTGSGYGTEFTLTISSLQSEDFAVYFCQQDHSSPRTFGGGTKVEIK

SEQ ID NO: 14224 - protein, 5 aa, synthetic construct
  REGION 1..5: note = Description of Artificial Sequence: Synthetic peptide
  REGION 1..5: note = XENP018863 vhCDR1
NYWMN

SEQ ID NO: 14225 - protein, 19 aa, synthetic construct
  REGION 1..19: note = Description of Artificial Sequence: Synthetic peptide
  REGION 1..19: note = XENP018863 vhCDR2
EIRLKSNNYATHYAEPVKG

SEQ ID NO: 14226 - protein, 11 aa, synthetic construct
  REGION 1..11: note = Description of Artificial Sequence: Synthetic peptide
  REGION 1..11: note = XENP018863 vhCDR3
YYGNYGGYFDV

SEQ ID NO: 14227 - protein, 11 aa, synthetic construct
  REGION 1..11: note = Description of Artificial Sequence: Synthetic peptide
  REGION 1..11: note = XENP018863 vlCDR1
RASQSVSNDVA

SEQ ID NO: 14228 - protein, 7 aa, synthetic construct
  REGION 1..7: note = Description of Artificial Sequence: Synthetic peptide
  REGION 1..7: note = XENP018863 vlCDR2
YASHRYT

SEQ ID NO: 14229 - protein, 9 aa, synthetic construct
  REGION 1..9: note = Description of Artificial Sequence: Synthetic peptide
  REGION 1..9: note = XENP018863 vlCDR3
QQDHSSPRT

SEQ ID NO: 14230 - protein, 249 aa, synthetic construct
  REGION 1..249: note = Description of Artificial Sequence: Synthetic polypeptide
  REGION 1..249: note = XENP018864 1G6_H1_L1.118_scFv(GKPGS)4
EVQLVESGGGLVKPGGSLRLSCAASGFTFSNYWMNWVRQAPGKGLEWVGEIRLKSNNYATHYAEPVKGRFTISRDDSKSTVYLQMNSLKTEDTAVYYCTRYYGNYGGYFDVWGAGTLVTVSSGKPGSGKPGSGKPGSGKPGSSIVMTQSPATLSVSPGERATLSCRASQSVSNDVAWYQQKPGQSPRLLINYASHRYTGVPDRFTGSGYGTEFTLTISSLQSEDFAVYFCQQDLSSPRTFGGGTKVEIK

SEQ ID NO: 14231 - protein, 122 aa, synthetic construct; identical to SEQ ID NO: 10922
  REGION 1..122: note = Description of Artificial Sequence: Synthetic polypeptide
  REGION 1..122: note = VH of XENP018864

SEQ ID NO: 14232 - protein, 107 aa, synthetic construct
  REGION 1..107: note = Description of Artificial Sequence: Synthetic polypeptide
  REGION 1..107: note = VL of XENP018864
SIVMTQSPATLSVSPGERATLSCRASQSVSNDVAWYQQKPGQSPRLLINYASHRYTGVPDRFTGSGYGTEFTLTISSLQSEDFAVYFCQQDLSSPRTFGGGTKVEIK

SEQ ID NO: 14233 - protein, 5 aa, synthetic construct
  REGION 1..5: note = Description of Artificial Sequence: Synthetic peptide
  REGION 1..5: note = XENP018864 vhCDR1
NYWMN

SEQ ID NO: 14234 - protein, 19 aa, synthetic construct
  REGION 1..19: note = Description of Artificial Sequence: Synthetic peptide
  REGION 1..19: note = XENP018864 vhCDR2
EIRLKSNNYATHYAEPVKG

SEQ ID NO: 14235 - protein, 11 aa, synthetic construct
  REGION 1..11: note = Description of Artificial Sequence: Synthetic peptide
  REGION 1..11: note = XENP018864 vhCDR3
YYGNYGGYFDV

SEQ ID NO: 14236 - protein, 11 aa, synthetic construct
  REGION 1..11: note = Description of Artificial Sequence: Synthetic peptide
  REGION 1..11: note = XENP018864 vlCDR1
RASQSVSNDVA

SEQ ID NO: 14237 - protein, 7 aa, synthetic construct
  REGION 1..7: note = Description of Artificial Sequence: Synthetic peptide
  REGION 1..7: note = XENP018864 vlCDR2
YASHRYT

SEQ ID NO: 14238 - protein, 9 aa, synthetic construct
  REGION 1..9: note = Description of Artificial Sequence: Synthetic peptide
  REGION 1..9: note = XENP018864 vlCDR3
QQDLSSPRT

SEQ ID NO: 14239 - protein, 249 aa, synthetic construct
  REGION 1..249: note = Description of Artificial Sequence: Synthetic polypeptide
  REGION 1..249: note = XENP018865 1G6_H1_L1.119_scFv(GKPGS)4
EVQLVESGGGLVKPGGSLRLSCAASGFTFSNYWMNWVRQAPGKGLEWVGEIRLKSNNYATHYAEPVKGRFTISRDDSKSTVYLQMNSLKTEDTAVYYCTRYYGNYGGYFDVWGAGTLVTVSSGKPGSGKPGSGKPGSGKPGSSIVMTQSPATLSVSPGERATLSCRASQSVSNDVAWYQQKPGQSPRLLINYASHRYTGVPDRFTGSGYGTEFTLTISSLQSEDFAVYFCQQDWSSPRTFGGGTKVEIK

SEQ ID NO: 14240 - protein, 122 aa, synthetic construct; identical to SEQ ID NO: 10922
  REGION 1..122: note = Description of Artificial Sequence: Synthetic polypeptide
  REGION 1..122: note = VH of XENP018865

SEQ ID NO: 14241 - protein, 107 aa, synthetic construct
  REGION 1..107: note = Description of Artificial Sequence: Synthetic polypeptide
  REGION 1..107: note = VL of XENP018865
SIVMTQSPATLSVSPGERATLSCRASQSVSNDVAWYQQKPGQSPRLLINYASHRYTGVPDRFTGSGYGTEFTLTISSLQSEDFAVYFCQQDWSSPRTFGGGTKVEIK

SEQ ID NO: 14242 - protein, 5 aa, synthetic construct
  REGION 1..5: note = Description of Artificial Sequence: Synthetic peptide
  REGION 1..5: note = XENP018865 vhCDR1
NYWMN

SEQ ID NO: 14243 - protein, 19 aa, synthetic construct
  REGION 1..19: note = Description of Artificial Sequence: Synthetic peptide
  REGION 1..19: note = XENP018865 vhCDR2
EIRLKSNNYATHYAEPVKG

SEQ ID NO: 14244 - protein, 11 aa, synthetic construct
  REGION 1..11: note = Description of Artificial Sequence: Synthetic peptide
  REGION 1..11: note = XENP018865 vhCDR3
YYGNYGGYFDV

SEQ ID NO: 14245 - protein, 11 aa, synthetic construct
  REGION 1..11: note = Description of Artificial Sequence: Synthetic peptide
  REGION 1..11: note = XENP018865 vlCDR1
RASQSVSNDVA

SEQ ID NO: 14246 - protein, 7 aa, synthetic construct
  REGION 1..7: note = Description of Artificial Sequence: Synthetic peptide
  REGION 1..7: note = XENP018865 vlCDR2
YASHRYT

SEQ ID NO: 14247 - protein, 9 aa, synthetic construct
  REGION 1..9: note = Description of Artificial Sequence: Synthetic peptide
  REGION 1..9: note = XENP018865 vlCDR3
QQDWSSPRT

SEQ ID NO: 14248 - protein, 249 aa, synthetic construct
  REGION 1..249: note = Description of Artificial Sequence: Synthetic polypeptide
  REGION 1..249: note = XENP018866 1G6_H1_L1.120_scFv(GKPGS)4
EVQLVESGGGLVKPGGSLRLSCAASGFTFSNYWMNWVRQAPGKGLEWVGEIRLKSNNYATHYAEPVKGRFTISRDDSKSTVYLQMNSLKTEDTAVYYCTRYYGNYGGYFDVWGAGTLVTVSSGKPGSGKPGSGKPGSGKPGSSIVMTQSPATLSVSPGERATLSCRASQSVSNDVAWYQQKPGQSPRLLINYASHRYTGVPDRFTGSGYGTEFTLTISSLQSEDFAVYFCQQDVSSPRTFGGGTKVEIK

SEQ ID NO: 14249 - protein, 122 aa, synthetic construct; identical to SEQ ID NO: 10922
  REGION 1..122: note = Description of Artificial Sequence: Synthetic polypeptide
  REGION 1..122: note = VH of XENP018866

SEQ ID NO: 14250 - protein, 107 aa, synthetic construct
  REGION 1..107: note = Description of Artificial Sequence: Synthetic polypeptide
  REGION 1..107: note = VL of XENP018866
SIVMTQSPATLSVSPGERATLSCRASQSVSNDVAWYQQKPGQSPRLLINYASHRYTGVPDRFTGSGYGTEFTLTISSLQSEDFAVYFCQQDVSSPRTFGGGTKVEIK

SEQ ID NO: 14251 - protein, 5 aa, synthetic construct
  REGION 1..5: note = Description of Artificial Sequence: Synthetic peptide
  REGION 1..5: note = XENP018866 vhCDR1
NYWMN

SEQ ID NO: 14252 - protein, 19 aa, synthetic construct
  REGION 1..19: note = Description of Artificial Sequence: Synthetic peptide
  REGION 1..19: note = XENP018866 vhCDR2
EIRLKSNNYATHYAEPVKG

SEQ ID NO: 14253 - protein, 11 aa, synthetic construct
  REGION 1..11: note = Description of Artificial Sequence: Synthetic peptide
  REGION 1..11: note = XENP018866 vhCDR3
YYGNYGGYFDV

SEQ ID NO: 14254 - protein, 11 aa, synthetic construct
  REGION 1..11: note = Description of Artificial Sequence: Synthetic peptide
  REGION 1..11: note = XENP018866 vlCDR1
RASQSVSNDVA

SEQ ID NO: 14255 - protein, 7 aa, synthetic construct
  REGION 1..7: note = Description of Artificial Sequence: Synthetic peptide
  REGION 1..7: note = XENP018866 vlCDR2
YASHRYT

SEQ ID NO: 14256 - protein, 9 aa, synthetic construct
  REGION 1..9: note = Description of Artificial Sequence: Synthetic peptide
  REGION 1..9: note = XENP018866 vlCDR3
QQDVSSPRT

SEQ ID NO: 14257 - protein, 249 aa, synthetic construct
  REGION 1..249: note = Description of Artificial Sequence: Synthetic polypeptide
  REGION 1..249: note = XENP018867 1G6_H1_L1.121_scFv(GKPGS)4
EVQLVESGGGLVKPGGSLRLSCAASGFTFSNYWMNWVRQAPGKGLEWVGEIRLKSNNYATHYAEPVKGRFTISRDDSKSTVYLQMNSLKTEDTAVYYCTRYYGNYGGYFDVWGAGTLVTVSSGKPGSGKPGSGKPGSGKPGSSIVMTQSPATLSVSPGERATLSCRASQSVSNDVAWYQQKPGQSPRLLINYASHRYTGVPDRFTGSGYGTEFTLTISSLQSEDFAVYFCQQDASSPRTFGGGTKVEIK

SEQ ID NO: 14258 - protein, 122 aa, synthetic construct; identical to SEQ ID NO: 10922
  REGION 1..122: note = Description of Artificial Sequence: Synthetic polypeptide
  REGION 1..122: note = VH of XENP018867

SEQ ID NO: 14259 - protein, 107 aa, synthetic construct
  REGION 1..107: note = Description of Artificial Sequence: Synthetic polypeptide
  REGION 1..107: note = VL of XENP018867
SIVMTQSPATLSVSPGERATLSCRASQSVSNDVAWYQQKPGQSPRLLINYASHRYTGVPDRFTGSGYGTEFTLTISSLQSEDFAVYFCQQDASSPRTFGGGTKVEIK

SEQ ID NO: 14260 - protein, 5 aa, synthetic construct
  REGION 1..5: note = Description of Artificial Sequence: Synthetic peptide
  REGION 1..5: note = XENP018867 vhCDR1
NYWMN

SEQ ID NO: 14261 - protein, 19 aa, synthetic construct
  REGION 1..19: note = Description of Artificial Sequence: Synthetic peptide
  REGION 1..19: note = XENP018867 vhCDR2
EIRLKSNNYATHYAEPVKG

SEQ ID NO: 14262 - protein, 11 aa, synthetic construct
  REGION 1..11: note = Description of Artificial Sequence: Synthetic peptide
  REGION 1..11: note = XENP018867 vhCDR3
YYGNYGGYFDV

SEQ ID NO: 14263 - protein, 11 aa, synthetic construct
  REGION 1..11: note = Description of Artificial Sequence: Synthetic peptide
  REGION 1..11: note = XENP018867 vlCDR1
RASQSVSNDVA

SEQ ID NO: 14264 - protein, 7 aa, synthetic construct
  REGION 1..7: note = Description of Artificial Sequence: Synthetic peptide
  REGION 1..7: note = XENP018867 vlCDR2
YASHRYT

SEQ ID NO: 14265 - protein, 9 aa, synthetic construct
  REGION 1..9: note = Description of Artificial Sequence: Synthetic peptide
  REGION 1..9: note = XENP018867 vlCDR3
QQDASSPRT

SEQ ID NO: 14266 - protein, 249 aa, synthetic construct
  REGION 1..249: note = Description of Artificial Sequence: Synthetic polypeptide
  REGION 1..249: note = XENP018868 1G6_H1_L1.122_scFv(GKPGS)4
EVQLVESGGGLVKPGGSLRLSCAASGFTFSNYWMNWVRQAPGKGLEWVGEIRLKSNNYATHYAEPVKGRFTISRDDSKSTVYLQMNSLKTEDTAVYYCTRYYGNYGGYFDVWGAGTLVTVSSGKPGSGKPGSGKPGSGKPGSSIVMTQSPATLSVSPGERATLSCRASQSVSNDVAWYQQKPGQSPRLLINYASHRYTGVPDRFTGSGYGTEFTLTISSLQSEDFAVYFCQQDQSSPRTFGGGTKVEIK

SEQ ID NO: 14267 - protein, 122 aa, synthetic construct; identical to SEQ ID NO: 10922
  REGION 1..122: note = Description of Artificial Sequence: Synthetic polypeptide
  REGION 1..122: note = VH of XENP018868

SEQ ID NO: 14268 - protein, 107 aa, synthetic construct
  REGION 1..107: note = Description of Artificial Sequence: Synthetic polypeptide
  REGION 1..107: note = VL of XENP018868
SIVMTQSPATLSVSPGERATLSCRASQSVSNDVAWYQQKPGQSPRLLINYASHRYTGVPDRFTGSGYGTEFTLTISSLQSEDFAVYFCQQDQSSPRTFGGGTKVEIK

SEQ ID NO: 14269 - protein, 5 aa, synthetic construct
  REGION 1..5: note = Description of Artificial Sequence: Synthetic peptide
  REGION 1..5: note = XENP018868 vhCDR1
NYWMN

SEQ ID NO: 14270 - protein, 19 aa, synthetic construct
  REGION 1..19: note = Description of Artificial Sequence: Synthetic peptide
  REGION 1..19: note = XENP018868 vhCDR2
EIRLKSNNYATHYAEPVKG

SEQ ID NO: 14271 - protein, 11 aa, synthetic construct
  REGION 1..11: note = Description of Artificial Sequence: Synthetic peptide
  REGION 1..11: note = XENP018868 vhCDR3
YYGNYGGYFDV

SEQ ID NO: 14272 - protein, 11 aa, synthetic construct
  REGION 1..11: note = Description of Artificial Sequence: Synthetic peptide
  REGION 1..11: note = XENP018868 vlCDR1
RASQSVSNDVA

SEQ ID NO: 14273 - protein, 7 aa, synthetic construct
  REGION 1..7: note = Description of Artificial Sequence: Synthetic peptide
  REGION 1..7: note = XENP018868 vlCDR2
YASHRYT

SEQ ID NO: 14274 - protein, 9 aa, synthetic construct
  REGION 1..9: note = Description of Artificial Sequence: Synthetic peptide
  REGION 1..9: note = XENP018868 vlCDR3
QQDQSSPRT

SEQ ID NO: 14275 - protein, 249 aa, synthetic construct
  REGION 1..249: note = Description of Artificial Sequence: Synthetic polypeptide
  REGION 1..249: note = XENP018869 1G6_H1_L1.123_scFv(GKPGS)4
EVQLVESGGGLVKPGGSLRLSCAASGFTFSNYWMNWVRQAPGKGLEWVGEIRLKSNNYATHYAEPVKGRFTISRDDSKSTVYLQMNSLKTEDTAVYYCTRYYGNYGGYFDVWGAGTLVTVSSGKPGSGKPGSGKPGSGKPGSSIVMTQSPATLSVSPGERATLSCRASQSVSNDVAWYQQKPGQSPRLLINYASHRYTGVPDRFTGSGYGTEFTLTISSLQSEDFAVYFCQQDDSSPRTFGGGTKVEIK

SEQ ID NO: 14276 - protein, 122 aa, synthetic construct; identical to SEQ ID NO: 10922
  REGION 1..122: note = Description of Artificial Sequence: Synthetic polypeptide
  REGION 1..122: note = VH of XENP018869

SEQ ID NO: 14277 - protein, 107 aa, synthetic construct
  REGION 1..107: note = Description of Artificial Sequence: Synthetic polypeptide
  REGION 1..107: note = VL of XENP018869
SIVMTQSPATLSVSPGERATLSCRASQSVSNDVAWYQQKPGQSPRLLINYASHRYTGVPDRFTGSGYGTEFTLTISSLQSEDFAVYFCQQDDSSPRTFGGGTKVEIK

SEQ ID NO: 14278 - protein, 5 aa, synthetic construct
  REGION 1..5: note = Description of Artificial Sequence: Synthetic peptide
  REGION 1..5: note = XENP018869 vhCDR1
NYWMN

SEQ ID NO: 14279 - protein, 19 aa, synthetic construct
  REGION 1..19: note = Description of Artificial Sequence: Synthetic peptide
  REGION 1..19: note = XENP018869 vhCDR2
EIRLKSNNYATHYAEPVKG

SEQ ID NO: 14280 - protein, 11 aa, synthetic construct
  REGION 1..11: note = Description of Artificial Sequence: Synthetic peptide
  REGION 1..11: note = XENP018869 vhCDR3
YYGNYGGYFDV

SEQ ID NO: 14281 - protein, 11 aa, synthetic construct
  REGION 1..11: note = Description of Artificial Sequence: Synthetic peptide
  REGION 1..11: note = XENP018869 vlCDR1
RASQSVSNDVA

SEQ ID NO: 14282 - protein, 7 aa, synthetic construct
  REGION 1..7: note = Description of Artificial Sequence: Synthetic peptide
  REGION 1..7: note = XENP018869 vlCDR2
YASHRYT

SEQ ID NO: 14283 - protein, 9 aa, synthetic construct
  REGION 1..9: note = Description of Artificial Sequence: Synthetic peptide
  REGION 1..9: note = XENP018869 vlCDR3
QQDDSSPRT

SEQ ID NO: 14284 - protein, 249 aa, synthetic construct
  REGION 1..249: note = Description of Artificial Sequence: Synthetic polypeptide
  REGION 1..249: note = XENP018870 1G6_H1_L1.124_scFv(GKPGS)4
EVQLVESGGGLVKPGGSLRLSCAASGFTFSNYWMNWVRQAPGKGLEWVGEIRLKSNNYATHYAEPVKGRFTISRDDSKSTVYLQMNSLKTEDTAVYYCTRYYGNYGGYFDVWGAGTLVTVSSGKPGSGKPGSGKPGSGKPGSSIVMTQSPATLSVSPGERATLSCRASQSVSNDVAWYQQKPGQSPRLLINYASHRYTGVPDRFTGSGYGTEFTLTISSLQSEDFAVYFCQQDKSSPRTFGGGTKVEIK

SEQ ID NO: 14285 - protein, 122 aa, synthetic construct; identical to SEQ ID NO: 10922
  REGION 1..122: note = Description of Artificial Sequence: Synthetic polypeptide
  REGION 1..122: note = VH of XENP018870

SEQ ID NO: 14286 - protein, 107 aa, synthetic construct
  REGION 1..107: note = Description of Artificial Sequence: Synthetic polypeptide
  REGION 1..107: note = VL of XENP018870
SIVMTQSPATLSVSPGERATLSCRASQSVSNDVAWYQQKPGQSPRLLINYASHRYTGVPDRFTGSGYGTEFTLTISSLQSEDFAVYFCQQDKSSPRTFGGGTKVEIK

SEQ ID NO: 14287 - protein, 5 aa, synthetic construct
  REGION 1..5: note = Description of Artificial Sequence: Synthetic peptide
  REGION 1..5: note = XENP018870 vhCDR1
NYWMN

SEQ ID NO: 14288 - protein, 19 aa, synthetic construct
  REGION 1..19: note = Description of Artificial Sequence: Synthetic peptide
  REGION 1..19: note = XENP018870 vhCDR2
EIRLKSNNYATHYAEPVKG

SEQ ID NO: 14289 - protein, 11 aa, synthetic construct
  REGION 1..11: note = Description of Artificial Sequence: Synthetic peptide
  REGION 1..11: note = XENP018870 vhCDR3
YYGNYGGYFDV

SEQ ID NO: 14290 - protein, 11 aa, synthetic construct
  REGION 1..11: note = Description of Artificial Sequence: Synthetic peptide
  REGION 1..11: note = XENP018870 vlCDR1
RASQSVSNDVA

SEQ ID NO: 14291 - protein, 7 aa, synthetic construct
  REGION 1..7: note = Description of Artificial Sequence: Synthetic peptide
  REGION 1..7: note = XENP018870 vlCDR2
YASHRYT

SEQ ID NO: 14292 - protein, 9 aa, synthetic construct
  REGION 1..9: note = Description of Artificial Sequence: Synthetic peptide
  REGION 1..9: note = XENP018870 vlCDR3
QQDKSSPRT

SEQ ID NO: 14293 - protein, 249 aa, synthetic construct
  REGION 1..249: note = Description of Artificial Sequence: Synthetic polypeptide
  REGION 1..249: note = XENP018871 1G6_H1_L1.125_scFv(GKPGS)4
EVQLVESGGGLVKPGGSLRLSCAASGFTFSNYWMNWVRQAPGKGLEWVGEIRLKSNNYATHYAEPVKGRFTISRDDSKSTVYLQMNSLKTEDTAVYYCTRYYGNYGGYFDVWGAGTLVTVSSGKPGSGKPGSGKPGSGKPGSSIVMTQSPATLSVSPGERATLSCRASQSVSNDVAWYQQKPGQSPRLLINYASHRYTGVPDRFTGSGYGTEFTLTISSLQSEDFAVYFCQQDSSSPRTFGGGTKVEIK

SEQ ID NO: 14294 - protein, 122 aa, synthetic construct; identical to SEQ ID NO: 10922
  REGION 1..122: note = Description of Artificial Sequence: Synthetic polypeptide
  REGION 1..122: note = VH of XENP018871

SEQ ID NO: 14295 - protein, 107 aa, synthetic construct
  REGION 1..107: note = Description of Artificial Sequence: Synthetic polypeptide
  REGION 1..107: note = VL of XENP018871
SIVMTQSPATLSVSPGERATLSCRASQSVSNDVAWYQQKPGQSPRLLINYASHRYTGVPDRFTGSGYGTEFTLTISSLQSEDFAVYFCQQDSSSPRTFGGGTKVEIK

SEQ ID NO: 14296 - protein, 5 aa, synthetic construct
  REGION 1..5: note = Description of Artificial Sequence: Synthetic peptide
  REGION 1..5: note = XENP018871 vhCDR1
NYWMN

SEQ ID NO: 14297 - protein, 19 aa, synthetic construct
  REGION 1..19: note = Description of Artificial Sequence: Synthetic peptide
  REGION 1..19: note = XENP018871 vhCDR2
EIRLKSNNYATHYAEPVKG

SEQ ID NO: 14298 - protein, 11 aa, synthetic construct
  REGION 1..11: note = Description of Artificial Sequence: Synthetic peptide
  REGION 1..11: note = XENP018871 vhCDR3
YYGNYGGYFDV

SEQ ID NO: 14299 - protein, 11 aa, synthetic construct
  REGION 1..11: note = Description of Artificial Sequence: Synthetic peptide
  REGION 1..11: note = XENP018871 vlCDR1
RASQSVSNDVA

SEQ ID NO: 14300 - protein, 7 aa, synthetic construct
  REGION 1..7: note = Description of Artificial Sequence: Synthetic peptide
  REGION 1..7: note = XENP018871 vlCDR2
YASHRYT

SEQ ID NO: 14301 - protein, 9 aa, synthetic construct
  REGION 1..9: note = Description of Artificial Sequence: Synthetic peptide
  REGION 1..9: note = XENP018871 vlCDR3
QQDSSSPRT

SEQ ID NO: 14302 - protein, 249 aa, synthetic construct
  REGION 1..249: note = Description of Artificial Sequence: Synthetic polypeptide
  REGION 1..249: note = XENP018872 1G6_H1_L1.126_scFv(GKPGS)4
EVQLVESGGGLVKPGGSLRLSCAASGFTFSNYWMNWVRQAPGKGLEWVGEIRLKSNNYATHYAEPVKGRFTISRDDSKSTVYLQMNSLKTEDTAVYYCTRYYGNYGGYFDVWGAGTLVTVSSGKPGSGKPGSGKPGSGKPGSSIVMTQSPATLSVSPGERATLSCRASQSVSNDVAWYQQKPGQSPRLLINYASHRYTGVPDRFTGSGYGTEFTLTISSLQSEDFAVYFCQQDGSSPRTFGGGTKVEIK

SEQ ID NO: 14303 - protein, 122 aa, synthetic construct; identical to SEQ ID NO: 10922
  REGION 1..122: note = Description of Artificial Sequence: Synthetic polypeptide
  REGION 1..122: note = VH of XENP018872

SEQ ID NO: 14304 - protein, 107 aa, synthetic construct
  REGION 1..107: note = Description of Artificial Sequence: Synthetic polypeptide
  REGION 1..107: note = VL of XENP018872
SIVMTQSPATLSVSPGERATLSCRASQSVSNDVAWYQQKPGQSPRLLINYASHRYTGVPDRFTGSGYGTEFTLTISSLQSEDFAVYFCQQDGSSPRTFGGGTKVEIK

SEQ ID NO: 14305 - protein, 5 aa, synthetic construct
  REGION 1..5: note = Description of Artificial Sequence: Synthetic peptide
  REGION 1..5: note = XENP018872 vhCDR1
NYWMN

SEQ ID NO: 14306 - protein, 19 aa, synthetic construct
  REGION 1..19: note = Description of Artificial Sequence: Synthetic peptide
  REGION 1..19: note = XENP018872 vhCDR2
EIRLKSNNYATHYAEPVKG

SEQ ID NO: 14307 - protein, 11 aa, synthetic construct
  REGION 1..11: note = Description of Artificial Sequence: Synthetic peptide
  REGION 1..11: note = XENP018872 vhCDR3
YYGNYGGYFDV

SEQ ID NO: 14308 - protein, 11 aa, synthetic construct
  REGION 1..11: note = Description of Artificial Sequence: Synthetic peptide
  REGION 1..11: note = XENP018872 vlCDR1
RASQSVSNDVA

SEQ ID NO: 14309 - protein, 7 aa, synthetic construct
  REGION 1..7: note = Description of Artificial Sequence: Synthetic peptide
  REGION 1..7: note = XENP018872 vlCDR2
YASHRYT

SEQ ID NO: 14310 - protein, 9 aa, synthetic construct
  REGION 1..9: note = Description of Artificial Sequence: Synthetic peptide
  REGION 1..9: note = XENP018872 vlCDR3
QQDGSSPRT

SEQ ID NO: 14311 - protein, 249 aa, synthetic construct
  REGION 1..249: note = Description of Artificial Sequence: Synthetic polypeptide
  REGION 1..249: note = XENP018873 1G6_H1_L1.127_scFv(GKPGS)4
EVQLVESGGGLVKPGGSLRLSCAASGFTFSNYWMNWVRQAPGKGLEWVGEIRLKSNNYATHYAEPVKGRFTISRDDSKSTVYLQMNSLKTEDTAVYYCTRYYGNYGGYFDVWGAGTLVTVSSGKPGSGKPGSGKPGSGKPGSSIVMTQSPATLSVSPGERATLSCRASQSVSNDVAWYQQKPGQSPRLLINYASHRYTGVPDRFTGSGYGTEFTLTISSLQSEDFAVYFCQQDYTSPRTFGGGTKVEIK

SEQ ID NO: 14312 - protein, 122 aa, synthetic construct; identical to SEQ ID NO: 10922
  REGION 1..122: note = Description of Artificial Sequence: Synthetic polypeptide
  REGION 1..122: note = VH of XENP018873

SEQ ID NO: 14313 - protein, 107 aa, synthetic construct
  REGION 1..107: note = Description of Artificial Sequence: Synthetic polypeptide
  REGION 1..107: note = VL of XENP018873
SIVMTQSPATLSVSPGERATLSCRASQSVSNDVAWYQQKPGQSPRLLINYASHRYTGVPDRFTGSGYGTEFTLTISSLQSEDFAVYFCQQDYTSPRTFGGGTKVEIK

SEQ ID NO: 14314 - protein, 5 aa, synthetic construct
  REGION 1..5: note = Description of Artificial Sequence: Synthetic peptide
  REGION 1..5: note = XENP018873 vhCDR1
NYWMN

SEQ ID NO: 14315 - protein, 19 aa, synthetic construct
  REGION 1..19: note = Description of Artificial Sequence: Synthetic peptide
  REGION 1..19: note = XENP018873 vhCDR2
EIRLKSNNYATHYAEPVKG

SEQ ID NO: 14316 - protein, 11 aa, synthetic construct
  REGION 1..11: note = Description of Artificial Sequence: Synthetic peptide
  REGION 1..11: note = XENP018873 vhCDR3
YYGNYGGYFDV

SEQ ID NO: 14317 - protein, 11 aa, synthetic construct
  REGION 1..11: note = Description of Artificial Sequence: Synthetic peptide
  REGION 1..11: note = XENP018873 vlCDR1
RASQSVSNDVA

SEQ ID NO: 14318 - protein, 7 aa, synthetic construct
  REGION 1..7: note = Description of Artificial Sequence: Synthetic peptide
  REGION 1..7: note = XENP018873 vlCDR2
YASHRYT

SEQ ID NO: 14319 - protein, 9 aa, synthetic construct
  REGION 1..9: note = Description of Artificial Sequence: Synthetic peptide
  REGION 1..9: note = XENP018873 vlCDR3
QQDYTSPRT

SEQ ID NO: 14320 - protein, 249 aa, synthetic construct
  REGION 1..249: note = Description of Artificial Sequence: Synthetic polypeptide
  REGION 1..249: note = XENP018874 1G6_H1_L1.128_scFv(GKPGS)4
EVQLVESGGGLVKPGGSLRLSCAASGFTFSNYWMNWVRQAPGKGLEWVGEIRLKSNNYATHYAEPVKGRFTISRDDSKSTVYLQMNSLKTEDTAVYYCTRYYGNYGGYFDVWGAGTLVTVSSGKPGSGKPGSGKPGSGKPGSSIVMTQSPATLSVSPGERATLSCRASQSVSNDVAWYQQKPGQSPRLLINYASHRYTGVPDRFTGSGYGTEFTLTISSLQSEDFAVYFCQQDYASPRTFGGGTKVEIK

SEQ ID NO: 14321 - protein, 122 aa, synthetic construct; identical to SEQ ID NO: 10922
  REGION 1..122: note = Description of Artificial Sequence: Synthetic polypeptide
  REGION 1..122: note = VH of XENP018874

SEQ ID NO: 14322 - protein, 107 aa, synthetic construct
  REGION 1..107: note = Description of Artificial Sequence: Synthetic polypeptide
  REGION 1..107: note = VL of XENP018874
SIVMTQSPATLSVSPGERATLSCRASQSVSNDVAWYQQKPGQSPRLLINYASHRYTGVPDRFTGSGYGTEFTLTISSLQSEDFAVYFCQQDYASPRTFGGGTKVEIK

SEQ ID NO: 14323 - protein, 5 aa, synthetic construct
  REGION 1..5: note = Description of Artificial Sequence: Synthetic peptide
  REGION 1..5: note = XENP018874 vhCDR1
NYWMN

SEQ ID NO: 14324 - protein, 19 aa, synthetic construct
  REGION 1..19: note = Description of Artificial Sequence: Synthetic peptide
  REGION 1..19: note = XENP018874 vhCDR2
EIRLKSNNYATHYAEPVKG

SEQ ID NO: 14325 - protein, 11 aa, synthetic construct
  REGION 1..11: note = Description of Artificial Sequence: Synthetic peptide
  REGION 1..11: note = XENP018874 vhCDR3
YYGNYGGYFDV

SEQ ID NO: 14326 - protein, 11 aa, synthetic construct
  REGION 1..11: note = Description of Artificial Sequence: Synthetic peptide
  REGION 1..11: note = XENP018874 vlCDR1
RASQSVSNDVA

SEQ ID NO: 14327 - protein, 7 aa, synthetic construct
  REGION 1..7: note = Description of Artificial Sequence: Synthetic peptide
  REGION 1..7: note = XENP018874 vlCDR2
YASHRYT

SEQ ID NO: 14328 - protein, 9 aa, synthetic construct
  REGION 1..9: note = Description of Artificial Sequence: Synthetic peptide
  REGION 1..9: note = XENP018874 vlCDR3
QQDYASPRT

SEQ ID NO: 14329 - protein, 249 aa, synthetic construct
  REGION 1..249: note = Description of Artificial Sequence: Synthetic polypeptide
  REGION 1..249: note = XENP018875 1G6_H1_L1.129_scFv(GKPGS)4
EVQLVESGGGLVKPGGSLRLSCAASGFTFSNYWMNWVRQAPGKGLEWVGEIRLKSNNYATHYAEPVKGRFTISRDDSKSTVYLQMNSLKTEDTAVYYCTRYYGNYGGYFDVWGAGTLVTVSSGKPGSGKPGSGKPGSGKPGSSIVMTQSPATLSVSPGERATLSCRASQSVSNDVAWYQQKPGQSPRLLINYASHRYTGVPDRFTGSGYGTEFTLTISSLQSEDFAVYFCQQDYQSPRTFGGGTKVEIK

SEQ ID NO: 14330 - protein, 122 aa, synthetic construct; identical to SEQ ID NO: 10922
  REGION 1..122: note = Description of Artificial Sequence: Synthetic polypeptide
  REGION 1..122: note = VH of XENP018875

SEQ ID NO: 14331 - protein, 107 aa, synthetic construct
  REGION 1..107: note = Description of Artificial Sequence: Synthetic polypeptide
  REGION 1..107: note = VL of XENP018875
SIVMTQSPATLSVSPGERATLSCRASQSVSNDVAWYQQKPGQSPRLLINYASHRYTGVPDRFTGSGYGTEFTLTISSLQSEDFAVYFCQQDYQSPRTFGGGTKVEIK

SEQ ID NO: 14332 - protein, 5 aa, synthetic construct
  REGION 1..5: note = Description of Artificial Sequence: Synthetic peptide
  REGION 1..5: note = XENP018875 vhCDR1
NYWMN

SEQ ID NO: 14333 - protein, 19 aa, synthetic construct
  REGION 1..19: note = Description of Artificial Sequence: Synthetic peptide
  REGION 1..19: note = XENP018875 vhCDR2
EIRLKSNNYATHYAEPVKG

SEQ ID NO: 14334 - protein, 11 aa, synthetic construct
  REGION 1..11: note = Description of Artificial Sequence: Synthetic peptide
  REGION 1..11: note = XENP018875 vhCDR3
YYGNYGGYFDV

SEQ ID NO: 14335 - protein, 11 aa, synthetic construct
  REGION 1..11: note = Description of Artificial Sequence: Synthetic peptide
  REGION 1..11: note = XENP018875 vlCDR1
RASQSVSNDVA

SEQ ID NO: 14336 - protein, 7 aa, synthetic construct
  REGION 1..7: note = Description of Artificial Sequence: Synthetic peptide
  REGION 1..7: note = XENP018875 vlCDR2
YASHRYT

SEQ ID NO: 14337 - protein, 9 aa, synthetic construct
  REGION 1..9: note = Description of Artificial Sequence: Synthetic peptide
  REGION 1..9: note = XENP018875 vlCDR3
QQDYQSPRT

SEQ ID NO: 14338 - protein, 249 aa, synthetic construct
  REGION 1..249: note = Description of Artificial Sequence: Synthetic polypeptide
  REGION 1..249: note = XENP018876 1G6_H1_L1.130_scFv(GKPGS)4
EVQLVESGGGLVKPGGSLRLSCAASGFTFSNYWMNWVRQAPGKGLEWVGEIRLKSNNYATHYAEPVKGRFTISRDDSKSTVYLQMNSLKTEDTAVYYCTRYYGNYGGYFDVWGAGTLVTVSSGKPGSGKPGSGKPGSGKPGSSIVMTQSPATLSVSPGERATLSCRASQSVSNDVAWYQQKPGQSPRLLINYASHRYTGVPDRFTGSGYGTEFTLTISSLQSEDFAVYFCQQDYGSPRTFGGGTKVEIK

SEQ ID NO: 14339 - protein, 122 aa, synthetic construct; identical to SEQ ID NO: 10922
  REGION 1..122: note = Description of Artificial Sequence: Synthetic polypeptide
  REGION 1..122: note = VH of XENP018876

SEQ ID NO: 14340 - protein, 107 aa, synthetic construct
  REGION 1..107: note = Description of Artificial Sequence: Synthetic polypeptide
  REGION 1..107: note = VL of XENP018876
SIVMTQSPATLSVSPGERATLSCRASQSVSNDVAWYQQKPGQSPRLLINYASHRYTGVPDRFTGSGYGTEFTLTISSLQSEDFAVYFCQQDYGSPRTFGGGTKVEIK

SEQ ID NO: 14341 - protein, 5 aa, synthetic construct
  REGION 1..5: note = Description of Artificial Sequence: Synthetic peptide
  REGION 1..5: note = XENP018876 vhCDR1
NYWMN

SEQ ID NO: 14342 - protein, 19 aa, synthetic construct
  REGION 1..19: note = Description of Artificial Sequence: Synthetic peptide
  REGION 1..19: note = XENP018876 vhCDR2
EIRLKSNNYATHYAEPVKG

SEQ ID NO: 14343 - protein, 11 aa, synthetic construct
  REGION 1..11: note = Description of Artificial Sequence: Synthetic peptide
  REGION 1..11: note = XENP018876 vhCDR3
YYGNYGGYFDV

SEQ ID NO: 14344 - protein, 11 aa, synthetic construct
  REGION 1..11: note = Description of Artificial Sequence: Synthetic peptide
  REGION 1..11: note = XENP018876 vlCDR1
RASQSVSNDVA

SEQ ID NO: 14345 - protein, 7 aa, synthetic construct
  REGION 1..7: note = Description of Artificial Sequence: Synthetic peptide
  REGION 1..7: note = XENP018876 vlCDR2
YASHRYT

SEQ ID NO: 14346 - protein, 9 aa, synthetic construct
  REGION 1..9: note = Description of Artificial Sequence: Synthetic peptide
  REGION 1..9: note = XENP018876 vlCDR3
QQDYGSPRT

SEQ ID NO: 14347 - protein, 249 aa, synthetic construct
  REGION 1..249: note = Description of Artificial Sequence: Synthetic polypeptide
  REGION 1..249: note = XENP018877 1G6_H1_L1.131_scFv(GKPGS)4
EVQLVESGGGLVKPGGSLRLSCAASGFTFSNYWMNWVRQAPGKGLEWVGEIRLKSNNYATHYAEPVKGRFTISRDDSKSTVYLQMNSLKTEDTAVYYCTRYYGNYGGYFDVWGAGTLVTVSSGKPGSGKPGSGKPGSGKPGSSIVMTQSPATLSVSPGERATLSCRASQSVSNDVAWYQQKPGQSPRLLINYASHRYTGVPDRFTGSGYGTEFTLTISSLQSEDFAVYFCQQDYVSPRTFGGGTKVEIK

SEQ ID NO: 14348 - protein, 122 aa, synthetic construct; identical to SEQ ID NO: 10922
  REGION 1..122: note = Description of Artificial Sequence: Synthetic polypeptide
  REGION 1..122: note = VH of XENP018877

SEQ ID NO: 14349 - protein, 107 aa, synthetic construct
  REGION 1..107: note = Description of Artificial Sequence: Synthetic polypeptide
  REGION 1..107: note = VL of XENP018877
SIVMTQSPATLSVSPGERATLSCRASQSVSNDVAWYQQKPGQSPRLLINYASHRYTGVPDRFTGSGYGTEFTLTISSLQSEDFAVYFCQQDYVSPRTFGGGTKVEIK

SEQ ID NO: 14350 - protein, 5 aa, synthetic construct
  REGION 1..5: note = Description of Artificial Sequence: Synthetic peptide
  REGION 1..5: note = XENP018877 vhCDR1
NYWMN

SEQ ID NO: 14351 - protein, 19 aa, synthetic construct
  REGION 1..19: note = Description of Artificial Sequence: Synthetic peptide
  REGION 1..19: note = XENP018877 vhCDR2
EIRLKSNNYATHYAEPVKG

SEQ ID NO: 14352 - protein, 11 aa, synthetic construct
  REGION 1..11: note = Description of Artificial Sequence: Synthetic peptide
  REGION 1..11: note = XENP018877 vhCDR3
YYGNYGGYFDV

SEQ ID NO: 14353 - protein, 11 aa, synthetic construct
  REGION 1..11: note = Description of Artificial Sequence: Synthetic peptide
  REGION 1..11: note = XENP018877 vlCDR1
RASQSVSNDVA

SEQ ID NO: 14354 - protein, 7 aa, synthetic construct
  REGION 1..7: note = Description of Artificial Sequence: Synthetic peptide
  REGION 1..7: note = XENP018877 vlCDR2
YASHRYT

SEQ ID NO: 14355 - protein, 9 aa, synthetic construct
  REGION 1..9: note = Description of Artificial Sequence: Synthetic peptide
  REGION 1..9: note = XENP018877 vlCDR3
QQDYVSPRT

SEQ ID NO: 14356 - protein, 249 aa, synthetic construct
  REGION 1..249: note = Description of Artificial Sequence: Synthetic polypeptide
  REGION 1..249: note = XENP018878 1G6_H1_L1.132_scFv(GKPGS)4
EVQLVESGGGLVKPGGSLRLSCAASGFTFSNYWMNWVRQAPGKGLEWVGEIRLKSNNYATHYAEPVKGRFTISRDDSKSTVYLQMNSLKTEDTAVYYCTRYYGNYGGYFDVWGAGTLVTVSSGKPGSGKPGSGKPGSGKPGSSIVMTQSPATLSVSPGERATLSCRASQSVSNDVAWYQQKPGQSPRLLINYASHRYTGVPDRFTGSGYGTEFTLTISSLQSEDFAVYFCQQDYHSPRTFGGGTKVEIK

SEQ ID NO: 14357 - protein, 122 aa, synthetic construct; identical to SEQ ID NO: 10922
  REGION 1..122: note = Description of Artificial Sequence: Synthetic polypeptide
  REGION 1..122: note = VH of XENP018878

SEQ ID NO: 14358 - protein, 107 aa, synthetic construct
  REGION 1..107: note = Description of Artificial Sequence: Synthetic polypeptide
  REGION 1..107: note = VL of XENP018878
SIVMTQSPATLSVSPGERATLSCRASQSVSNDVAWYQQKPGQSPRLLINYASHRYTGVPDRFTGSGYGTEFTLTISSLQSEDFAVYFCQQDYHSPRTFGGGTKVEIK

SEQ ID NO: 14359 - protein, 5 aa, synthetic construct
  REGION 1..5: note = Description of Artificial Sequence: Synthetic peptide
  REGION 1..5: note = XENP018878 vhCDR1
NYWMN

SEQ ID NO: 14360 - protein, 19 aa, synthetic construct
  REGION 1..19: note = Description of Artificial Sequence: Synthetic peptide
  REGION 1..19: note = XENP018878 vhCDR2
EIRLKSNNYATHYAEPVKG

SEQ ID NO: 14361 - protein, 11 aa, synthetic construct
  REGION 1..11: note = Description of Artificial Sequence: Synthetic peptide
  REGION 1..11: note = XENP018878 vhCDR3
YYGNYGGYFDV

SEQ ID NO: 14362 - protein, 11 aa, synthetic construct
  REGION 1..11: note = Description of Artificial Sequence: Synthetic peptide
  REGION 1..11: note = XENP018878 vlCDR1
RASQSVSNDVA

SEQ ID NO: 14363 - protein, 7 aa, synthetic construct
  REGION 1..7: note = Description of Artificial Sequence: Synthetic peptide
  REGION 1..7: note = XENP018878 vlCDR2
YASHRYT

SEQ ID NO: 14364 - protein, 9 aa, synthetic construct
  REGION 1..9: note = Description of Artificial Sequence: Synthetic peptide
  REGION 1..9: note = XENP018878 vlCDR3
QQDYHSPRT

SEQ ID NO: 14365 - protein, 249 aa, synthetic construct
  REGION 1..249: note = Description of Artificial Sequence: Synthetic polypeptide
  REGION 1..249: note = XENP018879 1G6_H1_L1.133_scFv(GKPGS)4
EVQLVESGGGLVKPGGSLRLSCAASGFTFSNYWMNWVRQAPGKGLEWVGEIRLKSNNYATHYAEPVKGRFTISRDDSKSTVYLQMNSLKTEDTAVYYCTRYYGNYGGYFDVWGAGTLVTVSSGKPGSGKPGSGKPGSGKPGSSIVMTQSPATLSVSPGERATLSCRASQSVSNDVAWYQQKPGQSPRLLINYASHRYTGVPDRFTGSGYGTEFTLTISSLQSEDFAVYFCQQDYDSPRTFGGGTKVEIK

SEQ ID NO: 14366 - protein, 122 aa, synthetic construct; identical to SEQ ID NO: 10922
  REGION 1..122: note = Description of Artificial Sequence: Synthetic polypeptide
  REGION 1..122: note = VH of XENP018879

SEQ ID NO: 14367 - protein, 107 aa, synthetic construct
  REGION 1..107: note = Description of Artificial Sequence: Synthetic polypeptide
  REGION 1..107: note = VL of XENP018879
SIVMTQSPATLSVSPGERATLSCRASQSVSNDVAWYQQKPGQSPRLLINYASHRYTGVPDRFTGSGYGTEFTLTISSLQSEDFAVYFCQQDYDSPRTFGGGTKVEIK

SEQ ID NO: 14368 - protein, 5 aa, synthetic construct
  REGION 1..5: note = Description of Artificial Sequence: Synthetic peptide
  REGION 1..5: note = XENP018879 vhCDR1
NYWMN

SEQ ID NO: 14369 - protein, 19 aa, synthetic construct
  REGION 1..19: note = Description of Artificial Sequence: Synthetic peptide
  REGION 1..19: note = XENP018879 vhCDR2
EIRLKSNNYATHYAEPVKG

SEQ ID NO: 14370 - protein, 11 aa, synthetic construct
  REGION 1..11: note = Description of Artificial Sequence: Synthetic peptide
  REGION 1..11: note = XENP018879 vhCDR3
YYGNYGGYFDV

SEQ ID NO: 14371 - protein, 11 aa, synthetic construct
  REGION 1..11: note = Description of Artificial Sequence: Synthetic peptide
  REGION 1..11: note = XENP018879 vlCDR1
RASQSVSNDVA

SEQ ID NO: 14372 - protein, 7 aa, synthetic construct
  REGION 1..7: note = Description of Artificial Sequence: Synthetic peptide
  REGION 1..7: note = XENP018879 vlCDR2
YASHRYT

SEQ ID NO: 14373 - protein, 9 aa, synthetic construct
  REGION 1..9: note = Description of Artificial Sequence: Synthetic peptide
  REGION 1..9: note = XENP018879 vlCDR3
QQDYDSPRT

SEQ ID NO: 14374 - protein, 249 aa, synthetic construct
  REGION 1..249: note = Description of Artificial Sequence: Synthetic polypeptide
  REGION 1..249: note = XENP018880 1G6_H1_L1.134_scFv(GKPGS)4
EVQLVESGGGLVKPGGSLRLSCAASGFTFSNYWMNWVRQAPGKGLEWVGEIRLKSNNYATHYAEPVKGRFTISRDDSKSTVYLQMNSLKTEDTAVYYCTRYYGNYGGYFDVWGAGTLVTVSSGKPGSGKPGSGKPGSGKPGSSIVMTQSPATLSVSPGERATLSCRASQSVSNDVAWYQQKPGQSPRLLINYASHRYTGVPDRFTGSGYGTEFTLTISSLQSEDFAVYFCQQDYKSPRTFGGGTKVEIK

SEQ ID NO: 14375 - protein, 122 aa, synthetic construct; identical to SEQ ID NO: 10922
  REGION 1..122: note = Description of Artificial Sequence: Synthetic polypeptide
  REGION 1..122: note = VH of XENP018880

SEQ ID NO: 14376 - protein, 107 aa, synthetic construct
  REGION 1..107: note = Description of Artificial Sequence: Synthetic polypeptide
  REGION 1..107: note = VL of XENP018880
SIVMTQSPATLSVSPGERATLSCRASQSVSNDVAWYQQKPGQSPRLLINYASHRYTGVPDRFTGSGYGTEFTLTISSLQSEDFAVYFCQQDYKSPRTFGGGTKVEIK

SEQ ID NO: 14377 - protein, 5 aa, synthetic construct
  REGION 1..5: note = Description of Artificial Sequence: Synthetic peptide
  REGION 1..5: note = XENP018880 vhCDR1
NYWMN

SEQ ID NO: 14378 - protein, 19 aa, synthetic construct
  REGION 1..19: note = Description of Artificial Sequence: Synthetic peptide
  REGION 1..19: note = XENP018880 vhCDR2
EIRLKSNNYATHYAEPVKG

SEQ ID NO: 14379 - protein, 11 aa, synthetic construct
  REGION 1..11: note = Description of Artificial Sequence: Synthetic peptide
  REGION 1..11: note = XENP018880 vhCDR3
YYGNYGGYFDV

SEQ ID NO: 14380 - protein, 11 aa, synthetic construct
  REGION 1..11: note = Description of Artificial Sequence: Synthetic peptide
  REGION 1..11: note = XENP018880 vlCDR1
RASQSVSNDVA

SEQ ID NO: 14381 - protein, 7 aa, synthetic construct
  REGION 1..7: note = Description of Artificial Sequence: Synthetic peptide
  REGION 1..7: note = XENP018880 vlCDR2
YASHRYT

SEQ ID NO: 14382 - protein, 9 aa, synthetic construct
  REGION 1..9: note = Description of Artificial Sequence: Synthetic peptide
  REGION 1..9: note = XENP018880 vlCDR3
QQDYKSPRT

SEQ ID NO: 14383 - protein, 249 aa, synthetic construct
  REGION 1..249: note = Description of Artificial Sequence: Synthetic polypeptide
  REGION 1..249: note = XENP018881 1G6_H1_L1.135_scFv(GKPGS)4
EVQLVESGGGLVKPGGSLRLSCAASGFTFSNYWMNWVRQAPGKGLEWVGEIRLKSNNYATHYAEPVKGRFTISRDDSKSTVYLQMNSLKTEDTAVYYCTRYYGNYGGYFDVWGAGTLVTVSSGKPGSGKPGSGKPGSGKPGSSIVMTQSPATLSVSPGERATLSCRASQSVSNDVAWYQQKPGQSPRLLINYASHRYTGVPDRFTGSGYGTEFTLTISSLQSEDFAVYFCQQDYFSPRTFGGGTKVEIK

SEQ ID NO: 14384 - protein, 122 aa, synthetic construct; identical to SEQ ID NO: 10922
  REGION 1..122: note = Description of Artificial Sequence: Synthetic polypeptide
  REGION 1..122: note = VH of XENP018881

SEQ ID NO: 14385 - protein, 107 aa, synthetic construct
  REGION 1..107: note = Description of Artificial Sequence: Synthetic polypeptide
  REGION 1..107: note = VL of XENP018881
SIVMTQSPATLSVSPGERATLSCRASQSVSNDVAWYQQKPGQSPRLLINYASHRYTGVPDRFTGSGYGTEFTLTISSLQSEDFAVYFCQQDYFSPRTFGGGTKVEIK

SEQ ID NO: 14386 - protein, 5 aa, synthetic construct
  REGION 1..5: note = Description of Artificial Sequence: Synthetic peptide
  REGION 1..5: note = XENP018881 vhCDR1
NYWMN

SEQ ID NO: 14387 - protein, 19 aa, synthetic construct
  REGION 1..19: note = Description of Artificial Sequence: Synthetic peptide
  REGION 1..19: note = XENP018881 vhCDR2
EIRLKSNNYATHYAEPVKG

SEQ ID NO: 14388 - protein, 11 aa, synthetic construct
  REGION 1..11: note = Description of Artificial Sequence: Synthetic peptide
  REGION 1..11: note = XENP018881 vhCDR3
YYGNYGGYFDV

SEQ ID NO: 14389 - protein, 11 aa, synthetic construct
  REGION 1..11: note = Description of Artificial Sequence: Synthetic peptide
  REGION 1..11: note = XENP018881 vlCDR1
RASQSVSNDVA

SEQ ID NO: 14390 - protein, 7 aa, synthetic construct
  REGION 1..7: note = Description of Artificial Sequence: Synthetic peptide
  REGION 1..7: note = XENP018881 vlCDR2
YASHRYT

SEQ ID NO: 14391 - protein, 9 aa, synthetic construct
  REGION 1..9: note = Description of Artificial Sequence: Synthetic peptide
  REGION 1..9: note = XENP018881 vlCDR3
QQDYFSPRT

SEQ ID NO: 14392 - protein, 249 aa, synthetic construct
  REGION 1..249: note = Description of Artificial Sequence: Synthetic polypeptide
  REGION 1..249: note = XENP018882 1G6_H1_L1.136_scFv(GKPGS)4
EVQLVESGGGLVKPGGSLRLSCAASGFTFSNYWMNWVRQAPGKGLEWVGEIRLKSNNYATHYAEPVKGRFTISRDDSKSTVYLQMNSLKTEDTAVYYCTRYYGNYGGYFDVWGAGTLVTVSSGKPGSGKPGSGKPGSGKPGSSIVMTQSPATLSVSPGERATLSCRASQSVSNDVAWYQQKPGQSPRLLINYASHRYTGVPDRFTGSGYGTEFTLTISSLQSEDFAVYFCQQDYSTPRTFGGGTKVEIK

SEQ ID NO: 14393 - protein, 122 aa, synthetic construct; identical to SEQ ID NO: 10922
  REGION 1..122: note = Description of Artificial Sequence: Synthetic polypeptide
  REGION 1..122: note = VH of XENP018882

SEQ ID NO: 14394 - protein, 107 aa, synthetic construct
  REGION 1..107: note = Description of Artificial Sequence: Synthetic polypeptide
  REGION 1..107: note = VL of XENP018882
SIVMTQSPATLSVSPGERATLSCRASQSVSNDVAWYQQKPGQSPRLLINYASHRYTGVPDRFTGSGYGTEFTLTISSLQSEDFAVYFCQQDYSTPRTFGGGTKVEIK

SEQ ID NO: 14395 - protein, 5 aa, synthetic construct
  REGION 1..5: note = Description of Artificial Sequence: Synthetic peptide
  REGION 1..5: note = XENP018882 vhCDR1
NYWMN

SEQ ID NO: 14396 - protein, 19 aa, synthetic construct
  REGION 1..19: note = Description of Artificial Sequence: Synthetic peptide
  REGION 1..19: note = XENP018882 vhCDR2
EIRLKSNNYATHYAEPVKG

SEQ ID NO: 14397 - protein, 11 aa, synthetic construct
  REGION 1..11: note = Description of Artificial Sequence: Synthetic peptide
  REGION 1..11: note = XENP018882 vhCDR3
YYGNYGGYFDV

SEQ ID NO: 14398 - protein, 11 aa, synthetic construct
  REGION 1..11: note = Description of Artificial Sequence: Synthetic peptide
  REGION 1..11: note = XENP018882 vlCDR1
RASQSVSNDVA

SEQ ID NO: 14399 - protein, 7 aa, synthetic construct
  REGION 1..7: note = Description of Artificial Sequence: Synthetic peptide
  REGION 1..7: note = XENP018882 vlCDR2
YASHRYT

SEQ ID NO: 14400 - protein, 9 aa, synthetic construct
  REGION 1..9: note = Description of Artificial Sequence: Synthetic peptide
  REGION 1..9: note = XENP018882 vlCDR3
QQDYSTPRT

SEQ ID NO: 14401 - protein, 249 aa, synthetic construct
  REGION 1..249: note = Description of Artificial Sequence: Synthetic polypeptide
  REGION 1..249: note = XENP018883 1G6_H1_L1.137_scFv(GKPGS)4
EVQLVESGGGLVKPGGSLRLSCAASGFTFSNYWMNWVRQAPGKGLEWVGEIRLKSNNYATHYAEPVKGRFTISRDDSKSTVYLQMNSLKTEDTAVYYCTRYYGNYGGYFDVWGAGTLVTVSSGKPGSGKPGSGKPGSGKPGSSIVMTQSPATLSVSPGERATLSCRASQSVSNDVAWYQQKPGQSPRLLINYASHRYTGVPDRFTGSGYGTEFTLTISSLQSEDFAVYFCQQDYSAPRTFGGGTKVEIK

SEQ ID NO: 14402 - protein, 122 aa, synthetic construct; identical to SEQ ID NO: 10922
  REGION 1..122: note = Description of Artificial Sequence: Synthetic polypeptide
  REGION 1..122: note = VH of XENP018883

SEQ ID NO: 14403 - protein, 107 aa, synthetic construct
  REGION 1..107: note = Description of Artificial Sequence: Synthetic polypeptide
  REGION 1..107: note = VL of XENP018883
SIVMTQSPATLSVSPGERATLSCRASQSVSNDVAWYQQKPGQSPRLLINYASHRYTGVPDRFTGSGYGTEFTLTISSLQSEDFAVYFCQQDYSAPRTFGGGTKVEIK

SEQ ID NO: 14404 - protein, 5 aa, synthetic construct
  REGION 1..5: note = Description of Artificial Sequence: Synthetic peptide
  REGION 1..5: note = XENP018883 vhCDR1
NYWMN

SEQ ID NO: 14405 - protein, 19 aa, synthetic construct
  REGION 1..19: note = Description of Artificial Sequence: Synthetic peptide
  REGION 1..19: note = XENP018883 vhCDR2
EIRLKSNNYATHYAEPVKG

SEQ ID NO: 14406 - protein, 11 aa, synthetic construct
  REGION 1..11: note = Description of Artificial Sequence: Synthetic peptide
  REGION 1..11: note = XENP018883 vhCDR3
YYGNYGGYFDV

SEQ ID NO: 14407 - protein, 11 aa, synthetic construct
  REGION 1..11: note = Description of Artificial Sequence: Synthetic peptide
  REGION 1..11: note = XENP018883 vlCDR1
RASQSVSNDVA

SEQ ID NO: 14408 - protein, 7 aa, synthetic construct
  REGION 1..7: note = Description of Artificial Sequence: Synthetic peptide
  REGION 1..7: note = XENP018883 vlCDR2
YASHRYT

SEQ ID NO: 14409 - protein, 9 aa, synthetic construct
  REGION 1..9: note = Description of Artificial Sequence: Synthetic peptide
  REGION 1..9: note = XENP018883 vlCDR3
QQDYSAPRT

SEQ ID NO: 14410 - protein, 249 aa, synthetic construct
  REGION 1..249: note = Description of Artificial Sequence: Synthetic polypeptide
  REGION 1..249: note = XENP018884 1G6_H1_L1.138_scFv(GKPGS)4
EVQLVESGGGLVKPGGSLRLSCAASGFTFSNYWMNWVRQAPGKGLEWVGEIRLKSNNYATHYAEPVKGRFTISRDDSKSTVYLQMNSLKTEDTAVYYCTRYYGNYGGYFDVWGAGTLVTVSSGKPGSGKPGSGKPGSGKPGSSIVMTQSPATLSVSPGERATLSCRASQSVSNDVAWYQQKPGQSPRLLINYASHRYTGVPDRFTGSGYGTEFTLTISSLQSEDFAVYFCQQDYSNPRTFGGGTKVEIK

SEQ ID NO: 14411 - protein, 122 aa, synthetic construct; identical to SEQ ID NO: 10922
  REGION 1..122: note = Description of Artificial Sequence: Synthetic polypeptide
  REGION 1..122: note = VH of XENP018884

SEQ ID NO: 14412 - protein, 107 aa, synthetic construct
  REGION 1..107: note = Description of Artificial Sequence: Synthetic polypeptide
  REGION 1..107: note = VL of XENP018884
SIVMTQSPATLSVSPGERATLSCRASQSVSNDVAWYQQKPGQSPRLLINYASHRYTGVPDRFTGSGYGTEFTLTISSLQSEDFAVYFCQQDYSNPRTFGGGTKVEIK

SEQ ID NO: 14413 - protein, 5 aa, synthetic construct
  REGION 1..5: note = Description of Artificial Sequence: Synthetic peptide
  REGION 1..5: note = XENP018884 vhCDR1
NYWMN

SEQ ID NO: 14414 - protein, 19 aa, synthetic construct
  REGION 1..19: note = Description of Artificial Sequence: Synthetic peptide
  REGION 1..19: note = XENP018884 vhCDR2
EIRLKSNNYATHYAEPVKG

SEQ ID NO: 14415 - protein, 11 aa, synthetic construct
  REGION 1..11: note = Description of Artificial Sequence: Synthetic peptide
  REGION 1..11: note = XENP018884 vhCDR3
YYGNYGGYFDV

SEQ ID NO: 14416 - protein, 11 aa, synthetic construct
  REGION 1..11: note = Description of Artificial Sequence: Synthetic peptide
  REGION 1..11: note = XENP018884 vlCDR1
RASQSVSNDVA

SEQ ID NO: 14417 - protein, 7 aa, synthetic construct
  REGION 1..7: note = Description of Artificial Sequence: Synthetic peptide
  REGION 1..7: note = XENP018884 vlCDR2
YASHRYT

SEQ ID NO: 14418 - protein, 9 aa, synthetic construct
  REGION 1..9: note = Description of Artificial Sequence: Synthetic peptide
  REGION 1..9: note = XENP018884 vlCDR3
QQDYSNPRT

SEQ ID NO: 14419 - protein, 249 aa, synthetic construct
  REGION 1..249: note = Description of Artificial Sequence: Synthetic polypeptide
  REGION 1..249: note = XENP018885 1G6_H1_L1.139_scFv(GKPGS)4
EVQLVESGGGLVKPGGSLRLSCAASGFTFSNYWMNWVRQAPGKGLEWVGEIRLKSNNYATHYAEPVKGRFTISRDDSKSTVYLQMNSLKTEDTAVYYCTRYYGNYGGYFDVWGAGTLVTVSSGKPGSGKPGSGKPGSGKPGSSIVMTQSPATLSVSPGERATLSCRASQSVSNDVAWYQQKPGQSPRLLINYASHRYTGVPDRFTGSGYGTEFTLTISSLQSEDFAVYFCQQDYSGPRTFGGGTKVEIK

SEQ ID NO: 14420 - protein, 122 aa, synthetic construct; identical to SEQ ID NO: 10922
  REGION 1..122: note = Description of Artificial Sequence: Synthetic polypeptide
  REGION 1..122: note = VH of XENP018885

SEQ ID NO: 14421 - protein, 107 aa, synthetic construct
  REGION 1..107: note = Description of Artificial Sequence: Synthetic polypeptide
  REGION 1..107: note = VL of XENP018885
SIVMTQSPATLSVSPGERATLSCRASQSVSNDVAWYQQKPGQSPRLLINYASHRYTGVPDRFTGSGYGTEFTLTISSLQSEDFAVYFCQQDYSGPRTFGGGTKVEIK

SEQ ID NO: 14422 - protein, 5 aa, synthetic construct
  REGION 1..5: note = Description of Artificial Sequence: Synthetic peptide
  REGION 1..5: note = XENP018885 vhCDR1
NYWMN

SEQ ID NO: 14423 - protein, 19 aa, synthetic construct
  REGION 1..19: note = Description of Artificial Sequence: Synthetic peptide
  REGION 1..19: note = XENP018885 vhCDR2
EIRLKSNNYATHYAEPVKG

SEQ ID NO: 14424 - protein, 11 aa, synthetic construct
  REGION 1..11: note = Description of Artificial Sequence: Synthetic peptide
  REGION 1..11: note = XENP018885 vhCDR3
YYGNYGGYFDV

SEQ ID NO: 14425 - protein, 11 aa, synthetic construct
  REGION 1..11: note = Description of Artificial Sequence: Synthetic peptide
  REGION 1..11: note = XENP018885 vlCDR1
RASQSVSNDVA

SEQ ID NO: 14426 - protein, 7 aa, synthetic construct
  REGION 1..7: note = Description of Artificial Sequence: Synthetic peptide
  REGION 1..7: note = XENP018885 vlCDR2
YASHRYT

SEQ ID NO: 14427 - protein, 9 aa, synthetic construct
  REGION 1..9: note = Description of Artificial Sequence: Synthetic peptide
  REGION 1..9: note = XENP018885 vlCDR3
QQDYSGPRT

SEQ ID NO: 14428 - protein, 249 aa, synthetic construct
  REGION 1..249: note = Description of Artificial Sequence: Synthetic polypeptide
  REGION 1..249: note = XENP018886 1G6_H1_L1.140_scFv(GKPGS)4
EVQLVESGGGLVKPGGSLRLSCAASGFTFSNYWMNWVRQAPGKGLEWVGEIRLKSNNYATHYAEPVKGRFTISRDDSKSTVYLQMNSLKTEDTAVYYCTRYYGNYGGYFDVWGAGTLVTVSSGKPGSGKPGSGKPGSGKPGSSIVMTQSPATLSVSPGERATLSCRASQSVSNDVAWYQQKPGQSPRLLINYASHRYTGVPDRFTGSGYGTEFTLTISSLQSEDFAVYFCQQDYSVPRTFGGGTKVEIK

SEQ ID NO: 14429 - protein, 122 aa, synthetic construct; identical to SEQ ID NO: 10922
  REGION 1..122: note = Description of Artificial Sequence: Synthetic polypeptide
  REGION 1..122: note = VH of XENP018886

SEQ ID NO: 14430 - protein, 107 aa, synthetic construct
  REGION 1..107: note = Description of Artificial Sequence: Synthetic polypeptide
  REGION 1..107: note = VL of XENP018886
SIVMTQSPATLSVSPGERATLSCRASQSVSNDVAWYQQKPGQSPRLLINYASHRYTGVPDRFTGSGYGTEFTLTISSLQSEDFAVYFCQQDYSVPRTFGGGTKVEIK

SEQ ID NO: 14431 - protein, 5 aa, synthetic construct
  REGION 1..5: note = Description of Artificial Sequence: Synthetic peptide
  REGION 1..5: note = XENP018886 vhCDR1
NYWMN

SEQ ID NO: 14432 - protein, 19 aa, synthetic construct
  REGION 1..19: note = Description of Artificial Sequence: Synthetic peptide
  REGION 1..19: note = XENP018886 vhCDR2
EIRLKSNNYATHYAEPVKG

SEQ ID NO: 14433 - protein, 11 aa, synthetic construct
  REGION 1..11: note = Description of Artificial Sequence: Synthetic peptide
  REGION 1..11: note = XENP018886 vhCDR3
YYGNYGGYFDV

SEQ ID NO: 14434 - protein, 11 aa, synthetic construct
  REGION 1..11: note = Description of Artificial Sequence: Synthetic peptide
  REGION 1..11: note = XENP018886 vlCDR1
RASQSVSNDVA

SEQ ID NO: 14435 - protein, 7 aa, synthetic construct
  REGION 1..7: note = Description of Artificial Sequence: Synthetic peptide
  REGION 1..7: note = XENP018886 vlCDR2
YASHRYT

SEQ ID NO: 14436 - protein, 9 aa, synthetic construct
  REGION 1..9: note = Description of Artificial Sequence: Synthetic peptide
  REGION 1..9: note = XENP018886 vlCDR3
QQDYSVPRT

SEQ ID NO: 14437 - protein, 249 aa, synthetic construct
  REGION 1..249: note = Description of Artificial Sequence: Synthetic polypeptide
  REGION 1..249: note = XENP018887 1G6_H1_L1.141_scFv(GKPGS)4
EVQLVESGGGLVKPGGSLRLSCAASGFTFSNYWMNWVRQAPGKGLEWVGEIRLKSNNYATHYAEPVKGRFTISRDDSKSTVYLQMNSLKTEDTAVYYCTRYYGNYGGYFDVWGAGTLVTVSSGKPGSGKPGSGKPGSGKPGSSIVMTQSPATLSVSPGERATLSCRASQSVSNDVAWYQQKPGQSPRLLINYASHRYTGVPDRFTGSGYGTEFTLTISSLQSEDFAVYFCQQDYSHPRTFGGGTKVEIK

SEQ ID NO: 14438 - protein, 122 aa, synthetic construct; identical to SEQ ID NO: 10922
  REGION 1..122: note = Description of Artificial Sequence: Synthetic polypeptide
  REGION 1..122: note = VH of XENP018887

SEQ ID NO: 14439 - protein, 107 aa, synthetic construct
  REGION 1..107: note = Description of Artificial Sequence: Synthetic polypeptide
  REGION 1..107: note = VL of XENP018887
SIVMTQSPATLSVSPGERATLSCRASQSVSNDVAWYQQKPGQSPRLLINYASHRYTGVPDRFTGSGYGTEFTLTISSLQSEDFAVYFCQQDYSHPRTFGGGTKVEIK

SEQ ID NO: 14440 - protein, 5 aa, synthetic construct
  REGION 1..5: note = Description of Artificial Sequence: Synthetic peptide
  REGION 1..5: note = XENP018887 vhCDR1
NYWMN

SEQ ID NO: 14441 - protein, 19 aa, synthetic construct
  REGION 1..19: note = Description of Artificial Sequence: Synthetic peptide
  REGION 1..19: note = XENP018887 vhCDR2
EIRLKSNNYATHYAEPVKG

SEQ ID NO: 14442 - protein, 11 aa, synthetic construct
  REGION 1..11: note = Description of Artificial Sequence: Synthetic peptide
  REGION 1..11: note = XENP018887 vhCDR3
YYGNYGGYFDV

SEQ ID NO: 14443 - protein, 11 aa, synthetic construct
  REGION 1..11: note = Description of Artificial Sequence: Synthetic peptide
  REGION 1..11: note = XENP018887 vlCDR1
RASQSVSNDVA

SEQ ID NO: 14444 - protein, 7 aa, synthetic construct
  REGION 1..7: note = Description of Artificial Sequence: Synthetic peptide
  REGION 1..7: note = XENP018887 vlCDR2
YASHRYT

SEQ ID NO: 14445 - protein, 9 aa, synthetic construct
  REGION 1..9: note = Description of Artificial Sequence: Synthetic peptide
  REGION 1..9: note = XENP018887 vlCDR3
QQDYSHPRT

SEQ ID NO: 14446 - protein, 249 aa, synthetic construct
  REGION 1..249: note = Description of Artificial Sequence: Synthetic polypeptide
  REGION 1..249: note = XENP018888 1G6_H1_L1.142_scFv(GKPGS)4
EVQLVESGGGLVKPGGSLRLSCAASGFTFSNYWMNWVRQAPGKGLEWVGEIRLKSNNYATHYAEPVKGRFTISRDDSKSTVYLQMNSLKTEDTAVYYCTRYYGNYGGYFDVWGAGTLVTVSSGKPGSGKPGSGKPGSGKPGSSIVMTQSPATLSVSPGERATLSCRASQSVSNDVAWYQQKPGQSPRLLINYASHRYTGVPDRFTGSGYGTEFTLTISSLQSEDFAVYFCQQDYSDPRTFGGGTKVEIK

SEQ ID NO: 14447 - protein, 122 aa, synthetic construct; identical to SEQ ID NO: 10922
  REGION 1..122: note = Description of Artificial Sequence: Synthetic polypeptide
  REGION 1..122: note = VH of XENP018888

SEQ ID NO: 14448 - protein, 107 aa, synthetic construct
  REGION 1..107: note = Description of Artificial Sequence: Synthetic polypeptide
  REGION 1..107: note = VL of XENP018888
SIVMTQSPATLSVSPGERATLSCRASQSVSNDVAWYQQKPGQSPRLLINYASHRYTGVPDRFTGSGYGTEFTLTISSLQSEDFAVYFCQQDYSDPRTFGGGTKVEIK

SEQ ID NO: 14449 - protein, 5 aa, synthetic construct
  REGION 1..5: note = Description of Artificial Sequence: Synthetic peptide
  REGION 1..5: note = XENP018888 vhCDR1
NYWMN

SEQ ID NO: 14450 - protein, 19 aa, synthetic construct
  REGION 1..19: note = Description of Artificial Sequence: Synthetic peptide
  REGION 1..19: note = XENP018888 vhCDR2
EIRLKSNNYATHYAEPVKG

SEQ ID NO: 14451 - protein, 11 aa, synthetic construct
  REGION 1..11: note = Description of Artificial Sequence: Synthetic peptide
  REGION 1..11: note = XENP018888 vhCDR3
YYGNYGGYFDV

SEQ ID NO: 14452 - protein, 11 aa, synthetic construct
  REGION 1..11: note = Description of Artificial Sequence: Synthetic peptide
  REGION 1..11: note = XENP018888 vlCDR1
RASQSVSNDVA

SEQ ID NO: 14453 - protein, 7 aa, synthetic construct
  REGION 1..7: note = Description of Artificial Sequence: Synthetic peptide
  REGION 1..7: note = XENP018888 vlCDR2
YASHRYT

SEQ ID NO: 14454 - protein, 9 aa, synthetic construct
  REGION 1..9: note = Description of Artificial Sequence: Synthetic peptide
  REGION 1..9: note = XENP018888 vlCDR3
QQDYSDPRT

SEQ ID NO: 14455 - protein, 249 aa, synthetic construct
  REGION 1..249: note = Description of Artificial Sequence: Synthetic polypeptide
  REGION 1..249: note = XENP018889 1G6_H1_L1.143_scFv(GKPGS)4
EVQLVESGGGLVKPGGSLRLSCAASGFTFSNYWMNWVRQAPGKGLEWVGEIRLKSNNYATHYAEPVKGRFTISRDDSKSTVYLQMNSLKTEDTAVYYCTRYYGNYGGYFDVWGAGTLVTVSSGKPGSGKPGSGKPGSGKPGSSIVMTQSPATLSVSPGERATLSCRASQSVSNDVAWYQQKPGQSPRLLINYASHRYTGVPDRFTGSGYGTEFTLTISSLQSEDFAVYFCQQDYSKPRTFGGGTKVEIK

SEQ ID NO: 14456 - protein, 122 aa, synthetic construct; identical to SEQ ID NO: 10922
  REGION 1..122: note = Description of Artificial Sequence: Synthetic polypeptide
  REGION 1..122: note = VH of XENP018889

SEQ ID NO: 14457 - protein, 107 aa, synthetic construct
  REGION 1..107: note = Description of Artificial Sequence: Synthetic polypeptide
  REGION 1..107: note = VL of XENP018889
SIVMTQSPATLSVSPGERATLSCRASQSVSNDVAWYQQKPGQSPRLLINYASHRYTGVPDRFTGSGYGTEFTLTISSLQSEDFAVYFCQQDYSKPRTFGGGTKVEIK

SEQ ID NO: 14458 - protein, 5 aa, synthetic construct
  REGION 1..5: note = Description of Artificial Sequence: Synthetic peptide
  REGION 1..5: note = XENP018889 vhCDR1
NYWMN

SEQ ID NO: 14459 - protein, 19 aa, synthetic construct
  REGION 1..19: note = Description of Artificial Sequence: Synthetic peptide
  REGION 1..19: note = XENP018889 vhCDR2
EIRLKSNNYATHYAEPVKG

SEQ ID NO: 14460 - protein, 11 aa, synthetic construct
  REGION 1..11: note = Description of Artificial Sequence: Synthetic peptide
  REGION 1..11: note = XENP018889 vhCDR3
YYGNYGGYFDV

SEQ ID NO: 14461 - protein, 11 aa, synthetic construct
  REGION 1..11: note = Description of Artificial Sequence: Synthetic peptide
  REGION 1..11: note = XENP018889 vlCDR1
RASQSVSNDVA

SEQ ID NO: 14462 - protein, 7 aa, synthetic construct
  REGION 1..7: note = Description of Artificial Sequence: Synthetic peptide
  REGION 1..7: note = XENP018889 vlCDR2
YASHRYT

SEQ ID NO: 14463 - protein, 9 aa, synthetic construct
  REGION 1..9: note = Description of Artificial Sequence: Synthetic peptide
  REGION 1..9: note = XENP018889 vlCDR3
QQDYSKPRT

SEQ ID NO: 14464 - protein, 249 aa, synthetic construct
  REGION 1..249: note = Description of Artificial Sequence: Synthetic polypeptide
  REGION 1..249: note = XENP018890 1G6_H1_L1.144_scFv(GKPGS)4
EVQLVESGGGLVKPGGSLRLSCAASGFTFSNYWMNWVRQAPGKGLEWVGEIRLKSNNYATHYAEPVKGRFTISRDDSKSTVYLQMNSLKTEDTAVYYCTRYYGNYGGYFDVWGAGTLVTVSSGKPGSGKPGSGKPGSGKPGSSIVMTQSPATLSVSPGERATLSCRASQSVSNDVAWYQQKPGQSPRLLINYASHRYTGVPDRFTGSGYGTEFTLTISSLQSEDFAVYFCQQDYSFPRTFGGGTKVEIK

SEQ ID NO: 14465 - protein, 122 aa, synthetic construct; identical to SEQ ID NO: 10922
  REGION 1..122: note = Description of Artificial Sequence: Synthetic polypeptide
  REGION 1..122: note = VH of XENP018890

SEQ ID NO: 14466 - protein, 107 aa, synthetic construct
  REGION 1..107: note = Description of Artificial Sequence: Synthetic polypeptide
  REGION 1..107: note = VL of XENP018890
SIVMTQSPATLSVSPGERATLSCRASQSVSNDVAWYQQKPGQSPRLLINYASHRYTGVPDRFTGSGYGTEFTLTISSLQSEDFAVYFCQQDYSFPRTFGGGTKVEIK

SEQ ID NO: 14467 - protein, 5 aa, synthetic construct
  REGION 1..5: note = Description of Artificial Sequence: Synthetic peptide
  REGION 1..5: note = XENP018890 vhCDR1
NYWMN

SEQ ID NO: 14468 - protein, 19 aa, synthetic construct
  REGION 1..19: note = Description of Artificial Sequence: Synthetic peptide
  REGION 1..19: note = XENP018890 vhCDR2
EIRLKSNNYATHYAEPVKG

SEQ ID NO: 14469 - protein, 11 aa, synthetic construct
  REGION 1..11: note = Description of Artificial Sequence: Synthetic peptide
  REGION 1..11: note = XENP018890 vhCDR3
YYGNYGGYFDV

SEQ ID NO: 14470 - protein, 11 aa, synthetic construct
  REGION 1..11: note = Description of Artificial Sequence: Synthetic peptide
  REGION 1..11: note = XENP018890 vlCDR1
RASQSVSNDVA

SEQ ID NO: 14471 - protein, 7 aa, synthetic construct
  REGION 1..7: note = Description of Artificial Sequence: Synthetic peptide
  REGION 1..7: note = XENP018890 vlCDR2
YASHRYT

SEQ ID NO: 14472 - protein, 9 aa, synthetic construct
  REGION 1..9: note = Description of Artificial Sequence: Synthetic peptide
  REGION 1..9: note = XENP018890 vlCDR3
QQDYSFPRT

SEQ ID NO: 14473 - protein, 249 aa, synthetic construct
  REGION 1..249: note = Description of Artificial Sequence: Synthetic polypeptide
  REGION 1..249: note = XENP018891 1G6_H1_L1.145_scFv(GKPGS)4
EVQLVESGGGLVKPGGSLRLSCAASGFTFSNYWMNWVRQAPGKGLEWVGEIRLKSNNYATHYAEPVKGRFTISRDDSKSTVYLQMNSLKTEDTAVYYCTRYYGNYGGYFDVWGAGTLVTVSSGKPGSGKPGSGKPGSGKPGSSIVMTQSPATLSVSPGERATLSCRASQSVSNDVAWYQQKPGQSPRLLINYASHRYTGVPDRFTGSGYGTEFTLTISSLQSEDFAVYFCQQDYSSPRTFGGGTKLEIK

SEQ ID NO: 14474 - protein, 122 aa, synthetic construct; identical to SEQ ID NO: 10922
  REGION 1..122: note = Description of Artificial Sequence: Synthetic polypeptide
  REGION 1..122: note = VH of XENP018891

SEQ ID NO: 14475 - protein, 107 aa, synthetic construct
  REGION 1..107: note = Description of Artificial Sequence: Synthetic polypeptide
  REGION 1..107: note = VL of XENP018891
SIVMTQSPATLSVSPGERATLSCRASQSVSNDVAWYQQKPGQSPRLLINYASHRYTGVPDRFTGSGYGTEFTLTISSLQSEDFAVYFCQQDYSSPRTFGGGTKLEIK

SEQ ID NO: 14476 - protein, 5 aa, synthetic construct
  REGION 1..5: note = Description of Artificial Sequence: Synthetic peptide
  REGION 1..5: note = XENP018891 vhCDR1
NYWMN

SEQ ID NO: 14477 - protein, 19 aa, synthetic construct
  REGION 1..19: note = Description of Artificial Sequence: Synthetic peptide
  REGION 1..19: note = XENP018891 vhCDR2
EIRLKSNNYATHYAEPVKG

SEQ ID NO: 14478 - protein, 11 aa, synthetic construct
  REGION 1..11: note = Description of Artificial Sequence: Synthetic peptide
  REGION 1..11: note = XENP018891 vhCDR3
YYGNYGGYFDV

SEQ ID NO: 14479 - protein, 11 aa, synthetic construct
  REGION 1..11: note = Description of Artificial Sequence: Synthetic peptide
  REGION 1..11: note = XENP018891 vlCDR1
RASQSVSNDVA

SEQ ID NO: 14480 - protein, 7 aa, synthetic construct
  REGION 1..7: note = Description of Artificial Sequence: Synthetic peptide
  REGION 1..7: note = XENP018891 vlCDR2
YASHRYT

SEQ ID NO: 14481 - protein, 9 aa, synthetic construct
  REGION 1..9: note = Description of Artificial Sequence: Synthetic peptide
  REGION 1..9: note = XENP018891 vlCDR3
QQDYSSPRT

SEQ ID NO: 14482 - protein, 249 aa, synthetic construct
  REGION 1..249: note = Description of Artificial Sequence: Synthetic polypeptide
  REGION 1..249: note = XENP018895 1G6_H0L0_scFv(GKPGS)4
EVKLEESGGGLVQPGGSMKLSCVASGFTFSNYWMNWVRQSPEKGLEWVAEIRLKSNNYATHYAESVKGRFTISRDDSKSSVYLQMNNLRAEDTGIYYCTRYYGNYGGYFDVWGAGTTVTVSSGKPGSGKPGSGKPGSGKPGSSIVMTQTPKFLLVSAGDRVTITCKASQSVSNDVAWYQQKPGQSPKLLINYASHRYTGVPDRFTGSGYGTDFTFTISTVQAEDLAVYFCQQDYSSPRTFGGGTKLEIK

SEQ ID NO: 14483 - protein, 122 aa, synthetic construct
  REGION 1..122: note = Description of Artificial Sequence: Synthetic polypeptide
  REGION 1..122: note = VH of XENP018895
EVKLEESGGGLVQPGGSMKLSCVASGFTFSNYWMNWVRQSPEKGLEWVAEIRLKSNNYATHYAESVKGRFTISRDDSKSSVYLQMNNLRAEDTGIYYCTRYYGNYGGYFDVWGAGTTVTVSS

SEQ ID NO: 14484 - protein, 107 aa, synthetic construct
  REGION 1..107: note = Description of Artificial Sequence: Synthetic polypeptide
  REGION 1..107: note = VL of XENP018895
SIVMTQTPKFLLVSAGDRVTITCKASQSVSNDVAWYQQKPGQSPKLLINYASHRYTGVPDRFTGSGYGTDFTFTISTVQAEDLAVYFCQQDYSSPRTFGGGTKLEIK

SEQ ID NO: 14485 - protein, 5 aa, synthetic construct
  REGION 1..5: note = Description of Artificial Sequence: Synthetic peptide
  REGION 1..5: note = XENP018895 vhCDR1
NYWMN

SEQ ID NO: 14486 - protein, 19 aa, synthetic construct
  REGION 1..19: note = Description of Artificial Sequence: Synthetic peptide
  REGION 1..19: note = XENP018895 vhCDR2
EIRLKSNNYATHYAESVKG

SEQ ID NO: 14487 - protein, 11 aa, synthetic construct
  REGION 1..11: note = Description of Artificial Sequence: Synthetic peptide
  REGION 1..11: note = XENP018895 vhCDR3
YYGNYGGYFDV

SEQ ID NO: 14488 - protein, 11 aa, synthetic construct
  REGION 1..11: note = Description of Artificial Sequence: Synthetic peptide
  REGION 1..11: note = XENP018895 vlCDR1
KASQSVSNDVA

SEQ ID NO: 14489 - protein, 7 aa, synthetic construct
  REGION 1..7: note = Description of Artificial Sequence: Synthetic peptide
  REGION 1..7: note = XENP018895 vlCDR2
YASHRYT

SEQ ID NO: 14490 - protein, 9 aa, synthetic construct
  REGION 1..9: note = Description of Artificial Sequence: Synthetic peptide
  REGION 1..9: note = XENP018895 vlCDR3
QQDYSSPRT

SEQ ID NO: 14491 - protein, 249 aa, synthetic construct
  REGION 1..249: note = Description of Artificial Sequence: Synthetic polypeptide
  REGION 1..249: note = XENP018896 1G6_L1H1_scFv(GKPGS)4
SIVMTQSPATLSVSPGERATLSCRASQSVSNDVAWYQQKPGQSPRLLINYASHRYTGVPDRFTGSGYGTEFTLTISSLQSEDFAVYFCQQDYSSPRTFGGGTKVEIKGKPGSGKPGSGKPGSGKPGSEVQLVESGGGLVKPGGSLRLSCAASGFTFSNYWMNWVRQAPGKGLEWVGEIRLKSNNYATHYAEPVKGRFTISRDDSKSTVYLQMNSLKTEDTAVYYCTRYYGNYGGYFDVWGAGTLVTVSS

SEQ ID NO: 14492 - protein, 107 aa, synthetic construct; identical to SEQ ID NO: 10923
  REGION 1..107: note = Description of Artificial Sequence: Synthetic polypeptide
  REGION 1..107: note = VH of XENP018896

SEQ ID NO: 14493 - protein, 122 aa, synthetic construct; identical to SEQ ID NO: 10922
  REGION 1..122: note = Description of Artificial Sequence: Synthetic polypeptide
  REGION 1..122: note = VL of XENP018896

SEQ ID NO: 14494 - protein, 11 aa, synthetic construct
  REGION 1..11: note = Description of Artificial Sequence: Synthetic peptide
  REGION 1..11: note = XENP018896 vhCDR1
RASQSVSNDVA

SEQ ID NO: 14495 - protein, 7 aa, synthetic construct
  REGION 1..7: note = Description of Artificial Sequence: Synthetic peptide
  REGION 1..7: note = XENP018896 vhCDR2
YASHRYT

SEQ ID NO: 14496 - protein, 9 aa, synthetic construct
  REGION 1..9: note = Description of Artificial Sequence: Synthetic peptide
  REGION 1..9: note = XENP018896 vhCDR3
QQDYSSPRT

SEQ ID NO: 14497 - protein, 5 aa, synthetic construct
  REGION 1..5: note = Description of Artificial Sequence: Synthetic peptide
  REGION 1..5: note = XENP018896 vlCDR1
NYWMN

SEQ ID NO: 14498 - protein, 19 aa, synthetic construct
  REGION 1..19: note = Description of Artificial Sequence: Synthetic peptide
  REGION 1..19: note = XENP018896 vlCDR2
EIRLKSNNYATHYAEPVKG

SEQ ID NO: 14499 - protein, 11 aa, synthetic construct
  REGION 1..11: note = Description of Artificial Sequence: Synthetic peptide
  REGION 1..11: note = XENP018896 vlCDR3
YYGNYGGYFDV

SEQ ID NO: 14500 - protein, 244 aa, synthetic construct
  REGION 1..244: note = Description of Artificial Sequence: Synthetic polypeptide
  REGION 1..244: note = XENP018901 6A3_H0L0_scFv(GKPGS)4
EVKLVESGGGLVKPGGSLKLSCAASGFTFSSYGMSWVRQTPEKRLEWVATISGGGRYTYYPDSVKGRFTISRDNAKNNLYLQMSSLRSEDTALYYCASYYDSSFDYWGQGTTLTVSSGKPGSGKPGSGKPGSGKPGSDIVMTQSHKFMSTSVGDRVSITCKASQDVGTAVAWYQQKPGQSPKLLIYWASTRHTGVPDRFTGSGSGTDFTLTISNVQSEDLADYFCQHYSIYPWTFGGGTKLEIK

SEQ ID NO: 14501 - protein, 117 aa, synthetic construct
  REGION 1..117: note = Description of Artificial Sequence: Synthetic polypeptide
  REGION 1..117: note = VH of XENP018901
EVKLVESGGGLVKPGGSLKLSCAASGFTFSSYGMSWVRQTPEKRLEWVATISGGGRYTYYPDSVKGRFTISRDNAKNNLYLQMSSLRSEDTALYYCASYYDSSFDYWGQGTTLTVSS

SEQ ID NO: 14502 - protein, 107 aa, synthetic construct
  REGION 1..107: note = Description of Artificial Sequence: Synthetic polypeptide
  REGION 1..107: note = VL of XENP018901
DIVMTQSHKFMSTSVGDRVSITCKASQDVGTAVAWYQQKPGQSPKLLIYWASTRHTGVPDRFTGSGSGTDFTLTISNVQSEDLADYFCQHYSIYPWTFGGGTKLEIK

SEQ ID NO: 14503 - protein, 5 aa, synthetic construct
  REGION 1..5: note = Description of Artificial Sequence: Synthetic peptide
  REGION 1..5: note = XENP018901 vhCDR1
SYGMS

SEQ ID NO: 14504 - protein, 17 aa, synthetic construct
  REGION 1..17: note = Description of Artificial Sequence: Synthetic peptide
  REGION 1..17: note = XENP018901 vhCDR2
TISGGGRYTYYPDSVKG

SEQ ID NO: 14505 - protein, 8 aa, synthetic construct
  REGION 1..8: note = Description of Artificial Sequence: Synthetic peptide
  REGION 1..8: note = XENP018901 vhCDR3
YYDSSFDY

SEQ ID NO: 14506 - protein, 11 aa, synthetic construct
  REGION 1..11: note = Description of Artificial Sequence: Synthetic peptide
  REGION 1..11: note = XENP018901 vlCDR1
KASQDVGTAVA

SEQ ID NO: 14507 - protein, 7 aa, synthetic construct
  REGION 1..7: note = Description of Artificial Sequence: Synthetic peptide
  REGION 1..7: note = XENP018901 vlCDR2
WASTRHT

SEQ ID NO: 14508 - protein, 9 aa, synthetic construct
  REGION 1..9: note = Description of Artificial Sequence: Synthetic peptide
  REGION 1..9: note = XENP018901 vlCDR3
QHYSIYPWT

SEQ ID NO: 14509 - protein, 244 aa, synthetic construct
  REGION 1..244: note = Description of Artificial Sequence: Synthetic polypeptide
  REGION 1..244: note = XENP018902 6A3_L3_H1.1_scFv(GKPGS)4
DIVMTQSPSSLSASVGDRVTITCRASQDVGTAVAWYQQKPGKSPKLLIYWASTRHTGVPDRFTGSGSGTDFTLTISSLQPEDFATYFCQHYSIYPWTFGGGTKVEIKGKPGSGKPGSGKPGSGKPGSEVQLLESGGGLVQPGGSLRLSCAASGFTFSSYGMSWVRQAPGKGLEWVSTISGGGRYTYYPDSVKGRFTISRDNSKNTLYLQMNSLRAEDTAVYYCASYYDSSFDYWGQGTLVTVSS

SEQ ID NO: 14510 - protein, 107 aa, synthetic construct; identical to SEQ ID NO: 11013
  REGION 1..107: note = Description of Artificial Sequence: Synthetic polypeptide
  REGION 1..107: note = VH of XENP018902

SEQ ID NO: 14511 - protein, 117 aa, synthetic construct; identical to SEQ ID NO: 11030
  REGION 1..117: note = Description of Artificial Sequence: Synthetic polypeptide
  REGION 1..117: note = VL of XENP018902

SEQ ID NO: 14512 - protein, 11 aa, synthetic construct
  REGION 1..11: note = Description of Artificial Sequence: Synthetic peptide
  REGION 1..11: note = XENP018902 vhCDR1
RASQDVGTAVA

SEQ ID NO: 14513 - protein, 7 aa, synthetic construct
  REGION 1..7: note = Description of Artificial Sequence: Synthetic peptide
  REGION 1..7: note = XENP018902 vhCDR2
WASTRHT

SEQ ID NO: 14514 - protein, 9 aa, synthetic construct
  REGION 1..9: note = Description of Artificial Sequence: Synthetic peptide
  REGION 1..9: note = XENP018902 vhCDR3
QHYSIYPWT

SEQ ID NO: 14515 - protein, 5 aa, synthetic construct
  REGION 1..5: note = Description of Artificial Sequence: Synthetic peptide
  REGION 1..5: note = XENP018902 vlCDR1
SYGMS

SEQ ID NO: 14516 - protein, 17 aa, synthetic construct
  REGION 1..17: note = Description of Artificial Sequence: Synthetic peptide
  REGION 1..17: note = XENP018902 vlCDR2
TISGGGRYTYYPDSVKG

SEQ ID NO: 14517 - protein, 9 aa, synthetic construct
  REGION 1..9: note = Description of Artificial Sequence: Synthetic peptide
  REGION 1..9: note = XENP018902 vlCDR3
SYYDSSFDY

SEQ ID NO: 14518 - protein, 249 aa, synthetic construct
  REGION 1..249: note = Description of Artificial Sequence: Synthetic polypeptide
  REGION 1..249: note = XENP018921 1G6_H1L3_scFv(GKPGS)4
EVQLVESGGGLVKPGGSLRLSCAASGFTFSNYWMNWVRQAPGKGLEWVGEIRLKSNNYATHYAEPVKGRFTISRDDSKSTVYLQMNSLKTEDTAVYYCTRYYGNYGGYFDVWGAGTLVTVSSGKPGSGKPGSGKPGSGKPGSSIVMTQSPLSLPVTPGEPASISCRASQSVSNDVAWYLQKPGQSPQLLINYASHRYTGVPDRFTGSGYGTDFTLKISRVEAEDVGVYFCQQDYSSPRTFGGGTKVEIK

SEQ ID NO: 14519 - protein, 122 aa, synthetic construct; identical to SEQ ID NO: 10922
  REGION 1..122: note = Description of Artificial Sequence: Synthetic polypeptide
  REGION 1..122: note = VH of XENP018921

SEQ ID NO: 14520 - protein, 107 aa, synthetic construct
  REGION 1..107: note = Description of Artificial Sequence: Synthetic polypeptide
  REGION 1..107: note = VL of XENP018921
SIVMTQSPLSLPVTPGEPASISCRASQSVSNDVAWYLQKPGQSPQLLINYASHRYTGVPDRFTGSGYGTDFTLKISRVEAEDVGVYFCQQDYSSPRTFGGGTKVEIK

SEQ ID NO: 14521 - protein, 5 aa, synthetic construct
  REGION 1..5: note = Description of Artificial Sequence: Synthetic peptide
  REGION 1..5: note = XENP018921 vhCDR1
NYWMN

SEQ ID NO: 14522 - protein, 19 aa, synthetic construct
  REGION 1..19: note = Description of Artificial Sequence: Synthetic peptide
  REGION 1..19: note = XENP018921 vhCDR2
EIRLKSNNYATHYAEPVKG

SEQ ID NO: 14523 - protein, 11 aa, synthetic construct
  REGION 1..11: note = Description of Artificial Sequence: Synthetic peptide
  REGION 1..11: note = XENP018921 vhCDR3
YYGNYGGYFDV

SEQ ID NO: 14524 - protein, 11 aa, synthetic construct
  REGION 1..11: note = Description of Artificial Sequence: Synthetic peptide
  REGION 1..11: note = XENP018921 vlCDR1
RASQSVSNDVA

SEQ ID NO: 14525 - protein, 7 aa, synthetic construct
  REGION 1..7: note = Description of Artificial Sequence: Synthetic peptide
  REGION 1..7: note = XENP018921 vlCDR2
YASHRYT

SEQ ID NO: 14526 - protein, 9 aa, synthetic construct
  REGION 1..9: note = Description of Artificial Sequence: Synthetic peptide
  REGION 1..9: note = XENP018921 vlCDR3
QQDYSSPRT

SEQ ID NO: 14527 - protein, 249 aa, synthetic construct
  REGION 1..249: note = Description of Artificial Sequence: Synthetic polypeptide
  REGION 1..249: note = XENP018922 1G6_H1L4_scFv(GKPGS)4
EVQLVESGGGLVKPGGSLRLSCAASGFTFSNYWMNWVRQAPGKGLEWVGEIRLKSNNYATHYAEPVKGRFTISRDDSKSTVYLQMNSLKTEDTAVYYCTRYYGNYGGYFDVWGAGTLVTVSSGKPGSGKPGSGKPGSGKPGSSIVMTQSPGTLSLSPGERATLSCRASQSVSNDVAWYQQKPGQSPRLLINYASHRYTGVPDRFTGSGYGTDFTLTISRLEPEDFAVYFCQQDYSSPRTFGGGTKVEIK

SEQ ID NO: 14528 - protein, 122 aa, synthetic construct; identical to SEQ ID NO: 10922
  REGION 1..122: note = Description of Artificial Sequence: Synthetic polypeptide
  REGION 1..122: note = VH of XENP018922

SEQ ID NO: 14529 - protein, 107 aa, synthetic construct
  REGION 1..107: note = Description of Artificial Sequence: Synthetic polypeptide
  REGION 1..107: note = VL of XENP018922
SIVMTQSPGTLSLSPGERATLSCRASQSVSNDVAWYQQKPGQSPRLLINYASHRYTGVPDRFTGSGYGTDFTLTISRLEPEDFAVYFCQQDYSSPRTFGGGTKVEIK

SEQ ID NO: 14530 - protein, 5 aa, synthetic construct
  REGION 1..5: note = Description of Artificial Sequence: Synthetic peptide
  REGION 1..5: note = XENP018922 vhCDR1
NYWMN

SEQ ID NO: 14531 - protein, 19 aa, synthetic construct
  REGION 1..19: note = Description of Artificial Sequence: Synthetic peptide
  REGION 1..19: note = XENP018922 vhCDR2
EIRLKSNNYATHYAEPVKG

SEQ ID NO: 14532 - protein, 11 aa, synthetic construct
  REGION 1..11: note = Description of Artificial Sequence: Synthetic peptide
  REGION 1..11: note = XENP018922 vhCDR3
YYGNYGGYFDV

SEQ ID NO: 14533 - protein, 11 aa, synthetic construct
  REGION 1..11: note = Description of Artificial Sequence: Synthetic peptide
  REGION 1..11: note = XENP018922 vlCDR1
RASQSVSNDVA

SEQ ID NO: 14534 - protein, 7 aa, synthetic construct
  REGION 1..7: note = Description of Artificial Sequence: Synthetic peptide
  REGION 1..7: note = XENP018922 vlCDR2
YASHRYT

SEQ ID NO: 14535 - protein, 9 aa, synthetic construct
  REGION 1..9: note = Description of Artificial Sequence: Synthetic peptide
  REGION 1..9: note = XENP018922 vlCDR3
QQDYSSPRT

SEQ ID NO: 14536 - protein, 249 aa, synthetic construct
  REGION 1..249: note = Description of Artificial Sequence: Synthetic polypeptide
  REGION 1..249: note = XENP018923 1G6_H1L5_scFv(GKPGS)4
EVQLVESGGGLVKPGGSLRLSCAASGFTFSNYWMNWVRQAPGKGLEWVGEIRLKSNNYATHYAEPVKGRFTISRDDSKSTVYLQMNSLKTEDTAVYYCTRYYGNYGGYFDVWGAGTLVTVSSGKPGSGKPGSGKPGSGKPGSSIVMTQSPDSLAVSLGERATINCKASQSVSNDVAWYQQKPGQSPKLLINYASHRYTGVPDRFTGSGYGTDFTLTISSLQAEDVAVYFCQQDYSSPRTFGGGTKVEIK

SEQ ID NO: 14537 - protein, 122 aa, synthetic construct; identical to SEQ ID NO: 10922
  REGION 1..122: note = Description of Artificial Sequence: Synthetic polypeptide
  REGION 1..122: note = VH of XENP018923

SEQ ID NO: 14538 - protein, 107 aa, synthetic construct
  REGION 1..107: note = Description of Artificial Sequence: Synthetic polypeptide
  REGION 1..107: note = VL of XENP018923
SIVMTQSPDSLAVSLGERATINCKASQSVSNDVAWYQQKPGQSPKLLINYASHRYTGVPDRFTGSGYGTDFTLTISSLQAEDVAVYFCQQDYSSPRTFGGGTKVEIK

SEQ ID NO: 14539 - protein, 5 aa, synthetic construct
  REGION 1..5: note = Description of Artificial Sequence: Synthetic peptide
  REGION 1..5: note = XENP018923 vhCDR1
NYWMN

SEQ ID NO: 14540 - protein, 19 aa, synthetic construct
  REGION 1..19: note = Description of Artificial Sequence: Synthetic peptide
  REGION 1..19: note = XENP018923 vhCDR2
EIRLKSNNYATHYAEPVKG

SEQ ID NO: 14541 - protein, 11 aa, synthetic construct
  REGION 1..11: note = Description of Artificial Sequence: Synthetic peptide
  REGION 1..11: note = XENP018923 vhCDR3
YYGNYGGYFDV

SEQ ID NO: 14542 - protein, 11 aa, synthetic construct
  REGION 1..11: note = Description of Artificial Sequence: Synthetic peptide
  REGION 1..11: note = XENP018923 vlCDR1
KASQSVSNDVA

SEQ ID NO: 14543 - protein, 7 aa, synthetic construct
  REGION 1..7: note = Description of Artificial Sequence: Synthetic peptide
  REGION 1..7: note = XENP018923 vlCDR2
YASHRYT

SEQ ID NO: 14544 - protein, 9 aa, synthetic construct
  REGION 1..9: note = Description of Artificial Sequence: Synthetic peptide
  REGION 1..9: note = XENP018923 vlCDR3
QQDYSSPRT

SEQ ID NO: 14545 - protein, 249 aa, synthetic construct
  REGION 1..249: note = Description of Artificial Sequence: Synthetic polypeptide
  REGION 1..249: note = XENP018924 1G6_H2L1_scFv(GKPGS)4
QVQLVQSGAEVKKPGASVKVSCKASGFTFSNYWMNWVRQAPGQGLEWMGEIRLKSNNYATHYAEKFQGRVTMTRDDSTSTVYMELSSLRSEDTAVYYCTRYYGNYGGYFDVWGAGTLVTVSSGKPGSGKPGSGKPGSGKPGSSIVMTQSPATLSVSPGERATLSCRASQSVSNDVAWYQQKPGQSPRLLINYASHRYTGVPDRFTGSGYGTEFTLTISSLQSEDFAVYFCQQDYSSPRTFGGGTKVEIK

SEQ ID NO: 14546 - protein, 122 aa, synthetic construct
  REGION 1..122: note = Description of Artificial Sequence: Synthetic polypeptide
  REGION 1..122: note = VH of XENP018924
QVQLVQSGAEVKKPGASVKVSCKASGFTFSNYWMNWVRQAPGQGLEWMGEIRLKSNNYATHYAEKFQGRVTMTRDDSTSTVYMELSSLRSEDTAVYYCTRYYGNYGGYFDVWGAGTLVTVSS

SEQ ID NO: 14547 - protein, 107 aa, synthetic construct; identical to SEQ ID NO: 10923
  REGION 1..107: note = Description of Artificial Sequence: Synthetic polypeptide
  REGION 1..107: note = VL of XENP018924

SEQ ID NO: 14548 - protein, 5 aa, synthetic construct
  REGION 1..5: note = Description of Artificial Sequence: Synthetic peptide
  REGION 1..5: note = XENP018924 vhCDR1
NYWMN

SEQ ID NO: 14549 - protein, 19 aa, synthetic construct
  REGION 1..19: note = Description of Artificial Sequence: Synthetic peptide
  REGION 1..19: note = XENP018924 vhCDR2
EIRLKSNNYATHYAEKFQG

SEQ ID NO: 14550 - protein, 11 aa, synthetic construct
  REGION 1..11: note = Description of Artificial Sequence: Synthetic peptide
  REGION 1..11: note = XENP018924 vhCDR3
YYGNYGGYFDV

SEQ ID NO: 14551 - protein, 11 aa, synthetic construct
  REGION 1..11: note = Description of Artificial Sequence: Synthetic peptide
  REGION 1..11: note = XENP018924 vlCDR1
RASQSVSNDVA

SEQ ID NO: 14552 - protein, 7 aa, synthetic construct
  REGION 1..7: note = Description of Artificial Sequence: Synthetic peptide
  REGION 1..7: note = XENP018924 vlCDR2
YASHRYT

SEQ ID NO: 14553 - protein, 9 aa, synthetic construct
  REGION 1..9: note = Description of Artificial Sequence: Synthetic peptide
  REGION 1..9: note = XENP018924 vlCDR3
QQDYSSPRT

SEQ ID NO: 14554 - protein, 249 aa, synthetic construct
  REGION 1..249: note = Description of Artificial Sequence: Synthetic polypeptide
  REGION 1..249: note = XENP018925 1G6_H2L2_scFv(GKPGS)4
QVQLVQSGAEVKKPGASVKVSCKASGFTFSNYWMNWVRQAPGQGLEWMGEIRLKSNNYATHYAEKFQGRVTMTRDDSTSTVYMELSSLRSEDTAVYYCTRYYGNYGGYFDVWGAGTLVTVSSGKPGSGKPGSGKPGSGKPGSSIVMTQSPSSLSASVGDRVTITCRASQSVSNDVAWYQQKPGKSPKLLINYASHRYTGVPDRFTGSGYGTDFTLTISSLQPEDFATYFCQQDYSSPRTFGGGTKVEIK

SEQ ID NO: 14555 - protein, 122 aa, synthetic construct; identical to SEQ ID NO: 14546
  REGION 1..122: note = Description of Artificial Sequence: Synthetic polypeptide
  REGION 1..122: note = VH of XENP018925

SEQ ID NO: 14556 - protein, 107 aa, synthetic construct; identical to SEQ ID NO: 10932
  REGION 1..107: note = Description of Artificial Sequence: Synthetic polypeptide
  REGION 1..107: note = VL of XENP018925

SEQ ID NO: 14557 - protein, 5 aa, synthetic construct
  REGION 1..5: note = Description of Artificial Sequence: Synthetic peptide
  REGION 1..5: note = XENP018925 vhCDR1
NYWMN

SEQ ID NO: 14558 - protein, 19 aa, synthetic construct
  REGION 1..19: note = Description of Artificial Sequence: Synthetic peptide
  REGION 1..19: note = XENP018925 vhCDR2
EIRLKSNNYATHYAEKFQG

SEQ ID NO: 14559 - protein, 11 aa, synthetic construct
  REGION 1..11: note = Description of Artificial Sequence: Synthetic peptide
  REGION 1..11: note = XENP018925 vhCDR3
YYGNYGGYFDV

SEQ ID NO: 14560 - protein, 11 aa, synthetic construct
  REGION 1..11: note = Description of Artificial Sequence: Synthetic peptide
  REGION 1..11: note = XENP018925 vlCDR1
RASQSVSNDVA

SEQ ID NO: 14561 - protein, 7 aa, synthetic construct
  REGION 1..7: note = Description of Artificial Sequence: Synthetic peptide
  REGION 1..7: note = XENP018925 vlCDR2
YASHRYT

SEQ ID NO: 14562 - protein, 9 aa, synthetic construct
  REGION 1..9: note = Description of Artificial Sequence: Synthetic peptide
  REGION 1..9: note = XENP018925 vlCDR3
QQDYSSPRT

SEQ ID NO: 14563 - protein, 249 aa, synthetic construct
  REGION 1..249: note = Description of Artificial Sequence: Synthetic polypeptide
  REGION 1..249: note = XENP018926 1G6_H2L3_scFv(GKPGS)4
QVQLVQSGAEVKKPGASVKVSCKASGFTFSNYWMNWVRQAPGQGLEWMGEIRLKSNNYATHYAEKFQGRVTMTRDDSTSTVYMELSSLRSEDTAVYYCTRYYGNYGGYFDVWGAGTLVTVSSGKPGSGKPGSGKPGSGKPGSSIVMTQSPLSLPVTPGEPASISCRASQSVSNDVAWYLQKPGQSPQLLINYASHRYTGVPDRFTGSGYGTDFTLKISRVEAEDVGVYFCQQDYSSPRTFGGGTKVEIK

SEQ ID NO: 14564 - protein, 122 aa, synthetic construct; identical to SEQ ID NO: 14546
  REGION 1..122: note = Description of Artificial Sequence: Synthetic polypeptide
  REGION 1..122: note = VH of XENP018926

SEQ ID NO: 14565 - protein, 107 aa, synthetic construct; identical to SEQ ID NO: 14520
  REGION 1..107: note = Description of Artificial Sequence: Synthetic polypeptide
  REGION 1..107: note = VL of XENP018926

SEQ ID NO: 14566 - protein, 5 aa, synthetic construct
  REGION 1..5: note = Description of Artificial Sequence: Synthetic peptide
  REGION 1..5: note = XENP018926 vhCDR1
NYWMN

SEQ ID NO: 14567 - protein, 19 aa, synthetic construct
  REGION 1..19: note = Description of Artificial Sequence: Synthetic peptide
  REGION 1..19: note = XENP018926 vhCDR2
EIRLKSNNYATHYAEKFQG

SEQ ID NO: 14568 - protein, 11 aa, synthetic construct
  REGION 1..11: note = Description of Artificial Sequence: Synthetic peptide
  REGION 1..11: note = XENP018926 vhCDR3
YYGNYGGYFDV

SEQ ID NO: 14569 - protein, 11 aa, synthetic construct
  REGION 1..11: note = Description of Artificial Sequence: Synthetic peptide
  REGION 1..11: note = XENP018926 vlCDR1
RASQSVSNDVA

SEQ ID NO: 14570 - protein, 7 aa, synthetic construct
  REGION 1..7: note = Description of Artificial Sequence: Synthetic peptide
  REGION 1..7: note = XENP018926 vlCDR2
YASHRYT

SEQ ID NO: 14571 - protein, 9 aa, synthetic construct
  REGION 1..9: note = Description of Artificial Sequence: Synthetic peptide
  REGION 1..9: note = XENP018926 vlCDR3
QQDYSSPRT

SEQ ID NO: 14572 - protein, 249 aa, synthetic construct
  REGION 1..249: note = Description of Artificial Sequence: Synthetic polypeptide
  REGION 1..249: note = XENP018927 1G6_H2L4_scFv(GKPGS)4
QVQLVQSGAEVKKPGASVKVSCKASGFTFSNYWMNWVRQAPGQGLEWMGEIRLKSNNYATHYAEKFQGRVTMTRDDSTSTVYMELSSLRSEDTAVYYCTRYYGNYGGYFDVWGAGTLVTVSSGKPGSGKPGSGKPGSGKPGSSIVMTQSPGTLSLSPGERATLSCRASQSVSNDVAWYQQKPGQSPRLLINYASHRYTGVPDRFTGSGYGTDFTLTISRLEPEDFAVYFCQQDYSSPRTFGGGTKVEIK

SEQ ID NO: 14573 - protein, 122 aa, synthetic construct; identical to SEQ ID NO: 14546
  REGION 1..122: note = Description of Artificial Sequence: Synthetic polypeptide
  REGION 1..122: note = VH of XENP018927

SEQ ID NO: 14574 - protein, 107 aa, synthetic construct; identical to SEQ ID NO: 14529
  REGION 1..107: note = Description of Artificial Sequence: Synthetic polypeptide
  REGION 1..107: note = VL of XENP018927

SEQ ID NO: 14575 - protein, 5 aa, synthetic construct
  REGION 1..5: note = Description of Artificial Sequence: Synthetic peptide
  REGION 1..5: note = XENP018927 vhCDR1
NYWMN

SEQ ID NO: 14576 - protein, 19 aa, synthetic construct
  REGION 1..19: note = Description of Artificial Sequence: Synthetic peptide
  REGION 1..19: note = XENP018927 vhCDR2
EIRLKSNNYATHYAEKFQG

SEQ ID NO: 14577 - protein, 11 aa, synthetic construct
  REGION 1..11: note = Description of Artificial Sequence: Synthetic peptide
  REGION 1..11: note = XENP018927 vhCDR3
YYGNYGGYFDV

SEQ ID NO: 14578 - protein, 11 aa, synthetic construct
  REGION 1..11: note = Description of Artificial Sequence: Synthetic peptide
  REGION 1..11: note = XENP018927 vlCDR1
RASQSVSNDVA

SEQ ID NO: 14579 - protein, 7 aa, synthetic construct
  REGION 1..7: note = Description of Artificial Sequence: Synthetic peptide
  REGION 1..7: note = XENP018927 vlCDR2
YASHRYT

SEQ ID NO: 14580 - protein, 9 aa, synthetic construct
  REGION 1..9: note = Description of Artificial Sequence: Synthetic peptide
  REGION 1..9: note = XENP018927 vlCDR3
QQDYSSPRT

SEQ ID NO: 14581 - protein, 249 aa, synthetic construct
  REGION 1..249: note = Description of Artificial Sequence: Synthetic polypeptide
  REGION 1..249: note = XENP018928 1G6_H2L5_scFv(GKPGS)4
QVQLVQSGAEVKKPGASVKVSCKASGFTFSNYWMNWVRQAPGQGLEWMGEIRLKSNNYATHYAEKFQGRVTMTRDDSTSTVYMELSSLRSEDTAVYYCTRYYGNYGGYFDVWGAGTLVTVSSGKPGSGKPGSGKPGSGKPGSSIVMTQSPDSLAVSLGERATINCKASQSVSNDVAWYQQKPGQSPKLLINYASHRYTGVPDRFTGSGYGTDFTLTISSLQAEDVAVYFCQQDYSSPRTFGGGTKVEIK

SEQ ID NO: 14582 - protein, 122 aa, synthetic construct; identical to SEQ ID NO: 14546
  REGION 1..122: note = Description of Artificial Sequence: Synthetic polypeptide
  REGION 1..122: note = VH of XENP018928

SEQ ID NO: 14583 - protein, 107 aa, synthetic construct; identical to SEQ ID NO: 14538
  REGION 1..107: note = Description of Artificial Sequence: Synthetic polypeptide
  REGION 1..107: note = VL of XENP018928

SEQ ID NO: 14584 - protein, 5 aa, synthetic construct
  REGION 1..5: note = Description of Artificial Sequence: Synthetic peptide
  REGION 1..5: note = XENP018928 vhCDR1
NYWMN

SEQ ID NO: 14585 - protein, 19 aa, synthetic construct
  REGION 1..19: note = Description of Artificial Sequence: Synthetic peptide
  REGION 1..19: note = XENP018928 vhCDR2
EIRLKSNNYATHYAEKFQG

SEQ ID NO: 14586 - protein, 11 aa, synthetic construct
  REGION 1..11: note = Description of Artificial Sequence: Synthetic peptide
  REGION 1..11: note = XENP018928 vhCDR3
YYGNYGGYFDV

SEQ ID NO: 14587 - protein, 11 aa, synthetic construct
  REGION 1..11: note = Description of Artificial Sequence: Synthetic peptide
  REGION 1..11: note = XENP018928 vlCDR1
KASQSVSNDVA

SEQ ID NO: 14588 - protein, 7 aa, synthetic construct
  REGION 1..7: note = Description of Artificial Sequence: Synthetic peptide
  REGION 1..7: note = XENP018928 vlCDR2
YASHRYT

SEQ ID NO: 14589 - protein, 9 aa, synthetic construct
  REGION 1..9: note = Description of Artificial Sequence: Synthetic peptide
  REGION 1..9: note = XENP018928 vlCDR3
QQDYSSPRT

SEQ ID NO: 14590 - protein, 249 aa, synthetic construct
  REGION 1..249: note = Description of Artificial Sequence: Synthetic polypeptide
  REGION 1..249: note = XENP018929 1G6_H3L1_scFv(GKPGS)4
EVQLLESGGGLVQPGGSLRLSCAASGFTFSNYWMNWVRQAPGKGLEWVSEIRLKSNNYATHYAESVKGRFTISRDDSKSTVYLQMNSLRAEDTAVYYCTRYYGNYGGYFDVWGAGTLVTVSSGKPGSGKPGSGKPGSGKPGSSIVMTQSPATLSVSPGERATLSCRASQSVSNDVAWYQQKPGQSPRLLINYASHRYTGVPDRFTGSGYGTEFTLTISSLQSEDFAVYFCQQDYSSPRTFGGGTKVEIK

SEQ ID NO: 14591 - protein, 122 aa, synthetic construct
  REGION 1..122: note = Description of Artificial Sequence: Synthetic polypeptide
  REGION 1..122: note = VH of XENP018929
EVQLLESGGGLVQPGGSLRLSCAASGFTFSNYWMNWVRQAPGKGLEWVSEIRLKSNNYATHYAESVKGRFTISRDDSKSTVYLQMNSLRAEDTAVYYCTRYYGNYGGYFDVWGAGTLVTVSS

SEQ ID NO: 14592 - protein, 107 aa, synthetic construct; identical to SEQ ID NO: 10923
  REGION 1..107: note = Description of Artificial Sequence: Synthetic polypeptide
  REGION 1..107: note = VL of XENP018929

SEQ ID NO: 14593 - protein, 5 aa, synthetic construct
  REGION 1..5: note = Description of Artificial Sequence: Synthetic peptide
  REGION 1..5: note = XENP018929 vhCDR1
NYWMN

SEQ ID NO: 14594 - protein, 19 aa, synthetic construct
  REGION 1..19: note = Description of Artificial Sequence: Synthetic peptide
  REGION 1..19: note = XENP018929 vhCDR2
EIRLKSNNYATHYAESVKG

SEQ ID NO: 14595 - protein, 11 aa, synthetic construct
  REGION 1..11: note = Description of Artificial Sequence: Synthetic peptide
  REGION 1..11: note = XENP018929 vhCDR3
YYGNYGGYFDV

SEQ ID NO: 14596 - protein, 11 aa, synthetic construct
  REGION 1..11: note = Description of Artificial Sequence: Synthetic peptide
  REGION 1..11: note = XENP018929 vlCDR1
RASQSVSNDVA

SEQ ID NO: 14597 - protein, 7 aa, synthetic construct
  REGION 1..7: note = Description of Artificial Sequence: Synthetic peptide
  REGION 1..7: note = XENP018929 vlCDR2
YASHRYT

SEQ ID NO: 14598 - protein, 9 aa, synthetic construct
  REGION 1..9: note = Description of Artificial Sequence: Synthetic peptide
  REGION 1..9: note = XENP018929 vlCDR3
QQDYSSPRT

SEQ ID NO: 14599 - protein, 249 aa, synthetic construct
  REGION 1..249: note = Description of Artificial Sequence: Synthetic polypeptide
  REGION 1..249: note = XENP018930 1G6_H3L2_scFv(GKPGS)4
EVQLLESGGGLVQPGGSLRLSCAASGFTFSNYWMNWVRQAPGKGLEWVSEIRLKSNNYATHYAESVKGRFTISRDDSKSTVYLQMNSLRAEDTAVYYCTRYYGNYGGYFDVWGAGTLVTVSSGKPGSGKPGSGKPGSGKPGSSIVMTQSPSSLSASVGDRVTITCRASQSVSNDVAWYQQKPGKSPKLLINYASHRYTGVPDRFTGSGYGTDFTLTISSLQPEDFATYFCQQDYSSPRTFGGGTKVEIK

SEQ ID NO: 14600 - protein, 122 aa, synthetic construct; identical to SEQ ID NO: 14591
  REGION 1..122: note = Description of Artificial Sequence: Synthetic polypeptide
  REGION 1..122: note = VH of XENP018930

SEQ ID NO: 14601 - protein, 107 aa, synthetic construct; identical to SEQ ID NO: 10932
  REGION 1..107: note = Description of Artificial Sequence: Synthetic polypeptide
  REGION 1..107: note = VL of XENP018930

SEQ ID NO: 14602 - protein, 5 aa, synthetic construct
  REGION 1..5: note = Description of Artificial Sequence: Synthetic peptide
  REGION 1..5: note = XENP018930 vhCDR1
NYWMN

SEQ ID NO: 14603 - protein, 19 aa, synthetic construct
  REGION 1..19: note = Description of Artificial Sequence: Synthetic peptide
  REGION 1..19: note = XENP018930 vhCDR2
EIRLKSNNYATHYAESVKG

SEQ ID NO: 14604 - protein, 11 aa, synthetic construct
  REGION 1..11: note = Description of Artificial Sequence: Synthetic peptide
  REGION 1..11: note = XENP018930 vhCDR3
YYGNYGGYFDV

SEQ ID NO: 14605 - protein, 11 aa, synthetic construct
  REGION 1..11: note = Description of Artificial Sequence: Synthetic peptide
  REGION 1..11: note = XENP018930 vlCDR1
RASQSVSNDVA

SEQ ID NO: 14606 - protein, 7 aa, synthetic construct
  REGION 1..7: note = Description of Artificial Sequence: Synthetic peptide
  REGION 1..7: note = XENP018930 vlCDR2
YASHRYT

SEQ ID NO: 14607 - protein, 9 aa, synthetic construct
  REGION 1..9: note = Description of Artificial Sequence: Synthetic peptide
  REGION 1..9: note = XENP018930 vlCDR3
QQDYSSPRT

SEQ ID NO: 14608 - protein, 249 aa, synthetic construct
  REGION 1..249: note = Description of Artificial Sequence: Synthetic polypeptide
  REGION 1..249: note = XENP018931 1G6_H3L3_scFv(GKPGS)4
EVQLLESGGGLVQPGGSLRLSCAASGFTFSNYWMNWVRQAPGKGLEWVSEIRLKSNNYATHYAESVKGRFTISRDDSKSTVYLQMNSLRAEDTAVYYCTRYYGNYGGYFDVWGAGTLVTVSSGKPGSGKPGSGKPGSGKPGSSIVMTQSPLSLPVTPGEPASISCRASQSVSNDVAWYLQKPGQSPQLLINYASHRYTGVPDRFTGSGYGTDFTLKISRVEAEDVGVYFCQQDYSSPRTFGGGTKVEIK

SEQ ID NO: 14609 - protein, 122 aa, synthetic construct; identical to SEQ ID NO: 14591
  REGION 1..122: note = Description of Artificial Sequence: Synthetic polypeptide
  REGION 1..122: note = VH of XENP018931

SEQ ID NO: 14610 - protein, 107 aa, synthetic construct; identical to SEQ ID NO: 14520
  REGION 1..107: note = Description of Artificial Sequence: Synthetic polypeptide
  REGION 1..107: note = VL of XENP018931

SEQ ID NO: 14611 - protein, 5 aa, synthetic construct
  REGION 1..5: note = Description of Artificial Sequence: Synthetic peptide
  REGION 1..5: note = XENP018931 vhCDR1
NYWMN

SEQ ID NO: 14612 - protein, 19 aa, synthetic construct
  REGION 1..19: note = Description of Artificial Sequence: Synthetic peptide
  REGION 1..19: note = XENP018931 vhCDR2
EIRLKSNNYATHYAESVKG

SEQ ID NO: 14613 - protein, 11 aa, synthetic construct
  REGION 1..11: note = Description of Artificial Sequence: Synthetic peptide
  REGION 1..11: note = XENP018931 vhCDR3
YYGNYGGYFDV

SEQ ID NO: 14614 - protein, 11 aa, synthetic construct
  REGION 1..11: note = Description of Artificial Sequence: Synthetic peptide
  REGION 1..11: note = XENP018931 vlCDR1
RASQSVSNDVA

SEQ ID NO: 14615 - protein, 7 aa, synthetic construct
  REGION 1..7: note = Description of Artificial Sequence: Synthetic peptide
  REGION 1..7: note = XENP018931 vlCDR2
YASHRYT

SEQ ID NO: 14616 - protein, 9 aa, synthetic construct
  REGION 1..9: note = Description of Artificial Sequence: Synthetic peptide
  REGION 1..9: note = XENP018931 vlCDR3
QQDYSSPRT

SEQ ID NO: 14617 - protein, 249 aa, synthetic construct
  REGION 1..249: note = Description of Artificial Sequence: Synthetic polypeptide
  REGION 1..249: note = XENP018932 1G6_H3L4_scFv(GKPGS)4
EVQLLESGGGLVQPGGSLRLSCAASGFTFSNYWMNWVRQAPGKGLEWVSEIRLKSNNYATHYAESVKGRFTISRDDSKSTVYLQMNSLRAEDTAVYYCTRYYGNYGGYFDVWGAGTLVTVSSGKPGSGKPGSGKPGSGKPGSSIVMTQSPGTLSLSPGERATLSCRASQSVSNDVAWYQQKPGQSPRLLINYASHRYTGVPDRFTGSGYGTDFTLTISRLEPEDFAVYFCQQDYSSPRTFGGGTKVEIK

SEQ ID NO: 14618 - protein, 122 aa, synthetic construct; identical to SEQ ID NO: 14591
  REGION 1..122: note = Description of Artificial Sequence: Synthetic polypeptide
  REGION 1..122: note = VH of XENP018932

SEQ ID NO: 14619 - protein, 107 aa, synthetic construct; identical to SEQ ID NO: 14529
  REGION 1..107: note = Description of Artificial Sequence: Synthetic polypeptide
  REGION 1..107: note = VL of XENP018932

SEQ ID NO: 14620 - protein, 5 aa, synthetic construct
  REGION 1..5: note = Description of Artificial Sequence: Synthetic peptide
  REGION 1..5: note = XENP018932 vhCDR1
NYWMN

SEQ ID NO: 14621 - protein, 19 aa, synthetic construct
  REGION 1..19: note = Description of Artificial Sequence: Synthetic peptide
  REGION 1..19: note = XENP018932 vhCDR2
EIRLKSNNYATHYAESVKG

SEQ ID NO: 14622 - protein, 11 aa, synthetic construct
  REGION 1..11: note = Description of Artificial Sequence: Synthetic peptide
  REGION 1..11: note = XENP018932 vhCDR3
YYGNYGGYFDV

SEQ ID NO: 14623 - protein, 11 aa, synthetic construct
  REGION 1..11: note = Description of Artificial Sequence: Synthetic peptide
  REGION 1..11: note = XENP018932 vlCDR1
RASQSVSNDVA

SEQ ID NO: 14624 - protein, 7 aa, synthetic construct
  REGION 1..7: note = Description of Artificial Sequence: Synthetic peptide
  REGION 1..7: note = XENP018932 vlCDR2
YASHRYT

SEQ ID NO: 14625 - protein, 9 aa, synthetic construct
  REGION 1..9: note = Description of Artificial Sequence: Synthetic peptide
  REGION 1..9: note = XENP018932 vlCDR3
QQDYSSPRT

SEQ ID NO: 14626 - protein, 249 aa, synthetic construct
  REGION 1..249: note = Description of Artificial Sequence: Synthetic polypeptide
  REGION 1..249: note = XENP018933 1G6_H3L5_scFv(GKPGS)4
EVQLLESGGGLVQPGGSLRLSCAASGFTFSNYWMNWVRQAPGKGLEWVSEIRLKSNNYATHYAESVKGRFTISRDDSKSTVYLQMNSLRAEDTAVYYCTRYYGNYGGYFDVWGAGTLVTVSSGKPGSGKPGSGKPGSGKPGSSIVMTQSPDSLAVSLGERATINCKASQSVSNDVAWYQQKPGQSPKLLINYASHRYTGVPDRFTGSGYGTDFTLTISSLQAEDVAVYFCQQDYSSPRTFGGGTKVEIK

SEQ ID NO: 14627 - protein, 122 aa, synthetic construct; identical to SEQ ID NO: 14591
  REGION 1..122: note = Description of Artificial Sequence: Synthetic polypeptide
  REGION 1..122: note = VH of XENP018933

SEQ ID NO: 14628 - protein, 107 aa, synthetic construct; identical to SEQ ID NO: 14538
  REGION 1..107: note = Description of Artificial Sequence: Synthetic polypeptide
  REGION 1..107: note = VL of XENP018933

SEQ ID NO: 14629 - protein, 5 aa, synthetic construct
  REGION 1..5: note = Description of Artificial Sequence: Synthetic peptide
  REGION 1..5: note = XENP018933 vhCDR1
NYWMN

SEQ ID NO: 14630 - protein, 19 aa, synthetic construct
  REGION 1..19: note = Description of Artificial Sequence: Synthetic peptide
  REGION 1..19: note = XENP018933 vhCDR2
EIRLKSNNYATHYAESVKG

SEQ ID NO: 14631 - protein, 11 aa, synthetic construct
  REGION 1..11: note = Description of Artificial Sequence: Synthetic peptide
  REGION 1..11: note = XENP018933 vhCDR3
YYGNYGGYFDV

SEQ ID NO: 14632 - protein, 11 aa, synthetic construct
  REGION 1..11: note = Description of Artificial Sequence: Synthetic peptide
  REGION 1..11: note = XENP018933 vlCDR1
KASQSVSNDVA

SEQ ID NO: 14633 - protein, 7 aa, synthetic construct
  REGION 1..7: note = Description of Artificial Sequence: Synthetic peptide
  REGION 1..7: note = XENP018933 vlCDR2
YASHRYT

SEQ ID NO: 14634 - protein, 9 aa, synthetic construct
  REGION 1..9: note = Description of Artificial Sequence: Synthetic peptide
  REGION 1..9: note = XENP018933 vlCDR3
QQDYSSPRT

SEQ ID NO: 14635 - protein, 249 aa, synthetic construct
  REGION 1..249: note = Description of Artificial Sequence: Synthetic polypeptide
  REGION 1..249: note = XENP018934 1G6_H4L1_scFv(GKPGS)4
EVQLVESGGGLVQPGGSLKLSCAASGFTFSNYWMNWVRQASGKGLEWVGEIRLKSNNYATHYAESVKGRFTISRDDSKSTVYLQMNSLKTEDTAVYYCTRYYGNYGGYFDVWGAGTLVTVSSGKPGSGKPGSGKPGSGKPGSSIVMTQSPATLSVSPGERATLSCRASQSVSNDVAWYQQKPGQSPRLLINYASHRYTGVPDRFTGSGYGTEFTLTISSLQSEDFAVYFCQQDYSSPRTFGGGTKVEIK

SEQ ID NO: 14636 - protein, 122 aa, synthetic construct
  REGION 1..122: note = Description of Artificial Sequence: Synthetic polypeptide
  REGION 1..122: note = VH of XENP018934
EVQLVESGGGLVQPGGSLKLSCAASGFTFSNYWMNWVRQASGKGLEWVGEIRLKSNNYATHYAESVKGRFTISRDDSKSTVYLQMNSLKTEDTAVYYCTRYYGNYGGYFDVWGAGTLVTVSS

SEQ ID NO: 14637 - protein, 107 aa, synthetic construct; identical to SEQ ID NO: 10923
  REGION 1..107: note = Description of Artificial Sequence: Synthetic polypeptide
  REGION 1..107: note = VL of XENP018934

SEQ ID NO: 14638 - protein, 5 aa, synthetic construct
  REGION 1..5: note = Description of Artificial Sequence: Synthetic peptide
  REGION 1..5: note = XENP018934 vhCDR1
NYWMN

SEQ ID NO: 14639 - protein, 19 aa, synthetic construct
  REGION 1..19: note = Description of Artificial Sequence: Synthetic peptide
  REGION 1..19: note = XENP018934 vhCDR2
EIRLKSNNYATHYAESVKG

SEQ ID NO: 14640 - protein, 11 aa, synthetic construct
  REGION 1..11: note = Description of Artificial Sequence: Synthetic peptide
  REGION 1..11: note = XENP018934 vhCDR3
YYGNYGGYFDV

SEQ ID NO: 14641 - protein, 11 aa, synthetic construct
  REGION 1..11: note = Description of Artificial Sequence: Synthetic peptide
  REGION 1..11: note = XENP018934 vlCDR1
RASQSVSNDVA

SEQ ID NO: 14642 - protein, 7 aa, synthetic construct
  REGION 1..7: note = Description of Artificial Sequence: Synthetic peptide
  REGION 1..7: note = XENP018934 vlCDR2
YASHRYT

SEQ ID NO: 14643 - protein, 9 aa, synthetic construct
  REGION 1..9: note = Description of Artificial Sequence: Synthetic peptide
  REGION 1..9: note = XENP018934 vlCDR3
QQDYSSPRT

SEQ ID NO: 14644 - protein, 249 aa, synthetic construct
  REGION 1..249: note = Description of Artificial Sequence: Synthetic polypeptide
  REGION 1..249: note = XENP018935 1G6_H4L2_scFv(GKPGS)4
EVQLVESGGGLVQPGGSLKLSCAASGFTFSNYWMNWVRQASGKGLEWVGEIRLKSNNYATHYAESVKGRFTISRDDSKSTVYLQMNSLKTEDTAVYYCTRYYGNYGGYFDVWGAGTLVTVSSGKPGSGKPGSGKPGSGKPGSSIVMTQSPSSLSASVGDRVTITCRASQSVSNDVAWYQQKPGKSPKLLINYASHRYTGVPDRFTGSGYGTDFTLTISSLQPEDFATYFCQQDYSSPRTFGGGTKVEIK

SEQ ID NO: 14645 - protein, 122 aa, synthetic construct; identical to SEQ ID NO: 14636
  REGION 1..122: note = Description of Artificial Sequence: Synthetic polypeptide
  REGION 1..122: note = VH of XENP018935

SEQ ID NO: 14646 - protein, 107 aa, synthetic construct; identical to SEQ ID NO: 10932
  REGION 1..107: note = Description of Artificial Sequence: Synthetic polypeptide
  REGION 1..107: note = VL of XENP018935

SEQ ID NO: 14647 - protein, 5 aa, synthetic construct
  REGION 1..5: note = Description of Artificial Sequence: Synthetic peptide
  REGION 1..5: note = XENP018935 vhCDR1
NYWMN

SEQ ID NO: 14648 - protein, 19 aa, synthetic construct
  REGION 1..19: note = Description of Artificial Sequence: Synthetic peptide
  REGION 1..19: note = XENP018935 vhCDR2
EIRLKSNNYATHYAESVKG

SEQ ID NO: 14649 - protein, 11 aa, synthetic construct
  REGION 1..11: note = Description of Artificial Sequence: Synthetic peptide
  REGION 1..11: note = XENP018935 vhCDR3
YYGNYGGYFDV

SEQ ID NO: 14650 - protein, 11 aa, synthetic construct
  REGION 1..11: note = Description of Artificial Sequence: Synthetic peptide
  REGION 1..11: note = XENP018935 vlCDR1
RASQSVSNDVA

SEQ ID NO: 14651 - protein, 7 aa, synthetic construct
  REGION 1..7: note = Description of Artificial Sequence: Synthetic peptide
  REGION 1..7: note = XENP018935 vlCDR2
YASHRYT

SEQ ID NO: 14652 - protein, 9 aa, synthetic construct
  REGION 1..9: note = Description of Artificial Sequence: Synthetic peptide
  REGION 1..9: note = XENP018935 vlCDR3
QQDYSSPRT

SEQ ID NO: 14653 - protein, 249 aa, synthetic construct
  REGION 1..249: note = Description of Artificial Sequence: Synthetic polypeptide
  REGION 1..249: note = XENP018936 1G6_H4L3_scFv(GKPGS)4
EVQLVESGGGLVQPGGSLKLSCAASGFTFSNYWMNWVRQASGKGLEWVGEIRLKSNNYATHYAESVKGRFTISRDDSKSTVYLQMNSLKTEDTAVYYCTRYYGNYGGYFDVWGAGTLVTVSSGKPGSGKPGSGKPGSGKPGSSIVMTQSPLSLPVTPGEPASISCRASQSVSNDVAWYLQKPGQSPQLLINYASHRYTGVPDRFTGSGYGTDFTLKISRVEAEDVGVYFCQQDYSSPRTFGGGTKVEIK

SEQ ID NO: 14654 - protein, 122 aa, synthetic construct; identical to SEQ ID NO: 14636
  REGION 1..122: note = Description of Artificial Sequence: Synthetic polypeptide
  REGION 1..122: note = VH of XENP018936

SEQ ID NO: 14655 - protein, 107 aa, synthetic construct; identical to SEQ ID NO: 14520
  REGION 1..107: note = Description of Artificial Sequence: Synthetic polypeptide
  REGION 1..107: note = VL of XENP018936

SEQ ID NO: 14656 - protein, 5 aa, synthetic construct
  REGION 1..5: note = Description of Artificial Sequence: Synthetic peptide
  REGION 1..5: note = XENP018936 vhCDR1
NYWMN

SEQ ID NO: 14657 - protein, 19 aa, synthetic construct
  REGION 1..19: note = Description of Artificial Sequence: Synthetic peptide
  REGION 1..19: note = XENP018936 vhCDR2
EIRLKSNNYATHYAESVKG

SEQ ID NO: 14658 - protein, 11 aa, synthetic construct
  REGION 1..11: note = Description of Artificial Sequence: Synthetic peptide
  REGION 1..11: note = XENP018936 vhCDR3
YYGNYGGYFDV

SEQ ID NO: 14659 - protein, 11 aa, synthetic construct
  REGION 1..11: note = Description of Artificial Sequence: Synthetic peptide
  REGION 1..11: note = XENP018936 vlCDR1
RASQSVSNDVA

SEQ ID NO: 14660 - protein, 7 aa, synthetic construct
  REGION 1..7: note = Description of Artificial Sequence: Synthetic peptide
  REGION 1..7: note = XENP018936 vlCDR2
YASHRYT

SEQ ID NO: 14661 - protein, 9 aa, synthetic construct
  REGION 1..9: note = Description of Artificial Sequence: Synthetic peptide
  REGION 1..9: note = XENP018936 vlCDR3
QQDYSSPRT

SEQ ID NO: 14662 - protein, 249 aa, synthetic construct
  REGION 1..249: note = Description of Artificial Sequence: Synthetic polypeptide
  REGION 1..249: note = XENP018937 1G6_H4L4_scFv(GKPGS)4
EVQLVESGGGLVQPGGSLKLSCAASGFTFSNYWMNWVRQASGKGLEWVGEIRLKSNNYATHYAESVKGRFTISRDDSKSTVYLQMNSLKTEDTAVYYCTRYYGNYGGYFDVWGAGTLVTVSSGKPGSGKPGSGKPGSGKPGSSIVMTQSPGTLSLSPGERATLSCRASQSVSNDVAWYQQKPGQSPRLLINYASHRYTGVPDRFTGSGYGTDFTLTISRLEPEDFAVYFCQQDYSSPRTFGGGTKVEIK

SEQ ID NO: 14663 - protein, 122 aa, synthetic construct; identical to SEQ ID NO: 14636
  REGION 1..122: note = Description of Artificial Sequence: Synthetic polypeptide
  REGION 1..122: note = VH of XENP018937

SEQ ID NO: 14664 - protein, 107 aa, synthetic construct; identical to SEQ ID NO: 14529
  REGION 1..107: note = Description of Artificial Sequence: Synthetic polypeptide
  REGION 1..107: note = VL of XENP018937

SEQ ID NO: 14665 - protein, 5 aa, synthetic construct
  REGION 1..5: note = Description of Artificial Sequence: Synthetic peptide
  REGION 1..5: note = XENP018937 vhCDR1
NYWMN

SEQ ID NO: 14666 - protein, 19 aa, synthetic construct
  REGION 1..19: note = Description of Artificial Sequence: Synthetic peptide
  REGION 1..19: note = XENP018937 vhCDR2
EIRLKSNNYATHYAESVKG

SEQ ID NO: 14667 - protein, 11 aa, synthetic construct
  REGION 1..11: note = Description of Artificial Sequence: Synthetic peptide
  REGION 1..11: note = XENP018937 vhCDR3
YYGNYGGYFDV

SEQ ID NO: 14668 - protein, 11 aa, synthetic construct
  REGION 1..11: note = Description of Artificial Sequence: Synthetic peptide
  REGION 1..11: note = XENP018937 vlCDR1
RASQSVSNDVA

SEQ ID NO: 14669 - protein, 7 aa, synthetic construct
  REGION 1..7: note = Description of Artificial Sequence: Synthetic peptide
  REGION 1..7: note = XENP018937 vlCDR2
YASHRYT

SEQ ID NO: 14670 - protein, 9 aa, synthetic construct
  REGION 1..9: note = Description of Artificial Sequence: Synthetic peptide
  REGION 1..9: note = XENP018937 vlCDR3
QQDYSSPRT

SEQ ID NO: 14671 - protein, 249 aa, synthetic construct
  REGION 1..249: note = Description of Artificial Sequence: Synthetic polypeptide
  REGION 1..249: note = XENP018938 1G6_H4L5_scFv(GKPGS)4
EVQLVESGGGLVQPGGSLKLSCAASGFTFSNYWMNWVRQASGKGLEWVGEIRLKSNNYATHYAESVKGRFTISRDDSKSTVYLQMNSLKTEDTAVYYCTRYYGNYGGYFDVWGAGTLVTVSSGKPGSGKPGSGKPGSGKPGSSIVMTQSPDSLAVSLGERATINCKASQSVSNDVAWYQQKPGQSPKLLINYASHRYTGVPDRFTGSGYGTDFTLTISSLQAEDVAVYFCQQDYSSPRTFGGGTKVEIK

SEQ ID NO: 14672 - protein, 122 aa, synthetic construct; identical to SEQ ID NO: 14636
  REGION 1..122: note = Description of Artificial Sequence: Synthetic polypeptide
  REGION 1..122: note = VH of XENP018938

SEQ ID NO: 14673 - protein, 107 aa, synthetic construct; identical to SEQ ID NO: 14538
  REGION 1..107: note = Description of Artificial Sequence: Synthetic polypeptide
  REGION 1..107: note = VL of XENP018938

SEQ ID NO: 14674 - protein, 5 aa, synthetic construct
  REGION 1..5: note = Description of Artificial Sequence: Synthetic peptide
  REGION 1..5: note = XENP018938 vhCDR1
NYWMN

SEQ ID NO: 14675 - protein, 19 aa, synthetic construct
  REGION 1..19: note = Description of Artificial Sequence: Synthetic peptide
  REGION 1..19: note = XENP018938 vhCDR2
EIRLKSNNYATHYAESVKG

SEQ ID NO: 14676 - protein, 11 aa, synthetic construct
  REGION 1..11: note = Description of Artificial Sequence: Synthetic peptide
  REGION 1..11: note = XENP018938 vhCDR3
YYGNYGGYFDV

SEQ ID NO: 14677 - protein, 11 aa, synthetic construct
  REGION 1..11: note = Description of Artificial Sequence: Synthetic peptide
  REGION 1..11: note = XENP018938 vlCDR1
KASQSVSNDVA

SEQ ID NO: 14678 - protein, 7 aa, synthetic construct
  REGION 1..7: note = Description of Artificial Sequence: Synthetic peptide
  REGION 1..7: note = XENP018938 vlCDR2
YASHRYT

SEQ ID NO: 14679 - protein, 9 aa, synthetic construct
  REGION 1..9: note = Description of Artificial Sequence: Synthetic peptide
  REGION 1..9: note = XENP018938 vlCDR3
QQDYSSPRT

SEQ ID NO: 14680 - protein, 249 aa, synthetic construct
  REGION 1..249: note = Description of Artificial Sequence: Synthetic polypeptide
  REGION 1..249: note = XENP019064 1G6_H1.239_L1_scFv(GKPGS)4
EVQLKESGGGLVKPGGSLRLSCAASGFTFSNYWMNWVRQAPGKGLEWVGEIRLKSNNYATHYAEPVKGRFTISRDDSKSTVYLQMNSLKTEDTAVYYCTRYYGNYGGYFDVWGAGTLVTVSSGKPGSGKPGSGKPGSGKPGSSIVMTQSPATLSVSPGERATLSCRASQSVSNDVAWYQQKPGQSPRLLINYASHRYTGVPDRFTGSGYGTEFTLTISSLQSEDFAVYFCQQDYSSPRTFGGGTKVEIK

SEQ ID NO: 14681 - protein, 122 aa, synthetic construct
  REGION 1..122: note = Description of Artificial Sequence: Synthetic polypeptide
  REGION 1..122: note = VH of XENP019064
EVQLKESGGGLVKPGGSLRLSCAASGFTFSNYWMNWVRQAPGKGLEWVGEIRLKSNNYATHYAEPVKGRFTISRDDSKSTVYLQMNSLKTEDTAVYYCTRYYGNYGGYFDVWGAGTLVTVSS

SEQ ID NO: 14682 - protein, 107 aa, synthetic construct; identical to SEQ ID NO: 10923
  REGION 1..107: note = Description of Artificial Sequence: Synthetic polypeptide
  REGION 1..107: note = VL of XENP019064

SEQ ID NO: 14683 - protein, 5 aa, synthetic construct
  REGION 1..5: note = Description of Artificial Sequence: Synthetic peptide
  REGION 1..5: note = XENP019064 vhCDR1
NYWMN

SEQ ID NO: 14684 - protein, 19 aa, synthetic construct
  REGION 1..19: note = Description of Artificial Sequence: Synthetic peptide
  REGION 1..19: note = XENP019064 vhCDR2
EIRLKSNNYATHYAEPVKG

SEQ ID NO: 14685 - protein, 11 aa, synthetic construct
  REGION 1..11: note = Description of Artificial Sequence: Synthetic peptide
  REGION 1..11: note = XENP019064 vhCDR3
YYGNYGGYFDV

SEQ ID NO: 14686 - protein, 11 aa, synthetic construct
  REGION 1..11: note = Description of Artificial Sequence: Synthetic peptide
  REGION 1..11: note = XENP019064 vlCDR1
RASQSVSNDVA

SEQ ID NO: 14687 - protein, 7 aa, synthetic construct
  REGION 1..7: note = Description of Artificial Sequence: Synthetic peptide
  REGION 1..7: note = XENP019064 vlCDR2
YASHRYT

SEQ ID NO: 14688 - protein, 9 aa, synthetic construct
  REGION 1..9: note = Description of Artificial Sequence: Synthetic peptide
  REGION 1..9: note = XENP019064 vlCDR3
QQDYSSPRT

SEQ ID NO: 14689 - protein, 249 aa, synthetic construct
  REGION 1..249: note = Description of Artificial Sequence: Synthetic polypeptide
  REGION 1..249: note = XENP019065 1G6_H1.240_L1_scFv(GKPGS)4
EVQLVESGGGLVKPGESLRLSCAASGFTFSNYWMNWVRQAPGKGLEWVGEIRLKSNNYATHYAEPVKGRFTISRDDSKSTVYLQMNSLKTEDTAVYYCTRYYGNYGGYFDVWGAGTLVTVSSGKPGSGKPGSGKPGSGKPGSSIVMTQSPATLSVSPGERATLSCRASQSVSNDVAWYQQKPGQSPRLLINYASHRYTGVPDRFTGSGYGTEFTLTISSLQSEDFAVYFCQQDYSSPRTFGGGTKVEIK

SEQ ID NO: 14690 - protein, 122 aa, synthetic construct
  REGION 1..122: note = Description of Artificial Sequence: Synthetic polypeptide
  REGION 1..122: note = VH of XENP019065
EVQLVESGGGLVKPGESLRLSCAASGFTFSNYWMNWVRQAPGKGLEWVGEIRLKSNNYATHYAEPVKGRFTISRDDSKSTVYLQMNSLKTEDTAVYYCTRYYGNYGGYFDVWGAGTLVTVSS

SEQ ID NO: 14691 - protein, 107 aa, synthetic construct; identical to SEQ ID NO: 10923
  REGION 1..107: note = Description of Artificial Sequence: Synthetic polypeptide
  REGION 1..107: note = VL of XENP019065

SEQ ID NO: 14692 - protein, 5 aa, synthetic construct
  REGION 1..5: note = Description of Artificial Sequence: Synthetic peptide
  REGION 1..5: note = XENP019065 vhCDR1
NYWMN

SEQ ID NO: 14693 - protein, 19 aa, synthetic construct
  REGION 1..19: note = Description of Artificial Sequence: Synthetic peptide
  REGION 1..19: note = XENP019065 vhCDR2
EIRLKSNNYATHYAEPVKG

SEQ ID NO: 14694 - protein, 11 aa, synthetic construct
  REGION 1..11: note = Description of Artificial Sequence: Synthetic peptide
  REGION 1..11: note = XENP019065 vhCDR3
YYGNYGGYFDV

SEQ ID NO: 14695 - protein, 11 aa, synthetic construct
  REGION 1..11: note = Description of Artificial Sequence: Synthetic peptide
  REGION 1..11: note = XENP019065 vlCDR1
RASQSVSNDVA

SEQ ID NO: 14696 - protein, 7 aa, synthetic construct
  REGION 1..7: note = Description of Artificial Sequence: Synthetic peptide
  REGION 1..7: note = XENP019065 vlCDR2
YASHRYT

SEQ ID NO: 14697 - protein, 9 aa, synthetic construct
  REGION 1..9: note = Description of Artificial Sequence: Synthetic peptide
  REGION 1..9: note = XENP019065 vlCDR3
QQDYSSPRT

SEQ ID NO: 14698 - protein, 249 aa, synthetic construct
  REGION 1..249: note = Description of Artificial Sequence: Synthetic polypeptide
  REGION 1..249: note = XENP019066 1G6_H1.241_L1_scFv(GKPGS)4
EVQLVESGGGLVKPGGSLRLTCAASGFTFSNYWMNWVRQAPGKGLEWVGEIRLKSNNYATHYAEPVKGRFTISRDDSKSTVYLQMNSLKTEDTAVYYCTRYYGNYGGYFDVWGAGTLVTVSSGKPGSGKPGSGKPGSGKPGSSIVMTQSPATLSVSPGERATLSCRASQSVSNDVAWYQQKPGQSPRLLINYASHRYTGVPDRFTGSGYGTEFTLTISSLQSEDFAVYFCQQDYSSPRTFGGGTKVEIK

SEQ ID NO: 14699 - protein, 122 aa, synthetic construct
  REGION 1..122: note = Description of Artificial Sequence: Synthetic polypeptide
  REGION 1..122: note = VH of XENP019066
EVQLVESGGGLVKPGGSLRLTCAASGFTFSNYWMNWVRQAPGKGLEWVGEIRLKSNNYATHYAEPVKGRFTISRDDSKSTVYLQMNSLKTEDTAVYYCTRYYGNYGGYFDVWGAGTLVTVSS

SEQ ID NO: 14700 - protein, 107 aa, synthetic construct; identical to SEQ ID NO: 10923
  REGION 1..107: note = Description of Artificial Sequence: Synthetic polypeptide
  REGION 1..107: note = VL of XENP019066

SEQ ID NO: 14701 - protein, 5 aa, synthetic construct
  REGION 1..5: note = Description of Artificial Sequence: Synthetic peptide
  REGION 1..5: note = XENP019066 vhCDR1
NYWMN

SEQ ID NO: 14702 - protein, 19 aa, synthetic construct
  REGION 1..19: note = Description of Artificial Sequence: Synthetic peptide
  REGION 1..19: note = XENP019066 vhCDR2
EIRLKSNNYATHYAEPVKG

SEQ ID NO: 14703 - protein, 11 aa, synthetic construct
  REGION 1..11: note = Description of Artificial Sequence: Synthetic peptide
  REGION 1..11: note = XENP019066 vhCDR3
YYGNYGGYFDV

SEQ ID NO: 14704 - protein, 11 aa, synthetic construct
  REGION 1..11: note = Description of Artificial Sequence: Synthetic peptide
  REGION 1..11: note = XENP019066 vlCDR1
RASQSVSNDVA

SEQ ID NO: 14705 - protein, 7 aa, synthetic construct
  REGION 1..7: note = Description of Artificial Sequence: Synthetic peptide
  REGION 1..7: note = XENP019066 vlCDR2
YASHRYT

SEQ ID NO: 14706 - protein, 9 aa, synthetic construct
  REGION 1..9: note = Description of Artificial Sequence: Synthetic peptide
  REGION 1..9: note = XENP019066 vlCDR3
QQDYSSPRT

SEQ ID NO: 14707 - protein, 249 aa, synthetic construct
  REGION 1..249: note = Description of Artificial Sequence: Synthetic polypeptide
  REGION 1..249: note = XENP019067 1G6_H1.242_L1_scFv(GKPGS)4
EVQLVESGGGLVKPGGSLRLVCAASGFTFSNYWMNWVRQAPGKGLEWVGEIRLKSNNYATHYAEPVKGRFTISRDDSKSTVYLQMNSLKTEDTAVYYCTRYYGNYGGYFDVWGAGTLVTVSSGKPGSGKPGSGKPGSGKPGSSIVMTQSPATLSVSPGERATLSCRASQSVSNDVAWYQQKPGQSPRLLINYASHRYTGVPDRFTGSGYGTEFTLTISSLQSEDFAVYFCQQDYSSPRTFGGGTKVEIK

SEQ ID NO: 14708 - protein, 122 aa, synthetic construct
  REGION 1..122: note = Description of Artificial Sequence: Synthetic polypeptide
  REGION 1..122: note = VH of XENP019067
EVQLVESGGGLVKPGGSLRLVCAASGFTFSNYWMNWVRQAPGKGLEWVGEIRLKSNNYATHYAEPVKGRFTISRDDSKSTVYLQMNSLKTEDTAVYYCTRYYGNYGGYFDVWGAGTLVTVSS

SEQ ID NO: 14709 - protein, 107 aa, synthetic construct; identical to SEQ ID NO: 10923
  REGION 1..107: note = Description of Artificial Sequence: Synthetic polypeptide
  REGION 1..107: note = VL of XENP019067

SEQ ID NO: 14710 - protein, 5 aa, synthetic construct
  REGION 1..5: note = Description of Artificial Sequence: Synthetic peptide
  REGION 1..5: note = XENP019067 vhCDR1
NYWMN

SEQ ID NO: 14711 - protein, 19 aa, synthetic construct
  REGION 1..19: note = Description of Artificial Sequence: Synthetic peptide
  REGION 1..19: note = XENP019067 vhCDR2
EIRLKSNNYATHYAEPVKG

SEQ ID NO: 14712 - protein, 11 aa, synthetic construct
  REGION 1..11: note = Description of Artificial Sequence: Synthetic peptide
  REGION 1..11: note = XENP019067 vhCDR3
YYGNYGGYFDV

SEQ ID NO: 14713 - protein, 11 aa, synthetic construct
  REGION 1..11: note = Description of Artificial Sequence: Synthetic peptide
  REGION 1..11: note = XENP019067 vlCDR1
RASQSVSNDVA

SEQ ID NO: 14714 - protein, 7 aa, synthetic construct
  REGION 1..7: note = Description of Artificial Sequence: Synthetic peptide
  REGION 1..7: note = XENP019067 vlCDR2
YASHRYT

SEQ ID NO: 14715 - protein, 9 aa, synthetic construct
  REGION 1..9: note = Description of Artificial Sequence: Synthetic peptide
  REGION 1..9: note = XENP019067 vlCDR3
QQDYSSPRT

SEQ ID NO: 14716 - protein, 249 aa, synthetic construct
  REGION 1..249: note = Description of Artificial Sequence: Synthetic polypeptide
  REGION 1..249: note = XENP019068 1G6_H1.243_L1_scFv(GKPGS)4
EVQLVESGGGLVKPGGSLRLSCAASGFTLSNYWMNWVRQAPGKGLEWVGEIRLKSNNYATHYAEPVKGRFTISRDDSKSTVYLQMNSLKTEDTAVYYCTRYYGNYGGYFDVWGAGTLVTVSSGKPGSGKPGSGKPGSGKPGSSIVMTQSPATLSVSPGERATLSCRASQSVSNDVAWYQQKPGQSPRLLINYASHRYTGVPDRFTGSGYGTEFTLTISSLQSEDFAVYFCQQDYSSPRTFGGGTKVEIK

SEQ ID NO: 14717 - protein, 122 aa, synthetic construct
  REGION 1..122: note = Description of Artificial Sequence: Synthetic polypeptide
  REGION 1..122: note = VH of XENP019068
EVQLVESGGGLVKPGGSLRLSCAASGFTLSNYWMNWVRQAPGKGLEWVGEIRLKSNNYATHYAEPVKGRFTISRDDSKSTVYLQMNSLKTEDTAVYYCTRYYGNYGGYFDVWGAGTLVTVSS

SEQ ID NO: 14718 - protein, 107 aa, synthetic construct; identical to SEQ ID NO: 10923
  REGION 1..107: note = Description of Artificial Sequence: Synthetic polypeptide
  REGION 1..107: note = VL of XENP019068

SEQ ID NO: 14719 - protein, 5 aa, synthetic construct
  REGION 1..5: note = Description of Artificial Sequence: Synthetic peptide
  REGION 1..5: note = XENP019068 vhCDR1
NYWMN

SEQ ID NO: 14720 - protein, 19 aa, synthetic construct
  REGION 1..19: note = Description of Artificial Sequence: Synthetic peptide
  REGION 1..19: note = XENP019068 vhCDR2
EIRLKSNNYATHYAEPVKG

SEQ ID NO: 14721 - protein, 11 aa, synthetic construct
  REGION 1..11: note = Description of Artificial Sequence: Synthetic peptide
  REGION 1..11: note = XENP019068 vhCDR3
YYGNYGGYFDV

SEQ ID NO: 14722 - protein, 11 aa, synthetic construct
  REGION 1..11: note = Description of Artificial Sequence: Synthetic peptide
  REGION 1..11: note = XENP019068 vlCDR1
RASQSVSNDVA

SEQ ID NO: 14723 - protein, 7 aa, synthetic construct
  REGION 1..7: note = Description of Artificial Sequence: Synthetic peptide
  REGION 1..7: note = XENP019068 vlCDR2
YASHRYT

SEQ ID NO: 14724 - protein, 9 aa, synthetic construct
  REGION 1..9: note = Description of Artificial Sequence: Synthetic peptide
  REGION 1..9: note = XENP019068 vlCDR3
QQDYSSPRT

SEQ ID NO: 14725 - protein, 249 aa, synthetic construct
  REGION 1..249: note = Description of Artificial Sequence: Synthetic polypeptide
  REGION 1..249: note = XENP019069 1G6_H1.244_L1_scFv(GKPGS)4
EVQLVESGGGLVKPGGSLRLSCAASGFTFSNYWMNWVRQAPGKGLQWVGEIRLKSNNYATHYAEPVKGRFTISRDDSKSTVYLQMNSLKTEDTAVYYCTRYYGNYGGYFDVWGAGTLVTVSSGKPGSGKPGSGKPGSGKPGSSIVMTQSPATLSVSPGERATLSCRASQSVSNDVAWYQQKPGQSPRLLINYASHRYTGVPDRFTGSGYGTEFTLTISSLQSEDFAVYFCQQDYSSPRTFGGGTKVEIK

SEQ ID NO: 14726 - protein, 122 aa, synthetic construct
  REGION 1..122: note = Description of Artificial Sequence: Synthetic polypeptide
  REGION 1..122: note = VH of XENP019069
EVQLVESGGGLVKPGGSLRLSCAASGFTFSNYWMNWVRQAPGKGLQWVGEIRLKSNNYATHYAEPVKGRFTISRDDSKSTVYLQMNSLKTEDTAVYYCTRYYGNYGGYFDVWGAGTLVTVSS

SEQ ID NO: 14727 - protein, 107 aa, synthetic construct; identical to SEQ ID NO: 10923
  REGION 1..107: note = Description of Artificial Sequence: Synthetic polypeptide
  REGION 1..107: note = VL of XENP019069

SEQ ID NO: 14728 - protein, 5 aa, synthetic construct
  REGION 1..5: note = Description of Artificial Sequence: Synthetic peptide
  REGION 1..5: note = XENP019069 vhCDR1
NYWMN

SEQ ID NO: 14729 - protein, 19 aa, synthetic construct
  REGION 1..19: note = Description of Artificial Sequence: Synthetic peptide
  REGION 1..19: note = XENP019069 vhCDR2
EIRLKSNNYATHYAEPVKG

SEQ ID NO: 14730 - protein, 11 aa, synthetic construct
  REGION 1..11: note = Description of Artificial Sequence: Synthetic peptide
  REGION 1..11: note = XENP019069 vhCDR3
YYGNYGGYFDV

SEQ ID NO: 14731 - protein, 11 aa, synthetic construct
  REGION 1..11: note = Description of Artificial Sequence: Synthetic peptide
  REGION 1..11: note = XENP019069 vlCDR1
RASQSVSNDVA

SEQ ID NO: 14732 - protein, 7 aa, synthetic construct
  REGION 1..7: note = Description of Artificial Sequence: Synthetic peptide
  REGION 1..7: note = XENP019069 vlCDR2
YASHRYT

SEQ ID NO: 14733 - protein, 9 aa, synthetic construct
  REGION 1..9: note = Description of Artificial Sequence: Synthetic peptide
  REGION 1..9: note = XENP019069 vlCDR3
QQDYSSPRT

SEQ ID NO: 14734 - protein, 249 aa, synthetic construct
  REGION 1..249: note = Description of Artificial Sequence: Synthetic polypeptide
  REGION 1..249: note = XENP019070 1G6_H1.245_L1_scFv(GKPGS)4
EVQLVESGGGLVKPGGSLRLSCAASGFTFSNYWMNWVRQAPGKGLEWIGEIRLKSNNYATHYAEPVKGRFTISRDDSKSTVYLQMNSLKTEDTAVYYCTRYYGNYGGYFDVWGAGTLVTVSSGKPGSGKPGSGKPGSGKPGSSIVMTQSPATLSVSPGERATLSCRASQSVSNDVAWYQQKPGQSPRLLINYASHRYTGVPDRFTGSGYGTEFTLTISSLQSEDFAVYFCQQDYSSPRTFGGGTKVEIK

SEQ ID NO: 14735 - protein, 122 aa, synthetic construct
  REGION 1..122: note = Description of Artificial Sequence: Synthetic polypeptide
  REGION 1..122: note = VH of XENP019070
EVQLVESGGGLVKPGGSLRLSCAASGFTFSNYWMNWVRQAPGKGLEWIGEIRLKSNNYATHYAEPVKGRFTISRDDSKSTVYLQMNSLKTEDTAVYYCTRYYGNYGGYFDVWGAGTLVTVSS

SEQ ID NO: 14736 - protein, 107 aa, synthetic construct; identical to SEQ ID NO: 10923
  REGION 1..107: note = Description of Artificial Sequence: Synthetic polypeptide
  REGION 1..107: note = VL of XENP019070

SEQ ID NO: 14737 - protein, 5 aa, synthetic construct
  REGION 1..5: note = Description of Artificial Sequence: Synthetic peptide
  REGION 1..5: note = XENP019070 vhCDR1
NYWMN

SEQ ID NO: 14738 - protein, 19 aa, synthetic construct
  REGION 1..19: note = Description of Artificial Sequence: Synthetic peptide
  REGION 1..19: note = XENP019070 vhCDR2
EIRLKSNNYATHYAEPVKG

SEQ ID NO: 14739 - protein, 11 aa, synthetic construct
  REGION 1..11: note = Description of Artificial Sequence: Synthetic peptide
  REGION 1..11: note = XENP019070 vhCDR3
YYGNYGGYFDV

SEQ ID NO: 14740 - protein, 11 aa, synthetic construct
  REGION 1..11: note = Description of Artificial Sequence: Synthetic peptide
  REGION 1..11: note = XENP019070 vlCDR1
RASQSVSNDVA

SEQ ID NO: 14741 - protein, 7 aa, synthetic construct
  REGION 1..7: note = Description of Artificial Sequence: Synthetic peptide
  REGION 1..7: note = XENP019070 vlCDR2
YASHRYT

SEQ ID NO: 14742 - protein, 9 aa, synthetic construct
  REGION 1..9: note = Description of Artificial Sequence: Synthetic peptide
  REGION 1..9: note = XENP019070 vlCDR3
QQDYSSPRT

SEQ ID NO: 14743 - protein, 249 aa, synthetic construct
  REGION 1..249: note = Description of Artificial Sequence: Synthetic polypeptide
  REGION 1..249: note = XENP019071 1G6_H1.246_L1_scFv(GKPGS)4
EVQLVESGGGLVKPGGSLRLSCAASGFTFSNYWMNWVRQAPGKGLEWMGEIRLKSNNYATHYAEPVKGRFTISRDDSKSTVYLQMNSLKTEDTAVYYCTRYYGNYGGYFDVWGAGTLVTVSSGKPGSGKPGSGKPGSGKPGSSIVMTQSPATLSVSPGERATLSCRASQSVSNDVAWYQQKPGQSPRLLINYASHRYTGVPDRFTGSGYGTEFTLTISSLQSEDFAVYFCQQDYSSPRTFGGGTKVEIK

SEQ ID NO: 14744 - protein, 122 aa, synthetic construct
  REGION 1..122: note = Description of Artificial Sequence: Synthetic polypeptide
  REGION 1..122: note = VH of XENP019071
EVQLVESGGGLVKPGGSLRLSCAASGFTFSNYWMNWVRQAPGKGLEWMGEIRLKSNNYATHYAEPVKGRFTISRDDSKSTVYLQMNSLKTEDTAVYYCTRYYGNYGGYFDVWGAGTLVTVSS

SEQ ID NO: 14745 - protein, 107 aa, synthetic construct; identical to SEQ ID NO: 10923
  REGION 1..107: note = Description of Artificial Sequence: Synthetic polypeptide
  REGION 1..107: note = VL of XENP019071

SEQ ID NO: 14746 - protein, 5 aa, synthetic construct
  REGION 1..5: note = Description of Artificial Sequence: Synthetic peptide
  REGION 1..5: note = XENP019071 vhCDR1
NYWMN

SEQ ID NO: 14747 - protein, 19 aa, synthetic construct
  REGION 1..19: note = Description of Artificial Sequence: Synthetic peptide
  REGION 1..19: note = XENP019071 vhCDR2
EIRLKSNNYATHYAEPVKG

SEQ ID NO: 14748 - protein, 11 aa, synthetic construct
  REGION 1..11: note = Description of Artificial Sequence: Synthetic peptide
  REGION 1..11: note = XENP019071 vhCDR3
YYGNYGGYFDV

SEQ ID NO: 14749 - protein, 11 aa, synthetic construct
  REGION 1..11: note = Description of Artificial Sequence: Synthetic peptide
  REGION 1..11: note = XENP019071 vlCDR1
RASQSVSNDVA

SEQ ID NO: 14750 - protein, 7 aa, synthetic construct
  REGION 1..7: note = Description of Artificial Sequence: Synthetic peptide
  REGION 1..7: note = XENP019071 vlCDR2
YASHRYT

SEQ ID NO: 14751 - protein, 9 aa, synthetic construct
  REGION 1..9: note = Description of Artificial Sequence: Synthetic peptide
  REGION 1..9: note = XENP019071 vlCDR3
QQDYSSPRT

SEQ ID NO: 14752 - protein, 249 aa, synthetic construct
  REGION 1..249: note = Description of Artificial Sequence: Synthetic polypeptide
  REGION 1..249: note = XENP019072 1G6_H1.247_L1_scFv(GKPGS)4
EVQLVESGGGLVKPGGSLRLSCAASGFTFSNYWMNWVRQAPGKGLEWVGEIRLKSNNYATHYAEPFKGRFTISRDDSKSTVYLQMNSLKTEDTAVYYCTRYYGNYGGYFDVWGAGTLVTVSSGKPGSGKPGSGKPGSGKPGSSIVMTQSPATLSVSPGERATLSCRASQSVSNDVAWYQQKPGQSPRLLINYASHRYTGVPDRFTGSGYGTEFTLTISSLQSEDFAVYFCQQDYSSPRTFGGGTKVEIK

SEQ ID NO: 14753 - protein, 122 aa, synthetic construct
  REGION 1..122: note = Description of Artificial Sequence: Synthetic polypeptide
  REGION 1..122: note = VH of XENP019072
EVQLVESGGGLVKPGGSLRLSCAASGFTFSNYWMNWVRQAPGKGLEWVGEIRLKSNNYATHYAEPFKGRFTISRDDSKSTVYLQMNSLKTEDTAVYYCTRYYGNYGGYFDVWGAGTLVTVSS

SEQ ID NO: 14754 - protein, 107 aa, synthetic construct; identical to SEQ ID NO: 10923
  REGION 1..107: note = Description of Artificial Sequence: Synthetic polypeptide
  REGION 1..107: note = VL of XENP019072

SEQ ID NO: 14755 - protein, 5 aa, synthetic construct
  REGION 1..5: note = Description of Artificial Sequence: Synthetic peptide
  REGION 1..5: note = XENP019072 vhCDR1
NYWMN

SEQ ID NO: 14756 - protein, 19 aa, synthetic construct
  REGION 1..19: note = Description of Artificial Sequence: Synthetic peptide
  REGION 1..19: note = XENP019072 vhCDR2
EIRLKSNNYATHYAEPFKG

SEQ ID NO: 14757 - protein, 11 aa, synthetic construct
  REGION 1..11: note = Description of Artificial Sequence: Synthetic peptide
  REGION 1..11: note = XENP019072 vhCDR3
YYGNYGGYFDV

SEQ ID NO: 14758 - protein, 11 aa, synthetic construct
  REGION 1..11: note = Description of Artificial Sequence: Synthetic peptide
  REGION 1..11: note = XENP019072 vlCDR1
RASQSVSNDVA

SEQ ID NO: 14759 - protein, 7 aa, synthetic construct
  REGION 1..7: note = Description of Artificial Sequence: Synthetic peptide
  REGION 1..7: note = XENP019072 vlCDR2
YASHRYT

SEQ ID NO: 14760 - protein, 9 aa, synthetic construct
  REGION 1..9: note = Description of Artificial Sequence: Synthetic peptide
  REGION 1..9: note = XENP019072 vlCDR3
QQDYSSPRT

SEQ ID NO: 14761 - protein, 249 aa, synthetic construct
  REGION 1..249: note = Description of Artificial Sequence: Synthetic polypeptide
  REGION 1..249: note = XENP019073 1G6_H1.248_L1_scFv(GKPGS)4
EVQLVESGGGLVKPGGSLRLSCAASGFTFSNYWMNWVRQAPGKGLEWVGEIRLKSNNYATHYAEPVKGRATISRDDSKSTVYLQMNSLKTEDTAVYYCTRYYGNYGGYFDVWGAGTLVTVSSGKPGSGKPGSGKPGSGKPGSSIVMTQSPATLSVSPGERATLSCRASQSVSNDVAWYQQKPGQSPRLLINYASHRYTGVPDRFTGSGYGTEFTLTISSLQSEDFAVYFCQQDYSSPRTFGGGTKVEIK

SEQ ID NO: 14762 - protein, 122 aa, synthetic construct
  REGION 1..122: note = Description of Artificial Sequence: Synthetic polypeptide
  REGION 1..122: note = VH of XENP019073
EVQLVESGGGLVKPGGSLRLSCAASGFTFSNYWMNWVRQAPGKGLEWVGEIRLKSNNYATHYAEPVKGRATISRDDSKSTVYLQMNSLKTEDTAVYYCTRYYGNYGGYFDVWGAGTLVTVSS

SEQ ID NO: 14763 - protein, 107 aa, synthetic construct; identical to SEQ ID NO: 10923
  REGION 1..107: note = Description of Artificial Sequence: Synthetic polypeptide
  REGION 1..107: note = VL of XENP019073

SEQ ID NO: 14764 - protein, 5 aa, synthetic construct
  REGION 1..5: note = Description of Artificial Sequence: Synthetic peptide
  REGION 1..5: note = XENP019073 vhCDR1
NYWMN

SEQ ID NO: 14765 - protein, 19 aa, synthetic construct
  REGION 1..19: note = Description of Artificial Sequence: Synthetic peptide
  REGION 1..19: note = XENP019073 vhCDR2
EIRLKSNNYATHYAEPVKG

SEQ ID NO: 14766 - protein, 11 aa, synthetic construct
  REGION 1..11: note = Description of Artificial Sequence: Synthetic peptide
  REGION 1..11: note = XENP019073 vhCDR3
YYGNYGGYFDV

SEQ ID NO: 14767 - protein, 11 aa, synthetic construct
  REGION 1..11: note = Description of Artificial Sequence: Synthetic peptide
  REGION 1..11: note = XENP019073 vlCDR1
RASQSVSNDVA

SEQ ID NO: 14768 - protein, 7 aa, synthetic construct
  REGION 1..7: note = Description of Artificial Sequence: Synthetic peptide
  REGION 1..7: note = XENP019073 vlCDR2
YASHRYT

SEQ ID NO: 14769 - protein, 9 aa, synthetic construct
  REGION 1..9: note = Description of Artificial Sequence: Synthetic peptide
  REGION 1..9: note = XENP019073 vlCDR3
QQDYSSPRT

SEQ ID NO: 14770 - protein, 249 aa, synthetic construct
  REGION 1..249: note = Description of Artificial Sequence: Synthetic polypeptide
  REGION 1..249: note = XENP019074 1G6_H1.249_L1_scFv(GKPGS)4
EVQLVESGGGLVKPGGSLRLSCAASGFTFSNYWMNWVRQAPGKGLEWVGEIRLKSNNYATHYAEPVKGRVTISRDDSKSTVYLQMNSLKTEDTAVYYCTRYYGNYGGYFDVWGAGTLVTVSSGKPGSGKPGSGKPGSGKPGSSIVMTQSPATLSVSPGERATLSCRASQSVSNDVAWYQQKPGQSPRLLINYASHRYTGVPDRFTGSGYGTEFTLTISSLQSEDFAVYFCQQDYSSPRTFGGGTKVEIK

SEQ ID NO: 14771 - protein, 122 aa, synthetic construct
  REGION 1..122: note = Description of Artificial Sequence: Synthetic polypeptide
  REGION 1..122: note = VH of XENP019074
EVQLVESGGGLVKPGGSLRLSCAASGFTFSNYWMNWVRQAPGKGLEWVGEIRLKSNNYATHYAEPVKGRVTISRDDSKSTVYLQMNSLKTEDTAVYYCTRYYGNYGGYFDVWGAGTLVTVSS

SEQ ID NO: 14772 - protein, 107 aa, synthetic construct; identical to SEQ ID NO: 10923
  REGION 1..107: note = Description of Artificial Sequence: Synthetic polypeptide
  REGION 1..107: note = VL of XENP019074

SEQ ID NO: 14773 - protein, 5 aa, synthetic construct
  REGION 1..5: note = Description of Artificial Sequence: Synthetic peptide
  REGION 1..5: note = XENP019074 vhCDR1
NYWMN

SEQ ID NO: 14774 - protein, 19 aa, synthetic construct
  REGION 1..19: note = Description of Artificial Sequence: Synthetic peptide
  REGION 1..19: note = XENP019074 vhCDR2
EIRLKSNNYATHYAEPVKG

SEQ ID NO: 14775 - protein, 11 aa, synthetic construct
  REGION 1..11: note = Description of Artificial Sequence: Synthetic peptide
  REGION 1..11: note = XENP019074 vhCDR3
YYGNYGGYFDV

SEQ ID NO: 14776 - protein, 11 aa, synthetic construct
  REGION 1..11: note = Description of Artificial Sequence: Synthetic peptide
  REGION 1..11: note = XENP019074 vlCDR1
RASQSVSNDVA

SEQ ID NO: 14777 - protein, 7 aa, synthetic construct
  REGION 1..7: note = Description of Artificial Sequence: Synthetic peptide
  REGION 1..7: note = XENP019074 vlCDR2
YASHRYT

SEQ ID NO: 14778 - protein, 9 aa, synthetic construct
  REGION 1..9: note = Description of Artificial Sequence: Synthetic peptide
  REGION 1..9: note = XENP019074 vlCDR3
QQDYSSPRT

SEQ ID NO: 14779 - protein, 249 aa, synthetic construct
  REGION 1..249: note = Description of Artificial Sequence: Synthetic polypeptide
  REGION 1..249: note = XENP019075 1G6_H1.250_L1_scFv(GKPGS)4
EVQLVESGGGLVKPGGSLRLSCAASGFTFSNYWMNWVRQAPGKGLEWVGEIRLKSNNYATHYAEPVKGRFTISRDDSSSTVYLQMNSLKTEDTAVYYCTRYYGNYGGYFDVWGAGTLVTVSSGKPGSGKPGSGKPGSGKPGSSIVMTQSPATLSVSPGERATLSCRASQSVSNDVAWYQQKPGQSPRLLINYASHRYTGVPDRFTGSGYGTEFTLTISSLQSEDFAVYFCQQDYSSPRTFGGGTKVEIK

SEQ ID NO: 14780 - protein, 122 aa, synthetic construct
  REGION 1..122: note = Description of Artificial Sequence: Synthetic polypeptide
  REGION 1..122: note = VH of XENP019075
EVQLVESGGGLVKPGGSLRLSCAASGFTFSNYWMNWVRQAPGKGLEWVGEIRLKSNNYATHYAEPVKGRFTISRDDSSSTVYLQMNSLKTEDTAVYYCTRYYGNYGGYFDVWGAGTLVTVSS

SEQ ID NO: 14781 - protein, 107 aa, synthetic construct; identical to SEQ ID NO: 10923
  REGION 1..107: note = Description of Artificial Sequence: Synthetic polypeptide
  REGION 1..107: note = VL of XENP019075

SEQ ID NO: 14782 - protein, 5 aa, synthetic construct
  REGION 1..5: note = Description of Artificial Sequence: Synthetic peptide
  REGION 1..5: note = XENP019075 vhCDR1
NYWMN

SEQ ID NO: 14783 - protein, 19 aa, synthetic construct
  REGION 1..19: note = Description of Artificial Sequence: Synthetic peptide
  REGION 1..19: note = XENP019075 vhCDR2
EIRLKSNNYATHYAEPVKG

SEQ ID NO: 14784 - protein, 11 aa, synthetic construct
  REGION 1..11: note = Description of Artificial Sequence: Synthetic peptide
  REGION 1..11: note = XENP019075 vhCDR3
YYGNYGGYFDV

SEQ ID NO: 14785 - protein, 11 aa, synthetic construct
  REGION 1..11: note = Description of Artificial Sequence: Synthetic peptide
  REGION 1..11: note = XENP019075 vlCDR1
RASQSVSNDVA

SEQ ID NO: 14786 - protein, 7 aa, synthetic construct
  REGION 1..7: note = Description of Artificial Sequence: Synthetic peptide
  REGION 1..7: note = XENP019075 vlCDR2
YASHRYT

SEQ ID NO: 14787 - protein, 9 aa, synthetic construct
  REGION 1..9: note = Description of Artificial Sequence: Synthetic peptide
  REGION 1..9: note = XENP019075 vlCDR3
QQDYSSPRT

SEQ ID NO: 14788 - protein, 249 aa, synthetic construct
  REGION 1..249: note = Description of Artificial Sequence: Synthetic polypeptide
  REGION 1..249: note = XENP019076 1G6_H1.251_L1_scFv(GKPGS)4
EVQLVESGGGLVKPGGSLRLSCAASGFTFSNYWMNWVRQAPGKGLEWVGEIRLKSNNYATHYAEPVKGRFTISRDDSKSMVYLQMNSLKTEDTAVYYCTRYYGNYGGYFDVWGAGTLVTVSSGKPGSGKPGSGKPGSGKPGSSIVMTQSPATLSVSPGERATLSCRASQSVSNDVAWYQQKPGQSPRLLINYASHRYTGVPDRFTGSGYGTEFTLTISSLQSEDFAVYFCQQDYSSPRTFGGGTKVEIK

SEQ ID NO: 14789 - protein, 122 aa, synthetic construct
  REGION 1..122: note = Description of Artificial Sequence: Synthetic polypeptide
  REGION 1..122: note = VH of XENP019076
EVQLVESGGGLVKPGGSLRLSCAASGFTFSNYWMNWVRQAPGKGLEWVGEIRLKSNNYATHYAEPVKGRFTISRDDSKSMVYLQMNSLKTEDTAVYYCTRYYGNYGGYFDVWGAGTLVTVSS

SEQ ID NO: 14790 - protein, 107 aa, synthetic construct; identical to SEQ ID NO: 10923
  REGION 1..107: note = Description of Artificial Sequence: Synthetic polypeptide
  REGION 1..107: note = VL of XENP019076

SEQ ID NO: 14791 - protein, 5 aa, synthetic construct
  REGION 1..5: note = Description of Artificial Sequence: Synthetic peptide
  REGION 1..5: note = XENP019076 vhCDR1
NYWMN

SEQ ID NO: 14792 - protein, 19 aa, synthetic construct
  REGION 1..19: note = Description of Artificial Sequence: Synthetic peptide
  REGION 1..19: note = XENP019076 vhCDR2
EIRLKSNNYATHYAEPVKG

SEQ ID NO: 14793 - protein, 11 aa, synthetic construct
  REGION 1..11: note = Description of Artificial Sequence: Synthetic peptide
  REGION 1..11: note = XENP019076 vhCDR3
YYGNYGGYFDV

SEQ ID NO: 14794 - protein, 11 aa, synthetic construct
  REGION 1..11: note = Description of Artificial Sequence: Synthetic peptide
  REGION 1..11: note = XENP019076 vlCDR1
RASQSVSNDVA

SEQ ID NO: 14795 - protein, 7 aa, synthetic construct
  REGION 1..7: note = Description of Artificial Sequence: Synthetic peptide
  REGION 1..7: note = XENP019076 vlCDR2
YASHRYT

SEQ ID NO: 14796 - protein, 9 aa, synthetic construct
  REGION 1..9: note = Description of Artificial Sequence: Synthetic peptide
  REGION 1..9: note = XENP019076 vlCDR3
QQDYSSPRT

SEQ ID NO: 14797 - protein, 249 aa, synthetic construct
  REGION 1..249: note = Description of Artificial Sequence: Synthetic polypeptide
  REGION 1..249: note = XENP019077 1G6_H1.252_L1_scFv(GKPGS)4
EVQLVESGGGLVKPGGSLRLSCAASGFTFSNYWMNWVRQAPGKGLEWVGEIRLKSNNYATHYAEPVKGRFTISRDDSKSQVYLQMNSLKTEDTAVYYCTRYYGNYGGYFDVWGAGTLVTVSSGKPGSGKPGSGKPGSGKPGSSIVMTQSPATLSVSPGERATLSCRASQSVSNDVAWYQQKPGQSPRLLINYASHRYTGVPDRFTGSGYGTEFTLTISSLQSEDFAVYFCQQDYSSPRTFGGGTKVEIK

SEQ ID NO: 14798 - protein, 122 aa, synthetic construct
  REGION 1..122: note = Description of Artificial Sequence: Synthetic polypeptide
  REGION 1..122: note = VH of XENP019077
EVQLVESGGGLVKPGGSLRLSCAASGFTFSNYWMNWVRQAPGKGLEWVGEIRLKSNNYATHYAEPVKGRFTISRDDSKSQVYLQMNSLKTEDTAVYYCTRYYGNYGGYFDVWGAGTLVTVSS

SEQ ID NO: 14799 - protein, 107 aa, synthetic construct; identical to SEQ ID NO: 10923
  REGION 1..107: note = Description of Artificial Sequence: Synthetic polypeptide
  REGION 1..107: note = VL of XENP019077

SEQ ID NO: 14800 - protein, 5 aa, synthetic construct
  REGION 1..5: note = Description of Artificial Sequence: Synthetic peptide
  REGION 1..5: note = XENP019077 vhCDR1
NYWMN

SEQ ID NO: 14801 - protein, 19 aa, synthetic construct
  REGION 1..19: note = Description of Artificial Sequence: Synthetic peptide
  REGION 1..19: note = XENP019077 vhCDR2
EIRLKSNNYATHYAEPVKG

SEQ ID NO: 14802 - protein, 11 aa, synthetic construct
  REGION 1..11: note = Description of Artificial Sequence: Synthetic peptide
  REGION 1..11: note = XENP019077 vhCDR3
YYGNYGGYFDV

SEQ ID NO: 14803 - protein, 11 aa, synthetic construct
  REGION 1..11: note = Description of Artificial Sequence: Synthetic peptide
  REGION 1..11: note = XENP019077 vlCDR1
RASQSVSNDVA

SEQ ID NO: 14804 - protein, 7 aa, synthetic construct
  REGION 1..7: note = Description of Artificial Sequence: Synthetic peptide
  REGION 1..7: note = XENP019077 vlCDR2
YASHRYT

SEQ ID NO: 14805 - protein, 9 aa, synthetic construct
  REGION 1..9: note = Description of Artificial Sequence: Synthetic peptide
  REGION 1..9: note = XENP019077 vlCDR3
QQDYSSPRT

SEQ ID NO: 14806 - protein, 249 aa, synthetic construct
  REGION 1..249: note = Description of Artificial Sequence: Synthetic polypeptide
  REGION 1..249: note = XENP019078 1G6_H1.253_L1_scFv(GKPGS)4
EVQLVESGGGLVKPGGSLRLSCAASGFTFSNYWMNWVRQAPGKGLEWVGEIRLKSNNYATHYAEPVKGRFTISRDDSKSTVVLQMNSLKTEDTAVYYCTRYYGNYGGYFDVWGAGTLVTVSSGKPGSGKPGSGKPGSGKPGSSIVMTQSPATLSVSPGERATLSCRASQSVSNDVAWYQQKPGQSPRLLINYASHRYTGVPDRFTGSGYGTEFTLTISSLQSEDFAVYFCQQDYSSPRTFGGGTKVEIK

SEQ ID NO: 14807 - protein, 122 aa, synthetic construct
  REGION 1..122: note = Description of Artificial Sequence: Synthetic polypeptide
  REGION 1..122: note = VH of XENP019078
EVQLVESGGGLVKPGGSLRLSCAASGFTFSNYWMNWVRQAPGKGLEWVGEIRLKSNNYATHYAEPVKGRFTISRDDSKSTVVLQMNSLKTEDTAVYYCTRYYGNYGGYFDVWGAGTLVTVSS

SEQ ID NO: 14808 - protein, 107 aa, synthetic construct; identical to SEQ ID NO: 10923
  REGION 1..107: note = Description of Artificial Sequence: Synthetic polypeptide
  REGION 1..107: note = VL of XENP019078

SEQ ID NO: 14809 - protein, 5 aa, synthetic construct
  REGION 1..5: note = Description of Artificial Sequence: Synthetic peptide
  REGION 1..5: note = XENP019078 vhCDR1
NYWMN

SEQ ID NO: 14810 - protein, 19 aa, synthetic construct
  REGION 1..19: note = Description of Artificial Sequence: Synthetic peptide
  REGION 1..19: note = XENP019078 vhCDR2
EIRLKSNNYATHYAEPVKG

SEQ ID NO: 14811 - protein, 11 aa, synthetic construct
  REGION 1..11: note = Description of Artificial Sequence: Synthetic peptide
  REGION 1..11: note = XENP019078 vhCDR3
YYGNYGGYFDV

SEQ ID NO: 14812 - protein, 11 aa, synthetic construct
  REGION 1..11: note = Description of Artificial Sequence: Synthetic peptide
  REGION 1..11: note = XENP019078 vlCDR1
RASQSVSNDVA

SEQ ID NO: 14813 - protein, 7 aa, synthetic construct
  REGION 1..7: note = Description of Artificial Sequence: Synthetic peptide
  REGION 1..7: note = XENP019078 vlCDR2
YASHRYT

SEQ ID NO: 14814 - protein, 9 aa, synthetic construct
  REGION 1..9: note = Description of Artificial Sequence: Synthetic peptide
  REGION 1..9: note = XENP019078 vlCDR3
QQDYSSPRT

SEQ ID NO: 14815 - protein, 249 aa, synthetic construct
  REGION 1..249: note = Description of Artificial Sequence: Synthetic polypeptide
  REGION 1..249: note = XENP019079 1G6_H1.254_L1_scFv(GKPGS)4
EVQLVESGGGLVKPGGSLRLSCAASGFTFSNYWMNWVRQAPGKGLEWVGEIRLKSNNYATHYAEPVKGRFTISRDDSKSTVYLEMNSLKTEDTAVYYCTRYYGNYGGYFDVWGAGTLVTVSSGKPGSGKPGSGKPGSGKPGSSIVMTQSPATLSVSPGERATLSCRASQSVSNDVAWYQQKPGQSPRLLINYASHRYTGVPDRFTGSGYGTEFTLTISSLQSEDFAVYFCQQDYSSPRTFGGGTKVEIK

SEQ ID NO: 14816 - protein, 122 aa, synthetic construct
  REGION 1..122: note = Description of Artificial Sequence: Synthetic polypeptide
  REGION 1..122: note = VH of XENP019079
EVQLVESGGGLVKPGGSLRLSCAASGFTFSNYWMNWVRQAPGKGLEWVGEIRLKSNNYATHYAEPVKGRFTISRDDSKSTVYLEMNSLKTEDTAVYYCTRYYGNYGGYFDVWGAGTLVTVSS

SEQ ID NO: 14817 - protein, 107 aa, synthetic construct; identical to SEQ ID NO: 10923
  REGION 1..107: note = Description of Artificial Sequence: Synthetic polypeptide
  REGION 1..107: note = VL of XENP019079

SEQ ID NO: 14818 - protein, 5 aa, synthetic construct
  REGION 1..5: note = Description of Artificial Sequence: Synthetic peptide
  REGION 1..5: note = XENP019079 vhCDR1
NYWMN

SEQ ID NO: 14819 - protein, 19 aa, synthetic construct
  REGION 1..19: note = Description of Artificial Sequence: Synthetic peptide
  REGION 1..19: note = XENP019079 vhCDR2
EIRLKSNNYATHYAEPVKG

SEQ ID NO: 14820 - protein, 11 aa, synthetic construct
  REGION 1..11: note = Description of Artificial Sequence: Synthetic peptide
  REGION 1..11: note = XENP019079 vhCDR3
YYGNYGGYFDV

SEQ ID NO: 14821 - protein, 11 aa, synthetic construct
  REGION 1..11: note = Description of Artificial Sequence: Synthetic peptide
  REGION 1..11: note = XENP019079 vlCDR1
RASQSVSNDVA

SEQ ID NO: 14822 - protein, 7 aa, synthetic construct
  REGION 1..7: note = Description of Artificial Sequence: Synthetic peptide
  REGION 1..7: note = XENP019079 vlCDR2
YASHRYT

SEQ ID NO: 14823 - protein, 9 aa, synthetic construct
  REGION 1..9: note = Description of Artificial Sequence: Synthetic peptide
  REGION 1..9: note = XENP019079 vlCDR3
QQDYSSPRT

SEQ ID NO: 14824 - protein, 249 aa, synthetic construct
  REGION 1..249: note = Description of Artificial Sequence: Synthetic polypeptide
  REGION 1..249: note = XENP019080 1G6_H1.255_L1_scFv(GKPGS)4
EVQLVESGGGLVKPGGSLRLSCAASGFTFSNYWMNWVRQAPGKGLEWVGEIRLKSNNYATHYAEPVKGRFTISRDDSKSTVYLQMNSEKTEDTAVYYCTRYYGNYGGYFDVWGAGTLVTVSSGKPGSGKPGSGKPGSGKPGSSIVMTQSPATLSVSPGERATLSCRASQSVSNDVAWYQQKPGQSPRLLINYASHRYTGVPDRFTGSGYGTEFTLTISSLQSEDFAVYFCQQDYSSPRTFGGGTKVEIK

SEQ ID NO: 14825 - protein, 122 aa, synthetic construct
  REGION 1..122: note = Description of Artificial Sequence: Synthetic polypeptide
  REGION 1..122: note = VH of XENP019080
EVQLVESGGGLVKPGGSLRLSCAASGFTFSNYWMNWVRQAPGKGLEWVGEIRLKSNNYATHYAEPVKGRFTISRDDSKSTVYLQMNSEKTEDTAVYYCTRYYGNYGGYFDVWGAGTLVTVSS

SEQ ID NO: 14826 - protein, 107 aa, synthetic construct; identical to SEQ ID NO: 10923
  REGION 1..107: note = Description of Artificial Sequence: Synthetic polypeptide
  REGION 1..107: note = VL of XENP019080

SEQ ID NO: 14827 - protein, 5 aa, synthetic construct
  REGION 1..5: note = Description of Artificial Sequence: Synthetic peptide
  REGION 1..5: note = XENP019080 vhCDR1
NYWMN

SEQ ID NO: 14828 - protein, 19 aa, synthetic construct
  REGION 1..19: note = Description of Artificial Sequence: Synthetic peptide
  REGION 1..19: note = XENP019080 vhCDR2
EIRLKSNNYATHYAEPVKG

SEQ ID NO: 14829 - protein, 11 aa, synthetic construct
  REGION 1..11: note = Description of Artificial Sequence: Synthetic peptide
  REGION 1..11: note = XENP019080 vhCDR3
YYGNYGGYFDV

SEQ ID NO: 14830 - protein, 11 aa, synthetic construct
  REGION 1..11: note = Description of Artificial Sequence: Synthetic peptide
  REGION 1..11: note = XENP019080 vlCDR1
RASQSVSNDVA

SEQ ID NO: 14831 - protein, 7 aa, synthetic construct
  REGION 1..7: note = Description of Artificial Sequence: Synthetic peptide
  REGION 1..7: note = XENP019080 vlCDR2
YASHRYT

SEQ ID NO: 14832 - protein, 9 aa, synthetic construct
  REGION 1..9: note = Description of Artificial Sequence: Synthetic peptide
  REGION 1..9: note = XENP019080 vlCDR3
QQDYSSPRT

SEQ ID NO: 14833 - protein, 249 aa, synthetic construct
  REGION 1..249: note = Description of Artificial Sequence: Synthetic polypeptide
  REGION 1..249: note = XENP019081 1G6_H1.256_L1_scFv(GKPGS)4
EVQLVESGGGLVKPGGSLRLSCAASGFTFSNYWMNWVRQAPGKGLEWVGEIRLKSNNYATHYAEPVKGRFTISRDDSKSTVYLQMNSVKTEDTAVYYCTRYYGNYGGYFDVWGAGTLVTVSSGKPGSGKPGSGKPGSGKPGSSIVMTQSPATLSVSPGERATLSCRASQSVSNDVAWYQQKPGQSPRLLINYASHRYTGVPDRFTGSGYGTEFTLTISSLQSEDFAVYFCQQDYSSPRTFGGGTKVEIK

SEQ ID NO: 14834 - protein, 122 aa, synthetic construct
  REGION 1..122: note = Description of Artificial Sequence: Synthetic polypeptide
  REGION 1..122: note = VH of XENP019081
EVQLVESGGGLVKPGGSLRLSCAASGFTFSNYWMNWVRQAPGKGLEWVGEIRLKSNNYATHYAEPVKGRFTISRDDSKSTVYLQMNSVKTEDTAVYYCTRYYGNYGGYFDVWGAGTLVTVSS

SEQ ID NO: 14835 - protein, 107 aa, synthetic construct; identical to SEQ ID NO: 10923
  REGION 1..107: note = Description of Artificial Sequence: Synthetic polypeptide
  REGION 1..107: note = VL of XENP019081

SEQ ID NO: 14836 - protein, 5 aa, synthetic construct
  REGION 1..5: note = Description of Artificial Sequence: Synthetic peptide
  REGION 1..5: note = XENP019081 vhCDR1
NYWMN

SEQ ID NO: 14837 - protein, 19 aa, synthetic construct
  REGION 1..19: note = Description of Artificial Sequence: Synthetic peptide
  REGION 1..19: note = XENP019081 vhCDR2
EIRLKSNNYATHYAEPVKG

SEQ ID NO: 14838 - protein, 11 aa, synthetic construct
  REGION 1..11: note = Description of Artificial Sequence: Synthetic peptide
  REGION 1..11: note = XENP019081 vhCDR3
YYGNYGGYFDV

SEQ ID NO: 14839 - protein, 11 aa, synthetic construct
  REGION 1..11: note = Description of Artificial Sequence: Synthetic peptide
  REGION 1..11: note = XENP019081 vlCDR1
RASQSVSNDVA

SEQ ID NO: 14840 - protein, 7 aa, synthetic construct
  REGION 1..7: note = Description of Artificial Sequence: Synthetic peptide
  REGION 1..7: note = XENP019081 vlCDR2
YASHRYT

SEQ ID NO: 14841 - protein, 9 aa, synthetic construct
  REGION 1..9: note = Description of Artificial Sequence: Synthetic peptide
  REGION 1..9: note = XENP019081 vlCDR3
QQDYSSPRT

SEQ ID NO: 14842 - protein, 249 aa, synthetic construct
  REGION 1..249: note = Description of Artificial Sequence: Synthetic polypeptide
  REGION 1..249: note = XENP019082 1G6_H1.257_L1_scFv(GKPGS)4
EVQLVESGGGLVKPGGSLRLSCAASGFTFSNYWMNWVRQAPGKGLEWVGEIRLKSNNYATHYAEPVKGRFTISRDDSKSTVYLQMNSLKTEDTAVYYCTRYYGNYGGYFDVWGRGTLVTVSSGKPGSGKPGSGKPGSGKPGSSIVMTQSPATLSVSPGERATLSCRASQSVSNDVAWYQQKPGQSPRLLINYASHRYTGVPDRFTGSGYGTEFTLTISSLQSEDFAVYFCQQDYSSPRTFGGGTKVEIK

SEQ ID NO: 14843 - protein, 122 aa, synthetic construct
  REGION 1..122: note = Description of Artificial Sequence: Synthetic polypeptide
  REGION 1..122: note = VH of XENP019082
EVQLVESGGGLVKPGGSLRLSCAASGFTFSNYWMNWVRQAPGKGLEWVGEIRLKSNNYATHYAEPVKGRFTISRDDSKSTVYLQMNSLKTEDTAVYYCTRYYGNYGGYFDVWGRGTLVTVSS

SEQ ID NO: 14844 - protein, 107 aa, synthetic construct; identical to SEQ ID NO: 10923
  REGION 1..107: note = Description of Artificial Sequence: Synthetic polypeptide
  REGION 1..107: note = VL of XENP019082

SEQ ID NO: 14845 - protein, 5 aa, synthetic construct
  REGION 1..5: note = Description of Artificial Sequence: Synthetic peptide
  REGION 1..5: note = XENP019082 vhCDR1
NYWMN

SEQ ID NO: 14846 - protein, 19 aa, synthetic construct
  REGION 1..19: note = Description of Artificial Sequence: Synthetic peptide
  REGION 1..19: note = XENP019082 vhCDR2
EIRLKSNNYATHYAEPVKG

SEQ ID NO: 14847 - protein, 11 aa, synthetic construct
  REGION 1..11: note = Description of Artificial Sequence: Synthetic peptide
  REGION 1..11: note = XENP019082 vhCDR3
YYGNYGGYFDV

SEQ ID NO: 14848 - protein, 11 aa, synthetic construct
  REGION 1..11: note = Description of Artificial Sequence: Synthetic peptide
  REGION 1..11: note = XENP019082 vlCDR1
RASQSVSNDVA

SEQ ID NO: 14849 - protein, 7 aa, synthetic construct
  REGION 1..7: note = Description of Artificial Sequence: Synthetic peptide
  REGION 1..7: note = XENP019082 vlCDR2
YASHRYT

SEQ ID NO: 14850 - protein, 9 aa, synthetic construct
  REGION 1..9: note = Description of Artificial Sequence: Synthetic peptide
  REGION 1..9: note = XENP019082 vlCDR3
QQDYSSPRT

SEQ ID NO: 14851 - protein, 249 aa, synthetic construct
  REGION 1..249: note = Description of Artificial Sequence: Synthetic polypeptide
  REGION 1..249: note = XENP019083 1G6_H1.258_L1_scFv(GKPGS)4
EVQLVESGGGLKKPGESLRLSCAASGFTFSNYWMNWVRQAPGKGLEWVGEIRLKSNNYATHYAEPVKGRFTISRDDSKSTVYLQMNSLKTEDTAVYYCTRYYGNYGGYFDVWGAGTLVTVSSGKPGSGKPGSGKPGSGKPGSSIVMTQSPATLSVSPGERATLSCRASQSVSNDVAWYQQKPGQSPRLLINYASHRYTGVPDRFTGSGYGTEFTLTISSLQSEDFAVYFCQQDYSSPRTFGGGTKVEIK

SEQ ID NO: 14852 - protein, 122 aa, synthetic construct
  REGION 1..122: note = Description of Artificial Sequence: Synthetic polypeptide
  REGION 1..122: note = VH of XENP019083
EVQLVESGGGLKKPGESLRLSCAASGFTFSNYWMNWVRQAPGKGLEWVGEIRLKSNNYATHYAEPVKGRFTISRDDSKSTVYLQMNSLKTEDTAVYYCTRYYGNYGGYFDVWGAGTLVTVSS

SEQ ID NO: 14853 - protein, 107 aa, synthetic construct; identical to SEQ ID NO: 10923
  REGION 1..107: note = Description of Artificial Sequence: Synthetic polypeptide
  REGION 1..107: note = VL of XENP019083

SEQ ID NO: 14854 - protein, 5 aa, synthetic construct
  REGION 1..5: note = Description of Artificial Sequence: Synthetic peptide
  REGION 1..5: note = XENP019083 vhCDR1
NYWMN

SEQ ID NO: 14855 - protein, 19 aa, synthetic construct
  REGION 1..19: note = Description of Artificial Sequence: Synthetic peptide
  REGION 1..19: note = XENP019083 vhCDR2
EIRLKSNNYATHYAEPVKG

SEQ ID NO: 14856 - protein, 11 aa, synthetic construct
  REGION 1..11: note = Description of Artificial Sequence: Synthetic peptide
  REGION 1..11: note = XENP019083 vhCDR3
YYGNYGGYFDV

SEQ ID NO: 14857 - protein, 11 aa, synthetic construct
  REGION 1..11: note = Description of Artificial Sequence: Synthetic peptide
  REGION 1..11: note = XENP019083 vlCDR1
RASQSVSNDVA

SEQ ID NO: 14858 - protein, 7 aa, synthetic construct
  REGION 1..7: note = Description of Artificial Sequence: Synthetic peptide
  REGION 1..7: note = XENP019083 vlCDR2
YASHRYT

SEQ ID NO: 14859 - protein, 9 aa, synthetic construct
  REGION 1..9: note = Description of Artificial Sequence: Synthetic peptide
  REGION 1..9: note = XENP019083 vlCDR3
QQDYSSPRT

SEQ ID NO: 14860 - protein, 249 aa, synthetic construct
  REGION 1..249: note = Description of Artificial Sequence: Synthetic polypeptide
  REGION 1..249: note = XENP019084 1G6_H1.259_L1_scFv(GKPGS)4
EVQLVESGGGLVKPGGSLRLSCAASGFTFSNYWMDWVRQAPGKGLEWVGEIRLKSNNYATHYAEPVKGRFTISRDDSKSTVYLQMNSLKTEDTAVYYCKRYYGNYGGYFDVWGAGTLVTVSSGKPGSGKPGSGKPGSGKPGSSIVMTQSPATLSVSPGERATLSCRASQSVSNDVAWYQQKPGQSPRLLINYASHRYTGVPDRFTGSGYGTEFTLTISSLQSEDFAVYFCQQDYSSPRTFGGGTKVEIK

SEQ ID NO: 14861 - protein, 122 aa, synthetic construct
  REGION 1..122: note = Description of Artificial Sequence: Synthetic polypeptide
  REGION 1..122: note = VH of XENP019084
EVQLVESGGGLVKPGGSLRLSCAASGFTFSNYWMDWVRQAPGKGLEWVGEIRLKSNNYATHYAEPVKGRFTISRDDSKSTVYLQMNSLKTEDTAVYYCKRYYGNYGGYFDVWGAGTLVTVSS

SEQ ID NO: 14862 - protein, 107 aa, synthetic construct; identical to SEQ ID NO: 10923
  REGION 1..107: note = Description of Artificial Sequence: Synthetic polypeptide
  REGION 1..107: note = VL of XENP019084

SEQ ID NO: 14863 - protein, 5 aa, synthetic construct
  REGION 1..5: note = Description of Artificial Sequence: Synthetic peptide
  REGION 1..5: note = XENP019084 vhCDR1
NYWMD

SEQ ID NO: 14864 - protein, 19 aa, synthetic construct
  REGION 1..19: note = Description of Artificial Sequence: Synthetic peptide
  REGION 1..19: note = XENP019084 vhCDR2
EIRLKSNNYATHYAEPVKG

SEQ ID NO: 14865 - protein, 11 aa, synthetic construct
  REGION 1..11: note = Description of Artificial Sequence: Synthetic peptide
  REGION 1..11: note = XENP019084 vhCDR3
YYGNYGGYFDV

SEQ ID NO: 14866 - protein, 11 aa, synthetic construct
  REGION 1..11: note = Description of Artificial Sequence: Synthetic peptide
  REGION 1..11: note = XENP019084 vlCDR1
RASQSVSNDVA

SEQ ID NO: 14867 - protein, 7 aa, synthetic construct
  REGION 1..7: note = Description of Artificial Sequence: Synthetic peptide
  REGION 1..7: note = XENP019084 vlCDR2
YASHRYT

SEQ ID NO: 14868 - protein, 9 aa, synthetic construct
  REGION 1..9: note = Description of Artificial Sequence: Synthetic peptide
  REGION 1..9: note = XENP019084 vlCDR3
QQDYSSPRT

SEQ ID NO: 14869 - protein, 249 aa, synthetic construct
  REGION 1..249: note = Description of Artificial Sequence: Synthetic polypeptide
  REGION 1..249: note = XENP019085 1G6_H1.260_L1_scFv(GKPGS)4
EVQLVESGGGLVKPGESLRLSCAASGFTFSNYWMNWVRQAPGKGLEWVGEIRLKSNNYATHYAEPVKGRFTISRDDSKSTVYLQMNSRKTEDTAVYYCTRYYGNYGGYFDVWGAGTLVTVSSGKPGSGKPGSGKPGSGKPGSSIVMTQSPATLSVSPGERATLSCRASQSVSNDVAWYQQKPGQSPRLLINYASHRYTGVPDRFTGSGYGTEFTLTISSLQSEDFAVYFCQQDYSSPRTFGGGTKVEIK

SEQ ID NO: 14870 - protein, 122 aa, synthetic construct
  REGION 1..122: note = Description of Artificial Sequence: Synthetic polypeptide
  REGION 1..122: note = VH of XENP019085
EVQLVESGGGLVKPGESLRLSCAASGFTFSNYWMNWVRQAPGKGLEWVGEIRLKSNNYATHYAEPVKGRFTISRDDSKSTVYLQMNSRKTEDTAVYYCTRYYGNYGGYFDVWGAGTLVTVSS

SEQ ID NO: 14871 - protein, 107 aa, synthetic construct; identical to SEQ ID NO: 10923
  REGION 1..107: note = Description of Artificial Sequence: Synthetic polypeptide
  REGION 1..107: note = VL of XENP019085

SEQ ID NO: 14872 - protein, 5 aa, synthetic construct
  REGION 1..5: note = Description of Artificial Sequence: Synthetic peptide
  REGION 1..5: note = XENP019085 vhCDR1
NYWMN

SEQ ID NO: 14873 - protein, 19 aa, synthetic construct
  REGION 1..19: note = Description of Artificial Sequence: Synthetic peptide
  REGION 1..19: note = XENP019085 vhCDR2
EIRLKSNNYATHYAEPVKG

SEQ ID NO: 14874 - protein, 11 aa, synthetic construct
  REGION 1..11: note = Description of Artificial Sequence: Synthetic peptide
  REGION 1..11: note = XENP019085 vhCDR3
YYGNYGGYFDV

SEQ ID NO: 14875 - protein, 11 aa, synthetic construct
  REGION 1..11: note = Description of Artificial Sequence: Synthetic peptide
  REGION 1..11: note = XENP019085 vlCDR1
RASQSVSNDVA

SEQ ID NO: 14876 - protein, 7 aa, synthetic construct
  REGION 1..7: note = Description of Artificial Sequence: Synthetic peptide
  REGION 1..7: note = XENP019085 vlCDR2
YASHRYT

SEQ ID NO: 14877 - protein, 9 aa, synthetic construct
  REGION 1..9: note = Description of Artificial Sequence: Synthetic peptide
  REGION 1..9: note = XENP019085 vlCDR3
QQDYSSPRT

SEQ ID NO: 14878 - protein, 249 aa, synthetic construct
  REGION 1..249: note = Description of Artificial Sequence: Synthetic polypeptide
  REGION 1..249: note = XENP019086 1G6_H1.261_L1_scFv(GKPGS)4
EVQLVESGGGLVKPGGSLRLSCKASGFTFSNYWMNWVRQAPGKGLEWVGEIRLKSNNYATHYAEPVKGRFTISRDDSKDTVYLQMNSLKTEDTAVYYCTRYYGNYGGYFDVWGAGTLVTVSSGKPGSGKPGSGKPGSGKPGSSIVMTQSPATLSVSPGERATLSCRASQSVSNDVAWYQQKPGQSPRLLINYASHRYTGVPDRFTGSGYGTEFTLTISSLQSEDFAVYFCQQDYSSPRTFGGGTKVEIK

SEQ ID NO: 14879 - protein, 122 aa, synthetic construct
  REGION 1..122: note = Description of Artificial Sequence: Synthetic polypeptide
  REGION 1..122: note = VH of XENP019086
EVQLVESGGGLVKPGGSLRLSCKASGFTFSNYWMNWVRQAPGKGLEWVGEIRLKSNNYATHYAEPVKGRFTISRDDSKDTVYLQMNSLKTEDTAVYYCTRYYGNYGGYFDVWGAGTLVTVSS

SEQ ID NO: 14880 - protein, 107 aa, synthetic construct; identical to SEQ ID NO: 10923
  REGION 1..107: note = Description of Artificial Sequence: Synthetic polypeptide
  REGION 1..107: note = VL of XENP019086

SEQ ID NO: 14881 - protein, 5 aa, synthetic construct
  REGION 1..5: note = Description of Artificial Sequence: Synthetic peptide
  REGION 1..5: note = XENP019086 vhCDR1
NYWMN

SEQ ID NO: 14882 - protein, 19 aa, synthetic construct
  REGION 1..19: note = Description of Artificial Sequence: Synthetic peptide
  REGION 1..19: note = XENP019086 vhCDR2
EIRLKSNNYATHYAEPVKG

SEQ ID NO: 14883 - protein, 11 aa, synthetic construct
  REGION 1..11: note = Description of Artificial Sequence: Synthetic peptide
  REGION 1..11: note = XENP019086 vhCDR3
YYGNYGGYFDV

SEQ ID NO: 14884 - protein, 11 aa, synthetic construct
  REGION 1..11: note = Description of Artificial Sequence: Synthetic peptide
  REGION 1..11: note = XENP019086 vlCDR1
RASQSVSNDVA

SEQ ID NO: 14885 - protein, 7 aa, synthetic construct
  REGION 1..7: note = Description of Artificial Sequence: Synthetic peptide
  REGION 1..7: note = XENP019086 vlCDR2
YASHRYT

SEQ ID NO: 14886 - protein, 9 aa, synthetic construct
  REGION 1..9: note = Description of Artificial Sequence: Synthetic peptide
  REGION 1..9: note = XENP019086 vlCDR3
QQDYSSPRT

SEQ ID NO: 14887 - protein, 249 aa, synthetic construct
  REGION 1..249: note = Description of Artificial Sequence: Synthetic polypeptide
  REGION 1..249: note = XENP019087 1G6_H1.262_L1_scFv(GKPGS)4
EVQLVESGGGLVKPGESLRLSCAASGFTFSNYWMNWVRQAPGKGLEWVGEIRLKSNNYATHYAEPVKGRFTISRDDSKSTVYLQMNRLKTEDTAVYYCTRYYGNYGGYFDVWGAGTLVTVSSGKPGSGKPGSGKPGSGKPGSSIVMTQSPATLSVSPGERATLSCRASQSVSNDVAWYQQKPGQSPRLLINYASHRYTGVPDRFTGSGYGTEFTLTISSLQSEDFAVYFCQQDYSSPRTFGGGTKVEIK

SEQ ID NO: 14888 - protein, 122 aa, synthetic construct
  REGION 1..122: note = Description of Artificial Sequence: Synthetic polypeptide
  REGION 1..122: note = VH of XENP019087
EVQLVESGGGLVKPGESLRLSCAASGFTFSNYWMNWVRQAPGKGLEWVGEIRLKSNNYATHYAEPVKGRFTISRDDSKSTVYLQMNRLKTEDTAVYYCTRYYGNYGGYFDVWGAGTLVTVSS

SEQ ID NO: 14889 - protein, 107 aa, synthetic construct; identical to SEQ ID NO: 10923
  REGION 1..107: note = Description of Artificial Sequence: Synthetic polypeptide
  REGION 1..107: note = VL of XENP019087

SEQ ID NO: 14890 - protein, 5 aa, synthetic construct
  REGION 1..5: note = Description of Artificial Sequence: Synthetic peptide
  REGION 1..5: note = XENP019087 vhCDR1
NYWMN

SEQ ID NO: 14891 - protein, 19 aa, synthetic construct
  REGION 1..19: note = Description of Artificial Sequence: Synthetic peptide
  REGION 1..19: note = XENP019087 vhCDR2
EIRLKSNNYATHYAEPVKG

SEQ ID NO: 14892 - protein, 11 aa, synthetic construct
  REGION 1..11: note = Description of Artificial Sequence: Synthetic peptide
  REGION 1..11: note = XENP019087 vhCDR3
YYGNYGGYFDV

SEQ ID NO: 14893 - protein, 11 aa, synthetic construct
  REGION 1..11: note = Description of Artificial Sequence: Synthetic peptide
  REGION 1..11: note = XENP019087 vlCDR1
RASQSVSNDVA

SEQ ID NO: 14894 - protein, 7 aa, synthetic construct
  REGION 1..7: note = Description of Artificial Sequence: Synthetic peptide
  REGION 1..7: note = XENP019087 vlCDR2
YASHRYT

SEQ ID NO: 14895 - protein, 9 aa, synthetic construct
  REGION 1..9: note = Description of Artificial Sequence: Synthetic peptide
  REGION 1..9: note = XENP019087 vlCDR3
QQDYSSPRT

SEQ ID NO: 14896 - protein, 249 aa, synthetic construct
  REGION 1..249: note = Description of Artificial Sequence: Synthetic polypeptide
  REGION 1..249: note = XENP019088 1G6_H1.263_L1_scFv(GKPGS)4
EVQLVESGGGLVKPGGSLRLSCAASGFTFSNYWMNWVRQAPGKGLEWVGEIRLKSNNYATHYAEKVKGLFTISRDDSKSTVYLQMNSLKTEDTAVYYCTRYYGNYGGYFDVWGAGTLVTVSSGKPGSGKPGSGKPGSGKPGSSIVMTQSPATLSVSPGERATLSCRASQSVSNDVAWYQQKPGQSPRLLINYASHRYTGVPDRFTGSGYGTEFTLTISSLQSEDFAVYFCQQDYSSPRTFGGGTKVEIK

SEQ ID NO: 14897 - protein, 122 aa, synthetic construct
  REGION 1..122: note = Description of Artificial Sequence: Synthetic polypeptide
  REGION 1..122: note = VH of XENP019088
EVQLVESGGGLVKPGGSLRLSCAASGFTFSNYWMNWVRQAPGKGLEWVGEIRLKSNNYATHYAEKVKGLFTISRDDSKSTVYLQMNSLKTEDTAVYYCTRYYGNYGGYFDVWGAGTLVTVSS

SEQ ID NO: 14898 - protein, 107 aa, synthetic construct; identical to SEQ ID NO: 10923
  REGION 1..107: note = Description of Artificial Sequence: Synthetic polypeptide
  REGION 1..107: note = VL of XENP019088

SEQ ID NO: 14899 - protein, 5 aa, synthetic construct
  REGION 1..5: note = Description of Artificial Sequence: Synthetic peptide
  REGION 1..5: note = XENP019088 vhCDR1
NYWMN

SEQ ID NO: 14900 - protein, 19 aa, synthetic construct
  REGION 1..19: note = Description of Artificial Sequence: Synthetic peptide
  REGION 1..19: note = XENP019088 vhCDR2
EIRLKSNNYATHYAEKVKG

SEQ ID NO: 14901 - protein, 11 aa, synthetic construct
  REGION 1..11: note = Description of Artificial Sequence: Synthetic peptide
  REGION 1..11: note = XENP019088 vhCDR3
YYGNYGGYFDV

SEQ ID NO: 14902 - protein, 11 aa, synthetic construct
  REGION 1..11: note = Description of Artificial Sequence: Synthetic peptide
  REGION 1..11: note = XENP019088 vlCDR1
RASQSVSNDVA

SEQ ID NO: 14903 - protein, 7 aa, synthetic construct
  REGION 1..7: note = Description of Artificial Sequence: Synthetic peptide
  REGION 1..7: note = XENP019088 vlCDR2
YASHRYT

SEQ ID NO: 14904 - protein, 9 aa, synthetic construct
  REGION 1..9: note = Description of Artificial Sequence: Synthetic peptide
  REGION 1..9: note = XENP019088 vlCDR3
QQDYSSPRT

SEQ ID NO: 14905 - protein, 249 aa, synthetic construct
  REGION 1..249: note = Description of Artificial Sequence: Synthetic polypeptide
  REGION 1..249: note = XENP019089 1G6_H1.264_L1_scFv(GKPGS)4
EVQLVESGGGLVKPGGSLRLSCKASGDTFSNYWMNWVRQAPGKGLEWVGEIRLKSNNYATHYAEPVKGRFTISRDDSKSTVYLQMNSLKTEDTAVYYCTRYYGNYGGYFDVWGAGTLVTVSSGKPGSGKPGSGKPGSGKPGSSIVMTQSPATLSVSPGERATLSCRASQSVSNDVAWYQQKPGQSPRLLINYASHRYTGVPDRFTGSGYGTEFTLTISSLQSEDFAVYFCQQDYSSPRTFGGGTKVEIK

SEQ ID NO: 14906 - protein, 122 aa, synthetic construct
  REGION 1..122: note = Description of Artificial Sequence: Synthetic polypeptide
  REGION 1..122: note = VH of XENP019089
EVQLVESGGGLVKPGGSLRLSCKASGDTFSNYWMNWVRQAPGKGLEWVGEIRLKSNNYATHYAEPVKGRFTISRDDSKSTVYLQMNSLKTEDTAVYYCTRYYGNYGGYFDVWGAGTLVTVSS

SEQ ID NO: 14907 - protein, 107 aa, synthetic construct; identical to SEQ ID NO: 10923
  REGION 1..107: note = Description of Artificial Sequence: Synthetic polypeptide
  REGION 1..107: note = VL of XENP019089

SEQ ID NO: 14908 - protein, 5 aa, synthetic construct
  REGION 1..5: note = Description of Artificial Sequence: Synthetic peptide
  REGION 1..5: note = XENP019089 vhCDR1
NYWMN

SEQ ID NO: 14909 - protein, 19 aa, synthetic construct
  REGION 1..19: note = Description of Artificial Sequence: Synthetic peptide
  REGION 1..19: note = XENP019089 vhCDR2
EIRLKSNNYATHYAEPVKG

SEQ ID NO: 14910 - protein, 11 aa, synthetic construct
  REGION 1..11: note = Description of Artificial Sequence: Synthetic peptide
  REGION 1..11: note = XENP019089 vhCDR3
YYGNYGGYFDV

SEQ ID NO: 14911 - protein, 11 aa, synthetic construct
  REGION 1..11: note = Description of Artificial Sequence: Synthetic peptide
  REGION 1..11: note = XENP019089 vlCDR1
RASQSVSNDVA

SEQ ID NO: 14912 - protein, 7 aa, synthetic construct
  REGION 1..7: note = Description of Artificial Sequence: Synthetic peptide
  REGION 1..7: note = XENP019089 vlCDR2
YASHRYT

SEQ ID NO: 14913 - protein, 9 aa, synthetic construct
  REGION 1..9: note = Description of Artificial Sequence: Synthetic peptide
  REGION 1..9: note = XENP019089 vlCDR3
QQDYSSPRT

SEQ ID NO: 14914 - protein, 249 aa, synthetic construct
  REGION 1..249: note = Description of Artificial Sequence: Synthetic polypeptide
  REGION 1..249: note = XENP019090 1G6_H1.265_L1_scFv(GKPGS)4
EVQLVESGGGLVKPGESLRLSCAASGFTFSNYWMNWVRQAPGKGLEWVGEIRLKSNNYATHYAEPVKGRFTISRDDSKSTVYLKMNSLKTEDTAVYYCTRYYGNYGGYFDVWGAGTLVTVSSGKPGSGKPGSGKPGSGKPGSSIVMTQSPATLSVSPGERATLSCRASQSVSNDVAWYQQKPGQSPRLLINYASHRYTGVPDRFTGSGYGTEFTLTISSLQSEDFAVYFCQQDYSSPRTFGGGTKVEIK

SEQ ID NO: 14915 - protein, 122 aa, synthetic construct
  REGION 1..122: note = Description of Artificial Sequence: Synthetic polypeptide
  REGION 1..122: note = VH of XENP019090
EVQLVESGGGLVKPGESLRLSCAASGFTFSNYWMNWVRQAPGKGLEWVGEIRLKSNNYATHYAEPVKGRFTISRDDSKSTVYLKMNSLKTEDTAVYYCTRYYGNYGGYFDVWGAGTLVTVSS

SEQ ID NO: 14916 - protein, 107 aa, synthetic construct; identical to SEQ ID NO: 10923
  REGION 1..107: note = Description of Artificial Sequence: Synthetic polypeptide
  REGION 1..107: note = VL of XENP019090

SEQ ID NO: 14917 - protein, 5 aa, synthetic construct
  REGION 1..5: note = Description of Artificial Sequence: Synthetic peptide
  REGION 1..5: note = XENP019090 vhCDR1
NYWMN

SEQ ID NO: 14918 - protein, 19 aa, synthetic construct
  REGION 1..19: note = Description of Artificial Sequence: Synthetic peptide
  REGION 1..19: note = XENP019090 vhCDR2
EIRLKSNNYATHYAEPVKG

SEQ ID NO: 14919 - protein, 11 aa, synthetic construct
  REGION 1..11: note = Description of Artificial Sequence: Synthetic peptide
  REGION 1..11: note = XENP019090 vhCDR3
YYGNYGGYFDV

SEQ ID NO: 14920 - protein, 11 aa, synthetic construct
  REGION 1..11: note = Description of Artificial Sequence: Synthetic peptide
  REGION 1..11: note = XENP019090 vlCDR1
RASQSVSNDVA

SEQ ID NO: 14921 - protein, 7 aa, synthetic construct
  REGION 1..7: note = Description of Artificial Sequence: Synthetic peptide
  REGION 1..7: note = XENP019090 vlCDR2
YASHRYT

SEQ ID NO: 14922 - protein, 9 aa, synthetic construct
  REGION 1..9: note = Description of Artificial Sequence: Synthetic peptide
  REGION 1..9: note = XENP019090 vlCDR3
QQDYSSPRT

SEQ ID NO: 14923 - protein, 249 aa, synthetic construct
  REGION 1..249: note = Description of Artificial Sequence: Synthetic polypeptide
  REGION 1..249: note = XENP019091 1G6_H1.266_L1_scFv(GKPGS)4
EVQLVESGGGLVKPGGSLRLSCAASGFTFSNYWMNWVRQAPGKGLEWVGEIRLKSNNYATHYAQPVKDRFTISRDDSKSTVYLQMNSLKTEDTAVYYCTRYYGNYGGYFDVWGAGTLVTVSSGKPGSGKPGSGKPGSGKPGSSIVMTQSPATLSVSPGERATLSCRASQSVSNDVAWYQQKPGQSPRLLINYASHRYTGVPDRFTGSGYGTEFTLTISSLQSEDFAVYFCQQDYSSPRTFGGGTKVEIK

SEQ ID NO: 14924 - protein, 122 aa, synthetic construct
  REGION 1..122: note = Description of Artificial Sequence: Synthetic polypeptide
  REGION 1..122: note = VH of XENP019091
EVQLVESGGGLVKPGGSLRLSCAASGFTFSNYWMNWVRQAPGKGLEWVGEIRLKSNNYATHYAQPVKDRFTISRDDSKSTVYLQMNSLKTEDTAVYYCTRYYGNYGGYFDVWGAGTLVTVSS

SEQ ID NO: 14925 - protein, 107 aa, synthetic construct; identical to SEQ ID NO: 10923
  REGION 1..107: note = Description of Artificial Sequence: Synthetic polypeptide
  REGION 1..107: note = VL of XENP019091

SEQ ID NO: 14926 - protein, 5 aa, synthetic construct
  REGION 1..5: note = Description of Artificial Sequence: Synthetic peptide
  REGION 1..5: note = XENP019091 vhCDR1
NYWMN

SEQ ID NO: 14927 - protein, 19 aa, synthetic construct
  REGION 1..19: note = Description of Artificial Sequence: Synthetic peptide
  REGION 1..19: note = XENP019091 vhCDR2
EIRLKSNNYATHYAQPVKD

SEQ ID NO: 14928 - protein, 11 aa, synthetic construct
  REGION 1..11: note = Description of Artificial Sequence: Synthetic peptide
  REGION 1..11: note = XENP019091 vhCDR3
YYGNYGGYFDV

SEQ ID NO: 14929 - protein, 11 aa, synthetic construct
  REGION 1..11: note = Description of Artificial Sequence: Synthetic peptide
  REGION 1..11: note = XENP019091 vlCDR1
RASQSVSNDVA

SEQ ID NO: 14930 - protein, 7 aa, synthetic construct
  REGION 1..7: note = Description of Artificial Sequence: Synthetic peptide
  REGION 1..7: note = XENP019091 vlCDR2
YASHRYT

SEQ ID NO: 14931 - protein, 9 aa, synthetic construct
  REGION 1..9: note = Description of Artificial Sequence: Synthetic peptide
  REGION 1..9: note = XENP019091 vlCDR3
QQDYSSPRT

SEQ ID NO: 14932 - protein, 249 aa, synthetic construct
  REGION 1..249: note = Description of Artificial Sequence: Synthetic polypeptide
  REGION 1..249: note = XENP019092 1G6_H1.267_L1_scFv(GKPGS)4
EVQLVESGGGLVKPGGSLRLSCAASGFTFSNYWMNWVRQAPGKGLEWVGEIRLKSNNYATHYAEPVKGRFTISRDDSKSTVYLEMNSRKTEDTAVYYCTRYYGNYGGYFDVWGAGTLVTVSSGKPGSGKPGSGKPGSGKPGSSIVMTQSPATLSVSPGERATLSCRASQSVSNDVAWYQQKPGQSPRLLINYASHRYTGVPDRFTGSGYGTEFTLTISSLQSEDFAVYFCQQDYSSPRTFGGGTKVEIK

SEQ ID NO: 14933 - protein, 122 aa, synthetic construct
  REGION 1..122: note = Description of Artificial Sequence: Synthetic polypeptide
  REGION 1..122: note = VH of XENP019092
EVQLVESGGGLVKPGGSLRLSCAASGFTFSNYWMNWVRQAPGKGLEWVGEIRLKSNNYATHYAEPVKGRFTISRDDSKSTVYLEMNSRKTEDTAVYYCTRYYGNYGGYFDVWGAGTLVTVSS

SEQ ID NO: 14934 - protein, 107 aa, synthetic construct; identical to SEQ ID NO: 10923
  REGION 1..107: note = Description of Artificial Sequence: Synthetic polypeptide
  REGION 1..107: note = VL of XENP019092

SEQ ID NO: 14935 - protein, 5 aa, synthetic construct
  REGION 1..5: note = Description of Artificial Sequence: Synthetic peptide
  REGION 1..5: note = XENP019092 vhCDR1
NYWMN

SEQ ID NO: 14936 - protein, 19 aa, synthetic construct
  REGION 1..19: note = Description of Artificial Sequence: Synthetic peptide
  REGION 1..19: note = XENP019092 vhCDR2
EIRLKSNNYATHYAEPVKG

SEQ ID NO: 14937 - protein, 11 aa, synthetic construct
  REGION 1..11: note = Description of Artificial Sequence: Synthetic peptide
  REGION 1..11: note = XENP019092 vhCDR3
YYGNYGGYFDV

SEQ ID NO: 14938 - protein, 11 aa, synthetic construct
  REGION 1..11: note = Description of Artificial Sequence: Synthetic peptide
  REGION 1..11: note = XENP019092 vlCDR1
RASQSVSNDVA

SEQ ID NO: 14939 - protein, 7 aa, synthetic construct
  REGION 1..7: note = Description of Artificial Sequence: Synthetic peptide
  REGION 1..7: note = XENP019092 vlCDR2
YASHRYT

SEQ ID NO: 14940 - protein, 9 aa, synthetic construct
  REGION 1..9: note = Description of Artificial Sequence: Synthetic peptide
  REGION 1..9: note = XENP019092 vlCDR3
QQDYSSPRT

SEQ ID NO: 14941 - protein, 249 aa, synthetic construct
  REGION 1..249: note = Description of Artificial Sequence: Synthetic polypeptide
  REGION 1..249: note = XENP019093 1G6_H1.268_L1_scFv(GKPGS)4
EVQLVESGGGLVKPGESLRLSCAASGFTFSNYWMNWVRQAPGKGLEWVGEIRLKSNNYATHYAEPVKGRFTISRDDSKSTVYLQMRSLKTEDTAVYYCTRYYGNYGGYFDVWGAGTLVTVSSGKPGSGKPGSGKPGSGKPGSSIVMTQSPATLSVSPGERATLSCRASQSVSNDVAWYQQKPGQSPRLLINYASHRYTGVPDRFTGSGYGTEFTLTISSLQSEDFAVYFCQQDYSSPRTFGGGTKVEIK

SEQ ID NO: 14942 - protein, 122 aa, synthetic construct
  REGION 1..122: note = Description of Artificial Sequence: Synthetic polypeptide
  REGION 1..122: note = VH of XENP019093
EVQLVESGGGLVKPGESLRLSCAASGFTFSNYWMNWVRQAPGKGLEWVGEIRLKSNNYATHYAEPVKGRFTISRDDSKSTVYLQMRSLKTEDTAVYYCTRYYGNYGGYFDVWGAGTLVTVSS

SEQ ID NO: 14943 - protein, 107 aa, synthetic construct; identical to SEQ ID NO: 10923
  REGION 1..107: note = Description of Artificial Sequence: Synthetic polypeptide
  REGION 1..107: note = VL of XENP019093

SEQ ID NO: 14944 - protein, 5 aa, synthetic construct
  REGION 1..5: note = Description of Artificial Sequence: Synthetic peptide
  REGION 1..5: note = XENP019093 vhCDR1
NYWMN

SEQ ID NO: 14945 - protein, 19 aa, synthetic construct
  REGION 1..19: note = Description of Artificial Sequence: Synthetic peptide
  REGION 1..19: note = XENP019093 vhCDR2
EIRLKSNNYATHYAEPVKG

SEQ ID NO: 14946 - protein, 11 aa, synthetic construct
  REGION 1..11: note = Description of Artificial Sequence: Synthetic peptide
  REGION 1..11: note = XENP019093 vhCDR3
YYGNYGGYFDV

SEQ ID NO: 14947 - protein, 11 aa, synthetic construct
  REGION 1..11: note = Description of Artificial Sequence: Synthetic peptide
  REGION 1..11: note = XENP019093 vlCDR1
RASQSVSNDVA

SEQ ID NO: 14948 - protein, 7 aa, synthetic construct
  REGION 1..7: note = Description of Artificial Sequence: Synthetic peptide
  REGION 1..7: note = XENP019093 vlCDR2
YASHRYT

SEQ ID NO: 14949 - protein, 9 aa, synthetic construct
  REGION 1..9: note = Description of Artificial Sequence: Synthetic peptide
  REGION 1..9: note = XENP019093 vlCDR3
QQDYSSPRT

SEQ ID NO: 14950 - protein, 249 aa, synthetic construct
  REGION 1..249: note = Description of Artificial Sequence: Synthetic polypeptide
  REGION 1..249: note = XENP019094 1G6_H1.269_L1_scFv(GKPGS)4
EVQLVESGGGLVKPGGSLRLSCAASGFTFSNFWMNWVRQAPGKGLEWVGEIRLYSNNYATHYAEPVKGRFTISRDDSKSTVYLQMNSLKTEDTAVYYCTRYYGNYGGYFDVWGAGTLVTVSSGKPGSGKPGSGKPGSGKPGSSIVMTQSPATLSVSPGERATLSCRASQSVSNDVAWYQQKPGQSPRLLINYASHRYTGVPDRFTGSGYGTEFTLTISSLQSEDFAVYFCQQDYSSPRTFGGGTKVEIK

SEQ ID NO: 14951 - protein, 122 aa, synthetic construct
  REGION 1..122: note = Description of Artificial Sequence: Synthetic polypeptide
  REGION 1..122: note = VH of XENP019094
EVQLVESGGGLVKPGGSLRLSCAASGFTFSNFWMNWVRQAPGKGLEWVGEIRLYSNNYATHYAEPVKGRFTISRDDSKSTVYLQMNSLKTEDTAVYYCTRYYGNYGGYFDVWGAGTLVTVSS

SEQ ID NO: 14952 - protein, 107 aa, synthetic construct; identical to SEQ ID NO: 10923
  REGION 1..107: note = Description of Artificial Sequence: Synthetic polypeptide
  REGION 1..107: note = VL of XENP019094

SEQ ID NO: 14953 - protein, 5 aa, synthetic construct
  REGION 1..5: note = Description of Artificial Sequence: Synthetic peptide
  REGION 1..5: note = XENP019094 vhCDR1
NFWMN

SEQ ID NO: 14954 - protein, 19 aa, synthetic construct
  REGION 1..19: note = Description of Artificial Sequence: Synthetic peptide
  REGION 1..19: note = XENP019094 vhCDR2
EIRLYSNNYATHYAEPVKG

SEQ ID NO: 14955 - protein, 11 aa, synthetic construct
  REGION 1..11: note = Description of Artificial Sequence: Synthetic peptide
  REGION 1..11: note = XENP019094 vhCDR3
YYGNYGGYFDV

SEQ ID NO: 14956 - protein, 11 aa, synthetic construct
  REGION 1..11: note = Description of Artificial Sequence: Synthetic peptide
  REGION 1..11: note = XENP019094 vlCDR1
RASQSVSNDVA

SEQ ID NO: 14957 - protein, 7 aa, synthetic construct
  REGION 1..7: note = Description of Artificial Sequence: Synthetic peptide
  REGION 1..7: note = XENP019094 vlCDR2
YASHRYT

SEQ ID NO: 14958 - protein, 9 aa, synthetic construct
  REGION 1..9: note = Description of Artificial Sequence: Synthetic peptide
  REGION 1..9: note = XENP019094 vlCDR3
QQDYSSPRT

SEQ ID NO: 14959 - protein, 249 aa, synthetic construct
  REGION 1..249: note = Description of Artificial Sequence: Synthetic polypeptide
  REGION 1..249: note = XENP019095 1G6_H1.270_L1_scFv(GKPGS)4
EVQLVESGGGLVKPGGSLRLSCAASGFTFSNYWMNWVRQAPGKGLEWVGEIRWYSNNYATHYAEPVKGRFTISRDDSKSTVYLQMNSLKTEDTAVYYCTRYYGNYGGYFDVWGAGTLVTVSSGKPGSGKPGSGKPGSGKPGSSIVMTQSPATLSVSPGERATLSCRASQSVSNDVAWYQQKPGQSPRLLINYASHRYTGVPDRFTGSGYGTEFTLTISSLQSEDFAVYFCQQDYSSPRTFGGGTKVEIK

SEQ ID NO: 14960 - protein, 122 aa, synthetic construct
  REGION 1..122: note = Description of Artificial Sequence: Synthetic polypeptide
  REGION 1..122: note = VH of XENP019095
EVQLVESGGGLVKPGGSLRLSCAASGFTFSNYWMNWVRQAPGKGLEWVGEIRWYSNNYATHYAEPVKGRFTISRDDSKSTVYLQMNSLKTEDTAVYYCTRYYGNYGGYFDVWGAGTLVTVSS

SEQ ID NO: 14961 - protein, 107 aa, synthetic construct; identical to SEQ ID NO: 10923
  REGION 1..107: note = Description of Artificial Sequence: Synthetic polypeptide
  REGION 1..107: note = VL of XENP019095

SEQ ID NO: 14962 - protein, 5 aa, synthetic construct
  REGION 1..5: note = Description of Artificial Sequence: Synthetic peptide
  REGION 1..5: note = XENP019095 vhCDR1
NYWMN

SEQ ID NO: 14963 - protein, 19 aa, synthetic construct
  REGION 1..19: note = Description of Artificial Sequence: Synthetic peptide
  REGION 1..19: note = XENP019095 vhCDR2
EIRWYSNNYATHYAEPVKG

SEQ ID NO: 14964 - protein, 11 aa, synthetic construct
  REGION 1..11: note = Description of Artificial Sequence: Synthetic peptide
  REGION 1..11: note = XENP019095 vhCDR3
YYGNYGGYFDV

SEQ ID NO: 14965 - protein, 11 aa, synthetic construct
  REGION 1..11: note = Description of Artificial Sequence: Synthetic peptide
  REGION 1..11: note = XENP019095 vlCDR1
RASQSVSNDVA

SEQ ID NO: 14966 - protein, 7 aa, synthetic construct
  REGION 1..7: note = Description of Artificial Sequence: Synthetic peptide
  REGION 1..7: note = XENP019095 vlCDR2
YASHRYT

SEQ ID NO: 14967 - protein, 9 aa, synthetic construct
  REGION 1..9: note = Description of Artificial Sequence: Synthetic peptide
  REGION 1..9: note = XENP019095 vlCDR3
QQDYSSPRT

SEQ ID NO: 14968 - protein, 249 aa, synthetic construct
  REGION 1..249: note = Description of Artificial Sequence: Synthetic polypeptide
  REGION 1..249: note = XENP019096 1G6_H1.271_L1_scFv(GKPGS)4
EVQLVESGGGLVKPGGSLRLSCAASGFTFSNYWMNWVRQAPGKGLEWVGEIRLYSNNYATHYAEPVKGRFTISRDDSKSTLYLQMNSLKTEDTAVYYCTRYYGNYGGYFDVWGAGTLVTVSSGKPGSGKPGSGKPGSGKPGSSIVMTQSPATLSVSPGERATLSCRASQSVSNDVAWYQQKPGQSPRLLINYASHRYTGVPDRFTGSGYGTEFTLTISSLQSEDFAVYFCQQDYSSPRTFGGGTKVEIK

SEQ ID NO: 14969 - protein, 122 aa, synthetic construct
  REGION 1..122: note = Description of Artificial Sequence: Synthetic polypeptide
  REGION 1..122: note = VH of XENP019096
EVQLVESGGGLVKPGGSLRLSCAASGFTFSNYWMNWVRQAPGKGLEWVGEIRLYSNNYATHYAEPVKGRFTISRDDSKSTLYLQMNSLKTEDTAVYYCTRYYGNYGGYFDVWGAGTLVTVSS

SEQ ID NO: 14970 - protein, 107 aa, synthetic construct; identical to SEQ ID NO: 10923
  REGION 1..107: note = Description of Artificial Sequence: Synthetic polypeptide
  REGION 1..107: note = VL of XENP019096

SEQ ID NO: 14971 - protein, 5 aa, synthetic construct
  REGION 1..5: note = Description of Artificial Sequence: Synthetic peptide
  REGION 1..5: note = XENP019096 vhCDR1
NYWMN

SEQ ID NO: 14972 - protein, 19 aa, synthetic construct
  REGION 1..19: note = Description of Artificial Sequence: Synthetic peptide
  REGION 1..19: note = XENP019096 vhCDR2
EIRLYSNNYATHYAEPVKG

SEQ ID NO: 14973 - protein, 11 aa, synthetic construct
  REGION 1..11: note = Description of Artificial Sequence: Synthetic peptide
  REGION 1..11: note = XENP019096 vhCDR3
YYGNYGGYFDV

SEQ ID NO: 14974 - protein, 11 aa, synthetic construct
  REGION 1..11: note = Description of Artificial Sequence: Synthetic peptide
  REGION 1..11: note = XENP019096 vlCDR1
RASQSVSNDVA

SEQ ID NO: 14975 - protein, 7 aa, synthetic construct
  REGION 1..7: note = Description of Artificial Sequence: Synthetic peptide
  REGION 1..7: note = XENP019096 vlCDR2
YASHRYT

SEQ ID NO: 14976 - protein, 9 aa, synthetic construct
  REGION 1..9: note = Description of Artificial Sequence: Synthetic peptide
  REGION 1..9: note = XENP019096 vlCDR3
QQDYSSPRT

SEQ ID NO: 14977 - protein, 249 aa, synthetic construct
  REGION 1..249: note = Description of Artificial Sequence: Synthetic polypeptide
  REGION 1..249: note = XENP019101 1G6_H1.272_L1_scFv(GKPGS)4
EVQLVESGGGLVKPGGSLRLSCAASGFTFSNFWMNWVRQAPGKGLEWVGEIRLYSNNYATHYAEPVKGRFTISRDDSKSTLYLQMNSLKTEDTAVYYCTRYYGNYGGYFDVWGAGTLVTVSSGKPGSGKPGSGKPGSGKPGSSIVMTQSPATLSVSPGERATLSCRASQSVSNDVAWYQQKPGQSPRLLINYASHRYTGVPDRFTGSGYGTEFTLTISSLQSEDFAVYFCQQDYSSPRTFGGGTKVEIK

SEQ ID NO: 14978 - protein, 122 aa, synthetic construct
  REGION 1..122: note = Description of Artificial Sequence: Synthetic polypeptide
  REGION 1..122: note = VH of XENP019101
EVQLVESGGGLVKPGGSLRLSCAASGFTFSNFWMNWVRQAPGKGLEWVGEIRLYSNNYATHYAEPVKGRFTISRDDSKSTLYLQMNSLKTEDTAVYYCTRYYGNYGGYFDVWGAGTLVTVSS

SEQ ID NO: 14979 - protein, 107 aa, synthetic construct; identical to SEQ ID NO: 10923
  REGION 1..107: note = Description of Artificial Sequence: Synthetic polypeptide
  REGION 1..107: note = VL of XENP019101

SEQ ID NO: 14980 - protein, 5 aa, synthetic construct
  REGION 1..5: note = Description of Artificial Sequence: Synthetic peptide
  REGION 1..5: note = XENP019101 vhCDR1
NFWMN

SEQ ID NO: 14981 - protein, 19 aa, synthetic construct
  REGION 1..19: note = Description of Artificial Sequence: Synthetic peptide
  REGION 1..19: note = XENP019101 vhCDR2
EIRLYSNNYATHYAEPVKG

SEQ ID NO: 14982 - protein, 11 aa, synthetic construct
  REGION 1..11: note = Description of Artificial Sequence: Synthetic peptide
  REGION 1..11: note = XENP019101 vhCDR3
YYGNYGGYFDV

SEQ ID NO: 14983 - protein, 11 aa, synthetic construct
  REGION 1..11: note = Description of Artificial Sequence: Synthetic peptide
  REGION 1..11: note = XENP019101 vlCDR1
RASQSVSNDVA

SEQ ID NO: 14984 - protein, 7 aa, synthetic construct
  REGION 1..7: note = Description of Artificial Sequence: Synthetic peptide
  REGION 1..7: note = XENP019101 vlCDR2
YASHRYT

SEQ ID NO: 14985 - protein, 9 aa, synthetic construct
  REGION 1..9: note = Description of Artificial Sequence: Synthetic peptide
  REGION 1..9: note = XENP019101 vlCDR3
QQDYSSPRT

SEQ ID NO: 14986 - protein, 249 aa, synthetic construct
  REGION 1..249: note = Description of Artificial Sequence: Synthetic polypeptide
  REGION 1..249: note = XENP019102 1G6_H1.273_L1_scFv(GKPGS)4
EVQLVESGGGLVKPGGSLRLSCAASGFTFSNFWMNWVRQAPGKGLEWVGEIRWKSNNYATHYAEPVKGRFTISRDDSKSTLYLQMNSLKTEDTAVYYCTRYYGNYGGYFDVWGAGTLVTVSSGKPGSGKPGSGKPGSGKPGSSIVMTQSPATLSVSPGERATLSCRASQSVSNDVAWYQQKPGQSPRLLINYASHRYTGVPDRFTGSGYGTEFTLTISSLQSEDFAVYFCQQDYSSPRTFGGGTKVEIK

SEQ ID NO: 14987 - protein, 122 aa, synthetic construct
  REGION 1..122: note = Description of Artificial Sequence: Synthetic polypeptide
  REGION 1..122: note = VH of XENP019102
EVQLVESGGGLVKPGGSLRLSCAASGFTFSNFWMNWVRQAPGKGLEWVGEIRWKSNNYATHYAEPVKGRFTISRDDSKSTLYLQMNSLKTEDTAVYYCTRYYGNYGGYFDVWGAGTLVTVSS

SEQ ID NO: 14988 - protein, 107 aa, synthetic construct; identical to SEQ ID NO: 10923
  REGION 1..107: note = Description of Artificial Sequence: Synthetic polypeptide
  REGION 1..107: note = VL of XENP019102

SEQ ID NO: 14989 - protein, 5 aa, synthetic construct
  REGION 1..5: note = Description of Artificial Sequence: Synthetic peptide
  REGION 1..5: note = XENP019102 vhCDR1
NFWMN

SEQ ID NO: 14990 - protein, 19 aa, synthetic construct
  REGION 1..19: note = Description of Artificial Sequence: Synthetic peptide
  REGION 1..19: note = XENP019102 vhCDR2
EIRWKSNNYATHYAEPVKG

SEQ ID NO: 14991 - protein, 11 aa, synthetic construct
  REGION 1..11: note = Description of Artificial Sequence: Synthetic peptide
  REGION 1..11: note = XENP019102 vhCDR3
YYGNYGGYFDV

SEQ ID NO: 14992 - protein, 11 aa, synthetic construct
  REGION 1..11: note = Description of Artificial Sequence: Synthetic peptide
  REGION 1..11: note = XENP019102 vlCDR1
RASQSVSNDVA

SEQ ID NO: 14993 - protein, 7 aa, synthetic construct
  REGION 1..7: note = Description of Artificial Sequence: Synthetic peptide
  REGION 1..7: note = XENP019102 vlCDR2
YASHRYT

SEQ ID NO: 14994 - protein, 9 aa, synthetic construct
  REGION 1..9: note = Description of Artificial Sequence: Synthetic peptide
  REGION 1..9: note = XENP019102 vlCDR3
QQDYSSPRT

SEQ ID NO: 14995 - protein, 249 aa, synthetic construct
  REGION 1..249: note = Description of Artificial Sequence: Synthetic polypeptide
  REGION 1..249: note = XENP019103 1G6_H1.274_L1_scFv(GKPGS)4
EVQLVESGGGLVKPGGSLRLSCAASGFTFSNFWMNWVRQAPGKGLEWVGEIRLKKNNYATHYAEPVKGRFTISRDDSKSTLYLQMNSLKTEDTAVYYCTRYYGNYGGYFDVWGAGTLVTVSSGKPGSGKPGSGKPGSGKPGSSIVMTQSPATLSVSPGERATLSCRASQSVSNDVAWYQQKPGQSPRLLINYASHRYTGVPDRFTGSGYGTEFTLTISSLQSEDFAVYFCQQDYSSPRTFGGGTKVEIK

SEQ ID NO: 14996 - protein, 122 aa, synthetic construct
  REGION 1..122: note = Description of Artificial Sequence: Synthetic polypeptide
  REGION 1..122: note = VH of XENP019103
EVQLVESGGGLVKPGGSLRLSCAASGFTFSNFWMNWVRQAPGKGLEWVGEIRLKKNNYATHYAEPVKGRFTISRDDSKSTLYLQMNSLKTEDTAVYYCTRYYGNYGGYFDVWGAGTLVTVSS

SEQ ID NO: 14997 - protein, 107 aa, synthetic construct; identical to SEQ ID NO: 10923
  REGION 1..107: note = Description of Artificial Sequence: Synthetic polypeptide
  REGION 1..107: note = VL of XENP019103

SEQ ID NO: 14998 - protein, 5 aa, synthetic construct
  REGION 1..5: note = Description of Artificial Sequence: Synthetic peptide
  REGION 1..5: note = XENP019103 vhCDR1
NFWMN

SEQ ID NO: 14999 - protein, 19 aa, synthetic construct
  REGION 1..19: note = Description of Artificial Sequence: Synthetic peptide
  REGION 1..19: note = XENP019103 vhCDR2
EIRLKKNNYATHYAEPVKG

SEQ ID NO: 15000 - protein, 11 aa, synthetic construct
  REGION 1..11: note = Description of Artificial Sequence: Synthetic peptide
  REGION 1..11: note = XENP019103 vhCDR3
YYGNYGGYFDV

SEQ ID NO: 15001 - protein, 11 aa, synthetic construct
  REGION 1..11: note = Description of Artificial Sequence: Synthetic peptide
  REGION 1..11: note = XENP019103 vlCDR1
RASQSVSNDVA

SEQ ID NO: 15002 - protein, 7 aa, synthetic construct
  REGION 1..7: note = Description of Artificial Sequence: Synthetic peptide
  REGION 1..7: note = XENP019103 vlCDR2
YASHRYT

SEQ ID NO: 15003 - protein, 9 aa, synthetic construct
  REGION 1..9: note = Description of Artificial Sequence: Synthetic peptide
  REGION 1..9: note = XENP019103 vlCDR3
QQDYSSPRT

SEQ ID NO: 15004 - protein, 249 aa, synthetic construct
  REGION 1..249: note = Description of Artificial Sequence: Synthetic polypeptide
  REGION 1..249: note = XENP019104 1G6_H1.275_L1_scFv(GKPGS)4
EVQLVESGGGLVKPGGSLRLSCAASGFTFSNFWMNWVRQAPGKGLEWVGEIRWYSNNYATHYAEPVKGRFTISRDDSKSTLYLQMNSLKTEDTAVYYCTRYYGNYGGYFDVWGAGTLVTVSSGKPGSGKPGSGKPGSGKPGSSIVMTQSPATLSVSPGERATLSCRASQSVSNDVAWYQQKPGQSPRLLINYASHRYTGVPDRFTGSGYGTEFTLTISSLQSEDFAVYFCQQDYSSPRTFGGGTKVEIK

SEQ ID NO: 15005 - protein, 122 aa, synthetic construct
  REGION 1..122: note = Description of Artificial Sequence: Synthetic polypeptide
  REGION 1..122: note = VH of XENP019104
EVQLVESGGGLVKPGGSLRLSCAASGFTFSNFWMNWVRQAPGKGLEWVGEIRWYSNNYATHYAEPVKGRFTISRDDSKSTLYLQMNSLKTEDTAVYYCTRYYGNYGGYFDVWGAGTLVTVSS

SEQ ID NO: 15006 - protein, 107 aa, synthetic construct; identical to SEQ ID NO: 10923
  REGION 1..107: note = Description of Artificial Sequence: Synthetic polypeptide
  REGION 1..107: note = VL of XENP019104

SEQ ID NO: 15007 - protein, 5 aa, synthetic construct
  REGION 1..5: note = Description of Artificial Sequence: Synthetic peptide
  REGION 1..5: note = XENP019104 vhCDR1
NFWMN

SEQ ID NO: 15008 - protein, 19 aa, synthetic construct
  REGION 1..19: note = Description of Artificial Sequence: Synthetic peptide
  REGION 1..19: note = XENP019104 vhCDR2
EIRWYSNNYATHYAEPVKG

SEQ ID NO: 15009 - protein, 11 aa, synthetic construct
  REGION 1..11: note = Description of Artificial Sequence: Synthetic peptide
  REGION 1..11: note = XENP019104 vhCDR3
YYGNYGGYFDV

SEQ ID NO: 15010 - protein, 11 aa, synthetic construct
  REGION 1..11: note = Description of Artificial Sequence: Synthetic peptide
  REGION 1..11: note = XENP019104 vlCDR1
RASQSVSNDVA

SEQ ID NO: 15011 - protein, 7 aa, synthetic construct
  REGION 1..7: note = Description of Artificial Sequence: Synthetic peptide
  REGION 1..7: note = XENP019104 vlCDR2
YASHRYT

SEQ ID NO: 15012 - protein, 9 aa, synthetic construct
  REGION 1..9: note = Description of Artificial Sequence: Synthetic peptide
  REGION 1..9: note = XENP019104 vlCDR3
QQDYSSPRT

SEQ ID NO: 15013 - protein, 249 aa, synthetic construct
  REGION 1..249: note = Description of Artificial Sequence: Synthetic polypeptide
  REGION 1..249: note = XENP019105 1G6_H1.276_L1_scFv(GKPGS)4
EVQLVESGGGLVQPGGSLKLSCAASGFTFSNYWMNWVRQAPGKGLEWVGEIRLKSNNYATHYAASVKGRFTISRDDSKSTLYLQMNSLKTEDTAVYYCTRYYGNYGGYFDVWGQGTLVTVSSGKPGSGKPGSGKPGSGKPGSSIVMTQSPATLSVSPGERATLSCRASQSVSNDVAWYQQKPGQSPRLLINYASHRYTGVPDRFTGSGYGTEFTLTISSLQSEDFAVYFCQQDYSSPRTFGGGTKVEIK

SEQ ID NO: 15014 - protein, 122 aa, synthetic construct
  REGION 1..122: note = Description of Artificial Sequence: Synthetic polypeptide
  REGION 1..122: note = VH of XENP019105
EVQLVESGGGLVQPGGSLKLSCAASGFTFSNYWMNWVRQAPGKGLEWVGEIRLKSNNYATHYAASVKGRFTISRDDSKSTLYLQMNSLKTEDTAVYYCTRYYGNYGGYFDVWGQGTLVTVSS

SEQ ID NO: 15015 - protein, 107 aa, synthetic construct; identical to SEQ ID NO: 10923
  REGION 1..107: note = Description of Artificial Sequence: Synthetic polypeptide
  REGION 1..107: note = VL of XENP019105

SEQ ID NO: 15016 - protein, 5 aa, synthetic construct
  REGION 1..5: note = Description of Artificial Sequence: Synthetic peptide
  REGION 1..5: note = XENP019105 vhCDR1
NYWMN

SEQ ID NO: 15017 - protein, 19 aa, synthetic construct
  REGION 1..19: note = Description of Artificial Sequence: Synthetic peptide
  REGION 1..19: note = XENP019105 vhCDR2
EIRLKSNNYATHYAASVKG

SEQ ID NO: 15018 - protein, 11 aa, synthetic construct
  REGION 1..11: note = Description of Artificial Sequence: Synthetic peptide
  REGION 1..11: note = XENP019105 vhCDR3
YYGNYGGYFDV

SEQ ID NO: 15019 - protein, 11 aa, synthetic construct
  REGION 1..11: note = Description of Artificial Sequence: Synthetic peptide
  REGION 1..11: note = XENP019105 vlCDR1
RASQSVSNDVA

SEQ ID NO: 15020 - protein, 7 aa, synthetic construct
  REGION 1..7: note = Description of Artificial Sequence: Synthetic peptide
  REGION 1..7: note = XENP019105 vlCDR2
YASHRYT

SEQ ID NO: 15021 - protein, 9 aa, synthetic construct
  REGION 1..9: note = Description of Artificial Sequence: Synthetic peptide
  REGION 1..9: note = XENP019105 vlCDR3
QQDYSSPRT

SEQ ID NO: 15022 - protein, 249 aa, synthetic construct
  REGION 1..249: note = Description of Artificial Sequence: Synthetic polypeptide
  REGION 1..249: note = XENP019106 1G6_H1.277_L1_scFv(GKPGS)4
EVQLVESGGGLVKPGGSLKLSCAASGFTFSNYWMNWVRQAPGKGLEWVGEIRLKSNNYATHYADSVKGRFTISRDDSKSTLYLQMNSLKTEDTAVYYCTRYYGNYGGYFDVWGQGTLVTVSSGKPGSGKPGSGKPGSGKPGSSIVMTQSPATLSVSPGERATLSCRASQSVSNDVAWYQQKPGQSPRLLINYASHRYTGVPDRFTGSGYGTEFTLTISSLQSEDFAVYFCQQDYSSPRTFGGGTKVEIK

SEQ ID NO: 15023 - protein, 122 aa, synthetic construct
  REGION 1..122: note = Description of Artificial Sequence: Synthetic polypeptide
  REGION 1..122: note = VH of XENP019106
EVQLVESGGGLVKPGGSLKLSCAASGFTFSNYWMNWVRQAPGKGLEWVGEIRLKSNNYATHYADSVKGRFTISRDDSKSTLYLQMNSLKTEDTAVYYCTRYYGNYGGYFDVWGQGTLVTVSS

SEQ ID NO: 15024 - protein, 107 aa, synthetic construct; identical to SEQ ID NO: 10923
  REGION 1..107: note = Description of Artificial Sequence: Synthetic polypeptide
  REGION 1..107: note = VL of XENP019106

SEQ ID NO: 15025 - protein, 5 aa, synthetic construct
  REGION 1..5: note = Description of Artificial Sequence: Synthetic peptide
  REGION 1..5: note = XENP019106 vhCDR1
NYWMN

SEQ ID NO: 15026 - protein, 19 aa, synthetic construct
  REGION 1..19: note = Description of Artificial Sequence: Synthetic peptide
  REGION 1..19: note = XENP019106 vhCDR2
EIRLKSNNYATHYADSVKG

SEQ ID NO: 15027 - protein, 11 aa, synthetic construct
  REGION 1..11: note = Description of Artificial Sequence: Synthetic peptide
  REGION 1..11: note = XENP019106 vhCDR3
YYGNYGGYFDV

SEQ ID NO: 15028 - protein, 11 aa, synthetic construct
  REGION 1..11: note = Description of Artificial Sequence: Synthetic peptide
  REGION 1..11: note = XENP019106 vlCDR1
RASQSVSNDVA

SEQ ID NO: 15029 - protein, 7 aa, synthetic construct
  REGION 1..7: note = Description of Artificial Sequence: Synthetic peptide
  REGION 1..7: note = XENP019106 vlCDR2
YASHRYT

SEQ ID NO: 15030 - protein, 9 aa, synthetic construct
  REGION 1..9: note = Description of Artificial Sequence: Synthetic peptide
  REGION 1..9: note = XENP019106 vlCDR3
QQDYSSPRT

SEQ ID NO: 15031 - protein, 249 aa, synthetic construct
  REGION 1..249: note = Description of Artificial Sequence: Synthetic polypeptide
  REGION 1..249: note = XENP019107 1G6_H1_L1.146_scFv(GKPGS)4
EVQLVESGGGLVKPGGSLRLSCAASGFTFSNYWMNWVRQAPGKGLEWVGEIRLKSNNYATHYAEPVKGRFTISRDDSKSTVYLQMNSLKTEDTAVYYCTRYYGNYGGYFDVWGAGTLVTVSSGKPGSGKPGSGKPGSGKPGSSIVMTQSPATLAVSPGERATLSCRASQSVSNDVAWYQQKPGQSPRLLINYASHRYTGVPDRFTGSGYGTEFTLTISSLQSEDFAVYFCQQDYSSPRTFGGGTKVEIK

SEQ ID NO: 15032 - protein, 122 aa, synthetic construct; identical to SEQ ID NO: 10922
  REGION 1..122: note = Description of Artificial Sequence: Synthetic polypeptide
  REGION 1..122: note = VH of XENP019107

SEQ ID NO: 15033 - protein, 107 aa, synthetic construct
  REGION 1..107: note = Description of Artificial Sequence: Synthetic polypeptide
  REGION 1..107: note = VL of XENP019107
SIVMTQSPATLAVSPGERATLSCRASQSVSNDVAWYQQKPGQSPRLLINYASHRYTGVPDRFTGSGYGTEFTLTISSLQSEDFAVYFCQQDYSSPRTFGGGTKVEIK

SEQ ID NO: 15034 - protein, 5 aa, synthetic construct
  REGION 1..5: note = Description of Artificial Sequence: Synthetic peptide
  REGION 1..5: note = XENP019107 vhCDR1
NYWMN

SEQ ID NO: 15035 - protein, 19 aa, synthetic construct
  REGION 1..19: note = Description of Artificial Sequence: Synthetic peptide
  REGION 1..19: note = XENP019107 vhCDR2
EIRLKSNNYATHYAEPVKG

SEQ ID NO: 15036 - protein, 11 aa, synthetic construct
  REGION 1..11: note = Description of Artificial Sequence: Synthetic peptide
  REGION 1..11: note = XENP019107 vhCDR3
YYGNYGGYFDV

SEQ ID NO: 15037 - protein, 11 aa, synthetic construct
  REGION 1..11: note = Description of Artificial Sequence: Synthetic peptide
  REGION 1..11: note = XENP019107 vlCDR1
RASQSVSNDVA

SEQ ID NO: 15038 - protein, 7 aa, synthetic construct
  REGION 1..7: note = Description of Artificial Sequence: Synthetic peptide
  REGION 1..7: note = XENP019107 vlCDR2
YASHRYT

SEQ ID NO: 15039 - protein, 9 aa, synthetic construct
  REGION 1..9: note = Description of Artificial Sequence: Synthetic peptide
  REGION 1..9: note = XENP019107 vlCDR3
QQDYSSPRT

SEQ ID NO: 15040 - protein, 249 aa, synthetic construct
  REGION 1..249: note = Description of Artificial Sequence: Synthetic polypeptide
  REGION 1..249: note = XENP019108 1G6_H1_L1.147_scFv(GKPGS)4
EVQLVESGGGLVKPGGSLRLSCAASGFTFSNYWMNWVRQAPGKGLEWVGEIRLKSNNYATHYAEPVKGRFTISRDDSKSTVYLQMNSLKTEDTAVYYCTRYYGNYGGYFDVWGAGTLVTVSSGKPGSGKPGSGKPGSGKPGSSIVMTQSPATLPVSPGERATLSCRASQSVSNDVAWYQQKPGQSPRLLINYASHRYTGVPDRFTGSGYGTEFTLTISSLQSEDFAVYFCQQDYSSPRTFGGGTKVEIK

SEQ ID NO: 15041 - protein, 122 aa, synthetic construct; identical to SEQ ID NO: 10922
  REGION 1..122: note = Description of Artificial Sequence: Synthetic polypeptide
  REGION 1..122: note = VH of XENP019108

SEQ ID NO: 15042 - protein, 107 aa, synthetic construct
  REGION 1..107: note = Description of Artificial Sequence: Synthetic polypeptide
  REGION 1..107: note = VL of XENP019108
SIVMTQSPATLPVSPGERATLSCRASQSVSNDVAWYQQKPGQSPRLLINYASHRYTGVPDRFTGSGYGTEFTLTISSLQSEDFAVYFCQQDYSSPRTFGGGTKVEIK

SEQ ID NO: 15043 - protein, 5 aa, synthetic construct
  REGION 1..5: note = Description of Artificial Sequence: Synthetic peptide
  REGION 1..5: note = XENP019108 vhCDR1
NYWMN

SEQ ID NO: 15044 - protein, 19 aa, synthetic construct
  REGION 1..19: note = Description of Artificial Sequence: Synthetic peptide
  REGION 1..19: note = XENP019108 vhCDR2
EIRLKSNNYATHYAEPVKG

SEQ ID NO: 15045 - protein, 11 aa, synthetic construct
  REGION 1..11: note = Description of Artificial Sequence: Synthetic peptide
  REGION 1..11: note = XENP019108 vhCDR3
YYGNYGGYFDV

SEQ ID NO: 15046 - protein, 11 aa, synthetic construct
  REGION 1..11: note = Description of Artificial Sequence: Synthetic peptide
  REGION 1..11: note = XENP019108 vlCDR1
RASQSVSNDVA

SEQ ID NO: 15047 - protein, 7 aa, synthetic construct
  REGION 1..7: note = Description of Artificial Sequence: Synthetic peptide
  REGION 1..7: note = XENP019108 vlCDR2
YASHRYT

SEQ ID NO: 15048 - protein, 9 aa, synthetic construct
  REGION 1..9: note = Description of Artificial Sequence: Synthetic peptide
  REGION 1..9: note = XENP019108 vlCDR3
QQDYSSPRT

SEQ ID NO: 15049 - protein, 249 aa, synthetic construct
  REGION 1..249: note = Description of Artificial Sequence: Synthetic polypeptide
  REGION 1..249: note = XENP019109 1G6_H1_L1.148_scFv(GKPGS)4
EVQLVESGGGLVKPGGSLRLSCAASGFTFSNYWMNWVRQAPGKGLEWVGEIRLKSNNYATHYAEPVKGRFTISRDDSKSTVYLQMNSLKTEDTAVYYCTRYYGNYGGYFDVWGAGTLVTVSSGKPGSGKPGSGKPGSGKPGSSIVMTQSPATLSASPGERATLSCRASQSVSNDVAWYQQKPGQSPRLLINYASHRYTGVPDRFTGSGYGTEFTLTISSLQSEDFAVYFCQQDYSSPRTFGGGTKVEIK

SEQ ID NO: 15050 - protein, 122 aa, synthetic construct; identical to SEQ ID NO: 10922
  REGION 1..122: note = Description of Artificial Sequence: Synthetic polypeptide
  REGION 1..122: note = VH of XENP019109

SEQ ID NO: 15051 - protein, 107 aa, synthetic construct
  REGION 1..107: note = Description of Artificial Sequence: Synthetic polypeptide
  REGION 1..107: note = VL of XENP019109
SIVMTQSPATLSASPGERATLSCRASQSVSNDVAWYQQKPGQSPRLLINYASHRYTGVPDRFTGSGYGTEFTLTISSLQSEDFAVYFCQQDYSSPRTFGGGTKVEIK

SEQ ID NO: 15052 - protein, 5 aa, synthetic construct
  REGION 1..5: note = Description of Artificial Sequence: Synthetic peptide
  REGION 1..5: note = XENP019109 vhCDR1
NYWMN

SEQ ID NO: 15053 - protein, 19 aa, synthetic construct
  REGION 1..19: note = Description of Artificial Sequence: Synthetic peptide
  REGION 1..19: note = XENP019109 vhCDR2
EIRLKSNNYATHYAEPVKG

SEQ ID NO: 15054 - protein, 11 aa, synthetic construct
  REGION 1..11: note = Description of Artificial Sequence: Synthetic peptide
  REGION 1..11: note = XENP019109 vhCDR3
YYGNYGGYFDV

SEQ ID NO: 15055 - protein, 11 aa, synthetic construct
  REGION 1..11: note = Description of Artificial Sequence: Synthetic peptide
  REGION 1..11: note = XENP019109 vlCDR1
RASQSVSNDVA

SEQ ID NO: 15056 - protein, 7 aa, synthetic construct
  REGION 1..7: note = Description of Artificial Sequence: Synthetic peptide
  REGION 1..7: note = XENP019109 vlCDR2
YASHRYT

SEQ ID NO: 15057 - protein, 9 aa, synthetic construct
  REGION 1..9: note = Description of Artificial Sequence: Synthetic peptide
  REGION 1..9: note = XENP019109 vlCDR3
QQDYSSPRT

SEQ ID NO: 15058 - protein, 249 aa, synthetic construct
  REGION 1..249: note = Description of Artificial Sequence: Synthetic polypeptide
  REGION 1..249: note = XENP019110 1G6_H1_L1.149_scFv(GKPGS)4
EVQLVESGGGLVKPGGSLRLSCAASGFTFSNYWMNWVRQAPGKGLEWVGEIRLKSNNYATHYAEPVKGRFTISRDDSKSTVYLQMNSLKTEDTAVYYCTRYYGNYGGYFDVWGAGTLVTVSSGKPGSGKPGSGKPGSGKPGSSIVMTQSPATLSVSPGERASLSCRASQSVSNDVAWYQQKPGQSPRLLINYASHRYTGVPDRFTGSGYGTEFTLTISSLQSEDFAVYFCQQDYSSPRTFGGGTKVEIK

SEQ ID NO: 15059 - protein, 122 aa, synthetic construct; identical to SEQ ID NO: 10922
  REGION 1..122: note = Description of Artificial Sequence: Synthetic polypeptide
  REGION 1..122: note = VH of XENP019110

SEQ ID NO: 15060 - protein, 107 aa, synthetic construct
  REGION 1..107: note = Description of Artificial Sequence: Synthetic polypeptide
  REGION 1..107: note = VL of XENP019110
SIVMTQSPATLSVSPGERASLSCRASQSVSNDVAWYQQKPGQSPRLLINYASHRYTGVPDRFTGSGYGTEFTLTISSLQSEDFAVYFCQQDYSSPRTFGGGTKVEIK

SEQ ID NO: 15061 - protein, 5 aa, synthetic construct
  REGION 1..5: note = Description of Artificial Sequence: Synthetic peptide
  REGION 1..5: note = XENP019110 vhCDR1
NYWMN

SEQ ID NO: 15062 - protein, 19 aa, synthetic construct
  REGION 1..19: note = Description of Artificial Sequence: Synthetic peptide
  REGION 1..19: note = XENP019110 vhCDR2
EIRLKSNNYATHYAEPVKG

SEQ ID NO: 15063 - protein, 11 aa, synthetic construct
  REGION 1..11: note = Description of Artificial Sequence: Synthetic peptide
  REGION 1..11: note = XENP019110 vhCDR3
YYGNYGGYFDV

SEQ ID NO: 15064 - protein, 11 aa, synthetic construct
  REGION 1..11: note = Description of Artificial Sequence: Synthetic peptide
  REGION 1..11: note = XENP019110 vlCDR1
RASQSVSNDVA

SEQ ID NO: 15065 - protein, 7 aa, synthetic construct
  REGION 1..7: note = Description of Artificial Sequence: Synthetic peptide
  REGION 1..7: note = XENP019110 vlCDR2
YASHRYT

SEQ ID NO: 15066 - protein, 9 aa, synthetic construct
  REGION 1..9: note = Description of Artificial Sequence: Synthetic peptide
  REGION 1..9: note = XENP019110 vlCDR3
QQDYSSPRT

SEQ ID NO: 15067 - protein, 249 aa, synthetic construct
  REGION 1..249: note = Description of Artificial Sequence: Synthetic polypeptide
  REGION 1..249: note = XENP019111 1G6_H1_L1.150_scFv(GKPGS)4
EVQLVESGGGLVKPGGSLRLSCAASGFTFSNYWMNWVRQAPGKGLEWVGEIRLKSNNYATHYAEPVKGRFTISRDDSKSTVYLQMNSLKTEDTAVYYCTRYYGNYGGYFDVWGAGTLVTVSSGKPGSGKPGSGKPGSGKPGSSIVMTQSPATLSVSPGERATLKCRASQSVSNDVAWYQQKPGQSPRLLINYASHRYTGVPDRFTGSGYGTEFTLTISSLQSEDFAVYFCQQDYSSPRTFGGGTKVEIK

SEQ ID NO: 15068 - protein, 122 aa, synthetic construct; identical to SEQ ID NO: 10922
  REGION 1..122: note = Description of Artificial Sequence: Synthetic polypeptide
  REGION 1..122: note = VH of XENP019111

SEQ ID NO: 15069 - protein, 107 aa, synthetic construct
  REGION 1..107: note = Description of Artificial Sequence: Synthetic polypeptide
  REGION 1..107: note = VL of XENP019111
SIVMTQSPATLSVSPGERATLKCRASQSVSNDVAWYQQKPGQSPRLLINYASHRYTGVPDRFTGSGYGTEFTLTISSLQSEDFAVYFCQQDYSSPRTFGGGTKVEIK

SEQ ID NO: 15070 - protein, 5 aa, synthetic construct
  REGION 1..5: note = Description of Artificial Sequence: Synthetic peptide
  REGION 1..5: note = XENP019111 vhCDR1
NYWMN

SEQ ID NO: 15071 - protein, 19 aa, synthetic construct
  REGION 1..19: note = Description of Artificial Sequence: Synthetic peptide
  REGION 1..19: note = XENP019111 vhCDR2
EIRLKSNNYATHYAEPVKG

SEQ ID NO: 15072 - protein, 11 aa, synthetic construct
  REGION 1..11: note = Description of Artificial Sequence: Synthetic peptide
  REGION 1..11: note = XENP019111 vhCDR3
YYGNYGGYFDV

SEQ ID NO: 15073 - protein, 11 aa, synthetic construct
  REGION 1..11: note = Description of Artificial Sequence: Synthetic peptide
  REGION 1..11: note = XENP019111 vlCDR1
RASQSVSNDVA

SEQ ID NO: 15074 - protein, 7 aa, synthetic construct
  REGION 1..7: note = Description of Artificial Sequence: Synthetic peptide
  REGION 1..7: note = XENP019111 vlCDR2
YASHRYT

SEQ ID NO: 15075 - protein, 9 aa, synthetic construct
  REGION 1..9: note = Description of Artificial Sequence: Synthetic peptide
  REGION 1..9: note = XENP019111 vlCDR3
QQDYSSPRT

SEQ ID NO: 15076 - protein, 249 aa, synthetic construct
  REGION 1..249: note = Description of Artificial Sequence: Synthetic polypeptide
  REGION 1..249: note = XENP019112 1G6_H1_L1.151_scFv(GKPGS)4
EVQLVESGGGLVKPGGSLRLSCAASGFTFSNYWMNWVRQAPGKGLEWVGEIRLKSNNYATHYAEPVKGRFTISRDDSKSTVYLQMNSLKTEDTAVYYCTRYYGNYGGYFDVWGAGTLVTVSSGKPGSGKPGSGKPGSGKPGSSIVMTQSPATLSVSPGERATLSCRASQSVSNDVAWYQQKPEQSPRLLINYASHRYTGVPDRFTGSGYGTEFTLTISSLQSEDFAVYFCQQDYSSPRTFGGGTKVEIK

SEQ ID NO: 15077 - protein, 122 aa, synthetic construct; identical to SEQ ID NO: 10922
  REGION 1..122: note = Description of Artificial Sequence: Synthetic polypeptide
  REGION 1..122: note = VH of XENP019112

SEQ ID NO: 15078 - protein, 107 aa, synthetic construct
  REGION 1..107: note = Description of Artificial Sequence: Synthetic polypeptide
  REGION 1..107: note = VL of XENP019112
SIVMTQSPATLSVSPGERATLSCRASQSVSNDVAWYQQKPEQSPRLLINYASHRYTGVPDRFTGSGYGTEFTLTISSLQSEDFAVYFCQQDYSSPRTFGGGTKVEIK

SEQ ID NO: 15079 - protein, 5 aa, synthetic construct
  REGION 1..5: note = Description of Artificial Sequence: Synthetic peptide
  REGION 1..5: note = XENP019112 vhCDR1
NYWMN

SEQ ID NO: 15080 - protein, 19 aa, synthetic construct
  REGION 1..19: note = Description of Artificial Sequence: Synthetic peptide
  REGION 1..19: note = XENP019112 vhCDR2
EIRLKSNNYATHYAEPVKG

SEQ ID NO: 15081 - protein, 11 aa, synthetic construct
  REGION 1..11: note = Description of Artificial Sequence: Synthetic peptide
  REGION 1..11: note = XENP019112 vhCDR3
YYGNYGGYFDV

SEQ ID NO: 15082 - protein, 11 aa, synthetic construct
  REGION 1..11: note = Description of Artificial Sequence: Synthetic peptide
  REGION 1..11: note = XENP019112 vlCDR1
RASQSVSNDVA

SEQ ID NO: 15083 - protein, 7 aa, synthetic construct
  REGION 1..7: note = Description of Artificial Sequence: Synthetic peptide
  REGION 1..7: note = XENP019112 vlCDR2
YASHRYT

SEQ ID NO: 15084 - protein, 9 aa, synthetic construct
  REGION 1..9: note = Description of Artificial Sequence: Synthetic peptide
  REGION 1..9: note = XENP019112 vlCDR3
QQDYSSPRT

SEQ ID NO: 15085 - protein, 249 aa, synthetic construct
  REGION 1..249: note = Description of Artificial Sequence: Synthetic polypeptide
  REGION 1..249: note = XENP019113 1G6_H1_L1.152_scFv(GKPGS)4
EVQLVESGGGLVKPGGSLRLSCAASGFTFSNYWMNWVRQAPGKGLEWVGEIRLKSNNYATHYAEPVKGRFTISRDDSKSTVYLQMNSLKTEDTAVYYCTRYYGNYGGYFDVWGAGTLVTVSSGKPGSGKPGSGKPGSGKPGSSIVMTQSPATLSVSPGERATLSCRASQSVSNDVAWYQQKPGESPRLLINYASHRYTGVPDRFTGSGYGTEFTLTISSLQSEDFAVYFCQQDYSSPRTFGGGTKVEIK

SEQ ID NO: 15086 - protein, 122 aa, synthetic construct; identical to SEQ ID NO: 10922
  REGION 1..122: note = Description of Artificial Sequence: Synthetic polypeptide
  REGION 1..122: note = VH of XENP019113

SEQ ID NO: 15087 - protein, 107 aa, synthetic construct
  REGION 1..107: note = Description of Artificial Sequence: Synthetic polypeptide
  REGION 1..107: note = VL of XENP019113
SIVMTQSPATLSVSPGERATLSCRASQSVSNDVAWYQQKPGESPRLLINYASHRYTGVPDRFTGSGYGTEFTLTISSLQSEDFAVYFCQQDYSSPRTFGGGTKVEIK

SEQ ID NO: 15088 - protein, 5 aa, synthetic construct
  REGION 1..5: note = Description of Artificial Sequence: Synthetic peptide
  REGION 1..5: note = XENP019113 vhCDR1
NYWMN

SEQ ID NO: 15089 - protein, 19 aa, synthetic construct
  REGION 1..19: note = Description of Artificial Sequence: Synthetic peptide
  REGION 1..19: note = XENP019113 vhCDR2
EIRLKSNNYATHYAEPVKG

SEQ ID NO: 15090 - protein, 11 aa, synthetic construct
  REGION 1..11: note = Description of Artificial Sequence: Synthetic peptide
  REGION 1..11: note = XENP019113 vhCDR3
YYGNYGGYFDV

SEQ ID NO: 15091 - protein, 11 aa, synthetic construct
  REGION 1..11: note = Description of Artificial Sequence: Synthetic peptide
  REGION 1..11: note = XENP019113 vlCDR1
RASQSVSNDVA

SEQ ID NO: 15092 - protein, 7 aa, synthetic construct
  REGION 1..7: note = Description of Artificial Sequence: Synthetic peptide
  REGION 1..7: note = XENP019113 vlCDR2
YASHRYT

SEQ ID NO: 15093 - protein, 9 aa, synthetic construct
  REGION 1..9: note = Description of Artificial Sequence: Synthetic peptide
  REGION 1..9: note = XENP019113 vlCDR3
QQDYSSPRT

SEQ ID NO: 15094 - protein, 249 aa, synthetic construct
  REGION 1..249: note = Description of Artificial Sequence: Synthetic polypeptide
  REGION 1..249: note = XENP019114 1G6_H1_L1.153_scFv(GKPGS)4
EVQLVESGGGLVKPGGSLRLSCAASGFTFSNYWMNWVRQAPGKGLEWVGEIRLKSNNYATHYAEPVKGRFTISRDDSKSTVYLQMNSLKTEDTAVYYCTRYYGNYGGYFDVWGAGTLVTVSSGKPGSGKPGSGKPGSGKPGSSIVMTQSPATLSVSPGERATLSCRASQSVSNDVAWYQQKPGQSPRVLINYASHRYTGVPDRFTGSGYGTEFTLTISSLQSEDFAVYFCQQDYSSPRTFGGGTKVEIK

SEQ ID NO: 15095 - protein, 122 aa, synthetic construct; identical to SEQ ID NO: 10922
  REGION 1..122: note = Description of Artificial Sequence: Synthetic polypeptide
  REGION 1..122: note = VH of XENP019114

SEQ ID NO: 15096 - protein, 107 aa, synthetic construct
  REGION 1..107: note = Description of Artificial Sequence: Synthetic polypeptide
  REGION 1..107: note = VL of XENP019114
SIVMTQSPATLSVSPGERATLSCRASQSVSNDVAWYQQKPGQSPRVLINYASHRYTGVPDRFTGSGYGTEFTLTISSLQSEDFAVYFCQQDYSSPRTFGGGTKVEIK

SEQ ID NO: 15097 - protein, 5 aa, synthetic construct
  REGION 1..5: note = Description of Artificial Sequence: Synthetic peptide
  REGION 1..5: note = XENP019114 vhCDR1
NYWMN

SEQ ID NO: 15098 - protein, 19 aa, synthetic construct
  REGION 1..19: note = Description of Artificial Sequence: Synthetic peptide
  REGION 1..19: note = XENP019114 vhCDR2
EIRLKSNNYATHYAEPVKG

SEQ ID NO: 15099 - protein, 11 aa, synthetic construct
  REGION 1..11: note = Description of Artificial Sequence: Synthetic peptide
  REGION 1..11: note = XENP019114 vhCDR3
YYGNYGGYFDV

SEQ ID NO: 15100 - protein, 11 aa, synthetic construct
  REGION 1..11: note = Description of Artificial Sequence: Synthetic peptide
  REGION 1..11: note = XENP019114 vlCDR1
RASQSVSNDVA

SEQ ID NO: 15101 - protein, 7 aa, synthetic construct
  REGION 1..7: note = Description of Artificial Sequence: Synthetic peptide
  REGION 1..7: note = XENP019114 vlCDR2
YASHRYT

SEQ ID NO: 15102 - protein, 9 aa, synthetic construct
  REGION 1..9: note = Description of Artificial Sequence: Synthetic peptide
  REGION 1..9: note = XENP019114 vlCDR3
QQDYSSPRT

SEQ ID NO: 15103 - protein, 249 aa, synthetic construct
  REGION 1..249: note = Description of Artificial Sequence: Synthetic polypeptide
  REGION 1..249: note = XENP019115 1G6_H1_L1.154_scFv(GKPGS)4
EVQLVESGGGLVKPGGSLRLSCAASGFTFSNYWMNWVRQAPGKGLEWVGEIRLKSNNYATHYAEPVKGRFTISRDDSKSTVYLQMNSLKTEDTAVYYCTRYYGNYGGYFDVWGAGTLVTVSSGKPGSGKPGSGKPGSGKPGSSIVMTQSPATLSVSPGERATLSCRASQSVSNDVAWYQQKPGQSPRLLVNYASHRYTGVPDRFTGSGYGTEFTLTISSLQSEDFAVYFCQQDYSSPRTFGGGTKVEIK

SEQ ID NO: 15104 - protein, 122 aa, synthetic construct; identical to SEQ ID NO: 10922
  REGION 1..122: note = Description of Artificial Sequence: Synthetic polypeptide
  REGION 1..122: note = VH of XENP019115

SEQ ID NO: 15105 - protein, 107 aa, synthetic construct
  REGION 1..107: note = Description of Artificial Sequence: Synthetic polypeptide
  REGION 1..107: note = VL of XENP019115
SIVMTQSPATLSVSPGERATLSCRASQSVSNDVAWYQQKPGQSPRLLVNYASHRYTGVPDRFTGSGYGTEFTLTISSLQSEDFAVYFCQQDYSSPRTFGGGTKVEIK

SEQ ID NO: 15106 - protein, 5 aa, synthetic construct
  REGION 1..5: note = Description of Artificial Sequence: Synthetic peptide
  REGION 1..5: note = XENP019115 vhCDR1
NYWMN

SEQ ID NO: 15107 - protein, 19 aa, synthetic construct
  REGION 1..19: note = Description of Artificial Sequence: Synthetic peptide
  REGION 1..19: note = XENP019115 vhCDR2
EIRLKSNNYATHYAEPVKG

SEQ ID NO: 15108 - protein, 11 aa, synthetic construct
  REGION 1..11: note = Description of Artificial Sequence: Synthetic peptide
  REGION 1..11: note = XENP019115 vhCDR3
YYGNYGGYFDV

SEQ ID NO: 15109 - protein, 11 aa, synthetic construct
  REGION 1..11: note = Description of Artificial Sequence: Synthetic peptide
  REGION 1..11: note = XENP019115 vlCDR1
RASQSVSNDVA

SEQ ID NO: 15110 - protein, 9 aa, synthetic construct
  REGION 1..9: note = Description of Artificial Sequence: Synthetic peptide
  REGION 1..9: note = XENP019115 vlCDR2
VNYASHRYT

SEQ ID NO: 15111 - protein, 9 aa, synthetic construct
  REGION 1..9: note = Description of Artificial Sequence: Synthetic peptide
  REGION 1..9: note = XENP019115 vlCDR3
QQDYSSPRT

SEQ ID NO: 15112 - protein, 249 aa, synthetic construct
  REGION 1..249: note = Description of Artificial Sequence: Synthetic polypeptide
  REGION 1..249: note = XENP019116 1G6_H1_L1.155_scFv(GKPGS)4
EVQLVESGGGLVKPGGSLRLSCAASGFTFSNYWMNWVRQAPGKGLEWVGEIRLKSNNYATHYAEPVKGRFTISRDDSKSTVYLQMNSLKTEDTAVYYCTRYYGNYGGYFDVWGAGTLVTVSSGKPGSGKPGSGKPGSGKPGSSIVMTQSPATLSVSPGERATLSCRASQSVSNDVAWYQQKPGQSPRLLINYANHRYTGVPDRFTGSGYGTEFTLTISSLQSEDFAVYFCQQDYSSPRTFGGGTKVEIK

SEQ ID NO: 15113 - protein, 122 aa, synthetic construct; identical to SEQ ID NO: 10922
  REGION 1..122: note = Description of Artificial Sequence: Synthetic polypeptide
  REGION 1..122: note = VH of XENP019116

SEQ ID NO: 15114 - protein, 107 aa, synthetic construct
  REGION 1..107: note = Description of Artificial Sequence: Synthetic polypeptide
  REGION 1..107: note = VL of XENP019116
SIVMTQSPATLSVSPGERATLSCRASQSVSNDVAWYQQKPGQSPRLLINYANHRYTGVPDRFTGSGYGTEFTLTISSLQSEDFAVYFCQQDYSSPRTFGGGTKVEIK

SEQ ID NO: 15115 - protein, 5 aa, synthetic construct
  REGION 1..5: note = Description of Artificial Sequence: Synthetic peptide
  REGION 1..5: note = XENP019116 vhCDR1
NYWMN

SEQ ID NO: 15116 - protein, 19 aa, synthetic construct
  REGION 1..19: note = Description of Artificial Sequence: Synthetic peptide
  REGION 1..19: note = XENP019116 vhCDR2
EIRLKSNNYATHYAEPVKG

SEQ ID NO: 15117 - protein, 11 aa, synthetic construct
  REGION 1..11: note = Description of Artificial Sequence: Synthetic peptide
  REGION 1..11: note = XENP019116 vhCDR3
YYGNYGGYFDV

SEQ ID NO: 15118 - protein, 11 aa, synthetic construct
  REGION 1..11: note = Description of Artificial Sequence: Synthetic peptide
  REGION 1..11: note = XENP019116 vlCDR1
RASQSVSNDVA

SEQ ID NO: 15119 - protein, 7 aa, synthetic construct
  REGION 1..7: note = Description of Artificial Sequence: Synthetic peptide
  REGION 1..7: note = XENP019116 vlCDR2
YANHRYT

SEQ ID NO: 15120 - protein, 9 aa, synthetic construct
  REGION 1..9: note = Description of Artificial Sequence: Synthetic peptide
  REGION 1..9: note = XENP019116 vlCDR3
QQDYSSPRT

SEQ ID NO: 15121 - protein, 249 aa, synthetic construct
  REGION 1..249: note = Description of Artificial Sequence: Synthetic polypeptide
  REGION 1..249: note = XENP019117 1G6_H1_L1.156_scFv(GKPGS)4
EVQLVESGGGLVKPGGSLRLSCAASGFTFSNYWMNWVRQAPGKGLEWVGEIRLKSNNYATHYAEPVKGRFTISRDDSKSTVYLQMNSLKTEDTAVYYCTRYYGNYGGYFDVWGAGTLVTVSSGKPGSGKPGSGKPGSGKPGSSIVMTQSPATLSVSPGERATLSCRASQSVSNDVAWYQQKPGQSPRLLINYASHRYTGVPDRFTGSGYGTEFTLTISSLESEDFAVYFCQQDYSSPRTFGGGTKVEIK

SEQ ID NO: 15122 - protein, 122 aa, synthetic construct; identical to SEQ ID NO: 10922
  REGION 1..122: note = Description of Artificial Sequence: Synthetic polypeptide
  REGION 1..122: note = VH of XENP019117

SEQ ID NO: 15123 - protein, 107 aa, synthetic construct
  REGION 1..107: note = Description of Artificial Sequence: Synthetic polypeptide
  REGION 1..107: note = VL of XENP019117
SIVMTQSPATLSVSPGERATLSCRASQSVSNDVAWYQQKPGQSPRLLINYASHRYTGVPDRFTGSGYGTEFTLTISSLESEDFAVYFCQQDYSSPRTFGGGTKVEIK

SEQ ID NO: 15124 - protein, 5 aa, synthetic construct
  REGION 1..5: note = Description of Artificial Sequence: Synthetic peptide
  REGION 1..5: note = XENP019117 vhCDR1
NYWMN

SEQ ID NO: 15125 - protein, 19 aa, synthetic construct
  REGION 1..19: note = Description of Artificial Sequence: Synthetic peptide
  REGION 1..19: note = XENP019117 vhCDR2
EIRLKSNNYATHYAEPVKG

SEQ ID NO: 15126 - protein, 11 aa, synthetic construct
  REGION 1..11: note = Description of Artificial Sequence: Synthetic peptide
  REGION 1..11: note = XENP019117 vhCDR3
YYGNYGGYFDV

SEQ ID NO: 15127 - protein, 11 aa, synthetic construct
  REGION 1..11: note = Description of Artificial Sequence: Synthetic peptide
  REGION 1..11: note = XENP019117 vlCDR1
RASQSVSNDVA

SEQ ID NO: 15128 - protein, 7 aa, synthetic construct
  REGION 1..7: note = Description of Artificial Sequence: Synthetic peptide
  REGION 1..7: note = XENP019117 vlCDR2
YASHRYT

SEQ ID NO: 15129 - protein, 9 aa, synthetic construct
  REGION 1..9: note = Description of Artificial Sequence: Synthetic peptide
  REGION 1..9: note = XENP019117 vlCDR3
QQDYSSPRT

SEQ ID NO: 15130 - protein, 249 aa, synthetic construct
  REGION 1..249: note = Description of Artificial Sequence: Synthetic polypeptide
  REGION 1..249: note = XENP019118 1G6_H1_L1.157_scFv(GKPGS)4
EVQLVESGGGLVKPGGSLRLSCAASGFTFSNYWMNWVRQAPGKGLEWVGEIRLKSNNYATHYAEPVKGRFTISRDDSKSTVYLQMNSLKTEDTAVYYCTRYYGNYGGYFDVWGAGTLVTVSSGKPGSGKPGSGKPGSGKPGSSIVMTQSPATLSVSPGERATLSCRASQSVSNDVAWYQQKPGQSPRLLINYASHRYTGVPDRFTGSGYGTEFTLTISSLKSEDFAVYFCQQDYSSPRTFGGGTKVEIK

SEQ ID NO: 15131 - protein, 122 aa, synthetic construct; identical to SEQ ID NO: 10922
  REGION 1..122: note = Description of Artificial Sequence: Synthetic polypeptide
  REGION 1..122: note = VH of XENP019118

SEQ ID NO: 15132 - protein, 107 aa, synthetic construct
  REGION 1..107: note = Description of Artificial Sequence: Synthetic polypeptide
  REGION 1..107: note = VL of XENP019118
SIVMTQSPATLSVSPGERATLSCRASQSVSNDVAWYQQKPGQSPRLLINYASHRYTGVPDRFTGSGYGTEFTLTISSLKSEDFAVYFCQQDYSSPRTFGGGTKVEIK

SEQ ID NO: 15133 - protein, 5 aa, synthetic construct
  REGION 1..5: note = Description of Artificial Sequence: Synthetic peptide
  REGION 1..5: note = XENP019118 vhCDR1
NYWMN

SEQ ID NO: 15134 - protein, 19 aa, synthetic construct
  REGION 1..19: note = Description of Artificial Sequence: Synthetic peptide
  REGION 1..19: note = XENP019118 vhCDR2
EIRLKSNNYATHYAEPVKG

SEQ ID NO: 15135 - protein, 11 aa, synthetic construct
  REGION 1..11: note = Description of Artificial Sequence: Synthetic peptide
  REGION 1..11: note = XENP019118 vhCDR3
YYGNYGGYFDV

SEQ ID NO: 15136 - protein, 11 aa, synthetic construct
  REGION 1..11: note = Description of Artificial Sequence: Synthetic peptide
  REGION 1..11: note = XENP019118 vlCDR1
RASQSVSNDVA

SEQ ID NO: 15137 - protein, 7 aa, synthetic construct
  REGION 1..7: note = Description of Artificial Sequence: Synthetic peptide
  REGION 1..7: note = XENP019118 vlCDR2
YASHRYT

SEQ ID NO: 15138 - protein, 9 aa, synthetic construct
  REGION 1..9: note = Description of Artificial Sequence: Synthetic peptide
  REGION 1..9: note = XENP019118 vlCDR3
QQDYSSPRT

SEQ ID NO: 15139 - protein, 249 aa, synthetic construct
  REGION 1..249: note = Description of Artificial Sequence: Synthetic polypeptide
  REGION 1..249: note = XENP019119 1G6_H1_L1.158_scFv(GKPGS)4
EVQLVESGGGLVKPGGSLRLSCAASGFTFSNYWMNWVRQAPGKGLEWVGEIRLKSNNYATHYAEPVKGRFTISRDDSKSTVYLQMNSLKTEDTAVYYCTRYYGNYGGYFDVWGAGTLVTVSSGKPGSGKPGSGKPGSGKPGSSIVMTQSPATLSVSPGERATLSCRASQSVSNDVAWYQQKPGQSPRLLINYASHRYTGVPDRFTGSGYGTEFTLTISSLQSEDFGVYFCQQDYSSPRTFGGGTKVEIK

SEQ ID NO: 15140 - protein, 122 aa, synthetic construct; identical to SEQ ID NO: 10922
  REGION 1..122: note = Description of Artificial Sequence: Synthetic polypeptide
  REGION 1..122: note = VH of XENP019119

SEQ ID NO: 15141 - protein, 107 aa, synthetic construct
  REGION 1..107: note = Description of Artificial Sequence: Synthetic polypeptide
  REGION 1..107: note = VL of XENP019119
SIVMTQSPATLSVSPGERATLSCRASQSVSNDVAWYQQKPGQSPRLLINYASHRYTGVPDRFTGSGYGTEFTLTISSLQSEDFGVYFCQQDYSSPRTFGGGTKVEIK

SEQ ID NO: 15142 - protein, 5 aa, synthetic construct
  REGION 1..5: note = Description of Artificial Sequence: Synthetic peptide
  REGION 1..5: note = XENP019119 vhCDR1
NYWMN

SEQ ID NO: 15143 - protein, 19 aa, synthetic construct
  REGION 1..19: note = Description of Artificial Sequence: Synthetic peptide
  REGION 1..19: note = XENP019119 vhCDR2
EIRLKSNNYATHYAEPVKG

SEQ ID NO: 15144 - protein, 11 aa, synthetic construct
  REGION 1..11: note = Description of Artificial Sequence: Synthetic peptide
  REGION 1..11: note = XENP019119 vhCDR3
YYGNYGGYFDV

SEQ ID NO: 15145 - protein, 11 aa, synthetic construct
  REGION 1..11: note = Description of Artificial Sequence: Synthetic peptide
  REGION 1..11: note = XENP019119 vlCDR1
RASQSVSNDVA

SEQ ID NO: 15146 - protein, 7 aa, synthetic construct
  REGION 1..7: note = Description of Artificial Sequence: Synthetic peptide
  REGION 1..7: note = XENP019119 vlCDR2
YASHRYT

SEQ ID NO: 15147 - protein, 9 aa, synthetic construct
  REGION 1..9: note = Description of Artificial Sequence: Synthetic peptide
  REGION 1..9: note = XENP019119 vlCDR3
QQDYSSPRT

SEQ ID NO: 15148 - protein, 249 aa, synthetic construct
  REGION 1..249: note = Description of Artificial Sequence: Synthetic polypeptide
  REGION 1..249: note = XENP019120 1G6_H1_L1.159_scFv(GKPGS)4
EVQLVESGGGLVKPGGSLRLSCAASGFTFSNYWMNWVRQAPGKGLEWVGEIRLKSNNYATHYAEPVKGRFTISRDDSKSTVYLQMNSLKTEDTAVYYCTRYYGNYGGYFDVWGAGTLVTVSSGKPGSGKPGSGKPGSGKPGSSIVMTQSPATLSVSPGERATLSCRASQSVSNDVAWYQQKPGQSPRLLINYASHRYTGVPDRFTGSGYGTEFTLTISSLQSEDFAVYFCKQDYSSPRTFGGGTKVEIK

SEQ ID NO: 15149 - protein, 122 aa, synthetic construct; identical to SEQ ID NO: 10922
  REGION 1..122: note = Description of Artificial Sequence: Synthetic polypeptide
  REGION 1..122: note = VH of XENP019120

SEQ ID NO: 15150 - protein, 107 aa, synthetic construct
  REGION 1..107: note = Description of Artificial Sequence: Synthetic polypeptide
  REGION 1..107: note = VL of XENP019120
SIVMTQSPATLSVSPGERATLSCRASQSVSNDVAWYQQKPGQSPRLLINYASHRYTGVPDRFTGSGYGTEFTLTISSLQSEDFAVYFCKQDYSSPRTFGGGTKVEIK

SEQ ID NO: 15151 - protein, 5 aa, synthetic construct
  REGION 1..5: note = Description of Artificial Sequence: Synthetic peptide
  REGION 1..5: note = XENP019120 vhCDR1
NYWMN

SEQ ID NO: 15152 - protein, 19 aa, synthetic construct
  REGION 1..19: note = Description of Artificial Sequence: Synthetic peptide
  REGION 1..19: note = XENP019120 vhCDR2
EIRLKSNNYATHYAEPVKG

SEQ ID NO: 15153 - protein, 11 aa, synthetic construct
  REGION 1..11: note = Description of Artificial Sequence: Synthetic peptide
  REGION 1..11: note = XENP019120 vhCDR3
YYGNYGGYFDV

SEQ ID NO: 15154 - protein, 11 aa, synthetic construct
  REGION 1..11: note = Description of Artificial Sequence: Synthetic peptide
  REGION 1..11: note = XENP019120 vlCDR1
RASQSVSNDVA

SEQ ID NO: 15155 - protein, 7 aa, synthetic construct
  REGION 1..7: note = Description of Artificial Sequence: Synthetic peptide
  REGION 1..7: note = XENP019120 vlCDR2
YASHRYT

SEQ ID NO: 15156 - protein, 9 aa, synthetic construct
  REGION 1..9: note = Description of Artificial Sequence: Synthetic peptide
  REGION 1..9: note = XENP019120 vlCDR3
KQDYSSPRT

SEQ ID NO: 15157 - protein, 249 aa, synthetic construct
  REGION 1..249: note = Description of Artificial Sequence: Synthetic polypeptide
  REGION 1..249: note = XENP019121 1G6_H1_L1.160_scFv(GKPGS)4
EVQLVESGGGLVKPGGSLRLSCAASGFTFSNYWMNWVRQAPGKGLEWVGEIRLKSNNYATHYAEPVKGRFTISRDDSKSTVYLQMNSLKTEDTAVYYCTRYYGNYGGYFDVWGAGTLVTVSSGKPGSGKPGSGKPGSGKPGSSIVMTQSPATLSVSPGERATLSCRASQSVSNDVAWYQQKPGQSPRLLINYASHRYTGVPDRFTGSGYGTEFTLTISSLQSEDFAVYFCQKDYSSPRTFGGGTKVEIK

SEQ ID NO: 15158 - protein, 122 aa, synthetic construct; identical to SEQ ID NO: 10922
  REGION 1..122: note = Description of Artificial Sequence: Synthetic polypeptide
  REGION 1..122: note = VH of XENP019121

SEQ ID NO: 15159 - protein, 107 aa, synthetic construct
  REGION 1..107: note = Description of Artificial Sequence: Synthetic polypeptide
  REGION 1..107: note = VL of XENP019121
SIVMTQSPATLSVSPGERATLSCRASQSVSNDVAWYQQKPGQSPRLLINYASHRYTGVPDRFTGSGYGTEFTLTISSLQSEDFAVYFCQKDYSSPRTFGGGTKVEIK

SEQ ID NO: 15160 - protein, 5 aa, synthetic construct
  REGION 1..5: note = Description of Artificial Sequence: Synthetic peptide
  REGION 1..5: note = XENP019121 vhCDR1
NYWMN

SEQ ID NO: 15161 - protein, 19 aa, synthetic construct
  REGION 1..19: note = Description of Artificial Sequence: Synthetic peptide
  REGION 1..19: note = XENP019121 vhCDR2
EIRLKSNNYATHYAEPVKG

SEQ ID NO: 15162 - protein, 11 aa, synthetic construct
  REGION 1..11: note = Description of Artificial Sequence: Synthetic peptide
  REGION 1..11: note = XENP019121 vhCDR3
YYGNYGGYFDV

SEQ ID NO: 15163 - protein, 11 aa, synthetic construct
  REGION 1..11: note = Description of Artificial Sequence: Synthetic peptide
  REGION 1..11: note = XENP019121 vlCDR1
RASQSVSNDVA

SEQ ID NO: 15164 - protein, 7 aa, synthetic construct
  REGION 1..7: note = Description of Artificial Sequence: Synthetic peptide
  REGION 1..7: note = XENP019121 vlCDR2
YASHRYT

SEQ ID NO: 15165 - protein, 9 aa, synthetic construct
  REGION 1..9: note = Description of Artificial Sequence: Synthetic peptide
  REGION 1..9: note = XENP019121 vlCDR3
QKDYSSPRT

SEQ ID NO: 15166 - protein, 249 aa, synthetic construct
  REGION 1..249: note = Description of Artificial Sequence: Synthetic polypeptide
  REGION 1..249: note = XENP019122 1G6_H1_L1.161_scFv(GKPGS)4
EVQLVESGGGLVKPGGSLRLSCAASGFTFSNYWMNWVRQAPGKGLEWVGEIRLKSNNYATHYAEPVKGRFTISRDDSKSTVYLQMNSLKTEDTAVYYCTRYYGNYGGYFDVWGAGTLVTVSSGKPGSGKPGSGKPGSGKPGSSIVMTQSPATLSVSPGERATLSCRASQSVSNDVAWYQQKPGQSPRLLINYASHRYTGVPDRFTGSGYGTEFTLTISSLQSEDFAVYFCQNDYSSPRTFGGGTKVEIK

SEQ ID NO: 15167 - protein, 122 aa, synthetic construct; identical to SEQ ID NO: 10922
  REGION 1..122: note = Description of Artificial Sequence: Synthetic polypeptide
  REGION 1..122: note = VH of XENP019122

SEQ ID NO: 15168 - protein, 107 aa, synthetic construct
  REGION 1..107: note = Description of Artificial Sequence: Synthetic polypeptide
  REGION 1..107: note = VL of XENP019122
SIVMTQSPATLSVSPGERATLSCRASQSVSNDVAWYQQKPGQSPRLLINYASHRYTGVPDRFTGSGYGTEFTLTISSLQSEDFAVYFCQNDYSSPRTFGGGTKVEIK

SEQ ID NO: 15169 - protein, 5 aa, synthetic construct
  REGION 1..5: note = Description of Artificial Sequence: Synthetic peptide
  REGION 1..5: note = XENP019122 vhCDR1
NYWMN

SEQ ID NO: 15170 - protein, 19 aa, synthetic construct
  REGION 1..19: note = Description of Artificial Sequence: Synthetic peptide
  REGION 1..19: note = XENP019122 vhCDR2
EIRLKSNNYATHYAEPVKG

SEQ ID NO: 15171 - protein, 11 aa, synthetic construct
  REGION 1..11: note = Description of Artificial Sequence: Synthetic peptide
  REGION 1..11: note = XENP019122 vhCDR3
YYGNYGGYFDV

SEQ ID NO: 15172 - protein, 11 aa, synthetic construct
  REGION 1..11: note = Description of Artificial Sequence: Synthetic peptide
  REGION 1..11: note = XENP019122 vlCDR1
RASQSVSNDVA

SEQ ID NO: 15173 - protein, 7 aa, synthetic construct
  REGION 1..7: note = Description of Artificial Sequence: Synthetic peptide
  REGION 1..7: note = XENP019122 vlCDR2
YASHRYT

SEQ ID NO: 15174 - protein, 9 aa, synthetic construct
  REGION 1..9: note = Description of Artificial Sequence: Synthetic peptide
  REGION 1..9: note = XENP019122 vlCDR3
QNDYSSPRT

SEQ ID NO: 15175 - protein, 249 aa, synthetic construct
  REGION 1..249: note = Description of Artificial Sequence: Synthetic polypeptide
  REGION 1..249: note = XENP019123 1G6_H1_L1.162_scFv(GKPGS)4
EVQLVESGGGLVKPGGSLRLSCAASGFTFSNYWMNWVRQAPGKGLEWVGEIRLKSNNYATHYAEPVKGRFTISRDDSKSTVYLQMNSLKTEDTAVYYCTRYYGNYGGYFDVWGAGTLVTVSSGKPGSGKPGSGKPGSGKPGSSIVMTQSPATLSVSPGERATLSCRASQSVSNDVAWYQQKPGQSPRLLINYASHRYTGVPDRFTGSGYGTEFTLTISSLQSEDFAVYFCQRDYSSPRTFGGGTKVEIK

SEQ ID NO: 15176 - protein, 122 aa, synthetic construct; identical to SEQ ID NO: 10922
  REGION 1..122: note = Description of Artificial Sequence: Synthetic polypeptide
  REGION 1..122: note = VH of XENP019123

SEQ ID NO: 15177 - protein, 107 aa, synthetic construct
  REGION 1..107: note = Description of Artificial Sequence: Synthetic polypeptide
  REGION 1..107: note = VL of XENP019123
SIVMTQSPATLSVSPGERATLSCRASQSVSNDVAWYQQKPGQSPRLLINYASHRYTGVPDRFTGSGYGTEFTLTISSLQSEDFAVYFCQRDYSSPRTFGGGTKVEIK

SEQ ID NO: 15178 - protein, 5 aa, synthetic construct
  REGION 1..5: note = Description of Artificial Sequence: Synthetic peptide
  REGION 1..5: note = XENP019123 vhCDR1
NYWMN

SEQ ID NO: 15179 - protein, 19 aa, synthetic construct
  REGION 1..19: note = Description of Artificial Sequence: Synthetic peptide
  REGION 1..19: note = XENP019123 vhCDR2
EIRLKSNNYATHYAEPVKG

SEQ ID NO: 15180 - protein, 11 aa, synthetic construct
  REGION 1..11: note = Description of Artificial Sequence: Synthetic peptide
  REGION 1..11: note = XENP019123 vhCDR3
YYGNYGGYFDV

SEQ ID NO: 15181 - protein, 11 aa, synthetic construct
  REGION 1..11: note = Description of Artificial Sequence: Synthetic peptide
  REGION 1..11: note = XENP019123 vlCDR1
RASQSVSNDVA

SEQ ID NO: 15182 - protein, 7 aa, synthetic construct
  REGION 1..7: note = Description of Artificial Sequence: Synthetic peptide
  REGION 1..7: note = XENP019123 vlCDR2
YASHRYT

SEQ ID NO: 15183 - protein, 9 aa, synthetic construct
  REGION 1..9: note = Description of Artificial Sequence: Synthetic peptide
  REGION 1..9: note = XENP019123 vlCDR3
QRDYSSPRT

SEQ ID NO: 15184 - protein, 249 aa, synthetic construct
  REGION 1..249: note = Description of Artificial Sequence: Synthetic polypeptide
  REGION 1..249: note = XENP019124 1G6_H1_L1.163_scFv(GKPGS)4
EVQLVESGGGLVKPGGSLRLSCAASGFTFSNYWMNWVRQAPGKGLEWVGEIRLKSNNYATHYAEPVKGRFTISRDDSKSTVYLQMNSLKTEDTAVYYCTRYYGNYGGYFDVWGAGTLVTVSSGKPGSGKPGSGKPGSGKPGSSIVMTQSPATLSVSPGEPATLSCRASQSVSNDVAWYQQKPGQSPRLLINYASHRYTGVPDRFTGSGYGTEFTLTISRLQSEDFAVYFCQQDYSSPRTFGGGTKVEIK

SEQ ID NO: 15185 - protein, 122 aa, synthetic construct; identical to SEQ ID NO: 10922
  REGION 1..122: note = Description of Artificial Sequence: Synthetic polypeptide
  REGION 1..122: note = VH of XENP019124

SEQ ID NO: 15186 - protein, 107 aa, synthetic construct
  REGION 1..107: note = Description of Artificial Sequence: Synthetic polypeptide
  REGION 1..107: note = VL of XENP019124
SIVMTQSPATLSVSPGEPATLSCRASQSVSNDVAWYQQKPGQSPRLLINYASHRYTGVPDRFTGSGYGTEFTLTISRLQSEDFAVYFCQQDYSSPRTFGGGTKVEIK

SEQ ID NO: 15187 - protein, 5 aa, synthetic construct
  REGION 1..5: note = Description of Artificial Sequence: Synthetic peptide
  REGION 1..5: note = XENP019124 vhCDR1
NYWMN

SEQ ID NO: 15188 - protein, 19 aa, synthetic construct
  REGION 1..19: note = Description of Artificial Sequence: Synthetic peptide
  REGION 1..19: note = XENP019124 vhCDR2
EIRLKSNNYATHYAEPVKG

SEQ ID NO: 15189 - protein, 11 aa, synthetic construct
  REGION 1..11: note = Description of Artificial Sequence: Synthetic peptide
  REGION 1..11: note = XENP019124 vhCDR3
YYGNYGGYFDV

SEQ ID NO: 15190 - protein, 11 aa, synthetic construct
  REGION 1..11: note = Description of Artificial Sequence: Synthetic peptide
  REGION 1..11: note = XENP019124 vlCDR1
RASQSVSNDVA

SEQ ID NO: 15191 - protein, 7 aa, synthetic construct
  REGION 1..7: note = Description of Artificial Sequence: Synthetic peptide
  REGION 1..7: note = XENP019124 vlCDR2
YASHRYT

SEQ ID NO: 15192 - protein, 9 aa, synthetic construct
  REGION 1..9: note = Description of Artificial Sequence: Synthetic peptide
  REGION 1..9: note = XENP019124 vlCDR3
QQDYSSPRT

SEQ ID NO: 15193 - protein, 249 aa, synthetic construct
  REGION 1..249: note = Description of Artificial Sequence: Synthetic polypeptide
  REGION 1..249: note = XENP019125 1G6_H1_L1.164_scFv(GKPGS)4
EVQLVESGGGLVKPGGSLRLSCAASGFTFSNYWMNWVRQAPGKGLEWVGEIRLKSNNYATHYAEPVKGRFTISRDDSKSTVYLQMNSLKTEDTAVYYCTRYYGNYGGYFDVWGAGTLVTVSSGKPGSGKPGSGKPGSGKPGSSIVMTQSPATLSVSPGERATLSCRASESVSNDVAWYQQKPGQSPRLLINYASHRYTGVPDRFTGSGYGTEFTLTISSLQSEDFAVYFCQKDYSSPRTFGGGTKVEIK

SEQ ID NO: 15194 - protein, 122 aa, synthetic construct; identical to SEQ ID NO: 10922
  REGION 1..122: note = Description of Artificial Sequence: Synthetic polypeptide
  REGION 1..122: note = VH of XENP019125

SEQ ID NO: 15195 - protein, 107 aa, synthetic construct
  REGION 1..107: note = Description of Artificial Sequence: Synthetic polypeptide
  REGION 1..107: note = VL of XENP019125
SIVMTQSPATLSVSPGERATLSCRASESVSNDVAWYQQKPGQSPRLLINYASHRYTGVPDRFTGSGYGTEFTLTISSLQSEDFAVYFCQKDYSSPRTFGGGTKVEIK

SEQ ID NO: 15196 - protein, 5 aa, synthetic construct
  REGION 1..5: note = Description of Artificial Sequence: Synthetic peptide
  REGION 1..5: note = XENP019125 vhCDR1
NYWMN

SEQ ID NO: 15197 - protein, 19 aa, synthetic construct
  REGION 1..19: note = Description of Artificial Sequence: Synthetic peptide
  REGION 1..19: note = XENP019125 vhCDR2
EIRLKSNNYATHYAEPVKG

SEQ ID NO: 15198 - protein, 11 aa, synthetic construct
  REGION 1..11: note = Description of Artificial Sequence: Synthetic peptide
  REGION 1..11: note = XENP019125 vhCDR3
YYGNYGGYFDV

SEQ ID NO: 15199 - protein, 11 aa, synthetic construct
  REGION 1..11: note = Description of Artificial Sequence: Synthetic peptide
  REGION 1..11: note = XENP019125 vlCDR1
RASESVSNDVA

SEQ ID NO: 15200 - protein, 7 aa, synthetic construct
  REGION 1..7: note = Description of Artificial Sequence: Synthetic peptide
  REGION 1..7: note = XENP019125 vlCDR2
YASHRYT

SEQ ID NO: 15201 - protein, 9 aa, synthetic construct
  REGION 1..9: note = Description of Artificial Sequence: Synthetic peptide
  REGION 1..9: note = XENP019125 vlCDR3
QKDYSSPRT

SEQ ID NO: 15202 - protein, 249 aa, synthetic construct
  REGION 1..249: note = Description of Artificial Sequence: Synthetic polypeptide
  REGION 1..249: note = XENP019126 1G6_H1_L1.165_scFv(GKPGS)4
EVQLVESGGGLVKPGGSLRLSCAASGFTFSNYWMNWVRQAPGKGLEWVGEIRLKSNNYATHYAEPVKGRFTISRDDSKSTVYLQMNSLKTEDTAVYYCTRYYGNYGGYFDVWGAGTLVTVSSGKPGSGKPGSGKPGSGKPGSSIVMTQSPATLSVSPGERATLSCRASESVSNDVAWYQQKPGQSPRLLINYASHRYTGVPDRFTGSGYGTEFTLTISSLQSEDFAVYFCQQDYKSPRTFGGGTKVEIK

SEQ ID NO: 15203 - protein, 122 aa, synthetic construct; identical to SEQ ID NO: 10922
  REGION 1..122: note = Description of Artificial Sequence: Synthetic polypeptide
  REGION 1..122: note = VH of XENP019126

SEQ ID NO: 15204 - protein, 107 aa, synthetic construct
  REGION 1..107: note = Description of Artificial Sequence: Synthetic polypeptide
  REGION 1..107: note = VL of XENP019126
SIVMTQSPATLSVSPGERATLSCRASESVSNDVAWYQQKPGQSPRLLINYASHRYTGVPDRFTGSGYGTEFTLTISSLQSEDFAVYFCQQDYKSPRTFGGGTKVEIK

SEQ ID NO: 15205 - protein, 5 aa, synthetic construct
  REGION 1..5: note = Description of Artificial Sequence: Synthetic peptide
  REGION 1..5: note = XENP019126 vhCDR1
NYWMN

SEQ ID NO: 15206 - protein, 19 aa, synthetic construct
  REGION 1..19: note = Description of Artificial Sequence: Synthetic peptide
  REGION 1..19: note = XENP019126 vhCDR2
EIRLKSNNYATHYAEPVKG

SEQ ID NO: 15207 - protein, 11 aa, synthetic construct
  REGION 1..11: note = Description of Artificial Sequence: Synthetic peptide
  REGION 1..11: note = XENP019126 vhCDR3
YYGNYGGYFDV

SEQ ID NO: 15208 - protein, 11 aa, synthetic construct
  REGION 1..11: note = Description of Artificial Sequence: Synthetic peptide
  REGION 1..11: note = XENP019126 vlCDR1
RASESVSNDVA

SEQ ID NO: 15209 - protein, 7 aa, synthetic construct
  REGION 1..7: note = Description of Artificial Sequence: Synthetic peptide
  REGION 1..7: note = XENP019126 vlCDR2
YASHRYT

SEQ ID NO: 15210 - protein, 9 aa, synthetic construct
  REGION 1..9: note = Description of Artificial Sequence: Synthetic peptide
  REGION 1..9: note = XENP019126 vlCDR3
QQDYKSPRT

SEQ ID NO: 15211 - protein, 249 aa, synthetic construct
  REGION 1..249: note = Description of Artificial Sequence: Synthetic polypeptide
  REGION 1..249: note = XENP019127 1G6_H1_L1.166_scFv(GKPGS)4
EVQLVESGGGLVKPGGSLRLSCAASGFTFSNYWMNWVRQAPGKGLEWVGEIRLKSNNYATHYAEPVKGRFTISRDDSKSTVYLQMNSLKTEDTAVYYCTRYYGNYGGYFDVWGAGTLVTVSSGKPGSGKPGSGKPGSGKPGSSIVMTQSPATLSVSPGERATLSCRASQSVSNDVAWYRQKPEQSPRLLINYASHRYTGVPDRFTGSGYGTEFTLTISSLQSEDFAVYFCQQDYSSPRTFGGGTKVEIK

SEQ ID NO: 15212 - protein, 122 aa, synthetic construct; identical to SEQ ID NO: 10922
  REGION 1..122: note = Description of Artificial Sequence: Synthetic polypeptide
  REGION 1..122: note = VH of XENP019127

SEQ ID NO: 15213 - protein, 107 aa, synthetic construct
  REGION 1..107: note = Description of Artificial Sequence: Synthetic polypeptide
  REGION 1..107: note = VL of XENP019127
SIVMTQSPATLSVSPGERATLSCRASQSVSNDVAWYRQKPEQSPRLLINYASHRYTGVPDRFTGSGYGTEFTLTISSLQSEDFAVYFCQQDYSSPRTFGGGTKVEIK

SEQ ID NO: 15214 - protein, 5 aa, synthetic construct
  REGION 1..5: note = Description of Artificial Sequence: Synthetic peptide
  REGION 1..5: note = XENP019127 vhCDR1
NYWMN

SEQ ID NO: 15215 - protein, 19 aa, synthetic construct
  REGION 1..19: note = Description of Artificial Sequence: Synthetic peptide
  REGION 1..19: note = XENP019127 vhCDR2
EIRLKSNNYATHYAEPVKG

SEQ ID NO: 15216 - protein, 11 aa, synthetic construct
  REGION 1..11: note = Description of Artificial Sequence: Synthetic peptide
  REGION 1..11: note = XENP019127 vhCDR3
YYGNYGGYFDV

SEQ ID NO: 15217 - protein, 11 aa, synthetic construct
  REGION 1..11: note = Description of Artificial Sequence: Synthetic peptide
  REGION 1..11: note = XENP019127 vlCDR1
RASQSVSNDVA

SEQ ID NO: 15218 - protein, 7 aa, synthetic construct
  REGION 1..7: note = Description of Artificial Sequence: Synthetic peptide
  REGION 1..7: note = XENP019127 vlCDR2
YASHRYT

SEQ ID NO: 15219 - protein, 9 aa, synthetic construct
  REGION 1..9: note = Description of Artificial Sequence: Synthetic peptide
  REGION 1..9: note = XENP019127 vlCDR3
QQDYSSPRT

SEQ ID NO: 15220 - protein, 249 aa, synthetic construct
  REGION 1..249: note = Description of Artificial Sequence: Synthetic polypeptide
  REGION 1..249: note = XENP019128 1G6_H1_L1.167_scFv(GKPGS)4
EVQLVESGGGLVKPGGSLRLSCAASGFTFSNYWMNWVRQAPGKGLEWVGEIRLKSNNYATHYAEPVKGRFTISRDDSKSTVYLQMNSLKTEDTAVYYCTRYYGNYGGYFDVWGAGTLVTVSSGKPGSGKPGSGKPGSGKPGSSIVMTQSPATLSVSPGERATLSCRASQSVSNDVAWYRQKPGESPRLLINYASHRYTGVPDRFTGSGYGTEFTLTISSLQSEDFAVYFCQQDYSSPRTFGGGTKVEIK

SEQ ID NO: 15221 - protein, 122 aa, synthetic construct; identical to SEQ ID NO: 10922
  REGION 1..122: note = Description of Artificial Sequence: Synthetic polypeptide
  REGION 1..122: note = VH of XENP019128

SEQ ID NO: 15222 - protein, 107 aa, synthetic construct
  REGION 1..107: note = Description of Artificial Sequence: Synthetic polypeptide
  REGION 1..107: note = VL of XENP019128
SIVMTQSPATLSVSPGERATLSCRASQSVSNDVAWYRQKPGESPRLLINYASHRYTGVPDRFTGSGYGTEFTLTISSLQSEDFAVYFCQQDYSSPRTFGGGTKVEIK

SEQ ID NO: 15223 - protein, 5 aa, synthetic construct
  REGION 1..5: note = Description of Artificial Sequence: Synthetic peptide
  REGION 1..5: note = XENP019128 vhCDR1
NYWMN

SEQ ID NO: 15224 - protein, 19 aa, synthetic construct
  REGION 1..19: note = Description of Artificial Sequence: Synthetic peptide
  REGION 1..19: note = XENP019128 vhCDR2
EIRLKSNNYATHYAEPVKG

SEQ ID NO: 15225 - protein, 11 aa, synthetic construct
  REGION 1..11: note = Description of Artificial Sequence: Synthetic peptide
  REGION 1..11: note = XENP019128 vhCDR3
YYGNYGGYFDV

SEQ ID NO: 15226 - protein, 11 aa, synthetic construct
  REGION 1..11: note = Description of Artificial Sequence: Synthetic peptide
  REGION 1..11: note = XENP019128 vlCDR1
RASQSVSNDVA

SEQ ID NO: 15227 - protein, 7 aa, synthetic construct
  REGION 1..7: note = Description of Artificial Sequence: Synthetic peptide
  REGION 1..7: note = XENP019128 vlCDR2
YASHRYT

SEQ ID NO: 15228 - protein, 9 aa, synthetic construct
  REGION 1..9: note = Description of Artificial Sequence: Synthetic peptide
  REGION 1..9: note = XENP019128 vlCDR3
QQDYSSPRT

SEQ ID NO: 15229 - protein, 249 aa, synthetic construct
  REGION 1..249: note = Description of Artificial Sequence: Synthetic polypeptide
  REGION 1..249: note = XENP019129 1G6_H1_L1.168_scFv(GKPGS)4
EVQLVESGGGLVKPGGSLRLSCAASGFTFSNYWMNWVRQAPGKGLEWVGEIRLKSNNYATHYAEPVKGRFTISRDDSKSTVYLQMNSLKTEDTAVYYCTRYYGNYGGYFDVWGAGTLVTVSSGKPGSGKPGSGKPGSGKPGSSIVMTQSPATLSVSPGERATLSCRASQSVSNDVAWYQQKPGQSPRLLINYASWRYTGVPDRFTGSGYGTEFTLTISSLQSEDFAVYFCQQDFSSPRTFGGGTKVEIK

SEQ ID NO: 15230 - protein, 122 aa, synthetic construct; identical to SEQ ID NO: 10922
  REGION 1..122: note = Description of Artificial Sequence: Synthetic polypeptide
  REGION 1..122: note = VH of XENP019129

SEQ ID NO: 15231 - protein, 107 aa, synthetic construct
  REGION 1..107: note = Description of Artificial Sequence: Synthetic polypeptide
  REGION 1..107: note = VL of XENP019129
SIVMTQSPATLSVSPGERATLSCRASQSVSNDVAWYQQKPGQSPRLLINYASWRYTGVPDRFTGSGYGTEFTLTISSLQSEDFAVYFCQQDFSSPRTFGGGTKVEIK

SEQ ID NO: 15232 - protein, 5 aa, synthetic construct
  REGION 1..5: note = Description of Artificial Sequence: Synthetic peptide
  REGION 1..5: note = XENP019129 vhCDR1
NYWMN

SEQ ID NO: 15233 - protein, 19 aa, synthetic construct
  REGION 1..19: note = Description of Artificial Sequence: Synthetic peptide
  REGION 1..19: note = XENP019129 vhCDR2
EIRLKSNNYATHYAEPVKG

SEQ ID NO: 15234 - protein, 11 aa, synthetic construct
  REGION 1..11: note = Description of Artificial Sequence: Synthetic peptide
  REGION 1..11: note = XENP019129 vhCDR3
YYGNYGGYFDV

SEQ ID NO: 15235 - protein, 11 aa, synthetic construct
  REGION 1..11: note = Description of Artificial Sequence: Synthetic peptide
  REGION 1..11: note = XENP019129 vlCDR1
RASQSVSNDVA

SEQ ID NO: 15236 - protein, 7 aa, synthetic construct
  REGION 1..7: note = Description of Artificial Sequence: Synthetic peptide
  REGION 1..7: note = XENP019129 vlCDR2
YASWRYT

SEQ ID NO: 15237 - protein, 9 aa, synthetic construct
  REGION 1..9: note = Description of Artificial Sequence: Synthetic peptide
  REGION 1..9: note = XENP019129 vlCDR3
QQDFSSPRT

SEQ ID NO: 15238 - protein, 249 aa, synthetic construct
  REGION 1..249: note = Description of Artificial Sequence: Synthetic polypeptide
  REGION 1..249: note = XENP019130 1G6_H1_L1.169_scFv(GKPGS)4
EVQLVESGGGLVKPGGSLRLSCAASGFTFSNYWMNWVRQAPGKGLEWVGEIRLKSNNYATHYAEPVKGRFTISRDDSKSTVYLQMNSLKTEDTAVYYCTRYYGNYGGYFDVWGAGTLVTVSSGKPGSGKPGSGKPGSGKPGSSIVMTQSPATLSVSPGERATLSCRASQSVSNDVAWYQQKPGQSPRLLINYASWRYTGVPDRFTGSGYGTEFTLTISSLQSEDFAVYFCQQDWSSPRTFGGGTKVEIK

SEQ ID NO: 15239 - protein, 122 aa, synthetic construct; identical to SEQ ID NO: 10922
  REGION 1..122: note = Description of Artificial Sequence: Synthetic polypeptide
  REGION 1..122: note = VH of XENP019130

SEQ ID NO: 15240 - protein, 107 aa, synthetic construct
  REGION 1..107: note = Description of Artificial Sequence: Synthetic polypeptide
  REGION 1..107: note = VL of XENP019130
SIVMTQSPATLSVSPGERATLSCRASQSVSNDVAWYQQKPGQSPRLLINYASWRYTGVPDRFTGSGYGTEFTLTISSLQSEDFAVYFCQQDWSSPRTFGGGTKVEIK

SEQ ID NO: 15241 - protein, 5 aa, synthetic construct
  REGION 1..5: note = Description of Artificial Sequence: Synthetic peptide
  REGION 1..5: note = XENP019130 vhCDR1
NYWMN

SEQ ID NO: 15242 - protein, 19 aa, synthetic construct
  REGION 1..19: note = Description of Artificial Sequence: Synthetic peptide
  REGION 1..19: note = XENP019130 vhCDR2
EIRLKSNNYATHYAEPVKG

SEQ ID NO: 15243 - protein, 11 aa, synthetic construct
  REGION 1..11: note = Description of Artificial Sequence: Synthetic peptide
  REGION 1..11: note = XENP019130 vhCDR3
YYGNYGGYFDV

SEQ ID NO: 15244 - protein, 11 aa, synthetic construct
  REGION 1..11: note = Description of Artificial Sequence: Synthetic peptide
  REGION 1..11: note = XENP019130 vlCDR1
RASQSVSNDVA

SEQ ID NO: 15245 - protein, 7 aa, synthetic construct
  REGION 1..7: note = Description of Artificial Sequence: Synthetic peptide
  REGION 1..7: note = XENP019130 vlCDR2
YASWRYT

SEQ ID NO: 15246 - protein, 9 aa, synthetic construct
  REGION 1..9: note = Description of Artificial Sequence: Synthetic peptide
  REGION 1..9: note = XENP019130 vlCDR3
QQDWSSPRT

SEQ ID NO: 15247 - protein, 249 aa, synthetic construct
  REGION 1..249: note = Description of Artificial Sequence: Synthetic polypeptide
  REGION 1..249: note = XENP019131 1G6_H1_L1.170_scFv(GKPGS)4
EVQLVESGGGLVKPGGSLRLSCAASGFTFSNYWMNWVRQAPGKGLEWVGEIRLKSNNYATHYAEPVKGRFTISRDDSKSTVYLQMNSLKTEDTAVYYCTRYYGNYGGYFDVWGAGTLVTVSSGKPGSGKPGSGKPGSGKPGSSIVMTQSPATLSVSPGERATLSCRASQSVSNDVAWYQQKPGQSPRLLINYASWRYTGVPDRFTGSGYGTEFTLTISSLQSEDFAVYFCQQDGSSPRTFGGGTKVEIK

SEQ ID NO: 15248 - protein, 122 aa, synthetic construct; identical to SEQ ID NO: 10922
  REGION 1..122: note = Description of Artificial Sequence: Synthetic polypeptide
  REGION 1..122: note = VH of XENP019131

SEQ ID NO: 15249 - protein, 107 aa, synthetic construct
  REGION 1..107: note = Description of Artificial Sequence: Synthetic polypeptide
  REGION 1..107: note = VL of XENP019131
SIVMTQSPATLSVSPGERATLSCRASQSVSNDVAWYQQKPGQSPRLLINYASWRYTGVPDRFTGSGYGTEFTLTISSLQSEDFAVYFCQQDGSSPRTFGGGTKVEIK

SEQ ID NO: 15250 - protein, 5 aa, synthetic construct
  REGION 1..5: note = Description of Artificial Sequence: Synthetic peptide
  REGION 1..5: note = XENP019131 vhCDR1
NYWMN

SEQ ID NO: 15251 - protein, 19 aa, synthetic construct
  REGION 1..19: note = Description of Artificial Sequence: Synthetic peptide
  REGION 1..19: note = XENP019131 vhCDR2
EIRLKSNNYATHYAEPVKG

SEQ ID NO: 15252 - protein, 11 aa, synthetic construct
  REGION 1..11: note = Description of Artificial Sequence: Synthetic peptide
  REGION 1..11: note = XENP019131 vhCDR3
YYGNYGGYFDV

SEQ ID NO: 15253 - protein, 11 aa, synthetic construct
  REGION 1..11: note = Description of Artificial Sequence: Synthetic peptide
  REGION 1..11: note = XENP019131 vlCDR1
RASQSVSNDVA

SEQ ID NO: 15254 - protein, 7 aa, synthetic construct
  REGION 1..7: note = Description of Artificial Sequence: Synthetic peptide
  REGION 1..7: note = XENP019131 vlCDR2
YASWRYT

SEQ ID NO: 15255 - protein, 9 aa, synthetic construct
  REGION 1..9: note = Description of Artificial Sequence: Synthetic peptide
  REGION 1..9: note = XENP019131 vlCDR3
QQDGSSPRT

SEQ ID NO: 15256 - protein, 249 aa, synthetic construct
  REGION 1..249: note = Description of Artificial Sequence: Synthetic polypeptide
  REGION 1..249: note = XENP019132 1G6_H1_L1.171_scFv(GKPGS)4
EVQLVESGGGLVKPGGSLRLSCAASGFTFSNYWMNWVRQAPGKGLEWVGEIRLKSNNYATHYAEPVKGRFTISRDDSKSTVYLQMNSLKTEDTAVYYCTRYYGNYGGYFDVWGAGTLVTVSSGKPGSGKPGSGKPGSGKPGSSIVMTQSPATLSVSPGERATLSCRASQSVSNDVAWYQQKPGQSPRLLINYASHRYTSVPDRFTGSGYGTEFTLTISSLQSEDFAVYFCQQDWSSPRTFGGGTKVEIK

SEQ ID NO: 15257 - protein, 122 aa, synthetic construct; identical to SEQ ID NO: 10922
  REGION 1..122: note = Description of Artificial Sequence: Synthetic polypeptide
  REGION 1..122: note = VH of XENP019132

SEQ ID NO: 15258 - protein, 107 aa, synthetic construct
  REGION 1..107: note = Description of Artificial Sequence: Synthetic polypeptide
  REGION 1..107: note = VL of XENP019132
SIVMTQSPATLSVSPGERATLSCRASQSVSNDVAWYQQKPGQSPRLLINYASHRYTSVPDRFTGSGYGTEFTLTISSLQSEDFAVYFCQQDWSSPRTFGGGTKVEIK

SEQ ID NO: 15259 - protein, 5 aa, synthetic construct
  REGION 1..5: note = Description of Artificial Sequence: Synthetic peptide
  REGION 1..5: note = XENP019132 vhCDR1
NYWMN

SEQ ID NO: 15260 - protein, 19 aa, synthetic construct
  REGION 1..19: note = Description of Artificial Sequence: Synthetic peptide
  REGION 1..19: note = XENP019132 vhCDR2
EIRLKSNNYATHYAEPVKG

SEQ ID NO: 15261 - protein, 11 aa, synthetic construct
  REGION 1..11: note = Description of Artificial Sequence: Synthetic peptide
  REGION 1..11: note = XENP019132 vhCDR3
YYGNYGGYFDV

SEQ ID NO: 15262 - protein, 11 aa, synthetic construct
  REGION 1..11: note = Description of Artificial Sequence: Synthetic peptide
  REGION 1..11: note = XENP019132 vlCDR1
RASQSVSNDVA

SEQ ID NO: 15263 - protein, 7 aa, synthetic construct
  REGION 1..7: note = Description of Artificial Sequence: Synthetic peptide
  REGION 1..7: note = XENP019132 vlCDR2
YASHRYT

SEQ ID NO: 15264 - protein, 9 aa, synthetic construct
  REGION 1..9: note = Description of Artificial Sequence: Synthetic peptide
  REGION 1..9: note = XENP019132 vlCDR3
QQDWSSPRT

SEQ ID NO: 15265 - protein, 249 aa, synthetic construct
  REGION 1..249: note = Description of Artificial Sequence: Synthetic polypeptide
  REGION 1..249: note = XENP019133 1G6_H1_L1.172_scFv(GKPGS)4
EVQLVESGGGLVKPGGSLRLSCAASGFTFSNYWMNWVRQAPGKGLEWVGEIRLKSNNYATHYAEPVKGRFTISRDDSKSTVYLQMNSLKTEDTAVYYCTRYYGNYGGYFDVWGAGTLVTVSSGKPGSGKPGSGKPGSGKPGSSIVMTQSPATLSVSPGERATLSCRASQSVSNDVAWYQQKPGQSPRLLINYASHRYTSVPDRFTGSGYGTEFTLTISSLQSEDFAVYFCQQDFSSPRTFGGGTKVEIK

SEQ ID NO: 15266 - protein, 122 aa, synthetic construct; identical to SEQ ID NO: 10922
  REGION 1..122: note = Description of Artificial Sequence: Synthetic polypeptide
  REGION 1..122: note = VH of XENP019133

SEQ ID NO: 15267 - protein, 107 aa, synthetic construct
  REGION 1..107: note = Description of Artificial Sequence: Synthetic polypeptide
  REGION 1..107: note = VL of XENP019133
SIVMTQSPATLSVSPGERATLSCRASQSVSNDVAWYQQKPGQSPRLLINYASHRYTSVPDRFTGSGYGTEFTLTISSLQSEDFAVYFCQQDFSSPRTFGGGTKVEIK

SEQ ID NO: 15268 - protein, 5 aa, synthetic construct
  REGION 1..5: note = Description of Artificial Sequence: Synthetic peptide
  REGION 1..5: note = XENP019133 vhCDR1
NYWMN

SEQ ID NO: 15269 - protein, 19 aa, synthetic construct
  REGION 1..19: note = Description of Artificial Sequence: Synthetic peptide
  REGION 1..19: note = XENP019133 vhCDR2
EIRLKSNNYATHYAEPVKG

SEQ ID NO: 15270 - protein, 11 aa, synthetic construct
  REGION 1..11: note = Description of Artificial Sequence: Synthetic peptide
  REGION 1..11: note = XENP019133 vhCDR3
YYGNYGGYFDV

SEQ ID NO: 15271 - protein, 11 aa, synthetic construct
  REGION 1..11: note = Description of Artificial Sequence: Synthetic peptide
  REGION 1..11: note = XENP019133 vlCDR1
RASQSVSNDVA

SEQ ID NO: 15272 - protein, 7 aa, synthetic construct
  REGION 1..7: note = Description of Artificial Sequence: Synthetic peptide
  REGION 1..7: note = XENP019133 vlCDR2
YASHRYT

SEQ ID NO: 15273 - protein, 9 aa, synthetic construct
  REGION 1..9: note = Description of Artificial Sequence: Synthetic peptide
  REGION 1..9: note = XENP019133 vlCDR3
QQDFSSPRT

SEQ ID NO: 15274 - protein, 249 aa, synthetic construct
  REGION 1..249: note = Description of Artificial Sequence: Synthetic polypeptide
  REGION 1..249: note = XENP019134 1G6_H1_L1.173_scFv(GKPGS)4
EVQLVESGGGLVKPGGSLRLSCAASGFTFSNYWMNWVRQAPGKGLEWVGEIRLKSNNYATHYAEPVKGRFTISRDDSKSTVYLQMNSLKTEDTAVYYCTRYYGNYGGYFDVWGAGTLVTVSSGKPGSGKPGSGKPGSGKPGSSIVMTQSPATLSVSPGERATLSCRASQSVSNDVAWYQQKPGQSPRLLINYASHRYTGVPDRFTGSGYGTEFTLTISSLQSEDFAVYFCQQDFGSPRTFGGGTKVEIK

SEQ ID NO: 15275 - protein, 122 aa, synthetic construct; identical to SEQ ID NO: 10922
  REGION 1..122: note = Description of Artificial Sequence: Synthetic polypeptide
  REGION 1..122: note = VH of XENP019134

SEQ ID NO: 15276 - protein, 107 aa, synthetic construct
  REGION 1..107: note = Description of Artificial Sequence: Synthetic polypeptide
  REGION 1..107: note = VL of XENP019134
SIVMTQSPATLSVSPGERATLSCRASQSVSNDVAWYQQKPGQSPRLLINYASHRYTGVPDRFTGSGYGTEFTLTISSLQSEDFAVYFCQQDFGSPRTFGGGTKVEIK

SEQ ID NO: 15277 - protein, 5 aa, synthetic construct
  REGION 1..5: note = Description of Artificial Sequence: Synthetic peptide
  REGION 1..5: note = XENP019134 vhCDR1
NYWMN

SEQ ID NO: 15278 - protein, 19 aa, synthetic construct
  REGION 1..19: note = Description of Artificial Sequence: Synthetic peptide
  REGION 1..19: note = XENP019134 vhCDR2
EIRLKSNNYATHYAEPVKG

SEQ ID NO: 15279 - protein, 11 aa, synthetic construct
  REGION 1..11: note = Description of Artificial Sequence: Synthetic peptide
  REGION 1..11: note = XENP019134 vhCDR3
YYGNYGGYFDV

SEQ ID NO: 15280 - protein, 11 aa, synthetic construct
  REGION 1..11: note = Description of Artificial Sequence: Synthetic peptide
  REGION 1..11: note = XENP019134 vlCDR1
RASQSVSNDVA

SEQ ID NO: 15281 - protein, 7 aa, synthetic construct
  REGION 1..7: note = Description of Artificial Sequence: Synthetic peptide
  REGION 1..7: note = XENP019134 vlCDR2
YASHRYT

SEQ ID NO: 15282 - protein, 9 aa, synthetic construct
  REGION 1..9: note = Description of Artificial Sequence: Synthetic peptide
  REGION 1..9: note = XENP019134 vlCDR3
QQDFGSPRT

SEQ ID NO: 15283 - protein, 249 aa, synthetic construct
  REGION 1..249: note = Description of Artificial Sequence: Synthetic polypeptide
  REGION 1..249: note = XENP019135 1G6_H1_L1.174_scFv(GKPGS)4
EVQLVESGGGLVKPGGSLRLSCAASGFTFSNYWMNWVRQAPGKGLEWVGEIRLKSNNYATHYAEPVKGRFTISRDDSKSTVYLQMNSLKTEDTAVYYCTRYYGNYGGYFDVWGAGTLVTVSSGKPGSGKPGSGKPGSGKPGSSIVMTQSPATLSVSPGERATLSCRASQSVSNDVAWYQQKPGQSPRLLINYASHRYTGVPDRFTGSGYGTEFTLTISSLQSEDFAVYFCQQDWGSPRTFGGGTKVEIK

SEQ ID NO: 15284 - protein, 122 aa, synthetic construct; identical to SEQ ID NO: 10922
  REGION 1..122: note = Description of Artificial Sequence: Synthetic polypeptide
  REGION 1..122: note = VH of XENP019135

SEQ ID NO: 15285 - protein, 107 aa, synthetic construct
  REGION 1..107: note = Description of Artificial Sequence: Synthetic polypeptide
  REGION 1..107: note = VL of XENP019135
SIVMTQSPATLSVSPGERATLSCRASQSVSNDVAWYQQKPGQSPRLLINYASHRYTGVPDRFTGSGYGTEFTLTISSLQSEDFAVYFCQQDWGSPRTFGGGTKVEIK

SEQ ID NO: 15286 - protein, 5 aa, synthetic construct
  REGION 1..5: note = Description of Artificial Sequence: Synthetic peptide
  REGION 1..5: note = XENP019135 vhCDR1
NYWMN

SEQ ID NO: 15287 - protein, 19 aa, synthetic construct
  REGION 1..19: note = Description of Artificial Sequence: Synthetic peptide
  REGION 1..19: note = XENP019135 vhCDR2
EIRLKSNNYATHYAEPVKG

SEQ ID NO: 15288 - protein, 11 aa, synthetic construct
  REGION 1..11: note = Description of Artificial Sequence: Synthetic peptide
  REGION 1..11: note = XENP019135 vhCDR3
YYGNYGGYFDV

SEQ ID NO: 15289 - protein, 11 aa, synthetic construct
  REGION 1..11: note = Description of Artificial Sequence: Synthetic peptide
  REGION 1..11: note = XENP019135 vlCDR1
RASQSVSNDVA

SEQ ID NO: 15290 - protein, 7 aa, synthetic construct
  REGION 1..7: note = Description of Artificial Sequence: Synthetic peptide
  REGION 1..7: note = XENP019135 vlCDR2
YASHRYT

SEQ ID NO: 15291 - protein, 9 aa, synthetic construct
  REGION 1..9: note = Description of Artificial Sequence: Synthetic peptide
  REGION 1..9: note = XENP019135 vlCDR3
QQDWGSPRT

SEQ ID NO: 15292 - protein, 249 aa, synthetic construct
  REGION 1..249: note = Description of Artificial Sequence: Synthetic polypeptide
  REGION 1..249: note = XENP019136 1G6_H1_L1.175_scFv(GKPGS)4
EVQLVESGGGLVKPGGSLRLSCAASGFTFSNYWMNWVRQAPGKGLEWVGEIRLKSNNYATHYAEPVKGRFTISRDDSKSTVYLQMNSLKTEDTAVYYCTRYYGNYGGYFDVWGAGTLVTVSSGKPGSGKPGSGKPGSGKPGSSIVMTQSPATLSVSPGERATLSCRASQSVGNDVAWYQQKPGQSPRLLINYASHRYTSVPDRFTGSGYGTEFTLTISSLQSEDFAVYFCQQDWSSPRTFGGGTKVEIK

SEQ ID NO: 15293 - protein, 122 aa, synthetic construct; identical to SEQ ID NO: 10922
  REGION 1..122: note = Description of Artificial Sequence: Synthetic polypeptide
  REGION 1..122: note = VH of XENP019136

SEQ ID NO: 15294 - protein, 107 aa, synthetic construct
  REGION 1..107: note = Description of Artificial Sequence: Synthetic polypeptide
  REGION 1..107: note = VL of XENP019136
SIVMTQSPATLSVSPGERATLSCRASQSVGNDVAWYQQKPGQSPRLLINYASHRYTSVPDRFTGSGYGTEFTLTISSLQSEDFAVYFCQQDWSSPRTFGGGTKVEIK

SEQ ID NO: 15295 - protein, 5 aa, synthetic construct
  REGION 1..5: note = Description of Artificial Sequence: Synthetic peptide
  REGION 1..5: note = XENP019136 vhCDR1
NYWMN

SEQ ID NO: 15296 - protein, 19 aa, synthetic construct
  REGION 1..19: note = Description of Artificial Sequence: Synthetic peptide
  REGION 1..19: note = XENP019136 vhCDR2
EIRLKSNNYATHYAEPVKG

SEQ ID NO: 15297 - protein, 11 aa, synthetic construct
  REGION 1..11: note = Description of Artificial Sequence: Synthetic peptide
  REGION 1..11: note = XENP019136 vhCDR3
YYGNYGGYFDV

SEQ ID NO: 15298 - protein, 11 aa, synthetic construct
  REGION 1..11: note = Description of Artificial Sequence: Synthetic peptide
  REGION 1..11: note = XENP019136 vlCDR1
RASQSVGNDVA

SEQ ID NO: 15299 - protein, 7 aa, synthetic construct
  REGION 1..7: note = Description of Artificial Sequence: Synthetic peptide
  REGION 1..7: note = XENP019136 vlCDR2
YASHRYT

SEQ ID NO: 15300 - protein, 9 aa, synthetic construct
  REGION 1..9: note = Description of Artificial Sequence: Synthetic peptide
  REGION 1..9: note = XENP019136 vlCDR3
QQDWSSPRT

SEQ ID NO: 15301 - protein, 249 aa, synthetic construct
  REGION 1..249: note = Description of Artificial Sequence: Synthetic polypeptide
  REGION 1..249: note = XENP019137 1G6_H1_L1.176_scFv(GKPGS)4
EVQLVESGGGLVKPGGSLRLSCAASGFTFSNYWMNWVRQAPGKGLEWVGEIRLKSNNYATHYAEPVKGRFTISRDDSKSTVYLQMNSLKTEDTAVYYCTRYYGNYGGYFDVWGAGTLVTVSSGKPGSGKPGSGKPGSGKPGSSIVMTQSPATLSVSPGERATLSCRASQSVGNDVAWYQQKPGQSPRLLINYASWRYTSVPDRFTGSGYGTEFTLTISSLQSEDFAVYFCQQDYSSPRTFGGGTKVEIK

SEQ ID NO: 15302 - protein, 122 aa, synthetic construct; identical to SEQ ID NO: 10922
  REGION 1..122: note = Description of Artificial Sequence: Synthetic polypeptide
  REGION 1..122: note = VH of XENP019137

SEQ ID NO: 15303 - protein, 107 aa, synthetic construct
  REGION 1..107: note = Description of Artificial Sequence: Synthetic polypeptide
  REGION 1..107: note = VL of XENP019137
SIVMTQSPATLSVSPGERATLSCRASQSVGNDVAWYQQKPGQSPRLLINYASWRYTSVPDRFTGSGYGTEFTLTISSLQSEDFAVYFCQQDYSSPRTFGGGTKVEIK

SEQ ID NO: 15304 - protein, 5 aa, synthetic construct
  REGION 1..5: note = Description of Artificial Sequence: Synthetic peptide
  REGION 1..5: note = XENP019137 vhCDR1
NYWMN

SEQ ID NO: 15305 - protein, 19 aa, synthetic construct
  REGION 1..19: note = Description of Artificial Sequence: Synthetic peptide
  REGION 1..19: note = XENP019137 vhCDR2
EIRLKSNNYATHYAEPVKG

SEQ ID NO: 15306 - protein, 11 aa, synthetic construct
  REGION 1..11: note = Description of Artificial Sequence: Synthetic peptide
  REGION 1..11: note = XENP019137 vhCDR3
YYGNYGGYFDV

SEQ ID NO: 15307 - protein, 11 aa, synthetic construct
  REGION 1..11: note = Description of Artificial Sequence: Synthetic peptide
  REGION 1..11: note = XENP019137 vlCDR1
RASQSVGNDVA

SEQ ID NO: 15308 - protein, 7 aa, synthetic construct
  REGION 1..7: note = Description of Artificial Sequence: Synthetic peptide
  REGION 1..7: note = XENP019137 vlCDR2
YASWRYT

SEQ ID NO: 15309 - protein, 9 aa, synthetic construct
  REGION 1..9: note = Description of Artificial Sequence: Synthetic peptide
  REGION 1..9: note = XENP019137 vlCDR3
QQDYSSPRT

SEQ ID NO: 15310 - protein, 249 aa, synthetic construct
  REGION 1..249: note = Description of Artificial Sequence: Synthetic polypeptide
  REGION 1..249: note = XENP019138 1G6_H1_L1.177_scFv(GKPGS)4
EVQLVESGGGLVKPGGSLRLSCAASGFTFSNYWMNWVRQAPGKGLEWVGEIRLKSNNYATHYAEPVKGRFTISRDDSKSTVYLQMNSLKTEDTAVYYCTRYYGNYGGYFDVWGAGTLVTVSSGKPGSGKPGSGKPGSGKPGSSIVMTQSPATLSVSPGERATLSCRASQSVGNDVAWYQQKPGQSPRLLINYASHRYTSVPDRFTGSGYGTEFTLTISSLQSEDFAVYFCQQDFSSPRTFGGGTKVEIK

SEQ ID NO: 15311 - protein, 122 aa, synthetic construct; identical to SEQ ID NO: 10922
  REGION 1..122: note = Description of Artificial Sequence: Synthetic polypeptide
  REGION 1..122: note = VH of XENP019138

SEQ ID NO: 15312 - protein, 107 aa, synthetic construct
  REGION 1..107: note = Description of Artificial Sequence: Synthetic polypeptide
  REGION 1..107: note = VL of XENP019138
SIVMTQSPATLSVSPGERATLSCRASQSVGNDVAWYQQKPGQSPRLLINYASHRYTSVPDRFTGSGYGTEFTLTISSLQSEDFAVYFCQQDFSSPRTFGGGTKVEIK

SEQ ID NO: 15313 - protein, 5 aa, synthetic construct
  REGION 1..5: note = Description of Artificial Sequence: Synthetic peptide
  REGION 1..5: note = XENP019138 vhCDR1
NYWMN

SEQ ID NO: 15314 - protein, 19 aa, synthetic construct
  REGION 1..19: note = Description of Artificial Sequence: Synthetic peptide
  REGION 1..19: note = XENP019138 vhCDR2
EIRLKSNNYATHYAEPVKG

SEQ ID NO: 15315 - protein, 11 aa, synthetic construct
  REGION 1..11: note = Description of Artificial Sequence: Synthetic peptide
  REGION 1..11: note = XENP019138 vhCDR3
YYGNYGGYFDV

SEQ ID NO: 15316 - protein, 11 aa, synthetic construct
  REGION 1..11: note = Description of Artificial Sequence: Synthetic peptide
  REGION 1..11: note = XENP019138 vlCDR1
RASQSVGNDVA

SEQ ID NO: 15317 - protein, 7 aa, synthetic construct
  REGION 1..7: note = Description of Artificial Sequence: Synthetic peptide
  REGION 1..7: note = XENP019138 vlCDR2
YASHRYT

SEQ ID NO: 15318 - protein, 9 aa, synthetic construct
  REGION 1..9: note = Description of Artificial Sequence: Synthetic peptide
  REGION 1..9: note = XENP019138 vlCDR3
QQDFSSPRT

SEQ ID NO: 15319 - protein, 249 aa, synthetic construct
  REGION 1..249: note = Description of Artificial Sequence: Synthetic polypeptide
  REGION 1..249: note = XENP019139 1G6_H1_L1.178_scFv(GKPGS)4
EVQLVESGGGLVKPGGSLRLSCAASGFTFSNYWMNWVRQAPGKGLEWVGEIRLKSNNYATHYAEPVKGRFTISRDDSKSTVYLQMNSLKTEDTAVYYCTRYYGNYGGYFDVWGAGTLVTVSSGKPGSGKPGSGKPGSGKPGSSIVMTQSPATLSVSPGERATLSCRASQSVGNDVAWYQQKPGQSPRLLINYASHRYTSVPDRFTGSGYGTEFTLTISSLQSEDFAVYFCQQDGSSPRTFGGGTKVEIK

SEQ ID NO: 15320 - protein, 122 aa, synthetic construct; identical to SEQ ID NO: 10922
  REGION 1..122: note = Description of Artificial Sequence: Synthetic polypeptide
  REGION 1..122: note = VH of XENP019139

SEQ ID NO: 15321 - protein, 107 aa, synthetic construct
  REGION 1..107: note = Description of Artificial Sequence: Synthetic polypeptide
  REGION 1..107: note = VL of XENP019139
SIVMTQSPATLSVSPGERATLSCRASQSVGNDVAWYQQKPGQSPRLLINYASHRYTSVPDRFTGSGYGTEFTLTISSLQSEDFAVYFCQQDGSSPRTFGGGTKVEIK

SEQ ID NO: 15322 - protein, 5 aa, synthetic construct
  REGION 1..5: note = Description of Artificial Sequence: Synthetic peptide
  REGION 1..5: note = XENP019139 vhCDR1
NYWMN

SEQ ID NO: 15323 - protein, 19 aa, synthetic construct
  REGION 1..19: note = Description of Artificial Sequence: Synthetic peptide
  REGION 1..19: note = XENP019139 vhCDR2
EIRLKSNNYATHYAEPVKG

SEQ ID NO: 15324 - protein, 11 aa, synthetic construct
  REGION 1..11: note = Description of Artificial Sequence: Synthetic peptide
  REGION 1..11: note = XENP019139 vhCDR3
YYGNYGGYFDV

SEQ ID NO: 15325 - protein, 11 aa, synthetic construct
  REGION 1..11: note = Description of Artificial Sequence: Synthetic peptide
  REGION 1..11: note = XENP019139 vlCDR1
RASQSVGNDVA

SEQ ID NO: 15326 - protein, 7 aa, synthetic construct
  REGION 1..7: note = Description of Artificial Sequence: Synthetic peptide
  REGION 1..7: note = XENP019139 vlCDR2
YASHRYT

SEQ ID NO: 15327 - protein, 9 aa, synthetic construct
  REGION 1..9: note = Description of Artificial Sequence: Synthetic peptide
  REGION 1..9: note = XENP019139 vlCDR3
QQDGSSPRT

SEQ ID NO: 15328 - protein, 249 aa, synthetic construct
  REGION 1..249: note = Description of Artificial Sequence: Synthetic polypeptide
  REGION 1..249: note = XENP019140 1G6_H1_L1.179_scFv(GKPGS)4
EVQLVESGGGLVKPGGSLRLSCAASGFTFSNYWMNWVRQAPGKGLEWVGEIRLKSNNYATHYAEPVKGRFTISRDDSKSTVYLQMNSLKTEDTAVYYCTRYYGNYGGYFDVWGAGTLVTVSSGKPGSGKPGSGKPGSGKPGSSIVMTQSPATLSVSPGERATLSCRASQSVSNDVAWYQQKPGQSPRLLINYASWRYTSVPDRFTGSGYGTEFTLTISSLQSEDFAVYFCQQDFSSPRTFGGGTKVEIK

SEQ ID NO: 15329 - protein, 122 aa, synthetic construct; identical to SEQ ID NO: 10922
  REGION 1..122: note = Description of Artificial Sequence: Synthetic polypeptide
  REGION 1..122: note = VH of XENP019140

SEQ ID NO: 15330 - protein, 107 aa, synthetic construct
  REGION 1..107: note = Description of Artificial Sequence: Synthetic polypeptide
  REGION 1..107: note = VL of XENP019140
SIVMTQSPATLSVSPGERATLSCRASQSVSNDVAWYQQKPGQSPRLLINYASWRYTSVPDRFTGSGYGTEFTLTISSLQSEDFAVYFCQQDFSSPRTFGGGTKVEIK

SEQ ID NO: 15331 - protein, 5 aa, synthetic construct
  REGION 1..5: note = Description of Artificial Sequence: Synthetic peptide
  REGION 1..5: note = XENP019140 vhCDR1
NYWMN

SEQ ID NO: 15332 - protein, 19 aa, synthetic construct
  REGION 1..19: note = Description of Artificial Sequence: Synthetic peptide
  REGION 1..19: note = XENP019140 vhCDR2
EIRLKSNNYATHYAEPVKG

SEQ ID NO: 15333 - protein, 11 aa, synthetic construct
  REGION 1..11: note = Description of Artificial Sequence: Synthetic peptide
  REGION 1..11: note = XENP019140 vhCDR3
YYGNYGGYFDV

SEQ ID NO: 15334 - protein, 11 aa, synthetic construct
  REGION 1..11: note = Description of Artificial Sequence: Synthetic peptide
  REGION 1..11: note = XENP019140 vlCDR1
RASQSVSNDVA

SEQ ID NO: 15335 - protein, 7 aa, synthetic construct
  REGION 1..7: note = Description of Artificial Sequence: Synthetic peptide
  REGION 1..7: note = XENP019140 vlCDR2
YASWRYT

SEQ ID NO: 15336 - protein, 9 aa, synthetic construct
  REGION 1..9: note = Description of Artificial Sequence: Synthetic peptide
  REGION 1..9: note = XENP019140 vlCDR3
QQDFSSPRT

SEQ ID NO: 15337 - protein, 249 aa, synthetic construct
  REGION 1..249: note = Description of Artificial Sequence: Synthetic polypeptide
  REGION 1..249: note = XENP019141 1G6_H1_L1.180_scFv(GKPGS)4
EVQLVESGGGLVKPGGSLRLSCAASGFTFSNYWMNWVRQAPGKGLEWVGEIRLKSNNYATHYAEPVKGRFTISRDDSKSTVYLQMNSLKTEDTAVYYCTRYYGNYGGYFDVWGAGTLVTVSSGKPGSGKPGSGKPGSGKPGSSIVMTQSPATLSVSPGERATLSCRASQSVSNDVAWYQQKPGQSPRLLINYASWRYTSVPDRFTGSGYGTEFTLTISSLQSEDFAVYFCQQDWSSPRTFGGGTKVEIK

SEQ ID NO: 15338 - protein, 122 aa, synthetic construct; identical to SEQ ID NO: 10922
  REGION 1..122: note = Description of Artificial Sequence: Synthetic polypeptide
  REGION 1..122: note = VH of XENP019141

SEQ ID NO: 15339 - protein, 107 aa, synthetic construct
  REGION 1..107: note = Description of Artificial Sequence: Synthetic polypeptide
  REGION 1..107: note = VL of XENP019141
SIVMTQSPATLSVSPGERATLSCRASQSVSNDVAWYQQKPGQSPRLLINYASWRYTSVPDRFTGSGYGTEFTLTISSLQSEDFAVYFCQQDWSSPRTFGGGTKVEIK

SEQ ID NO: 15340 - protein, 5 aa, synthetic construct
  REGION 1..5: note = Description of Artificial Sequence: Synthetic peptide
  REGION 1..5: note = XENP019141 vhCDR1
NYWMN

SEQ ID NO: 15341 - protein, 19 aa, synthetic construct
  REGION 1..19: note = Description of Artificial Sequence: Synthetic peptide
  REGION 1..19: note = XENP019141 vhCDR2
EIRLKSNNYATHYAEPVKG

SEQ ID NO: 15342 - protein, 11 aa, synthetic construct
  REGION 1..11: note = Description of Artificial Sequence: Synthetic peptide
  REGION 1..11: note = XENP019141 vhCDR3
YYGNYGGYFDV

SEQ ID NO: 15343 - protein, 11 aa, synthetic construct
  REGION 1..11: note = Description of Artificial Sequence: Synthetic peptide
  REGION 1..11: note = XENP019141 vlCDR1
RASQSVSNDVA

SEQ ID NO: 15344 - protein, 7 aa, synthetic construct
  REGION 1..7: note = Description of Artificial Sequence: Synthetic peptide
  REGION 1..7: note = XENP019141 vlCDR2
YASWRYT

SEQ ID NO: 15345 - protein, 9 aa, synthetic construct
  REGION 1..9: note = Description of Artificial Sequence: Synthetic peptide
  REGION 1..9: note = XENP019141 vlCDR3
QQDWSSPRT

SEQ ID NO: 15346 - protein, 249 aa, synthetic construct
  REGION 1..249: note = Description of Artificial Sequence: Synthetic polypeptide
  REGION 1..249: note = XENP019142 1G6_H1_L1.181_scFv(GKPGS)4
EVQLVESGGGLVKPGGSLRLSCAASGFTFSNYWMNWVRQAPGKGLEWVGEIRLKSNNYATHYAEPVKGRFTISRDDSKSTVYLQMNSLKTEDTAVYYCTRYYGNYGGYFDVWGAGTLVTVSSGKPGSGKPGSGKPGSGKPGSSIVMTQSPATLSVSPGERATLSCRASQSVSNDVAWYQQKPGQSPRLLINYASWRYTSVPDRFTGSGYGTEFTLTISSLQSEDFAVYFCQQDGSSPRTFGGGTKVEIK

SEQ ID NO: 15347 - protein, 122 aa, synthetic construct; identical to SEQ ID NO: 10922
  REGION 1..122: note = Description of Artificial Sequence: Synthetic polypeptide
  REGION 1..122: note = VH of XENP019142

SEQ ID NO: 15348 - protein, 107 aa, synthetic construct
  REGION 1..107: note = Description of Artificial Sequence: Synthetic polypeptide
  REGION 1..107: note = VL of XENP019142
SIVMTQSPATLSVSPGERATLSCRASQSVSNDVAWYQQKPGQSPRLLINYASWRYTSVPDRFTGSGYGTEFTLTISSLQSEDFAVYFCQQDGSSPRTFGGGTKVEIK

SEQ ID NO: 15349 - protein, 5 aa, synthetic construct
  REGION 1..5: note = Description of Artificial Sequence: Synthetic peptide
  REGION 1..5: note = XENP019142 vhCDR1
NYWMN

SEQ ID NO: 15350 - protein, 19 aa, synthetic construct
  REGION 1..19: note = Description of Artificial Sequence: Synthetic peptide
  REGION 1..19: note = XENP019142 vhCDR2
EIRLKSNNYATHYAEPVKG

SEQ ID NO: 15351 - protein, 11 aa, synthetic construct
  REGION 1..11: note = Description of Artificial Sequence: Synthetic peptide
  REGION 1..11: note = XENP019142 vhCDR3
YYGNYGGYFDV

SEQ ID NO: 15352 - protein, 11 aa, synthetic construct
  REGION 1..11: note = Description of Artificial Sequence: Synthetic peptide
  REGION 1..11: note = XENP019142 vlCDR1
RASQSVSNDVA

SEQ ID NO: 15353 - protein, 7 aa, synthetic construct
  REGION 1..7: note = Description of Artificial Sequence: Synthetic peptide
  REGION 1..7: note = XENP019142 vlCDR2
YASWRYT

SEQ ID NO: 15354 - protein, 9 aa, synthetic construct
  REGION 1..9: note = Description of Artificial Sequence: Synthetic peptide
  REGION 1..9: note = XENP019142 vlCDR3
QQDGSSPRT

SEQ ID NO: 15355 - protein, 249 aa, synthetic construct
  REGION 1..249: note = Description of Artificial Sequence: Synthetic polypeptide
  REGION 1..249: note = XENP019143 1G6_H1_L1.182_scFv(GKPGS)4
EVQLVESGGGLVKPGGSLRLSCAASGFTFSNYWMNWVRQAPGKGLEWVGEIRLKSNNYATHYAEPVKGRFTISRDDSKSTVYLQMNSLKTEDTAVYYCTRYYGNYGGYFDVWGAGTLVTVSSGKPGSGKPGSGKPGSGKPGSSIVMTQSPATLSVSPGERATLSCRASQSVGNDVAWYQQKPGQSPRLLINYASWRYTSVPDRFTGSGYGTEFTLTISSLQSEDFAVYFCQQDWSSPRTFGGGTKVEIK

SEQ ID NO: 15356 - protein, 122 aa, synthetic construct; identical to SEQ ID NO: 10922
  REGION 1..122: note = Description of Artificial Sequence: Synthetic polypeptide
  REGION 1..122: note = VH of XENP019143

SEQ ID NO: 15357 - protein, 107 aa, synthetic construct
  REGION 1..107: note = Description of Artificial Sequence: Synthetic polypeptide
  REGION 1..107: note = VL of XENP019143
SIVMTQSPATLSVSPGERATLSCRASQSVGNDVAWYQQKPGQSPRLLINYASWRYTSVPDRFTGSGYGTEFTLTISSLQSEDFAVYFCQQDWSSPRTFGGGTKVEIK

SEQ ID NO: 15358 - protein, 5 aa, synthetic construct
  REGION 1..5: note = Description of Artificial Sequence: Synthetic peptide
  REGION 1..5: note = XENP019143 vhCDR1
NYWMN

SEQ ID NO: 15359 - protein, 19 aa, synthetic construct
  REGION 1..19: note = Description of Artificial Sequence: Synthetic peptide
  REGION 1..19: note = XENP019143 vhCDR2
EIRLKSNNYATHYAEPVKG

SEQ ID NO: 15360 - protein, 11 aa, synthetic construct
  REGION 1..11: note = Description of Artificial Sequence: Synthetic peptide
  REGION 1..11: note = XENP019143 vhCDR3
YYGNYGGYFDV

SEQ ID NO: 15361 - protein, 11 aa, synthetic construct
  REGION 1..11: note = Description of Artificial Sequence: Synthetic peptide
  REGION 1..11: note = XENP019143 vlCDR1
RASQSVGNDVA

SEQ ID NO: 15362 - protein, 7 aa, synthetic construct
  REGION 1..7: note = Description of Artificial Sequence: Synthetic peptide
  REGION 1..7: note = XENP019143 vlCDR2
YASWRYT

SEQ ID NO: 15363 - protein, 9 aa, synthetic construct
  REGION 1..9: note = Description of Artificial Sequence: Synthetic peptide
  REGION 1..9: note = XENP019143 vlCDR3
QQDWSSPRT

SEQ ID NO: 15364 - protein, 249 aa, synthetic construct
  REGION 1..249: note = Description of Artificial Sequence: Synthetic polypeptide
  REGION 1..249: note = XENP019144 1G6_H1_L1.183_scFv(GKPGS)4
EVQLVESGGGLVKPGGSLRLSCAASGFTFSNYWMNWVRQAPGKGLEWVGEIRLKSNNYATHYAEPVKGRFTISRDDSKSTVYLQMNSLKTEDTAVYYCTRYYGNYGGYFDVWGAGTLVTVSSGKPGSGKPGSGKPGSGKPGSSIVMTQSPATLSVSPGERATLSCRASQSVGNDVAWYQQKPGQSPRLLINYASWRYTSVPDRFTGSGYGTEFTLTISSLQSEDFAVYFCQQDFSSPRTFGGGTKVEIK

SEQ ID NO: 15365 - protein, 122 aa, synthetic construct; identical to SEQ ID NO: 10922
  REGION 1..122: note = Description of Artificial Sequence: Synthetic polypeptide
  REGION 1..122: note = VH of XENP019144

SEQ ID NO: 15366 - protein, 107 aa, synthetic construct
  REGION 1..107: note = Description of Artificial Sequence: Synthetic polypeptide
  REGION 1..107: note = VL of XENP019144
SIVMTQSPATLSVSPGERATLSCRASQSVGNDVAWYQQKPGQSPRLLINYASWRYTSVPDRFTGSGYGTEFTLTISSLQSEDFAVYFCQQDFSSPRTFGGGTKVEIK

SEQ ID NO: 15367 - protein, 5 aa, synthetic construct
  REGION 1..5: note = Description of Artificial Sequence: Synthetic peptide
  REGION 1..5: note = XENP019144 vhCDR1
NYWMN

SEQ ID NO: 15368 - protein, 19 aa, synthetic construct
  REGION 1..19: note = Description of Artificial Sequence: Synthetic peptide
  REGION 1..19: note = XENP019144 vhCDR2
EIRLKSNNYATHYAEPVKG

SEQ ID NO: 15369 - protein, 11 aa, synthetic construct
  REGION 1..11: note = Description of Artificial Sequence: Synthetic peptide
  REGION 1..11: note = XENP019144 vhCDR3
YYGNYGGYFDV

SEQ ID NO: 15370 - protein, 11 aa, synthetic construct
  REGION 1..11: note = Description of Artificial Sequence: Synthetic peptide
  REGION 1..11: note = XENP019144 vlCDR1
RASQSVGNDVA

SEQ ID NO: 15371 - protein, 7 aa, synthetic construct
  REGION 1..7: note = Description of Artificial Sequence: Synthetic peptide
  REGION 1..7: note = XENP019144 vlCDR2
YASWRYT

SEQ ID NO: 15372 - protein, 9 aa, synthetic construct
  REGION 1..9: note = Description of Artificial Sequence: Synthetic peptide
  REGION 1..9: note = XENP019144 vlCDR3
QQDFSSPRT

SEQ ID NO: 15373 - protein, 249 aa, synthetic construct
  REGION 1..249: note = Description of Artificial Sequence: Synthetic polypeptide
  REGION 1..249: note = XENP019145 1G6_H1_L1.184_scFv(GKPGS)4
EVQLVESGGGLVKPGGSLRLSCAASGFTFSNYWMNWVRQAPGKGLEWVGEIRLKSNNYATHYAEPVKGRFTISRDDSKSTVYLQMNSLKTEDTAVYYCTRYYGNYGGYFDVWGAGTLVTVSSGKPGSGKPGSGKPGSGKPGSSIVMTQSPATLSVSPGERATLSCRASQSVGNDVAWYQQKPGQSPRLLINYASWRYTSVPDRFTGSGYGTEFTLTISSLQSEDFAVYFCQQDGSSPRTFGGGTKVEIK

SEQ ID NO: 15374 - protein, 122 aa, synthetic construct; identical to SEQ ID NO: 10922
  REGION 1..122: note = Description of Artificial Sequence: Synthetic polypeptide
  REGION 1..122: note = VH of XENP019145

SEQ ID NO: 15375 - protein, 107 aa, synthetic construct
  REGION 1..107: note = Description of Artificial Sequence: Synthetic polypeptide
  REGION 1..107: note = VL of XENP019145
SIVMTQSPATLSVSPGERATLSCRASQSVGNDVAWYQQKPGQSPRLLINYASWRYTSVPDRFTGSGYGTEFTLTISSLQSEDFAVYFCQQDGSSPRTFGGGTKVEIK

SEQ ID NO: 15376 - protein, 5 aa, synthetic construct
  REGION 1..5: note = Description of Artificial Sequence: Synthetic peptide
  REGION 1..5: note = XENP019145 vhCDR1
NYWMN

SEQ ID NO: 15377 - protein, 19 aa, synthetic construct
  REGION 1..19: note = Description of Artificial Sequence: Synthetic peptide
  REGION 1..19: note = XENP019145 vhCDR2
EIRLKSNNYATHYAEPVKG

SEQ ID NO: 15378 - protein, 11 aa, synthetic construct
  REGION 1..11: note = Description of Artificial Sequence: Synthetic peptide
  REGION 1..11: note = XENP019145 vhCDR3
YYGNYGGYFDV

SEQ ID NO: 15379 - protein, 11 aa, synthetic construct
  REGION 1..11: note = Description of Artificial Sequence: Synthetic peptide
  REGION 1..11: note = XENP019145 vlCDR1
RASQSVGNDVA

SEQ ID NO: 15380 - protein, 7 aa, synthetic construct
  REGION 1..7: note = Description of Artificial Sequence: Synthetic peptide
  REGION 1..7: note = XENP019145 vlCDR2
YASWRYT

SEQ ID NO: 15381 - protein, 9 aa, synthetic construct
  REGION 1..9: note = Description of Artificial Sequence: Synthetic peptide
  REGION 1..9: note = XENP019145 vlCDR3
QQDGSSPRT

SEQ ID NO: 15382 - protein, 249 aa, synthetic construct
  REGION 1..249: note = Description of Artificial Sequence: Synthetic polypeptide
  REGION 1..249: note = XENP019146 1G6_H1_L1.185_scFv(GKPGS)4
EVQLVESGGGLVKPGGSLRLSCAASGFTFSNYWMNWVRQAPGKGLEWVGEIRLKSNNYATHYAEPVKGRFTISRDDSKSTVYLQMNSLKTEDTAVYYCTRYYGNYGGYFDVWGAGTLVTVSSGKPGSGKPGSGKPGSGKPGSEIVMTQSPATLSVSPGERATLSCRASQSVSNDLAWYQQKPGQSPRLLINYASHRYTGVPARFSGSGYGTEFTLTISSLQSEDFAVYYCQQDYSSPRTFGGGTKVEIK

SEQ ID NO: 15383 - protein, 122 aa, synthetic construct; identical to SEQ ID NO: 10922
  REGION 1..122: note = Description of Artificial Sequence: Synthetic polypeptide
  REGION 1..122: note = VH of XENP019146

SEQ ID NO: 15384 - protein, 107 aa, synthetic construct
  REGION 1..107: note = Description of Artificial Sequence: Synthetic polypeptide
  REGION 1..107: note = VL of XENP019146
EIVMTQSPATLSVSPGERATLSCRASQSVSNDLAWYQQKPGQSPRLLINYASHRYTGVPARFSGSGYGTEFTLTISSLQSEDFAVYYCQQDYSSPRTFGGGTKVEIK

SEQ ID NO: 15385 - protein, 5 aa, synthetic construct
  REGION 1..5: note = Description of Artificial Sequence: Synthetic peptide
  REGION 1..5: note = XENP019146 vhCDR1
NYWMN

SEQ ID NO: 15386 - protein, 19 aa, synthetic construct
  REGION 1..19: note = Description of Artificial Sequence: Synthetic peptide
  REGION 1..19: note = XENP019146 vhCDR2
EIRLKSNNYATHYAEPVKG

SEQ ID NO: 15387 - protein, 11 aa, synthetic construct
  REGION 1..11: note = Description of Artificial Sequence: Synthetic peptide
  REGION 1..11: note = XENP019146 vhCDR3
YYGNYGGYFDV

SEQ ID NO: 15388 - protein, 11 aa, synthetic construct
  REGION 1..11: note = Description of Artificial Sequence: Synthetic peptide
  REGION 1..11: note = XENP019146 vlCDR1
RASQSVSNDLA

SEQ ID NO: 15389 - protein, 7 aa, synthetic construct
  REGION 1..7: note = Description of Artificial Sequence: Synthetic peptide
  REGION 1..7: note = XENP019146 vlCDR2
YASHRYT

SEQ ID NO: 15390 - protein, 9 aa, synthetic construct
  REGION 1..9: note = Description of Artificial Sequence: Synthetic peptide
  REGION 1..9: note = XENP019146 vlCDR3
QQDYSSPRT

SEQ ID NO: 15391 - protein, 249 aa, synthetic construct
  REGION 1..249: note = Description of Artificial Sequence: Synthetic polypeptide
  REGION 1..249: note = XENP019147 1G6_H1_L1.186_scFv(GKPGS)4
EVQLVESGGGLVKPGGSLRLSCAASGFTFSNYWMNWVRQAPGKGLEWVGEIRLKSNNYATHYAEPVKGRFTISRDDSKSTVYLQMNSLKTEDTAVYYCTRYYGNYGGYFDVWGAGTLVTVSSGKPGSGKPGSGKPGSGKPGSDIVMTQSPATLSVSPGERATLSCRASQSVSNDLAWYQQKPGQSPRLLINYASHRYTGVPDRFSGSGYGTEFTLTISSLQSEDFAVYYCQQDYSSPRTFGGGTKVEIK

SEQ ID NO: 15392 - protein, 122 aa, synthetic construct; identical to SEQ ID NO: 10922
  REGION 1..122: note = Description of Artificial Sequence: Synthetic polypeptide
  REGION 1..122: note = VH of XENP019147

SEQ ID NO: 15393 - protein, 107 aa, synthetic construct
  REGION 1..107: note = Description of Artificial Sequence: Synthetic polypeptide
  REGION 1..107: note = VL of XENP019147
DIVMTQSPATLSVSPGERATLSCRASQSVSNDLAWYQQKPGQSPRLLINYASHRYTGVPDRFSGSGYGTEFTLTISSLQSEDFAVYYCQQDYSSPRTFGGGTKVEIK

SEQ ID NO: 15394 - protein, 5 aa, synthetic construct
  REGION 1..5: note = Description of Artificial Sequence: Synthetic peptide
  REGION 1..5: note = XENP019147 vhCDR1
NYWMN

SEQ ID NO: 15395 - protein, 19 aa, synthetic construct
  REGION 1..19: note = Description of Artificial Sequence: Synthetic peptide
  REGION 1..19: note = XENP019147 vhCDR2
EIRLKSNNYATHYAEPVKG

SEQ ID NO: 15396 - protein, 11 aa, synthetic construct
  REGION 1..11: note = Description of Artificial Sequence: Synthetic peptide
  REGION 1..11: note = XENP019147 vhCDR3
YYGNYGGYFDV

SEQ ID NO: 15397 - protein, 11 aa, synthetic construct
  REGION 1..11: note = Description of Artificial Sequence: Synthetic peptide
  REGION 1..11: note = XENP019147 vlCDR1
RASQSVSNDLA

SEQ ID NO: 15398 - protein, 7 aa, synthetic construct
  REGION 1..7: note = Description of Artificial Sequence: Synthetic peptide
  REGION 1..7: note = XENP019147 vlCDR2
YASHRYT

SEQ ID NO: 15399 - protein, 9 aa, synthetic construct
  REGION 1..9: note = Description of Artificial Sequence: Synthetic peptide
  REGION 1..9: note = XENP019147 vlCDR3
QQDYSSPRT

SEQ ID NO: 15400 - protein, 249 aa, synthetic construct
  REGION 1..249: note = Description of Artificial Sequence: Synthetic polypeptide
  REGION 1..249: note = XENP019148 1G6_H1.257_L1.152_scFv(GKPGS)4
EVQLVESGGGLVKPGGSLRLSCAASGFTFSNYWMNWVRQAPGKGLEWVGEIRLKSNNYATHYAEPVKGRFTISRDDSKSTVYLQMNSLKTEDTAVYYCTRYYGNYGGYFDVWGRGTLVTVSSGKPGSGKPGSGKPGSGKPGSSIVMTQSPATLSVSPGERATLSCRASQSVSNDVAWYQQKPGESPRLLINYASHRYTGVPDRFTGSGYGTEFTLTISSLQSEDFAVYFCQQDYSSPRTFGGGTKVEIK

SEQ ID NO: 15401 - protein, 122 aa, synthetic construct; identical to SEQ ID NO: 14843
  REGION 1..122: note = Description of Artificial Sequence: Synthetic polypeptide
  REGION 1..122: note = VH of XENP019148

SEQ ID NO: 15402 - protein, 107 aa, synthetic construct; identical to SEQ ID NO: 15087
  REGION 1..107: note = Description of Artificial Sequence: Synthetic polypeptide
  REGION 1..107: note = VL of XENP019148

SEQ ID NO: 15403 - protein, 5 aa, synthetic construct
  REGION 1..5: note = Description of Artificial Sequence: Synthetic peptide
  REGION 1..5: note = XENP019148 vhCDR1
NYWMN

SEQ ID NO: 15404 - protein, 19 aa, synthetic construct
  REGION 1..19: note = Description of Artificial Sequence: Synthetic peptide
  REGION 1..19: note = XENP019148 vhCDR2
EIRLKSNNYATHYAEPVKG

SEQ ID NO: 15405 - protein, 11 aa, synthetic construct
  REGION 1..11: note = Description of Artificial Sequence: Synthetic peptide
  REGION 1..11: note = XENP019148 vhCDR3
YYGNYGGYFDV

SEQ ID NO: 15406 - protein, 11 aa, synthetic construct
  REGION 1..11: note = Description of Artificial Sequence: Synthetic peptide
  REGION 1..11: note = XENP019148 vlCDR1
RASQSVSNDVA

SEQ ID NO: 15407 - protein, 7 aa, synthetic construct
  REGION 1..7: note = Description of Artificial Sequence: Synthetic peptide
  REGION 1..7: note = XENP019148 vlCDR2
YASHRYT

SEQ ID NO: 15408 - protein, 9 aa, synthetic construct
  REGION 1..9: note = Description of Artificial Sequence: Synthetic peptide
  REGION 1..9: note = XENP019148 vlCDR3
QQDYSSPRT

SEQ ID NO: 15409 - protein, 249 aa, synthetic construct
  REGION 1..249: note = Description of Artificial Sequence: Synthetic polypeptide
  REGION 1..249: note = XENP019149 1G6_H1.257_L1.151_scFv(GKPGS)4
EVQLVESGGGLVKPGGSLRLSCAASGFTFSNYWMNWVRQAPGKGLEWVGEIRLKSNNYATHYAEPVKGRFTISRDDSKSTVYLQMNSLKTEDTAVYYCTRYYGNYGGYFDVWGRGTLVTVSSGKPGSGKPGSGKPGSGKPGSSIVMTQSPATLSVSPGERATLSCRASQSVSNDVAWYQQKPEQSPRLLINYASHRYTGVPDRFTGSGYGTEFTLTISSLQSEDFAVYFCQQDYSSPRTFGGGTKVEIK

SEQ ID NO: 15410 - protein, 122 aa, synthetic construct; identical to SEQ ID NO: 14843
  REGION 1..122: note = Description of Artificial Sequence: Synthetic polypeptide
  REGION 1..122: note = VH of XENP019149

SEQ ID NO: 15411 - protein, 107 aa, synthetic construct; identical to SEQ ID NO: 15078
  REGION 1..107: note = Description of Artificial Sequence: Synthetic polypeptide
  REGION 1..107: note = VL of XENP019149

SEQ ID NO: 15412 - protein, 5 aa, synthetic construct
  REGION 1..5: note = Description of Artificial Sequence: Synthetic peptide
  REGION 1..5: note = XENP019149 vhCDR1
NYWMN

SEQ ID NO: 15413 - protein, 19 aa, synthetic construct
  REGION 1..19: note = Description of Artificial Sequence: Synthetic peptide
  REGION 1..19: note = XENP019149 vhCDR2
EIRLKSNNYATHYAEPVKG

SEQ ID NO: 15414 - protein, 11 aa, synthetic construct
  REGION 1..11: note = Description of Artificial Sequence: Synthetic peptide
  REGION 1..11: note = XENP019149 vhCDR3
YYGNYGGYFDV

SEQ ID NO: 15415 - protein, 11 aa, synthetic construct
  REGION 1..11: note = Description of Artificial Sequence: Synthetic peptide
  REGION 1..11: note = XENP019149 vlCDR1
RASQSVSNDVA

SEQ ID NO: 15416 - protein, 7 aa, synthetic construct
  REGION 1..7: note = Description of Artificial Sequence: Synthetic peptide
  REGION 1..7: note = XENP019149 vlCDR2
YASHRYT

SEQ ID NO: 15417 - protein, 9 aa, synthetic construct
  REGION 1..9: note = Description of Artificial Sequence: Synthetic peptide
  REGION 1..9: note = XENP019149 vlCDR3
QQDYSSPRT

SEQ ID NO: 15418 - protein, 249 aa, synthetic construct
  REGION 1..249: note = Description of Artificial Sequence: Synthetic polypeptide
  REGION 1..249: note = XENP019150 1G6_H1.139_L1.134_scFv(GKPGS)4
EVQLVESGGGLVKPGGSLRLSCAASGFTFSNYWMNWVRQAPGKGLEWVGEIRLKSNNYATDYAEPVKGRFTISRDDSKSTVYLQMNSLKTEDTAVYYCTRYYGNYGGYFDVWGAGTLVTVSSGKPGSGKPGSGKPGSGKPGSSIVMTQSPATLSVSPGERATLSCRASQSVSNDVAWYQQKPGQSPRLLINYASHRYTGVPDRFTGSGYGTEFTLTISSLQSEDFAVYFCQQDYKSPRTFGGGTKVEIK

SEQ ID NO: 15419 - protein, 122 aa, synthetic construct; identical to SEQ ID NO: 12278
  REGION 1..122: note = Description of Artificial Sequence: Synthetic polypeptide
  REGION 1..122: note = VH of XENP019150

SEQ ID NO: 15420 - protein, 107 aa, synthetic construct; identical to SEQ ID NO: 14376
  REGION 1..107: note = Description of Artificial Sequence: Synthetic polypeptide
  REGION 1..107: note = VL of XENP019150

SEQ ID NO: 15421 - protein, 5 aa, synthetic construct
  REGION 1..5: note = Description of Artificial Sequence: Synthetic peptide
  REGION 1..5: note = XENP019150 vhCDR1
NYWMN

SEQ ID NO: 15422 - protein, 19 aa, synthetic construct
  REGION 1..19: note = Description of Artificial Sequence: Synthetic peptide
  REGION 1..19: note = XENP019150 vhCDR2
EIRLKSNNYATDYAEPVKG

SEQ ID NO: 15423 - protein, 11 aa, synthetic construct
  REGION 1..11: note = Description of Artificial Sequence: Synthetic peptide
  REGION 1..11: note = XENP019150 vhCDR3
YYGNYGGYFDV

SEQ ID NO: 15424 - protein, 11 aa, synthetic construct
  REGION 1..11: note = Description of Artificial Sequence: Synthetic peptide
  REGION 1..11: note = XENP019150 vlCDR1
RASQSVSNDVA

SEQ ID NO: 15425 - protein, 7 aa, synthetic construct
  REGION 1..7: note = Description of Artificial Sequence: Synthetic peptide
  REGION 1..7: note = XENP019150 vlCDR2
YASHRYT

SEQ ID NO: 15426 - protein, 9 aa, synthetic construct
  REGION 1..9: note = Description of Artificial Sequence: Synthetic peptide
  REGION 1..9: note = XENP019150 vlCDR3
QQDYKSPRT

SEQ ID NO: 15427 - protein, 249 aa, synthetic construct
  REGION 1..249: note = Description of Artificial Sequence: Synthetic polypeptide
  REGION 1..249: note = XENP019151 1G6_H1.48_L1.187_scFv(GKPGS)4
EVQLVESGGGLVKPGGSLRLSCAASGFTFSNYWMNWVRKAPGKGLEWVGEIRLKSNNYATHYAEPVKGRFTISRDDSKSTVYLQMNSLKTEDTAVYYCTRYYGNYGGYFDVWGAGTLVTVSSGKPGSGKPGSGKPGSGKPGSSIVMTQSPATLSVSPGERATLSCRASQSVSNDVAWYQQKPGESPRLLINYASHRYTGVPDRFTGSGYGTEFTLTISSLQSEDFAVYFCQQDYSSPRTFGGGTKVEIK

SEQ ID NO: 15428 - protein, 122 aa, synthetic construct; identical to SEQ ID NO: 11462
  REGION 1..122: note = Description of Artificial Sequence: Synthetic polypeptide
  REGION 1..122: note = VH of XENP019151

SEQ ID NO: 15429 - protein, 107 aa, synthetic construct; identical to SEQ ID NO: 15087
  REGION 1..107: note = Description of Artificial Sequence: Synthetic polypeptide
  REGION 1..107: note = VL of XENP019151

SEQ ID NO: 15430 - protein, 11 aa, synthetic construct
  REGION 1..11: note = Description of Artificial Sequence: Synthetic peptide
  REGION 1..11: note = XENP019151 vlCDR1
RASQSVSNDVA

SEQ ID NO: 15431 - protein, 7 aa, synthetic construct
  REGION 1..7: note = Description of Artificial Sequence: Synthetic peptide
  REGION 1..7: note = XENP019151 vlCDR2
YASHRYT

SEQ ID NO: 15432 - protein, 9 aa, synthetic construct
  REGION 1..9: note = Description of Artificial Sequence: Synthetic peptide
  REGION 1..9: note = XENP019151 vlCDR3
QQDYSSPRT

SEQ ID NO: 15433 - protein, 249 aa, synthetic construct
  REGION 1..249: note = Description of Artificial Sequence: Synthetic polypeptide
  REGION 1..249: note = XENP019152 1G6_H1.48_L1.151_scFv(GKPGS)4
EVQLVESGGGLVKPGGSLRLSCAASGFTFSNYWMNWVRKAPGKGLEWVGEIRLKSNNYATHYAEPVKGRFTISRDDSKSTVYLQMNSLKTEDTAVYYCTRYYGNYGGYFDVWGAGTLVTVSSGKPGSGKPGSGKPGSGKPGSSIVMTQSPATLSVSPGERATLSCRASQSVSNDVAWYQQKPEQSPRLLINYASHRYTGVPDRFTGSGYGTEFTLTISSLQSEDFAVYFCQQDYSSPRTFGGGTKVEIK

SEQ ID NO: 15434 - protein, 122 aa, synthetic construct; identical to SEQ ID NO: 11462
  REGION 1..122: note = Description of Artificial Sequence: Synthetic polypeptide
  REGION 1..122: note = VH of XENP019152

SEQ ID NO: 15435 - protein, 107 aa, synthetic construct; identical to SEQ ID NO: 15078
  REGION 1..107: note = Description of Artificial Sequence: Synthetic polypeptide
  REGION 1..107: note = VL of XENP019152

SEQ ID NO: 15436 - protein, 11 aa, synthetic construct
  REGION 1..11: note = Description of Artificial Sequence: Synthetic peptide
  REGION 1..11: note = XENP019152 vlCDR1
RASQSVSNDVA

SEQ ID NO: 15437 - protein, 7 aa, synthetic construct
  REGION 1..7: note = Description of Artificial Sequence: Synthetic peptide
  REGION 1..7: note = XENP019152 vlCDR2
YASHRYT

SEQ ID NO: 15438 - protein, 9 aa, synthetic construct
  REGION 1..9: note = Description of Artificial Sequence: Synthetic peptide
  REGION 1..9: note = XENP019152 vlCDR3
QQDYSSPRT

SEQ ID NO: 15439 - protein, 249 aa, synthetic construct
  REGION 1..249: note = Description of Artificial Sequence: Synthetic polypeptide
  REGION 1..249: note = XENP019153 1G6_H1.43_L1.159_scFv(GKPGS)4
EVQLVESGGGLVKPGGSLRLSCAASGFTFSNYWMDWVRQAPGKGLEWVGEIRLKSNNYATHYAEPVKGRFTISRDDSKSTVYLQMNSLKTEDTAVYYCTRYYGNYGGYFDVWGAGTLVTVSSGKPGSGKPGSGKPGSGKPGSSIVMTQSPATLSVSPGERATLSCRASQSVSNDVAWYQQKPGQSPRLLINYASHRYTGVPDRFTGSGYGTEFTLTISSLQSEDFAVYFCKQDYSSPRTFGGGTKVEIK

SEQ ID NO: 15440 - protein, 122 aa, synthetic construct; identical to SEQ ID NO: 11417
  REGION 1..122: note = Description of Artificial Sequence: Synthetic polypeptide
  REGION 1..122: note = VH of XENP019153

SEQ ID NO: 15441 - protein, 107 aa, synthetic construct; identical to SEQ ID NO: 15150
  REGION 1..107: note = Description of Artificial Sequence: Synthetic polypeptide
  REGION 1..107: note = VL of XENP019153

SEQ ID NO: 15442 - protein, 5 aa, synthetic construct
  REGION 1..5: note = Description of Artificial Sequence: Synthetic peptide
  REGION 1..5: note = XENP019153 vhCDR1
NYWMD

SEQ ID NO: 15443 - protein, 19 aa, synthetic construct
  REGION 1..19: note = Description of Artificial Sequence: Synthetic peptide
  REGION 1..19: note = XENP019153 vhCDR2
EIRLKSNNYATHYAEPVKG

SEQ ID NO: 15444 - protein, 11 aa, synthetic construct
  REGION 1..11: note = Description of Artificial Sequence: Synthetic peptide
  REGION 1..11: note = XENP019153 vhCDR3
YYGNYGGYFDV

SEQ ID NO: 15445 - protein, 11 aa, synthetic construct
  REGION 1..11: note = Description of Artificial Sequence: Synthetic peptide
  REGION 1..11: note = XENP019153 vlCDR1
RASQSVSNDVA

SEQ ID NO: 15446 - protein, 7 aa, synthetic construct
  REGION 1..7: note = Description of Artificial Sequence: Synthetic peptide
  REGION 1..7: note = XENP019153 vlCDR2
YASHRYT

SEQ ID NO: 15447 - protein, 9 aa, synthetic construct
  REGION 1..9: note = Description of Artificial Sequence: Synthetic peptide
  REGION 1..9: note = XENP019153 vlCDR3
KQDYSSPRT

SEQ ID NO: 15448 - protein, 249 aa, synthetic construct
  REGION 1..249: note = Description of Artificial Sequence: Synthetic polypeptide
  REGION 1..249: note = XENP019154 1G6_H1.90_L1.119_scFv(GKPGS)4
EVQLVESGGGLVKPGGSLRLSCAASGFTFSNYWMNWVRQAPGKGLEWVGEIRLYSNNYATHYAEPVKGRFTISRDDSKSTVYLQMNSLKTEDTAVYYCTRYYGNYGGYFDVWGAGTLVTVSSGKPGSGKPGSGKPGSGKPGSSIVMTQSPATLSVSPGERATLSCRASQSVSNDVAWYQQKPGQSPRLLINYASHRYTGVPDRFTGSGYGTEFTLTISSLQSEDFAVYFCQQDWSSPRTFGGGTKVEIK

SEQ ID NO: 15449 - protein, 122 aa, synthetic construct; identical to SEQ ID NO: 11837
  REGION 1..122: note = Description of Artificial Sequence: Synthetic polypeptide
  REGION 1..122: note = VH of XENP019154

SEQ ID NO: 15450 - protein, 107 aa, synthetic construct; identical to SEQ ID NO: 14241
  REGION 1..107: note = Description of Artificial Sequence: Synthetic polypeptide
  REGION 1..107: note = VL of XENP019154

SEQ ID NO: 15451 - protein, 5 aa, synthetic construct
  REGION 1..5: note = Description of Artificial Sequence: Synthetic peptide
  REGION 1..5: note = XENP019154 vhCDR1
NYWMN

SEQ ID NO: 15452 - protein, 19 aa, synthetic construct
  REGION 1..19: note = Description of Artificial Sequence: Synthetic peptide
  REGION 1..19: note = XENP019154 vhCDR2
EIRLYSNNYATHYAEPVKG

SEQ ID NO: 15453 - protein, 11 aa, synthetic construct
  REGION 1..11: note = Description of Artificial Sequence: Synthetic peptide
  REGION 1..11: note = XENP019154 vhCDR3
YYGNYGGYFDV

SEQ ID NO: 15454 - protein, 11 aa, synthetic construct
  REGION 1..11: note = Description of Artificial Sequence: Synthetic peptide
  REGION 1..11: note = XENP019154 vlCDR1
RASQSVSNDVA

SEQ ID NO: 15455 - protein, 7 aa, synthetic construct
  REGION 1..7: note = Description of Artificial Sequence: Synthetic peptide
  REGION 1..7: note = XENP019154 vlCDR2
YASHRYT

SEQ ID NO: 15456 - protein, 9 aa, synthetic construct
  REGION 1..9: note = Description of Artificial Sequence: Synthetic peptide
  REGION 1..9: note = XENP019154 vlCDR3
QQDWSSPRT

SEQ ID NO: 15457 - protein, 249 aa, synthetic construct
  REGION 1..249: note = Description of Artificial Sequence: Synthetic polypeptide
  REGION 1..249: note = XENP019155 1G6_H1.90_L1.23_scFv(GKPGS)4
EVQLVESGGGLVKPGGSLRLSCAASGFTFSNYWMNWVRQAPGKGLEWVGEIRLYSNNYATHYAEPVKGRFTISRDDSKSTVYLQMNSLKTEDTAVYYCTRYYGNYGGYFDVWGAGTLVTVSSGKPGSGKPGSGKPGSGKPGSSIVMTQSPATLSVSPGERATLSCRASQSVGNDVAWYQQKPGQSPRLLINYASHRYTGVPDRFTGSGYGTEFTLTISSLQSEDFAVYFCQQDYSSPRTFGGGTKVEIK

SEQ ID NO: 15458 - protein, 122 aa, synthetic construct; identical to SEQ ID NO: 11837
  REGION 1..122: note = Description of Artificial Sequence: Synthetic polypeptide
  REGION 1..122: note = VH of XENP019155

SEQ ID NO: 15459 - protein, 107 aa, synthetic construct; identical to SEQ ID NO: 13377
  REGION 1..107: note = Description of Artificial Sequence: Synthetic polypeptide
  REGION 1..107: note = VL of XENP019155

SEQ ID NO: 15460 - protein, 5 aa, synthetic construct
  REGION 1..5: note = Description of Artificial Sequence: Synthetic peptide
  REGION 1..5: note = XENP019155 vhCDR1
NYWMN

SEQ ID NO: 15461 - protein, 19 aa, synthetic construct
  REGION 1..19: note = Description of Artificial Sequence: Synthetic peptide
  REGION 1..19: note = XENP019155 vhCDR2
EIRLYSNNYATHYAEPVKG

SEQ ID NO: 15462 - protein, 11 aa, synthetic construct
  REGION 1..11: note = Description of Artificial Sequence: Synthetic peptide
  REGION 1..11: note = XENP019155 vhCDR3
YYGNYGGYFDV

SEQ ID NO: 15463 - protein, 11 aa, synthetic construct
  REGION 1..11: note = Description of Artificial Sequence: Synthetic peptide
  REGION 1..11: note = XENP019155 vlCDR1
RASQSVGNDVA

SEQ ID NO: 15464 - protein, 7 aa, synthetic construct
  REGION 1..7: note = Description of Artificial Sequence: Synthetic peptide
  REGION 1..7: note = XENP019155 vlCDR2
YASHRYT

SEQ ID NO: 15465 - protein, 9 aa, synthetic construct
  REGION 1..9: note = Description of Artificial Sequence: Synthetic peptide
  REGION 1..9: note = XENP019155 vlCDR3
QQDYSSPRT

SEQ ID NO: 15466 - protein, 249 aa, synthetic construct
  REGION 1..249: note = Description of Artificial Sequence: Synthetic polypeptide
  REGION 1..249: note = XENP019156 1G6_H1.90_L1.67_scFv(GKPGS)4
EVQLVESGGGLVKPGGSLRLSCAASGFTFSNYWMNWVRQAPGKGLEWVGEIRLYSNNYATHYAEPVKGRFTISRDDSKSTVYLQMNSLKTEDTAVYYCTRYYGNYGGYFDVWGAGTLVTVSSGKPGSGKPGSGKPGSGKPGSSIVMTQSPATLSVSPGERATLSCRASQSVSNDVAWYQQKPGQSPRLLINYASWRYTGVPDRFTGSGYGTEFTLTISSLQSEDFAVYFCQQDYSSPRTFGGGTKVEIK

SEQ ID NO: 15467 - protein, 122 aa, synthetic construct; identical to SEQ ID NO: 11837
  REGION 1..122: note = Description of Artificial Sequence: Synthetic polypeptide
  REGION 1..122: note = VH of XENP019156

SEQ ID NO: 15468 - protein, 107 aa, synthetic construct; identical to SEQ ID NO: 13773
  REGION 1..107: note = Description of Artificial Sequence: Synthetic polypeptide
  REGION 1..107: note = VL of XENP019156

SEQ ID NO: 15469 - protein, 5 aa, synthetic construct
  REGION 1..5: note = Description of Artificial Sequence: Synthetic peptide
  REGION 1..5: note = XENP019156 vhCDR1
NYWMN

SEQ ID NO: 15470 - protein, 19 aa, synthetic construct
  REGION 1..19: note = Description of Artificial Sequence: Synthetic peptide
  REGION 1..19: note = XENP019156 vhCDR2
EIRLYSNNYATHYAEPVKG

SEQ ID NO: 15471 - protein, 11 aa, synthetic construct
  REGION 1..11: note = Description of Artificial Sequence: Synthetic peptide
  REGION 1..11: note = XENP019156 vhCDR3
YYGNYGGYFDV

SEQ ID NO: 15472 - protein, 11 aa, synthetic construct
  REGION 1..11: note = Description of Artificial Sequence: Synthetic peptide
  REGION 1..11: note = XENP019156 vlCDR1
RASQSVSNDVA

SEQ ID NO: 15473 - protein, 7 aa, synthetic construct
  REGION 1..7: note = Description of Artificial Sequence: Synthetic peptide
  REGION 1..7: note = XENP019156 vlCDR2
YASWRYT

SEQ ID NO: 15474 - protein, 9 aa, synthetic construct
  REGION 1..9: note = Description of Artificial Sequence: Synthetic peptide
  REGION 1..9: note = XENP019156 vlCDR3
QQDYSSPRT

SEQ ID NO: 15475 - protein, 249 aa, synthetic construct
  REGION 1..249: note = Description of Artificial Sequence: Synthetic polypeptide
  REGION 1..249: note = XENP019157 1G6_H1.90_L1.94_scFv(GKPGS)4
EVQLVESGGGLVKPGGSLRLSCAASGFTFSNYWMNWVRQAPGKGLEWVGEIRLYSNNYATHYAEPVKGRFTISRDDSKSTVYLQMNSLKTEDTAVYYCTRYYGNYGGYFDVWGAGTLVTVSSGKPGSGKPGSGKPGSGKPGSSIVMTQSPATLSVSPGERATLSCRASQSVSNDVAWYQQKPGQSPRLLINYASHRYTSVPDRFTGSGYGTEFTLTISSLQSEDFAVYFCQQDYSSPRTFGGGTKVEIK

SEQ ID NO: 15476 - protein, 122 aa, synthetic construct; identical to SEQ ID NO: 11837
  REGION 1..122: note = Description of Artificial Sequence: Synthetic polypeptide
  REGION 1..122: note = VH of XENP019157

SEQ ID NO: 15477 - protein, 107 aa, synthetic construct; identical to SEQ ID NO: 14016
  REGION 1..107: note = Description of Artificial Sequence: Synthetic polypeptide
  REGION 1..107: note = VL of XENP019157

SEQ ID NO: 15478 - protein, 5 aa, synthetic construct
  REGION 1..5: note = Description of Artificial Sequence: Synthetic peptide
  REGION 1..5: note = XENP019157 vhCDR1
NYWMN

SEQ ID NO: 15479 - protein, 19 aa, synthetic construct
  REGION 1..19: note = Description of Artificial Sequence: Synthetic peptide
  REGION 1..19: note = XENP019157 vhCDR2
EIRLYSNNYATHYAEPVKG

SEQ ID NO: 15480 - protein, 11 aa, synthetic construct
  REGION 1..11: note = Description of Artificial Sequence: Synthetic peptide
  REGION 1..11: note = XENP019157 vhCDR3
YYGNYGGYFDV

SEQ ID NO: 15481 - protein, 11 aa, synthetic construct
  REGION 1..11: note = Description of Artificial Sequence: Synthetic peptide
  REGION 1..11: note = XENP019157 vlCDR1
RASQSVSNDVA

SEQ ID NO: 15482 - protein, 7 aa, synthetic construct
  REGION 1..7: note = Description of Artificial Sequence: Synthetic peptide
  REGION 1..7: note = XENP019157 vlCDR2
YASHRYT

SEQ ID NO: 15483 - protein, 9 aa, synthetic construct
  REGION 1..9: note = Description of Artificial Sequence: Synthetic peptide
  REGION 1..9: note = XENP019157 vlCDR3
QQDYSSPRT

SEQ ID NO: 15484 - protein, 249 aa, synthetic construct
  REGION 1..249: note = Description of Artificial Sequence: Synthetic polypeptide
  REGION 1..249: note = XENP019158 1G6_H1.90_L1.116_scFv(GKPGS)4
EVQLVESGGGLVKPGGSLRLSCAASGFTFSNYWMNWVRQAPGKGLEWVGEIRLYSNNYATHYAEPVKGRFTISRDDSKSTVYLQMNSLKTEDTAVYYCTRYYGNYGGYFDVWGAGTLVTVSSGKPGSGKPGSGKPGSGKPGSSIVMTQSPATLSVSPGERATLSCRASQSVSNDVAWYQQKPGQSPRLLINYASHRYTGVPDRFTGSGYGTEFTLTISSLQSEDFAVYFCQQDFSSPRTFGGGTKVEIK

SEQ ID NO: 15485 - protein, 122 aa, synthetic construct; identical to SEQ ID NO: 11837
  REGION 1..122: note = Description of Artificial Sequence: Synthetic polypeptide
  REGION 1..122: note = VH of XENP019158

SEQ ID NO: 15486 - protein, 107 aa, synthetic construct; identical to SEQ ID NO: 14214
  REGION 1..107: note = Description of Artificial Sequence: Synthetic polypeptide
  REGION 1..107: note = VL of XENP019158

SEQ ID NO: 15487 - protein, 5 aa, synthetic construct
  REGION 1..5: note = Description of Artificial Sequence: Synthetic peptide
  REGION 1..5: note = XENP019158 vhCDR1
NYWMN

SEQ ID NO: 15488 - protein, 19 aa, synthetic construct
  REGION 1..19: note = Description of Artificial Sequence: Synthetic peptide
  REGION 1..19: note = XENP019158 vhCDR2
EIRLYSNNYATHYAEPVKG

SEQ ID NO: 15489 - protein, 11 aa, synthetic construct
  REGION 1..11: note = Description of Artificial Sequence: Synthetic peptide
  REGION 1..11: note = XENP019158 vhCDR3
YYGNYGGYFDV

SEQ ID NO: 15490 - protein, 11 aa, synthetic construct
  REGION 1..11: note = Description of Artificial Sequence: Synthetic peptide
  REGION 1..11: note = XENP019158 vlCDR1
RASQSVSNDVA

SEQ ID NO: 15491 - protein, 7 aa, synthetic construct
  REGION 1..7: note = Description of Artificial Sequence: Synthetic peptide
  REGION 1..7: note = XENP019158 vlCDR2
YASHRYT

SEQ ID NO: 15492 - protein, 9 aa, synthetic construct
  REGION 1..9: note = Description of Artificial Sequence: Synthetic peptide
  REGION 1..9: note = XENP019158 vlCDR3
QQDFSSPRT

SEQ ID NO: 15493 - protein, 249 aa, synthetic construct; identical to SEQ ID NO: 15448
  REGION 1..249: note = Description of Artificial Sequence: Synthetic polypeptide
  REGION 1..249: note = XENP019159 1G6_H1.155_L1.119_scFv(GKPGS)4

SEQ ID NO: 15494 - protein, 122 aa, synthetic construct; identical to SEQ ID NO: 11837
  REGION 1..122: note = Description of Artificial Sequence: Synthetic polypeptide
  REGION 1..122: note = VH of XENP019159

SEQ ID NO: 15495 - protein, 107 aa, synthetic construct; identical to SEQ ID NO: 14241
  REGION 1..107: note = Description of Artificial Sequence: Synthetic polypeptide
  REGION 1..107: note = VL of XENP019159

SEQ ID NO: 15496 - protein, 5 aa, synthetic construct
  REGION 1..5: note = Description of Artificial Sequence: Synthetic peptide
  REGION 1..5: note = XENP019159 vhCDR1
NYWMN

SEQ ID NO: 15497 - protein, 19 aa, synthetic construct
  REGION 1..19: note = Description of Artificial Sequence: Synthetic peptide
  REGION 1..19: note = XENP019159 vhCDR2
EIRLYSNNYATHYAEPVKG

SEQ ID NO: 15498 - protein, 11 aa, synthetic construct
  REGION 1..11: note = Description of Artificial Sequence: Synthetic peptide
  REGION 1..11: note = XENP019159 vhCDR3
YYGNYGGYFDV

SEQ ID NO: 15499 - protein, 11 aa, synthetic construct
  REGION 1..11: note = Description of Artificial Sequence: Synthetic peptide
  REGION 1..11: note = XENP019159 vlCDR1
RASQSVSNDVA

SEQ ID NO: 15500 - protein, 7 aa, synthetic construct
  REGION 1..7: note = Description of Artificial Sequence: Synthetic peptide
  REGION 1..7: note = XENP019159 vlCDR2
YASHRYT

SEQ ID NO: 15501 - protein, 9 aa, synthetic construct
  REGION 1..9: note = Description of Artificial Sequence: Synthetic peptide
  REGION 1..9: note = XENP019159 vlCDR3
QQDWSSPRT

SEQ ID NO: 15502 - protein, 249 aa, synthetic construct
  REGION 1..249: note = Description of Artificial Sequence: Synthetic polypeptide
  REGION 1..249: note = XENP019182 1G6_H1_L1.190_scFv(GKPGS)4
EVQLVESGGGLVKPGGSLRLSCAASGFTFSNYWMNWVRQAPGKGLEWVGEIRLKSNNYATHYAEPVKGRFTISRDDSKSTVYLQMNSLKTEDTAVYYCTRYYGNYGGYFDVWGAGTLVTVSSGKPGSGKPGSGKPGSGKPGSSIVMTQSPATLSVSPGERATLSCRASQSVGNDVAWYQQKPGQSPRLLINYASHRYTGVPDRFTGSGYGTEFTLTISSLQSEDFAVYFCQQDFSSPRTFGGGTKVEIK

SEQ ID NO: 15503 - protein, 122 aa, synthetic construct; identical to SEQ ID NO: 10922
  REGION 1..122: note = Description of Artificial Sequence: Synthetic polypeptide
  REGION 1..122: note = VH of XENP019182

SEQ ID NO: 15504 - protein, 107 aa, synthetic construct
  REGION 1..107: note = Description of Artificial Sequence: Synthetic polypeptide
  REGION 1..107: note = VL of XENP019182
SIVMTQSPATLSVSPGERATLSCRASQSVGNDVAWYQQKPGQSPRLLINYASHRYTGVPDRFTGSGYGTEFTLTISSLQSEDFAVYFCQQDFSSPRTFGGGTKVEIK

SEQ ID NO: 15505 - protein, 5 aa, synthetic construct
  REGION 1..5: note = Description of Artificial Sequence: Synthetic peptide
  REGION 1..5: note = XENP019182 vhCDR1
NYWMN

SEQ ID NO: 15506 - protein, 19 aa, synthetic construct
  REGION 1..19: note = Description of Artificial Sequence: Synthetic peptide
  REGION 1..19: note = XENP019182 vhCDR2
EIRLKSNNYATHYAEPVKG

SEQ ID NO: 15507 - protein, 11 aa, synthetic construct
  REGION 1..11: note = Description of Artificial Sequence: Synthetic peptide
  REGION 1..11: note = XENP019182 vhCDR3
YYGNYGGYFDV

SEQ ID NO: 15508 - protein, 11 aa, synthetic construct
  REGION 1..11: note = Description of Artificial Sequence: Synthetic peptide
  REGION 1..11: note = XENP019182 vlCDR1
RASQSVGNDVA

SEQ ID NO: 15509 - protein, 7 aa, synthetic construct
  REGION 1..7: note = Description of Artificial Sequence: Synthetic peptide
  REGION 1..7: note = XENP019182 vlCDR2
YASHRYT

SEQ ID NO: 15510 - protein, 9 aa, synthetic construct
  REGION 1..9: note = Description of Artificial Sequence: Synthetic peptide
  REGION 1..9: note = XENP019182 vlCDR3
QQDFSSPRT

SEQ ID NO: 15511 - protein, 249 aa, synthetic construct
  REGION 1..249: note = Description of Artificial Sequence: Synthetic polypeptide
  REGION 1..249: note = XENP019183 1G6_H1_L1.191_scFv(GKPGS)4
EVQLVESGGGLVKPGGSLRLSCAASGFTFSNYWMNWVRQAPGKGLEWVGEIRLKSNNYATHYAEPVKGRFTISRDDSKSTVYLQMNSLKTEDTAVYYCTRYYGNYGGYFDVWGAGTLVTVSSGKPGSGKPGSGKPGSGKPGSSIVMTQSPATLSVSPGERATLSCRASQSVGNDVAWYQQKPGQSPRLLINYASHRYTGVPDRFTGSGYGTEFTLTISSLQSEDFAVYFCQQDWSSPRTFGGGTKVEIK

SEQ ID NO: 15512 - protein, 122 aa, synthetic construct; identical to SEQ ID NO: 10922
  REGION 1..122: note = Description of Artificial Sequence: Synthetic polypeptide
  REGION 1..122: note = VH of XENP019183

SEQ ID NO: 15513 - protein, 107 aa, synthetic construct
  REGION 1..107: note = Description of Artificial Sequence: Synthetic polypeptide
  REGION 1..107: note = VL of XENP019183
SIVMTQSPATLSVSPGERATLSCRASQSVGNDVAWYQQKPGQSPRLLINYASHRYTGVPDRFTGSGYGTEFTLTISSLQSEDFAVYFCQQDWSSPRTFGGGTKVEIK

SEQ ID NO: 15514 - protein, 5 aa, synthetic construct
  REGION 1..5: note = Description of Artificial Sequence: Synthetic peptide
  REGION 1..5: note = XENP019183 vhCDR1
NYWMN

SEQ ID NO: 15515 - protein, 19 aa, synthetic construct
  REGION 1..19: note = Description of Artificial Sequence: Synthetic peptide
  REGION 1..19: note = XENP019183 vhCDR2
EIRLKSNNYATHYAEPVKG

SEQ ID NO: 15516 - protein, 11 aa, synthetic construct
  REGION 1..11: note = Description of Artificial Sequence: Synthetic peptide
  REGION 1..11: note = XENP019183 vhCDR3
YYGNYGGYFDV

SEQ ID NO: 15517 - protein, 11 aa, synthetic construct
  REGION 1..11: note = Description of Artificial Sequence: Synthetic peptide
  REGION 1..11: note = XENP019183 vlCDR1
RASQSVGNDVA

SEQ ID NO: 15518 - protein, 7 aa, synthetic construct
  REGION 1..7: note = Description of Artificial Sequence: Synthetic peptide
  REGION 1..7: note = XENP019183 vlCDR2
YASHRYT

SEQ ID NO: 15519 - protein, 9 aa, synthetic construct
  REGION 1..9: note = Description of Artificial Sequence: Synthetic peptide
  REGION 1..9: note = XENP019183 vlCDR3
QQDWSSPRT

SEQ ID NO: 15520 - protein, 480 aa, synthetic construct
  REGION 1..480: note = Description of Artificial Sequence: Synthetic polypeptide
  REGION 1..480: note = XENP019202 1G6_H1.278_L1_scFv(GKPGS)4
EVQLVESGGGLVKPGGSLRLSCVASGFTFSNYWMNWVRQAPGKGLEWVAEIRLYSNNYATHYAESVKGRFTISRDDSKSTLYLQMNNLKTEDTGVYYCTRYYGNYGGYFDVWGQGTLVTVSSGKPGSGKPGSGKPGSGKPGSSIVMTQSPATLSVSPGERATLSCRASQSVSNDVAWYQQKPGQSPRLLINYASHRYTGVPDRFTGSGYGTEFTLTISSLQSEDFAVYFCQQDYSSPRTFGGGTKVEIKEPKSSDKTHTCPPCPAPPVAGPSVFLFPPKPKDTLMISRTPEVTCVVVDVKHEDPEVKFNWYVDGVEVHNAKTKPREEQYNSTYRVVSVLTVLHQDWLNGKEYKCKVSNKALPAPIEKTISKAKGQPREPQVYTLPPSREQMTKNQVKLTCLVKGFYPSDIAVEWESNGQPENNYKTTPPVLDSDGSFFLYSKLTVDKSRWQQGNVFSCSVMHEALHNHYTQKSLSLSPGK

SEQ ID NO: 15521 - protein, 122 aa, synthetic construct
  REGION 1..122: note = Description of Artificial Sequence: Synthetic polypeptide
  REGION 1..122: note = VH of XENP019202
EVQLVESGGGLVKPGGSLRLSCVASGFTFSNYWMNWVRQAPGKGLEWVAEIRLYSNNYATHYAESVKGRFTISRDDSKSTLYLQMNNLKTEDTGVYYCTRYYGNYGGYFDVWGQGTLVTVSS

SEQ ID NO: 15522 - protein, 338 aa, synthetic construct
  REGION 1..338: note = Description of Artificial Sequence: Synthetic polypeptide
  REGION 1..338: note = VL of XENP019202
SIVMTQSPATLSVSPGERATLSCRASQSVSNDVAWYQQKPGQSPRLLINYASHRYTGVPDRFTGSGYGTEFTLTISSLQSEDFAVYFCQQDYSSPRTFGGGTKVEIKEPKSSDKTHTCPPCPAPPVAGPSVFLFPPKPKDTLMISRTPEVTCVVVDVKHEDPEVKFNWYVDGVEVHNAKTKPREEQYNSTYRVVSVLTVLHQDWLNGKEYKCKVSNKALPAPIEKTISKAKGQPREPQVYTLPPSREQMTKNQVKLTCLVKGFYPSDIAVEWESNGQPENNYKTTPPVLDSDGSFFLYSKLTVDKSRWQQGNVFSCSVMHEALHNHYTQKSLSLSPGK

SEQ ID NO: 15523 - protein, 5 aa, synthetic construct
  REGION 1..5: note = Description of Artificial Sequence: Synthetic peptide
  REGION 1..5: note = XENP019202 vhCDR1
NYWMN

SEQ ID NO: 15524 - protein, 19 aa, synthetic construct
  REGION 1..19: note = Description of Artificial Sequence: Synthetic peptide
  REGION 1..19: note = XENP019202 vhCDR2
EIRLYSNNYATHYAESVKG

SEQ ID NO: 15525 - protein, 11 aa, synthetic construct
  REGION 1..11: note = Description of Artificial Sequence: Synthetic peptide
  REGION 1..11: note = XENP019202 vhCDR3
YYGNYGGYFDV

SEQ ID NO: 15526 - protein, 11 aa, synthetic construct
  REGION 1..11: note = Description of Artificial Sequence: Synthetic peptide
  REGION 1..11: note = XENP019202 vlCDR1
RASQSVSNDVA

SEQ ID NO: 15527 - protein, 7 aa, synthetic construct
  REGION 1..7: note = Description of Artificial Sequence: Synthetic peptide
  REGION 1..7: note = XENP019202 vlCDR2
YASHRYT

SEQ ID NO: 15528 - protein, 9 aa, synthetic construct
  REGION 1..9: note = Description of Artificial Sequence: Synthetic peptide
  REGION 1..9: note = XENP019202 vlCDR3
QQDYSSPRT

SEQ ID NO: 15529 - protein, 249 aa, synthetic construct
  REGION 1..249: note = Description of Artificial Sequence: Synthetic polypeptide
  REGION 1..249: note = XENP019203 1G6_H1_L1.188_scFv(GKPGS)4
EVQLVESGGGLVKPGGSLRLSCAASGFTFSNYWMNWVRQAPGKGLEWVGEIRLKSNNYATHYAEPVKGRFTISRDDSKSTVYLQMNSLKTEDTAVYYCTRYYGNYGGYFDVWGAGTLVTVSSGKPGSGKPGSGKPGSGKPGSEIVMTQSPATLSVSPGERVTLTCRASQSVGNDVAWYQQKPGQSPRLLINYASHRYTGVPDRFTGSGYGTEFTLTISSVQSEDFAVYFCQQDFSSPRTFGGGTKVEIK

SEQ ID NO: 15530 - protein, 122 aa, synthetic construct; identical to SEQ ID NO: 10922
  REGION 1..122: note = Description of Artificial Sequence: Synthetic polypeptide
  REGION 1..122: note = VH of XENP019203

SEQ ID NO: 15531 - protein, 107 aa, synthetic construct
  REGION 1..107: note = Description of Artificial Sequence: Synthetic polypeptide
  REGION 1..107: note = VL of XENP019203
EIVMTQSPATLSVSPGERVTLTCRASQSVGNDVAWYQQKPGQSPRLLINYASHRYTGVPDRFTGSGYGTEFTLTISSVQSEDFAVYFCQQDFSSPRTFGGGTKVEIK

SEQ ID NO: 15532 - protein, 5 aa, synthetic construct
  REGION 1..5: note = Description of Artificial Sequence: Synthetic peptide
  REGION 1..5: note = XENP019203 vhCDR1
NYWMN

SEQ ID NO: 15533 - protein, 19 aa, synthetic construct
  REGION 1..19: note = Description of Artificial Sequence: Synthetic peptide
  REGION 1..19: note = XENP019203 vhCDR2
EIRLKSNNYATHYAEPVKG

SEQ ID NO: 15534 - protein, 11 aa, synthetic construct
  REGION 1..11: note = Description of Artificial Sequence: Synthetic peptide
  REGION 1..11: note = XENP019203 vhCDR3
YYGNYGGYFDV

SEQ ID NO: 15535 - protein, 11 aa, synthetic construct
  REGION 1..11: note = Description of Artificial Sequence: Synthetic peptide
  REGION 1..11: note = XENP019203 vlCDR1
RASQSVGNDVA

SEQ ID NO: 15536 - protein, 7 aa, synthetic construct
  REGION 1..7: note = Description of Artificial Sequence: Synthetic peptide
  REGION 1..7: note = XENP019203 vlCDR2
YASHRYT

SEQ ID NO: 15537 - protein, 9 aa, synthetic construct
  REGION 1..9: note = Description of Artificial Sequence: Synthetic peptide
  REGION 1..9: note = XENP019203 vlCDR3
QQDFSSPRT

SEQ ID NO: 15538 - protein, 249 aa, synthetic construct
  REGION 1..249: note = Description of Artificial Sequence: Synthetic polypeptide
  REGION 1..249: note = XENP019204 1G6_H1_L1.189_scFv(GKPGS)4
EVQLVESGGGLVKPGGSLRLSCAASGFTFSNYWMNWVRQAPGKGLEWVGEIRLKSNNYATHYAEPVKGRFTISRDDSKSTVYLQMNSLKTEDTAVYYCTRYYGNYGGYFDVWGAGTLVTVSSGKPGSGKPGSGKPGSGKPGSEIVLTQSPATLSVSPGERVTLTCRASQSVGNDVAWYQQKPGQAPRLLINYASHRYTGVPDRFTGSGYGTEFTLTISSVQSEDFAVYYCQQDFSSPRTFGGGTKVEIK

SEQ ID NO: 15539 - protein, 122 aa, synthetic construct; identical to SEQ ID NO: 10922
  REGION 1..122: note = Description of Artificial Sequence: Synthetic polypeptide
  REGION 1..122: note = VH of XENP019204

SEQ ID NO: 15540 - protein, 107 aa, synthetic construct
  REGION 1..107: note = Description of Artificial Sequence: Synthetic polypeptide
  REGION 1..107: note = VL of XENP019204
EIVLTQSPATLSVSPGERVTLTCRASQSVGNDVAWYQQKPGQAPRLLINYASHRYTGVPDRFTGSGYGTEFTLTISSVQSEDFAVYYCQQDFSSPRTFGGGTKVEIK

SEQ ID NO: 15541 - protein, 5 aa, synthetic construct
  REGION 1..5: note = Description of Artificial Sequence: Synthetic peptide
  REGION 1..5: note = XENP019204 vhCDR1
NYWMN

SEQ ID NO: 15542 - protein, 19 aa, synthetic construct
  REGION 1..19: note = Description of Artificial Sequence: Synthetic peptide
  REGION 1..19: note = XENP019204 vhCDR2
EIRLKSNNYATHYAEPVKG

SEQ ID NO: 15543 - protein, 11 aa, synthetic construct
  REGION 1..11: note = Description of Artificial Sequence: Synthetic peptide
  REGION 1..11: note = XENP019204 vhCDR3
YYGNYGGYFDV

SEQ ID NO: 15544 - protein, 11 aa, synthetic construct
  REGION 1..11: note = Description of Artificial Sequence: Synthetic peptide
  REGION 1..11: note = XENP019204 vlCDR1
RASQSVGNDVA

SEQ ID NO: 15545 - protein, 7 aa, synthetic construct
  REGION 1..7: note = Description of Artificial Sequence: Synthetic peptide
  REGION 1..7: note = XENP019204 vlCDR2
YASHRYT

SEQ ID NO: 15546 - protein, 9 aa, synthetic construct
  REGION 1..9: note = Description of Artificial Sequence: Synthetic peptide
  REGION 1..9: note = XENP019204 vlCDR3
QQDFSSPRT

SEQ ID NO: 15547 - protein, 249 aa, synthetic construct
  REGION 1..249: note = Description of Artificial Sequence: Synthetic polypeptide
  REGION 1..249: note = XENP019205 1G6_H1.278_L1.188_scFv(GKPGS)4
EVQLVESGGGLVKPGGSLRLSCVASGFTFSNYWMNWVRQAPGKGLEWVAEIRLYSNNYATHYAESVKGRFTISRDDSKSTLYLQMNNLKTEDTGVYYCTRYYGNYGGYFDVWGQGTLVTVSSGKPGSGKPGSGKPGSGKPGSEIVMTQSPATLSVSPGERVTLTCRASQSVGNDVAWYQQKPGQSPRLLINYASHRYTGVPDRFTGSGYGTEFTLTISSVQSEDFAVYFCQQDFSSPRTFGGGTKVEIK

SEQ ID NO: 15548 - protein, 122 aa, synthetic construct; identical to SEQ ID NO: 15521
  REGION 1..122: note = Description of Artificial Sequence: Synthetic polypeptide
  REGION 1..122: note = VH of XENP019205

SEQ ID NO: 15549 - protein, 107 aa, synthetic construct; identical to SEQ ID NO: 15531
  REGION 1..107: note = Description of Artificial Sequence: Synthetic polypeptide
  REGION 1..107: note = VL of XENP019205

SEQ ID NO: 15550 - protein, 5 aa, synthetic construct
  REGION 1..5: note = Description of Artificial Sequence: Synthetic peptide
  REGION 1..5: note = XENP019205 vhCDR1
NYWMN

SEQ ID NO: 15551 - protein, 19 aa, synthetic construct
  REGION 1..19: note = Description of Artificial Sequence: Synthetic peptide
  REGION 1..19: note = XENP019205 vhCDR2
EIRLYSNNYATHYAESVKG

SEQ ID NO: 15552 - protein, 11 aa, synthetic construct
  REGION 1..11: note = Description of Artificial Sequence: Synthetic peptide
  REGION 1..11: note = XENP019205 vhCDR3
YYGNYGGYFDV

SEQ ID NO: 15553 - protein, 11 aa, synthetic construct
  REGION 1..11: note = Description of Artificial Sequence: Synthetic peptide
  REGION 1..11: note = XENP019205 vlCDR1
RASQSVGNDVA

SEQ ID NO: 15554 - protein, 7 aa, synthetic construct
  REGION 1..7: note = Description of Artificial Sequence: Synthetic peptide
  REGION 1..7: note = XENP019205 vlCDR2
YASHRYT

SEQ ID NO: 15555 - protein, 9 aa, synthetic construct
  REGION 1..9: note = Description of Artificial Sequence: Synthetic peptide
  REGION 1..9: note = XENP019205 vlCDR3
QQDFSSPRT

SEQ ID NO: 15556 - protein, 249 aa, synthetic construct
  REGION 1..249: note = Description of Artificial Sequence: Synthetic polypeptide
  REGION 1..249: note = XENP019206 1G6_H1.278_L1.189_scFv(GKPGS)4
EVQLVESGGGLVKPGGSLRLSCVASGFTFSNYWMNWVRQAPGKGLEWVAEIRLYSNNYATHYAESVKGRFTISRDDSKSTLYLQMNNLKTEDTGVYYCTRYYGNYGGYFDVWGQGTLVTVSSGKPGSGKPGSGKPGSGKPGSEIVLTQSPATLSVSPGERVTLTCRASQSVGNDVAWYQQKPGQAPRLLINYASHRYTGVPDRFTGSGYGTEFTLTISSVQSEDFAVYYCQQDFSSPRTFGGGTKVEIK

SEQ ID NO: 15557 - protein, 122 aa, synthetic construct; identical to SEQ ID NO: 15521
  REGION 1..122: note = Description of Artificial Sequence: Synthetic polypeptide
  REGION 1..122: note = VH of XENP019206

SEQ ID NO: 15558 - protein, 107 aa, synthetic construct; identical to SEQ ID NO: 15540
  REGION 1..107: note = Description of Artificial Sequence: Synthetic polypeptide
  REGION 1..107: note = VL of XENP019206

SEQ ID NO: 15559 - protein, 5 aa, synthetic construct
  REGION 1..5: note = Description of Artificial Sequence: Synthetic peptide
  REGION 1..5: note = XENP019206 vhCDR1
NYWMN

SEQ ID NO: 15560 - protein, 19 aa, synthetic construct
  REGION 1..19: note = Description of Artificial Sequence: Synthetic peptide
  REGION 1..19: note = XENP019206 vhCDR2
EIRLYSNNYATHYAESVKG

SEQ ID NO: 15561 - protein, 11 aa, synthetic construct
  REGION 1..11: note = Description of Artificial Sequence: Synthetic peptide
  REGION 1..11: note = XENP019206 vhCDR3
YYGNYGGYFDV

SEQ ID NO: 15562 - protein, 11 aa, synthetic construct
  REGION 1..11: note = Description of Artificial Sequence: Synthetic peptide
  REGION 1..11: note = XENP019206 vlCDR1
RASQSVGNDVA

SEQ ID NO: 15563 - protein, 7 aa, synthetic construct
  REGION 1..7: note = Description of Artificial Sequence: Synthetic peptide
  REGION 1..7: note = XENP019206 vlCDR2
YASHRYT

SEQ ID NO: 15564 - protein, 9 aa, synthetic construct
  REGION 1..9: note = Description of Artificial Sequence: Synthetic peptide
  REGION 1..9: note = XENP019206 vlCDR3
QQDFSSPRT

SEQ ID NO: 15565 - protein, 249 aa, synthetic construct
  REGION 1..249: note = Description of Artificial Sequence: Synthetic polypeptide
  REGION 1..249: note = XENP019207 1G6_L1.188_H1.278_scFv(GKPGS)4
EIVMTQSPATLSVSPGERVTLTCRASQSVGNDVAWYQQKPGQSPRLLINYASHRYTGVPDRFTGSGYGTEFTLTISSVQSEDFAVYFCQQDFSSPRTFGGGTKVEIKGKPGSGKPGSGKPGSGKPGSEVQLVESGGGLVKPGGSLRLSCVASGFTFSNYWMNWVRQAPGKGLEWVAEIRLYSNNYATHYAESVKGRFTISRDDSKSTLYLQMNNLKTEDTGVYYCTRYYGNYGGYFDVWGQGTLVTVSS

SEQ ID NO: 15566 - protein, 107 aa, synthetic construct; identical to SEQ ID NO: 15531
  REGION 1..107: note = Description of Artificial Sequence: Synthetic polypeptide
  REGION 1..107: note = VH of XENP019207

SEQ ID NO: 15567 - protein, 122 aa, synthetic construct; identical to SEQ ID NO: 15521
  REGION 1..122: note = Description of Artificial Sequence: Synthetic polypeptide
  REGION 1..122: note = VL of XENP019207

SEQ ID NO: 15568 - protein, 11 aa, synthetic construct
  REGION 1..11: note = Description of Artificial Sequence: Synthetic peptide
  REGION 1..11: note = XENP019207 vhCDR1
RASQSVGNDVA

SEQ ID NO: 15569 - protein, 7 aa, synthetic construct
  REGION 1..7: note = Description of Artificial Sequence: Synthetic peptide
  REGION 1..7: note = XENP019207 vhCDR2
YASHRYT

SEQ ID NO: 15570 - protein, 9 aa, synthetic construct
  REGION 1..9: note = Description of Artificial Sequence: Synthetic peptide
  REGION 1..9: note = XENP019207 vhCDR3
QQDFSSPRT

SEQ ID NO: 15571 - protein, 5 aa, synthetic construct
  REGION 1..5: note = Description of Artificial Sequence: Synthetic peptide
  REGION 1..5: note = XENP019207 vlCDR1
NYWMN

SEQ ID NO: 15572 - protein, 19 aa, synthetic construct
  REGION 1..19: note = Description of Artificial Sequence: Synthetic peptide
  REGION 1..19: note = XENP019207 vlCDR2
EIRLYSNNYATHYAESVKG

SEQ ID NO: 15573 - protein, 11 aa, synthetic construct
  REGION 1..11: note = Description of Artificial Sequence: Synthetic peptide
  REGION 1..11: note = XENP019207 vlCDR3
YYGNYGGYFDV

SEQ ID NO: 15574 - protein, 249 aa, synthetic construct
  REGION 1..249: note = Description of Artificial Sequence: Synthetic polypeptide
  REGION 1..249: note = XENP019208 1G6_L1.189_H1.278_scFv(GKPGS)4
EIVLTQSPATLSVSPGERVTLTCRASQSVGNDVAWYQQKPGQAPRLLINYASHRYTGVPDRFTGSGYGTEFTLTISSVQSEDFAVYYCQQDFSSPRTFGGGTKVEIKGKPGSGKPGSGKPGSGKPGSEVQLVESGGGLVKPGGSLRLSCVASGFTFSNYWMNWVRQAPGKGLEWVAEIRLYSNNYATHYAESVKGRFTISRDDSKSTLYLQMNNLKTEDTGVYYCTRYYGNYGGYFDVWGQGTLVTVSS

SEQ ID NO: 15575 - protein, 107 aa, synthetic construct; identical to SEQ ID NO: 15540
  REGION 1..107: note = Description of Artificial Sequence: Synthetic polypeptide
  REGION 1..107: note = VH of XENP019208

SEQ ID NO: 15576 - protein, 122 aa, synthetic construct; identical to SEQ ID NO: 15521
  REGION 1..122: note = Description of Artificial Sequence: Synthetic polypeptide
  REGION 1..122: note = VL of XENP019208

SEQ ID NO: 15577 - protein, 11 aa, synthetic construct
  REGION 1..11: note = Description of Artificial Sequence: Synthetic peptide
  REGION 1..11: note = XENP019208 vhCDR1
RASQSVGNDVA

SEQ ID NO: 15578 - protein, 7 aa, synthetic construct
  REGION 1..7: note = Description of Artificial Sequence: Synthetic peptide
  REGION 1..7: note = XENP019208 vhCDR2
YASHRYT

SEQ ID NO: 15579 - protein, 9 aa, synthetic construct
  REGION 1..9: note = Description of Artificial Sequence: Synthetic peptide
  REGION 1..9: note = XENP019208 vhCDR3
QQDFSSPRT

SEQ ID NO: 15580 - protein, 5 aa, synthetic construct
  REGION 1..5: note = Description of Artificial Sequence: Synthetic peptide
  REGION 1..5: note = XENP019208 vlCDR1
NYWMN

SEQ ID NO: 15581 - protein, 19 aa, synthetic construct
  REGION 1..19: note = Description of Artificial Sequence: Synthetic peptide
  REGION 1..19: note = XENP019208 vlCDR2
EIRLYSNNYATHYAESVKG

SEQ ID NO: 15582 - protein, 11 aa, synthetic construct
  REGION 1..11: note = Description of Artificial Sequence: Synthetic peptide
  REGION 1..11: note = XENP019208 vlCDR3
YYGNYGGYFDV

SEQ ID NO: 15583 - protein, 249 aa, synthetic construct
  REGION 1..249: note = Description of Artificial Sequence: Synthetic polypeptide
  REGION 1..249: note = XENP019618 1G6_H1.279_L1.189_scFv(GKPGS)4
EVQLVESGGGLVKPGGSLRLSCVASGFTFSNYWMNWVRQAPGKGLEWVAEIRLYSNNYATHYAESVKGRFTISRDDSKSTLYLQMNNLKTEDTGVYYCTRYYGNYGGYFDVWGRGTLVTVSSGKPGSGKPGSGKPGSGKPGSEIVLTQSPATLSVSPGERVTLTCRASQSVGNDVAWYQQKPGQAPRLLINYASHRYTGVPDRFTGSGYGTEFTLTISSVQSEDFAVYYCQQDFSSPRTFGGGTKVEIK

SEQ ID NO: 15584 - protein, 122 aa, synthetic construct; identical to SEQ ID NO: 2872
  REGION 1..122: note = Description of Artificial Sequence: Synthetic polypeptide
  REGION 1..122: note = VH of XENP019618

SEQ ID NO: 15585 - protein, 107 aa, synthetic construct; identical to SEQ ID NO: 15540
  REGION 1..107: note = Description of Artificial Sequence: Synthetic polypeptide
  REGION 1..107: note = VL of XENP019618

SEQ ID NO: 15586 - protein, 5 aa, synthetic construct
  REGION 1..5: note = Description of Artificial Sequence: Synthetic peptide
  REGION 1..5: note = XENP019618 vhCDR1
NYWMN

SEQ ID NO: 15587 - protein, 19 aa, synthetic construct
  REGION 1..19: note = Description of Artificial Sequence: Synthetic peptide
  REGION 1..19: note = XENP019618 vhCDR2
EIRLYSNNYATHYAESVKG

SEQ ID NO: 15588 - protein, 11 aa, synthetic construct
  REGION 1..11: note = Description of Artificial Sequence: Synthetic peptide
  REGION 1..11: note = XENP019618 vhCDR3
YYGNYGGYFDV

SEQ ID NO: 15589 - protein, 11 aa, synthetic construct
  REGION 1..11: note = Description of Artificial Sequence: Synthetic peptide
  REGION 1..11: note = XENP019618 vlCDR1
RASQSVGNDVA

SEQ ID NO: 15590 - protein, 7 aa, synthetic construct
  REGION 1..7: note = Description of Artificial Sequence: Synthetic peptide
  REGION 1..7: note = XENP019618 vlCDR2
YASHRYT

SEQ ID NO: 15591 - protein, 9 aa, synthetic construct
  REGION 1..9: note = Description of Artificial Sequence: Synthetic peptide
  REGION 1..9: note = XENP019618 vlCDR3
QQDFSSPRT

SEQ ID NO: 15592 - protein, 249 aa, synthetic construct
  REGION 1..249: note = Description of Artificial Sequence: Synthetic polypeptide
  REGION 1..249: note = XENP019619 1G6_H1.280_L1.189_scFv(GKPGS)4
EVQLVESGGGLVKPGGSLRLTCVASGFTFSNYWMNWVRQAPGKGLEWVAEIRLYSNNYATHYAESVKGRFTISRDDSKSTLYLQMNNLKTEDTGVYYCTRYYGNYGGYFDVWGRGTLVTVSSGKPGSGKPGSGKPGSGKPGSEIVLTQSPATLSVSPGERVTLTCRASQSVGNDVAWYQQKPGQAPRLLINYASHRYTGVPDRFTGSGYGTEFTLTISSVQSEDFAVYYCQQDFSSPRTFGGGTKVEIK

SEQ ID NO: 15593 - protein, 122 aa, synthetic construct
  REGION 1..122: note = Description of Artificial Sequence: Synthetic polypeptide
  REGION 1..122: note = VH of XENP019619
EVQLVESGGGLVKPGGSLRLTCVASGFTFSNYWMNWVRQAPGKGLEWVAEIRLYSNNYATHYAESVKGRFTISRDDSKSTLYLQMNNLKTEDTGVYYCTRYYGNYGGYFDVWGRGTLVTVSS

SEQ ID NO: 15594 - protein, 107 aa, synthetic construct; identical to SEQ ID NO: 15540
  REGION 1..107: note = Description of Artificial Sequence: Synthetic polypeptide
  REGION 1..107: note = VL of XENP019619

SEQ ID NO: 15595 - protein, 5 aa, synthetic construct
  REGION 1..5: note = Description of Artificial Sequence: Synthetic peptide
  REGION 1..5: note = XENP019619 vhCDR1
NYWMN

SEQ ID NO: 15596 - protein, 19 aa, synthetic construct
  REGION 1..19: note = Description of Artificial Sequence: Synthetic peptide
  REGION 1..19: note = XENP019619 vhCDR2
EIRLYSNNYATHYAESVKG

SEQ ID NO: 15597 - protein, 11 aa, synthetic construct
  REGION 1..11: note = Description of Artificial Sequence: Synthetic peptide
  REGION 1..11: note = XENP019619 vhCDR3
YYGNYGGYFDV

SEQ ID NO: 15598 - protein, 11 aa, synthetic construct
  REGION 1..11: note = Description of Artificial Sequence: Synthetic peptide
  REGION 1..11: note = XENP019619 vlCDR1
RASQSVGNDVA

SEQ ID NO: 15599 - protein, 7 aa, synthetic construct
  REGION 1..7: note = Description of Artificial Sequence: Synthetic peptide
  REGION 1..7: note = XENP019619 vlCDR2
YASHRYT

SEQ ID NO: 15600 - protein, 9 aa, synthetic construct
  REGION 1..9: note = Description of Artificial Sequence: Synthetic peptide
  REGION 1..9: note = XENP019619 vlCDR3
QQDFSSPRT

SEQ ID NO: 15601 - protein, 249 aa, synthetic construct
  REGION 1..249: note = Description of Artificial Sequence: Synthetic polypeptide
  REGION 1..249: note = XENP019620 1G6_H1.281_L1.189_scFv(GKPGS)4
EVQLVESGGGLVKPGGSLRLSCVASGFTFSNYWMNWVRQAPGKGLEWVAEIRLYSNNYATHYAESVKGRFTISRDDSKSMLYLQMNNLKTEDTGVYYCTRYYGNYGGYFDVWGRGTLVTVSSGKPGSGKPGSGKPGSGKPGSEIVLTQSPATLSVSPGERVTLTCRASQSVGNDVAWYQQKPGQAPRLLINYASHRYTGVPDRFTGSGYGTEFTLTISSVQSEDFAVYYCQQDFSSPRTFGGGTKVEIK

SEQ ID NO: 15602 - protein, 122 aa, synthetic construct
  REGION 1..122: note = Description of Artificial Sequence: Synthetic polypeptide
  REGION 1..122: note = VH of XENP019620
EVQLVESGGGLVKPGGSLRLSCVASGFTFSNYWMNWVRQAPGKGLEWVAEIRLYSNNYATHYAESVKGRFTISRDDSKSMLYLQMNNLKTEDTGVYYCTRYYGNYGGYFDVWGRGTLVTVSS

SEQ ID NO: 15603 - protein, 107 aa, synthetic construct; identical to SEQ ID NO: 15540
  REGION 1..107: note = Description of Artificial Sequence: Synthetic polypeptide
  REGION 1..107: note = VL of XENP019620

SEQ ID NO: 15604 - protein, 5 aa, synthetic construct
  REGION 1..5: note = Description of Artificial Sequence: Synthetic peptide
  REGION 1..5: note = XENP019620 vhCDR1
NYWMN

SEQ ID NO: 15605 - protein, 19 aa, synthetic construct
  REGION 1..19: note = Description of Artificial Sequence: Synthetic peptide
  REGION 1..19: note = XENP019620 vhCDR2
EIRLYSNNYATHYAESVKG

SEQ ID NO: 15606 - protein, 11 aa, synthetic construct
  REGION 1..11: note = Description of Artificial Sequence: Synthetic peptide
  REGION 1..11: note = XENP019620 vhCDR3
YYGNYGGYFDV

SEQ ID NO: 15607 - protein, 11 aa, synthetic construct
  REGION 1..11: note = Description of Artificial Sequence: Synthetic peptide
  REGION 1..11: note = XENP019620 vlCDR1
RASQSVGNDVA

SEQ ID NO: 15608 - protein, 7 aa, synthetic construct
  REGION 1..7: note = Description of Artificial Sequence: Synthetic peptide
  REGION 1..7: note = XENP019620 vlCDR2
YASHRYT

SEQ ID NO: 15609 - protein, 9 aa, synthetic construct
  REGION 1..9: note = Description of Artificial Sequence: Synthetic peptide
  REGION 1..9: note = XENP019620 vlCDR3
QQDFSSPRT

SEQ ID NO: 15610 - protein, 249 aa, synthetic construct
  REGION 1..249: note = Description of Artificial Sequence: Synthetic polypeptide
  REGION 1..249: note = XENP019621 1G6_H1.282_L1.189_scFv(GKPGS)4
EVQLVESGGGLVKPGGSLRLTCVASGFTFSNYWMNWVRQAPGKGLEWVAEIRLYSNNYATHYAESVKGRFTISRDDSKSMLYLQMNNLKTEDTGVYYCTRYYGNYGGYFDVWGRGTLVTVSSGKPGSGKPGSGKPGSGKPGSEIVLTQSPATLSVSPGERVTLTCRASQSVGNDVAWYQQKPGQAPRLLINYASHRYTGVPDRFTGSGYGTEFTLTISSVQSEDFAVYYCQQDFSSPRTFGGGTKVEIK

SEQ ID NO: 15611 - protein, 122 aa, synthetic construct
  REGION 1..122: note = Description of Artificial Sequence: Synthetic polypeptide
  REGION 1..122: note = VH of XENP019621
EVQLVESGGGLVKPGGSLRLTCVASGFTFSNYWMNWVRQAPGKGLEWVAEIRLYSNNYATHYAESVKGRFTISRDDSKSMLYLQMNNLKTEDTGVYYCTRYYGNYGGYFDVWGRGTLVTVSS

SEQ ID NO: 15612 - protein, 107 aa, synthetic construct; identical to SEQ ID NO: 15540
  REGION 1..107: note = Description of Artificial Sequence: Synthetic polypeptide
  REGION 1..107: note = VL of XENP019621

SEQ ID NO: 15613 - protein, 5 aa, synthetic construct
  REGION 1..5: note = Description of Artificial Sequence: Synthetic peptide
  REGION 1..5: note = XENP019621 vhCDR1
NYWMN

SEQ ID NO: 15614 - protein, 19 aa, synthetic construct
  REGION 1..19: note = Description of Artificial Sequence: Synthetic peptide
  REGION 1..19: note = XENP019621 vhCDR2
EIRLYSNNYATHYAESVKG

SEQ ID NO: 15615 - protein, 11 aa, synthetic construct
  REGION 1..11: note = Description of Artificial Sequence: Synthetic peptide
  REGION 1..11: note = XENP019621 vhCDR3
YYGNYGGYFDV

SEQ ID NO: 15616 - protein, 11 aa, synthetic construct
  REGION 1..11: note = Description of Artificial Sequence: Synthetic peptide
  REGION 1..11: note = XENP019621 vlCDR1
RASQSVGNDVA

SEQ ID NO: 15617 - protein, 7 aa, synthetic construct
  REGION 1..7: note = Description of Artificial Sequence: Synthetic peptide
  REGION 1..7: note = XENP019621 vlCDR2
YASHRYT

SEQ ID NO: 15618 - protein, 9 aa, synthetic construct
  REGION 1..9: note = Description of Artificial Sequence: Synthetic peptide
  REGION 1..9: note = XENP019621 vlCDR3
QQDFSSPRT

SEQ ID NO: 15619 - protein, 249 aa, synthetic construct
  REGION 1..249: note = Description of Artificial Sequence: Synthetic polypeptide
  REGION 1..249: note = XENP019622 1G6_H1.283_L1.189_scFv(GKPGS)4
EVQLVESGGGLVKPGGSLRLSCVASGFTFSNYWMNWVRQAPGKGLEWVCEIRLYSNNYATHYAESVKGRFTCSRDDSKSTLYLQMNNLKTEDTGVYYCTRYYGNYGGYFDVWGQGTLVTVSSGKPGSGKPGSGKPGSGKPGSEIVLTQSPATLSVSPGERVTLTCRASQSVGNDVAWYQQKPGQAPRLLINYASHRYTGVPDRFTGSGYGTEFTLTISSVQSEDFAVYYCQQDFSSPRTFGGGTKVEIK

SEQ ID NO: 15620 - protein, 122 aa, synthetic construct
  REGION 1..122: note = Description of Artificial Sequence: Synthetic polypeptide
  REGION 1..122: note = VH of XENP019622
EVQLVESGGGLVKPGGSLRLSCVASGFTFSNYWMNWVRQAPGKGLEWVCEIRLYSNNYATHYAESVKGRFTCSRDDSKSTLYLQMNNLKTEDTGVYYCTRYYGNYGGYFDVWGQGTLVTVSS

SEQ ID NO: 15621 - protein, 107 aa, synthetic construct; identical to SEQ ID NO: 15540
  REGION 1..107: note = Description of Artificial Sequence: Synthetic polypeptide
  REGION 1..107: note = VL of XENP019622

SEQ ID NO: 15622 - protein, 5 aa, synthetic construct
  REGION 1..5: note = Description of Artificial Sequence: Synthetic peptide
  REGION 1..5: note = XENP019622 vhCDR1
NYWMN

SEQ ID NO: 15623 - protein, 19 aa, synthetic construct
  REGION 1..19: note = Description of Artificial Sequence: Synthetic peptide
  REGION 1..19: note = XENP019622 vhCDR2
EIRLYSNNYATHYAESVKG

SEQ ID NO: 15624 - protein, 11 aa, synthetic construct
  REGION 1..11: note = Description of Artificial Sequence: Synthetic peptide
  REGION 1..11: note = XENP019622 vhCDR3
YYGNYGGYFDV

SEQ ID NO: 15625 - protein, 11 aa, synthetic construct
  REGION 1..11: note = Description of Artificial Sequence: Synthetic peptide
  REGION 1..11: note = XENP019622 vlCDR1
RASQSVGNDVA

SEQ ID NO: 15626 - protein, 7 aa, synthetic construct
  REGION 1..7: note = Description of Artificial Sequence: Synthetic peptide
  REGION 1..7: note = XENP019622 vlCDR2
YASHRYT

SEQ ID NO: 15627 - protein, 9 aa, synthetic construct
  REGION 1..9: note = Description of Artificial Sequence: Synthetic peptide
  REGION 1..9: note = XENP019622 vlCDR3
QQDFSSPRT

SEQ ID NO: 15628 - protein, 249 aa, synthetic construct
  REGION 1..249: note = Description of Artificial Sequence: Synthetic polypeptide
  REGION 1..249: note = XENP019623 1G6_H1.284_L1.189_scFv(GKPGS)4
EVQLVESGGGLVKPGGSLRLSCVASGFTFSNYWMNWVRQAPGKGLEWVCEIRLYSNNYATHYAESVKGRFTCSRDDSKSTLYLQMNNLKTEDTGVYYCTRYYGNYGGYFDVWGRGTLVTVSSGKPGSGKPGSGKPGSGKPGSEIVLTQSPATLSVSPGERVTLTCRASQSVGNDVAWYQQKPGQAPRLLINYASHRYTGVPDRFTGSGYGTEFTLTISSVQSEDFAVYYCQQDFSSPRTFGGGTKVEIK

SEQ ID NO: 15629 - protein, 122 aa, synthetic construct
  REGION 1..122: note = Description of Artificial Sequence: Synthetic polypeptide
  REGION 1..122: note = VH of XENP019623
EVQLVESGGGLVKPGGSLRLSCVASGFTFSNYWMNWVRQAPGKGLEWVCEIRLYSNNYATHYAESVKGRFTCSRDDSKSTLYLQMNNLKTEDTGVYYCTRYYGNYGGYFDVWGRGTLVTVSS

SEQ ID NO: 15630 - protein, 107 aa, synthetic construct; identical to SEQ ID NO: 15540
  REGION 1..107: note = Description of Artificial Sequence: Synthetic polypeptide
  REGION 1..107: note = VL of XENP019623

SEQ ID NO: 15631 - protein, 5 aa, synthetic construct
  REGION 1..5: note = Description of Artificial Sequence: Synthetic peptide
  REGION 1..5: note = XENP019623 vhCDR1
NYWMN

SEQ ID NO: 15632 - protein, 19 aa, synthetic construct
  REGION 1..19: note = Description of Artificial Sequence: Synthetic peptide
  REGION 1..19: note = XENP019623 vhCDR2
EIRLYSNNYATHYAESVKG

SEQ ID NO: 15633 - protein, 11 aa, synthetic construct
  REGION 1..11: note = Description of Artificial Sequence: Synthetic peptide
  REGION 1..11: note = XENP019623 vhCDR3
YYGNYGGYFDV

SEQ ID NO: 15634 - protein, 11 aa, synthetic construct
  REGION 1..11: note = Description of Artificial Sequence: Synthetic peptide
  REGION 1..11: note = XENP019623 vlCDR1
RASQSVGNDVA

SEQ ID NO: 15635 - protein, 7 aa, synthetic construct
  REGION 1..7: note = Description of Artificial Sequence: Synthetic peptide
  REGION 1..7: note = XENP019623 vlCDR2
YASHRYT

SEQ ID NO: 15636 - protein, 9 aa, synthetic construct
  REGION 1..9: note = Description of Artificial Sequence: Synthetic peptide
  REGION 1..9: note = XENP019623 vlCDR3
QQDFSSPRT

SEQ ID NO: 15637 - protein, 249 aa, synthetic construct
  REGION 1..249: note = Description of Artificial Sequence: Synthetic polypeptide
  REGION 1..249: note = XENP019624 1G6_H1.285_L1.189_scFv(GKPGS)4
EVQLVESGGGLVKPGGSLRLTCVASGFTFSNYWMNWVRQAPGKGLEWVCEIRLYSNNYATHYAESVKGRFTCSRDDSKSMLYLQMNNLKTEDTGVYYCTRYYGNYGGYFDVWGRGTLVTVSSGKPGSGKPGSGKPGSGKPGSEIVLTQSPATLSVSPGERVTLTCRASQSVGNDVAWYQQKPGQAPRLLINYASHRYTGVPDRFTGSGYGTEFTLTISSVQSEDFAVYYCQQDFSSPRTFGGGTKVEIK

SEQ ID NO: 15638 - protein, 122 aa, synthetic construct
  REGION 1..122: note = Description of Artificial Sequence: Synthetic polypeptide
  REGION 1..122: note = VH of XENP019624
EVQLVESGGGLVKPGGSLRLTCVASGFTFSNYWMNWVRQAPGKGLEWVCEIRLYSNNYATHYAESVKGRFTCSRDDSKSMLYLQMNNLKTEDTGVYYCTRYYGNYGGYFDVWGRGTLVTVSS

SEQ ID NO: 15639 - protein, 107 aa, synthetic construct; identical to SEQ ID NO: 15540
  REGION 1..107: note = Description of Artificial Sequence: Synthetic polypeptide
  REGION 1..107: note = VL of XENP019624

SEQ ID NO: 15640 - protein, 5 aa, synthetic construct
  REGION 1..5: note = Description of Artificial Sequence: Synthetic peptide
  REGION 1..5: note = XENP019624 vhCDR1
NYWMN

SEQ ID NO: 15641 - protein, 19 aa, synthetic construct
  REGION 1..19: note = Description of Artificial Sequence: Synthetic peptide
  REGION 1..19: note = XENP019624 vhCDR2
EIRLYSNNYATHYAESVKG

SEQ ID NO: 15642 - protein, 11 aa, synthetic construct
  REGION 1..11: note = Description of Artificial Sequence: Synthetic peptide
  REGION 1..11: note = XENP019624 vhCDR3
YYGNYGGYFDV

SEQ ID NO: 15643 - protein, 11 aa, synthetic construct
  REGION 1..11: note = Description of Artificial Sequence: Synthetic peptide
  REGION 1..11: note = XENP019624 vlCDR1
RASQSVGNDVA

SEQ ID NO: 15644 - protein, 7 aa, synthetic construct
  REGION 1..7: note = Description of Artificial Sequence: Synthetic peptide
  REGION 1..7: note = XENP019624 vlCDR2
YASHRYT

SEQ ID NO: 15645 - protein, 9 aa, synthetic construct
  REGION 1..9: note = Description of Artificial Sequence: Synthetic peptide
  REGION 1..9: note = XENP019624 vlCDR3
QQDFSSPRT

SEQ ID NO: 15646 - protein, 249 aa, synthetic construct
  REGION 1..249: note = Description of Artificial Sequence: Synthetic polypeptide
  REGION 1..249: note = XENP019625 1G6_H1.286_L1.189_scFv(GKPGS)4
EVQLVESGGGLVKPGGSLRLSCVASGFTFSNYWMNWVRQAPGKGLEWVAEIRLYSDNYATHYAESVKGRFTISRDDSKSTLYLQMNNLKTEDTGVYYCTRYYGNYGGYFDVWGQGTLVTVSSGKPGSGKPGSGKPGSGKPGSEIVLTQSPATLSVSPGERVTLTCRASQSVGNDVAWYQQKPGQAPRLLINYASHRYTGVPDRFTGSGYGTEFTLTISSVQSEDFAVYYCQQDFSSPRTFGGGTKVEIK

SEQ ID NO: 15647 - protein, 122 aa, synthetic construct
  REGION 1..122: note = Description of Artificial Sequence: Synthetic polypeptide
  REGION 1..122: note = VH of XENP019625
EVQLVESGGGLVKPGGSLRLSCVASGFTFSNYWMNWVRQAPGKGLEWVAEIRLYSDNYATHYAESVKGRFTISRDDSKSTLYLQMNNLKTEDTGVYYCTRYYGNYGGYFDVWGQGTLVTVSS

SEQ ID NO: 15648 - protein, 107 aa, synthetic construct; identical to SEQ ID NO: 15540
  REGION 1..107: note = Description of Artificial Sequence: Synthetic polypeptide
  REGION 1..107: note = VL of XENP019625

SEQ ID NO: 15649 - protein, 5 aa, synthetic construct
  REGION 1..5: note = Description of Artificial Sequence: Synthetic peptide
  REGION 1..5: note = XENP019625 vhCDR1
NYWMN

SEQ ID NO: 15650 - protein, 19 aa, synthetic construct
  REGION 1..19: note = Description of Artificial Sequence: Synthetic peptide
  REGION 1..19: note = XENP019625 vhCDR2
EIRLYSDNYATHYAESVKG

SEQ ID NO: 15651 - protein, 11 aa, synthetic construct
  REGION 1..11: note = Description of Artificial Sequence: Synthetic peptide
  REGION 1..11: note = XENP019625 vhCDR3
YYGNYGGYFDV

SEQ ID NO: 15652 - protein, 11 aa, synthetic construct
  REGION 1..11: note = Description of Artificial Sequence: Synthetic peptide
  REGION 1..11: note = XENP019625 vlCDR1
RASQSVGNDVA

SEQ ID NO: 15653 - protein, 7 aa, synthetic construct
  REGION 1..7: note = Description of Artificial Sequence: Synthetic peptide
  REGION 1..7: note = XENP019625 vlCDR2
YASHRYT

SEQ ID NO: 15654 - protein, 9 aa, synthetic construct
  REGION 1..9: note = Description of Artificial Sequence: Synthetic peptide
  REGION 1..9: note = XENP019625 vlCDR3
QQDFSSPRT

SEQ ID NO: 15655 - protein, 249 aa, synthetic construct
  REGION 1..249: note = Description of Artificial Sequence: Synthetic polypeptide
  REGION 1..249: note = XENP019626 1G6_H1.278_L1.192_scFv(GKPGS)4
EVQLVESGGGLVKPGGSLRLSCVASGFTFSNYWMNWVRQAPGKGLEWVAEIRLYSNNYATHYAESVKGRFTISRDDSKSTLYLQMNNLKTEDTGVYYCTRYYGNYGGYFDVWGQGTLVTVSSGKPGSGKPGSGKPGSGKPGSEIVLTQSPATLSASPGERVTLTCRASQSVGNDVAWYQQKPGQAPRLLINYASHRYTGVPDRFTGSGYGTEFTLTISSVQSEDFAVYYCQQDFSSPRTFGGGTKVEIK

SEQ ID NO: 15656 - protein, 122 aa, synthetic construct; identical to SEQ ID NO: 15521
  REGION 1..122: note = Description of Artificial Sequence: Synthetic polypeptide
  REGION 1..122: note = VH of XENP019626

SEQ ID NO: 15657 - protein, 107 aa, synthetic construct
  REGION 1..107: note = Description of Artificial Sequence: Synthetic polypeptide
  REGION 1..107: note = VL of XENP019626
EIVLTQSPATLSASPGERVTLTCRASQSVGNDVAWYQQKPGQAPRLLINYASHRYTGVPDRFTGSGYGTEFTLTISSVQSEDFAVYYCQQDFSSPRTFGGGTKVEIK

SEQ ID NO: 15658 - protein, 5 aa, synthetic construct
  REGION 1..5: note = Description of Artificial Sequence: Synthetic peptide
  REGION 1..5: note = XENP019626 vhCDR1
NYWMN

SEQ ID NO: 15659 - protein, 19 aa, synthetic construct
  REGION 1..19: note = Description of Artificial Sequence: Synthetic peptide
  REGION 1..19: note = XENP019626 vhCDR2
EIRLYSNNYATHYAESVKG

SEQ ID NO: 15660 - protein, 11 aa, synthetic construct
  REGION 1..11: note = Description of Artificial Sequence: Synthetic peptide
  REGION 1..11: note = XENP019626 vhCDR3
YYGNYGGYFDV

SEQ ID NO: 15661 - protein, 11 aa, synthetic construct
  REGION 1..11: note = Description of Artificial Sequence: Synthetic peptide
  REGION 1..11: note = XENP019626 vlCDR1
RASQSVGNDVA

SEQ ID NO: 15662 - protein, 7 aa, synthetic construct
  REGION 1..7: note = Description of Artificial Sequence: Synthetic peptide
  REGION 1..7: note = XENP019626 vlCDR2
YASHRYT

SEQ ID NO: 15663 - protein, 9 aa, synthetic construct
  REGION 1..9: note = Description of Artificial Sequence: Synthetic peptide
  REGION 1..9: note = XENP019626 vlCDR3
QQDFSSPRT

SEQ ID NO: 15664 - protein, 249 aa, synthetic construct
  REGION 1..249: note = Description of Artificial Sequence: Synthetic polypeptide
  REGION 1..249: note = XENP019627 1G6_H1.278_L1.193_scFv(GKPGS)4
EVQLVESGGGLVKPGGSLRLSCVASGFTFSNYWMNWVRQAPGKGLEWVAEIRLYSNNYATHYAESVKGRFTISRDDSKSTLYLQMNNLKTEDTGVYYCTRYYGNYGGYFDVWGQGTLVTVSSGKPGSGKPGSGKPGSGKPGSEIVLTQSPATLSVSPGERVTLTCRASQSVGNDVAWYQQKPGQAPRLLINYASHRYTGVPDRFTGSGYGTEFTLTISSVQSEDFGVYYCQQDFSSPRTFGGGTKVEIK

SEQ ID NO: 15665 - protein, 122 aa, synthetic construct; identical to SEQ ID NO: 15521
  REGION 1..122: note = Description of Artificial Sequence: Synthetic polypeptide
  REGION 1..122: note = VH of XENP019627

SEQ ID NO: 15666 - protein, 107 aa, synthetic construct
  REGION 1..107: note = Description of Artificial Sequence: Synthetic polypeptide
  REGION 1..107: note = VL of XENP019627
EIVLTQSPATLSVSPGERVTLTCRASQSVGNDVAWYQQKPGQAPRLLINYASHRYTGVPDRFTGSGYGTEFTLTISSVQSEDFGVYYCQQDFSSPRTFGGGTKVEIK

SEQ ID NO: 15667 - protein, 5 aa, synthetic construct
  REGION 1..5: note = Description of Artificial Sequence: Synthetic peptide
  REGION 1..5: note = XENP019627 vhCDR1
NYWMN

SEQ ID NO: 15668 - protein, 19 aa, synthetic construct
  REGION 1..19: note = Description of Artificial Sequence: Synthetic peptide
  REGION 1..19: note = XENP019627 vhCDR2
EIRLYSNNYATHYAESVKG

SEQ ID NO: 15669 - protein, 11 aa, synthetic construct
  REGION 1..11: note = Description of Artificial Sequence: Synthetic peptide
  REGION 1..11: note = XENP019627 vhCDR3
YYGNYGGYFDV

SEQ ID NO: 15670 - protein, 11 aa, synthetic construct
  REGION 1..11: note = Description of Artificial Sequence: Synthetic peptide
  REGION 1..11: note = XENP019627 vlCDR1
RASQSVGNDVA

SEQ ID NO: 15671 - protein, 7 aa, synthetic construct
  REGION 1..7: note = Description of Artificial Sequence: Synthetic peptide
  REGION 1..7: note = XENP019627 vlCDR2
YASHRYT

SEQ ID NO: 15672 - protein, 9 aa, synthetic construct
  REGION 1..9: note = Description of Artificial Sequence: Synthetic peptide
  REGION 1..9: note = XENP019627 vlCDR3
QQDFSSPRT

SEQ ID NO: 15673 - protein, 249 aa, synthetic construct
  REGION 1..249: note = Description of Artificial Sequence: Synthetic polypeptide
  REGION 1..249: note = XENP019628 1G6_H1.278_L1.194_scFv(GKPGS)4
EVQLVESGGGLVKPGGSLRLSCVASGFTFSNYWMNWVRQAPGKGLEWVAEIRLYSNNYATHYAESVKGRFTISRDDSKSTLYLQMNNLKTEDTGVYYCTRYYGNYGGYFDVWGQGTLVTVSSGKPGSGKPGSGKPGSGKPGSEIVLTQSPATLSASPGERVTLTCRASQSVGNDVAWYQQKPGQAPRLLINYASHRYTGVPDRFTGSGYGTEFTLTISSVQSEDFGVYYCQQDFSSPRTFGGGTKVEIK

SEQ ID NO: 15674 - protein, 122 aa, synthetic construct; identical to SEQ ID NO: 15521
  REGION 1..122: note = Description of Artificial Sequence: Synthetic polypeptide
  REGION 1..122: note = VH of XENP019628

SEQ ID NO: 15675 - protein, 107 aa, synthetic construct; identical to SEQ ID NO: 2871
  REGION 1..107: note = Description of Artificial Sequence: Synthetic polypeptide
  REGION 1..107: note = VL of XENP019628

SEQ ID NO: 15676 - protein, 5 aa, synthetic construct
  REGION 1..5: note = Description of Artificial Sequence: Synthetic peptide
  REGION 1..5: note = XENP019628 vhCDR1
NYWMN

SEQ ID NO: 15677 - protein, 19 aa, synthetic construct
  REGION 1..19: note = Description of Artificial Sequence: Synthetic peptide
  REGION 1..19: note = XENP019628 vhCDR2
EIRLYSNNYATHYAESVKG

SEQ ID NO: 15678 - protein, 11 aa, synthetic construct
  REGION 1..11: note = Description of Artificial Sequence: Synthetic peptide
  REGION 1..11: note = XENP019628 vhCDR3
YYGNYGGYFDV

SEQ ID NO: 15679 - protein, 11 aa, synthetic construct
  REGION 1..11: note = Description of Artificial Sequence: Synthetic peptide
  REGION 1..11: note = XENP019628 vlCDR1
RASQSVGNDVA

SEQ ID NO: 15680 - protein, 7 aa, synthetic construct
  REGION 1..7: note = Description of Artificial Sequence: Synthetic peptide
  REGION 1..7: note = XENP019628 vlCDR2
YASHRYT

SEQ ID NO: 15681 - protein, 9 aa, synthetic construct
  REGION 1..9: note = Description of Artificial Sequence: Synthetic peptide
  REGION 1..9: note = XENP019628 vlCDR3
QQDFSSPRT

SEQ ID NO: 15682 - protein, 249 aa, synthetic construct
  REGION 1..249: note = Description of Artificial Sequence: Synthetic polypeptide
  REGION 1..249: note = XENP019629 1G6_H1.278_L1.195_scFv(GKPGS)4
EVQLVESGGGLVKPGGSLRLSCVASGFTFSNYWMNWVRQAPGKGLEWVAEIRLYSNNYATHYAESVKGRFTISRDDSKSTLYLQMNNLKTEDTGVYYCTRYYGNYGGYFDVWGQGTLVTVSSGKPGSGKPGSGKPGSGKPGSEIVLTQSPATLSVSPGERVTLTCRASQSVGNDVAWYQQKPGQAPRLLCNYASHRYTGVPDRFTCSGYGTEFTLTISSVQSEDFAVYYCQQDFSSPRTFGGGTKVEIK

SEQ ID NO: 15683 - protein, 122 aa, synthetic construct; identical to SEQ ID NO: 15521
  REGION 1..122: note = Description of Artificial Sequence: Synthetic polypeptide
  REGION 1..122: note = VH of XENP019629

SEQ ID NO: 15684 - protein, 107 aa, synthetic construct
  REGION 1..107: note = Description of Artificial Sequence: Synthetic polypeptide
  REGION 1..107: note = VL of XENP019629
EIVLTQSPATLSVSPGERVTLTCRASQSVGNDVAWYQQKPGQAPRLLCNYASHRYTGVPDRFTCSGYGTEFTLTISSVQSEDFAVYYCQQDFSSPRTFGGGTKVEIK

SEQ ID NO: 15685 - protein, 5 aa, synthetic construct
  REGION 1..5: note = Description of Artificial Sequence: Synthetic peptide
  REGION 1..5: note = XENP019629 vhCDR1
NYWMN

SEQ ID NO: 15686 - protein, 19 aa, synthetic construct
  REGION 1..19: note = Description of Artificial Sequence: Synthetic peptide
  REGION 1..19: note = XENP019629 vhCDR2
EIRLYSNNYATHYAESVKG

SEQ ID NO: 15687 - protein, 11 aa, synthetic construct
  REGION 1..11: note = Description of Artificial Sequence: Synthetic peptide
  REGION 1..11: note = XENP019629 vhCDR3
YYGNYGGYFDV

SEQ ID NO: 15688 - protein, 11 aa, synthetic construct
  REGION 1..11: note = Description of Artificial Sequence: Synthetic peptide
  REGION 1..11: note = XENP019629 vlCDR1
RASQSVGNDVA

SEQ ID NO: 15689 - protein, 9 aa, synthetic construct
  REGION 1..9: note = Description of Artificial Sequence: Synthetic peptide
  REGION 1..9: note = XENP019629 vlCDR2
CNYASHRYT

SEQ ID NO: 15690 - protein, 9 aa, synthetic construct
  REGION 1..9: note = Description of Artificial Sequence: Synthetic peptide
  REGION 1..9: note = XENP019629 vlCDR3
QQDFSSPRT

SEQ ID NO: 15691 - protein, 249 aa, synthetic construct
  REGION 1..249: note = Description of Artificial Sequence: Synthetic polypeptide
  REGION 1..249: note = XENP019630 1G6_H1.278_L1.196_scFv(GKPGS)4
EVQLVESGGGLVKPGGSLRLSCVASGFTFSNYWMNWVRQAPGKGLEWVAEIRLYSNNYATHYAESVKGRFTISRDDSKSTLYLQMNNLKTEDTGVYYCTRYYGNYGGYFDVWGQGTLVTVSSGKPGSGKPGSGKPGSGKPGSEIVLTQSPATLSASPGERVTLTCRASQSVGNDVAWYQQKPGQAPRLLCNYASHRYTGVPDRFTCSGYGTEFTLTISSVQSEDFGVYYCQQDFSSPRTFGGGTKVEIK

SEQ ID NO: 15692 - protein, 122 aa, synthetic construct; identical to SEQ ID NO: 15521
  REGION 1..122: note = Description of Artificial Sequence: Synthetic polypeptide
  REGION 1..122: note = VH of XENP019630

SEQ ID NO: 15693 - protein, 107 aa, synthetic construct
  REGION 1..107: note = Description of Artificial Sequence: Synthetic polypeptide
  REGION 1..107: note = VL of XENP019630
EIVLTQSPATLSASPGERVTLTCRASQSVGNDVAWYQQKPGQAPRLLCNYASHRYTGVPDRFTCSGYGTEFTLTISSVQSEDFGVYYCQQDFSSPRTFGGGTKVEIK

SEQ ID NO: 15694 - protein, 5 aa, synthetic construct
  REGION 1..5: note = Description of Artificial Sequence: Synthetic peptide
  REGION 1..5: note = XENP019630 vhCDR1
NYWMN

SEQ ID NO: 15695 - protein, 19 aa, synthetic construct
  REGION 1..19: note = Description of Artificial Sequence: Synthetic peptide
  REGION 1..19: note = XENP019630 vhCDR2
EIRLYSNNYATHYAESVKG

SEQ ID NO: 15696 - protein, 11 aa, synthetic construct
  REGION 1..11: note = Description of Artificial Sequence: Synthetic peptide
  REGION 1..11: note = XENP019630 vhCDR3
YYGNYGGYFDV

SEQ ID NO: 15697 - protein, 11 aa, synthetic construct
  REGION 1..11: note = Description of Artificial Sequence: Synthetic peptide
  REGION 1..11: note = XENP019630 vlCDR1
RASQSVGNDVA

SEQ ID NO: 15698 - protein, 9 aa, synthetic construct
  REGION 1..9: note = Description of Artificial Sequence: Synthetic peptide
  REGION 1..9: note = XENP019630 vlCDR2
CNYASHRYT

SEQ ID NO: 15699 - protein, 9 aa, synthetic construct
  REGION 1..9: note = Description of Artificial Sequence: Synthetic peptide
  REGION 1..9: note = XENP019630 vlCDR3
QQDFSSPRT

SEQ ID NO: 15700 - protein, 249 aa, synthetic construct
  REGION 1..249: note = Description of Artificial Sequence: Synthetic polypeptide
  REGION 1..249: note = XENP019631 1G6_H1.278_L1.197_scFv(GKPGS)4
EVQLVESGGGLVKPGGSLRLSCVASGFTFSNYWMNWVRQAPGKGLEWVAEIRLYSNNYATHYAESVKGRFTISRDDSKSTLYLQMNNLKTEDTGVYYCTRYYGNYGGYFDVWGQGTLVTVSSGKPGSGKPGSGKPGSGKPGSEIVLTQSPATLSASPGERVTLTCRASQSVGNDVAWYQQKPGQAPRLLCNYASHRYTSVPDRFTCSGYGTEFTLTISSVQSEDFGVYYCQQDFSSPRTFGGGTKVEIK

SEQ ID NO: 15701 - protein, 122 aa, synthetic construct; identical to SEQ ID NO: 15521
  REGION 1..122: note = Description of Artificial Sequence: Synthetic polypeptide
  REGION 1..122: note = VH of XENP019631

SEQ ID NO: 15702 - protein, 107 aa, synthetic construct
  REGION 1..107: note = Description of Artificial Sequence: Synthetic polypeptide
  REGION 1..107: note = VL of XENP019631
EIVLTQSPATLSASPGERVTLTCRASQSVGNDVAWYQQKPGQAPRLLCNYASHRYTSVPDRFTCSGYGTEFTLTISSVQSEDFGVYYCQQDFSSPRTFGGGTKVEIK

SEQ ID NO: 15703 - protein, 5 aa, synthetic construct
  REGION 1..5: note = Description of Artificial Sequence: Synthetic peptide
  REGION 1..5: note = XENP019631 vhCDR1
NYWMN

SEQ ID NO: 15704 - protein, 19 aa, synthetic construct
  REGION 1..19: note = Description of Artificial Sequence: Synthetic peptide
  REGION 1..19: note = XENP019631 vhCDR2
EIRLYSNNYATHYAESVKG

SEQ ID NO: 15705 - protein, 11 aa, synthetic construct
  REGION 1..11: note = Description of Artificial Sequence: Synthetic peptide
  REGION 1..11: note = XENP019631 vhCDR3
YYGNYGGYFDV

SEQ ID NO: 15706 - protein, 11 aa, synthetic construct
  REGION 1..11: note = Description of Artificial Sequence: Synthetic peptide
  REGION 1..11: note = XENP019631 vlCDR1
RASQSVGNDVA

SEQ ID NO: 15707 - protein, 9 aa, synthetic construct
  REGION 1..9: note = Description of Artificial Sequence: Synthetic peptide
  REGION 1..9: note = XENP019631 vlCDR2
CNYASHRYT

SEQ ID NO: 15708 - protein, 9 aa, synthetic construct
  REGION 1..9: note = Description of Artificial Sequence: Synthetic peptide
  REGION 1..9: note = XENP019631 vlCDR3
QQDFSSPRT

SEQ ID NO: 15709 - protein, 249 aa, synthetic construct
  REGION 1..249: note = Description of Artificial Sequence: Synthetic polypeptide
  REGION 1..249: note = XENP019632 1G6_H1.278_L1.198_scFv(GKPGS)4
EVQLVESGGGLVKPGGSLRLSCVASGFTFSNYWMNWVRQAPGKGLEWVAEIRLYSNNYATHYAESVKGRFTISRDDSKSTLYLQMNNLKTEDTGVYYCTRYYGNYGGYFDVWGQGTLVTVSSGKPGSGKPGSGKPGSGKPGSEIVLTQSPSTLSVSPGERVTLTCRASQSVGNDVAWYQQKPGQAPRLLINYASHRYTGVPDRFTGSGYGTEFTLTISSVQSEDFAVYYCQQDFSSPRTFGGGTKVEIK

SEQ ID NO: 15710 - protein, 122 aa, synthetic construct; identical to SEQ ID NO: 15521
  REGION 1..122: note = Description of Artificial Sequence: Synthetic polypeptide
  REGION 1..122: note = VH of XENP019632

SEQ ID NO: 15711 - protein, 107 aa, synthetic construct
  REGION 1..107: note = Description of Artificial Sequence: Synthetic polypeptide
  REGION 1..107: note = VL of XENP019632
EIVLTQSPSTLSVSPGERVTLTCRASQSVGNDVAWYQQKPGQAPRLLINYASHRYTGVPDRFTGSGYGTEFTLTISSVQSEDFAVYYCQQDFSSPRTFGGGTKVEIK

SEQ ID NO: 15712 - protein, 5 aa, synthetic construct
  REGION 1..5: note = Description of Artificial Sequence: Synthetic peptide
  REGION 1..5: note = XENP019632 vhCDR1
NYWMN

SEQ ID NO: 15713 - protein, 19 aa, synthetic construct
  REGION 1..19: note = Description of Artificial Sequence: Synthetic peptide
  REGION 1..19: note = XENP019632 vhCDR2
EIRLYSNNYATHYAESVKG

SEQ ID NO: 15714 - protein, 11 aa, synthetic construct
  REGION 1..11: note = Description of Artificial Sequence: Synthetic peptide
  REGION 1..11: note = XENP019632 vhCDR3
YYGNYGGYFDV

SEQ ID NO: 15715 - protein, 11 aa, synthetic construct
  REGION 1..11: note = Description of Artificial Sequence: Synthetic peptide
  REGION 1..11: note = XENP019632 vlCDR1
RASQSVGNDVA

SEQ ID NO: 15716 - protein, 7 aa, synthetic construct
  REGION 1..7: note = Description of Artificial Sequence: Synthetic peptide
  REGION 1..7: note = XENP019632 vlCDR2
YASHRYT

SEQ ID NO: 15717 - protein, 9 aa, synthetic construct
  REGION 1..9: note = Description of Artificial Sequence: Synthetic peptide
  REGION 1..9: note = XENP019632 vlCDR3
QQDFSSPRT

SEQ ID NO: 15718 - protein, 249 aa, synthetic construct
  REGION 1..249: note = Description of Artificial Sequence: Synthetic polypeptide
  REGION 1..249: note = XENP019633 1G6_H1.278_L1.199_scFv(GKPGS)4
EVQLVESGGGLVKPGGSLRLSCVASGFTFSNYWMNWVRQAPGKGLEWVAEIRLYSNNYATHYAESVKGRFTISRDDSKSTLYLQMNNLKTEDTGVYYCTRYYGNYGGYFDVWGQGTLVTVSSGKPGSGKPGSGKPGSGKPGSEIVLTQSPDTLSVSPGERVTLTCRASQSVGNDVAWYQQKPGQAPRLLINYASHRYTGVPDRFTGSGYGTEFTLTISSVQSEDFAVYYCQQDFSSPRTFGGGTKVEIK

SEQ ID NO: 15719 - protein, 122 aa, synthetic construct; identical to SEQ ID NO: 15521
  REGION 1..122: note = Description of Artificial Sequence: Synthetic polypeptide
  REGION 1..122: note = VH of XENP019633

SEQ ID NO: 15720 - protein, 107 aa, synthetic construct
  REGION 1..107: note = Description of Artificial Sequence: Synthetic polypeptide
  REGION 1..107: note = VL of XENP019633
EIVLTQSPDTLSVSPGERVTLTCRASQSVGNDVAWYQQKPGQAPRLLINYASHRYTGVPDRFTGSGYGTEFTLTISSVQSEDFAVYYCQQDFSSPRTFGGGTKVEIK

SEQ ID NO: 15721 - protein, 5 aa, synthetic construct
  REGION 1..5: note = Description of Artificial Sequence: Synthetic peptide
  REGION 1..5: note = XENP019633 vhCDR1
NYWMN

SEQ ID NO: 15722 - protein, 19 aa, synthetic construct
  REGION 1..19: note = Description of Artificial Sequence: Synthetic peptide
  REGION 1..19: note = XENP019633 vhCDR2
EIRLYSNNYATHYAESVKG

SEQ ID NO: 15723 - protein, 11 aa, synthetic construct
  REGION 1..11: note = Description of Artificial Sequence: Synthetic peptide
  REGION 1..11: note = XENP019633 vhCDR3
YYGNYGGYFDV

SEQ ID NO: 15724 - protein, 11 aa, synthetic construct
  REGION 1..11: note = Description of Artificial Sequence: Synthetic peptide
  REGION 1..11: note = XENP019633 vlCDR1
RASQSVGNDVA

SEQ ID NO: 15725 - protein, 7 aa, synthetic construct
  REGION 1..7: note = Description of Artificial Sequence: Synthetic peptide
  REGION 1..7: note = XENP019633 vlCDR2
YASHRYT

SEQ ID NO: 15726 - protein, 9 aa, synthetic construct
  REGION 1..9: note = Description of Artificial Sequence: Synthetic peptide
  REGION 1..9: note = XENP019633 vlCDR3
QQDFSSPRT

SEQ ID NO: 15727 - protein, 249 aa, synthetic construct
  REGION 1..249: note = Description of Artificial Sequence: Synthetic polypeptide
  REGION 1..249: note = XENP019634 1G6_H1.278_L1.200_scFv(GKPGS)4
EVQLVESGGGLVKPGGSLRLSCVASGFTFSNYWMNWVRQAPGKGLEWVAEIRLYSNNYATHYAESVKGRFTISRDDSKSTLYLQMNNLKTEDTGVYYCTRYYGNYGGYFDVWGQGTLVTVSSGKPGSGKPGSGKPGSGKPGSEIVLTQSPATLAVSPGERVTLTCRASQSVGNDVAWYQQKPGQAPRLLINYASHRYTGVPDRFTGSGYGTEFTLTISSVQSEDFAVYYCQQDFSSPRTFGGGTKVEIK

SEQ ID NO: 15728 - protein, 122 aa, synthetic construct; identical to SEQ ID NO: 15521
  REGION 1..122: note = Description of Artificial Sequence: Synthetic polypeptide
  REGION 1..122: note = VH of XENP019634

SEQ ID NO: 15729 - protein, 107 aa, synthetic construct
  REGION 1..107: note = Description of Artificial Sequence: Synthetic polypeptide
  REGION 1..107: note = VL of XENP019634
EIVLTQSPATLAVSPGERVTLTCRASQSVGNDVAWYQQKPGQAPRLLINYASHRYTGVPDRFTGSGYGTEFTLTISSVQSEDFAVYYCQQDFSSPRTFGGGTKVEIK

SEQ ID NO: 15730 - protein, 5 aa, synthetic construct
  REGION 1..5: note = Description of Artificial Sequence: Synthetic peptide
  REGION 1..5: note = XENP019634 vhCDR1
NYWMN

SEQ ID NO: 15731 - protein, 19 aa, synthetic construct
  REGION 1..19: note = Description of Artificial Sequence: Synthetic peptide
  REGION 1..19: note = XENP019634 vhCDR2
EIRLYSNNYATHYAESVKG

SEQ ID NO: 15732 - protein, 11 aa, synthetic construct
  REGION 1..11: note = Description of Artificial Sequence: Synthetic peptide
  REGION 1..11: note = XENP019634 vhCDR3
YYGNYGGYFDV

SEQ ID NO: 15733 - protein, 11 aa, synthetic construct
  REGION 1..11: note = Description of Artificial Sequence: Synthetic peptide
  REGION 1..11: note = XENP019634 vlCDR1
RASQSVGNDVA

SEQ ID NO: 15734 - protein, 7 aa, synthetic construct
  REGION 1..7: note = Description of Artificial Sequence: Synthetic peptide
  REGION 1..7: note = XENP019634 vlCDR2
YASHRYT

SEQ ID NO: 15735 - protein, 9 aa, synthetic construct
  REGION 1..9: note = Description of Artificial Sequence: Synthetic peptide
  REGION 1..9: note = XENP019634 vlCDR3
QQDFSSPRT

SEQ ID NO: 15736 - protein, 249 aa, synthetic construct; identical to SEQ ID NO: 15655
  REGION 1..249: note = Description of Artificial Sequence: Synthetic polypeptide
  REGION 1..249: note = XENP019635 1G6_H1.278_L1.201_scFv(GKPGS)4

SEQ ID NO: 15737 - protein, 122 aa, synthetic construct; identical to SEQ ID NO: 15521
  REGION 1..122: note = Description of Artificial Sequence: Synthetic polypeptide
  REGION 1..122: note = VH of XENP019635

SEQ ID NO: 15738 - protein, 107 aa, synthetic construct; identical to SEQ ID NO: 15657
  REGION 1..107: note = Description of Artificial Sequence: Synthetic polypeptide
  REGION 1..107: note = VL of XENP019635

SEQ ID NO: 15739 - protein, 5 aa, synthetic construct
  REGION 1..5: note = Description of Artificial Sequence: Synthetic peptide
  REGION 1..5: note = XENP019635 vhCDR1
NYWMN

SEQ ID NO: 15740 - protein, 19 aa, synthetic construct
  REGION 1..19: note = Description of Artificial Sequence: Synthetic peptide
  REGION 1..19: note = XENP019635 vhCDR2
EIRLYSNNYATHYAESVKG

SEQ ID NO: 15741 - protein, 11 aa, synthetic construct
  REGION 1..11: note = Description of Artificial Sequence: Synthetic peptide
  REGION 1..11: note = XENP019635 vhCDR3
YYGNYGGYFDV

SEQ ID NO: 15742 - protein, 11 aa, synthetic construct
  REGION 1..11: note = Description of Artificial Sequence: Synthetic peptide
  REGION 1..11: note = XENP019635 vlCDR1
RASQSVGNDVA

SEQ ID NO: 15743 - protein, 7 aa, synthetic construct
  REGION 1..7: note = Description of Artificial Sequence: Synthetic peptide
  REGION 1..7: note = XENP019635 vlCDR2
YASHRYT

SEQ ID NO: 15744 - protein, 9 aa, synthetic construct
  REGION 1..9: note = Description of Artificial Sequence: Synthetic peptide
  REGION 1..9: note = XENP019635 vlCDR3
QQDFSSPRT

SEQ ID NO: 15745 - protein, 249 aa, synthetic construct
  REGION 1..249: note = Description of Artificial Sequence: Synthetic polypeptide
  REGION 1..249: note = XENP019636 1G6_H1.278_L1.202_scFv(GKPGS)4
EVQLVESGGGLVKPGGSLRLSCVASGFTFSNYWMNWVRQAPGKGLEWVAEIRLYSNNYATHYAESVKGRFTISRDDSKSTLYLQMNNLKTEDTGVYYCTRYYGNYGGYFDVWGQGTLVTVSSGKPGSGKPGSGKPGSGKPGSEIVLTQSPATLSVSVGERVTLTCRASQSVGNDVAWYQQKPGQAPRLLINYASHRYTGVPDRFTGSGYGTEFTLTISSVQSEDFAVYYCQQDFSSPRTFGGGTKVEIK

SEQ ID NO: 15746 - protein, 122 aa, synthetic construct; identical to SEQ ID NO: 15521
  REGION 1..122: note = Description of Artificial Sequence: Synthetic polypeptide
  REGION 1..122: note = VH of XENP019636

SEQ ID NO: 15747 - protein, 107 aa, synthetic construct
  REGION 1..107: note = Description of Artificial Sequence: Synthetic polypeptide
  REGION 1..107: note = VL of XENP019636
EIVLTQSPATLSVSVGERVTLTCRASQSVGNDVAWYQQKPGQAPRLLINYASHRYTGVPDRFTGSGYGTEFTLTISSVQSEDFAVYYCQQDFSSPRTFGGGTKVEIK

SEQ ID NO: 15748 - protein, 5 aa, synthetic construct
  REGION 1..5: note = Description of Artificial Sequence: Synthetic peptide
  REGION 1..5: note = XENP019636 vhCDR1
NYWMN

SEQ ID NO: 15749 - protein, 19 aa, synthetic construct
  REGION 1..19: note = Description of Artificial Sequence: Synthetic peptide
  REGION 1..19: note = XENP019636 vhCDR2
EIRLYSNNYATHYAESVKG

SEQ ID NO: 15750 - protein, 11 aa, synthetic construct
  REGION 1..11: note = Description of Artificial Sequence: Synthetic peptide
  REGION 1..11: note = XENP019636 vhCDR3
YYGNYGGYFDV

SEQ ID NO: 15751 - protein, 11 aa, synthetic construct
  REGION 1..11: note = Description of Artificial Sequence: Synthetic peptide
  REGION 1..11: note = XENP019636 vlCDR1
RASQSVGNDVA

SEQ ID NO: 15752 - protein, 7 aa, synthetic construct
  REGION 1..7: note = Description of Artificial Sequence: Synthetic peptide
  REGION 1..7: note = XENP019636 vlCDR2
YASHRYT

SEQ ID NO: 15753 - protein, 9 aa, synthetic construct
  REGION 1..9: note = Description of Artificial Sequence: Synthetic peptide
  REGION 1..9: note = XENP019636 vlCDR3
QQDFSSPRT

SEQ ID NO: 15754 - protein, 249 aa, synthetic construct
  REGION 1..249: note = Description of Artificial Sequence: Synthetic polypeptide
  REGION 1..249: note = XENP019637 1G6_H1.278_L1.203_scFv(GKPGS)4
EVQLVESGGGLVKPGGSLRLSCVASGFTFSNYWMNWVRQAPGKGLEWVAEIRLYSNNYATHYAESVKGRFTISRDDSKSTLYLQMNNLKTEDTGVYYCTRYYGNYGGYFDVWGQGTLVTVSSGKPGSGKPGSGKPGSGKPGSEIVLTQSPATLSVSLGERVTLTCRASQSVGNDVAWYQQKPGQAPRLLINYASHRYTGVPDRFTGSGYGTEFTLTISSVQSEDFAVYYCQQDFSSPRTFGGGTKVEIK

SEQ ID NO: 15755 - protein, 122 aa, synthetic construct; identical to SEQ ID NO: 15521
  REGION 1..122: note = Description of Artificial Sequence: Synthetic polypeptide
  REGION 1..122: note = VH of XENP019637

SEQ ID NO: 15756 - protein, 107 aa, synthetic construct
  REGION 1..107: note = Description of Artificial Sequence: Synthetic polypeptide
  REGION 1..107: note = VL of XENP019637
EIVLTQSPATLSVSLGERVTLTCRASQSVGNDVAWYQQKPGQAPRLLINYASHRYTGVPDRFTGSGYGTEFTLTISSVQSEDFAVYYCQQDFSSPRTFGGGTKVEIK

SEQ ID NO: 15757 - protein, 5 aa, synthetic construct
  REGION 1..5: note = Description of Artificial Sequence: Synthetic peptide
  REGION 1..5: note = XENP019637 vhCDR1
NYWMN

SEQ ID NO: 15758 - protein, 19 aa, synthetic construct
  REGION 1..19: note = Description of Artificial Sequence: Synthetic peptide
  REGION 1..19: note = XENP019637 vhCDR2
EIRLYSNNYATHYAESVKG

SEQ ID NO: 15759 - protein, 11 aa, synthetic construct
  REGION 1..11: note = Description of Artificial Sequence: Synthetic peptide
  REGION 1..11: note = XENP019637 vhCDR3
YYGNYGGYFDV

SEQ ID NO: 15760 - protein, 11 aa, synthetic construct
  REGION 1..11: note = Description of Artificial Sequence: Synthetic peptide
  REGION 1..11: note = XENP019637 vlCDR1
RASQSVGNDVA

SEQ ID NO: 15761 - protein, 7 aa, synthetic construct
  REGION 1..7: note = Description of Artificial Sequence: Synthetic peptide
  REGION 1..7: note = XENP019637 vlCDR2
YASHRYT

SEQ ID NO: 15762 - protein, 9 aa, synthetic construct
  REGION 1..9: note = Description of Artificial Sequence: Synthetic peptide
  REGION 1..9: note = XENP019637 vlCDR3
QQDFSSPRT

SEQ ID NO: 15763 - protein, 249 aa, synthetic construct
  REGION 1..249: note = Description of Artificial Sequence: Synthetic polypeptide
  REGION 1..249: note = XENP019638 1G6_H1.278_L1.204_scFv(GKPGS)4
EVQLVESGGGLVKPGGSLRLSCVASGFTFSNYWMNWVRQAPGKGLEWVAEIRLYSNNYATHYAESVKGRFTISRDDSKSTLYLQMNNLKTEDTGVYYCTRYYGNYGGYFDVWGQGTLVTVSSGKPGSGKPGSGKPGSGKPGSEIVLTQSPATLSVSPGERVTLNCRASQSVGNDVAWYQQKPGQAPRLLINYASHRYTGVPDRFTGSGYGTEFTLTISSVQSEDFAVYYCQQDFSSPRTFGGGTKVEIK

SEQ ID NO: 15764 - protein, 122 aa, synthetic construct; identical to SEQ ID NO: 15521
  REGION 1..122: note = Description of Artificial Sequence: Synthetic polypeptide
  REGION 1..122: note = VH of XENP019638

SEQ ID NO: 15765 - protein, 107 aa, synthetic construct
  REGION 1..107: note = Description of Artificial Sequence: Synthetic polypeptide
  REGION 1..107: note = VL of XENP019638
EIVLTQSPATLSVSPGERVTLNCRASQSVGNDVAWYQQKPGQAPRLLINYASHRYTGVPDRFTGSGYGTEFTLTISSVQSEDFAVYYCQQDFSSPRTFGGGTKVEIK

SEQ ID NO: 15766 - protein, 5 aa, synthetic construct
  REGION 1..5: note = Description of Artificial Sequence: Synthetic peptide
  REGION 1..5: note = XENP019638 vhCDR1
NYWMN

SEQ ID NO: 15767 - protein, 19 aa, synthetic construct
  REGION 1..19: note = Description of Artificial Sequence: Synthetic peptide
  REGION 1..19: note = XENP019638 vhCDR2
EIRLYSNNYATHYAESVKG

SEQ ID NO: 15768 - protein, 11 aa, synthetic construct
  REGION 1..11: note = Description of Artificial Sequence: Synthetic peptide
  REGION 1..11: note = XENP019638 vhCDR3
YYGNYGGYFDV

SEQ ID NO: 15769 - protein, 11 aa, synthetic construct
  REGION 1..11: note = Description of Artificial Sequence: Synthetic peptide
  REGION 1..11: note = XENP019638 vlCDR1
RASQSVGNDVA

SEQ ID NO: 15770 - protein, 7 aa, synthetic construct
  REGION 1..7: note = Description of Artificial Sequence: Synthetic peptide
  REGION 1..7: note = XENP019638 vlCDR2
YASHRYT

SEQ ID NO: 15771 - protein, 9 aa, synthetic construct
  REGION 1..9: note = Description of Artificial Sequence: Synthetic peptide
  REGION 1..9: note = XENP019638 vlCDR3
QQDFSSPRT

SEQ ID NO: 15772 - protein, 249 aa, synthetic construct
  REGION 1..249: note = Description of Artificial Sequence: Synthetic polypeptide
  REGION 1..249: note = XENP019639 1G6_H1.278_L1.205_scFv(GKPGS)4
EVQLVESGGGLVKPGGSLRLSCVASGFTFSNYWMNWVRQAPGKGLEWVAEIRLYSNNYATHYAESVKGRFTISRDDSKSTLYLQMNNLKTEDTGVYYCTRYYGNYGGYFDVWGQGTLVTVSSGKPGSGKPGSGKPGSGKPGSEIVLTQSPATLSVSPGERVTLTCRASQSVGNDVAWYQQKPGKAPRLLINYASHRYTGVPDRFTGSGYGTEFTLTISSVQSEDFAVYYCQQDFSSPRTFGGGTKVEIK

SEQ ID NO: 15773 - protein, 122 aa, synthetic construct; identical to SEQ ID NO: 15521
  REGION 1..122: note = Description of Artificial Sequence: Synthetic polypeptide
  REGION 1..122: note = VH of XENP019639

SEQ ID NO: 15774 - protein, 107 aa, synthetic construct
  REGION 1..107: note = Description of Artificial Sequence: Synthetic polypeptide
  REGION 1..107: note = VL of XENP019639
EIVLTQSPATLSVSPGERVTLTCRASQSVGNDVAWYQQKPGKAPRLLINYASHRYTGVPDRFTGSGYGTEFTLTISSVQSEDFAVYYCQQDFSSPRTFGGGTKVEIK

SEQ ID NO: 15775 - protein, 5 aa, synthetic construct
  REGION 1..5: note = Description of Artificial Sequence: Synthetic peptide
  REGION 1..5: note = XENP019639 vhCDR1
NYWMN

SEQ ID NO: 15776 - protein, 19 aa, synthetic construct
  REGION 1..19: note = Description of Artificial Sequence: Synthetic peptide
  REGION 1..19: note = XENP019639 vhCDR2
EIRLYSNNYATHYAESVKG

SEQ ID NO: 15777 - protein, 11 aa, synthetic construct
  REGION 1..11: note = Description of Artificial Sequence: Synthetic peptide
  REGION 1..11: note = XENP019639 vhCDR3
YYGNYGGYFDV

SEQ ID NO: 15778 - protein, 11 aa, synthetic construct
  REGION 1..11: note = Description of Artificial Sequence: Synthetic peptide
  REGION 1..11: note = XENP019639 vlCDR1
RASQSVGNDVA

SEQ ID NO: 15779 - protein, 7 aa, synthetic construct
  REGION 1..7: note = Description of Artificial Sequence: Synthetic peptide
  REGION 1..7: note = XENP019639 vlCDR2
YASHRYT

SEQ ID NO: 15780 - protein, 9 aa, synthetic construct
  REGION 1..9: note = Description of Artificial Sequence: Synthetic peptide
  REGION 1..9: note = XENP019639 vlCDR3
QQDFSSPRT

SEQ ID NO: 15781 - protein, 249 aa, synthetic construct
  REGION 1..249: note = Description of Artificial Sequence: Synthetic polypeptide
  REGION 1..249: note = XENP019640 1G6_H1.278_L1.206_scFv(GKPGS)4
EVQLVESGGGLVKPGGSLRLSCVASGFTFSNYWMNWVRQAPGKGLEWVAEIRLYSNNYATHYAESVKGRFTISRDDSKSTLYLQMNNLKTEDTGVYYCTRYYGNYGGYFDVWGQGTLVTVSSGKPGSGKPGSGKPGSGKPGSEIVLTQSPATLSVSPGERVTLTCRASQSVGNDVAWYQQKPGQAPRLLINYASHRYTGVPDRFTGSGYGTEFTLTISSVQPEDFAVYYCQQDFSSPRTFGGGTKVEIK

SEQ ID NO: 15782 - protein, 122 aa, synthetic construct; identical to SEQ ID NO: 15521
  REGION 1..122: note = Description of Artificial Sequence: Synthetic polypeptide
  REGION 1..122: note = VH of XENP019640

SEQ ID NO: 15783 - protein, 107 aa, synthetic construct
  REGION 1..107: note = Description of Artificial Sequence: Synthetic polypeptide
  REGION 1..107: note = VL of XENP019640
EIVLTQSPATLSVSPGERVTLTCRASQSVGNDVAWYQQKPGQAPRLLINYASHRYTGVPDRFTGSGYGTEFTLTISSVQPEDFAVYYCQQDFSSPRTFGGGTKVEIK

SEQ ID NO: 15784 - protein, 5 aa, synthetic construct
  REGION 1..5: note = Description of Artificial Sequence: Synthetic peptide
  REGION 1..5: note = XENP019640 vhCDR1
NYWMN

SEQ ID NO: 15785 - protein, 19 aa, synthetic construct
  REGION 1..19: note = Description of Artificial Sequence: Synthetic peptide
  REGION 1..19: note = XENP019640 vhCDR2
EIRLYSNNYATHYAESVKG

SEQ ID NO: 15786 - protein, 11 aa, synthetic construct
  REGION 1..11: note = Description of Artificial Sequence: Synthetic peptide
  REGION 1..11: note = XENP019640 vhCDR3
YYGNYGGYFDV

SEQ ID NO: 15787 - protein, 11 aa, synthetic construct
  REGION 1..11: note = Description of Artificial Sequence: Synthetic peptide
  REGION 1..11: note = XENP019640 vlCDR1
RASQSVGNDVA

SEQ ID NO: 15788 - protein, 7 aa, synthetic construct
  REGION 1..7: note = Description of Artificial Sequence: Synthetic peptide
  REGION 1..7: note = XENP019640 vlCDR2
YASHRYT

SEQ ID NO: 15789 - protein, 9 aa, synthetic construct
  REGION 1..9: note = Description of Artificial Sequence: Synthetic peptide
  REGION 1..9: note = XENP019640 vlCDR3
QQDFSSPRT

SEQ ID NO: 15790 - protein, 249 aa, synthetic construct
  REGION 1..249: note = Description of Artificial Sequence: Synthetic polypeptide
  REGION 1..249: note = XENP019641 1G6_H1.278_L1.207_scFv(GKPGS)4
EVQLVESGGGLVKPGGSLRLSCVASGFTFSNYWMNWVRQAPGKGLEWVAEIRLYSNNYATHYAESVKGRFTISRDDSKSTLYLQMNNLKTEDTGVYYCTRYYGNYGGYFDVWGQGTLVTVSSGKPGSGKPGSGKPGSGKPGSEIVLTQSPATLSVSPGERVTLTCRASQSVGNDVAWYQQKPGQAPRLLINYASHRYTGVPDRFTGSGYGTEFTLTISSVQSEDVAVYYCQQDFSSPRTFGGGTKVEIK

SEQ ID NO: 15791 - protein, 122 aa, synthetic construct; identical to SEQ ID NO: 15521
  REGION 1..122: note = Description of Artificial Sequence: Synthetic polypeptide
  REGION 1..122: note = VH of XENP019641

SEQ ID NO: 15792 - protein, 107 aa, synthetic construct
  REGION 1..107: note = Description of Artificial Sequence: Synthetic polypeptide
  REGION 1..107: note = VL of XENP019641
EIVLTQSPATLSVSPGERVTLTCRASQSVGNDVAWYQQKPGQAPRLLINYASHRYTGVPDRFTGSGYGTEFTLTISSVQSEDVAVYYCQQDFSSPRTFGGGTKVEIK

SEQ ID NO: 15793 - protein, 5 aa, synthetic construct
  REGION 1..5: note = Description of Artificial Sequence: Synthetic peptide
  REGION 1..5: note = XENP019641 vhCDR1
NYWMN

SEQ ID NO: 15794 - protein, 19 aa, synthetic construct
  REGION 1..19: note = Description of Artificial Sequence: Synthetic peptide
  REGION 1..19: note = XENP019641 vhCDR2
EIRLYSNNYATHYAESVKG

SEQ ID NO: 15795 - protein, 11 aa, synthetic construct
  REGION 1..11: note = Description of Artificial Sequence: Synthetic peptide
  REGION 1..11: note = XENP019641 vhCDR3
YYGNYGGYFDV

SEQ ID NO: 15796 - protein, 11 aa, synthetic construct
  REGION 1..11: note = Description of Artificial Sequence: Synthetic peptide
  REGION 1..11: note = XENP019641 vlCDR1
RASQSVGNDVA

SEQ ID NO: 15797 - protein, 7 aa, synthetic construct
  REGION 1..7: note = Description of Artificial Sequence: Synthetic peptide
  REGION 1..7: note = XENP019641 vlCDR2
YASHRYT

SEQ ID NO: 15798 - protein, 9 aa, synthetic construct
  REGION 1..9: note = Description of Artificial Sequence: Synthetic peptide
  REGION 1..9: note = XENP019641 vlCDR3
QQDFSSPRT

SEQ ID NO: 15799 - protein, 249 aa, synthetic construct
  REGION 1..249: note = Description of Artificial Sequence: Synthetic polypeptide
  REGION 1..249: note = XENP019642 1G6_H1.278_L1.208_scFv(GKPGS)4
EVQLVESGGGLVKPGGSLRLSCVASGFTFSNYWMNWVRQAPGKGLEWVAEIRLYSNNYATHYAESVKGRFTISRDDSKSTLYLQMNNLKTEDTGVYYCTRYYGNYGGYFDVWGQGTLVTVSSGKPGSGKPGSGKPGSGKPGSEIVLTQSPATLSVSPGERVTLTCRASQSVGNDVAWYQQKPGQAPRLLINYASHRYTGVPDRFTGSGYGTEFTLTISSVQSEDFATYYCQQDFSSPRTFGGGTKVEIK

SEQ ID NO: 15800 - protein, 122 aa, synthetic construct; identical to SEQ ID NO: 15521
  REGION 1..122: note = Description of Artificial Sequence: Synthetic polypeptide
  REGION 1..122: note = VH of XENP019642

SEQ ID NO: 15801 - protein, 107 aa, synthetic construct
  REGION 1..107: note = Description of Artificial Sequence: Synthetic polypeptide
  REGION 1..107: note = VL of XENP019642
EIVLTQSPATLSVSPGERVTLTCRASQSVGNDVAWYQQKPGQAPRLLINYASHRYTGVPDRFTGSGYGTEFTLTISSVQSEDFATYYCQQDFSSPRTFGGGTKVEIK

SEQ ID NO: 15802 - protein, 5 aa, synthetic construct
  REGION 1..5: note = Description of Artificial Sequence: Synthetic peptide
  REGION 1..5: note = XENP019642 vhCDR1
NYWMN

SEQ ID NO: 15803 - protein, 19 aa, synthetic construct
  REGION 1..19: note = Description of Artificial Sequence: Synthetic peptide
  REGION 1..19: note = XENP019642 vhCDR2
EIRLYSNNYATHYAESVKG

SEQ ID NO: 15804 - protein, 11 aa, synthetic construct
  REGION 1..11: note = Description of Artificial Sequence: Synthetic peptide
  REGION 1..11: note = XENP019642 vhCDR3
YYGNYGGYFDV

SEQ ID NO: 15805 - protein, 11 aa, synthetic construct
  REGION 1..11: note = Description of Artificial Sequence: Synthetic peptide
  REGION 1..11: note = XENP019642 vlCDR1
RASQSVGNDVA

SEQ ID NO: 15806 - protein, 7 aa, synthetic construct
  REGION 1..7: note = Description of Artificial Sequence: Synthetic peptide
  REGION 1..7: note = XENP019642 vlCDR2
YASHRYT

SEQ ID NO: 15807 - protein, 9 aa, synthetic construct
  REGION 1..9: note = Description of Artificial Sequence: Synthetic peptide
  REGION 1..9: note = XENP019642 vlCDR3
QQDFSSPRT

SEQ ID NO: 15808 - protein, 249 aa, synthetic construct
  REGION 1..249: note = Description of Artificial Sequence: Synthetic polypeptide
  REGION 1..249: note = XENP019643 1G6_L1.189_H1.279_scFv(GKPGS)4
EIVLTQSPATLSVSPGERVTLTCRASQSVGNDVAWYQQKPGQAPRLLINYASHRYTGVPDRFTGSGYGTEFTLTISSVQSEDFAVYYCQQDFSSPRTFGGGTKVEIKGKPGSGKPGSGKPGSGKPGSEVQLVESGGGLVKPGGSLRLSCVASGFTFSNYWMNWVRQAPGKGLEWVAEIRLYSNNYATHYAESVKGRFTISRDDSKSTLYLQMNNLKTEDTGVYYCTRYYGNYGGYFDVWGRGTLVTVSS

SEQ ID NO: 15809 - protein, 107 aa, synthetic construct; identical to SEQ ID NO: 15540
  REGION 1..107: note = Description of Artificial Sequence: Synthetic polypeptide
  REGION 1..107: note = VH of XENP019643

SEQ ID NO: 15810 - protein, 122 aa, synthetic construct; identical to SEQ ID NO: 2872
  REGION 1..122: note = Description of Artificial Sequence: Synthetic polypeptide
  REGION 1..122: note = VL of XENP019643

SEQ ID NO: 15811 - protein, 11 aa, synthetic construct
  REGION 1..11: note = Description of Artificial Sequence: Synthetic peptide
  REGION 1..11: note = XENP019643 vhCDR1
RASQSVGNDVA

SEQ ID NO: 15812 - protein, 7 aa, synthetic construct
  REGION 1..7: note = Description of Artificial Sequence: Synthetic peptide
  REGION 1..7: note = XENP019643 vhCDR2
YASHRYT

SEQ ID NO: 15813 - protein, 9 aa, synthetic construct
  REGION 1..9: note = Description of Artificial Sequence: Synthetic peptide
  REGION 1..9: note = XENP019643 vhCDR3
QQDFSSPRT

SEQ ID NO: 15814 - protein, 5 aa, synthetic construct
  REGION 1..5: note = Description of Artificial Sequence: Synthetic peptide
  REGION 1..5: note = XENP019643 vlCDR1
NYWMN

SEQ ID NO: 15815 - protein, 19 aa, synthetic construct
  REGION 1..19: note = Description of Artificial Sequence: Synthetic peptide
  REGION 1..19: note = XENP019643 vlCDR2
EIRLYSNNYATHYAESVKG

SEQ ID NO: 15816 - protein, 11 aa, synthetic construct
  REGION 1..11: note = Description of Artificial Sequence: Synthetic peptide
  REGION 1..11: note = XENP019643 vlCDR3
YYGNYGGYFDV

SEQ ID NO: 15817 - protein, 249 aa, synthetic construct
  REGION 1..249: note = Description of Artificial Sequence: Synthetic polypeptide
  REGION 1..249: note = XENP019644 1G6_L1.189_H1.280_scFv(GKPGS)4
EIVLTQSPATLSVSPGERVTLTCRASQSVGNDVAWYQQKPGQAPRLLINYASHRYTGVPDRFTGSGYGTEFTLTISSVQSEDFAVYYCQQDFSSPRTFGGGTKVEIKGKPGSGKPGSGKPGSGKPGSEVQLVESGGGLVKPGGSLRLTCVASGFTFSNYWMNWVRQAPGKGLEWVAEIRLYSNNYATHYAESVKGRFTISRDDSKSTLYLQMNNLKTEDTGVYYCTRYYGNYGGYFDVWGRGTLVTVSS

SEQ ID NO: 15818 - protein, 107 aa, synthetic construct; identical to SEQ ID NO: 15540
  REGION 1..107: note = Description of Artificial Sequence: Synthetic polypeptide
  REGION 1..107: note = VH of XENP019644

SEQ ID NO: 15819 - protein, 122 aa, synthetic construct; identical to SEQ ID NO: 15593
  REGION 1..122: note = Description of Artificial Sequence: Synthetic polypeptide
  REGION 1..122: note = VL of XENP019644

SEQ ID NO: 15820 - protein, 11 aa, synthetic construct
  REGION 1..11: note = Description of Artificial Sequence: Synthetic peptide
  REGION 1..11: note = XENP019644 vhCDR1
RASQSVGNDVA

SEQ ID NO: 15821 - protein, 7 aa, synthetic construct
  REGION 1..7: note = Description of Artificial Sequence: Synthetic peptide
  REGION 1..7: note = XENP019644 vhCDR2
YASHRYT

SEQ ID NO: 15822 - protein, 9 aa, synthetic construct
  REGION 1..9: note = Description of Artificial Sequence: Synthetic peptide
  REGION 1..9: note = XENP019644 vhCDR3
QQDFSSPRT

SEQ ID NO: 15823 - protein, 5 aa, synthetic construct
  REGION 1..5: note = Description of Artificial Sequence: Synthetic peptide
  REGION 1..5: note = XENP019644 vlCDR1
NYWMN

SEQ ID NO: 15824 - protein, 19 aa, synthetic construct
  REGION 1..19: note = Description of Artificial Sequence: Synthetic peptide
  REGION 1..19: note = XENP019644 vlCDR2
EIRLYSNNYATHYAESVKG

SEQ ID NO: 15825 - protein, 11 aa, synthetic construct
  REGION 1..11: note = Description of Artificial Sequence: Synthetic peptide
  REGION 1..11: note = XENP019644 vlCDR3
YYGNYGGYFDV

SEQ ID NO: 15826 - protein, 249 aa, synthetic construct
  REGION 1..249: note = Description of Artificial Sequence: Synthetic polypeptide
  REGION 1..249: note = XENP019645 1G6_L1.189_H1.281_scFv(GKPGS)4
EIVLTQSPATLSVSPGERVTLTCRASQSVGNDVAWYQQKPGQAPRLLINYASHRYTGVPDRFTGSGYGTEFTLTISSVQSEDFAVYYCQQDFSSPRTFGGGTKVEIKGKPGSGKPGSGKPGSGKPGSEVQLVESGGGLVKPGGSLRLSCVASGFTFSNYWMNWVRQAPGKGLEWVAEIRLYSNNYATHYAESVKGRFTISRDDSKSMLYLQMNNLKTEDTGVYYCTRYYGNYGGYFDVWGRGTLVTVSS

SEQ ID NO: 15827 - protein, 107 aa, synthetic construct; identical to SEQ ID NO: 15540
  REGION 1..107: note = Description of Artificial Sequence: Synthetic polypeptide
  REGION 1..107: note = VH of XENP019645

SEQ ID NO: 15828 - protein, 122 aa, synthetic construct; identical to SEQ ID NO: 15602
  REGION 1..122: note = Description of Artificial Sequence: Synthetic polypeptide
  REGION 1..122: note = VL of XENP019645

SEQ ID NO: 15829 - protein, 11 aa, synthetic construct
  REGION 1..11: note = Description of Artificial Sequence: Synthetic peptide
  REGION 1..11: note = XENP019645 vhCDR1
RASQSVGNDVA

SEQ ID NO: 15830 - protein, 7 aa, synthetic construct
  REGION 1..7: note = Description of Artificial Sequence: Synthetic peptide
  REGION 1..7: note = XENP019645 vhCDR2
YASHRYT

SEQ ID NO: 15831 - protein, 9 aa, synthetic construct
  REGION 1..9: note = Description of Artificial Sequence: Synthetic peptide
  REGION 1..9: note = XENP019645 vhCDR3
QQDFSSPRT

SEQ ID NO: 15832 - protein, 5 aa, synthetic construct
  REGION 1..5: note = Description of Artificial Sequence: Synthetic peptide
  REGION 1..5: note = XENP019645 vlCDR1
NYWMN

SEQ ID NO: 15833 - protein, 19 aa, synthetic construct
  REGION 1..19: note = Description of Artificial Sequence: Synthetic peptide
  REGION 1..19: note = XENP019645 vlCDR2
EIRLYSNNYATHYAESVKG

SEQ ID NO: 15834 - protein, 11 aa, synthetic construct
  REGION 1..11: note = Description of Artificial Sequence: Synthetic peptide
  REGION 1..11: note = XENP019645 vlCDR3
YYGNYGGYFDV

SEQ ID NO: 15835 - protein, 249 aa, synthetic construct
  REGION 1..249: note = Description of Artificial Sequence: Synthetic polypeptide
  REGION 1..249: note = XENP019646 1G6_L1.189_H1.282_scFv(GKPGS)4
EIVLTQSPATLSVSPGERVTLTCRASQSVGNDVAWYQQKPGQAPRLLINYASHRYTGVPDRFTGSGYGTEFTLTISSVQSEDFAVYYCQQDFSSPRTFGGGTKVEIKGKPGSGKPGSGKPGSGKPGSEVQLVESGGGLVKPGGSLRLTCVASGFTFSNYWMNWVRQAPGKGLEWVAEIRLYSNNYATHYAESVKGRFTISRDDSKSMLYLQMNNLKTEDTGVYYCTRYYGNYGGYFDVWGRGTLVTVSS

SEQ ID NO: 15836 - protein, 107 aa, synthetic construct; identical to SEQ ID NO: 15540
  REGION 1..107: note = Description of Artificial Sequence: Synthetic polypeptide
  REGION 1..107: note = VH of XENP019646

SEQ ID NO: 15837 - protein, 122 aa, synthetic construct; identical to SEQ ID NO: 15611
  REGION 1..122: note = Description of Artificial Sequence: Synthetic polypeptide
  REGION 1..122: note = VL of XENP019646

SEQ ID NO: 15838 - protein, 11 aa, synthetic construct
  REGION 1..11: note = Description of Artificial Sequence: Synthetic peptide
  REGION 1..11: note = XENP019646 vhCDR1
RASQSVGNDVA

SEQ ID NO: 15839 - protein, 7 aa, synthetic construct
  REGION 1..7: note = Description of Artificial Sequence: Synthetic peptide
  REGION 1..7: note = XENP019646 vhCDR2
YASHRYT

SEQ ID NO: 15840 - protein, 9 aa, synthetic construct
  REGION 1..9: note = Description of Artificial Sequence: Synthetic peptide
  REGION 1..9: note = XENP019646 vhCDR3
QQDFSSPRT

SEQ ID NO: 15841 - protein, 5 aa, synthetic construct
  REGION 1..5: note = Description of Artificial Sequence: Synthetic peptide
  REGION 1..5: note = XENP019646 vlCDR1
NYWMN

SEQ ID NO: 15842 - protein, 19 aa, synthetic construct
  REGION 1..19: note = Description of Artificial Sequence: Synthetic peptide
  REGION 1..19: note = XENP019646 vlCDR2
EIRLYSNNYATHYAESVKG

SEQ ID NO: 15843 - protein, 11 aa, synthetic construct
  REGION 1..11: note = Description of Artificial Sequence: Synthetic peptide
  REGION 1..11: note = XENP019646 vlCDR3
YYGNYGGYFDV

SEQ ID NO: 15844 - protein, 249 aa, synthetic construct
  REGION 1..249: note = Description of Artificial Sequence: Synthetic polypeptide
  REGION 1..249: note = XENP019647 1G6_L1.189_H1.283_scFv(GKPGS)4
EIVLTQSPATLSVSPGERVTLTCRASQSVGNDVAWYQQKPGQAPRLLINYASHRYTGVPDRFTGSGYGTEFTLTISSVQSEDFAVYYCQQDFSSPRTFGGGTKVEIKGKPGSGKPGSGKPGSGKPGSEVQLVESGGGLVKPGGSLRLSCVASGFTFSNYWMNWVRQAPGKGLEWVCEIRLYSNNYATHYAESVKGRFTCSRDDSKSTLYLQMNNLKTEDTGVYYCTRYYGNYGGYFDVWGQGTLVTVSS

SEQ ID NO: 15845 - protein, 107 aa, synthetic construct; identical to SEQ ID NO: 15540
  REGION 1..107: note = Description of Artificial Sequence: Synthetic polypeptide
  REGION 1..107: note = VH of XENP019647

SEQ ID NO: 15846 - protein, 122 aa, synthetic construct; identical to SEQ ID NO: 15620
  REGION 1..122: note = Description of Artificial Sequence: Synthetic polypeptide
  REGION 1..122: note = VL of XENP019647

SEQ ID NO: 15847 - protein, 11 aa, synthetic construct
  REGION 1..11: note = Description of Artificial Sequence: Synthetic peptide
  REGION 1..11: note = XENP019647 vhCDR1
RASQSVGNDVA

SEQ ID NO: 15848 - protein, 7 aa, synthetic construct
  REGION 1..7: note = Description of Artificial Sequence: Synthetic peptide
  REGION 1..7: note = XENP019647 vhCDR2
YASHRYT

SEQ ID NO: 15849 - protein, 9 aa, synthetic construct
  REGION 1..9: note = Description of Artificial Sequence: Synthetic peptide
  REGION 1..9: note = XENP019647 vhCDR3
QQDFSSPRT

SEQ ID NO: 15850 - protein, 5 aa, synthetic construct
  REGION 1..5: note = Description of Artificial Sequence: Synthetic peptide
  REGION 1..5: note = XENP019647 vlCDR1
NYWMN

SEQ ID NO: 15851 - protein, 19 aa, synthetic construct
  REGION 1..19: note = Description of Artificial Sequence: Synthetic peptide
  REGION 1..19: note = XENP019647 vlCDR2
EIRLYSNNYATHYAESVKG

SEQ ID NO: 15852 - protein, 11 aa, synthetic construct
  REGION 1..11: note = Description of Artificial Sequence: Synthetic peptide
  REGION 1..11: note = XENP019647 vlCDR3
YYGNYGGYFDV

SEQ ID NO: 15853 - protein, 249 aa, synthetic construct
  REGION 1..249: note = Description of Artificial Sequence: Synthetic polypeptide
  REGION 1..249: note = XENP019648 1G6_L1.189_H1.284_scFv(GKPGS)4
EIVLTQSPATLSVSPGERVTLTCRASQSVGNDVAWYQQKPGQAPRLLINYASHRYTGVPDRFTGSGYGTEFTLTISSVQSEDFAVYYCQQDFSSPRTFGGGTKVEIKGKPGSGKPGSGKPGSGKPGSEVQLVESGGGLVKPGGSLRLSCVASGFTFSNYWMNWVRQAPGKGLEWVCEIRLYSNNYATHYAESVKGRFTCSRDDSKSTLYLQMNNLKTEDTGVYYCTRYYGNYGGYFDVWGRGTLVTVSS

SEQ ID NO: 15854 - protein, 107 aa, synthetic construct; identical to SEQ ID NO: 15540
  REGION 1..107: note = Description of Artificial Sequence: Synthetic polypeptide
  REGION 1..107: note = VH of XENP019648

SEQ ID NO: 15855 - protein, 122 aa, synthetic construct; identical to SEQ ID NO: 15629
  REGION 1..122: note = Description of Artificial Sequence: Synthetic polypeptide
  REGION 1..122: note = VL of XENP019648

SEQ ID NO: 15856 - protein, 11 aa, synthetic construct
  REGION 1..11: note = Description of Artificial Sequence: Synthetic peptide
  REGION 1..11: note = XENP019648 vhCDR1
RASQSVGNDVA

SEQ ID NO: 15857 - protein, 7 aa, synthetic construct
  REGION 1..7: note = Description of Artificial Sequence: Synthetic peptide
  REGION 1..7: note = XENP019648 vhCDR2
YASHRYT

SEQ ID NO: 15858 - protein, 9 aa, synthetic construct
  REGION 1..9: note = Description of Artificial Sequence: Synthetic peptide
  REGION 1..9: note = XENP019648 vhCDR3
QQDFSSPRT

SEQ ID NO: 15859 - protein, 5 aa, synthetic construct
  REGION 1..5: note = Description of Artificial Sequence: Synthetic peptide
  REGION 1..5: note = XENP019648 vlCDR1
NYWMN

SEQ ID NO: 15860 - protein, 19 aa, synthetic construct
  REGION 1..19: note = Description of Artificial Sequence: Synthetic peptide
  REGION 1..19: note = XENP019648 vlCDR2
EIRLYSNNYATHYAESVKG

SEQ ID NO: 15861 - protein, 11 aa, synthetic construct
  REGION 1..11: note = Description of Artificial Sequence: Synthetic peptide
  REGION 1..11: note = XENP019648 vlCDR3
YYGNYGGYFDV

SEQ ID NO: 15862 - protein, 249 aa, synthetic construct
  REGION 1..249: note = Description of Artificial Sequence: Synthetic polypeptide
  REGION 1..249: note = XENP019649 1G6_L1.189_H1.285_scFv(GKPGS)4
EIVLTQSPATLSVSPGERVTLTCRASQSVGNDVAWYQQKPGQAPRLLINYASHRYTGVPDRFTGSGYGTEFTLTISSVQSEDFAVYYCQQDFSSPRTFGGGTKVEIKGKPGSGKPGSGKPGSGKPGSEVQLVESGGGLVKPGGSLRLTCVASGFTFSNYWMNWVRQAPGKGLEWVCEIRLYSNNYATHYAESVKGRFTCSRDDSKSMLYLQMNNLKTEDTGVYYCTRYYGNYGGYFDVWGRGTLVTVSS

SEQ ID NO: 15863 - protein, 107 aa, synthetic construct; identical to SEQ ID NO: 15540
  REGION 1..107: note = Description of Artificial Sequence: Synthetic polypeptide
  REGION 1..107: note = VH of XENP019649

SEQ ID NO: 15864 - protein, 122 aa, synthetic construct; identical to SEQ ID NO: 15638
  REGION 1..122: note = Description of Artificial Sequence: Synthetic polypeptide
  REGION 1..122: note = VL of XENP019649

SEQ ID NO: 15865 - protein, 11 aa, synthetic construct
  REGION 1..11: note = Description of Artificial Sequence: Synthetic peptide
  REGION 1..11: note = XENP019649 vhCDR1
RASQSVGNDVA

SEQ ID NO: 15866 - protein, 7 aa, synthetic construct
  REGION 1..7: note = Description of Artificial Sequence: Synthetic peptide
  REGION 1..7: note = XENP019649 vhCDR2
YASHRYT

SEQ ID NO: 15867 - protein, 9 aa, synthetic construct
  REGION 1..9: note = Description of Artificial Sequence: Synthetic peptide
  REGION 1..9: note = XENP019649 vhCDR3
QQDFSSPRT

SEQ ID NO: 15868 - protein, 5 aa, synthetic construct
  REGION 1..5: note = Description of Artificial Sequence: Synthetic peptide
  REGION 1..5: note = XENP019649 vlCDR1
NYWMN

SEQ ID NO: 15869 - protein, 19 aa, synthetic construct
  REGION 1..19: note = Description of Artificial Sequence: Synthetic peptide
  REGION 1..19: note = XENP019649 vlCDR2
EIRLYSNNYATHYAESVKG

SEQ ID NO: 15870 - protein, 11 aa, synthetic construct
  REGION 1..11: note = Description of Artificial Sequence: Synthetic peptide
  REGION 1..11: note = XENP019649 vlCDR3
YYGNYGGYFDV

SEQ ID NO: 15871 - protein, 249 aa, synthetic construct
  REGION 1..249: note = Description of Artificial Sequence: Synthetic polypeptide
  REGION 1..249: note = XENP019650 1G6_L1.192_H1.278_scFv(GKPGS)4
EIVLTQSPATLSASPGERVTLTCRASQSVGNDVAWYQQKPGQAPRLLINYASHRYTGVPDRFTGSGYGTEFTLTISSVQSEDFAVYYCQQDFSSPRTFGGGTKVEIKGKPGSGKPGSGKPGSGKPGSEVQLVESGGGLVKPGGSLRLSCVASGFTFSNYWMNWVRQAPGKGLEWVAEIRLYSNNYATHYAESVKGRFTISRDDSKSTLYLQMNNLKTEDTGVYYCTRYYGNYGGYFDVWGQGTLVTVSS

SEQ ID NO: 15872 - protein, 107 aa, synthetic construct; identical to SEQ ID NO: 15657
  REGION 1..107: note = Description of Artificial Sequence: Synthetic polypeptide
  REGION 1..107: note = VH of XENP019650

SEQ ID NO: 15873 - protein, 122 aa, synthetic construct; identical to SEQ ID NO: 15521
  REGION 1..122: note = Description of Artificial Sequence: Synthetic polypeptide
  REGION 1..122: note = VL of XENP019650

SEQ ID NO: 15874 - protein, 11 aa, synthetic construct
  REGION 1..11: note = Description of Artificial Sequence: Synthetic peptide
  REGION 1..11: note = XENP019650 vhCDR1
RASQSVGNDVA

SEQ ID NO: 15875 - protein, 7 aa, synthetic construct
  REGION 1..7: note = Description of Artificial Sequence: Synthetic peptide
  REGION 1..7: note = XENP019650 vhCDR2
YASHRYT

SEQ ID NO: 15876 - protein, 9 aa, synthetic construct
  REGION 1..9: note = Description of Artificial Sequence: Synthetic peptide
  REGION 1..9: note = XENP019650 vhCDR3
QQDFSSPRT

SEQ ID NO: 15877 - protein, 5 aa, synthetic construct
  REGION 1..5: note = Description of Artificial Sequence: Synthetic peptide
  REGION 1..5: note = XENP019650 vlCDR1
NYWMN

SEQ ID NO: 15878 - protein, 19 aa, synthetic construct
  REGION 1..19: note = Description of Artificial Sequence: Synthetic peptide
  REGION 1..19: note = XENP019650 vlCDR2
EIRLYSNNYATHYAESVKG

SEQ ID NO: 15879 - protein, 11 aa, synthetic construct
  REGION 1..11: note = Description of Artificial Sequence: Synthetic peptide
  REGION 1..11: note = XENP019650 vlCDR3
YYGNYGGYFDV

SEQ ID NO: 15880 - protein, 249 aa, synthetic construct
  REGION 1..249: note = Description of Artificial Sequence: Synthetic polypeptide
  REGION 1..249: note = XENP019651 1G6_L1.193_H1.278_scFv(GKPGS)4
EIVLTQSPATLSVSPGERVTLTCRASQSVGNDVAWYQQKPGQAPRLLINYASHRYTGVPDRFTGSGYGTEFTLTISSVQSEDFGVYYCQQDFSSPRTFGGGTKVEIKGKPGSGKPGSGKPGSGKPGSEVQLVESGGGLVKPGGSLRLSCVASGFTFSNYWMNWVRQAPGKGLEWVAEIRLYSNNYATHYAESVKGRFTISRDDSKSTLYLQMNNLKTEDTGVYYCTRYYGNYGGYFDVWGQGTLVTVSS

SEQ ID NO: 15881 - protein, 107 aa, synthetic construct; identical to SEQ ID NO: 15666
  REGION 1..107: note = Description of Artificial Sequence: Synthetic polypeptide
  REGION 1..107: note = VH of XENP019651

SEQ ID NO: 15882 - protein, 122 aa, synthetic construct; identical to SEQ ID NO: 15521
  REGION 1..122: note = Description of Artificial Sequence: Synthetic polypeptide
  REGION 1..122: note = VL of XENP019651

SEQ ID NO: 15883 - protein, 11 aa, synthetic construct
  REGION 1..11: note = Description of Artificial Sequence: Synthetic peptide
  REGION 1..11: note = XENP019651 vhCDR1
RASQSVGNDVA

SEQ ID NO: 15884 - protein, 7 aa, synthetic construct
  REGION 1..7: note = Description of Artificial Sequence: Synthetic peptide
  REGION 1..7: note = XENP019651 vhCDR2
YASHRYT

SEQ ID NO: 15885 - protein, 9 aa, synthetic construct
  REGION 1..9: note = Description of Artificial Sequence: Synthetic peptide
  REGION 1..9: note = XENP019651 vhCDR3
QQDFSSPRT

SEQ ID NO: 15886 - protein, 5 aa, synthetic construct
  REGION 1..5: note = Description of Artificial Sequence: Synthetic peptide
  REGION 1..5: note = XENP019651 vlCDR1
NYWMN

SEQ ID NO: 15887 - protein, 19 aa, synthetic construct
  REGION 1..19: note = Description of Artificial Sequence: Synthetic peptide
  REGION 1..19: note = XENP019651 vlCDR2
EIRLYSNNYATHYAESVKG

SEQ ID NO: 15888 - protein, 11 aa, synthetic construct
  REGION 1..11: note = Description of Artificial Sequence: Synthetic peptide
  REGION 1..11: note = XENP019651 vlCDR3
YYGNYGGYFDV

SEQ ID NO: 15889 - protein, 249 aa, synthetic construct
  REGION 1..249: note = Description of Artificial Sequence: Synthetic polypeptide
  REGION 1..249: note = XENP019652 1G6_L1.194_H1.278_scFv(GKPGS)4
EIVLTQSPATLSASPGERVTLTCRASQSVGNDVAWYQQKPGQAPRLLINYASHRYTGVPDRFTGSGYGTEFTLTISSVQSEDFGVYYCQQDFSSPRTFGGGTKVEIKGKPGSGKPGSGKPGSGKPGSEVQLVESGGGLVKPGGSLRLSCVASGFTFSNYWMNWVRQAPGKGLEWVAEIRLYSNNYATHYAESVKGRFTISRDDSKSTLYLQMNNLKTEDTGVYYCTRYYGNYGGYFDVWGQGTLVTVSS

SEQ ID NO: 15890 - protein, 107 aa, synthetic construct; identical to SEQ ID NO: 2871
  REGION 1..107: note = Description of Artificial Sequence: Synthetic polypeptide
  REGION 1..107: note = VH of XENP019652

SEQ ID NO: 15891 - protein, 122 aa, synthetic construct; identical to SEQ ID NO: 15521
  REGION 1..122: note = Description of Artificial Sequence: Synthetic polypeptide
  REGION 1..122: note = VL of XENP019652

SEQ ID NO: 15892 - protein, 11 aa, synthetic construct
  REGION 1..11: note = Description of Artificial Sequence: Synthetic peptide
  REGION 1..11: note = XENP019652 vhCDR1
RASQSVGNDVA

SEQ ID NO: 15893 - protein, 7 aa, synthetic construct
  REGION 1..7: note = Description of Artificial Sequence: Synthetic peptide
  REGION 1..7: note = XENP019652 vhCDR2
YASHRYT

SEQ ID NO: 15894 - protein, 9 aa, synthetic construct
  REGION 1..9: note = Description of Artificial Sequence: Synthetic peptide
  REGION 1..9: note = XENP019652 vhCDR3
QQDFSSPRT

SEQ ID NO: 15895 - protein, 5 aa, synthetic construct
  REGION 1..5: note = Description of Artificial Sequence: Synthetic peptide
  REGION 1..5: note = XENP019652 vlCDR1
NYWMN

SEQ ID NO: 15896 - protein, 19 aa, synthetic construct
  REGION 1..19: note = Description of Artificial Sequence: Synthetic peptide
  REGION 1..19: note = XENP019652 vlCDR2
EIRLYSNNYATHYAESVKG

SEQ ID NO: 15897 - protein, 11 aa, synthetic construct
  REGION 1..11: note = Description of Artificial Sequence: Synthetic peptide
  REGION 1..11: note = XENP019652 vlCDR3
YYGNYGGYFDV

SEQ ID NO: 15898 - protein, 249 aa, synthetic construct
  REGION 1..249: note = Description of Artificial Sequence: Synthetic polypeptide
  REGION 1..249: note = XENP019653 1G6_L1.195_H1.278_scFv(GKPGS)4
EIVLTQSPATLSVSPGERVTLTCRASQSVGNDVAWYQQKPGQAPRLLCNYASHRYTGVPDRFTCSGYGTEFTLTISSVQSEDFAVYYCQQDFSSPRTFGGGTKVEIKGKPGSGKPGSGKPGSGKPGSEVQLVESGGGLVKPGGSLRLSCVASGFTFSNYWMNWVRQAPGKGLEWVAEIRLYSNNYATHYAESVKGRFTISRDDSKSTLYLQMNNLKTEDTGVYYCTRYYGNYGGYFDVWGQGTLVTVSS

SEQ ID NO: 15899 - protein, 107 aa, synthetic construct; identical to SEQ ID NO: 15684
  REGION 1..107: note = Description of Artificial Sequence: Synthetic polypeptide
  REGION 1..107: note = VH of XENP019653

SEQ ID NO: 15900 - protein, 122 aa, synthetic construct; identical to SEQ ID NO: 15521
  REGION 1..122: note = Description of Artificial Sequence: Synthetic polypeptide
  REGION 1..122: note = VL of XENP019653

SEQ ID NO: 15901 - protein, 11 aa, synthetic construct
  REGION 1..11: note = Description of Artificial Sequence: Synthetic peptide
  REGION 1..11: note = XENP019653 vhCDR1
RASQSVGNDVA

SEQ ID NO: 15902 - protein, 9 aa, synthetic construct
  REGION 1..9: note = Description of Artificial Sequence: Synthetic peptide
  REGION 1..9: note = XENP019653 vhCDR2
CNYASHRYT

SEQ ID NO: 15903 - protein, 9 aa, synthetic construct
  REGION 1..9: note = Description of Artificial Sequence: Synthetic peptide
  REGION 1..9: note = XENP019653 vhCDR3
QQDFSSPRT

SEQ ID NO: 15904 - protein, 5 aa, synthetic construct
  REGION 1..5: note = Description of Artificial Sequence: Synthetic peptide
  REGION 1..5: note = XENP019653 vlCDR1
NYWMN

SEQ ID NO: 15905 - protein, 19 aa, synthetic construct
  REGION 1..19: note = Description of Artificial Sequence: Synthetic peptide
  REGION 1..19: note = XENP019653 vlCDR2
EIRLYSNNYATHYAESVKG

SEQ ID NO: 15906 - protein, 11 aa, synthetic construct
  REGION 1..11: note = Description of Artificial Sequence: Synthetic peptide
  REGION 1..11: note = XENP019653 vlCDR3
YYGNYGGYFDV

SEQ ID NO: 15907 - protein, 249 aa, synthetic construct
  REGION 1..249: note = Description of Artificial Sequence: Synthetic polypeptide
  REGION 1..249: note = XENP019654 1G6_L1.196_H1.278_scFv(GKPGS)4
EIVLTQSPATLSASPGERVTLTCRASQSVGNDVAWYQQKPGQAPRLLCNYASHRYTGVPDRFTCSGYGTEFTLTISSVQSEDFGVYYCQQDFSSPRTFGGGTKVEIKGKPGSGKPGSGKPGSGKPGSEVQLVESGGGLVKPGGSLRLSCVASGFTFSNYWMNWVRQAPGKGLEWVAEIRLYSNNYATHYAESVKGRFTISRDDSKSTLYLQMNNLKTEDTGVYYCTRYYGNYGGYFDVWGQGTLVTVSS

SEQ ID NO: 15908 - protein, 107 aa, synthetic construct; identical to SEQ ID NO: 15693
  REGION 1..107: note = Description of Artificial Sequence: Synthetic polypeptide
  REGION 1..107: note = VH of XENP019654

SEQ ID NO: 15909 - protein, 122 aa, synthetic construct; identical to SEQ ID NO: 15521
  REGION 1..122: note = Description of Artificial Sequence: Synthetic polypeptide
  REGION 1..122: note = VL of XENP019654

SEQ ID NO: 15910 - protein, 11 aa, synthetic construct
  REGION 1..11: note = Description of Artificial Sequence: Synthetic peptide
  REGION 1..11: note = XENP019654 vhCDR1
RASQSVGNDVA

SEQ ID NO: 15911 - protein, 9 aa, synthetic construct
  REGION 1..9: note = Description of Artificial Sequence: Synthetic peptide
  REGION 1..9: note = XENP019654 vhCDR2
CNYASHRYT

SEQ ID NO: 15912 - protein, 9 aa, synthetic construct
  REGION 1..9: note = Description of Artificial Sequence: Synthetic peptide
  REGION 1..9: note = XENP019654 vhCDR3
QQDFSSPRT

SEQ ID NO: 15913 - protein, 5 aa, synthetic construct
  REGION 1..5: note = Description of Artificial Sequence: Synthetic peptide
  REGION 1..5: note = XENP019654 vlCDR1
NYWMN

SEQ ID NO: 15914 - protein, 19 aa, synthetic construct
  REGION 1..19: note = Description of Artificial Sequence: Synthetic peptide
  REGION 1..19: note = XENP019654 vlCDR2
EIRLYSNNYATHYAESVKG

SEQ ID NO: 15915 - protein, 11 aa, synthetic construct
  REGION 1..11: note = Description of Artificial Sequence: Synthetic peptide
  REGION 1..11: note = XENP019654 vlCDR3
YYGNYGGYFDV

SEQ ID NO: 15916 - protein, 249 aa, synthetic construct
  REGION 1..249: note = Description of Artificial Sequence: Synthetic polypeptide
  REGION 1..249: note = XENP019655 1G6_L1.197_H1.278_scFv(GKPGS)4
EIVLTQSPATLSASPGERVTLTCRASQSVGNDVAWYQQKPGQAPRLLCNYASHRYTSVPDRFTCSGYGTEFTLTISSVQSEDFGVYYCQQDFSSPRTFGGGTKVEIKGKPGSGKPGSGKPGSGKPGSEVQLVESGGGLVKPGGSLRLSCVASGFTFSNYWMNWVRQAPGKGLEWVAEIRLYSNNYATHYAESVKGRFTISRDDSKSTLYLQMNNLKTEDTGVYYCTRYYGNYGGYFDVWGQGTLVTVSS

SEQ ID NO: 15917 - protein, 107 aa, synthetic construct; identical to SEQ ID NO: 15702
  REGION 1..107: note = Description of Artificial Sequence: Synthetic polypeptide
  REGION 1..107: note = VH of XENP019655

SEQ ID NO: 15918 - protein, 122 aa, synthetic construct; identical to SEQ ID NO: 15521
  REGION 1..122: note = Description of Artificial Sequence: Synthetic polypeptide
  REGION 1..122: note = VL of XENP019655

SEQ ID NO: 15919 - protein, 11 aa, synthetic construct
  REGION 1..11: note = Description of Artificial Sequence: Synthetic peptide
  REGION 1..11: note = XENP019655 vhCDR1
RASQSVGNDVA

SEQ ID NO: 15920 - protein, 9 aa, synthetic construct
  REGION 1..9: note = Description of Artificial Sequence: Synthetic peptide
  REGION 1..9: note = XENP019655 vhCDR2
CNYASHRYT

SEQ ID NO: 15921 - protein, 9 aa, synthetic construct
  REGION 1..9: note = Description of Artificial Sequence: Synthetic peptide
  REGION 1..9: note = XENP019655 vhCDR3
QQDFSSPRT

SEQ ID NO: 15922 - protein, 5 aa, synthetic construct
  REGION 1..5: note = Description of Artificial Sequence: Synthetic peptide
  REGION 1..5: note = XENP019655 vlCDR1
NYWMN

SEQ ID NO: 15923 - protein, 19 aa, synthetic construct
  REGION 1..19: note = Description of Artificial Sequence: Synthetic peptide
  REGION 1..19: note = XENP019655 vlCDR2
EIRLYSNNYATHYAESVKG

SEQ ID NO: 15924 - protein, 11 aa, synthetic construct
  REGION 1..11: note = Description of Artificial Sequence: Synthetic peptide
  REGION 1..11: note = XENP019655 vlCDR3
YYGNYGGYFDV

SEQ ID NO: 15925 - protein, 249 aa, synthetic construct
  REGION 1..249: note = Description of Artificial Sequence: Synthetic polypeptide
  REGION 1..249: note = XENP019656 1G6_H1.278_L1.189_scFv_linkerV1
EVQLVESGGGLVKPGGSLRLSCVASGFTFSNYWMNWVRQAPGKGLEWVAEIRLYSNNYATHYAESVKGRFTISRDDSKSTLYLQMNNLKTEDTGVYYCTRYYGNYGGYFDVWGQGTLVTVSSGKPGSGKPGSGKPGSGGGGSEIVLTQSPATLSVSPGERVTLTCRASQSVGNDVAWYQQKPGQAPRLLINYASHRYTGVPDRFTGSGYGTEFTLTISSVQSEDFAVYYCQQDFSSPRTFGGGTKVEIK

SEQ ID NO: 15926 - protein, 122 aa, synthetic construct; identical to SEQ ID NO: 15521
  REGION 1..122: note = Description of Artificial Sequence: Synthetic polypeptide
  REGION 1..122: note = VH of XENP019656

SEQ ID NO: 15927 - protein, 107 aa, synthetic construct; identical to SEQ ID NO: 15540
  REGION 1..107: note = Description of Artificial Sequence: Synthetic polypeptide
  REGION 1..107: note = VL of XENP019656

SEQ ID NO: 15928 - protein, 5 aa, synthetic construct
  REGION 1..5: note = Description of Artificial Sequence: Synthetic peptide
  REGION 1..5: note = XENP019656 vhCDR1
NYWMN

SEQ ID NO: 15929 - protein, 19 aa, synthetic construct
  REGION 1..19: note = Description of Artificial Sequence: Synthetic peptide
  REGION 1..19: note = XENP019656 vhCDR2
EIRLYSNNYATHYAESVKG

SEQ ID NO: 15930 - protein, 11 aa, synthetic construct
  REGION 1..11: note = Description of Artificial Sequence: Synthetic peptide
  REGION 1..11: note = XENP019656 vhCDR3
YYGNYGGYFDV

SEQ ID NO: 15931 - protein, 11 aa, synthetic construct
  REGION 1..11: note = Description of Artificial Sequence: Synthetic peptide
  REGION 1..11: note = XENP019656 vlCDR1
RASQSVGNDVA

SEQ ID NO: 15932 - protein, 7 aa, synthetic construct
  REGION 1..7: note = Description of Artificial Sequence: Synthetic peptide
  REGION 1..7: note = XENP019656 vlCDR2
YASHRYT

SEQ ID NO: 15933 - protein, 9 aa, synthetic construct
  REGION 1..9: note = Description of Artificial Sequence: Synthetic peptide
  REGION 1..9: note = XENP019656 vlCDR3
QQDFSSPRT

SEQ ID NO: 15934 - protein, 247 aa, synthetic construct
  REGION 1..247: note = Description of Artificial Sequence: Synthetic polypeptide
  REGION 1..247: note = XENP019657 1G6_H1.278_L1.189_scFv_linkerV2
EVQLVESGGGLVKPGGSLRLSCVASGFTFSNYWMNWVRQAPGKGLEWVAEIRLYSNNYATHYAESVKGRFTISRDDSKSTLYLQMNNLKTEDTGVYYCTRYYGNYGGYFDVWGQGTLVTVSSGKPGSGKPGSGKPGSGKPEIVLTQSPATLSVSPGERVTLTCRASQSVGNDVAWYQQKPGQAPRLLINYASHRYTGVPDRFTGSGYGTEFTLTISSVQSEDFAVYYCQQDFSSPRTFGGGTKVEIK

SEQ ID NO: 15935 - protein, 122 aa, synthetic construct; identical to SEQ ID NO: 15521
  REGION 1..122: note = Description of Artificial Sequence: Synthetic polypeptide
  REGION 1..122: note = VH of XENP019657

SEQ ID NO: 15936 - protein, 107 aa, synthetic construct; identical to SEQ ID NO: 15540
  REGION 1..107: note = Description of Artificial Sequence: Synthetic polypeptide
  REGION 1..107: note = VL of XENP019657

SEQ ID NO: 15937 - protein, 5 aa, synthetic construct
  REGION 1..5: note = Description of Artificial Sequence: Synthetic peptide
  REGION 1..5: note = XENP019657 vhCDR1
NYWMN

SEQ ID NO: 15938 - protein, 19 aa, synthetic construct
  REGION 1..19: note = Description of Artificial Sequence: Synthetic peptide
  REGION 1..19: note = XENP019657 vhCDR2
EIRLYSNNYATHYAESVKG

SEQ ID NO: 15939 - protein, 11 aa, synthetic construct
  REGION 1..11: note = Description of Artificial Sequence: Synthetic peptide
  REGION 1..11: note = XENP019657 vhCDR3
YYGNYGGYFDV

SEQ ID NO: 15940 - protein, 11 aa, synthetic construct
  REGION 1..11: note = Description of Artificial Sequence: Synthetic peptide
  REGION 1..11: note = XENP019657 vlCDR1
RASQSVGNDVA

SEQ ID NO: 15941 - protein, 7 aa, synthetic construct
  REGION 1..7: note = Description of Artificial Sequence: Synthetic peptide
  REGION 1..7: note = XENP019657 vlCDR2
YASHRYT

SEQ ID NO: 15942 - protein, 9 aa, synthetic construct
  REGION 1..9: note = Description of Artificial Sequence: Synthetic peptide
  REGION 1..9: note = XENP019657 vlCDR3
QQDFSSPRT

SEQ ID NO: 15943 - protein, 244 aa, synthetic construct
  REGION 1..244: note = Description of Artificial Sequence: Synthetic polypeptide
  REGION 1..244: note = XENP019658 1G6_H1.278_L1.189_scFv_linkerV3
EVQLVESGGGLVKPGGSLRLSCVASGFTFSNYWMNWVRQAPGKGLEWVAEIRLYSNNYATHYAESVKGRFTISRDDSKSTLYLQMNNLKTEDTGVYYCTRYYGNYGGYFDVWGQGTLVTVSSGKPGSGKPGSGKPGSEIVLTQSPATLSVSPGERVTLTCRASQSVGNDVAWYQQKPGQAPRLLINYASHRYTGVPDRFTGSGYGTEFTLTISSVQSEDFAVYYCQQDFSSPRTFGGGTKVEIK

SEQ ID NO: 15944 - protein, 122 aa, synthetic construct; identical to SEQ ID NO: 15521
  REGION 1..122: note = Description of Artificial Sequence: Synthetic polypeptide
  REGION 1..122: note = VH of XENP019658

SEQ ID NO: 15945 - protein, 107 aa, synthetic construct; identical to SEQ ID NO: 15540
  REGION 1..107: note = Description of Artificial Sequence: Synthetic polypeptide
  REGION 1..107: note = VL of XENP019658

SEQ ID NO: 15946 - protein, 5 aa, synthetic construct
  REGION 1..5: note = Description of Artificial Sequence: Synthetic peptide
  REGION 1..5: note = XENP019658 vhCDR1
NYWMN

SEQ ID NO: 15947 - protein, 19 aa, synthetic construct
  REGION 1..19: note = Description of Artificial Sequence: Synthetic peptide
  REGION 1..19: note = XENP019658 vhCDR2
EIRLYSNNYATHYAESVKG

SEQ ID NO: 15948 - protein, 11 aa, synthetic construct
  REGION 1..11: note = Description of Artificial Sequence: Synthetic peptide
  REGION 1..11: note = XENP019658 vhCDR3
YYGNYGGYFDV

SEQ ID NO: 15949 - protein, 11 aa, synthetic construct
  REGION 1..11: note = Description of Artificial Sequence: Synthetic peptide
  REGION 1..11: note = XENP019658 vlCDR1
RASQSVGNDVA

SEQ ID NO: 15950 - protein, 7 aa, synthetic construct
  REGION 1..7: note = Description of Artificial Sequence: Synthetic peptide
  REGION 1..7: note = XENP019658 vlCDR2
YASHRYT

SEQ ID NO: 15951 - protein, 9 aa, synthetic construct
  REGION 1..9: note = Description of Artificial Sequence: Synthetic peptide
  REGION 1..9: note = XENP019658 vlCDR3
QQDFSSPRT

SEQ ID NO: 15952 - protein, 251 aa, synthetic construct
  REGION 1..251: note = Description of Artificial Sequence: Synthetic polypeptide
  REGION 1..251: note = XENP019659 1G6_H1.278_L1.189_scFv_linkerV4
EVQLVESGGGLVKPGGSLRLSCVASGFTFSNYWMNWVRQAPGKGLEWVAEIRLYSNNYATHYAESVKGRFTISRDDSKSTLYLQMNNLKTEDTGVYYCTRYYGNYGGYFDVWGQGTLVTVSSGKPGSGKPGSGKPGSGKPGSGSEIVLTQSPATLSVSPGERVTLTCRASQSVGNDVAWYQQKPGQAPRLLINYASHRYTGVPDRFTGSGYGTEFTLTISSVQSEDFAVYYCQQDFSSPRTFGGGTKVEIK

SEQ ID NO: 15953 - protein, 122 aa, synthetic construct; identical to SEQ ID NO: 15521
  REGION 1..122: note = Description of Artificial Sequence: Synthetic polypeptide
  REGION 1..122: note = VH of XENP019659

SEQ ID NO: 15954 - protein, 107 aa, synthetic construct; identical to SEQ ID NO: 15540
  REGION 1..107: note = Description of Artificial Sequence: Synthetic polypeptide
  REGION 1..107: note = VL of XENP019659

SEQ ID NO: 15955 - protein, 5 aa, synthetic construct
  REGION 1..5: note = Description of Artificial Sequence: Synthetic peptide
  REGION 1..5: note = XENP019659 vhCDR1
NYWMN

SEQ ID NO: 15956 - protein, 19 aa, synthetic construct
  REGION 1..19: note = Description of Artificial Sequence: Synthetic peptide
  REGION 1..19: note = XENP019659 vhCDR2
EIRLYSNNYATHYAESVKG

SEQ ID NO: 15957 - protein, 11 aa, synthetic construct
  REGION 1..11: note = Description of Artificial Sequence: Synthetic peptide
  REGION 1..11: note = XENP019659 vhCDR3
YYGNYGGYFDV

SEQ ID NO: 15958 - protein, 11 aa, synthetic construct
  REGION 1..11: note = Description of Artificial Sequence: Synthetic peptide
  REGION 1..11: note = XENP019659 vlCDR1
RASQSVGNDVA

SEQ ID NO: 15959 - protein, 7 aa, synthetic construct
  REGION 1..7: note = Description of Artificial Sequence: Synthetic peptide
  REGION 1..7: note = XENP019659 vlCDR2
YASHRYT

SEQ ID NO: 15960 - protein, 9 aa, synthetic construct
  REGION 1..9: note = Description of Artificial Sequence: Synthetic peptide
  REGION 1..9: note = XENP019659 vlCDR3
QQDFSSPRT

SEQ ID NO: 15961 - protein, 252 aa, synthetic construct
  REGION 1..252: note = Description of Artificial Sequence: Synthetic polypeptide
  REGION 1..252: note = XENP019660 1G6_H1.278_L1.189_scFv_linkerV5
EVQLVESGGGLVKPGGSLRLSCVASGFTFSNYWMNWVRQAPGKGLEWVAEIRLYSNNYATHYAESVKGRFTISRDDSKSTLYLQMNNLKTEDTGVYYCTRYYGNYGGYFDVWGQGTLVTVSSGKPGSGKPGSGKPGSGKPGSGGSEIVLTQSPATLSVSPGERVTLTCRASQSVGNDVAWYQQKPGQAPRLLINYASHRYTGVPDRFTGSGYGTEFTLTISSVQSEDFAVYYCQQDFSSPRTFGGGTKVEIK

SEQ ID NO: 15962 - protein, 122 aa, synthetic construct; identical to SEQ ID NO: 15521
  REGION 1..122: note = Description of Artificial Sequence: Synthetic polypeptide
  REGION 1..122: note = VH of XENP019660

SEQ ID NO: 15963 - protein, 108 aa, synthetic construct
  REGION 1..108: note = Description of Artificial Sequence: Synthetic polypeptide
  REGION 1..108: note = VL of XENP019660
SEIVLTQSPATLSVSPGERVTLTCRASQSVGNDVAWYQQKPGQAPRLLINYASHRYTGVPDRFTGSGYGTEFTLTISSVQSEDFAVYYCQQDFSSPRTFGGGTKVEIK

SEQ ID NO: 15964 - protein, 5 aa, synthetic construct
  REGION 1..5: note = Description of Artificial Sequence: Synthetic peptide
  REGION 1..5: note = XENP019660 vhCDR1
NYWMN

SEQ ID NO: 15965 - protein, 19 aa, synthetic construct
  REGION 1..19: note = Description of Artificial Sequence: Synthetic peptide
  REGION 1..19: note = XENP019660 vhCDR2
EIRLYSNNYATHYAESVKG

SEQ ID NO: 15966 - protein, 11 aa, synthetic construct
  REGION 1..11: note = Description of Artificial Sequence: Synthetic peptide
  REGION 1..11: note = XENP019660 vhCDR3
YYGNYGGYFDV

SEQ ID NO: 15967 - protein, 11 aa, synthetic construct
  REGION 1..11: note = Description of Artificial Sequence: Synthetic peptide
  REGION 1..11: note = XENP019660 vlCDR1
RASQSVGNDVA

SEQ ID NO: 15968 - protein, 7 aa, synthetic construct
  REGION 1..7: note = Description of Artificial Sequence: Synthetic peptide
  REGION 1..7: note = XENP019660 vlCDR2
YASHRYT

SEQ ID NO: 15969 - protein, 9 aa, synthetic construct
  REGION 1..9: note = Description of Artificial Sequence: Synthetic peptide
  REGION 1..9: note = XENP019660 vlCDR3
QQDFSSPRT

SEQ ID NO: 15970 - protein, 253 aa, synthetic construct
  REGION 1..253: note = Description of Artificial Sequence: Synthetic polypeptide
  REGION 1..253: note = XENP019661 1G6_H1.278_L1.189_scFv_linkerV6
EVQLVESGGGLVKPGGSLRLSCVASGFTFSNYWMNWVRQAPGKGLEWVAEIRLYSNNYATHYAESVKGRFTISRDDSKSTLYLQMNNLKTEDTGVYYCTRYYGNYGGYFDVWGQGTLVTVSSGKPGSGKPGSGKPGSGKPGSGGGSEIVLTQSPATLSVSPGERVTLTCRASQSVGNDVAWYQQKPGQAPRLLINYASHRYTGVPDRFTGSGYGTEFTLTISSVQSEDFAVYYCQQDFSSPRTFGGGTKVEIK

SEQ ID NO: 15971 - protein, 122 aa, synthetic construct; identical to SEQ ID NO: 15521
  REGION 1..122: note = Description of Artificial Sequence: Synthetic polypeptide
  REGION 1..122: note = VH of XENP019661

SEQ ID NO: 15972 - protein, 107 aa, synthetic construct; identical to SEQ ID NO: 15540
  REGION 1..107: note = Description of Artificial Sequence: Synthetic polypeptide
  REGION 1..107: note = VL of XENP019661

SEQ ID NO: 15973 - protein, 5 aa, synthetic construct
  REGION 1..5: note = Description of Artificial Sequence: Synthetic peptide
  REGION 1..5: note = XENP019661 vhCDR1
NYWMN

SEQ ID NO: 15974 - protein, 19 aa, synthetic construct
  REGION 1..19: note = Description of Artificial Sequence: Synthetic peptide
  REGION 1..19: note = XENP019661 vhCDR2
EIRLYSNNYATHYAESVKG

SEQ ID NO: 15975 - protein, 11 aa, synthetic construct
  REGION 1..11: note = Description of Artificial Sequence: Synthetic peptide
  REGION 1..11: note = XENP019661 vhCDR3
YYGNYGGYFDV

SEQ ID NO: 15976 - protein, 11 aa, synthetic construct
  REGION 1..11: note = Description of Artificial Sequence: Synthetic peptide
  REGION 1..11: note = XENP019661 vlCDR1
RASQSVGNDVA

SEQ ID NO: 15977 - protein, 7 aa, synthetic construct
  REGION 1..7: note = Description of Artificial Sequence: Synthetic peptide
  REGION 1..7: note = XENP019661 vlCDR2
YASHRYT

SEQ ID NO: 15978 - protein, 9 aa, synthetic construct
  REGION 1..9: note = Description of Artificial Sequence: Synthetic peptide
  REGION 1..9: note = XENP019661 vlCDR3
QQDFSSPRT

SEQ ID NO: 15979 - protein, 254 aa, synthetic construct
  REGION 1..254: note = Description of Artificial Sequence: Synthetic polypeptide
  REGION 1..254: note = XENP019662 1G6_H1.278_L1.189_scFv_linkerV7
EVQLVESGGGLVKPGGSLRLSCVASGFTFSNYWMNWVRQAPGKGLEWVAEIRLYSNNYATHYAESVKGRFTISRDDSKSTLYLQMNNLKTEDTGVYYCTRYYGNYGGYFDVWGQGTLVTVSSGKPGSGKPGSGKPGSGKPGSGGGGSEIVLTQSPATLSVSPGERVTLTCRASQSVGNDVAWYQQKPGQAPRLLINYASHRYTGVPDRFTGSGYGTEFTLTISSVQSEDFAVYYCQQDFSSPRTFGGGTKVEIK

SEQ ID NO: 15980 - protein, 122 aa, synthetic construct; identical to SEQ ID NO: 15521
  REGION 1..122: note = Description of Artificial Sequence: Synthetic polypeptide
  REGION 1..122: note = VH of XENP019662

SEQ ID NO: 15981 - protein, 107 aa, synthetic construct; identical to SEQ ID NO: 15540
  REGION 1..107: note = Description of Artificial Sequence: Synthetic polypeptide
  REGION 1..107: note = VL of XENP019662

SEQ ID NO: 15982 - protein, 5 aa, synthetic construct
  REGION 1..5: note = Description of Artificial Sequence: Synthetic peptide
  REGION 1..5: note = XENP019662 vhCDR1
NYWMN

SEQ ID NO: 15983 - protein, 19 aa, synthetic construct
  REGION 1..19: note = Description of Artificial Sequence: Synthetic peptide
  REGION 1..19: note = XENP019662 vhCDR2
EIRLYSNNYATHYAESVKG

SEQ ID NO: 15984 - protein, 11 aa, synthetic construct
  REGION 1..11: note = Description of Artificial Sequence: Synthetic peptide
  REGION 1..11: note = XENP019662 vhCDR3
YYGNYGGYFDV

SEQ ID NO: 15985 - protein, 11 aa, synthetic construct
  REGION 1..11: note = Description of Artificial Sequence: Synthetic peptide
  REGION 1..11: note = XENP019662 vlCDR1
RASQSVGNDVA

SEQ ID NO: 15986 - protein, 7 aa, synthetic construct
  REGION 1..7: note = Description of Artificial Sequence: Synthetic peptide
  REGION 1..7: note = XENP019662 vlCDR2
YASHRYT

SEQ ID NO: 15987 - protein, 9 aa, synthetic construct
  REGION 1..9: note = Description of Artificial Sequence: Synthetic peptide
  REGION 1..9: note = XENP019662 vlCDR3
QQDFSSPRT

SEQ ID NO: 15988 - protein, 242 aa, synthetic construct
  REGION 1..242: note = Description of Artificial Sequence: Synthetic polypeptide
  REGION 1..242: note = XENP019663 1G6_H1.278_L1.189_scFv_linkerV8
EVQLVESGGGLVKPGGSLRLSCVASGFTFSNYWMNWVRQAPGKGLEWVAEIRLYSNNYATHYAESVKGRFTISRDDSKSTLYLQMNNLKTEDTGVYYCTRYYGNYGGYFDVWGQGTLVTVSSGKPGSGKPGSGKPEIVLTQSPATLSVSPGERVTLTCRASQSVGNDVAWYQQKPGQAPRLLINYASHRYTGVPDRFTGSGYGTEFTLTISSVQSEDFAVYYCQQDFSSPRTFGGGTKVEIK

SEQ ID NO: 15989 - protein, 122 aa, synthetic construct; identical to SEQ ID NO: 15521
  REGION 1..122: note = Description of Artificial Sequence: Synthetic polypeptide
  REGION 1..122: note = VH of XENP019663

SEQ ID NO: 15990 - protein, 107 aa, synthetic construct; identical to SEQ ID NO: 15540
  REGION 1..107: note = Description of Artificial Sequence: Synthetic polypeptide
  REGION 1..107: note = VL of XENP019663

SEQ ID NO: 15991 - protein, 5 aa, synthetic construct
  REGION 1..5: note = Description of Artificial Sequence: Synthetic peptide
  REGION 1..5: note = XENP019663 vhCDR1
NYWMN

SEQ ID NO: 15992 - protein, 19 aa, synthetic construct
  REGION 1..19: note = Description of Artificial Sequence: Synthetic peptide
  REGION 1..19: note = XENP019663 vhCDR2
EIRLYSNNYATHYAESVKG

SEQ ID NO: 15993 - protein, 11 aa, synthetic construct
  REGION 1..11: note = Description of Artificial Sequence: Synthetic peptide
  REGION 1..11: note = XENP019663 vhCDR3
YYGNYGGYFDV

SEQ ID NO: 15994 - protein, 11 aa, synthetic construct
  REGION 1..11: note = Description of Artificial Sequence: Synthetic peptide
  REGION 1..11: note = XENP019663 vlCDR1
RASQSVGNDVA

SEQ ID NO: 15995 - protein, 7 aa, synthetic construct
  REGION 1..7: note = Description of Artificial Sequence: Synthetic peptide
  REGION 1..7: note = XENP019663 vlCDR2
YASHRYT

SEQ ID NO: 15996 - protein, 9 aa, synthetic construct
  REGION 1..9: note = Description of Artificial Sequence: Synthetic peptide
  REGION 1..9: note = XENP019663 vlCDR3
QQDFSSPRT

SEQ ID NO: 15997 - protein, 249 aa, synthetic construct
  REGION 1..249: note = Description of Artificial Sequence: Synthetic polypeptide
  REGION 1..249: note = XENP019664 1G6_H1.287_L1.209_scFv(GKPGS)4
EVQLVESGGGLVKPGGSLRLSCVASGFTFSNYWMNWVRQAPGKCLEWVAEIRLYSNNYATHYAESVKGRFTISRDDSKSTLYLQMNNLKTEDTGVYYCTRYYGNYGGYFDVWGQGTLVTVSSGKPGSGKPGSGKPGSGKPGSEIVLTQSPATLSVSPGERVTLTCRASQSVGNDVAWYQQKPGQAPRLLINYASHRYTGVPDRFTGSGYGTEFTLTISSVQSEDFAVYYCQQDFSSPRTFGCGTKVEIK

SEQ ID NO: 15998 - protein, 122 aa, synthetic construct
  REGION 1..122: note = Description of Artificial Sequence: Synthetic polypeptide
  REGION 1..122: note = VH of XENP019664
EVQLVESGGGLVKPGGSLRLSCVASGFTFSNYWMNWVRQAPGKCLEWVAEIRLYSNNYATHYAESVKGRFTISRDDSKSTLYLQMNNLKTEDTGVYYCTRYYGNYGGYFDVWGQGTLVTVSS

SEQ ID NO: 15999 - protein, 107 aa, synthetic construct
  REGION 1..107: note = Description of Artificial Sequence: Synthetic polypeptide
  REGION 1..107: note = VL of XENP019664
EIVLTQSPATLSVSPGERVTLTCRASQSVGNDVAWYQQKPGQAPRLLINYASHRYTGVPDRFTGSGYGTEFTLTISSVQSEDFAVYYCQQDFSSPRTFGCGTKVEIK

SEQ ID NO: 16000 - protein, 5 aa, synthetic construct
  REGION 1..5: note = Description of Artificial Sequence: Synthetic peptide
  REGION 1..5: note = XENP019664 vhCDR1
NYWMN

SEQ ID NO: 16001 - protein, 19 aa, synthetic construct
  REGION 1..19: note = Description of Artificial Sequence: Synthetic peptide
  REGION 1..19: note = XENP019664 vhCDR2
EIRLYSNNYATHYAESVKG

SEQ ID NO: 16002 - protein, 11 aa, synthetic construct
  REGION 1..11: note = Description of Artificial Sequence: Synthetic peptide
  REGION 1..11: note = XENP019664 vhCDR3
YYGNYGGYFDV

SEQ ID NO: 16003 - protein, 11 aa, synthetic construct
  REGION 1..11: note = Description of Artificial Sequence: Synthetic peptide
  REGION 1..11: note = XENP019664 vlCDR1
RASQSVGNDVA

SEQ ID NO: 16004 - protein, 7 aa, synthetic construct
  REGION 1..7: note = Description of Artificial Sequence: Synthetic peptide
  REGION 1..7: note = XENP019664 vlCDR2
YASHRYT

SEQ ID NO: 16005 - protein, 9 aa, synthetic construct
  REGION 1..9: note = Description of Artificial Sequence: Synthetic peptide
  REGION 1..9: note = XENP019664 vlCDR3
QQDFSSPRT

SEQ ID NO: 16006 - protein, 249 aa, synthetic construct
  REGION 1..249: note = Description of Artificial Sequence: Synthetic polypeptide
  REGION 1..249: note = XENP019665 1G6_L1.209_H1.287_scFv(GKPGS)4
EIVLTQSPATLSVSPGERVTLTCRASQSVGNDVAWYQQKPGQAPRLLINYASHRYTGVPDRFTGSGYGTEFTLTISSVQSEDFAVYYCQQDFSSPRTFGCGTKVEIKGKPGSGKPGSGKPGSGKPGSEVQLVESGGGLVKPGGSLRLSCVASGFTFSNYWMNWVRQAPGKCLEWVAEIRLYSNNYATHYAESVKGRFTISRDDSKSTLYLQMNNLKTEDTGVYYCTRYYGNYGGYFDVWGQGTLVTVSS

SEQ ID NO: 16007 - protein, 107 aa, synthetic construct; identical to SEQ ID NO: 15999
  REGION 1..107: note = Description of Artificial Sequence: Synthetic polypeptide
  REGION 1..107: note = VH of XENP019665

SEQ ID NO: 16008 - protein, 122 aa, synthetic construct; identical to SEQ ID NO: 15998
  REGION 1..122: note = Description of Artificial Sequence: Synthetic polypeptide
  REGION 1..122: note = VL of XENP019665

SEQ ID NO: 16009 - protein, 11 aa, synthetic construct
  REGION 1..11: note = Description of Artificial Sequence: Synthetic peptide
  REGION 1..11: note = XENP019665 vhCDR1
RASQSVGNDVA

SEQ ID NO: 16010 - protein, 7 aa, synthetic construct
  REGION 1..7: note = Description of Artificial Sequence: Synthetic peptide
  REGION 1..7: note = XENP019665 vhCDR2
YASHRYT

SEQ ID NO: 16011 - protein, 9 aa, synthetic construct
  REGION 1..9: note = Description of Artificial Sequence: Synthetic peptide
  REGION 1..9: note = XENP019665 vhCDR3
QQDFSSPRT

SEQ ID NO: 16012 - protein, 5 aa, synthetic construct
  REGION 1..5: note = Description of Artificial Sequence: Synthetic peptide
  REGION 1..5: note = XENP019665 vlCDR1
NYWMN

SEQ ID NO: 16013 - protein, 19 aa, synthetic construct
  REGION 1..19: note = Description of Artificial Sequence: Synthetic peptide
  REGION 1..19: note = XENP019665 vlCDR2
EIRLYSNNYATHYAESVKG

SEQ ID NO: 16014 - protein, 11 aa, synthetic construct
  REGION 1..11: note = Description of Artificial Sequence: Synthetic peptide
  REGION 1..11: note = XENP019665 vlCDR3
YYGNYGGYFDV

SEQ ID NO: 16015 - protein, 249 aa, synthetic construct
  REGION 1..249: note = Description of Artificial Sequence: Synthetic polypeptide
  REGION 1..249: note = XENP019666 1G6_H1.284_L1.194_scFv(GKPGS)4
EVQLVESGGGLVKPGGSLRLSCVASGFTFSNYWMNWVRQAPGKGLEWVCEIRLYSNNYATHYAESVKGRFTCSRDDSKSTLYLQMNNLKTEDTGVYYCTRYYGNYGGYFDVWGRGTLVTVSSGKPGSGKPGSGKPGSGKPGSEIVLTQSPATLSASPGERVTLTCRASQSVGNDVAWYQQKPGQAPRLLINYASHRYTGVPDRFTGSGYGTEFTLTISSVQSEDFGVYYCQQDFSSPRTFGGGTKVEIK

SEQ ID NO: 16016 - protein, 122 aa, synthetic construct; identical to SEQ ID NO: 15629
  REGION 1..122: note = Description of Artificial Sequence: Synthetic polypeptide
  REGION 1..122: note = VH of XENP019666

SEQ ID NO: 16017 - protein, 107 aa, synthetic construct; identical to SEQ ID NO: 2871
  REGION 1..107: note = Description of Artificial Sequence: Synthetic polypeptide
  REGION 1..107: note = VL of XENP019666

SEQ ID NO: 16018 - protein, 5 aa, synthetic construct
  REGION 1..5: note = Description of Artificial Sequence: Synthetic peptide
  REGION 1..5: note = XENP019666 vhCDR1
NYWMN

SEQ ID NO: 16019 - protein, 19 aa, synthetic construct
  REGION 1..19: note = Description of Artificial Sequence: Synthetic peptide
  REGION 1..19: note = XENP019666 vhCDR2
EIRLYSNNYATHYAESVKG

SEQ ID NO: 16020 - protein, 11 aa, synthetic construct
  REGION 1..11: note = Description of Artificial Sequence: Synthetic peptide
  REGION 1..11: note = XENP019666 vhCDR3
YYGNYGGYFDV

SEQ ID NO: 16021 - protein, 11 aa, synthetic construct
  REGION 1..11: note = Description of Artificial Sequence: Synthetic peptide
  REGION 1..11: note = XENP019666 vlCDR1
RASQSVGNDVA

SEQ ID NO: 16022 - protein, 7 aa, synthetic construct
  REGION 1..7: note = Description of Artificial Sequence: Synthetic peptide
  REGION 1..7: note = XENP019666 vlCDR2
YASHRYT

SEQ ID NO: 16023 - protein, 9 aa, synthetic construct
  REGION 1..9: note = Description of Artificial Sequence: Synthetic peptide
  REGION 1..9: note = XENP019666 vlCDR3
QQDFSSPRT

SEQ ID NO: 16024 - protein, 249 aa, synthetic construct
  REGION 1..249: note = Description of Artificial Sequence: Synthetic polypeptide
  REGION 1..249: note = XENP019667 1G6_L1.194_H1.284_scFv(GKPGS)4
EIVLTQSPATLSASPGERVTLTCRASQSVGNDVAWYQQKPGQAPRLLINYASHRYTGVPDRFTGSGYGTEFTLTISSVQSEDFGVYYCQQDFSSPRTFGGGTKVEIKGKPGSGKPGSGKPGSGKPGSEVQLVESGGGLVKPGGSLRLSCVASGFTFSNYWMNWVRQAPGKGLEWVCEIRLYSNNYATHYAESVKGRFTCSRDDSKSTLYLQMNNLKTEDTGVYYCTRYYGNYGGYFDVWGRGTLVTVSS

SEQ ID NO: 16025 - protein, 107 aa, synthetic construct; identical to SEQ ID NO: 2871
  REGION 1..107: note = Description of Artificial Sequence: Synthetic polypeptide
  REGION 1..107: note = VH of XENP019667

SEQ ID NO: 16026 - protein, 122 aa, synthetic construct; identical to SEQ ID NO: 15629
  REGION 1..122: note = Description of Artificial Sequence: Synthetic polypeptide
  REGION 1..122: note = VL of XENP019667

SEQ ID NO: 16027 - protein, 11 aa, synthetic construct
  REGION 1..11: note = Description of Artificial Sequence: Synthetic peptide
  REGION 1..11: note = XENP019667 vhCDR1
RASQSVGNDVA

SEQ ID NO: 16028 - protein, 7 aa, synthetic construct
  REGION 1..7: note = Description of Artificial Sequence: Synthetic peptide
  REGION 1..7: note = XENP019667 vhCDR2
YASHRYT

SEQ ID NO: 16029 - protein, 9 aa, synthetic construct
  REGION 1..9: note = Description of Artificial Sequence: Synthetic peptide
  REGION 1..9: note = XENP019667 vhCDR3
QQDFSSPRT

SEQ ID NO: 16030 - protein, 5 aa, synthetic construct
  REGION 1..5: note = Description of Artificial Sequence: Synthetic peptide
  REGION 1..5: note = XENP019667 vlCDR1
NYWMN

SEQ ID NO: 16031 - protein, 19 aa, synthetic construct
  REGION 1..19: note = Description of Artificial Sequence: Synthetic peptide
  REGION 1..19: note = XENP019667 vlCDR2
EIRLYSNNYATHYAESVKG

SEQ ID NO: 16032 - protein, 11 aa, synthetic construct
  REGION 1..11: note = Description of Artificial Sequence: Synthetic peptide
  REGION 1..11: note = XENP019667 vlCDR3
YYGNYGGYFDV

SEQ ID NO: 16033 - protein, 249 aa, synthetic construct
  REGION 1..249: note = Description of Artificial Sequence: Synthetic polypeptide
  REGION 1..249: note = XENP019668 1G6_H1.288_L1.210_scFv(GKPGS)4
EVQLVESGGGLVKPGGSLRLSCVASGFTFSNYWMNWVRQAPGKCLEWVAEIRLYSNNYATHYAESVKGRFTISRDDSKSTLYLQMNNLKTEDTGVYYCTRYYGNYGGYFDVWGRGTLVTVSSGKPGSGKPGSGKPGSGKPGSEIVLTQSPATLSASPGERVTLTCRASQSVGNDVAWYQQKPGQAPRLLINYASHRYTGVPDRFTGSGYGTEFTLTISSVQSEDFGVYYCQQDFSSPRTFGCGTKVEIK

SEQ ID NO: 16034 - protein, 122 aa, synthetic construct
  REGION 1..122: note = Description of Artificial Sequence: Synthetic polypeptide
  REGION 1..122: note = VH of XENP019668
EVQLVESGGGLVKPGGSLRLSCVASGFTFSNYWMNWVRQAPGKCLEWVAEIRLYSNNYATHYAESVKGRFTISRDDSKSTLYLQMNNLKTEDTGVYYCTRYYGNYGGYFDVWGRGTLVTVSS

SEQ ID NO: 16035 - protein, 107 aa, synthetic construct
  REGION 1..107: note = Description of Artificial Sequence: Synthetic polypeptide
  REGION 1..107: note = VL of XENP019668
EIVLTQSPATLSASPGERVTLTCRASQSVGNDVAWYQQKPGQAPRLLINYASHRYTGVPDRFTGSGYGTEFTLTISSVQSEDFGVYYCQQDFSSPRTFGCGTKVEIK

SEQ ID NO: 16036 - protein, 5 aa, synthetic construct
  REGION 1..5: note = Description of Artificial Sequence: Synthetic peptide
  REGION 1..5: note = XENP019668 vhCDR1
NYWMN

SEQ ID NO: 16037 - protein, 19 aa, synthetic construct
  REGION 1..19: note = Description of Artificial Sequence: Synthetic peptide
  REGION 1..19: note = XENP019668 vhCDR2
EIRLYSNNYATHYAESVKG

SEQ ID NO: 16038 - protein, 11 aa, synthetic construct
  REGION 1..11: note = Description of Artificial Sequence: Synthetic peptide
  REGION 1..11: note = XENP019668 vhCDR3
YYGNYGGYFDV

SEQ ID NO: 16039 - protein, 11 aa, synthetic construct
  REGION 1..11: note = Description of Artificial Sequence: Synthetic peptide
  REGION 1..11: note = XENP019668 vlCDR1
RASQSVGNDVA

SEQ ID NO: 16040 - protein, 7 aa, synthetic construct
  REGION 1..7: note = Description of Artificial Sequence: Synthetic peptide
  REGION 1..7: note = XENP019668 vlCDR2
YASHRYT

SEQ ID NO: 16041 - protein, 9 aa, synthetic construct
  REGION 1..9: note = Description of Artificial Sequence: Synthetic peptide
  REGION 1..9: note = XENP019668 vlCDR3
QQDFSSPRT

SEQ ID NO: 16042 - protein, 249 aa, synthetic construct
  REGION 1..249: note = Description of Artificial Sequence: Synthetic polypeptide
  REGION 1..249: note = XENP019669 1G6_L1.210_H1.288_scFv(GKPGS)4
EIVLTQSPATLSASPGERVTLTCRASQSVGNDVAWYQQKPGQAPRLLINYASHRYTGVPDRFTGSGYGTEFTLTISSVQSEDFGVYYCQQDFSSPRTFGCGTKVEIKGKPGSGKPGSGKPGSGKPGSEVQLVESGGGLVKPGGSLRLSCVASGFTFSNYWMNWVRQAPGKCLEWVAEIRLYSNNYATHYAESVKGRFTISRDDSKSTLYLQMNNLKTEDTGVYYCTRYYGNYGGYFDVWGRGTLVTVSS

SEQ ID NO: 16043 - protein, 107 aa, synthetic construct; identical to SEQ ID NO: 16035
  REGION 1..107: note = Description of Artificial Sequence: Synthetic polypeptide
  REGION 1..107: note = VH of XENP019669

SEQ ID NO: 16044 - protein, 122 aa, synthetic construct; identical to SEQ ID NO: 16034
  REGION 1..122: note = Description of Artificial Sequence: Synthetic polypeptide
  REGION 1..122: note = VL of XENP019669

SEQ ID NO: 16045 - protein, 11 aa, synthetic construct
  REGION 1..11: note = Description of Artificial Sequence: Synthetic peptide
  REGION 1..11: note = XENP019669 vhCDR1
RASQSVGNDVA

SEQ ID NO: 16046 - protein, 7 aa, synthetic construct
  REGION 1..7: note = Description of Artificial Sequence: Synthetic peptide
  REGION 1..7: note = XENP019669 vhCDR2
YASHRYT

SEQ ID NO: 16047 - protein, 9 aa, synthetic construct
  REGION 1..9: note = Description of Artificial Sequence: Synthetic peptide
  REGION 1..9: note = XENP019669 vhCDR3
QQDFSSPRT

SEQ ID NO: 16048 - protein, 5 aa, synthetic construct
  REGION 1..5: note = Description of Artificial Sequence: Synthetic peptide
  REGION 1..5: note = XENP019669 vlCDR1
NYWMN

SEQ ID NO: 16049 - protein, 19 aa, synthetic construct
  REGION 1..19: note = Description of Artificial Sequence: Synthetic peptide
  REGION 1..19: note = XENP019669 vlCDR2
EIRLYSNNYATHYAESVKG

SEQ ID NO: 16050 - protein, 11 aa, synthetic construct
  REGION 1..11: note = Description of Artificial Sequence: Synthetic peptide
  REGION 1..11: note = XENP019669 vlCDR3
YYGNYGGYFDV

SEQ ID NO: 16051 - protein, 249 aa, synthetic construct
  REGION 1..249: note = Description of Artificial Sequence: Synthetic polypeptide
  REGION 1..249: note = XENP019690 1G6_H1.279_L1.194_scFv(GKPGS)4
EVQLVESGGGLVKPGGSLRLSCVASGFTFSNYWMNWVRQAPGKGLEWVAEIRLYSNNYATHYAESVKGRFTISRDDSKSTLYLQMNNLKTEDTGVYYCTRYYGNYGGYFDVWGRGTLVTVSSGKPGSGKPGSGKPGSGKPGSEIVLTQSPATLSASPGERVTLTCRASQSVGNDVAWYQQKPGQAPRLLINYASHRYTGVPDRFTGSGYGTEFTLTISSVQSEDFGVYYCQQDFSSPRTFGGGTKVEIK

SEQ ID NO: 16052 - protein, 122 aa, synthetic construct; identical to SEQ ID NO: 2872
  REGION 1..122: note = Description of Artificial Sequence: Synthetic polypeptide
  REGION 1..122: note = VH of XENP019690

SEQ ID NO: 16053 - protein, 107 aa, synthetic construct; identical to SEQ ID NO: 2871
  REGION 1..107: note = Description of Artificial Sequence: Synthetic polypeptide
  REGION 1..107: note = VL of XENP019690

SEQ ID NO: 16054 - protein, 5 aa, synthetic construct
  REGION 1..5: note = Description of Artificial Sequence: Synthetic peptide
  REGION 1..5: note = XENP019690 vhCDR1
NYWMN

SEQ ID NO: 16055 - protein, 19 aa, synthetic construct
  REGION 1..19: note = Description of Artificial Sequence: Synthetic peptide
  REGION 1..19: note = XENP019690 vhCDR2
EIRLYSNNYATHYAESVKG

SEQ ID NO: 16056 - protein, 11 aa, synthetic construct
  REGION 1..11: note = Description of Artificial Sequence: Synthetic peptide
  REGION 1..11: note = XENP019690 vhCDR3
YYGNYGGYFDV

SEQ ID NO: 16057 - protein, 11 aa, synthetic construct
  REGION 1..11: note = Description of Artificial Sequence: Synthetic peptide
  REGION 1..11: note = XENP019690 vlCDR1
RASQSVGNDVA

SEQ ID NO: 16058 - protein, 7 aa, synthetic construct
  REGION 1..7: note = Description of Artificial Sequence: Synthetic peptide
  REGION 1..7: note = XENP019690 vlCDR2
YASHRYT

SEQ ID NO: 16059 - protein, 9 aa, synthetic construct
  REGION 1..9: note = Description of Artificial Sequence: Synthetic peptide
  REGION 1..9: note = XENP019690 vlCDR3
QQDFSSPRT

SEQ ID NO: 16060 - protein, 249 aa, synthetic construct
  REGION 1..249: note = Description of Artificial Sequence: Synthetic polypeptide
  REGION 1..249: note = XENP019691 1G6_H1.282_L1.194_scFv(GKPGS)4
EVQLVESGGGLVKPGGSLRLTCVASGFTFSNYWMNWVRQAPGKGLEWVAEIRLYSNNYATHYAESVKGRFTISRDDSKSMLYLQMNNLKTEDTGVYYCTRYYGNYGGYFDVWGRGTLVTVSSGKPGSGKPGSGKPGSGKPGSEIVLTQSPATLSASPGERVTLTCRASQSVGNDVAWYQQKPGQAPRLLINYASHRYTGVPDRFTGSGYGTEFTLTISSVQSEDFGVYYCQQDFSSPRTFGGGTKVEIK

SEQ ID NO: 16061 - protein, 122 aa, synthetic construct; identical to SEQ ID NO: 15611
  REGION 1..122: note = Description of Artificial Sequence: Synthetic polypeptide
  REGION 1..122: note = VH of XENP019691

SEQ ID NO: 16062 - protein, 107 aa, synthetic construct; identical to SEQ ID NO: 2871
  REGION 1..107: note = Description of Artificial Sequence: Synthetic polypeptide
  REGION 1..107: note = VL of XENP019691

SEQ ID NO: 16063 - protein, 5 aa, synthetic construct
  REGION 1..5: note = Description of Artificial Sequence: Synthetic peptide
  REGION 1..5: note = XENP019691 vhCDR1
NYWMN

SEQ ID NO: 16064 - protein, 19 aa, synthetic construct
  REGION 1..19: note = Description of Artificial Sequence: Synthetic peptide
  REGION 1..19: note = XENP019691 vhCDR2
EIRLYSNNYATHYAESVKG

SEQ ID NO: 16065 - protein, 11 aa, synthetic construct
  REGION 1..11: note = Description of Artificial Sequence: Synthetic peptide
  REGION 1..11: note = XENP019691 vhCDR3
YYGNYGGYFDV

SEQ ID NO: 16066 - protein, 11 aa, synthetic construct
  REGION 1..11: note = Description of Artificial Sequence: Synthetic peptide
  REGION 1..11: note = XENP019691 vlCDR1
RASQSVGNDVA

SEQ ID NO: 16067 - protein, 7 aa, synthetic construct
  REGION 1..7: note = Description of Artificial Sequence: Synthetic peptide
  REGION 1..7: note = XENP019691 vlCDR2
YASHRYT

SEQ ID NO: 16068 - protein, 9 aa, synthetic construct
  REGION 1..9: note = Description of Artificial Sequence: Synthetic peptide
  REGION 1..9: note = XENP019691 vlCDR3
QQDFSSPRT

SEQ ID NO: 16069 - protein, 249 aa, synthetic construct
  REGION 1..249: note = Description of Artificial Sequence: Synthetic polypeptide
  REGION 1..249: note = XENP019692 1G6_L1.194_H1.279_scFv(GKPGS)4
EIVLTQSPATLSASPGERVTLTCRASQSVGNDVAWYQQKPGQAPRLLINYASHRYTGVPDRFTGSGYGTEFTLTISSVQSEDFGVYYCQQDFSSPRTFGGGTKVEIKGKPGSGKPGSGKPGSGKPGSEVQLVESGGGLVKPGGSLRLSCVASGFTFSNYWMNWVRQAPGKGLEWVAEIRLYSNNYATHYAESVKGRFTISRDDSKSTLYLQMNNLKTEDTGVYYCTRYYGNYGGYFDVWGRGTLVTVSS

SEQ ID NO: 16070 - protein, 107 aa, synthetic construct; identical to SEQ ID NO: 2871
  REGION 1..107: note = Description of Artificial Sequence: Synthetic polypeptide
  REGION 1..107: note = VH of XENP019692

SEQ ID NO: 16071 - protein, 122 aa, synthetic construct; identical to SEQ ID NO: 2872
  REGION 1..122: note = Description of Artificial Sequence: Synthetic polypeptide
  REGION 1..122: note = VL of XENP019692

SEQ ID NO: 16072 - protein, 11 aa, synthetic construct
  REGION 1..11: note = Description of Artificial Sequence: Synthetic peptide
  REGION 1..11: note = XENP019692 vhCDR1
RASQSVGNDVA

SEQ ID NO: 16073 - protein, 7 aa, synthetic construct
  REGION 1..7: note = Description of Artificial Sequence: Synthetic peptide
  REGION 1..7: note = XENP019692 vhCDR2
YASHRYT

SEQ ID NO: 16074 - protein, 9 aa, synthetic construct
  REGION 1..9: note = Description of Artificial Sequence: Synthetic peptide
  REGION 1..9: note = XENP019692 vhCDR3
QQDFSSPRT

SEQ ID NO: 16075 - protein, 5 aa, synthetic construct
  REGION 1..5: note = Description of Artificial Sequence: Synthetic peptide
  REGION 1..5: note = XENP019692 vlCDR1
NYWMN

SEQ ID NO: 16076 - protein, 19 aa, synthetic construct
  REGION 1..19: note = Description of Artificial Sequence: Synthetic peptide
  REGION 1..19: note = XENP019692 vlCDR2
EIRLYSNNYATHYAESVKG

SEQ ID NO: 16077 - protein, 11 aa, synthetic construct
  REGION 1..11: note = Description of Artificial Sequence: Synthetic peptide
  REGION 1..11: note = XENP019692 vlCDR3
YYGNYGGYFDV

SEQ ID NO: 16078 - protein, 249 aa, synthetic construct
  REGION 1..249: note = Description of Artificial Sequence: Synthetic polypeptide
  REGION 1..249: note = XENP019693 1G6_L1.194_H1.282_scFv(GKPGS)4
EIVLTQSPATLSASPGERVTLTCRASQSVGNDVAWYQQKPGQAPRLLINYASHRYTGVPDRFTGSGYGTEFTLTISSVQSEDFGVYYCQQDFSSPRTFGGGTKVEIKGKPGSGKPGSGKPGSGKPGSEVQLVESGGGLVKPGGSLRLTCVASGFTFSNYWMNWVRQAPGKGLEWVAEIRLYSNNYATHYAESVKGRFTISRDDSKSMLYLQMNNLKTEDTGVYYCTRYYGNYGGYFDVWGRGTLVTVSS

SEQ ID NO: 16079 - protein, 107 aa, synthetic construct; identical to SEQ ID NO: 2871
  REGION 1..107: note = Description of Artificial Sequence: Synthetic polypeptide
  REGION 1..107: note = VH of XENP019693

SEQ ID NO: 16080 - protein, 122 aa, synthetic construct; identical to SEQ ID NO: 15611
  REGION 1..122: note = Description of Artificial Sequence: Synthetic polypeptide
  REGION 1..122: note = VL of XENP019693

SEQ ID NO: 16081 - protein, 11 aa, synthetic construct
  REGION 1..11: note = Description of Artificial Sequence: Synthetic peptide
  REGION 1..11: note = XENP019693 vhCDR1
RASQSVGNDVA

SEQ ID NO: 16082 - protein, 7 aa, synthetic construct
  REGION 1..7: note = Description of Artificial Sequence: Synthetic peptide
  REGION 1..7: note = XENP019693 vhCDR2
YASHRYT

SEQ ID NO: 16083 - protein, 9 aa, synthetic construct
  REGION 1..9: note = Description of Artificial Sequence: Synthetic peptide
  REGION 1..9: note = XENP019693 vhCDR3
QQDFSSPRT

SEQ ID NO: 16084 - protein, 5 aa, synthetic construct
  REGION 1..5: note = Description of Artificial Sequence: Synthetic peptide
  REGION 1..5: note = XENP019693 vlCDR1
NYWMN

SEQ ID NO: 16085 - protein, 19 aa, synthetic construct
  REGION 1..19: note = Description of Artificial Sequence: Synthetic peptide
  REGION 1..19: note = XENP019693 vlCDR2
EIRLYSNNYATHYAESVKG

SEQ ID NO: 16086 - protein, 11 aa, synthetic construct
  REGION 1..11: note = Description of Artificial Sequence: Synthetic peptide
  REGION 1..11: note = XENP019693 vlCDR3
YYGNYGGYFDV

SEQ ID NO: 16087 - protein, 247 aa, synthetic construct
  REGION 1..247: note = Description of Artificial Sequence: Synthetic polypeptide
  REGION 1..247: note = XENP020162 2E9_H1L1_scFv(GKPGS)4
QVQLVQSGAEVKKPGASVKVSCKASGYAFTNYWLGWVRQAPGQGLEWMGNFYPGSSNTYYNEKFQGRVTMTADKSISTAYMELSRLRSDDTAVYFCARHYGTNYRYFDVWGAGTLVTVSSGKPGSGKPGSGKPGSGKPGSDIVLTQSPGTLSLSPGERATLSCRASQSVSNDVAWYQQKPGQSPRLLIYYASNRYTGVPDRFTGSGYGTDFTLTISRLEPEDFAVYFCQQDYSSPYTFGGGTKVEIK

SEQ ID NO: 16088 - protein, 120 aa, synthetic construct; identical to SEQ ID NO: 3091
  REGION 1..120: note = Description of Artificial Sequence: Synthetic polypeptide
  REGION 1..120: note = VH of XENP020162

SEQ ID NO: 16089 - protein, 107 aa, synthetic construct; identical to SEQ ID NO: 3092
  REGION 1..107: note = Description of Artificial Sequence: Synthetic polypeptide
  REGION 1..107: note = VL of XENP020162

SEQ ID NO: 16090 - protein, 5 aa, synthetic construct
  REGION 1..5: note = Description of Artificial Sequence: Synthetic peptide
  REGION 1..5: note = XENP020162 vhCDR1
NYWLG

SEQ ID NO: 16091 - protein, 17 aa, synthetic construct
  REGION 1..17: note = Description of Artificial Sequence: Synthetic peptide
  REGION 1..17: note = XENP020162 vhCDR2
NFYPGSSNTYYNEKFQG

SEQ ID NO: 16092 - protein, 11 aa, synthetic construct
  REGION 1..11: note = Description of Artificial Sequence: Synthetic peptide
  REGION 1..11: note = XENP020162 vhCDR3
HYGTNYRYFDV

SEQ ID NO: 16093 - protein, 11 aa, synthetic construct
  REGION 1..11: note = Description of Artificial Sequence: Synthetic peptide
  REGION 1..11: note = XENP020162 vlCDR1
RASQSVSNDVA

SEQ ID NO: 16094 - protein, 7 aa, synthetic construct
  REGION 1..7: note = Description of Artificial Sequence: Synthetic peptide
  REGION 1..7: note = XENP020162 vlCDR2
YASNRYT

SEQ ID NO: 16095 - protein, 9 aa, synthetic construct
  REGION 1..9: note = Description of Artificial Sequence: Synthetic peptide
  REGION 1..9: note = XENP020162 vlCDR3
QQDYSSPYT

SEQ ID NO: 16096 - protein, 247 aa, synthetic construct
  REGION 1..247: note = Description of Artificial Sequence: Synthetic polypeptide
  REGION 1..247: note = XENP020163 2E9_H2L1_scFv(GKPGS)4
EVQLVQSGAEVKKPGESLKISCKASGYAFTNYWLGWVRQMPGKGLEWMGNFYPGSSNTYYNPSFQGQVTISADKSISTAYLQWSSLKASDTAMYFCARHYGTNYRYFDVWGAGTLVTVSSGKPGSGKPGSGKPGSGKPGSDIVLTQSPGTLSLSPGERATLSCRASQSVSNDVAWYQQKPGQSPRLLIYYASNRYTGVPDRFTGSGYGTDFTLTISRLEPEDFAVYFCQQDYSSPYTFGGGTKVEIK

SEQ ID NO: 16097 - protein, 120 aa, synthetic construct
  REGION 1..120: note = Description of Artificial Sequence: Synthetic polypeptide
  REGION 1..120: note = VH of XENP020163
EVQLVQSGAEVKKPGESLKISCKASGYAFTNYWLGWVRQMPGKGLEWMGNFYPGSSNTYYNPSFQGQVTISADKSISTAYLQWSSLKASDTAMYFCARHYGTNYRYFDVWGAGTLVTVSS

SEQ ID NO: 16098 - protein, 107 aa, synthetic construct; identical to SEQ ID NO: 3092
  REGION 1..107: note = Description of Artificial Sequence: Synthetic polypeptide
  REGION 1..107: note = VL of XENP020163

SEQ ID NO: 16099 - protein, 5 aa, synthetic construct
  REGION 1..5: note = Description of Artificial Sequence: Synthetic peptide
  REGION 1..5: note = XENP020163 vhCDR1
NYWLG

SEQ ID NO: 16100 - protein, 17 aa, synthetic construct
  REGION 1..17: note = Description of Artificial Sequence: Synthetic peptide
  REGION 1..17: note = XENP020163 vhCDR2
NFYPGSSNTYYNPSFQG

SEQ ID NO: 16101 - protein, 11 aa, synthetic construct
  REGION 1..11: note = Description of Artificial Sequence: Synthetic peptide
  REGION 1..11: note = XENP020163 vhCDR3
HYGTNYRYFDV

SEQ ID NO: 16102 - protein, 11 aa, synthetic construct
  REGION 1..11: note = Description of Artificial Sequence: Synthetic peptide
  REGION 1..11: note = XENP020163 vlCDR1
RASQSVSNDVA

SEQ ID NO: 16103 - protein, 7 aa, synthetic construct
  REGION 1..7: note = Description of Artificial Sequence: Synthetic peptide
  REGION 1..7: note = XENP020163 vlCDR2
YASNRYT

SEQ ID NO: 16104 - protein, 9 aa, synthetic construct
  REGION 1..9: note = Description of Artificial Sequence: Synthetic peptide
  REGION 1..9: note = XENP020163 vlCDR3
QQDYSSPYT

SEQ ID NO: 16105 - protein, 242 aa, synthetic construct
  REGION 1..242: note = Description of Artificial Sequence: Synthetic polypeptide
  REGION 1..242: note = XENP020164 3C11(PD-1)_H1L1_scFv(GKPGS)4
QVQLVQSGAEVKKPGASVKVSCKASGYTFTSYWMHWVRQAPGQGLEWMGAIYPGNIATSYNQKFQGRVTMTADTSTSTAYMELSSLRSEDTAVYYCTTSYVMDYWGQGTLVTVSSGKPGSGKPGSGKPGSGKPGSDIVMTQSPSSLSASVGDRVTITCQASQDINSYLSWFQQKPGKSPKTLIYRANRLVDGVPSRFSGSGSGQDYTFTISSLQPEDIATYYCLQYDEFPYTFGGGTKVEIK

SEQ ID NO: 16106 - protein, 115 aa, synthetic construct
  REGION 1..115: note = Description of Artificial Sequence: Synthetic polypeptide
  REGION 1..115: note = VH of XENP020164
QVQLVQSGAEVKKPGASVKVSCKASGYTFTSYWMHWVRQAPGQGLEWMGAIYPGNIATSYNQKFQGRVTMTADTSTSTAYMELSSLRSEDTAVYYCTTSYVMDYWGQGTLVTVSS

SEQ ID NO: 16107 - protein, 107 aa, synthetic construct
  REGION 1..107: note = Description of Artificial Sequence: Synthetic polypeptide
  REGION 1..107: note = VL of XENP020164
DIVMTQSPSSLSASVGDRVTITCQASQDINSYLSWFQQKPGKSPKTLIYRANRLVDGVPSRFSGSGSGQDYTFTISSLQPEDIATYYCLQYDEFPYTFGGGTKVEIK

SEQ ID NO: 16108 - protein, 5 aa, synthetic construct
  REGION 1..5: note = Description of Artificial Sequence: Synthetic peptide
  REGION 1..5: note = XENP020164 vhCDR1
SYWMH

SEQ ID NO: 16109 - protein, 17 aa, synthetic construct
  REGION 1..17: note = Description of Artificial Sequence: Synthetic peptide
  REGION 1..17: note = XENP020164 vhCDR2
AIYPGNIATSYNQKFQG

SEQ ID NO: 16110 - protein, 6 aa, synthetic construct
  REGION 1..6: note = Description of Artificial Sequence: Synthetic peptide
  REGION 1..6: note = XENP020164 vhCDR3
SYVMDY

SEQ ID NO: 16111 - protein, 11 aa, synthetic construct
  REGION 1..11: note = Description of Artificial Sequence: Synthetic peptide
  REGION 1..11: note = XENP020164 vlCDR1
QASQDINSYLS

SEQ ID NO: 16112 - protein, 7 aa, synthetic construct
  REGION 1..7: note = Description of Artificial Sequence: Synthetic peptide
  REGION 1..7: note = XENP020164 vlCDR2
RANRLVD

SEQ ID NO: 16113 - protein, 9 aa, synthetic construct
  REGION 1..9: note = Description of Artificial Sequence: Synthetic peptide
  REGION 1..9: note = XENP020164 vlCDR3
LQYDEFPYT

SEQ ID NO: 16114 - protein, 239 aa, synthetic construct
  REGION 1..239: note = Description of Artificial Sequence: Synthetic polypeptide
  REGION 1..239: note = XENP020165 3G12_H1L1_scFv(GKPGS)4
QVQLVQSGAEVKKPGASVKVSCKASGYTFTSYWMHWVRQAPGQGLEWMGVIDPSDSYTSYNQKFQGRVTMTVDTSTSTAYMELSSLRSEDTAVYYCTGAYYWGQGTLVTVSSGKPGSGKPGSGKPGSGKPGSDIVLTQSPSSLSASVGDRVTITCRASQGISSNIGWLQQKPGKSFKGLIYHGTNLEDGVPSRFTGSGSGADYTLTISSLQPEDFATYYCVQYAQSPWTFGGGTKVEIK

SEQ ID NO: 16115 - protein, 112 aa, synthetic construct
  REGION 1..112: note = Description of Artificial Sequence: Synthetic polypeptide
  REGION 1..112: note = VH of XENP020165
QVQLVQSGAEVKKPGASVKVSCKASGYTFTSYWMHWVRQAPGQGLEWMGVIDPSDSYTSYNQKFQGRVTMTVDTSTSTAYMELSSLRSEDTAVYYCTGAYYWGQGTLVTVSS

SEQ ID NO: 16116 - protein, 107 aa, synthetic construct
  REGION 1..107: note = Description of Artificial Sequence: Synthetic polypeptide
  REGION 1..107: note = VL of XENP020165
DIVLTQSPSSLSASVGDRVTITCRASQGISSNIGWLQQKPGKSFKGLIYHGTNLEDGVPSRFTGSGSGADYTLTISSLQPEDFATYYCVQYAQSPWTFGGGTKVEIK

SEQ ID NO: 16117 - protein, 5 aa, synthetic construct
  REGION 1..5: note = Description of Artificial Sequence: Synthetic peptide
  REGION 1..5: note = XENP020165 vhCDR1
SYWMH

SEQ ID NO: 16118 - protein, 17 aa, synthetic construct
  REGION 1..17: note = Description of Artificial Sequence: Synthetic peptide
  REGION 1..17: note = XENP020165 vhCDR2
VIDPSDSYTSYNQKFQG

SEQ ID NO: 16119 - skipped

SEQ ID NO: 16120 - protein, 11 aa, synthetic construct
  REGION 1..11: note = Description of Artificial Sequence: Synthetic peptide
  REGION 1..11: note = XENP020165 vlCDR1
RASQGISSNIG

SEQ ID NO: 16121 - protein, 7 aa, synthetic construct
  REGION 1..7: note = Description of Artificial Sequence: Synthetic peptide
  REGION 1..7: note = XENP020165 vlCDR2
HGTNLED

SEQ ID NO: 16122 - protein, 9 aa, synthetic construct
  REGION 1..9: note = Description of Artificial Sequence: Synthetic peptide
  REGION 1..9: note = XENP020165 vlCDR3
VQYAQSPWT

SEQ ID NO: 16123 - protein, 239 aa, synthetic construct
  REGION 1..239: note = Description of Artificial Sequence: Synthetic polypeptide
  REGION 1..239: note = XENP020166 5C4_H1L1_scFv(GKPGS)4
QVQLVQSGAEVKKPGASVKVSCKASGYTFTDYWMHWLRQAPGQGLEWMGAIDTSDSYPTYNQKFQGRVTMTVDDSTSTAYMELSSLRSEDTAVYYCTRFDYWGQGTLVTVSSGKPGSGKPGSGKPGSGKPGSDIVMTQSPDSLAVSLGERATINCKASQSVSNDVAWYQQKPGQSPKLLIYYASNRYTGVPDRFTGSGYGTDFTLTISSLQAEDVAVYFCQQDYSSPYTFGGGTKVEIK

SEQ ID NO: 16124 - protein, 112 aa, synthetic construct
  REGION 1..112: note = Description of Artificial Sequence: Synthetic polypeptide
  REGION 1..112: note = VH of XENP020166
QVQLVQSGAEVKKPGASVKVSCKASGYTFTDYWMHWLRQAPGQGLEWMGAIDTSDSYPTYNQKFQGRVTMTVDDSTSTAYMELSSLRSEDTAVYYCTRFDYWGQGTLVTVSS

SEQ ID NO: 16125 - protein, 107 aa, synthetic construct
  REGION 1..107: note = Description of Artificial Sequence: Synthetic polypeptide
  REGION 1..107: note = VL of XENP020166
DIVMTQSPDSLAVSLGERATINCKASQSVSNDVAWYQQKPGQSPKLLIYYASNRYTGVPDRFTGSGYGTDFTLTISSLQAEDVAVYFCQQDYSSPYTFGGGTKVEIK

SEQ ID NO: 16126 - protein, 5 aa, synthetic construct
  REGION 1..5: note = Description of Artificial Sequence: Synthetic peptide
  REGION 1..5: note = XENP020166 vhCDR1
DYWMH

SEQ ID NO: 16127 - protein, 17 aa, synthetic construct
  REGION 1..17: note = Description of Artificial Sequence: Synthetic peptide
  REGION 1..17: note = XENP020166 vhCDR2
AIDTSDSYPTYNQKFQG

SEQ ID NO: 16128 - skipped

SEQ ID NO: 16129 - protein, 11 aa, synthetic construct
  REGION 1..11: note = Description of Artificial Sequence: Synthetic peptide
  REGION 1..11: note = XENP020166 vlCDR1
KASQSVSNDVA

SEQ ID NO: 16130 - protein, 7 aa, synthetic construct
  REGION 1..7: note = Description of Artificial Sequence: Synthetic peptide
  REGION 1..7: note = XENP020166 vlCDR2
YASNRYT

SEQ ID NO: 16131 - protein, 9 aa, synthetic construct
  REGION 1..9: note = Description of Artificial Sequence: Synthetic peptide
  REGION 1..9: note = XENP020166 vlCDR3
QQDYSSPYT

SEQ ID NO: 16132 - protein, 239 aa, synthetic construct
  REGION 1..239: note = Description of Artificial Sequence: Synthetic polypeptide
  REGION 1..239: note = XENP020167 5C4_H2L1_scFv(GKPGS)4
QVQLVQSGSELKKPGASVKVSCKASGYTFTDYWMHWLRQAPGQGLEWMGAIDTSDSYPTYNQGFTGRFVFSVDDSVSTAYLQISSLKAEDTAVYYCTRFDYWGQGTLVTVSSGKPGSGKPGSGKPGSGKPGSDIVMTQSPDSLAVSLGERATINCKASQSVSNDVAWYQQKPGQSPKLLIYYASNRYTGVPDRFTGSGYGTDFTLTISSLQAEDVAVYFCQQDYSSPYTFGGGTKVEIK

SEQ ID NO: 16133 - protein, 112 aa, synthetic construct
  REGION 1..112: note = Description of Artificial Sequence: Synthetic polypeptide
  REGION 1..112: note = VH of XENP020167
QVQLVQSGSELKKPGASVKVSCKASGYTFTDYWMHWLRQAPGQGLEWMGAIDTSDSYPTYNQGFTGRFVFSVDDSVSTAYLQISSLKAEDTAVYYCTRFDYWGQGTLVTVSS

SEQ ID NO: 16134 - protein, 107 aa, synthetic construct; identical to SEQ ID NO: 16125
  REGION 1..107: note = Description of Artificial Sequence: Synthetic polypeptide
  REGION 1..107: note = VL of XENP020167

SEQ ID NO: 16135 - protein, 5 aa, synthetic construct
  REGION 1..5: note = Description of Artificial Sequence: Synthetic peptide
  REGION 1..5: note = XENP020167 vhCDR1
DYWMH

SEQ ID NO: 16136 - protein, 17 aa, synthetic construct
  REGION 1..17: note = Description of Artificial Sequence: Synthetic peptide
  REGION 1..17: note = XENP020167 vhCDR2
AIDTSDSYPTYNQGFTG

SEQ ID NO: 16137 - skipped

SEQ ID NO: 16138 - protein, 11 aa, synthetic construct
  REGION 1..11: note = Description of Artificial Sequence: Synthetic peptide
  REGION 1..11: note = XENP020167 vlCDR1
KASQSVSNDVA

SEQ ID NO: 16139 - protein, 7 aa, synthetic construct
  REGION 1..7: note = Description of Artificial Sequence: Synthetic peptide
  REGION 1..7: note = XENP020167 vlCDR2
YASNRYT

SEQ ID NO: 16140 - protein, 9 aa, synthetic construct
  REGION 1..9: note = Description of Artificial Sequence: Synthetic peptide
  REGION 1..9: note = XENP020167 vlCDR3
QQDYSSPYT

SEQ ID NO: 16141 - protein, 443 aa, synthetic construct
  REGION 1..443: note = Description of Artificial Sequence: Synthetic polypeptide
  REGION 1..443: note = XENP013810 Nivolumab_H0L0_IgG1 Heavy Chain
QVQLVESGGGVVQPGRSLRLDCKASGITFSNSGMHWVRQAPGKGLEWVAVIWYDGSKRYYADSVKGRFTISRDNSKNTLFLQMNSLRAEDTAVYYCATNDDYWGQGTLVTVSSASTKGPSVFPLAPSSKSTSGGTAALGCLVKDYFPEPVTVSWNSGALTSGVHTFPAVLQSSGLYSLSSVVTVPSSSLGTQTYICNVNHKPSNTKVDKKVEPKSCDKTHTCPPCPAPELLGGPSVFLFPPKPKDTLMISRTPEVTCVVVDVSHEDPEVKFNWYVDGVEVHNAKTKPREEQYNSTYRVVSVLTVLHQDWLNGKEYKCKVSNKALPAPIEKTISKAKGQPREPQVYTLPPSREEMTKNQVSLTCLVKGFYPSDIAVEWESNGQPENNYKTTPPVLDSDGSFFLYSKLTVDKSRWQQGNVFSCSVMHEALHNHYTQKSLSLSPGK

SEQ ID NO: 16142 - protein, 113 aa, synthetic construct [sequence omitted]

SEQ ID NO: 16143 - protein, 5 aa, synthetic construct
  REGION 1..5: note = Description of Artificial Sequence: Synthetic peptide
  REGION 1..5: note = XENP013810 vhCDR1
NSGMH

SEQ ID NO: 16144 - protein, 17 aa, synthetic construct
  REGION 1..17: note = Description of Artificial Sequence: Synthetic peptide
  REGION 1..17: note = XENP013810 vhCDR2
VIWYDGSKRYYADSVKG

SEQ ID NO: 16145 - protein, 4 aa, synthetic construct
  REGION 1..4: note = Description of Artificial Sequence: Synthetic peptide
  REGION 1..4: note = XENP013810 vhCDR3
NDDY

SEQ ID NO: 16146 - protein, 214 aa, synthetic construct
  REGION 1..214: note = Description of Artificial Sequence: Synthetic polypeptide
  REGION 1..214: note = XENP013810 Nivolumab_H0L0_IgG1 Light Chain
EIVLTQSPATLSLSPGERATLSCRASQSVSSYLAWYQQKPGQAPRLLIYDASNRATGIPARFSGSGSGTDFTLTISSLEPEDFAVYYCQQSSNWPRTFGQGTKVEIKRTVAAPSVFIFPPSDEQLKSGTASVVCLLNNFYPREAKVQWKVDNALQSGNSQESVTEQDSKDSTYSLSSTLTLSKADYEKHKVYACEVTHQGLSSPVTKSFNRGEC

SEQ ID NO: 16147 - protein, 107 aa, synthetic construct [sequence omitted]

SEQ ID NO: 16148 - protein, 11 aa, synthetic construct
  REGION 1..11: note = Description of Artificial Sequence: Synthetic peptide
  REGION 1..11: note = XENP013810 vlCDR1
RASQSVSSYLA

SEQ ID NO: 16149 - protein, 7 aa, synthetic construct
  REGION 1..7: note = Description of Artificial Sequence: Synthetic peptide
  REGION 1..7: note = XENP013810 vlCDR2
DASNRAT

SEQ ID NO: 16150 - protein, 9 aa, synthetic construct
  REGION 1..9: note = Description of Artificial Sequence: Synthetic peptide
  REGION 1..9: note = XENP013810 vlCDR3
QQSSNWPRT

SEQ ID NO: 16151 - protein, 443 aa, synthetic construct
  REGION 1..443: note = Description of Artificial Sequence: Synthetic polypeptide
  REGION 1..443: note = XENP013960 Nivolumab_H0L0_IgG1_G236R/L328R Heavy Chain
QVQLVESGGGVVQPGRSLRLDCKASGITFSNSGMHWVRQAPGKGLEWVAVIWYDGSKRYYADSVKGRFTISRDNSKNTLFLQMNSLRAEDTAVYYCATNDDYWGQGTLVTVSSASTKGPSVFPLAPSSKSTSGGTAALGCLVKDYFPEPVTVSWNSGALTSGVHTFPAVLQSSGLYSLSSVVTVPSSSLGTQTYICNVNHKPSNTKVDKKVEPKSCDKTHTCPPCPAPELLRGPSVFLFPPKPKDTLMISRTPEVTCVVVDVSHEDPEVKFNWYVDGVEVHNAKTKPREEQYNSTYRVVSVLTVLHQDWLNGKEYKCKVSNKARPAPIEKTISKAKGQPREPQVYTLPPSREEMTKNQVSLTCLVKGFYPSDIAVEWESNGQPENNYKTTPPVLDSDGSFFLYSKLTVDKSRWQQGNVFSCSVMHEALHNHYTQKSLSLSPGK

SEQ ID NO: 16152 - protein, 113 aa, synthetic construct [sequence omitted]

SEQ ID NO: 16153 - protein, 5 aa, synthetic construct
  REGION 1..5: note = Description of Artificial Sequence: Synthetic peptide
  REGION 1..5: note = XENP013960 vhCDR1
NSGMH

SEQ ID NO: 16154 - protein, 17 aa, synthetic construct
  REGION 1..17: note = Description of Artificial Sequence: Synthetic peptide
  REGION 1..17: note = XENP013960 vhCDR2
VIWYDGSKRYYADSVKG

SEQ ID NO: 16155 - protein, 4 aa, synthetic construct
  REGION 1..4: note = Description of Artificial Sequence: Synthetic peptide
  REGION 1..4: note = XENP013960 vhCDR3
NDDY

SEQ ID NO: 16156 - protein, 214 aa, synthetic construct; identical to SEQ ID NO: 16146
  REGION 1..214: note = Description of Artificial Sequence: Synthetic polypeptide
  REGION 1..214: note = XENP013960 Nivolumab_H0L0_IgG1_G236R/L328R Light Chain

SEQ ID NO: 16157 - protein, 107 aa, synthetic construct [sequence omitted]

SEQ ID NO: 16158 - protein, 11 aa, synthetic construct
  REGION 1..11: note = Description of Artificial Sequence: Synthetic peptide
  REGION 1..11: note = XENP013960 vlCDR1
RASQSVSSYLA

SEQ ID NO: 16159 - protein, 7 aa, synthetic construct
  REGION 1..7: note = Description of Artificial Sequence: Synthetic peptide
  REGION 1..7: note = XENP013960 vlCDR2
DASNRAT

SEQ ID NO: 16160 - protein, 9 aa, synthetic construct
  REGION 1..9: note = Description of Artificial Sequence: Synthetic peptide
  REGION 1..9: note = XENP013960 vlCDR3
QQSSNWPRT

SEQ ID NO: 16161 - protein, 442 aa, synthetic construct
  REGION 1..442: note = Description of Artificial Sequence: Synthetic polypeptide
  REGION 1..442: note = XENP016432 Nivolumab_H0L0_IgG1_PVA_/S267K Heavy Chain
QVQLVESGGGVVQPGRSLRLDCKASGITFSNSGMHWVRQAPGKGLEWVAVIWYDGSKRYYADSVKGRFTISRDNSKNTLFLQMNSLRAEDTAVYYCATNDDYWGQGTLVTVSSASTKGPSVFPLAPSSKSTSGGTAALGCLVKDYFPEPVTVSWNSGALTSGVHTFPAVLQSSGLYSLSSVVTVPSSSLGTQTYICNVNHKPSNTKVDKKVEPKSCDKTHTCPPCPAPPVAGPSVFLFPPKPKDTLMISRTPEVTCVVVDVKHEDPEVKFNWYVDGVEVHNAKTKPREEQYNSTYRVVSVLTVLHQDWLNGKEYKCKVSNKALPAPIEKTISKAKGQPREPQVYTLPPSREEMTKNQVSLTCLVKGFYPSDIAVEWESNGQPENNYKTTPPVLDSDGSFFLYSKLTVDKSRWQQGNVFSCSVMHEALHNHYTQKSLSLSPGK

SEQ ID NO: 16162 - protein, 113 aa, synthetic construct [sequence omitted]

SEQ ID NO: 16163 - protein, 5 aa, synthetic construct
  REGION 1..5: note = Description of Artificial Sequence: Synthetic peptide
  REGION 1..5: note = XENP016432 vhCDR1
NSGMH

SEQ ID NO: 16164 - protein, 17 aa, synthetic construct
  REGION 1..17: note = Description of Artificial Sequence: Synthetic peptide
  REGION 1..17: note = XENP016432 vhCDR2
VIWYDGSKRYYADSVKG

SEQ ID NO: 16165 - protein, 4 aa, synthetic construct
  REGION 1..4: note = Description of Artificial Sequence: Synthetic peptide
  REGION 1..4: note = XENP016432 vhCDR3
NDDY

SEQ ID NO: 16166 - protein, 214 aa, synthetic construct; identical to SEQ ID NO: 16146
  REGION 1..214: note = Description of Artificial Sequence: Synthetic polypeptide
  REGION 1..214: note = XENP016432 Nivolumab_H0L0_IgG1_PVA_/S267K Light Chain

SEQ ID NO: 16167 - protein, 107 aa, synthetic construct [sequence omitted]

SEQ ID NO: 16168 - protein, 11 aa, synthetic construct
  REGION 1..11: note = Description of Artificial Sequence: Synthetic peptide
  REGION 1..11: note = XENP016432 vlCDR1
RASQSVSSYLA

SEQ ID NO: 16169 - protein, 7 aa, synthetic construct
  REGION 1..7: note = Description of Artificial Sequence: Synthetic peptide
  REGION 1..7: note = XENP016432 vlCDR2
DASNRAT

SEQ ID NO: 16170 - protein, 9 aa, synthetic construct
  REGION 1..9: note = Description of Artificial Sequence: Synthetic peptide
  REGION 1..9: note = XENP016432 vlCDR3
QQSSNWPRT

SEQ ID NO: 16171 - protein, 440 aa, synthetic construct
  REGION 1..440: note = Description of Artificial Sequence: Synthetic polypeptide
  REGION 1..440: note = XENP016602 Nivolumab_H0_IgG4_S228P Heavy Chain
QVQLVESGGGVVQPGRSLRLDCKASGITFSNSGMHWVRQAPGKGLEWVAVIWYDGSKRYYADSVKGRFTISRDNSKNTLFLQMNSLRAEDTAVYYCATNDDYWGQGTLVTVSSASTKGPSVFPLAPSSKSTSGGTAALGCLVKDYFPEPVTVSWNSGALTSGVHTFPAVLQSSGLYSLSSVVTVPSSSLGTKTYTCNVDHKPSNTKVDKRVESKYGPPCPPCPAPEFLGGPSVFLFPPKPKDTLMISRTPEVTCVVVDVSQEDPEVQFNWYVDGVEVHNAKTKPREEQFNSTYRVVSVLTVLHQDWLNGKEYKCKVSNKGLPSSIEKTISKAKGQPREPQVYTLPPSQEEMTKNQVSLTCLVKGFYPSDIAVEWESNGQPENNYKTTPPVLDSDGSFFLYSRLTVDKSRWQEGNVFSCSVMHEALHNHYTQKSLSLSLGK

SEQ ID NO: 16172 - protein, 113 aa, synthetic construct [sequence omitted]

SEQ ID NO: 16173 - protein, 5 aa, synthetic construct
  REGION 1..5: note = Description of Artificial Sequence: Synthetic peptide
  REGION 1..5: note = XENP016602 vhCDR1
NSGMH

SEQ ID NO: 16174 - protein, 17 aa, synthetic construct
  REGION 1..17: note = Description of Artificial Sequence: Synthetic peptide
  REGION 1..17: note = XENP016602 vhCDR2
VIWYDGSKRYYADSVKG

SEQ ID NO: 16175 - protein, 4 aa, synthetic construct
  REGION 1..4: note = Description of Artificial Sequence: Synthetic peptide
  REGION 1..4: note = XENP016602 vhCDR3
NDDY

SEQ ID NO: 16176 - protein, 214 aa, synthetic construct; identical to SEQ ID NO: 16146
  REGION 1..214: note = Description of Artificial Sequence: Synthetic polypeptide
  REGION 1..214: note = XENP016602 Nivolumab_H0_IgG4_S228P Light Chain

SEQ ID NO: 16177 - protein, 107 aa, synthetic construct [sequence omitted]

SEQ ID NO: 16178 - protein, 11 aa, synthetic construct
  REGION 1..11: note = Description of Artificial Sequence: Synthetic peptide
  REGION 1..11: note = XENP016602 vlCDR1
RASQSVSSYLA

SEQ ID NO: 16179 - protein, 7 aa, synthetic construct
  REGION 1..7: note = Description of Artificial Sequence: Synthetic peptide
  REGION 1..7: note = XENP016602 vlCDR2
DASNRAT

SEQ ID NO: 16180 - protein, 9 aa, synthetic construct
  REGION 1..9: note = Description of Artificial Sequence: Synthetic peptide
  REGION 1..9: note = XENP016602 vlCDR3
QQSSNWPRT

SEQ ID NO: 16181 - protein, 447 aa, synthetic construct
  REGION 1..447: note = Description of Artificial Sequence: Synthetic polypeptide
  REGION 1..447: note = XENP016603 Pembrolizumab_H0_IgG4_S228P Heavy Chain
QVQLVQSGVEVKKPGASVKVSCKASGYTFTNYYMYWVRQAPGQGLEWMGGINPSNGGTNFNEKFKNRVTLTTDSSTTTAYMELKSLQFDDTAVYYCARRDYRFDMGFDYWGQGTTVTVSSASTKGPSVFPLAPSSKSTSGGTAALGCLVKDYFPEPVTVSWNSGALTSGVHTFPAVLQSSGLYSLSSVVTVPSSSLGTKTYTCNVDHKPSNTKVDKRVESKYGPPCPPCPAPEFLGGPSVFLFPPKPKDTLMISRTPEVTCVVVDVSQEDPEVQFNWYVDGVEVHNAKTKPREEQFNSTYRVVSVLTVLHQDWLNGKEYKCKVSNKGLPSSIEKTISKAKGQPREPQVYTLPPSQEEMTKNQVSLTCLVKGFYPSDIAVEWESNGQPENNYKTTPPVLDSDGSFFLYSRLTVDKSRWQEGNVFSCSVMHEALHNHYTQKSLSLSLGK

SEQ ID NO: 16182 - protein, 120 aa, synthetic construct [sequence omitted]

SEQ ID NO: 16183 - protein, 5 aa, synthetic construct
  REGION 1..5: note = Description of Artificial Sequence: Synthetic peptide
  REGION 1..5: note = XENP016603 vhCDR1
NYYMY

SEQ ID NO: 16184 - protein, 17 aa, synthetic construct
  REGION 1..17: note = Description of Artificial Sequence: Synthetic peptide
  REGION 1..17: note = XENP016603 vhCDR2
GINPSNGGTNFNEKFKN

SEQ ID NO: 16185 - protein, 11 aa, synthetic construct
  REGION 1..11: note = Description of Artificial Sequence: Synthetic peptide
  REGION 1..11: note = XENP016603 vhCDR3
RDYRFDMGFDY

SEQ ID NO: 16186 - protein, 218 aa, synthetic construct
  REGION 1..218: note = Description of Artificial Sequence: Synthetic polypeptide
  REGION 1..218: note = XENP016603 Pembrolizumab_H0_IgG4_S228P Light Chain
EIVLTQSPATLSLSPGERATLSCRASKGVSTSGYSYLHWYQQKPGQAPRLLIYLASYLESGVPARFSGSGSGTDFTLTISSLEPEDFAVYYCQHSRDLPLTFGGGTKVEIKRTVAAPSVFIFPPSDEQLKSGTASVVCLLNNFYPREAKVQWKVDNALQSGNSQESVTEQDSKDSTYSLSSTLTLSKADYEKHKVYACEVTHQGLSSPVTKSFNRGEC

SEQ ID NO: 16187 - protein, 111 aa, synthetic construct [sequence omitted]

SEQ ID NO: 16188 - protein, 15 aa, synthetic construct
  REGION 1..15: note = Description of Artificial Sequence: Synthetic peptide
  REGION 1..15: note = XENP016603 vlCDR1
RASKGVSTSGYSYLH

SEQ ID NO: 16189 - protein, 7 aa, synthetic construct
  REGION 1..7: note = Description of Artificial Sequence: Synthetic peptide
  REGION 1..7: note = XENP016603 vlCDR2
LASYLES

SEQ ID NO: 16190 - protein, 9 aa, synthetic construct
  REGION 1..9: note = Description of Artificial Sequence: Synthetic peptide
  REGION 1..9: note = XENP016603 vlCDR3
QHSRDLPLT

SEQ ID NO: 16191 - protein, 443 aa, synthetic construct
  REGION 1..443: note = Description of Artificial Sequence: Synthetic polypeptide
  REGION 1..443: note = XENP017903 1A2_H1L1_IgG1_PVA_/S267K Heavy Chain
QIQLVQSGAEVKKPGASVKVSCKASGYTFTDYSMHWVRQAPGQGLEWMGWINTETGEPTYADKFQGRVTMTLDTSTSTAYMELSSLRSEDTAVYFCASSPLDYWGQGTLVTVSSASTKGPSVFPLAPSSKSTSGGTAALGCLVKDYFPEPVTVSWNSGALTSGVHTFPAVLQSSGLYSLSSVVTVPSSSLGTQTYICNVNHKPSNTKVDKKVEPKSCDKTHTCPPCPAPPVAGPSVFLFPPKPKDTLMISRTPEVTCVVVDVKHEDPEVKFNWYVDGVEVHNAKTKPREEQYNSTYRVVSVLTVLHQDWLNGKEYKCKVSNKALPAPIEKTISKAKGQPREPQVYTLPPSREEMTKNQVSLTCLVKGFYPSDIAVEWESNGQPENNYKTTPPVLDSDGSFFLYSKLTVDKSRWQQGNVFSCSVMHEALHNHYTQKSLSLSPGK

SEQ ID NO: 16192 - protein, 114 aa, synthetic construct; identical to SEQ ID NO: 10895
  REGION 1..114: note = Description of Artificial Sequence: Synthetic polypeptide
  REGION 1..114: note = VH of XENP017903

SEQ ID NO: 16193 - protein, 5 aa, synthetic construct
  REGION 1..5: note = Description of Artificial Sequence: Synthetic peptide
  REGION 1..5: note = XENP017903 vhCDR1
DYSMH

SEQ ID NO: 16194 - protein, 17 aa, synthetic construct
  REGION 1..17: note = Description of Artificial Sequence: Synthetic peptide
  REGION 1..17: note = XENP017903 vhCDR2
WINTETGEPTYADKFQG

SEQ ID NO: 16195 - protein, 5 aa, synthetic construct
  REGION 1..5: note = Description of Artificial Sequence: Synthetic peptide
  REGION 1..5: note = XENP017903 vhCDR3
SPLDY

SEQ ID NO: 16196 - protein, 219 aa, synthetic construct
  REGION 1..219: note = Description of Artificial Sequence: Synthetic polypeptide
  REGION 1..219: note = XENP017903 1A2_H1L1_IgG1_PVA_/S267K Light Chain
DLLLTQSPLSLPVTPGEPASISCRSSQSIVHSNGNTYLEWFLQKPGQSPQLLIYKVFNRFSGVPDRFSGSGSGTDFTLKISRVEAEDVGVYYCFQGSHVPFTFGSGTKLEIKRTVAAPSVFIFPPSDEQLKSGTASVVCLLNNFYPREAKVQWKVDNALQSGNSQESVTEQDSKDSTYSLSSTLTLSKADYEKHKVYACEVTHQGLSSPVTKSFNRGEC

SEQ ID NO: 16197 - protein, 112 aa, synthetic construct; identical to SEQ ID NO: 10896
  REGION 1..112: note = Description of Artificial Sequence: Synthetic polypeptide
  REGION 1..112: note = VL of XENP017903

SEQ ID NO: 16198 - protein, 16 aa, synthetic construct
  REGION 1..16: note = Description of Artificial Sequence: Synthetic peptide
  REGION 1..16: note = XENP017903 vlCDR1
RSSQSIVHSNGNTYLE

SEQ ID NO: 16199 - protein, 7 aa, synthetic construct
  REGION 1..7: note = Description of Artificial Sequence: Synthetic peptide
  REGION 1..7: note = XENP017903 vlCDR2
KVFNRFS

SEQ ID NO: 16200 - protein, 9 aa, synthetic construct
  REGION 1..9: note = Description of Artificial Sequence: Synthetic peptide
  REGION 1..9: note = XENP017903 vlCDR3
FQGSHVPFT

SEQ ID NO: 16201 - protein, 449 aa, synthetic construct
  REGION 1..449: note = Description of Artificial Sequence: Synthetic polypeptide
  REGION 1..449: note = XENP017904 1C7_H1L1_IgG1_PVA_/S267K Heavy Chain
EVQLLESGGGLVQPGGSLRLSCAASGFAFSSYDMSWVRQAPGKRLEWVSYISSGGGSTYYPDSVKGRFTISRDNSKNTLYLQMNSLRAEDTAVYYCARPLDDYYAPFAYWGQGTLVTVSSASTKGPSVFPLAPSSKSTSGGTAALGCLVKDYFPEPVTVSWNSGALTSGVHTFPAVLQSSGLYSLSSVVTVPSSSLGTQTYICNVNHKPSNTKVDKKVEPKSCDKTHTCPPCPAPPVAGPSVFLFPPKPKDTLMISRTPEVTCVVVDVKHEDPEVKFNWYVDGVEVHNAKTKPREEQYNSTYRVVSVLTVLHQDWLNGKEYKCKVSNKALPAPIEKTISKAKGQPREPQVYTLPPSREEMTKNQVSLTCLVKGFYPSDIAVEWESNGQPENNYKTTPPVLDSDGSFFLYSKLTVDKSRWQQGNVFSCSVMHEALHNHYTQKSLSLSPGK

SEQ ID NO: 16202 - protein, 120 aa, synthetic construct; identical to SEQ ID NO: 10904
  REGION 1..120: note = Description of Artificial Sequence: Synthetic polypeptide
  REGION 1..120: note = VH of XENP017904

SEQ ID NO: 16203 - protein, 5 aa, synthetic construct
  REGION 1..5: note = Description of Artificial Sequence: Synthetic peptide
  REGION 1..5: note = XENP017904 vhCDR1
SYDMS

SEQ ID NO: 16204 - protein, 17 aa, synthetic construct
  REGION 1..17: note = Description of Artificial Sequence: Synthetic peptide
  REGION 1..17: note = XENP017904 vhCDR2
YISSGGGSTYYPDSVKG

SEQ ID NO: 16205 - protein, 11 aa, synthetic construct
  REGION 1..11: note = Description of Artificial Sequence: Synthetic peptide
  REGION 1..11: note = XENP017904 vhCDR3
PLDDYYAPFAY

SEQ ID NO: 16206 - protein, 218 aa, synthetic construct
  REGION 1..218: note = Description of Artificial Sequence: Synthetic polypeptide
  REGION 1..218: note = XENP017904 1C7_H1L1_IgG1_PVA_/S267K Light Chain
DIVLTQSPSSLSASVGDRVTITCRASESVDNDGISFMNWFQQKPGKPPKLLIYAASNQGSGVPARFSGSGSGTDFTLTISSLQPEDFATYFCQQSKEVPWTFGGGTKVEIKRTVAAPSVFIFPPSDEQLKSGTASVVCLLNNFYPREAKVQWKVDNALQSGNSQESVTEQDSKDSTYSLSSTLTLSKADYEKHKVYACEVTHQGLSSPVTKSFNRGEC

SEQ ID NO: 16207 - protein, 111 aa, synthetic construct; identical to SEQ ID NO: 10905
  REGION 1..111: note = Description of Artificial Sequence: Synthetic polypeptide
  REGION 1..111: note = VL of XENP017904

SEQ ID NO: 16208 - protein, 15 aa, synthetic construct
  REGION 1..15: note = Description of Artificial Sequence: Synthetic peptide
  REGION 1..15: note = XENP017904 vlCDR1
RASESVDNDGISFMN

SEQ ID NO: 16209 - protein, 7 aa, synthetic construct
  REGION 1..7: note = Description of Artificial Sequence: Synthetic peptide
  REGION 1..7: note = XENP017904 vlCDR2
AASNQGS

SEQ ID NO: 16210 - protein, 9 aa, synthetic construct
  REGION 1..9: note = Description of Artificial Sequence: Synthetic peptide
  REGION 1..9: note = XENP017904 vlCDR3
QQSKEVPWT

SEQ ID NO: 16211 - protein, 443 aa, synthetic construct
  REGION 1..443: note = Description of Artificial Sequence: Synthetic polypeptide
  REGION 1..443: note = XENP017905 1G2_H1L1_IgG1_PVA_/S267K Heavy Chain
QVQLVQSGAEVKKPGASVKVSCKVSGFSLTDYGVNWVRQAPGQGLEWMGMIWGDGSTDYNSKFQGRVTMTKDISTSTVYMELSSLRSEDTAVYYCAREYAMDYWGQGTLVTVSSASTKGPSVFPLAPSSKSTSGGTAALGCLVKDYFPEPVTVSWNSGALTSGVHTFPAVLQSSGLYSLSSVVTVPSSSLGTQTYICNVNHKPSNTKVDKKVEPKSCDKTHTCPPCPAPPVAGPSVFLFPPKPKDTLMISRTPEVTCVVVDVKHEDPEVKFNWYVDGVEVHNAKTKPREEQYNSTYRVVSVLTVLHQDWLNGKEYKCKVSNKALPAPIEKTISKAKGQPREPQVYTLPPSREEMTKNQVSLTCLVKGFYPSDIAVEWESNGQPENNYKTTPPVLDSDGSFFLYSKLTVDKSRWQQGNVFSCSVMHEALHNHYTQKSLSLSPGK

SEQ ID NO: 16212 - protein, 114 aa, synthetic construct; identical to SEQ ID NO: 10913
  REGION 1..114: note = Description of Artificial Sequence: Synthetic polypeptide
  REGION 1..114: note = VH of XENP017905

SEQ ID NO: 16213 - protein, 5 aa, synthetic construct
  REGION 1..5: note = Description of Artificial Sequence: Synthetic peptide
  REGION 1..5: note = XENP017905 vhCDR1
DYGVN

SEQ ID NO: 16214 - protein, 16 aa, synthetic construct
  REGION 1..16: note = Description of Artificial Sequence: Synthetic peptide
  REGION 1..16: note = XENP017905 vhCDR2
MIWGDGSTDYNSKFQG

SEQ ID NO: 16215 - protein, 6 aa, synthetic construct
  REGION 1..6: note = Description of Artificial Sequence: Synthetic peptide
  REGION 1..6: note = XENP017905 vhCDR3
EYAMDY

SEQ ID NO: 16216 - protein, 219 aa, synthetic construct
  REGION 1..219: note = Description of Artificial Sequence: Synthetic polypeptide
  REGION 1..219: note = XENP017905 1G2_H1L1_IgG1_PVA_/S267K Light Chain
DIVMTQSPDSLAVSLGERATINCKSSQSLLNSRTRKNYLAWYQQKPGQSPKLLIFWASTRESGVPDRFTGSGSGTDFTLTISSLQAEDVAVYYCKQSYNLRTFGGGTKVEIKRTVAAPSVFIFPPSDEQLKSGTASVVCLLNNFYPREAKVQWKVDNALQSGNSQESVTEQDSKDSTYSLSSTLTLSKADYEKHKVYACEVTHQGLSSPVTKSFNRGEC

SEQ ID NO: 16217 - protein, 112 aa, synthetic construct; identical to SEQ ID NO: 10914
  REGION 1..112: note = Description of Artificial Sequence: Synthetic polypeptide
  REGION 1..112: note = VL of XENP017905

SEQ ID NO: 16218 - protein, 17 aa, synthetic construct
  REGION 1..17: note = Description of Artificial Sequence: Synthetic peptide
  REGION 1..17: note = XENP017905 vlCDR1
KSSQSLLNSRTRKNYLA

SEQ ID NO: 16219 - protein, 7 aa, synthetic construct
  REGION 1..7: note = Description of Artificial Sequence: Synthetic peptide
  REGION 1..7: note = XENP017905 vlCDR2
WASTRES

SEQ ID NO: 16220 - protein, 8 aa, synthetic construct
  REGION 1..8: note = Description of Artificial Sequence: Synthetic peptide
  REGION 1..8: note = XENP017905 vlCDR3
KQSYNLRT

SEQ ID NO: 16221 - protein, 451 aa, synthetic construct
  REGION 1..451: note = Description of Artificial Sequence: Synthetic polypeptide
  REGION 1..451: note = XENP017906 1G6_H1L1_IgG1_PVA_/S267K Heavy Chain
EVQLVESGGGLVKPGGSLRLSCAASGFTFSNYWMNWVRQAPGKGLEWVGEIRLKSNNYATHYAEPVKGRFTISRDDSKSTVYLQMNSLKTEDTAVYYCTRYYGNYGGYFDVWGAGTLVTVSSASTKGPSVFPLAPSSKSTSGGTAALGCLVKDYFPEPVTVSWNSGALTSGVHTFPAVLQSSGLYSLSSVVTVPSSSLGTQTYICNVNHKPSNTKVDKKVEPKSCDKTHTCPPCPAPPVAGPSVFLFPPKPKDTLMISRTPEVTCVVVDVKHEDPEVKFNWYVDGVEVHNAKTKPREEQYNSTYRVVSVLTVLHQDWLNGKEYKCKVSNKALPAPIEKTISKAKGQPREPQVYTLPPSREEMTKNQVSLTCLVKGFYPSDIAVEWESNGQPENNYKTTPPVLDSDGSFFLYSKLTVDKSRWQQGNVFSCSVMHEALHNHYTQKSLSLSPGK

SEQ ID NO: 16222 - protein, 122 aa, synthetic construct; identical to SEQ ID NO: 10922
  REGION 1..122: note = Description of Artificial Sequence: Synthetic polypeptide
  REGION 1..122: note = VH of XENP017906

SEQ ID NO: 16223 - protein, 5 aa, synthetic construct
  REGION 1..5: note = Description of Artificial Sequence: Synthetic peptide
  REGION 1..5: note = XENP017906 vhCDR1
NYWMN

SEQ ID NO: 16224 - protein, 19 aa, synthetic construct
  REGION 1..19: note = Description of Artificial Sequence: Synthetic peptide
  REGION 1..19: note = XENP017906 vhCDR2
EIRLKSNNYATHYAEPVKG

SEQ ID NO: 16225 - protein, 11 aa, synthetic construct
  REGION 1..11: note = Description of Artificial Sequence: Synthetic peptide
  REGION 1..11: note = XENP017906 vhCDR3
YYGNYGGYFDV

SEQ ID NO: 16226 - protein, 214 aa, synthetic construct
  REGION 1..214: note = Description of Artificial Sequence: Synthetic polypeptide
  REGION 1..214: note = XENP017906 1G6_H1L1_IgG1_PVA_/S267K Light Chain
SIVMTQSPATLSVSPGERATLSCRASQSVSNDVAWYQQKPGQSPRLLINYASHRYTGVPDRFTGSGYGTEFTLTISSLQSEDFAVYFCQQDYSSPRTFGGGTKVEIKRTVAAPSVFIFPPSDEQLKSGTASVVCLLNNFYPREAKVQWKVDNALQSGNSQESVTEQDSKDSTYSLSSTLTLSKADYEKHKVYACEVTHQGLSSPVTKSFNRGEC

SEQ ID NO: 16227 - protein, 107 aa, synthetic construct; identical to SEQ ID NO: 10923
  REGION 1..107: note = Description of Artificial Sequence: Synthetic polypeptide
  REGION 1..107: note = VL of XENP017906

SEQ ID NO: 16228 - protein, 11 aa, synthetic construct
  REGION 1..11: note = Description of Artificial Sequence: Synthetic peptide
  REGION 1..11: note = XENP017906 vlCDR1
RASQSVSNDVA

SEQ ID NO: 16229 - protein, 7 aa, synthetic construct
  REGION 1..7: note = Description of Artificial Sequence: Synthetic peptide
  REGION 1..7: note = XENP017906 vlCDR2
YASHRYT

SEQ ID NO: 16230 - protein, 9 aa, synthetic construct
  REGION 1..9: note = Description of Artificial Sequence: Synthetic peptide
  REGION 1..9: note = XENP017906 vlCDR3
QQDYSSPRT

SEQ ID NO: 16231 - protein, 451 aa, synthetic construct; identical to SEQ ID NO: 16221
  REGION 1..451: note = Description of Artificial Sequence: Synthetic polypeptide
  REGION 1..451: note = XENP017907 1G6_H1L2_IgG1_PVA_/S267K Heavy Chain

SEQ ID NO: 16232 - protein, 122 aa, synthetic construct; identical to SEQ ID NO: 10922
  REGION 1..122: note = Description of Artificial Sequence: Synthetic polypeptide
  REGION 1..122: note = VH of XENP017907

SEQ ID NO: 16233 - protein, 5 aa, synthetic construct
  REGION 1..5: note = Description of Artificial Sequence: Synthetic peptide
  REGION 1..5: note = XENP017907 vhCDR1
NYWMN

SEQ ID NO: 16234 - protein, 19 aa, synthetic construct
  REGION 1..19: note = Description of Artificial Sequence: Synthetic peptide
  REGION 1..19: note = XENP017907 vhCDR2
EIRLKSNNYATHYAEPVKG

SEQ ID NO: 16235 - protein, 11 aa, synthetic construct
  REGION 1..11: note = Description of Artificial Sequence: Synthetic peptide
  REGION 1..11: note = XENP017907 vhCDR3
YYGNYGGYFDV

SEQ ID NO: 16236 - protein, 214 aa, synthetic construct
  REGION 1..214: note = Description of Artificial Sequence: Synthetic polypeptide
  REGION 1..214: note = XENP017907 1G6_H1L2_IgG1_PVA_/S267K Light Chain
SIVMTQSPSSLSASVGDRVTITCRASQSVSNDVAWYQQKPGKSPKLLINYASHRYTGVPDRFTGSGYGTDFTLTISSLQPEDFATYFCQQDYSSPRTFGGGTKVEIKRTVAAPSVFIFPPSDEQLKSGTASVVCLLNNFYPREAKVQWKVDNALQSGNSQESVTEQDSKDSTYSLSSTLTLSKADYEKHKVYACEVTHQGLSSPVTKSFNRGEC

SEQ ID NO: 16237 - protein, 107 aa, synthetic construct; identical to SEQ ID NO: 10932
  REGION 1..107: note = Description of Artificial Sequence: Synthetic polypeptide
  REGION 1..107: note = VL of XENP017907

SEQ ID NO: 16238 - protein, 11 aa, synthetic construct
  REGION 1..11: note = Description of Artificial Sequence: Synthetic peptide
  REGION 1..11: note = XENP017907 vlCDR1
RASQSVSNDVA

SEQ ID NO: 16239 - protein, 7 aa, synthetic construct
  REGION 1..7: note = Description of Artificial Sequence: Synthetic peptide
  REGION 1..7: note = XENP017907 vlCDR2
YASHRYT

SEQ ID NO: 16240 - protein, 9 aa, synthetic construct
  REGION 1..9: note = Description of Artificial Sequence: Synthetic peptide
  REGION 1..9: note = XENP017907 vlCDR3
QQDYSSPRT

SEQ ID NO: 16241 - protein, 444 aa, synthetic construct
  REGION 1..444: note = Description of Artificial Sequence: Synthetic polypeptide
  REGION 1..444: note = XENP017908 2A2_H1L1_IgG1_PVA_/S267K Heavy Chain
QVQLVQSGAEVKKPGASVKVSCKASGYTFTNYWMHWVRQAPGQGLEWMGYINPSTGYTEYNQKFQGRVTMTADKSTSTAYMELSSLRSEDTAVYYCATGNYFAYWGQGTLVTVSSASTKGPSVFPLAPSSKSTSGGTAALGCLVKDYFPEPVTVSWNSGALTSGVHTFPAVLQSSGLYSLSSVVTVPSSSLGTQTYICNVNHKPSNTKVDKKVEPKSCDKTHTCPPCPAPPVAGPSVFLFPPKPKDTLMISRTPEVTCVVVDVKHEDPEVKFNWYVDGVEVHNAKTKPREEQYNSTYRVVSVLTVLHQDWLNGKEYKCKVSNKALPAPIEKTISKAKGQPREPQVYTLPPSREEMTKNQVSLTCLVKGFYPSDIAVEWESNGQPENNYKTTPPVLDSDGSFFLYSKLTVDKSRWQQGNVFSCSVMHEALHNHYTQKSLSLSPGK

SEQ ID NO: 16242 - protein, 115 aa, synthetic construct; identical to SEQ ID NO: 10940
  REGION 1..115: note = Description of Artificial Sequence: Synthetic polypeptide
  REGION 1..115: note = VH of XENP017908

SEQ ID NO: 16243 - protein, 5 aa, synthetic construct
  REGION 1..5: note = Description of Artificial Sequence: Synthetic peptide
  REGION 1..5: note = XENP017908 vhCDR1
NYWMH

SEQ ID NO: 16244 - protein, 17 aa, synthetic construct
  REGION 1..17: note = Description of Artificial Sequence: Synthetic peptide
  REGION 1..17: note = XENP017908 vhCDR2
YINPSTGYTEYNQKFQG

SEQ ID NO: 16245 - protein, 6 aa, synthetic construct
  REGION 1..6: note = Description of Artificial Sequence: Synthetic peptide
  REGION 1..6: note = XENP017908 vhCDR3
GNYFAY

SEQ ID NO: 16246 - protein, 214 aa, synthetic construct
  REGION 1..214: note = Description of Artificial Sequence: Synthetic polypeptide
  REGION 1..214: note = XENP017908 2A2_H1L1_IgG1_PVA_/S267K Light Chain
DIQMTQSPSSLSASVGDRVTITCRPSESLYSYLAWYQQKPGKSPKLLVYNAKTLVEGVPSRFSGSGSGTDFTLTISSLQPEDFATYYCQHHYGTPFTFGSGTKLEIKRTVAAPSVFIFPPSDEQLKSGTASVVCLLNNFYPREAKVQWKVDNALQSGNSQESVTEQDSKDSTYSLSSTLTLSKADYEKHKVYACEVTHQGLSSPVTKSFNRGEC

SEQ ID NO: 16247 - protein, 107 aa, synthetic construct; identical to SEQ ID NO: 10941
  REGION 1..107: note = Description of Artificial Sequence: Synthetic polypeptide
  REGION 1..107: note = VL of XENP017908

SEQ ID NO: 16248 - protein, 11 aa, synthetic construct
  REGION 1..11: note = Description of Artificial Sequence: Synthetic peptide
  REGION 1..11: note = XENP017908 vlCDR1
RPSESLYSYLA

SEQ ID NO: 16249 - protein, 7 aa, synthetic construct
  REGION 1..7: note = Description of Artificial Sequence: Synthetic peptide
  REGION 1..7: note = XENP017908 vlCDR2
NAKTLVE

SEQ ID NO: 16250 - protein, 9 aa, synthetic construct
  REGION 1..9: note = Description of Artificial Sequence: Synthetic peptide
  REGION 1..9: note = XENP017908 vlCDR3
QHHYGTPFT

SEQ ID NO: 16251 - protein, 449 aa, synthetic construct
  REGION 1..449: note = Description of Artificial Sequence: Synthetic polypeptide
  REGION 1..449: note = XENP017909 2F11_H1L1_IgG1_PVA_/S267K Heavy Chain
QVQLVQSGAEVKKPGASVKVSCKGSGYTFTDYVMHWVRQAPGQSLEWMGVISTYYGDASYNQKFQGRVTMTVDKSTSTAYMELSSLRSEDTAVYYCAREGYDGYLYFDVWGAGTLVTVSSASTKGPSVFPLAPSSKSTSGGTAALGCLVKDYFPEPVTVSWNSGALTSGVHTFPAVLQSSGLYSLSSVVTVPSSSLGTQTYICNVNHKPSNTKVDKKVEPKSCDKTHTCPPCPAPPVAGPSVFLFPPKPKDTLMISRTPEVTCVVVDVKHEDPEVKFNWYVDGVEVHNAKTKPREEQYNSTYRVVSVLTVLHQDWLNGKEYKCKVSNKALPAPIEKTISKAKGQPREPQVYTLPPSREEMTKNQVSLTCLVKGFYPSDIAVEWESNGQPENNYKTTPPVLDSDGSFFLYSKLTVDKSRWQQGNVFSCSVMHEALHNHYTQKSLSLSPGK

SEQ ID NO: 16252 - protein, 120 aa, synthetic construct; identical to SEQ ID NO: 10949
  REGION 1..120: note = Description of Artificial Sequence: Synthetic polypeptide
  REGION 1..120: note = VH of XENP017909

SEQ ID NO: 16253 - protein, 5 aa, synthetic construct
  REGION 1..5: note = Description of Artificial Sequence: Synthetic peptide
  REGION 1..5: note = XENP017909 vhCDR1
DYVMH

SEQ ID NO: 16254 - protein, 17 aa, synthetic construct
  REGION 1..17: note = Description of Artificial Sequence: Synthetic peptide
  REGION 1..17: note = XENP017909 vhCDR2
VISTYYGDASYNQKFQG

SEQ ID NO: 16255 - protein, 11 aa, synthetic construct
  REGION 1..11: note = Description of Artificial Sequence: Synthetic peptide
  REGION 1..11: note = XENP017909 vhCDR3
EGYDGYLYFDV

SEQ ID NO: 16256 - protein, 219 aa, synthetic construct
  REGION 1..219: note = Description of Artificial Sequence: Synthetic polypeptide
  REGION 1..219: note = XENP017909 2F11_H1L1_IgG1_PVA_/S267K Light Chain
DVLMTQTPLSSPVTLGQPASISCRSSQSIVHSNGNTYLEWYQQRPGQSPRLLIYKVSNRFSGVPDRFSGSGSGTDFTLKISRVEAEDVGVYYCFQGSHVPYTFGGGTKVEIKRTVAAPSVFIFPPSDEQLKSGTASVVCLLNNFYPREAKVQWKVDNALQSGNSQESVTEQDSKDSTYSLSSTLTLSKADYEKHKVYACEVTHQGLSSPVTKSFNRGEC

SEQ ID NO: 16257 - protein, 112 aa, synthetic construct; identical to SEQ ID NO: 10950
  REGION 1..112: note = Description of Artificial Sequence: Synthetic polypeptide
  REGION 1..112: note = VL of XENP017909

SEQ ID NO: 16258 - protein, 16 aa, synthetic construct
  REGION 1..16: note = Description of Artificial Sequence: Synthetic peptide
  REGION 1..16: note = XENP017909 vlCDR1
RSSQSIVHSNGNTYLE

SEQ ID NO: 16259 - protein, 7 aa, synthetic construct
  REGION 1..7: note = Description of Artificial Sequence: Synthetic peptide
  REGION 1..7: note = XENP017909 vlCDR2
KVSNRFS

SEQ ID NO: 16260 - protein, 9 aa, synthetic construct
  REGION 1..9: note = Description of Artificial Sequence: Synthetic peptide
  REGION 1..9: note = XENP017909 vlCDR3
FQGSHVPYT

SEQ ID NO: 16261 - protein, 449 aa, synthetic construct
  REGION 1..449: note = Description of Artificial Sequence: Synthetic polypeptide
  REGION 1..449: note = XENP017910 5H1_H1L1_IgG1_PVA_/S267K Heavy Chain
QVQLVQSGAEVKKPGASVKVSCKGSGYTFTDYVMHWVRQAPGQSLEWMGVISIHYGDGRYNQKFQGRVTMTVDKSTSTAYMELSSLRSEDTAVYYCAREVYDGYLYFDVWGAGTLVTVSSASTKGPSVFPLAPSSKSTSGGTAALGCLVKDYFPEPVTVSWNSGALTSGVHTFPAVLQSSGLYSLSSVVTVPSSSLGTQTYICNVNHKPSNTKVDKKVEPKSCDKTHTCPPCPAPPVAGPSVFLFPPKPKDTLMISRTPEVTCVVVDVKHEDPEVKFNWYVDGVEVHNAKTKPREEQYNSTYRVVSVLTVLHQDWLNGKEYKCKVSNKALPAPIEKTISKAKGQPREPQVYTLPPSREEMTKNQVSLTCLVKGFYPSDIAVEWESNGQPENNYKTTPPVLDSDGSFFLYSKLTVDKSRWQQGNVFSCSVMHEALHNHYTQKSLSLSPGK

SEQ ID NO: 16262 - protein, 120 aa, synthetic construct; identical to SEQ ID NO: 10958
  REGION 1..120: note = Description of Artificial Sequence: Synthetic polypeptide
  REGION 1..120: note = VH of XENP017910

SEQ ID NO: 16263 - protein, 5 aa, synthetic construct
  REGION 1..5: note = Description of Artificial Sequence: Synthetic peptide
  REGION 1..5: note = XENP017910 vhCDR1
DYVMH

SEQ ID NO: 16264 - protein, 17 aa, synthetic construct
  REGION 1..17: note = Description of Artificial Sequence: Synthetic peptide
  REGION 1..17: note = XENP017910 vhCDR2
VISIHYGDGRYNQKFQG

SEQ ID NO: 16265 - protein, 11 aa, synthetic construct
  REGION 1..11: note = Description of Artificial Sequence: Synthetic peptide
  REGION 1..11: note = XENP017910 vhCDR3
EVYDGYLYFDV

SEQ ID NO: 16266 - protein, 219 aa, synthetic construct
  REGION 1..219: note = Description of Artificial Sequence: Synthetic polypeptide
  REGION 1..219: note = XENP017910 5H1_H1L1_IgG1_PVA_/S267K Light Chain
DVLMTQSPLSLPVTPGEPASISCRSSQSIVHSNGNTYLEWYLQKPGQSPQLLIYKVSNRFSGVPDRFGGRGSGTDFTLKISRVEAEDVGVYYCFQGSHVPYTFGGGTKVEIKRTVAAPSVFIFPPSDEQLKSGTASVVCLLNNFYPREAKVQWKVDNALQSGNSQESVTEQDSKDSTYSLSSTLTLSKADYEKHKVYACEVTHQGLSSPVTKSFNRGEC

SEQ ID NO: 16267 - protein, 112 aa, synthetic construct; identical to SEQ ID NO: 10959
  REGION 1..112: note = Description of Artificial Sequence: Synthetic polypeptide
  REGION 1..112: note = VL of XENP017910

SEQ ID NO: 16268 - protein, 16 aa, synthetic construct
  REGION 1..16: note = Description of Artificial Sequence: Synthetic peptide
  REGION 1..16: note = XENP017910 vlCDR1
RSSQSIVHSNGNTYLE

SEQ ID NO: 16269 - protein, 7 aa, synthetic construct
  REGION 1..7: note = Description of Artificial Sequence: Synthetic peptide
  REGION 1..7: note = XENP017910 vlCDR2
KVSNRFS

SEQ ID NO: 16270 - protein, 9 aa, synthetic construct
  REGION 1..9: note = Description of Artificial Sequence: Synthetic peptide
  REGION 1..9: note = XENP017910 vlCDR3
FQGSHVPYT

SEQ ID NO: 16271 - protein, 449 aa, synthetic construct; identical to SEQ ID NO: 16261
  REGION 1..449: note = Description of Artificial Sequence: Synthetic polypeptide
  REGION 1..449: note = XENP017911 5H1_H1L2_IgG1_PVA_/S267K Heavy Chain

SEQ ID NO: 16272 - protein, 120 aa, synthetic construct; identical to SEQ ID NO: 10958
  REGION 1..120: note = Description of Artificial Sequence: Synthetic polypeptide
  REGION 1..120: note = VH of XENP017911

SEQ ID NO: 16273 - protein, 5 aa, synthetic construct
  REGION 1..5: note = Description of Artificial Sequence: Synthetic peptide
  REGION 1..5: note = XENP017911 vhCDR1
DYVMH

SEQ ID NO: 16274 - protein, 17 aa, synthetic construct
  REGION 1..17: note = Description of Artificial Sequence: Synthetic peptide
  REGION 1..17: note = XENP017911 vhCDR2
VISIHYGDGRYNQKFQG

SEQ ID NO: 16275 - protein, 11 aa, synthetic construct
  REGION 1..11: note = Description of Artificial Sequence: Synthetic peptide
  REGION 1..11: note = XENP017911 vhCDR3
EVYDGYLYFDV

SEQ ID NO: 16276 - protein, 219 aa, synthetic construct
  REGION 1..219: note = Description of Artificial Sequence: Synthetic polypeptide
  REGION 1..219: note = XENP017911 5H1_H1L2_IgG1_PVA_/S267K Light Chain
DVLMTQSPLSLPVTLGQPASISCRSSQSIVHSNGNTYLEWYQQRPGQSPRLLIYKVSNRFSGVPDRFGGRGSGTDFTLKISRVEAEDVGVYYCFQGSHVPYTFGGGTKVEIKRTVAAPSVFIFPPSDEQLKSGTASVVCLLNNFYPREAKVQWKVDNALQSGNSQESVTEQDSKDSTYSLSSTLTLSKADYEKHKVYACEVTHQGLSSPVTKSFNRGEC

SEQ ID NO: 16277 - protein, 112 aa, synthetic construct; identical to SEQ ID NO: 10968
  REGION 1..112: note = Description of Artificial Sequence: Synthetic polypeptide
  REGION 1..112: note = VL of XENP017911

SEQ ID NO: 16278 - protein, 16 aa, synthetic construct
  REGION 1..16: note = Description of Artificial Sequence: Synthetic peptide
  REGION 1..16: note = XENP017911 vlCDR1
RSSQSIVHSNGNTYLE

SEQ ID NO: 16279 - protein, 7 aa, synthetic construct
  REGION 1..7: note = Description of Artificial Sequence: Synthetic peptide
  REGION 1..7: note = XENP017911 vlCDR2
KVSNRFS

SEQ ID NO: 16280 - protein, 9 aa, synthetic construct
  REGION 1..9: note = Description of Artificial Sequence: Synthetic peptide
  REGION 1..9: note = XENP017911 vlCDR3
FQGSHVPYT

SEQ ID NO: 16281 - protein, 449 aa, synthetic construct
  REGION 1..449: note = Description of Artificial Sequence: Synthetic polypeptide
  REGION 1..449: note = XENP017912 10E4_H1L1_IgG1_PVA_/S267K Heavy Chain
QVQLVQSGAEVKKPGASVKVSCKASGYSFTSYWMHWVRQAPGQGLEWMGAIYPGNSDTSYNQKFQGRVTMTADTSTSTAYMELSSLRSEDTAVYYCTRDGNYVRYYFDYWGQGTLVTVSSASTKGPSVFPLAPSSKSTSGGTAALGCLVKDYFPEPVTVSWNSGALTSGVHTFPAVLQSSGLYSLSSVVTVPSSSLGTQTYICNVNHKPSNTKVDKKVEPKSCDKTHTCPPCPAPPVAGPSVFLFPPKPKDTLMISRTPEVTCVVVDVKHEDPEVKFNWYVDGVEVHNAKTKPREEQYNSTYRVVSVLTVLHQDWLNGKEYKCKVSNKALPAPIEKTISKAKGQPREPQVYTLPPSREEMTKNQVSLTCLVKGFYPSDIAVEWESNGQPENNYKTTPPVLDSDGSFFLYSKLTVDKSRWQQGNVFSCSVMHEALHNHYTQKSLSLSPGK

SEQ ID NO: 16282 - protein, 120 aa, synthetic construct; identical to SEQ ID NO: 10976
  REGION 1..120: note = Description of Artificial Sequence: Synthetic polypeptide
  REGION 1..120: note = VH of XENP017912

SEQ ID NO: 16283 - protein, 5 aa, synthetic construct
  REGION 1..5: note = Description of Artificial Sequence: Synthetic peptide
  REGION 1..5: note = XENP017912 vhCDR1
SYWMH

SEQ ID NO: 16284 - protein, 17 aa, synthetic construct
  REGION 1..17: note = Description of Artificial Sequence: Synthetic peptide
  REGION 1..17: note = XENP017912 vhCDR2
AIYPGNSDTSYNQKFQG

SEQ ID NO: 16285 - protein, 11 aa, synthetic construct
  REGION 1..11: note = Description of Artificial Sequence: Synthetic peptide
  REGION 1..11: note = XENP017912 vhCDR3
DGNYVRYYFDY

SEQ ID NO: 16286 - protein, 214 aa, synthetic construct
  REGION 1..214: note = Description of Artificial Sequence: Synthetic polypeptide
  REGION 1..214: note = XENP017912 10E4_H1L1_IgG1_PVA_/S267K Light Chain
DIQMTQSPSSLSASVGDRVTITCRASQDIGSNLNWLQQKPGKTIKRLIYATSNLDSGVPKRFSGRRSGSDYTLTISSLQPEDFATYYCLQYASSPLTFGTGTKLEIKRTVAAPSVFIFPPSDEQLKSGTASVVCLLNNFYPREAKVQWKVDNALQSGNSQESVTEQDSKDSTYSLSSTLTLSKADYEKHKVYACEVTHQGLSSPVTKSFNRGEC

SEQ ID NO: 16287 - protein, 107 aa, synthetic construct; identical to SEQ ID NO: 10977
  REGION 1..107: note = Description of Artificial Sequence: Synthetic polypeptide
  REGION 1..107: note = VL of XENP017912

SEQ ID NO: 16288 - protein, 11 aa, synthetic construct
  REGION 1..11: note = Description of Artificial Sequence: Synthetic peptide
  REGION 1..11: note = XENP017912 vlCDR1
RASQDIGSNLN

SEQ ID NO: 16289 - protein, 7 aa, synthetic construct
  REGION 1..7: note = Description of Artificial Sequence: Synthetic peptide
  REGION 1..7: note = XENP017912 vlCDR2
ATSNLDS

SEQ ID NO: 16290 - protein, 9 aa, synthetic construct
  REGION 1..9: note = Description of Artificial Sequence: Synthetic peptide
  REGION 1..9: note = XENP017912 vlCDR3
LQYASSPLT

SEQ ID NO: 16291 - protein, 449 aa, synthetic construct
  REGION 1..449: note = Description of Artificial Sequence: Synthetic polypeptide
  REGION 1..449: note = XENP017913 4C11_H1L1_IgG1_PVA_/S267K Heavy Chain
QIQLVQSGAEVKKPGASVKVSCKASGYTFTSYWMHWVRQAPGQGLEWMGAIYPGNSDTSYNQKFQGRVTMTADTSTSTAYMELSSLRSEDTAVYYCTNLYYGSSFAMDYWGQGTLVTVSSASTKGPSVFPLAPSSKSTSGGTAALGCLVKDYFPEPVTVSWNSGALTSGVHTFPAVLQSSGLYSLSSVVTVPSSSLGTQTYICNVNHKPSNTKVDKKVEPKSCDKTHTCPPCPAPPVAGPSVFLFPPKPKDTLMISRTPEVTCVVVDVKHEDPEVKFNWYVDGVEVHNAKTKPREEQYNSTYRVVSVLTVLHQDWLNGKEYKCKVSNKALPAPIEKTISKAKGQPREPQVYTLPPSREEMTKNQVSLTCLVKGFYPSDIAVEWESNGQPENNYKTTPPVLDSDGSFFLYSKLTVDKSRWQQGNVFSCSVMHEALHNHYTQKSLSLSPGK

SEQ ID NO: 16292 - protein, 120 aa, synthetic construct; identical to SEQ ID NO: 10985
  REGION 1..120: note = Description of Artificial Sequence: Synthetic polypeptide
  REGION 1..120: note = VH of XENP017913

SEQ ID NO: 16293 - protein, 5 aa, synthetic construct
  REGION 1..5: note = Description of Artificial Sequence: Synthetic peptide
  REGION 1..5: note = XENP017913 vhCDR1
SYWMH

SEQ ID NO: 16294 - protein, 17 aa, synthetic construct
  REGION 1..17: note = Description of Artificial Sequence: Synthetic peptide
  REGION 1..17: note = XENP017913 vhCDR2
AIYPGNSDTSYNQKFQG

SEQ ID NO: 16295 - protein, 11 aa, synthetic construct
  REGION 1..11: note = Description of Artificial Sequence: Synthetic peptide
  REGION 1..11: note = XENP017913 vhCDR3
LYYGSSFAMDY

SEQ ID NO: 16296 - protein, 214 aa, synthetic construct
  REGION 1..214: note = Description of Artificial Sequence: Synthetic polypeptide
  REGION 1..214: note = XENP017913 4C11_H1L1_IgG1_PVA_/S267K Light Chain
DIKMTQSPSSLSASVGDRVTITCRASQDINTYLSWFQQKPGKSPKTLIYRANRLVDGVPSRFSGSGSGQDYTLTISSLQPEDFATYYCLHYDDFPYTFGGGTKVEIKRTVAAPSVFIFPPSDEQLKSGTASVVCLLNNFYPREAKVQWKVDNALQSGNSQESVTEQDSKDSTYSLSSTLTLSKADYEKHKVYACEVTHQGLSSPVTKSFNRGEC

SEQ ID NO: 16297 - protein, 107 aa, synthetic construct; identical to SEQ ID NO: 10986
  REGION 1..107: note = Description of Artificial Sequence: Synthetic polypeptide
  REGION 1..107: note = VL of XENP017913

SEQ ID NO: 16298 - protein, 11 aa, synthetic construct
  REGION 1..11: note = Description of Artificial Sequence: Synthetic peptide
  REGION 1..11: note = XENP017913 vlCDR1
RASQDINTYLS

SEQ ID NO: 16299 - protein, 7 aa, synthetic construct
  REGION 1..7: note = Description of Artificial Sequence: Synthetic peptide
  REGION 1..7: note = XENP017913 vlCDR2
RANRLVD

SEQ ID NO: 16300 - protein, 9 aa, synthetic construct
  REGION 1..9: note = Description of Artificial Sequence: Synthetic peptide
  REGION 1..9: note = XENP017913 vlCDR3
LHYDDFPYT

SEQ ID NO: 16301 - protein, 446 aa, synthetic construct
  REGION 1..446: note = Description of Artificial Sequence: Synthetic polypeptide
  REGION 1..446: note = XENP017914 6A3_H1L1_IgG1_PVA_/S267K Heavy Chain
EVQLLESGGGLVQPGGSLRLSCAASGFTFSSYGMSWVRQAPGKRLEWVSTISGGGRYTYYPDSVKGRFTISRDNSKNTLYLQMNSLRAEDTAVYYCASYYDSSFDYWGQGTLVTVSSASTKGPSVFPLAPSSKSTSGGTAALGCLVKDYFPEPVTVSWNSGALTSGVHTFPAVLQSSGLYSLSSVVTVPSSSLGTQTYICNVNHKPSNTKVDKKVEPKSCDKTHTCPPCPAPPVAGPSVFLFPPKPKDTLMISRTPEVTCVVVDVKHEDPEVKFNWYVDGVEVHNAKTKPREEQYNSTYRVVSVLTVLHQDWLNGKEYKCKVSNKALPAPIEKTISKAKGQPREPQVYTLPPSREEMTKNQVSLTCLVKGFYPSDIAVEWESNGQPENNYKTTPPVLDSDGSFFLYSKLTVDKSRWQQGNVFSCSVMHEALHNHYTQKSLSLSPGK

SEQ ID NO: 16302 - protein, 117 aa, synthetic construct; identical to SEQ ID NO: 10994
  REGION 1..117: note = Description of Artificial Sequence: Synthetic polypeptide
  REGION 1..117: note = VH of XENP017914

SEQ ID NO: 16303 - protein, 5 aa, synthetic construct
  REGION 1..5: note = Description of Artificial Sequence: Synthetic peptide
  REGION 1..5: note = XENP017914 vhCDR1
SYGMS

SEQ ID NO: 16304 - protein, 17 aa, synthetic construct
  REGION 1..17: note = Description of Artificial Sequence: Synthetic peptide
  REGION 1..17: note = XENP017914 vhCDR2
TISGGGRYTYYPDSVKG

SEQ ID NO: 16305 - protein, 8 aa, synthetic construct
  REGION 1..8: note = Description of Artificial Sequence: Synthetic peptide
  REGION 1..8: note = XENP017914 vhCDR3
YYDSSFDY

SEQ ID NO: 16306 - protein, 214 aa, synthetic construct
  REGION 1..214: note = Description of Artificial Sequence: Synthetic polypeptide
  REGION 1..214: note = XENP017914 6A3_H1L1_IgG1_PVA_/S267K Light Chain
DIVMTQSPDSLAVSLGERATINCKASQDVGTAVAWYQQKPGQSPKLLIYWASTRHTGVPDRFTGSGSGTDFTLTISSLQAEDVAVYFCQHYSIYPWTFGGGTKVEIKRTVAAPSVFIFPPSDEQLKSGTASVVCLLNNFYPREAKVQWKVDNALQSGNSQESVTEQDSKDSTYSLSSTLTLSKADYEKHKVYACEVTHQGLSSPVTKSFNRGEC

SEQ ID NO: 16307 - protein, 107 aa, synthetic construct; identical to SEQ ID NO: 10995
  REGION 1..107: note = Description of Artificial Sequence: Synthetic polypeptide
  REGION 1..107: note = VL of XENP017914

SEQ ID NO: 16308 - protein, 11 aa, synthetic construct
  REGION 1..11: note = Description of Artificial Sequence: Synthetic peptide
  REGION 1..11: note = XENP017914 vlCDR1
KASQDVGTAVA

SEQ ID NO: 16309 - protein, 7 aa, synthetic construct
  REGION 1..7: note = Description of Artificial Sequence: Synthetic peptide
  REGION 1..7: note = XENP017914 vlCDR2
WASTRHT

SEQ ID NO: 16310 - protein, 9 aa, synthetic construct
  REGION 1..9: note = Description of Artificial Sequence: Synthetic peptide
  REGION 1..9: note = XENP017914 vlCDR3
QHYSIYPWT

SEQ ID NO: 16311 - protein, 446 aa, synthetic construct; identical to SEQ ID NO: 16301
  REGION 1..446: note = Description of Artificial Sequence: Synthetic polypeptide
  REGION 1..446: note = XENP017915 6A3_H1L2_IgG1_PVA_/S267K Heavy Chain

SEQ ID NO: 16312 - protein, 117 aa, synthetic construct; identical to SEQ ID NO: 10994
  REGION 1..117: note = Description of Artificial Sequence: Synthetic polypeptide
  REGION 1..117: note = VH of XENP017915

SEQ ID NO: 16313 - protein, 5 aa, synthetic construct
  REGION 1..5: note = Description of Artificial Sequence: Synthetic peptide
  REGION 1..5: note = XENP017915 vhCDR1
SYGMS

SEQ ID NO: 16314 - protein, 17 aa, synthetic construct
  REGION 1..17: note = Description of Artificial Sequence: Synthetic peptide
  REGION 1..17: note = XENP017915 vhCDR2
TISGGGRYTYYPDSVKG

SEQ ID NO: 16315 - protein, 8 aa, synthetic construct
  REGION 1..8: note = Description of Artificial Sequence: Synthetic peptide
  REGION 1..8: note = XENP017915 vhCDR3
YYDSSFDY

SEQ ID NO: 16316 - protein, 214 aa, synthetic construct
  REGION 1..214: note = Description of Artificial Sequence: Synthetic polypeptide
  REGION 1..214: note = XENP017915 6A3_H1L2_IgG1_PVA_/S267K Light Chain
DIVMTQSPATLSVSPGERATLSCRASQDVGTAVAWYQQKPGQSPRLLIYWASTRHTGVPDRFTGSGSGTEFTLTISSLQSEDFAVYFCQHYSIYPWTFGGGTKVEIKRTVAAPSVFIFPPSDEQLKSGTASVVCLLNNFYPREAKVQWKVDNALQSGNSQESVTEQDSKDSTYSLSSTLTLSKADYEKHKVYACEVTHQGLSSPVTKSFNRGEC

SEQ ID NO: 16317 - protein, 107 aa, synthetic construct; identical to SEQ ID NO: 11004
  REGION 1..107: note = Description of Artificial Sequence: Synthetic polypeptide
  REGION 1..107: note = VL of XENP017915

SEQ ID NO: 16318 - protein, 11 aa, synthetic construct
  REGION 1..11: note = Description of Artificial Sequence: Synthetic peptide
  REGION 1..11: note = XENP017915 vlCDR1
RASQDVGTAVA

SEQ ID NO: 16319 - protein, 7 aa, synthetic construct
  REGION 1..7: note = Description of Artificial Sequence: Synthetic peptide
  REGION 1..7: note = XENP017915 vlCDR2
WASTRHT

SEQ ID NO: 16320 - protein, 9 aa, synthetic construct
  REGION 1..9: note = Description of Artificial Sequence: Synthetic peptide
  REGION 1..9: note = XENP017915 vlCDR3
QHYSIYPWT

SEQ ID NO: 16321 - protein, 446 aa, synthetic construct; identical to SEQ ID NO: 16301
  REGION 1..446: note = Description of Artificial Sequence: Synthetic polypeptide
  REGION 1..446: note = XENP017916 6A3_H1L3_IgG1_PVA_/S267K Heavy Chain

SEQ ID NO: 16322 - protein, 117 aa, synthetic construct; identical to SEQ ID NO: 10994
  REGION 1..117: note = Description of Artificial Sequence: Synthetic polypeptide
  REGION 1..117: note = VH of XENP017916

SEQ ID NO: 16323 - protein, 5 aa, synthetic construct
  REGION 1..5: note = Description of Artificial Sequence: Synthetic peptide
  REGION 1..5: note = XENP017916 vhCDR1
SYGMS

SEQ ID NO: 16324 - protein, 17 aa, synthetic construct
  REGION 1..17: note = Description of Artificial Sequence: Synthetic peptide
  REGION 1..17: note = XENP017916 vhCDR2
TISGGGRYTYYPDSVKG

SEQ ID NO: 16325 - protein, 8 aa, synthetic construct
  REGION 1..8: note = Description of Artificial Sequence: Synthetic peptide
  REGION 1..8: note = XENP017916 vhCDR3
YYDSSFDY

SEQ ID NO: 16326 - protein, 214 aa, synthetic construct
  REGION 1..214: note = Description of Artificial Sequence: Synthetic polypeptide
  REGION 1..214: note = XENP017916 6A3_H1L3_IgG1_PVA_/S267K Light Chain
DIVMTQSPSSLSASVGDRVTITCRASQDVGTAVAWYQQKPGKSPKLLIYWASTRHTGVPDRFTGSGSGTDFTLTISSLQPEDFATYFCQHYSIYPWTFGGGTKVEIKRTVAAPSVFIFPPSDEQLKSGTASVVCLLNNFYPREAKVQWKVDNALQSGNSQESVTEQDSKDSTYSLSSTLTLSKADYEKHKVYACEVTHQGLSSPVTKSFNRGEC

SEQ ID NO: 16327 - protein, 107 aa, synthetic construct; identical to SEQ ID NO: 11013
  REGION 1..107: note = Description of Artificial Sequence: Synthetic polypeptide
  REGION 1..107: note = VL of XENP017916

SEQ ID NO: 16328 - protein, 11 aa, synthetic construct
  REGION 1..11: note = Description of Artificial Sequence: Synthetic peptide
  REGION 1..11: note = XENP017916 vlCDR1
RASQDVGTAVA

SEQ ID NO: 16329 - protein, 7 aa, synthetic construct
  REGION 1..7: note = Description of Artificial Sequence: Synthetic peptide
  REGION 1..7: note = XENP017916 vlCDR2
WASTRHT

SEQ ID NO: 16330 - protein, 9 aa, synthetic construct
  REGION 1..9: note = Description of Artificial Sequence: Synthetic peptide
  REGION 1..9: note = XENP017916 vlCDR3
QHYSIYPWT

SEQ ID NO: 16331 - protein, 446 aa, synthetic construct
  REGION 1..446: note = Description of Artificial Sequence: Synthetic polypeptide
  REGION 1..446: note = XENP017917 6A3_H2L3_IgG1_PVA_/S267K Heavy Chain
EVQLLESGGGLVQPGGSLRLSCAASGFTFSSYGMSWVRQAPGKGLEWVSTISGGGRYTYYPDSVKGRFTISRDNSKNTLYLQMNSLRAEDTAVYYCASYYDSSFDYWGQGTLVTVSSASTKGPSVFPLAPSSKSTSGGTAALGCLVKDYFPEPVTVSWNSGALTSGVHTFPAVLQSSGLYSLSSVVTVPSSSLGTQTYICNVNHKPSNTKVDKKVEPKSCDKTHTCPPCPAPPVAGPSVFLFPPKPKDTLMISRTPEVTCVVVDVKHEDPEVKFNWYVDGVEVHNAKTKPREEQYNSTYRVVSVLTVLHQDWLNGKEYKCKVSNKALPAPIEKTISKAKGQPREPQVYTLPPSREEMTKNQVSLTCLVKGFYPSDIAVEWESNGQPENNYKTTPPVLDSDGSFFLYSKLTVDKSRWQQGNVFSCSVMHEALHNHYTQKSLSLSPGK

SEQ ID NO: 16332 - protein, 117 aa, synthetic construct; identical to SEQ ID NO: 11030
  REGION 1..117: note = Description of Artificial Sequence: Synthetic polypeptide
  REGION 1..117: note = VH of XENP017917

SEQ ID NO: 16333 - protein, 5 aa, synthetic construct
  REGION 1..5: note = Description of Artificial Sequence: Synthetic peptide
  REGION 1..5: note = XENP017917 vhCDR1
SYGMS

SEQ ID NO: 16334 - protein, 17 aa, synthetic construct
  REGION 1..17: note = Description of Artificial Sequence: Synthetic peptide
  REGION 1..17: note = XENP017917 vhCDR2
TISGGGRYTYYPDSVKG

SEQ ID NO: 16335 - protein, 8 aa, synthetic construct
  REGION 1..8: note = Description of Artificial Sequence: Synthetic peptide
  REGION 1..8: note = XENP017917 vhCDR3
YYDSSFDY

SEQ ID NO: 16336 - protein, 214 aa, synthetic construct; identical to SEQ ID NO: 16326
  REGION 1..214: note = Description of Artificial Sequence: Synthetic polypeptide
  REGION 1..214: note = XENP017917 6A3_H2L3_IgG1_PVA_/S267K Light Chain

SEQ ID NO: 16337 - protein, 107 aa, synthetic construct; identical to SEQ ID NO: 11013
  REGION 1..107: note = Description of Artificial Sequence: Synthetic polypeptide
  REGION 1..107: note = VL of XENP017917

SEQ ID NO: 16338 - protein, 11 aa, synthetic construct
  REGION 1..11: note = Description of Artificial Sequence: Synthetic peptide
  REGION 1..11: note = XENP017917 vlCDR1
RASQDVGTAVA

SEQ ID NO: 16339 - protein, 7 aa, synthetic construct
  REGION 1..7: note = Description of Artificial Sequence: Synthetic peptide
  REGION 1..7: note = XENP017917 vlCDR2
WASTRHT

SEQ ID NO: 16340 - protein, 9 aa, synthetic construct
  REGION 1..9: note = Description of Artificial Sequence: Synthetic peptide
  REGION 1..9: note = XENP017917 vlCDR3
QHYSIYPWT

SEQ ID NO: 16341 - protein, 446 aa, synthetic construct
  REGION 1..446: note = Description of Artificial Sequence: Synthetic polypeptide
  REGION 1..446: note = XENP017918 6A3_H1.1_L3_IgG1_PVA_/S267K Heavy Chain
QVQLVESGGGLVKPGGSLRLSCAASGFTFSSYGMSWVRQAPGKRLEWVSTISGGGRYTYYPDSVKGRFTISRDNAKNSLYLQMNSLRAEDTAVYYCASYYDSSFDYWGQGTLVTVSSASTKGPSVFPLAPSSKSTSGGTAALGCLVKDYFPEPVTVSWNSGALTSGVHTFPAVLQSSGLYSLSSVVTVPSSSLGTQTYICNVNHKPSNTKVDKKVEPKSCDKTHTCPPCPAPPVAGPSVFLFPPKPKDTLMISRTPEVTCVVVDVKHEDPEVKFNWYVDGVEVHNAKTKPREEQYNSTYRVVSVLTVLHQDWLNGKEYKCKVSNKALPAPIEKTISKAKGQPREPQVYTLPPSREEMTKNQVSLTCLVKGFYPSDIAVEWESNGQPENNYKTTPPVLDSDGSFFLYSKLTVDKSRWQQGNVFSCSVMHEALHNHYTQKSLSLSPGK

SEQ ID NO: 16342 - protein, 117 aa, synthetic construct; identical to SEQ ID NO: 11021
  REGION 1..117: note = Description of Artificial Sequence: Synthetic polypeptide
  REGION 1..117: note = VH of XENP017918

SEQ ID NO: 16343 - protein, 5 aa, synthetic construct
  REGION 1..5: note = Description of Artificial Sequence: Synthetic peptide
  REGION 1..5: note = XENP017918 vhCDR1
SYGMS

SEQ ID NO: 16344 - protein, 17 aa, synthetic construct
  REGION 1..17: note = Description of Artificial Sequence: Synthetic peptide
  REGION 1..17: note = XENP017918 vhCDR2
TISGGGRYTYYPDSVKG

SEQ ID NO: 16345 - protein, 8 aa, synthetic construct
  REGION 1..8: note = Description of Artificial Sequence: Synthetic peptide
  REGION 1..8: note = XENP017918 vhCDR3
YYDSSFDY

SEQ ID NO: 16346 - protein, 214 aa, synthetic construct; identical to SEQ ID NO: 16326
  REGION 1..214: note = Description of Artificial Sequence: Synthetic polypeptide
  REGION 1..214: note = XENP017918 6A3_H1.1_L3_IgG1_PVA_/S267K Light Chain

SEQ ID NO: 16347 - protein, 107 aa, synthetic construct; identical to SEQ ID NO: 11013
  REGION 1..107: note = Description of Artificial Sequence: Synthetic polypeptide
  REGION 1..107: note = VL of XENP017918

SEQ ID NO: 16348 - protein, 11 aa, synthetic construct
  REGION 1..11: note = Description of Artificial Sequence: Synthetic peptide
  REGION 1..11: note = XENP017918 vlCDR1
RASQDVGTAVA

SEQ ID NO: 16349 - protein, 7 aa, synthetic construct
  REGION 1..7: note = Description of Artificial Sequence: Synthetic peptide
  REGION 1..7: note = XENP017918 vlCDR2
WASTRHT

SEQ ID NO: 16350 - protein, 9 aa, synthetic construct
  REGION 1..9: note = Description of Artificial Sequence: Synthetic peptide
  REGION 1..9: note = XENP017918 vlCDR3
QHYSIYPWT

SEQ ID NO: 16351 - protein, 451 aa, synthetic construct
  REGION 1..451: note = Description of Artificial Sequence: Synthetic polypeptide
  REGION 1..451: note = XENP018089 H1M7789N_H0L0_IgG1 Heavy Chain
EVQLLESGGGLVQPGGSLRLSCSASGFTFSSYTMNWVRQAPGKGLEWVSGISDTGGNTYYTDSVKGRFTVSRDNSKNTLSLQMNSLRAEDTAVYYCAKDQGGSYPYYFHYWGQGSLVTVSSASTKGPSVFPLAPSSKSTSGGTAALGCLVKDYFPEPVTVSWNSGALTSGVHTFPAVLQSSGLYSLSSVVTVPSSSLGTQTYICNVNHKPSNTKVDKKVEPKSCDKTHTCPPCPAPELLGGPSVFLFPPKPKDTLMISRTPEVTCVVVDVSHEDPEVKFNWYVDGVEVHNAKTKPREEQYNSTYRVVSVLTVLHQDWLNGKEYKCKVSNKALPAPIEKTISKAKGQPREPQVYTLPPSREEMTKNQVSLTCLVKGFYPSDIAVEWESNGQPENNYKTTPPVLDSDGSFFLYSKLTVDKSRWQQGNVFSCSVMHEALHNHYTQKSLSLSPGK

SEQ ID NO: 16352 - protein, 121 aa, synthetic construct
  REGION 1..121: note = Description of Artificial Sequence: Synthetic polypeptide
  REGION 1..121: note = VH of XENP018089
EVQLLESGGGLVQPGGSLRLSCSASGFTFSSYTMNWVRQAPGKGLEWVSGISDTGGNTYYTDSVKGRFTVSRDNSKNTLSLQMNSLRAEDTAVYYCAKDQGGSYPYYFHYWGQGSLVTVSS

SEQ ID NO: 16353 - protein, 5 aa, synthetic construct
  REGION 1..5: note = Description of Artificial Sequence: Synthetic peptide
  REGION 1..5: note = XENP018089 vhCDR1
SYTMN

SEQ ID NO: 16354 - protein, 17 aa, synthetic construct
  REGION 1..17: note = Description of Artificial Sequence: Synthetic peptide
  REGION 1..17: note = XENP018089 vhCDR2
GISDTGGNTYYTDSVKG

SEQ ID NO: 16355 - protein, 12 aa, synthetic construct
  REGION 1..12: note = Description of Artificial Sequence: Synthetic peptide
  REGION 1..12: note = XENP018089 vhCDR3
DQGGSYPYYFHY

SEQ ID NO: 16356 - protein, 215 aa, synthetic construct
  REGION 1..215: note = Description of Artificial Sequence: Synthetic polypeptide
  REGION 1..215: note = XENP018089 H1M7789N_H0L0_IgG1 Light Chain
DIQMTQSPSSLSASVGDRVTITCRASQSISSYLIWYQQKPGTAPKFLIYAASSLQSGVPSRFSGSGSGTDFTLTISSLQPEDFATYYCQQSYSTPPITFGQGTRLEIKRTVAAPSVFIFPPSDEQLKSGTASVVCLLNNFYPREAKVQWKVDNALQSGNSQESVTEQDSKDSTYSLSSTLTLSKADYEKHKVYACEVTHQGLSSPVTKSFNRGEC

SEQ ID NO: 16357 - protein, 108 aa, synthetic construct
  REGION 1..108: note = Description of Artificial Sequence: Synthetic polypeptide
  REGION 1..108: note = VL of XENP018089
DIQMTQSPSSLSASVGDRVTITCRASQSISSYLIWYQQKPGTAPKFLIYAASSLQSGVPSRFSGSGSGTDFTLTISSLQPEDFATYYCQQSYSTPPITFGQGTRLEIK

SEQ ID NO: 16358 - protein, 11 aa, synthetic construct
  REGION 1..11: note = Description of Artificial Sequence: Synthetic peptide
  REGION 1..11: note = XENP018089 vlCDR1
RASQSISSYLI

SEQ ID NO: 16359 - protein, 7 aa, synthetic construct
  REGION 1..7: note = Description of Artificial Sequence: Synthetic peptide
  REGION 1..7: note = XENP018089 vlCDR2
AASSLQS

SEQ ID NO: 16360 - protein, 10 aa, synthetic construct
  REGION 1..10: note = Description of Artificial Sequence: Synthetic peptide
  REGION 1..10: note = XENP018089 vlCDR3
QQSYSTPPIT

SEQ ID NO: 16361 - protein, 446 aa, synthetic construct
  REGION 1..446: note = Description of Artificial Sequence: Synthetic polypeptide
  REGION 1..446: note = XENP018090 H2aM7791N_H0L0_IgG1 Heavy Chain
QMQLQQWGAGLLKPSETLSLTCVVYGGSLNGYYWSWIRQSPGKGLEWIGEIDHSGSTNYNPSLKNRVTMSVDTSKIQFSLKLTSVTVADTAVYYCAREGLLPFDYWGQGTLVTVSSASTKGPSVFPLAPSSKSTSGGTAALGCLVKDYFPEPVTVSWNSGALTSGVHTFPAVLQSSGLYSLSSVVTVPSSSLGTQTYICNVNHKPSNTKVDKKVEPKSCDKTHTCPPCPAPELLGGPSVFLFPPKPKDTLMISRTPEVTCVVVDVSHEDPEVKFNWYVDGVEVHNAKTKPREEQYNSTYRVVSVLTVLHQDWLNGKEYKCKVSNKALPAPIEKTISKAKGQPREPQVYTLPPSREEMTKNQVSLTCLVKGFYPSDIAVEWESNGQPENNYKTTPPVLDSDGSFFLYSKLTVDKSRWQQGNVFSCSVMHEALHNHYTQKSLSLSPGK

SEQ ID NO: 16362 - protein, 116 aa, synthetic construct
  REGION 1..116: note = Description of Artificial Sequence: Synthetic polypeptide
  REGION 1..116: note = VH of XENP018090
QMQLQQWGAGLLKPSETLSLTCVVYGGSLNGYYWSWIRQSPGKGLEWIGEIDHSGSTNYNPSLKNRVTMSVDTSKIQFSLKLTSVTVADTAVYYCAREGLLPFDYWGQGTLVTVSS

SEQ ID NO: 16363 - protein, 5 aa, synthetic construct
  REGION 1..5: note = Description of Artificial Sequence: Synthetic peptide
  REGION 1..5: note = XENP018090 vhCDR1
GYYWS

SEQ ID NO: 16364 - protein, 16 aa, synthetic construct
  REGION 1..16: note = Description of Artificial Sequence: Synthetic peptide
  REGION 1..16: note = XENP018090 vhCDR2
EIDHSGSTNYNPSLKN

SEQ ID NO: 16365 - protein, 8 aa, synthetic construct
  REGION 1..8: note = Description of Artificial Sequence: Synthetic peptide
  REGION 1..8: note = XENP018090 vhCDR3
EGLLPFDY

SEQ ID NO: 16366 - protein, 215 aa, synthetic construct
  REGION 1..215: note = Description of Artificial Sequence: Synthetic polypeptide
  REGION 1..215: note = XENP018090 H2aM7791N_H0L0_IgG1 Light Chain
EIVLTQSPGTLSLSPGERVTLSCRASQSVYSNYLAWYQQNPGQAPRLLIYAASNRATGIPDRFSGSGSGTDFTLTISRLEPEDFAVYYCHQYATSPWTFGQGTKVEIKRTVAAPSVFIFPPSDEQLKSGTASVVCLLNNFYPREAKVQWKVDNALQSGNSQESVTEQDSKDSTYSLSSTLTLSKADYEKHKVYACEVTHQGLSSPVTKSFNRGEC

SEQ ID NO: 16367 - protein, 108 aa, synthetic construct
  REGION 1..108: note = Description of Artificial Sequence: Synthetic polypeptide
  REGION 1..108: note = VL of XENP018090
EIVLTQSPGTLSLSPGERVTLSCRASQSVYSNYLAWYQQNPGQAPRLLIYAASNRATGIPDRFSGSGSGTDFTLTISRLEPEDFAVYYCHQYATSPWTFGQGTKVEIK

SEQ ID NO: 16368 - protein, 12 aa, synthetic construct
  REGION 1..12: note = Description of Artificial Sequence: Synthetic peptide
  REGION 1..12: note = XENP018090 vlCDR1
RASQSVYSNYLA

SEQ ID NO: 16369 - protein, 7 aa, synthetic construct
  REGION 1..7: note = Description of Artificial Sequence: Synthetic peptide
  REGION 1..7: note = XENP018090 vlCDR2
AASNRAT

SEQ ID NO: 16370 - protein, 9 aa, synthetic construct
  REGION 1..9: note = Description of Artificial Sequence: Synthetic peptide
  REGION 1..9: note = XENP018090 vlCDR3
HQYATSPWT

SEQ ID NO: 16371 - protein, 446 aa, synthetic construct
  REGION 1..446: note = Description of Artificial Sequence: Synthetic polypeptide
  REGION 1..446: note = XENP018091 H2aM7796N_H0L0_IgG1 Heavy Chain
QVQLVESGGGVVQPGRSLRLSCAASGFTFSSYGMHWVRQAPGKGLEWVAIIWSDGDSEYNLDSVKGRFTISRDNSKNTLYLQMNSLRVEDSAVYYCARDRDLEDIWGQGTMVTVSSASTKGPSVFPLAPSSKSTSGGTAALGCLVKDYFPEPVTVSWNSGALTSGVHTFPAVLQSSGLYSLSSVVTVPSSSLGTQTYICNVNHKPSNTKVDKKVEPKSCDKTHTCPPCPAPELLGGPSVFLFPPKPKDTLMISRTPEVTCVVVDVSHEDPEVKFNWYVDGVEVHNAKTKPREEQYNSTYRVVSVLTVLHQDWLNGKEYKCKVSNKALPAPIEKTISKAKGQPREPQVYTLPPSREEMTKNQVSLTCLVKGFYPSDIAVEWESNGQPENNYKTTPPVLDSDGSFFLYSKLTVDKSRWQQGNVFSCSVMHEALHNHYTQKSLSLSPGK

SEQ ID NO: 16372 - protein, 116 aa, synthetic construct
  REGION 1..116: note = Description of Artificial Sequence: Synthetic polypeptide
  REGION 1..116: note = VH of XENP018091
QVQLVESGGGVVQPGRSLRLSCAASGFTFSSYGMHWVRQAPGKGLEWVAIIWSDGDSEYNLDSVKGRFTISRDNSKNTLYLQMNSLRVEDSAVYYCARDRDLEDIWGQGTMVTVSS

SEQ ID NO: 16373 - protein, 5 aa, synthetic construct
  REGION 1..5: note = Description of Artificial Sequence: Synthetic peptide
  REGION 1..5: note = XENP018091 vhCDR1
SYGMH

SEQ ID NO: 16374 - protein, 17 aa, synthetic construct
  REGION 1..17: note = Description of Artificial Sequence: Synthetic peptide
  REGION 1..17: note = XENP018091 vhCDR2
IIWSDGDSEYNLDSVKG

SEQ ID NO: 16375 - protein, 7 aa, synthetic construct
  REGION 1..7: note = Description of Artificial Sequence: Synthetic peptide
  REGION 1..7: note = XENP018091 vhCDR3
DRDLEDI

SEQ ID NO: 16376 - protein, 214 aa, synthetic construct
  REGION 1..214: note = Description of Artificial Sequence: Synthetic polypeptide
  REGION 1..214: note = XENP018091 H2aM7796N_H0L0_IgG1 Light Chain
DIQMTQSPSSLSASVGDRVTITCRASQGIRNDLGWYQQKPGKAPKRLIYAASNLQSGVPSRFSGSGSGTEFTLTISSLQPEDFATYYCLQHNSYPLTFGGGTKVEIKRTVAAPSVFIFPPSDEQLKSGTASVVCLLNNFYPREAKVQWKVDNALQSGNSQESVTEQDSKDSTYSLSSTLTLSKADYEKHKVYACEVTHQGLSSPVTKSFNRGEC

SEQ ID NO: 16377 - protein, 107 aa, synthetic construct
  REGION 1..107: note = Description of Artificial Sequence: Synthetic polypeptide
  REGION 1..107: note = VL of XENP018091
DIQMTQSPSSLSASVGDRVTITCRASQGIRNDLGWYQQKPGKAPKRLIYAASNLQSGVPSRFSGSGSGTEFTLTISSLQPEDFATYYCLQHNSYPLTFGGGTKVEIK

SEQ ID NO: 16378 - protein, 11 aa, synthetic construct
  REGION 1..11: note = Description of Artificial Sequence: Synthetic peptide
  REGION 1..11: note = XENP018091 vlCDR1
RASQGIRNDLG

SEQ ID NO: 16379 - protein, 7 aa, synthetic construct
  REGION 1..7: note = Description of Artificial Sequence: Synthetic peptide
  REGION 1..7: note = XENP018091 vlCDR2
AASNLQS

SEQ ID NO: 16380 - protein, 9 aa, synthetic construct
  REGION 1..9: note = Description of Artificial Sequence: Synthetic peptide
  REGION 1..9: note = XENP018091 vlCDR3
LQHNSYPLT

SEQ ID NO: 16381 - protein, 451 aa, synthetic construct
  REGION 1..451: note = Description of Artificial Sequence: Synthetic polypeptide
  REGION 1..451: note = XENP018092 H4H9057P2_H0L0_IgG1 Heavy Chain
EVQLVESGGGLVQSGRSLRLSCAASGFTFDDYAMHWVRQPPGKGLEWVSGINWNRGRTGYADSVKGRFTISRDNAKNSLYLQMNDLRVEDTALYYCAKAEQWLDEGYFDYWGQGTLVTVSSASTKGPSVFPLAPSSKSTSGGTAALGCLVKDYFPEPVTVSWNSGALTSGVHTFPAVLQSSGLYSLSSVVTVPSSSLGTQTYICNVNHKPSNTKVDKKVEPKSCDKTHTCPPCPAPELLGGPSVFLFPPKPKDTLMISRTPEVTCVVVDVSHEDPEVKFNWYVDGVEVHNAKTKPREEQYNSTYRVVSVLTVLHQDWLNGKEYKCKVSNKALPAPIEKTISKAKGQPREPQVYTLPPSREEMTKNQVSLTCLVKGFYPSDIAVEWESNGQPENNYKTTPPVLDSDGSFFLYSKLTVDKSRWQQGNVFSCSVMHEALHNHYTQKSLSLSPGK

SEQ ID NO: 16382 - protein, 121 aa, synthetic construct
  REGION 1..121: note = Description of Artificial Sequence: Synthetic polypeptide
  REGION 1..121: note = VH of XENP018092
EVQLVESGGGLVQSGRSLRLSCAASGFTFDDYAMHWVRQPPGKGLEWVSGINWNRGRTGYADSVKGRFTISRDNAKNSLYLQMNDLRVEDTALYYCAKAEQWLDEGYFDYWGQGTLVTVSS

SEQ ID NO: 16383 - protein, 5 aa, synthetic construct
  REGION 1..5: note = Description of Artificial Sequence: Synthetic peptide
  REGION 1..5: note = XENP018092 vhCDR1
DYAMH

SEQ ID NO: 16384 - protein, 17 aa, synthetic construct
  REGION 1..17: note = Description of Artificial Sequence: Synthetic peptide
  REGION 1..17: note = XENP018092 vhCDR2
GINWNRGRTGYADSVKG

SEQ ID NO: 16385 - protein, 12 aa, synthetic construct
  REGION 1..12: note = Description of Artificial Sequence: Synthetic peptide
  REGION 1..12: note = XENP018092 vhCDR3
AEQWLDEGYFDY

SEQ ID NO: 16386 - protein, 215 aa, synthetic construct
  REGION 1..215: note = Description of Artificial Sequence: Synthetic polypeptide
  REGION 1..215: note = XENP018092 H4H9057P2_H0L0_IgG1 Light Chain
DIQMTQSPSSLSASVGDRVTITCRASQSISSYLNWYQQKPGKAPKLLIYAASSLQSGVPSRFSGSGSGTDFTLTISSLQPEDFATYYCQQSYSTPPITFGQGTRLEIKRTVAAPSVFIFPPSDEQLKSGTASVVCLLNNFYPREAKVQWKVDNALQSGNSQESVTEQDSKDSTYSLSSTLTLSKADYEKHKVYACEVTHQGLSSPVTKSFNRGEC

SEQ ID NO: 16387 - protein, 108 aa, synthetic construct; identical to SEQ ID NO: 4405
  REGION 1..108: note = Description of Artificial Sequence: Synthetic polypeptide
  REGION 1..108: note = VL of XENP018092

SEQ ID NO: 16388 - protein, 11 aa, synthetic construct
  REGION 1..11: note = Description of Artificial Sequence: Synthetic peptide
  REGION 1..11: note = XENP018092 vlCDR1
RASQSISSYLN

SEQ ID NO: 16389 - protein, 7 aa, synthetic construct
  REGION 1..7: note = Description of Artificial Sequence: Synthetic peptide
  REGION 1..7: note = XENP018092 vlCDR2
AASSLQS

SEQ ID NO: 16390 - protein, 10 aa, synthetic construct
  REGION 1..10: note = Description of Artificial Sequence: Synthetic peptide
  REGION 1..10: note = XENP018092 vlCDR3
QQSYSTPPIT

SEQ ID NO: 16391 - protein, 451 aa, synthetic construct
  REGION 1..451: note = Description of Artificial Sequence: Synthetic polypeptide
  REGION 1..451: note = XENP018093 H4H9068P2_H0L0_IgG1 Heavy Chain
EVQLVESGGGLVQPGGSLRLSCAASGFSFSSYAMNWVRQAPGKGLEWVSTISDSGGSTYYADSVKGRFTISRDNSKNTLSLQMNSLRAEDTAVYYCAKDQGGSYPYYFHYWGQGTLVTVSSASTKGPSVFPLAPSSKSTSGGTAALGCLVKDYFPEPVTVSWNSGALTSGVHTFPAVLQSSGLYSLSSVVTVPSSSLGTQTYICNVNHKPSNTKVDKKVEPKSCDKTHTCPPCPAPELLGGPSVFLFPPKPKDTLMISRTPEVTCVVVDVSHEDPEVKFNWYVDGVEVHNAKTKPREEQYNSTYRVVSVLTVLHQDWLNGKEYKCKVSNKALPAPIEKTISKAKGQPREPQVYTLPPSREEMTKNQVSLTCLVKGFYPSDIAVEWESNGQPENNYKTTPPVLDSDGSFFLYSKLTVDKSRWQQGNVFSCSVMHEALHNHYTQKSLSLSPGK

SEQ ID NO: 16392 - protein, 121 aa, synthetic construct
  REGION 1..121: note = Description of Artificial Sequence: Synthetic polypeptide
  REGION 1..121: note = VH of XENP018093
EVQLVESGGGLVQPGGSLRLSCAASGFSFSSYAMNWVRQAPGKGLEWVSTISDSGGSTYYADSVKGRFTISRDNSKNTLSLQMNSLRAEDTAVYYCAKDQGGSYPYYFHYWGQGTLVTVSS

SEQ ID NO: 16393 - protein, 5 aa, synthetic construct
  REGION 1..5: note = Description of Artificial Sequence: Synthetic peptide
  REGION 1..5: note = XENP018093 vhCDR1
SYAMN

SEQ ID NO: 16394 - protein, 17 aa, synthetic construct
  REGION 1..17: note = Description of Artificial Sequence: Synthetic peptide
  REGION 1..17: note = XENP018093 vhCDR2
TISDSGGSTYYADSVKG

SEQ ID NO: 16395 - protein, 12 aa, synthetic construct
  REGION 1..12: note = Description of Artificial Sequence: Synthetic peptide
  REGION 1..12: note = XENP018093 vhCDR3
DQGGSYPYYFHY

SEQ ID NO: 16396 - protein, 215 aa, synthetic construct; identical to SEQ ID NO: 16386
  REGION 1..215: note = Description of Artificial Sequence: Synthetic polypeptide
  REGION 1..215: note = XENP018093 H4H9068P2_H0L0_IgG1 Light Chain

SEQ ID NO: 16397 - protein, 108 aa, synthetic construct; identical to SEQ ID NO: 4405
  REGION 1..108: note = Description of Artificial Sequence: Synthetic polypeptide
  REGION 1..108: note = VL of XENP018093

SEQ ID NO: 16398 - protein, 11 aa, synthetic construct
  REGION 1..11: note = Description of Artificial Sequence: Synthetic peptide
  REGION 1..11: note = XENP018093 vlCDR1
RASQSISSYLN

SEQ ID NO: 16399 - protein, 7 aa, synthetic construct
  REGION 1..7: note = Description of Artificial Sequence: Synthetic peptide
  REGION 1..7: note = XENP018093 vlCDR2
AASSLQS

SEQ ID NO: 16400 - protein, 10 aa, synthetic construct
  REGION 1..10: note = Description of Artificial Sequence: Synthetic peptide
  REGION 1..10: note = XENP018093 vlCDR3
QQSYSTPPIT

SEQ ID NO: 16401 - protein, 451 aa, synthetic construct
  REGION 1..451: note = Description of Artificial Sequence: Synthetic polypeptide
  REGION 1..451: note = XENP018094 1G6_H1.1_L1_IgG1_PVA_/S267K Heavy Chain
QVQLVESGGGLVKPGGSLRLSCAASGFTFSNYWMNWVRQAPGKGLEWVGEIRLKSNNYATHYAEPVKGRFTISRDDSKSTVYLQMNSLKTEDTAVYYCTRYYGNYGGYFDVWGAGTLVTVSSASTKGPSVFPLAPSSKSTSGGTAALGCLVKDYFPEPVTVSWNSGALTSGVHTFPAVLQSSGLYSLSSVVTVPSSSLGTQTYICNVNHKPSNTKVDKKVEPKSCDKTHTCPPCPAPPVAGPSVFLFPPKPKDTLMISRTPEVTCVVVDVKHEDPEVKFNWYVDGVEVHNAKTKPREEQYNSTYRVVSVLTVLHQDWLNGKEYKCKVSNKALPAPIEKTISKAKGQPREPQVYTLPPSREEMTKNQVSLTCLVKGFYPSDIAVEWESNGQPENNYKTTPPVLDSDGSFFLYSKLTVDKSRWQQGNVFSCSVMHEALHNHYTQKSLSLSPGK

SEQ ID NO: 16402 - protein, 122 aa, synthetic construct; identical to SEQ ID NO: 11039
  REGION 1..122: note = Description of Artificial Sequence: Synthetic polypeptide
  REGION 1..122: note = VH of XENP018094

SEQ ID NO: 16403 - protein, 5 aa, synthetic construct
  REGION 1..5: note = Description of Artificial Sequence: Synthetic peptide
  REGION 1..5: note = XENP018094 vhCDR1
NYWMN

SEQ ID NO: 16404 - protein, 19 aa, synthetic construct
  REGION 1..19: note = Description of Artificial Sequence: Synthetic peptide
  REGION 1..19: note = XENP018094 vhCDR2
EIRLKSNNYATHYAEPVKG

SEQ ID NO: 16405 - protein, 11 aa, synthetic construct
  REGION 1..11: note = Description of Artificial Sequence: Synthetic peptide
  REGION 1..11: note = XENP018094 vhCDR3
YYGNYGGYFDV

SEQ ID NO: 16406 - protein, 214 aa, synthetic construct; identical to SEQ ID NO: 16226
  REGION 1..214: note = Description of Artificial Sequence: Synthetic polypeptide
  REGION 1..214: note = XENP018094 1G6_H1.1_L1_IgG1_PVA_/S267K Light Chain

SEQ ID NO: 16407 - protein, 107 aa, synthetic construct; identical to SEQ ID NO: 10923
  REGION 1..107: note = Description of Artificial Sequence: Synthetic polypeptide
  REGION 1..107: note = VL of XENP018094

SEQ ID NO: 16408 - protein, 11 aa, synthetic construct
  REGION 1..11: note = Description of Artificial Sequence: Synthetic peptide
  REGION 1..11: note = XENP018094 vlCDR1
RASQSVSNDVA

SEQ ID NO: 16409 - protein, 7 aa, synthetic construct
  REGION 1..7: note = Description of Artificial Sequence: Synthetic peptide
  REGION 1..7: note = XENP018094 vlCDR2
YASHRYT

SEQ ID NO: 16410 - protein, 9 aa, synthetic construct
  REGION 1..9: note = Description of Artificial Sequence: Synthetic peptide
  REGION 1..9: note = XENP018094 vlCDR3
QQDYSSPRT

SEQ ID NO: 16411 - protein, 451 aa, synthetic construct
  REGION 1..451: note = Description of Artificial Sequence: Synthetic polypeptide
  REGION 1..451: note = XENP018095 1G6_H1.2_L1_IgG1_PVA_/S267K Heavy Chain
EVKLVESGGGLVKPGGSLRLSCAASGFTFSNYWMNWVRQAPGKGLEWVGEIRLKSNNYATHYAEPVKGRFTISRDDSKSTVYLQMNSLKTEDTAVYYCTRYYGNYGGYFDVWGAGTLVTVSSASTKGPSVFPLAPSSKSTSGGTAALGCLVKDYFPEPVTVSWNSGALTSGVHTFPAVLQSSGLYSLSSVVTVPSSSLGTQTYICNVNHKPSNTKVDKKVEPKSCDKTHTCPPCPAPPVAGPSVFLFPPKPKDTLMISRTPEVTCVVVDVKHEDPEVKFNWYVDGVEVHNAKTKPREEQYNSTYRVVSVLTVLHQDWLNGKEYKCKVSNKALPAPIEKTISKAKGQPREPQVYTLPPSREEMTKNQVSLTCLVKGFYPSDIAVEWESNGQPENNYKTTPPVLDSDGSFFLYSKLTVDKSRWQQGNVFSCSVMHEALHNHYTQKSLSLSPGK

SEQ ID NO: 16412 - protein, 122 aa, synthetic construct; identical to SEQ ID NO: 11048
  REGION 1..122: note = Description of Artificial Sequence: Synthetic polypeptide
  REGION 1..122: note = VH of XENP018095

SEQ ID NO: 16413 - protein, 5 aa, synthetic construct
  REGION 1..5: note = Description of Artificial Sequence: Synthetic peptide
  REGION 1..5: note = XENP018095 vhCDR1
NYWMN

SEQ ID NO: 16414 - protein, 19 aa, synthetic construct
  REGION 1..19: note = Description of Artificial Sequence: Synthetic peptide
  REGION 1..19: note = XENP018095 vhCDR2
EIRLKSNNYATHYAEPVKG

SEQ ID NO: 16415 - protein, 11 aa, synthetic construct
  REGION 1..11: note = Description of Artificial Sequence: Synthetic peptide
  REGION 1..11: note = XENP018095 vhCDR3
YYGNYGGYFDV

SEQ ID NO: 16416 - protein, 214 aa, synthetic construct; identical to SEQ ID NO: 16226
  REGION 1..214: note = Description of Artificial Sequence: Synthetic polypeptide
  REGION 1..214: note = XENP018095 1G6_H1.2_L1_IgG1_PVA_/S267K Light Chain

SEQ ID NO: 16417 - protein, 107 aa, synthetic construct; identical to SEQ ID NO: 10923
  REGION 1..107: note = Description of Artificial Sequence: Synthetic polypeptide
  REGION 1..107: note = VL of XENP018095

SEQ ID NO: 16418 - protein, 11 aa, synthetic construct
  REGION 1..11: note = Description of Artificial Sequence: Synthetic peptide
  REGION 1..11: note = XENP018095 vlCDR1
RASQSVSNDVA

SEQ ID NO: 16419 - protein, 7 aa, synthetic construct
  REGION 1..7: note = Description of Artificial Sequence: Synthetic peptide
  REGION 1..7: note = XENP018095 vlCDR2
YASHRYT

SEQ ID NO: 16420 - protein, 9 aa, synthetic construct
  REGION 1..9: note = Description of Artificial Sequence: Synthetic peptide
  REGION 1..9: note = XENP018095 vlCDR3
QQDYSSPRT

SEQ ID NO: 16421 - protein, 451 aa, synthetic construct
  REGION 1..451: note = Description of Artificial Sequence: Synthetic polypeptide
  REGION 1..451: note = XENP018096 1G6_H1.3_L1_IgG1_PVA_/S267K Heavy Chain
EVQLEESGGGLVKPGGSLRLSCAASGFTFSNYWMNWVRQAPGKGLEWVGEIRLKSNNYATHYAEPVKGRFTISRDDSKSTVYLQMNSLKTEDTAVYYCTRYYGNYGGYFDVWGAGTLVTVSSASTKGPSVFPLAPSSKSTSGGTAALGCLVKDYFPEPVTVSWNSGALTSGVHTFPAVLQSSGLYSLSSVVTVPSSSLGTQTYICNVNHKPSNTKVDKKVEPKSCDKTHTCPPCPAPPVAGPSVFLFPPKPKDTLMISRTPEVTCVVVDVKHEDPEVKFNWYVDGVEVHNAKTKPREEQYNSTYRVVSVLTVLHQDWLNGKEYKCKVSNKALPAPIEKTISKAKGQPREPQVYTLPPSREEMTKNQVSLTCLVKGFYPSDIAVEWESNGQPENNYKTTPPVLDSDGSFFLYSKLTVDKSRWQQGNVFSCSVMHEALHNHYTQKSLSLSPGK

SEQ ID NO: 16422 - protein, 122 aa, synthetic construct; identical to SEQ ID NO: 11057
  REGION 1..122: note = Description of Artificial Sequence: Synthetic polypeptide
  REGION 1..122: note = VH of XENP018096

SEQ ID NO: 16423 - protein, 5 aa, synthetic construct
  REGION 1..5: note = Description of Artificial Sequence: Synthetic peptide
  REGION 1..5: note = XENP018096 vhCDR1
NYWMN

SEQ ID NO: 16424 - protein, 19 aa, synthetic construct
  REGION 1..19: note = Description of Artificial Sequence: Synthetic peptide
  REGION 1..19: note = XENP018096 vhCDR2
EIRLKSNNYATHYAEPVKG

SEQ ID NO: 16425 - protein, 11 aa, synthetic construct
  REGION 1..11: note = Description of Artificial Sequence: Synthetic peptide
  REGION 1..11: note = XENP018096 vhCDR3
YYGNYGGYFDV

SEQ ID NO: 16426 - protein, 214 aa, synthetic construct; identical to SEQ ID NO: 16226
  REGION 1..214: note = Description of Artificial Sequence: Synthetic polypeptide
  REGION 1..214: note = XENP018096 1G6_H1.3_L1_IgG1_PVA_/S267K Light Chain

SEQ ID NO: 16427 - protein, 107 aa, synthetic construct; identical to SEQ ID NO: 10923
  REGION 1..107: note = Description of Artificial Sequence: Synthetic polypeptide
  REGION 1..107: note = VL of XENP018096

SEQ ID NO: 16428 - protein, 11 aa, synthetic construct
  REGION 1..11: note = Description of Artificial Sequence: Synthetic peptide
  REGION 1..11: note = XENP018096 vlCDR1
RASQSVSNDVA

SEQ ID NO: 16429 - protein, 7 aa, synthetic construct
  REGION 1..7: note = Description of Artificial Sequence: Synthetic peptide
  REGION 1..7: note = XENP018096 vlCDR2
YASHRYT

SEQ ID NO: 16430 - protein, 9 aa, synthetic construct
  REGION 1..9: note = Description of Artificial Sequence: Synthetic peptide
  REGION 1..9: note = XENP018096 vlCDR3
QQDYSSPRT

SEQ ID NO: 16431 - protein, 451 aa, synthetic construct
  REGION 1..451: note = Description of Artificial Sequence: Synthetic polypeptide
  REGION 1..451: note = XENP018101 1G6_H1.4_L1_IgG1_PVA_/S267K Heavy Chain
EVQLVESGGGLVQPGGSLRLSCAASGFTFSNYWMNWVRQAPGKGLEWVGEIRLKSNNYATHYAEPVKGRFTISRDDSKSTVYLQMNSLKTEDTAVYYCTRYYGNYGGYFDVWGAGTLVTVSSASTKGPSVFPLAPSSKSTSGGTAALGCLVKDYFPEPVTVSWNSGALTSGVHTFPAVLQSSGLYSLSSVVTVPSSSLGTQTYICNVNHKPSNTKVDKKVEPKSCDKTHTCPPCPAPPVAGPSVFLFPPKPKDTLMISRTPEVTCVVVDVKHEDPEVKFNWYVDGVEVHNAKTKPREEQYNSTYRVVSVLTVLHQDWLNGKEYKCKVSNKALPAPIEKTISKAKGQPREPQVYTLPPSREEMTKNQVSLTCLVKGFYPSDIAVEWESNGQPENNYKTTPPVLDSDGSFFLYSKLTVDKSRWQQGNVFSCSVMHEALHNHYTQKSLSLSPGK

SEQ ID NO: 16432 - protein, 122 aa, synthetic construct; identical to SEQ ID NO: 11066
  REGION 1..122: note = Description of Artificial Sequence: Synthetic polypeptide
  REGION 1..122: note = VH of XENP018101

SEQ ID NO: 16433 - protein, 5 aa, synthetic construct
  REGION 1..5: note = Description of Artificial Sequence: Synthetic peptide
  REGION 1..5: note = XENP018101 vhCDR1
NYWMN

SEQ ID NO: 16434 - protein, 19 aa, synthetic construct
  REGION 1..19: note = Description of Artificial Sequence: Synthetic peptide
  REGION 1..19: note = XENP018101 vhCDR2
EIRLKSNNYATHYAEPVKG

SEQ ID NO: 16435 - protein, 11 aa, synthetic construct
  REGION 1..11: note = Description of Artificial Sequence: Synthetic peptide
  REGION 1..11: note = XENP018101 vhCDR3
YYGNYGGYFDV

SEQ ID NO: 16436 - protein, 214 aa, synthetic construct; identical to SEQ ID NO: 16226
  REGION 1..214: note = Description of Artificial Sequence: Synthetic polypeptide
  REGION 1..214: note = XENP018101 1G6_H1.4_L1_IgG1_PVA_/S267K Light Chain

SEQ ID NO: 16437 - protein, 107 aa, synthetic construct; identical to SEQ ID NO: 10923
  REGION 1..107: note = Description of Artificial Sequence: Synthetic polypeptide
  REGION 1..107: note = VL of XENP018101

SEQ ID NO: 16438 - protein, 11 aa, synthetic construct
  REGION 1..11: note = Description of Artificial Sequence: Synthetic peptide
  REGION 1..11: note = XENP018101 vlCDR1
RASQSVSNDVA

SEQ ID NO: 16439 - protein, 7 aa, synthetic construct
  REGION 1..7: note = Description of Artificial Sequence: Synthetic peptide
  REGION 1..7: note = XENP018101 vlCDR2
YASHRYT

SEQ ID NO: 16440 - protein, 9 aa, synthetic construct
  REGION 1..9: note = Description of Artificial Sequence: Synthetic peptide
  REGION 1..9: note = XENP018101 vlCDR3
QQDYSSPRT

SEQ ID NO: 16441 - protein, 451 aa, synthetic construct
  REGION 1..451: note = Description of Artificial Sequence: Synthetic polypeptide
  REGION 1..451: note = XENP018102 1G6_H1.5_L1_IgG1_PVA_/S267K Heavy Chain
EVQLVESGGGLVRPGGSLRLSCAASGFTFSNYWMNWVRQAPGKGLEWVGEIRLKSNNYATHYAEPVKGRFTISRDDSKSTVYLQMNSLKTEDTAVYYCTRYYGNYGGYFDVWGAGTLVTVSSASTKGPSVFPLAPSSKSTSGGTAALGCLVKDYFPEPVTVSWNSGALTSGVHTFPAVLQSSGLYSLSSVVTVPSSSLGTQTYICNVNHKPSNTKVDKKVEPKSCDKTHTCPPCPAPPVAGPSVFLFPPKPKDTLMISRTPEVTCVVVDVKHEDPEVKFNWYVDGVEVHNAKTKPREEQYNSTYRVVSVLTVLHQDWLNGKEYKCKVSNKALPAPIEKTISKAKGQPREPQVYTLPPSREEMTKNQVSLTCLVKGFYPSDIAVEWESNGQPENNYKTTPPVLDSDGSFFLYSKLTVDKSRWQQGNVFSCSVMHEALHNHYTQKSLSLSPGK

SEQ ID NO: 16442 - protein, 122 aa, synthetic construct; identical to SEQ ID NO: 11075
  REGION 1..122: note = Description of Artificial Sequence: Synthetic polypeptide
  REGION 1..122: note = VH of XENP018102

SEQ ID NO: 16443 - protein, 5 aa, synthetic construct
  REGION 1..5: note = Description of Artificial Sequence: Synthetic peptide
  REGION 1..5: note = XENP018102 vhCDR1
NYWMN

SEQ ID NO: 16444 - protein, 19 aa, synthetic construct
  REGION 1..19: note = Description of Artificial Sequence: Synthetic peptide
  REGION 1..19: note = XENP018102 vhCDR2
EIRLKSNNYATHYAEPVKG

SEQ ID NO: 16445 - protein, 11 aa, synthetic construct
  REGION 1..11: note = Description of Artificial Sequence: Synthetic peptide
  REGION 1..11: note = XENP018102 vhCDR3
YYGNYGGYFDV

SEQ ID NO: 16446 - protein, 214 aa, synthetic construct; identical to SEQ ID NO: 16226
  REGION 1..214: note = Description of Artificial Sequence: Synthetic polypeptide
  REGION 1..214: note = XENP018102 1G6_H1.5_L1_IgG1_PVA_/S267K Light Chain

SEQ ID NO: 16447 - protein, 107 aa, synthetic construct; identical to SEQ ID NO: 10923
  REGION 1..107: note = Description of Artificial Sequence: Synthetic polypeptide
  REGION 1..107: note = VL of XENP018102

SEQ ID NO: 16448 - protein, 11 aa, synthetic construct
  REGION 1..11: note = Description of Artificial Sequence: Synthetic peptide
  REGION 1..11: note = XENP018102 vlCDR1
RASQSVSNDVA

SEQ ID NO: 16449 - protein, 7 aa, synthetic construct
  REGION 1..7: note = Description of Artificial Sequence: Synthetic peptide
  REGION 1..7: note = XENP018102 vlCDR2
YASHRYT

SEQ ID NO: 16450 - protein, 9 aa, synthetic construct
  REGION 1..9: note = Description of Artificial Sequence: Synthetic peptide
  REGION 1..9: note = XENP018102 vlCDR3
QQDYSSPRT

SEQ ID NO: 16451 - protein, 451 aa, synthetic construct
  REGION 1..451: note = Description of Artificial Sequence: Synthetic polypeptide
  REGION 1..451: note = XENP018103 1G6_H1.6_L1_IgG1_PVA_/S267K Heavy Chain
EVQLVESGGGLVKPGGSMRLSCAASGFTFSNYWMNWVRQAPGKGLEWVGEIRLKSNNYATHYAEPVKGRFTISRDDSKSTVYLQMNSLKTEDTAVYYCTRYYGNYGGYFDVWGAGTLVTVSSASTKGPSVFPLAPSSKSTSGGTAALGCLVKDYFPEPVTVSWNSGALTSGVHTFPAVLQSSGLYSLSSVVTVPSSSLGTQTYICNVNHKPSNTKVDKKVEPKSCDKTHTCPPCPAPPVAGPSVFLFPPKPKDTLMISRTPEVTCVVVDVKHEDPEVKFNWYVDGVEVHNAKTKPREEQYNSTYRVVSVLTVLHQDWLNGKEYKCKVSNKALPAPIEKTISKAKGQPREPQVYTLPPSREEMTKNQVSLTCLVKGFYPSDIAVEWESNGQPENNYKTTPPVLDSDGSFFLYSKLTVDKSRWQQGNVFSCSVMHEALHNHYTQKSLSLSPGK

SEQ ID NO: 16452 - protein, 122 aa, synthetic construct; identical to SEQ ID NO: 11084
  REGION 1..122: note = Description of Artificial Sequence: Synthetic polypeptide
  REGION 1..122: note = VH of XENP018103

SEQ ID NO: 16453 - protein, 5 aa, synthetic construct
  REGION 1..5: note = Description of Artificial Sequence: Synthetic peptide
  REGION 1..5: note = XENP018103 vhCDR1
NYWMN

SEQ ID NO: 16454 - protein, 19 aa, synthetic construct
  REGION 1..19: note = Description of Artificial Sequence: Synthetic peptide
  REGION 1..19: note = XENP018103 vhCDR2
EIRLKSNNYATHYAEPVKG

SEQ ID NO: 16455 - protein, 11 aa, synthetic construct
  REGION 1..11: note = Description of Artificial Sequence: Synthetic peptide
  REGION 1..11: note = XENP018103 vhCDR3
YYGNYGGYFDV

SEQ ID NO: 16456 - protein, 214 aa, synthetic construct; identical to SEQ ID NO: 16226
  REGION 1..214: note = Description of Artificial Sequence: Synthetic polypeptide
  REGION 1..214: note = XENP018103 1G6_H1.6_L1_IgG1_PVA_/S267K Light Chain

SEQ ID NO: 16457 - protein, 107 aa, synthetic construct; identical to SEQ ID NO: 10923
  REGION 1..107: note = Description of Artificial Sequence: Synthetic polypeptide
  REGION 1..107: note = VL of XENP018103

SEQ ID NO: 16458 - protein, 11 aa, synthetic construct
  REGION 1..11: note = Description of Artificial Sequence: Synthetic peptide
  REGION 1..11: note = XENP018103 vlCDR1
RASQSVSNDVA

SEQ ID NO: 16459 - protein, 7 aa, synthetic construct
  REGION 1..7: note = Description of Artificial Sequence: Synthetic peptide
  REGION 1..7: note = XENP018103 vlCDR2
YASHRYT

SEQ ID NO: 16460 - protein, 9 aa, synthetic construct
  REGION 1..9: note = Description of Artificial Sequence: Synthetic peptide
  REGION 1..9: note = XENP018103 vlCDR3
QQDYSSPRT

SEQ ID NO: 16461 - protein, 451 aa, synthetic construct
  REGION 1..451: note = Description of Artificial Sequence: Synthetic polypeptide
  REGION 1..451: note = XENP018104 1G6_H1.7_L1_IgG1_PVA_/S267K Heavy Chain
EVQLVESGGGLVKPGGSLKLSCAASGFTFSNYWMNWVRQAPGKGLEWVGEIRLKSNNYATHYAEPVKGRFTISRDDSKSTVYLQMNSLKTEDTAVYYCTRYYGNYGGYFDVWGAGTLVTVSSASTKGPSVFPLAPSSKSTSGGTAALGCLVKDYFPEPVTVSWNSGALTSGVHTFPAVLQSSGLYSLSSVVTVPSSSLGTQTYICNVNHKPSNTKVDKKVEPKSCDKTHTCPPCPAPPVAGPSVFLFPPKPKDTLMISRTPEVTCVVVDVKHEDPEVKFNWYVDGVEVHNAKTKPREEQYNSTYRVVSVLTVLHQDWLNGKEYKCKVSNKALPAPIEKTISKAKGQPREPQVYTLPPSREEMTKNQVSLTCLVKGFYPSDIAVEWESNGQPENNYKTTPPVLDSDGSFFLYSKLTVDKSRWQQGNVFSCSVMHEALHNHYTQKSLSLSPGK

SEQ ID NO: 16462 - protein, 122 aa, synthetic construct; identical to SEQ ID NO: 11093
  REGION 1..122: note = Description of Artificial Sequence: Synthetic polypeptide
  REGION 1..122: note = VH of XENP018104

SEQ ID NO: 16463 - protein, 5 aa, synthetic construct
  REGION 1..5: note = Description of Artificial Sequence: Synthetic peptide
  REGION 1..5: note = XENP018104 vhCDR1
NYWMN

SEQ ID NO: 16464 - protein, 19 aa, synthetic construct
  REGION 1..19: note = Description of Artificial Sequence: Synthetic peptide
  REGION 1..19: note = XENP018104 vhCDR2
EIRLKSNNYATHYAEPVKG

SEQ ID NO: 16465 - protein, 11 aa, synthetic construct
  REGION 1..11: note = Description of Artificial Sequence: Synthetic peptide
  REGION 1..11: note = XENP018104 vhCDR3
YYGNYGGYFDV

SEQ ID NO: 16466 - protein, 214 aa, synthetic construct; identical to SEQ ID NO: 16226
  REGION 1..214: note = Description of Artificial Sequence: Synthetic polypeptide
  REGION 1..214: note = XENP018104 1G6_H1.7_L1_IgG1_PVA_/S267K Light Chain

SEQ ID NO: 16467 - protein, 107 aa, synthetic construct; identical to SEQ ID NO: 10923
  REGION 1..107: note = Description of Artificial Sequence: Synthetic polypeptide
  REGION 1..107: note = VL of XENP018104

SEQ ID NO: 16468 - protein, 11 aa, synthetic construct
  REGION 1..11: note = Description of Artificial Sequence: Synthetic peptide
  REGION 1..11: note = XENP018104 vlCDR1
RASQSVSNDVA

SEQ ID NO: 16469 - protein, 7 aa, synthetic construct
  REGION 1..7: note = Description of Artificial Sequence: Synthetic peptide
  REGION 1..7: note = XENP018104 vlCDR2
YASHRYT

SEQ ID NO: 16470 - protein, 9 aa, synthetic construct
  REGION 1..9: note = Description of Artificial Sequence: Synthetic peptide
  REGION 1..9: note = XENP018104 vlCDR3
QQDYSSPRT

SEQ ID NO: 16471 - protein, 451 aa, synthetic construct
  REGION 1..451: note = Description of Artificial Sequence: Synthetic polypeptide
  REGION 1..451: note = XENP018105 1G6_H1.8_L1_IgG1_PVA_/S267K Heavy Chain
EVQLVESGGGLVKPGGSLRLSCVASGFTFSNYWMNWVRQAPGKGLEWVGEIRLKSNNYATHYAEPVKGRFTISRDDSKSTVYLQMNSLKTEDTAVYYCTRYYGNYGGYFDVWGAGTLVTVSSASTKGPSVFPLAPSSKSTSGGTAALGCLVKDYFPEPVTVSWNSGALTSGVHTFPAVLQSSGLYSLSSVVTVPSSSLGTQTYICNVNHKPSNTKVDKKVEPKSCDKTHTCPPCPAPPVAGPSVFLFPPKPKDTLMISRTPEVTCVVVDVKHEDPEVKFNWYVDGVEVHNAKTKPREEQYNSTYRVVSVLTVLHQDWLNGKEYKCKVSNKALPAPIEKTISKAKGQPREPQVYTLPPSREEMTKNQVSLTCLVKGFYPSDIAVEWESNGQPENNYKTTPPVLDSDGSFFLYSKLTVDKSRWQQGNVFSCSVMHEALHNHYTQKSLSLSPGK

SEQ ID NO: 16472 - protein, 122 aa, synthetic construct; identical to SEQ ID NO: 11102
  REGION 1..122: note = Description of Artificial Sequence: Synthetic polypeptide
  REGION 1..122: note = VH of XENP018105

SEQ ID NO: 16473 - protein, 5 aa, synthetic construct
  REGION 1..5: note = Description of Artificial Sequence: Synthetic peptide
  REGION 1..5: note = XENP018105 vhCDR1
NYWMN

SEQ ID NO: 16474 - protein, 19 aa, synthetic construct
  REGION 1..19: note = Description of Artificial Sequence: Synthetic peptide
  REGION 1..19: note = XENP018105 vhCDR2
EIRLKSNNYATHYAEPVKG

SEQ ID NO: 16475 - protein, 11 aa, synthetic construct
  REGION 1..11: note = Description of Artificial Sequence: Synthetic peptide
  REGION 1..11: note = XENP018105 vhCDR3
YYGNYGGYFDV

SEQ ID NO: 16476 - protein, 214 aa, synthetic construct; identical to SEQ ID NO: 16226
  REGION 1..214: note = Description of Artificial Sequence: Synthetic polypeptide
  REGION 1..214: note = XENP018105 1G6_H1.8_L1_IgG1_PVA_/S267K Light Chain

SEQ ID NO: 16477 - protein, 107 aa, synthetic construct; identical to SEQ ID NO: 10923
  REGION 1..107: note = Description of Artificial Sequence: Synthetic polypeptide
  REGION 1..107: note = VL of XENP018105

SEQ ID NO: 16478 - protein, 11 aa, synthetic construct
  REGION 1..11: note = Description of Artificial Sequence: Synthetic peptide
  REGION 1..11: note = XENP018105 vlCDR1
RASQSVSNDVA

SEQ ID NO: 16479 - protein, 7 aa, synthetic construct
  REGION 1..7: note = Description of Artificial Sequence: Synthetic peptide
  REGION 1..7: note = XENP018105 vlCDR2
YASHRYT

SEQ ID NO: 16480 - protein, 9 aa, synthetic construct
  REGION 1..9: note = Description of Artificial Sequence: Synthetic peptide
  REGION 1..9: note = XENP018105 vlCDR3
QQDYSSPRT

SEQ ID NO: 16481 - protein, 451 aa, synthetic construct
  REGION 1..451: note = Description of Artificial Sequence: Synthetic polypeptide
  REGION 1..451: note = XENP018106 1G6_H1.9_L1_IgG1_PVA_/S267K Heavy Chain
EVQLVESGGGLVKPGGSLRLSCAASGFTVSNYWMNWVRQAPGKGLEWVGEIRLKSNNYATHYAEPVKGRFTISRDDSKSTVYLQMNSLKTEDTAVYYCTRYYGNYGGYFDVWGAGTLVTVSSASTKGPSVFPLAPSSKSTSGGTAALGCLVKDYFPEPVTVSWNSGALTSGVHTFPAVLQSSGLYSLSSVVTVPSSSLGTQTYICNVNHKPSNTKVDKKVEPKSCDKTHTCPPCPAPPVAGPSVFLFPPKPKDTLMISRTPEVTCVVVDVKHEDPEVKFNWYVDGVEVHNAKTKPREEQYNSTYRVVSVLTVLHQDWLNGKEYKCKVSNKALPAPIEKTISKAKGQPREPQVYTLPPSREEMTKNQVSLTCLVKGFYPSDIAVEWESNGQPENNYKTTPPVLDSDGSFFLYSKLTVDKSRWQQGNVFSCSVMHEALHNHYTQKSLSLSPGK

SEQ ID NO: 16482 - protein, 122 aa, synthetic construct; identical to SEQ ID NO: 11111
  REGION 1..122: note = Description of Artificial Sequence: Synthetic polypeptide
  REGION 1..122: note = VH of XENP018106

SEQ ID NO: 16483 - protein, 5 aa, synthetic construct
  REGION 1..5: note = Description of Artificial Sequence: Synthetic peptide
  REGION 1..5: note = XENP018106 vhCDR1
NYWMN

SEQ ID NO: 16484 - protein, 19 aa, synthetic construct
  REGION 1..19: note = Description of Artificial Sequence: Synthetic peptide
  REGION 1..19: note = XENP018106 vhCDR2
EIRLKSNNYATHYAEPVKG

SEQ ID NO: 16485 - protein, 11 aa, synthetic construct
  REGION 1..11: note = Description of Artificial Sequence: Synthetic peptide
  REGION 1..11: note = XENP018106 vhCDR3
YYGNYGGYFDV

SEQ ID NO: 16486 - protein, 214 aa, synthetic construct; identical to SEQ ID NO: 16226
  REGION 1..214: note = Description of Artificial Sequence: Synthetic polypeptide
  REGION 1..214: note = XENP018106 1G6_H1.9_L1_IgG1_PVA_/S267K Light Chain

SEQ ID NO: 16487 - protein, 107 aa, synthetic construct; identical to SEQ ID NO: 10923
  REGION 1..107: note = Description of Artificial Sequence: Synthetic polypeptide
  REGION 1..107: note = VL of XENP018106

SEQ ID NO: 16488 - protein, 11 aa, synthetic construct
  REGION 1..11: note = Description of Artificial Sequence: Synthetic peptide
  REGION 1..11: note = XENP018106 vlCDR1
RASQSVSNDVA

SEQ ID NO: 16489 - protein, 7 aa, synthetic construct
  REGION 1..7: note = Description of Artificial Sequence: Synthetic peptide
  REGION 1..7: note = XENP018106 vlCDR2
YASHRYT

SEQ ID NO: 16490 - protein, 9 aa, synthetic construct
  REGION 1..9: note = Description of Artificial Sequence: Synthetic peptide
  REGION 1..9: note = XENP018106 vlCDR3
QQDYSSPRT

SEQ ID NO: 16491 - protein, 451 aa, synthetic construct
  REGION 1..451: note = Description of Artificial Sequence: Synthetic polypeptide
  REGION 1..451: note = XENP018107 1G6_H1.10_L1_IgG1_PVA_/S267K Heavy Chain
EVQLVESGGGLVKPGGSLRLSCAASGFTFTNYWMNWVRQAPGKGLEWVGEIRLKSNNYATHYAEPVKGRFTISRDDSKSTVYLQMNSLKTEDTAVYYCTRYYGNYGGYFDVWGAGTLVTVSSASTKGPSVFPLAPSSKSTSGGTAALGCLVKDYFPEPVTVSWNSGALTSGVHTFPAVLQSSGLYSLSSVVTVPSSSLGTQTYICNVNHKPSNTKVDKKVEPKSCDKTHTCPPCPAPPVAGPSVFLFPPKPKDTLMISRTPEVTCVVVDVKHEDPEVKFNWYVDGVEVHNAKTKPREEQYNSTYRVVSVLTVLHQDWLNGKEYKCKVSNKALPAPIEKTISKAKGQPREPQVYTLPPSREEMTKNQVSLTCLVKGFYPSDIAVEWESNGQPENNYKTTPPVLDSDGSFFLYSKLTVDKSRWQQGNVFSCSVMHEALHNHYTQKSLSLSPGK

SEQ ID NO: 16492 - protein, 122 aa, synthetic construct; identical to SEQ ID NO: 11120
  REGION 1..122: note = Description of Artificial Sequence: Synthetic polypeptide
  REGION 1..122: note = VH of XENP018107

SEQ ID NO: 16493 - protein, 5 aa, synthetic construct
  REGION 1..5: note = Description of Artificial Sequence: Synthetic peptide
  REGION 1..5: note = XENP018107 vhCDR1
NYWMN

SEQ ID NO: 16494 - protein, 19 aa, synthetic construct
  REGION 1..19: note = Description of Artificial Sequence: Synthetic peptide
  REGION 1..19: note = XENP018107 vhCDR2
EIRLKSNNYATHYAEPVKG

SEQ ID NO: 16495 - protein, 11 aa, synthetic construct
  REGION 1..11: note = Description of Artificial Sequence: Synthetic peptide
  REGION 1..11: note = XENP018107 vhCDR3
YYGNYGGYFDV

SEQ ID NO: 16496 - protein, 214 aa, synthetic construct; identical to SEQ ID NO: 16226
  REGION 1..214: note = Description of Artificial Sequence: Synthetic polypeptide
  REGION 1..214: note = XENP018107 1G6_H1.10_L1_IgG1_PVA_/S267K Light Chain

SEQ ID NO: 16497 - protein, 107 aa, synthetic construct; identical to SEQ ID NO: 10923
  REGION 1..107: note = Description of Artificial Sequence: Synthetic polypeptide
  REGION 1..107: note = VL of XENP018107

SEQ ID NO: 16498 - protein, 11 aa, synthetic construct
  REGION 1..11: note = Description of Artificial Sequence: Synthetic peptide
  REGION 1..11: note = XENP018107 vlCDR1
RASQSVSNDVA

SEQ ID NO: 16499 - protein, 7 aa, synthetic construct
  REGION 1..7: note = Description of Artificial Sequence: Synthetic peptide
  REGION 1..7: note = XENP018107 vlCDR2
YASHRYT

SEQ ID NO: 16500 - protein, 9 aa, synthetic construct
  REGION 1..9: note = Description of Artificial Sequence: Synthetic peptide
  REGION 1..9: note = XENP018107 vlCDR3
QQDYSSPRT

SEQ ID NO: 16501 - protein, 451 aa, synthetic construct
  REGION 1..451: note = Description of Artificial Sequence: Synthetic polypeptide
  REGION 1..451: note = XENP018108 1G6_H1.11_L1_IgG1_PVA_/S267K Heavy Chain
EVQLVESGGGLVKPGGSLRLSCAASGFTFANYWMNWVRQAPGKGLEWVGEIRLKSNNYATHYAEPVKGRFTISRDDSKSTVYLQMNSLKTEDTAVYYCTRYYGNYGGYFDVWGAGTLVTVSSASTKGPSVFPLAPSSKSTSGGTAALGCLVKDYFPEPVTVSWNSGALTSGVHTFPAVLQSSGLYSLSSVVTVPSSSLGTQTYICNVNHKPSNTKVDKKVEPKSCDKTHTCPPCPAPPVAGPSVFLFPPKPKDTLMISRTPEVTCVVVDVKHEDPEVKFNWYVDGVEVHNAKTKPREEQYNSTYRVVSVLTVLHQDWLNGKEYKCKVSNKALPAPIEKTISKAKGQPREPQVYTLPPSREEMTKNQVSLTCLVKGFYPSDIAVEWESNGQPENNYKTTPPVLDSDGSFFLYSKLTVDKSRWQQGNVFSCSVMHEALHNHYTQKSLSLSPGK

SEQ ID NO: 16502 - protein, 122 aa, synthetic construct; identical to SEQ ID NO: 11129
  REGION 1..122: note = Description of Artificial Sequence: Synthetic polypeptide
  REGION 1..122: note = VH of XENP018108

SEQ ID NO: 16503 - protein, 5 aa, synthetic construct
  REGION 1..5: note = Description of Artificial Sequence: Synthetic peptide
  REGION 1..5: note = XENP018108 vhCDR1
NYWMN

SEQ ID NO: 16504 - protein, 19 aa, synthetic construct
  REGION 1..19: note = Description of Artificial Sequence: Synthetic peptide
  REGION 1..19: note = XENP018108 vhCDR2
EIRLKSNNYATHYAEPVKG

SEQ ID NO: 16505 - protein, 11 aa, synthetic construct
  REGION 1..11: note = Description of Artificial Sequence: Synthetic peptide
  REGION 1..11: note = XENP018108 vhCDR3
YYGNYGGYFDV

SEQ ID NO: 16506 - protein, 214 aa, synthetic construct; identical to SEQ ID NO: 16226
  REGION 1..214: note = Description of Artificial Sequence: Synthetic polypeptide
  REGION 1..214: note = XENP018108 1G6_H1.11_L1_IgG1_PVA_/S267K Light Chain

SEQ ID NO: 16507 - protein, 107 aa, synthetic construct; identical to SEQ ID NO: 10923
  REGION 1..107: note = Description of Artificial Sequence: Synthetic polypeptide
  REGION 1..107: note = VL of XENP018108

SEQ ID NO: 16508 - protein, 11 aa, synthetic construct
  REGION 1..11: note = Description of Artificial Sequence: Synthetic peptide
  REGION 1..11: note = XENP018108 vlCDR1
RASQSVSNDVA

SEQ ID NO: 16509 - protein, 7 aa, synthetic construct
  REGION 1..7: note = Description of Artificial Sequence: Synthetic peptide
  REGION 1..7: note = XENP018108 vlCDR2
YASHRYT

SEQ ID NO: 16510 - protein, 9 aa, synthetic construct
  REGION 1..9: note = Description of Artificial Sequence: Synthetic peptide
  REGION 1..9: note = XENP018108 vlCDR3
QQDYSSPRT

SEQ ID NO: 16511 - protein, 451 aa, synthetic construct
  REGION 1..451: note = Description of Artificial Sequence: Synthetic polypeptide
  REGION 1..451: note = XENP018109 1G6_H1.12_L1_IgG1_PVA_/S267K Heavy Chain
EVQLVESGGGLVKPGGSLRLSCAASGFTFQNYWMNWVRQAPGKGLEWVGEIRLKSNNYATHYAEPVKGRFTISRDDSKSTVYLQMNSLKTEDTAVYYCTRYYGNYGGYFDVWGAGTLVTVSSASTKGPSVFPLAPSSKSTSGGTAALGCLVKDYFPEPVTVSWNSGALTSGVHTFPAVLQSSGLYSLSSVVTVPSSSLGTQTYICNVNHKPSNTKVDKKVEPKSCDKTHTCPPCPAPPVAGPSVFLFPPKPKDTLMISRTPEVTCVVVDVKHEDPEVKFNWYVDGVEVHNAKTKPREEQYNSTYRVVSVLTVLHQDWLNGKEYKCKVSNKALPAPIEKTISKAKGQPREPQVYTLPPSREEMTKNQVSLTCLVKGFYPSDIAVEWESNGQPENNYKTTPPVLDSDGSFFLYSKLTVDKSRWQQGNVFSCSVMHEALHNHYTQKSLSLSPGK

SEQ ID NO: 16512 - protein, 122 aa, synthetic construct; identical to SEQ ID NO: 11138
  REGION 1..122: note = Description of Artificial Sequence: Synthetic polypeptide
  REGION 1..122: note = VH of XENP018109

SEQ ID NO: 16513 - protein, 5 aa, synthetic construct
  REGION 1..5: note = Description of Artificial Sequence: Synthetic peptide
  REGION 1..5: note = XENP018109 vhCDR1
NYWMN

SEQ ID NO: 16514 - protein, 19 aa, synthetic construct
  REGION 1..19: note = Description of Artificial Sequence: Synthetic peptide
  REGION 1..19: note = XENP018109 vhCDR2
EIRLKSNNYATHYAEPVKG

SEQ ID NO: 16515 - protein, 11 aa, synthetic construct
  REGION 1..11: note = Description of Artificial Sequence: Synthetic peptide
  REGION 1..11: note = XENP018109 vhCDR3
YYGNYGGYFDV

SEQ ID NO: 16516 - protein, 214 aa, synthetic construct; identical to SEQ ID NO: 16226
  REGION 1..214: note = Description of Artificial Sequence: Synthetic polypeptide
  REGION 1..214: note = XENP018109 1G6_H1.12_L1_IgG1_PVA_/S267K Light Chain

SEQ ID NO: 16517 - protein, 107 aa, synthetic construct; identical to SEQ ID NO: 10923
  REGION 1..107: note = Description of Artificial Sequence: Synthetic polypeptide
  REGION 1..107: note = VL of XENP018109

SEQ ID NO: 16518 - protein, 11 aa, synthetic construct
  REGION 1..11: note = Description of Artificial Sequence: Synthetic peptide
  REGION 1..11: note = XENP018109 vlCDR1
RASQSVSNDVA

SEQ ID NO: 16519 - protein, 7 aa, synthetic construct
  REGION 1..7: note = Description of Artificial Sequence: Synthetic peptide
  REGION 1..7: note = XENP018109 vlCDR2
YASHRYT

SEQ ID NO: 16520 - protein, 9 aa, synthetic construct
  REGION 1..9: note = Description of Artificial Sequence: Synthetic peptide
  REGION 1..9: note = XENP018109 vlCDR3
QQDYSSPRT

SEQ ID NO: 16521 - protein, 451 aa, synthetic construct
  REGION 1..451: note = Description of Artificial Sequence: Synthetic polypeptide
  REGION 1..451: note = XENP018110 1G6_H1.13_L1_IgG1_PVA_/S267K Heavy Chain
EVQLVESGGGLVKPGGSLRLSCAASGFTFGNYWMNWVRQAPGKGLEWVGEIRLKSNNYATHYAEPVKGRFTISRDDSKSTVYLQMNSLKTEDTAVYYCTRYYGNYGGYFDVWGAGTLVTVSSASTKGPSVFPLAPSSKSTSGGTAALGCLVKDYFPEPVTVSWNSGALTSGVHTFPAVLQSSGLYSLSSVVTVPSSSLGTQTYICNVNHKPSNTKVDKKVEPKSCDKTHTCPPCPAPPVAGPSVFLFPPKPKDTLMISRTPEVTCVVVDVKHEDPEVKFNWYVDGVEVHNAKTKPREEQYNSTYRVVSVLTVLHQDWLNGKEYKCKVSNKALPAPIEKTISKAKGQPREPQVYTLPPSREEMTKNQVSLTCLVKGFYPSDIAVEWESNGQPENNYKTTPPVLDSDGSFFLYSKLTVDKSRWQQGNVFSCSVMHEALHNHYTQKSLSLSPGK

SEQ ID NO: 16522 - protein, 122 aa, synthetic construct; identical to SEQ ID NO: 11147
  REGION 1..122: note = Description of Artificial Sequence: Synthetic polypeptide
  REGION 1..122: note = VH of XENP018110

SEQ ID NO: 16523 - protein, 5 aa, synthetic construct
  REGION 1..5: note = Description of Artificial Sequence: Synthetic peptide
  REGION 1..5: note = XENP018110 vhCDR1
NYWMN

SEQ ID NO: 16524 - protein, 19 aa, synthetic construct
  REGION 1..19: note = Description of Artificial Sequence: Synthetic peptide
  REGION 1..19: note = XENP018110 vhCDR2
EIRLKSNNYATHYAEPVKG

SEQ ID NO: 16525 - protein, 11 aa, synthetic construct
  REGION 1..11: note = Description of Artificial Sequence: Synthetic peptide
  REGION 1..11: note = XENP018110 vhCDR3
YYGNYGGYFDV

SEQ ID NO: 16526 - protein, 214 aa, synthetic construct; identical to SEQ ID NO: 16226
  REGION 1..214: note = Description of Artificial Sequence: Synthetic polypeptide
  REGION 1..214: note = XENP018110 1G6_H1.13_L1_IgG1_PVA_/S267K Light Chain

SEQ ID NO: 16527 - protein, 107 aa, synthetic construct; identical to SEQ ID NO: 10923
  REGION 1..107: note = Description of Artificial Sequence: Synthetic polypeptide
  REGION 1..107: note = VL of XENP018110

SEQ ID NO: 16528 - protein, 11 aa, synthetic construct
  REGION 1..11: note = Description of Artificial Sequence: Synthetic peptide
  REGION 1..11: note = XENP018110 vlCDR1
RASQSVSNDVA

SEQ ID NO: 16529 - protein, 7 aa, synthetic construct
  REGION 1..7: note = Description of Artificial Sequence: Synthetic peptide
  REGION 1..7: note = XENP018110 vlCDR2
YASHRYT

SEQ ID NO: 16530 - protein, 9 aa, synthetic construct
  REGION 1..9: note = Description of Artificial Sequence: Synthetic peptide
  REGION 1..9: note = XENP018110 vlCDR3
QQDYSSPRT

SEQ ID NO: 16531 - protein, 451 aa, synthetic construct
  REGION 1..451: note = Description of Artificial Sequence: Synthetic polypeptide
  REGION 1..451: note = XENP018111 1G6_H1.14_L1_IgG1_PVA_/S267K Heavy Chain
EVQLVESGGGLVKPGGSLRLSCAASGFTFVNYWMNWVRQAPGKGLEWVGEIRLKSNNYATHYAEPVKGRFTISRDDSKSTVYLQMNSLKTEDTAVYYCTRYYGNYGGYFDVWGAGTLVTVSSASTKGPSVFPLAPSSKSTSGGTAALGCLVKDYFPEPVTVSWNSGALTSGVHTFPAVLQSSGLYSLSSVVTVPSSSLGTQTYICNVNHKPSNTKVDKKVEPKSCDKTHTCPPCPAPPVAGPSVFLFPPKPKDTLMISRTPEVTCVVVDVKHEDPEVKFNWYVDGVEVHNAKTKPREEQYNSTYRVVSVLTVLHQDWLNGKEYKCKVSNKALPAPIEKTISKAKGQPREPQVYTLPPSREEMTKNQVSLTCLVKGFYPSDIAVEWESNGQPENNYKTTPPVLDSDGSFFLYSKLTVDKSRWQQGNVFSCSVMHEALHNHYTQKSLSLSPGK

SEQ ID NO: 16532 - protein, 122 aa, synthetic construct; identical to SEQ ID NO: 11156
  REGION 1..122: note = Description of Artificial Sequence: Synthetic polypeptide
  REGION 1..122: note = VH of XENP018111

SEQ ID NO: 16533 - protein, 5 aa, synthetic construct
  REGION 1..5: note = Description of Artificial Sequence: Synthetic peptide
  REGION 1..5: note = XENP018111 vhCDR1
NYWMN

SEQ ID NO: 16534 - protein, 19 aa, synthetic construct
  REGION 1..19: note = Description of Artificial Sequence: Synthetic peptide
  REGION 1..19: note = XENP018111 vhCDR2
EIRLKSNNYATHYAEPVKG

SEQ ID NO: 16535 - protein, 11 aa, synthetic construct
  REGION 1..11: note = Description of Artificial Sequence: Synthetic peptide
  REGION 1..11: note = XENP018111 vhCDR3
YYGNYGGYFDV

SEQ ID NO: 16536 - protein, 214 aa, synthetic construct; identical to SEQ ID NO: 16226
  REGION 1..214: note = Description of Artificial Sequence: Synthetic polypeptide
  REGION 1..214: note = XENP018111 1G6_H1.14_L1_IgG1_PVA_/S267K Light Chain

SEQ ID NO: 16537 - protein, 107 aa, synthetic construct; identical to SEQ ID NO: 10923
  REGION 1..107: note = Description of Artificial Sequence: Synthetic polypeptide
  REGION 1..107: note = VL of XENP018111

SEQ ID NO: 16538 - protein, 11 aa, synthetic construct
  REGION 1..11: note = Description of Artificial Sequence: Synthetic peptide
  REGION 1..11: note = XENP018111 vlCDR1
RASQSVSNDVA

SEQ ID NO: 16539 - protein, 7 aa, synthetic construct
  REGION 1..7: note = Description of Artificial Sequence: Synthetic peptide
  REGION 1..7: note = XENP018111 vlCDR2
YASHRYT

SEQ ID NO: 16540 - protein, 9 aa, synthetic construct
  REGION 1..9: note = Description of Artificial Sequence: Synthetic peptide
  REGION 1..9: note = XENP018111 vlCDR3
QQDYSSPRT

SEQ ID NO: 16541 - protein, 451 aa, synthetic construct
  REGION 1..451: note = Description of Artificial Sequence: Synthetic polypeptide
  REGION 1..451: note = XENP018112 1G6_H1.15_L1_IgG1_PVA_/S267K Heavy Chain
EVQLVESGGGLVKPGGSLRLSCAASGFTFHNYWMNWVRQAPGKGLEWVGEIRLKSNNYATHYAEPVKGRFTISRDDSKSTVYLQMNSLKTEDTAVYYCTRYYGNYGGYFDVWGAGTLVTVSSASTKGPSVFPLAPSSKSTSGGTAALGCLVKDYFPEPVTVSWNSGALTSGVHTFPAVLQSSGLYSLSSVVTVPSSSLGTQTYICNVNHKPSNTKVDKKVEPKSCDKTHTCPPCPAPPVAGPSVFLFPPKPKDTLMISRTPEVTCVVVDVKHEDPEVKFNWYVDGVEVHNAKTKPREEQYNSTYRVVSVLTVLHQDWLNGKEYKCKVSNKALPAPIEKTISKAKGQPREPQVYTLPPSREEMTKNQVSLTCLVKGFYPSDIAVEWESNGQPENNYKTTPPVLDSDGSFFLYSKLTVDKSRWQQGNVFSCSVMHEALHNHYTQKSLSLSPGK

SEQ ID NO: 16542 - protein, 122 aa, synthetic construct; identical to SEQ ID NO: 11165
  REGION 1..122: note = Description of Artificial Sequence: Synthetic polypeptide
  REGION 1..122: note = VH of XENP018112

SEQ ID NO: 16543 - protein, 5 aa, synthetic construct
  REGION 1..5: note = Description of Artificial Sequence: Synthetic peptide
  REGION 1..5: note = XENP018112 vhCDR1
NYWMN

SEQ ID NO: 16544 - protein, 19 aa, synthetic construct
  REGION 1..19: note = Description of Artificial Sequence: Synthetic peptide
  REGION 1..19: note = XENP018112 vhCDR2
EIRLKSNNYATHYAEPVKG

SEQ ID NO: 16545 - protein, 11 aa, synthetic construct
  REGION 1..11: note = Description of Artificial Sequence: Synthetic peptide
  REGION 1..11: note = XENP018112 vhCDR3
YYGNYGGYFDV

SEQ ID NO: 16546 - protein, 214 aa, synthetic construct; identical to SEQ ID NO: 16226
  REGION 1..214: note = Description of Artificial Sequence: Synthetic polypeptide
  REGION 1..214: note = XENP018112 1G6_H1.15_L1_IgG1_PVA_/S267K Light Chain

SEQ ID NO: 16547 - protein, 107 aa, synthetic construct; identical to SEQ ID NO: 10923
  REGION 1..107: note = Description of Artificial Sequence: Synthetic polypeptide
  REGION 1..107: note = VL of XENP018112

SEQ ID NO: 16548 - protein, 11 aa, synthetic construct
  REGION 1..11: note = Description of Artificial Sequence: Synthetic peptide
  REGION 1..11: note = XENP018112 vlCDR1
RASQSVSNDVA

SEQ ID NO: 16549 - protein, 7 aa, synthetic construct
  REGION 1..7: note = Description of Artificial Sequence: Synthetic peptide
  REGION 1..7: note = XENP018112 vlCDR2
YASHRYT

SEQ ID NO: 16550 - protein, 9 aa, synthetic construct
  REGION 1..9: note = Description of Artificial Sequence: Synthetic peptide
  REGION 1..9: note = XENP018112 vlCDR3
QQDYSSPRT

SEQ ID NO: 16551 - protein, 451 aa, synthetic construct
  REGION 1..451: note = Description of Artificial Sequence: Synthetic polypeptide
  REGION 1..451: note = XENP018113 1G6_H1.16_L1_IgG1_PVA_/S267K Heavy Chain
EVQLVESGGGLVKPGGSLRLSCAASGFTFDNYWMNWVRQAPGKGLEWVGEIRLKSNNYATHYAEPVKGRFTISRDDSKSTVYLQMNSLKTEDTAVYYCTRYYGNYGGYFDVWGAGTLVTVSSASTKGPSVFPLAPSSKSTSGGTAALGCLVKDYFPEPVTVSWNSGALTSGVHTFPAVLQSSGLYSLSSVVTVPSSSLGTQTYICNVNHKPSNTKVDKKVEPKSCDKTHTCPPCPAPPVAGPSVFLFPPKPKDTLMISRTPEVTCVVVDVKHEDPEVKFNWYVDGVEVHNAKTKPREEQYNSTYRVVSVLTVLHQDWLNGKEYKCKVSNKALPAPIEKTISKAKGQPREPQVYTLPPSREEMTKNQVSLTCLVKGFYPSDIAVEWESNGQPENNYKTTPPVLDSDGSFFLYSKLTVDKSRWQQGNVFSCSVMHEALHNHYTQKSLSLSPGK

SEQ ID NO: 16552 - protein, 122 aa, synthetic construct; identical to SEQ ID NO: 11174
  REGION 1..122: note = Description of Artificial Sequence: Synthetic polypeptide
  REGION 1..122: note = VH of XENP018113

SEQ ID NO: 16553 - protein, 5 aa, synthetic construct
  REGION 1..5: note = Description of Artificial Sequence: Synthetic peptide
  REGION 1..5: note = XENP018113 vhCDR1
NYWMN

SEQ ID NO: 16554 - protein, 19 aa, synthetic construct
  REGION 1..19: note = Description of Artificial Sequence: Synthetic peptide
  REGION 1..19: note = XENP018113 vhCDR2
EIRLKSNNYATHYAEPVKG

SEQ ID NO: 16555 - protein, 11 aa, synthetic construct
  REGION 1..11: note = Description of Artificial Sequence: Synthetic peptide
  REGION 1..11: note = XENP018113 vhCDR3
YYGNYGGYFDV

SEQ ID NO: 16556 - protein, 214 aa, synthetic construct; identical to SEQ ID NO: 16226
  REGION 1..214: note = Description of Artificial Sequence: Synthetic polypeptide
  REGION 1..214: note = XENP018113 1G6_H1.16_L1_IgG1_PVA_/S267K Light Chain

SEQ ID NO: 16557 - protein, 107 aa, synthetic construct; identical to SEQ ID NO: 10923
  REGION 1..107: note = Description of Artificial Sequence: Synthetic polypeptide
  REGION 1..107: note = VL of XENP018113

SEQ ID NO: 16558 - protein, 11 aa, synthetic construct
  REGION 1..11: note = Description of Artificial Sequence: Synthetic peptide
  REGION 1..11: note = XENP018113 vlCDR1
RASQSVSNDVA

SEQ ID NO: 16559 - protein, 7 aa, synthetic construct
  REGION 1..7: note = Description of Artificial Sequence: Synthetic peptide
  REGION 1..7: note = XENP018113 vlCDR2
YASHRYT

SEQ ID NO: 16560 - protein, 9 aa, synthetic construct
  REGION 1..9: note = Description of Artificial Sequence: Synthetic peptide
  REGION 1..9: note = XENP018113 vlCDR3
QQDYSSPRT

SEQ ID NO: 16561 - protein, 451 aa, synthetic construct
  REGION 1..451: note = Description of Artificial Sequence: Synthetic polypeptide
  REGION 1..451: note = XENP018114 1G6_H1.17_L1_IgG1_PVA_/S267K Heavy Chain
EVQLVESGGGLVKPGGSLRLSCAASGFTFKNYWMNWVRQAPGKGLEWVGEIRLKSNNYATHYAEPVKGRFTISRDDSKSTVYLQMNSLKTEDTAVYYCTRYYGNYGGYFDVWGAGTLVTVSSASTKGPSVFPLAPSSKSTSGGTAALGCLVKDYFPEPVTVSWNSGALTSGVHTFPAVLQSSGLYSLSSVVTVPSSSLGTQTYICNVNHKPSNTKVDKKVEPKSCDKTHTCPPCPAPPVAGPSVFLFPPKPKDTLMISRTPEVTCVVVDVKHEDPEVKFNWYVDGVEVHNAKTKPREEQYNSTYRVVSVLTVLHQDWLNGKEYKCKVSNKALPAPIEKTISKAKGQPREPQVYTLPPSREEMTKNQVSLTCLVKGFYPSDIAVEWESNGQPENNYKTTPPVLDSDGSFFLYSKLTVDKSRWQQGNVFSCSVMHEALHNHYTQKSLSLSPGK

SEQ ID NO: 16562 - protein, 122 aa, synthetic construct; identical to SEQ ID NO: 11183
  REGION 1..122: note = Description of Artificial Sequence: Synthetic polypeptide
  REGION 1..122: note = VH of XENP018114

SEQ ID NO: 16563 - protein, 5 aa, synthetic construct
  REGION 1..5: note = Description of Artificial Sequence: Synthetic peptide
  REGION 1..5: note = XENP018114 vhCDR1
NYWMN

SEQ ID NO: 16564 - protein, 19 aa, synthetic construct
  REGION 1..19: note = Description of Artificial Sequence: Synthetic peptide
  REGION 1..19: note = XENP018114 vhCDR2
EIRLKSNNYATHYAEPVKG

SEQ ID NO: 16565 - protein, 11 aa, synthetic construct
  REGION 1..11: note = Description of Artificial Sequence: Synthetic peptide
  REGION 1..11: note = XENP018114 vhCDR3
YYGNYGGYFDV

SEQ ID NO: 16566 - protein, 214 aa, synthetic construct; identical to SEQ ID NO: 16226
  REGION 1..214: note = Description of Artificial Sequence: Synthetic polypeptide
  REGION 1..214: note = XENP018114 1G6_H1.17_L1_IgG1_PVA_/S267K Light Chain

SEQ ID NO: 16567 - protein, 107 aa, synthetic construct; identical to SEQ ID NO: 10923
  REGION 1..107: note = Description of Artificial Sequence: Synthetic polypeptide
  REGION 1..107: note = VL of XENP018114

SEQ ID NO: 16568 - protein, 11 aa, synthetic construct
  REGION 1..11: note = Description of Artificial Sequence: Synthetic peptide
  REGION 1..11: note = XENP018114 vlCDR1
RASQSVSNDVA

SEQ ID NO: 16569 - protein, 7 aa, synthetic construct
  REGION 1..7: note = Description of Artificial Sequence: Synthetic peptide
  REGION 1..7: note = XENP018114 vlCDR2
YASHRYT

SEQ ID NO: 16570 - protein, 9 aa, synthetic construct
  REGION 1..9: note = Description of Artificial Sequence: Synthetic peptide
  REGION 1..9: note = XENP018114 vlCDR3
QQDYSSPRT

SEQ ID NO: 16571 - protein, 451 aa, synthetic construct
  REGION 1..451: note = Description of Artificial Sequence: Synthetic polypeptide
  REGION 1..451: note = XENP018115 1G6_H1.18_L1_IgG1_PVA_/S267K Heavy Chain
EVQLVESGGGLVKPGGSLRLSCAASGFTFYNYWMNWVRQAPGKGLEWVGEIRLKSNNYATHYAEPVKGRFTISRDDSKSTVYLQMNSLKTEDTAVYYCTRYYGNYGGYFDVWGAGTLVTVSSASTKGPSVFPLAPSSKSTSGGTAALGCLVKDYFPEPVTVSWNSGALTSGVHTFPAVLQSSGLYSLSSVVTVPSSSLGTQTYICNVNHKPSNTKVDKKVEPKSCDKTHTCPPCPAPPVAGPSVFLFPPKPKDTLMISRTPEVTCVVVDVKHEDPEVKFNWYVDGVEVHNAKTKPREEQYNSTYRVVSVLTVLHQDWLNGKEYKCKVSNKALPAPIEKTISKAKGQPREPQVYTLPPSREEMTKNQVSLTCLVKGFYPSDIAVEWESNGQPENNYKTTPPVLDSDGSFFLYSKLTVDKSRWQQGNVFSCSVMHEALHNHYTQKSLSLSPGK

SEQ ID NO: 16572 - protein, 122 aa, synthetic construct; identical to SEQ ID NO: 11192
  REGION 1..122: note = Description of Artificial Sequence: Synthetic polypeptide
  REGION 1..122: note = VH of XENP018115

SEQ ID NO: 16573 - protein, 5 aa, synthetic construct
  REGION 1..5: note = Description of Artificial Sequence: Synthetic peptide
  REGION 1..5: note = XENP018115 vhCDR1
NYWMN

SEQ ID NO: 16574 - protein, 19 aa, synthetic construct
  REGION 1..19: note = Description of Artificial Sequence: Synthetic peptide
  REGION 1..19: note = XENP018115 vhCDR2
EIRLKSNNYATHYAEPVKG

SEQ ID NO: 16575 - protein, 11 aa, synthetic construct
  REGION 1..11: note = Description of Artificial Sequence: Synthetic peptide
  REGION 1..11: note = XENP018115 vhCDR3
YYGNYGGYFDV

SEQ ID NO: 16576 - protein, 214 aa, synthetic construct; identical to SEQ ID NO: 16226
  REGION 1..214: note = Description of Artificial Sequence: Synthetic polypeptide
  REGION 1..214: note = XENP018115 1G6_H1.18_L1_IgG1_PVA_/S267K Light Chain

SEQ ID NO: 16577 - protein, 107 aa, synthetic construct; identical to SEQ ID NO: 10923
  REGION 1..107: note = Description of Artificial Sequence: Synthetic polypeptide
  REGION 1..107: note = VL of XENP018115

SEQ ID NO: 16578 - protein, 11 aa, synthetic construct
  REGION 1..11: note = Description of Artificial Sequence: Synthetic peptide
  REGION 1..11: note = XENP018115 vlCDR1
RASQSVSNDVA

SEQ ID NO: 16579 - protein, 7 aa, synthetic construct
  REGION 1..7: note = Description of Artificial Sequence: Synthetic peptide
  REGION 1..7: note = XENP018115 vlCDR2
YASHRYT

SEQ ID NO: 16580 - protein, 9 aa, synthetic construct
  REGION 1..9: note = Description of Artificial Sequence: Synthetic peptide
  REGION 1..9: note = XENP018115 vlCDR3
QQDYSSPRT

SEQ ID NO: 16581 - protein, 451 aa, synthetic construct
  REGION 1..451: note = Description of Artificial Sequence: Synthetic polypeptide
  REGION 1..451: note = XENP018116 1G6_H1.19_L1_IgG1_PVA_/S267K Heavy Chain
EVQLVESGGGLVKPGGSLRLSCAASGFTFSDYWMNWVRQAPGKGLEWVGEIRLKSNNYATHYAEPVKGRFTISRDDSKSTVYLQMNSLKTEDTAVYYCTRYYGNYGGYFDVWGAGTLVTVSSASTKGPSVFPLAPSSKSTSGGTAALGCLVKDYFPEPVTVSWNSGALTSGVHTFPAVLQSSGLYSLSSVVTVPSSSLGTQTYICNVNHKPSNTKVDKKVEPKSCDKTHTCPPCPAPPVAGPSVFLFPPKPKDTLMISRTPEVTCVVVDVKHEDPEVKFNWYVDGVEVHNAKTKPREEQYNSTYRVVSVLTVLHQDWLNGKEYKCKVSNKALPAPIEKTISKAKGQPREPQVYTLPPSREEMTKNQVSLTCLVKGFYPSDIAVEWESNGQPENNYKTTPPVLDSDGSFFLYSKLTVDKSRWQQGNVFSCSVMHEALHNHYTQKSLSLSPGK

SEQ ID NO: 16582 - protein, 122 aa, synthetic construct; identical to SEQ ID NO: 11201
  REGION 1..122: note = Description of Artificial Sequence: Synthetic polypeptide
  REGION 1..122: note = VH of XENP018116

SEQ ID NO: 16583 - protein, 5 aa, synthetic construct
  REGION 1..5: note = Description of Artificial Sequence: Synthetic peptide
  REGION 1..5: note = XENP018116 vhCDR1
DYWMN

SEQ ID NO: 16584 - protein, 19 aa, synthetic construct
  REGION 1..19: note = Description of Artificial Sequence: Synthetic peptide
  REGION 1..19: note = XENP018116 vhCDR2
EIRLKSNNYATHYAEPVKG

SEQ ID NO: 16585 - protein, 11 aa, synthetic construct
  REGION 1..11: note = Description of Artificial Sequence: Synthetic peptide
  REGION 1..11: note = XENP018116 vhCDR3
YYGNYGGYFDV

SEQ ID NO: 16586 - protein, 214 aa, synthetic construct; identical to SEQ ID NO: 16226
  REGION 1..214: note = Description of Artificial Sequence: Synthetic polypeptide
  REGION 1..214: note = XENP018116 1G6_H1.19_L1_IgG1_PVA_/S267K Light Chain

SEQ ID NO: 16587 - protein, 107 aa, synthetic construct; identical to SEQ ID NO: 10923
  REGION 1..107: note = Description of Artificial Sequence: Synthetic polypeptide
  REGION 1..107: note = VL of XENP018116

SEQ ID NO: 16588 - protein, 11 aa, synthetic construct
  REGION 1..11: note = Description of Artificial Sequence: Synthetic peptide
  REGION 1..11: note = XENP018116 vlCDR1
RASQSVSNDVA

SEQ ID NO: 16589 - protein, 7 aa, synthetic construct
  REGION 1..7: note = Description of Artificial Sequence: Synthetic peptide
  REGION 1..7: note = XENP018116 vlCDR2
YASHRYT

SEQ ID NO: 16590 - protein, 9 aa, synthetic construct
  REGION 1..9: note = Description of Artificial Sequence: Synthetic peptide
  REGION 1..9: note = XENP018116 vlCDR3
QQDYSSPRT

SEQ ID NO: 16591 - protein, 451 aa, synthetic construct
  REGION 1..451: note = Description of Artificial Sequence: Synthetic polypeptide
  REGION 1..451: note = XENP018117 1G6_H1.20_L1_IgG1_PVA_/S267K Heavy Chain
EVQLVESGGGLVKPGGSLRLSCAASGFTFSHYWMNWVRQAPGKGLEWVGEIRLKSNNYATHYAEPVKGRFTISRDDSKSTVYLQMNSLKTEDTAVYYCTRYYGNYGGYFDVWGAGTLVTVSSASTKGPSVFPLAPSSKSTSGGTAALGCLVKDYFPEPVTVSWNSGALTSGVHTFPAVLQSSGLYSLSSVVTVPSSSLGTQTYICNVNHKPSNTKVDKKVEPKSCDKTHTCPPCPAPPVAGPSVFLFPPKPKDTLMISRTPEVTCVVVDVKHEDPEVKFNWYVDGVEVHNAKTKPREEQYNSTYRVVSVLTVLHQDWLNGKEYKCKVSNKALPAPIEKTISKAKGQPREPQVYTLPPSREEMTKNQVSLTCLVKGFYPSDIAVEWESNGQPENNYKTTPPVLDSDGSFFLYSKLTVDKSRWQQGNVFSCSVMHEALHNHYTQKSLSLSPGK

SEQ ID NO: 16592 - protein, 122 aa, synthetic construct; identical to SEQ ID NO: 11210
  REGION 1..122: note = Description of Artificial Sequence: Synthetic polypeptide
  REGION 1..122: note = VH of XENP018117

SEQ ID NO: 16593 - protein, 5 aa, synthetic construct
  REGION 1..5: note = Description of Artificial Sequence: Synthetic peptide
  REGION 1..5: note = XENP018117 vhCDR1
HYWMN

SEQ ID NO: 16594 - protein, 19 aa, synthetic construct
  REGION 1..19: note = Description of Artificial Sequence: Synthetic peptide
  REGION 1..19: note = XENP018117 vhCDR2
EIRLKSNNYATHYAEPVKG

SEQ ID NO: 16595 - protein, 11 aa, synthetic construct
  REGION 1..11: note = Description of Artificial Sequence: Synthetic peptide
  REGION 1..11: note = XENP018117 vhCDR3
YYGNYGGYFDV

SEQ ID NO: 16596 - protein, 214 aa, synthetic construct; identical to SEQ ID NO: 16226
  REGION 1..214: note = Description of Artificial Sequence: Synthetic polypeptide
  REGION 1..214: note = XENP018117 1G6_H1.20_L1_IgG1_PVA_/S267K Light Chain

SEQ ID NO: 16597 - protein, 107 aa, synthetic construct; identical to SEQ ID NO: 10923
  REGION 1..107: note = Description of Artificial Sequence: Synthetic polypeptide
  REGION 1..107: note = VL of XENP018117

SEQ ID NO: 16598 - protein, 11 aa, synthetic construct
  REGION 1..11: note = Description of Artificial Sequence: Synthetic peptide
  REGION 1..11: note = XENP018117 vlCDR1
RASQSVSNDVA

SEQ ID NO: 16599 - protein, 7 aa, synthetic construct
  REGION 1..7: note = Description of Artificial Sequence: Synthetic peptide
  REGION 1..7: note = XENP018117 vlCDR2
YASHRYT

SEQ ID NO: 16600 - protein, 9 aa, synthetic construct
  REGION 1..9: note = Description of Artificial Sequence: Synthetic peptide
  REGION 1..9: note = XENP018117 vlCDR3
QQDYSSPRT

SEQ ID NO: 16601 - protein, 451 aa, synthetic construct
  REGION 1..451: note = Description of Artificial Sequence: Synthetic polypeptide
  REGION 1..451: note = XENP018118 1G6_H1.21_L1_IgG1_PVA_/S267K Heavy Chain
EVQLVESGGGLVKPGGSLRLSCAASGFTFSEYWMNWVRQAPGKGLEWVGEIRLKSNNYATHYAEPVKGRFTISRDDSKSTVYLQMNSLKTEDTAVYYCTRYYGNYGGYFDVWGAGTLVTVSSASTKGPSVFPLAPSSKSTSGGTAALGCLVKDYFPEPVTVSWNSGALTSGVHTFPAVLQSSGLYSLSSVVTVPSSSLGTQTYICNVNHKPSNTKVDKKVEPKSCDKTHTCPPCPAPPVAGPSVFLFPPKPKDTLMISRTPEVTCVVVDVKHEDPEVKFNWYVDGVEVHNAKTKPREEQYNSTYRVVSVLTVLHQDWLNGKEYKCKVSNKALPAPIEKTISKAKGQPREPQVYTLPPSREEMTKNQVSLTCLVKGFYPSDIAVEWESNGQPENNYKTTPPVLDSDGSFFLYSKLTVDKSRWQQGNVFSCSVMHEALHNHYTQKSLSLSPGK

SEQ ID NO: 16602 - protein, 122 aa, synthetic construct; identical to SEQ ID NO: 11219
  REGION 1..122: note = Description of Artificial Sequence: Synthetic polypeptide
  REGION 1..122: note = VH of XENP018118

SEQ ID NO: 16603 - protein, 5 aa, synthetic construct
  REGION 1..5: note = Description of Artificial Sequence: Synthetic peptide
  REGION 1..5: note = XENP018118 vhCDR1
EYWMN

SEQ ID NO: 16604 - protein, 19 aa, synthetic construct
  REGION 1..19: note = Description of Artificial Sequence: Synthetic peptide
  REGION 1..19: note = XENP018118 vhCDR2
EIRLKSNNYATHYAEPVKG

SEQ ID NO: 16605 - protein, 11 aa, synthetic construct
  REGION 1..11: note = Description of Artificial Sequence: Synthetic peptide
  REGION 1..11: note = XENP018118 vhCDR3
YYGNYGGYFDV

SEQ ID NO: 16606 - protein, 214 aa, synthetic construct; identical to SEQ ID NO: 16226
  REGION 1..214: note = Description of Artificial Sequence: Synthetic polypeptide
  REGION 1..214: note = XENP018118 1G6_H1.21_L1_IgG1_PVA_/S267K Light Chain

SEQ ID NO: 16607 - protein, 107 aa, synthetic construct; identical to SEQ ID NO: 10923
  REGION 1..107: note = Description of Artificial Sequence: Synthetic polypeptide
  REGION 1..107: note = VL of XENP018118

SEQ ID NO: 16608 - protein, 11 aa, synthetic construct
  REGION 1..11: note = Description of Artificial Sequence: Synthetic peptide
  REGION 1..11: note = XENP018118 vlCDR1
RASQSVSNDVA

SEQ ID NO: 16609 - protein, 7 aa, synthetic construct
  REGION 1..7: note = Description of Artificial Sequence: Synthetic peptide
  REGION 1..7: note = XENP018118 vlCDR2
YASHRYT

SEQ ID NO: 16610 - protein, 9 aa, synthetic construct
  REGION 1..9: note = Description of Artificial Sequence: Synthetic peptide
  REGION 1..9: note = XENP018118 vlCDR3
QQDYSSPRT

SEQ ID NO: 16611 - protein, 451 aa, synthetic construct
  REGION 1..451: note = Description of Artificial Sequence: Synthetic polypeptide
  REGION 1..451: note = XENP018119 1G6_H1.22_L1_IgG1_PVA_/S267K Heavy Chain
EVQLVESGGGLVKPGGSLRLSCAASGFTFSSYWMNWVRQAPGKGLEWVGEIRLKSNNYATHYAEPVKGRFTISRDDSKSTVYLQMNSLKTEDTAVYYCTRYYGNYGGYFDVWGAGTLVTVSSASTKGPSVFPLAPSSKSTSGGTAALGCLVKDYFPEPVTVSWNSGALTSGVHTFPAVLQSSGLYSLSSVVTVPSSSLGTQTYICNVNHKPSNTKVDKKVEPKSCDKTHTCPPCPAPPVAGPSVFLFPPKPKDTLMISRTPEVTCVVVDVKHEDPEVKFNWYVDGVEVHNAKTKPREEQYNSTYRVVSVLTVLHQDWLNGKEYKCKVSNKALPAPIEKTISKAKGQPREPQVYTLPPSREEMTKNQVSLTCLVKGFYPSDIAVEWESNGQPENNYKTTPPVLDSDGSFFLYSKLTVDKSRWQQGNVFSCSVMHEALHNHYTQKSLSLSPGK

SEQ ID NO: 16612 - protein, 122 aa, synthetic construct; identical to SEQ ID NO: 11228
  REGION 1..122: note = Description of Artificial Sequence: Synthetic polypeptide
  REGION 1..122: note = VH of XENP018119

SEQ ID NO: 16613 - protein, 5 aa, synthetic construct
  REGION 1..5: note = Description of Artificial Sequence: Synthetic peptide
  REGION 1..5: note = XENP018119 vhCDR1
SYWMN

SEQ ID NO: 16614 - protein, 19 aa, synthetic construct
  REGION 1..19: note = Description of Artificial Sequence: Synthetic peptide
  REGION 1..19: note = XENP018119 vhCDR2
EIRLKSNNYATHYAEPVKG

SEQ ID NO: 16615 - protein, 11 aa, synthetic construct
  REGION 1..11: note = Description of Artificial Sequence: Synthetic peptide
  REGION 1..11: note = XENP018119 vhCDR3
YYGNYGGYFDV

SEQ ID NO: 16616 - protein, 214 aa, synthetic construct; identical to SEQ ID NO: 16226
  REGION 1..214: note = Description of Artificial Sequence: Synthetic polypeptide
  REGION 1..214: note = XENP018119 1G6_H1.22_L1_IgG1_PVA_/S267K Light Chain

SEQ ID NO: 16617 - protein, 107 aa, synthetic construct; identical to SEQ ID NO: 10923
  REGION 1..107: note = Description of Artificial Sequence: Synthetic polypeptide
  REGION 1..107: note = VL of XENP018119

SEQ ID NO: 16618 - protein, 11 aa, synthetic construct
  REGION 1..11: note = Description of Artificial Sequence: Synthetic peptide
  REGION 1..11: note = XENP018119 vlCDR1
RASQSVSNDVA

SEQ ID NO: 16619 - protein, 7 aa, synthetic construct
  REGION 1..7: note = Description of Artificial Sequence: Synthetic peptide
  REGION 1..7: note = XENP018119 vlCDR2
YASHRYT

SEQ ID NO: 16620 - protein, 9 aa, synthetic construct
  REGION 1..9: note = Description of Artificial Sequence: Synthetic peptide
  REGION 1..9: note = XENP018119 vlCDR3
QQDYSSPRT

SEQ ID NO: 16621 - protein, 451 aa, synthetic construct
  REGION 1..451: note = Description of Artificial Sequence: Synthetic polypeptide
  REGION 1..451: note = XENP018120 1G6_H1.23_L1_IgG1_PVA_/S267K Heavy Chain
EVQLVESGGGLVKPGGSLRLSCAASGFTFSRYWMNWVRQAPGKGLEWVGEIRLKSNNYATHYAEPVKGRFTISRDDSKSTVYLQMNSLKTEDTAVYYCTRYYGNYGGYFDVWGAGTLVTVSSASTKGPSVFPLAPSSKSTSGGTAALGCLVKDYFPEPVTVSWNSGALTSGVHTFPAVLQSSGLYSLSSVVTVPSSSLGTQTYICNVNHKPSNTKVDKKVEPKSCDKTHTCPPCPAPPVAGPSVFLFPPKPKDTLMISRTPEVTCVVVDVKHEDPEVKFNWYVDGVEVHNAKTKPREEQYNSTYRVVSVLTVLHQDWLNGKEYKCKVSNKALPAPIEKTISKAKGQPREPQVYTLPPSREEMTKNQVSLTCLVKGFYPSDIAVEWESNGQPENNYKTTPPVLDSDGSFFLYSKLTVDKSRWQQGNVFSCSVMHEALHNHYTQKSLSLSPGK

SEQ ID NO: 16622 - protein, 122 aa, synthetic construct; identical to SEQ ID NO: 11237
  REGION 1..122: note = Description of Artificial Sequence: Synthetic polypeptide
  REGION 1..122: note = VH of XENP018120

SEQ ID NO: 16623 - protein, 5 aa, synthetic construct
  REGION 1..5: note = Description of Artificial Sequence: Synthetic peptide
  REGION 1..5: note = XENP018120 vhCDR1
RYWMN

SEQ ID NO: 16624 - protein, 19 aa, synthetic construct
  REGION 1..19: note = Description of Artificial Sequence: Synthetic peptide
  REGION 1..19: note = XENP018120 vhCDR2
EIRLKSNNYATHYAEPVKG

SEQ ID NO: 16625 - protein, 11 aa, synthetic construct
  REGION 1..11: note = Description of Artificial Sequence: Synthetic peptide
  REGION 1..11: note = XENP018120 vhCDR3
YYGNYGGYFDV

SEQ ID NO: 16626 - protein, 214 aa, synthetic construct; identical to SEQ ID NO: 16226
  REGION 1..214: note = Description of Artificial Sequence: Synthetic polypeptide
  REGION 1..214: note = XENP018120 1G6_H1.23_L1_IgG1_PVA_/S267K Light Chain

SEQ ID NO: 16627 - protein, 107 aa, synthetic construct; identical to SEQ ID NO: 10923
  REGION 1..107: note = Description of Artificial Sequence: Synthetic polypeptide
  REGION 1..107: note = VL of XENP018120

SEQ ID NO: 16628 - protein, 11 aa, synthetic construct
  REGION 1..11: note = Description of Artificial Sequence: Synthetic peptide
  REGION 1..11: note = XENP018120 vlCDR1
RASQSVSNDVA

SEQ ID NO: 16629 - protein, 7 aa, synthetic construct
  REGION 1..7: note = Description of Artificial Sequence: Synthetic peptide
  REGION 1..7: note = XENP018120 vlCDR2
YASHRYT

SEQ ID NO: 16630 - protein, 9 aa, synthetic construct
  REGION 1..9: note = Description of Artificial Sequence: Synthetic peptide
  REGION 1..9: note = XENP018120 vlCDR3
QQDYSSPRT

SEQ ID NO: 16631 - protein, 451 aa, synthetic construct
  REGION 1..451: note = Description of Artificial Sequence: Synthetic polypeptide
  REGION 1..451: note = XENP018121 1G6_H1.24_L1_IgG1_PVA_/S267K Heavy Chain
EVQLVESGGGLVKPGGSLRLSCAASGFTFSLYWMNWVRQAPGKGLEWVGEIRLKSNNYATHYAEPVKGRFTISRDDSKSTVYLQMNSLKTEDTAVYYCTRYYGNYGGYFDVWGAGTLVTVSSASTKGPSVFPLAPSSKSTSGGTAALGCLVKDYFPEPVTVSWNSGALTSGVHTFPAVLQSSGLYSLSSVVTVPSSSLGTQTYICNVNHKPSNTKVDKKVEPKSCDKTHTCPPCPAPPVAGPSVFLFPPKPKDTLMISRTPEVTCVVVDVKHEDPEVKFNWYVDGVEVHNAKTKPREEQYNSTYRVVSVLTVLHQDWLNGKEYKCKVSNKALPAPIEKTISKAKGQPREPQVYTLPPSREEMTKNQVSLTCLVKGFYPSDIAVEWESNGQPENNYKTTPPVLDSDGSFFLYSKLTVDKSRWQQGNVFSCSVMHEALHNHYTQKSLSLSPGK

SEQ ID NO: 16632 - protein, 122 aa, synthetic construct; identical to SEQ ID NO: 11246
  REGION 1..122: note = Description of Artificial Sequence: Synthetic polypeptide
  REGION 1..122: note = VH of XENP018121

SEQ ID NO: 16633 - protein, 5 aa, synthetic construct
  REGION 1..5: note = Description of Artificial Sequence: Synthetic peptide
  REGION 1..5: note = XENP018121 vhCDR1
LYWMN

SEQ ID NO: 16634 - protein, 19 aa, synthetic construct
  REGION 1..19: note = Description of Artificial Sequence: Synthetic peptide
  REGION 1..19: note = XENP018121 vhCDR2
EIRLKSNNYATHYAEPVKG

SEQ ID NO: 16635 - protein, 11 aa, synthetic construct
  REGION 1..11: note = Description of Artificial Sequence: Synthetic peptide
  REGION 1..11: note = XENP018121 vhCDR3
YYGNYGGYFDV

SEQ ID NO: 16636 - protein, 214 aa, synthetic construct; identical to SEQ ID NO: 16226
  REGION 1..214: note = Description of Artificial Sequence: Synthetic polypeptide
  REGION 1..214: note = XENP018121 1G6_H1.24_L1_IgG1_PVA_/S267K Light Chain

SEQ ID NO: 16637 - protein, 107 aa, synthetic construct; identical to SEQ ID NO: 10923
  REGION 1..107: note = Description of Artificial Sequence: Synthetic polypeptide
  REGION 1..107: note = VL of XENP018121

SEQ ID NO: 16638 - protein, 11 aa, synthetic construct
  REGION 1..11: note = Description of Artificial Sequence: Synthetic peptide
  REGION 1..11: note = XENP018121 vlCDR1
RASQSVSNDVA

SEQ ID NO: 16639 - protein, 7 aa, synthetic construct
  REGION 1..7: note = Description of Artificial Sequence: Synthetic peptide
  REGION 1..7: note = XENP018121 vlCDR2
YASHRYT

SEQ ID NO: 16640 - protein, 9 aa, synthetic construct
  REGION 1..9: note = Description of Artificial Sequence: Synthetic peptide
  REGION 1..9: note = XENP018121 vlCDR3
QQDYSSPRT

SEQ ID NO: 16641 - protein, 451 aa, synthetic construct
  REGION 1..451: note = Description of Artificial Sequence: Synthetic polypeptide
  REGION 1..451: note = XENP018122 1G6_H1.25_L1_IgG1_PVA_/S267K Heavy Chain
EVQLVESGGGLVKPGGSLRLSCAASGFTFSTYWMNWVRQAPGKGLEWVGEIRLKSNNYATHYAEPVKGRFTISRDDSKSTVYLQMNSLKTEDTAVYYCTRYYGNYGGYFDVWGAGTLVTVSSASTKGPSVFPLAPSSKSTSGGTAALGCLVKDYFPEPVTVSWNSGALTSGVHTFPAVLQSSGLYSLSSVVTVPSSSLGTQTYICNVNHKPSNTKVDKKVEPKSCDKTHTCPPCPAPPVAGPSVFLFPPKPKDTLMISRTPEVTCVVVDVKHEDPEVKFNWYVDGVEVHNAKTKPREEQYNSTYRVVSVLTVLHQDWLNGKEYKCKVSNKALPAPIEKTISKAKGQPREPQVYTLPPSREEMTKNQVSLTCLVKGFYPSDIAVEWESNGQPENNYKTTPPVLDSDGSFFLYSKLTVDKSRWQQGNVFSCSVMHEALHNHYTQKSLSLSPGK

SEQ ID NO: 16642 - protein, 122 aa, synthetic construct; identical to SEQ ID NO: 11255
  REGION 1..122: note = Description of Artificial Sequence: Synthetic polypeptide
  REGION 1..122: note = VH of XENP018122

SEQ ID NO: 16643 - protein, 5 aa, synthetic construct
  REGION 1..5: note = Description of Artificial Sequence: Synthetic peptide
  REGION 1..5: note = XENP018122 vhCDR1
TYWMN

SEQ ID NO: 16644 - protein, 19 aa, synthetic construct
  REGION 1..19: note = Description of Artificial Sequence: Synthetic peptide
  REGION 1..19: note = XENP018122 vhCDR2
EIRLKSNNYATHYAEPVKG

SEQ ID NO: 16645 - protein, 11 aa, synthetic construct
  REGION 1..11: note = Description of Artificial Sequence: Synthetic peptide
  REGION 1..11: note = XENP018122 vhCDR3
YYGNYGGYFDV

SEQ ID NO: 16646 - protein, 214 aa, synthetic construct; identical to SEQ ID NO: 16226
  REGION 1..214: note = Description of Artificial Sequence: Synthetic polypeptide
  REGION 1..214: note = XENP018122 1G6_H1.25_L1_IgG1_PVA_/S267K Light Chain

SEQ ID NO: 16647 - protein, 107 aa, synthetic construct; identical to SEQ ID NO: 10923
  REGION 1..107: note = Description of Artificial Sequence: Synthetic polypeptide
  REGION 1..107: note = VL of XENP018122

SEQ ID NO: 16648 - protein, 11 aa, synthetic construct
  REGION 1..11: note = Description of Artificial Sequence: Synthetic peptide
  REGION 1..11: note = XENP018122 vlCDR1
RASQSVSNDVA

SEQ ID NO: 16649 - protein, 7 aa, synthetic construct
  REGION 1..7: note = Description of Artificial Sequence: Synthetic peptide
  REGION 1..7: note = XENP018122 vlCDR2
YASHRYT

SEQ ID NO: 16650 - protein, 9 aa, synthetic construct
  REGION 1..9: note = Description of Artificial Sequence: Synthetic peptide
  REGION 1..9: note = XENP018122 vlCDR3
QQDYSSPRT

SEQ ID NO: 16651 - protein, 451 aa, synthetic construct
  REGION 1..451: note = Description of Artificial Sequence: Synthetic polypeptide
  REGION 1..451: note = XENP018123 1G6_H1.26_L1_IgG1_PVA_/S267K Heavy Chain
EVQLVESGGGLVKPGGSLRLSCAASGFTFSGYWMNWVRQAPGKGLEWVGEIRLKSNNYATHYAEPVKGRFTISRDDSKSTVYLQMNSLKTEDTAVYYCTRYYGNYGGYFDVWGAGTLVTVSSASTKGPSVFPLAPSSKSTSGGTAALGCLVKDYFPEPVTVSWNSGALTSGVHTFPAVLQSSGLYSLSSVVTVPSSSLGTQTYICNVNHKPSNTKVDKKVEPKSCDKTHTCPPCPAPPVAGPSVFLFPPKPKDTLMISRTPEVTCVVVDVKHEDPEVKFNWYVDGVEVHNAKTKPREEQYNSTYRVVSVLTVLHQDWLNGKEYKCKVSNKALPAPIEKTISKAKGQPREPQVYTLPPSREEMTKNQVSLTCLVKGFYPSDIAVEWESNGQPENNYKTTPPVLDSDGSFFLYSKLTVDKSRWQQGNVFSCSVMHEALHNHYTQKSLSLSPGK

SEQ ID NO: 16652 - protein, 122 aa, synthetic construct; identical to SEQ ID NO: 11264
  REGION 1..122: note = Description of Artificial Sequence: Synthetic polypeptide
  REGION 1..122: note = VH of XENP018123

SEQ ID NO: 16653 - protein, 5 aa, synthetic construct
  REGION 1..5: note = Description of Artificial Sequence: Synthetic peptide
  REGION 1..5: note = XENP018123 vhCDR1
GYWMN

SEQ ID NO: 16654 - protein, 19 aa, synthetic construct
  REGION 1..19: note = Description of Artificial Sequence: Synthetic peptide
  REGION 1..19: note = XENP018123 vhCDR2
EIRLKSNNYATHYAEPVKG

SEQ ID NO: 16655 - protein, 11 aa, synthetic construct
  REGION 1..11: note = Description of Artificial Sequence: Synthetic peptide
  REGION 1..11: note = XENP018123 vhCDR3
YYGNYGGYFDV

SEQ ID NO: 16656 - protein, 214 aa, synthetic construct; identical to SEQ ID NO: 16226
  REGION 1..214: note = Description of Artificial Sequence: Synthetic polypeptide
  REGION 1..214: note = XENP018123 1G6_H1.26_L1_IgG1_PVA_/S267K Light Chain

SEQ ID NO: 16657 - protein, 107 aa, synthetic construct; identical to SEQ ID NO: 10923
  REGION 1..107: note = Description of Artificial Sequence: Synthetic polypeptide
  REGION 1..107: note = VL of XENP018123

SEQ ID NO: 16658 - protein, 11 aa, synthetic construct
  REGION 1..11: note = Description of Artificial Sequence: Synthetic peptide
  REGION 1..11: note = XENP018123 vlCDR1
RASQSVSNDVA

SEQ ID NO: 16659 - protein, 7 aa, synthetic construct
  REGION 1..7: note = Description of Artificial Sequence: Synthetic peptide
  REGION 1..7: note = XENP018123 vlCDR2
YASHRYT

SEQ ID NO: 16660 - protein, 9 aa, synthetic construct
  REGION 1..9: note = Description of Artificial Sequence: Synthetic peptide
  REGION 1..9: note = XENP018123 vlCDR3
QQDYSSPRT

SEQ ID NO: 16661 - protein, 451 aa, synthetic construct
  REGION 1..451: note = Description of Artificial Sequence: Synthetic polypeptide
  REGION 1..451: note = XENP018124 1G6_H1.27_L1_IgG1_PVA_/S267K Heavy Chain
EVQLVESGGGLVKPGGSLRLSCAASGFTFSYYWMNWVRQAPGKGLEWVGEIRLKSNNYATHYAEPVKGRFTISRDDSKSTVYLQMNSLKTEDTAVYYCTRYYGNYGGYFDVWGAGTLVTVSSASTKGPSVFPLAPSSKSTSGGTAALGCLVKDYFPEPVTVSWNSGALTSGVHTFPAVLQSSGLYSLSSVVTVPSSSLGTQTYICNVNHKPSNTKVDKKVEPKSCDKTHTCPPCPAPPVAGPSVFLFPPKPKDTLMISRTPEVTCVVVDVKHEDPEVKFNWYVDGVEVHNAKTKPREEQYNSTYRVVSVLTVLHQDWLNGKEYKCKVSNKALPAPIEKTISKAKGQPREPQVYTLPPSREEMTKNQVSLTCLVKGFYPSDIAVEWESNGQPENNYKTTPPVLDSDGSFFLYSKLTVDKSRWQQGNVFSCSVMHEALHNHYTQKSLSLSPGK

SEQ ID NO: 16662 - protein, 122 aa, synthetic construct; identical to SEQ ID NO: 11273
  REGION 1..122: note = Description of Artificial Sequence: Synthetic polypeptide
  REGION 1..122: note = VH of XENP018124

SEQ ID NO: 16663 - protein, 5 aa, synthetic construct
  REGION 1..5: note = Description of Artificial Sequence: Synthetic peptide
  REGION 1..5: note = XENP018124 vhCDR1
YYWMN

SEQ ID NO: 16664 - protein, 19 aa, synthetic construct
  REGION 1..19: note = Description of Artificial Sequence: Synthetic peptide
  REGION 1..19: note = XENP018124 vhCDR2
EIRLKSNNYATHYAEPVKG

SEQ ID NO: 16665 - protein, 11 aa, synthetic construct
  REGION 1..11: note = Description of Artificial Sequence: Synthetic peptide
  REGION 1..11: note = XENP018124 vhCDR3
YYGNYGGYFDV

SEQ ID NO: 16666 - protein, 214 aa, synthetic construct; identical to SEQ ID NO: 16226
  REGION 1..214: note = Description of Artificial Sequence: Synthetic polypeptide
  REGION 1..214: note = XENP018124 1G6_H1.27_L1_IgG1_PVA_/S267K Light Chain

SEQ ID NO: 16667 - protein, 107 aa, synthetic construct; identical to SEQ ID NO: 10923
  REGION 1..107: note = Description of Artificial Sequence: Synthetic polypeptide
  REGION 1..107: note = VL of XENP018124

SEQ ID NO: 16668 - protein, 11 aa, synthetic construct
  REGION 1..11: note = Description of Artificial Sequence: Synthetic peptide
  REGION 1..11: note = XENP018124 vlCDR1
RASQSVSNDVA

SEQ ID NO: 16669 - protein, 7 aa, synthetic construct
  REGION 1..7: note = Description of Artificial Sequence: Synthetic peptide
  REGION 1..7: note = XENP018124 vlCDR2
YASHRYT

SEQ ID NO: 16670 - protein, 9 aa, synthetic construct
  REGION 1..9: note = Description of Artificial Sequence: Synthetic peptide
  REGION 1..9: note = XENP018124 vlCDR3
QQDYSSPRT

SEQ ID NO: 16671 - protein, 451 aa, synthetic construct
  REGION 1..451: note = Description of Artificial Sequence: Synthetic polypeptide
  REGION 1..451: note = XENP018125 1G6_H1.28_L1_IgG1_PVA_/S267K Heavy Chain
EVQLVESGGGLVKPGGSLRLSCAASGFTFSNFWMNWVRQAPGKGLEWVGEIRLKSNNYATHYAEPVKGRFTISRDDSKSTVYLQMNSLKTEDTAVYYCTRYYGNYGGYFDVWGAGTLVTVSSASTKGPSVFPLAPSSKSTSGGTAALGCLVKDYFPEPVTVSWNSGALTSGVHTFPAVLQSSGLYSLSSVVTVPSSSLGTQTYICNVNHKPSNTKVDKKVEPKSCDKTHTCPPCPAPPVAGPSVFLFPPKPKDTLMISRTPEVTCVVVDVKHEDPEVKFNWYVDGVEVHNAKTKPREEQYNSTYRVVSVLTVLHQDWLNGKEYKCKVSNKALPAPIEKTISKAKGQPREPQVYTLPPSREEMTKNQVSLTCLVKGFYPSDIAVEWESNGQPENNYKTTPPVLDSDGSFFLYSKLTVDKSRWQQGNVFSCSVMHEALHNHYTQKSLSLSPGK

SEQ ID NO: 16672 - protein, 122 aa, synthetic construct; identical to SEQ ID NO: 11282
  REGION 1..122: note = Description of Artificial Sequence: Synthetic polypeptide
  REGION 1..122: note = VH of XENP018125

SEQ ID NO: 16673 - protein, 5 aa, synthetic construct
  REGION 1..5: note = Description of Artificial Sequence: Synthetic peptide
  REGION 1..5: note = XENP018125 vhCDR1
NFWMN

SEQ ID NO: 16674 - protein, 19 aa, synthetic construct
  REGION 1..19: note = Description of Artificial Sequence: Synthetic peptide
  REGION 1..19: note = XENP018125 vhCDR2
EIRLKSNNYATHYAEPVKG

SEQ ID NO: 16675 - protein, 11 aa, synthetic construct
  REGION 1..11: note = Description of Artificial Sequence: Synthetic peptide
  REGION 1..11: note = XENP018125 vhCDR3
YYGNYGGYFDV

SEQ ID NO: 16676 - protein, 214 aa, synthetic construct; identical to SEQ ID NO: 16226
  REGION 1..214: note = Description of Artificial Sequence: Synthetic polypeptide
  REGION 1..214: note = XENP018125 1G6_H1.28_L1_IgG1_PVA_/S267K Light Chain

SEQ ID NO: 16677 - protein, 107 aa, synthetic construct; identical to SEQ ID NO: 10923
  REGION 1..107: note = Description of Artificial Sequence: Synthetic polypeptide
  REGION 1..107: note = VL of XENP018125

SEQ ID NO: 16678 - protein, 11 aa, synthetic construct
  REGION 1..11: note = Description of Artificial Sequence: Synthetic peptide
  REGION 1..11: note = XENP018125 vlCDR1
RASQSVSNDVA

SEQ ID NO: 16679 - protein, 7 aa, synthetic construct
  REGION 1..7: note = Description of Artificial Sequence: Synthetic peptide
  REGION 1..7: note = XENP018125 vlCDR2
YASHRYT

SEQ ID NO: 16680 - protein, 9 aa, synthetic construct
  REGION 1..9: note = Description of Artificial Sequence: Synthetic peptide
  REGION 1..9: note = XENP018125 vlCDR3
QQDYSSPRT

SEQ ID NO: 16681 - protein, 451 aa, synthetic construct
  REGION 1..451: note = Description of Artificial Sequence: Synthetic polypeptide
  REGION 1..451: note = XENP018126 1G6_H1.29_L1_IgG1_PVA_/S267K Heavy Chain
EVQLVESGGGLVKPGGSLRLSCAASGFTFSNHWMNWVRQAPGKGLEWVGEIRLKSNNYATHYAEPVKGRFTISRDDSKSTVYLQMNSLKTEDTAVYYCTRYYGNYGGYFDVWGAGTLVTVSSASTKGPSVFPLAPSSKSTSGGTAALGCLVKDYFPEPVTVSWNSGALTSGVHTFPAVLQSSGLYSLSSVVTVPSSSLGTQTYICNVNHKPSNTKVDKKVEPKSCDKTHTCPPCPAPPVAGPSVFLFPPKPKDTLMISRTPEVTCVVVDVKHEDPEVKFNWYVDGVEVHNAKTKPREEQYNSTYRVVSVLTVLHQDWLNGKEYKCKVSNKALPAPIEKTISKAKGQPREPQVYTLPPSREEMTKNQVSLTCLVKGFYPSDIAVEWESNGQPENNYKTTPPVLDSDGSFFLYSKLTVDKSRWQQGNVFSCSVMHEALHNHYTQKSLSLSPGK

SEQ ID NO: 16682 - protein, 122 aa, synthetic construct; identical to SEQ ID NO: 11291
  REGION 1..122: note = Description of Artificial Sequence: Synthetic polypeptide
  REGION 1..122: note = VH of XENP018126

SEQ ID NO: 16683 - protein, 5 aa, synthetic construct
  REGION 1..5: note = Description of Artificial Sequence: Synthetic peptide
  REGION 1..5: note = XENP018126 vhCDR1
NHWMN

SEQ ID NO: 16684 - protein, 19 aa, synthetic construct
  REGION 1..19: note = Description of Artificial Sequence: Synthetic peptide
  REGION 1..19: note = XENP018126 vhCDR2
EIRLKSNNYATHYAEPVKG

SEQ ID NO: 16685 - protein, 11 aa, synthetic construct
  REGION 1..11: note = Description of Artificial Sequence: Synthetic peptide
  REGION 1..11: note = XENP018126 vhCDR3
YYGNYGGYFDV

SEQ ID NO: 16686 - protein, 214 aa, synthetic construct; identical to SEQ ID NO: 16226
  REGION 1..214: note = Description of Artificial Sequence: Synthetic polypeptide
  REGION 1..214: note = XENP018126 1G6_H1.29_L1_IgG1_PVA_/S267K Light Chain

SEQ ID NO: 16687 - protein, 107 aa, synthetic construct; identical to SEQ ID NO: 10923
  REGION 1..107: note = Description of Artificial Sequence: Synthetic polypeptide
  REGION 1..107: note = VL of XENP018126

SEQ ID NO: 16688 - protein, 11 aa, synthetic construct
  REGION 1..11: note = Description of Artificial Sequence: Synthetic peptide
  REGION 1..11: note = XENP018126 vlCDR1
RASQSVSNDVA

SEQ ID NO: 16689 - protein, 7 aa, synthetic construct
  REGION 1..7: note = Description of Artificial Sequence: Synthetic peptide
  REGION 1..7: note = XENP018126 vlCDR2
YASHRYT

SEQ ID NO: 16690 - protein, 9 aa, synthetic construct
  REGION 1..9: note = Description of Artificial Sequence: Synthetic peptide
  REGION 1..9: note = XENP018126 vlCDR3
QQDYSSPRT

SEQ ID NO: 16691 - protein, 451 aa, synthetic construct
  REGION 1..451: note = Description of Artificial Sequence: Synthetic polypeptide
  REGION 1..451: note = XENP018127 1G6_H1.30_L1_IgG1_PVA_/S267K Heavy Chain
EVQLVESGGGLVKPGGSLRLSCAASGFTFSNLWMNWVRQAPGKGLEWVGEIRLKSNNYATHYAEPVKGRFTISRDDSKSTVYLQMNSLKTEDTAVYYCTRYYGNYGGYFDVWGAGTLVTVSSASTKGPSVFPLAPSSKSTSGGTAALGCLVKDYFPEPVTVSWNSGALTSGVHTFPAVLQSSGLYSLSSVVTVPSSSLGTQTYICNVNHKPSNTKVDKKVEPKSCDKTHTCPPCPAPPVAGPSVFLFPPKPKDTLMISRTPEVTCVVVDVKHEDPEVKFNWYVDGVEVHNAKTKPREEQYNSTYRVVSVLTVLHQDWLNGKEYKCKVSNKALPAPIEKTISKAKGQPREPQVYTLPPSREEMTKNQVSLTCLVKGFYPSDIAVEWESNGQPENNYKTTPPVLDSDGSFFLYSKLTVDKSRWQQGNVFSCSVMHEALHNHYTQKSLSLSPGK

SEQ ID NO: 16692 - protein, 122 aa, synthetic construct; identical to SEQ ID NO: 11300
  REGION 1..122: note = Description of Artificial Sequence: Synthetic polypeptide
  REGION 1..122: note = VH of XENP018127

SEQ ID NO: 16693 - protein, 5 aa, synthetic construct
  REGION 1..5: note = Description of Artificial Sequence: Synthetic peptide
  REGION 1..5: note = XENP018127 vhCDR1
NLWMN

SEQ ID NO: 16694 - protein, 19 aa, synthetic construct
  REGION 1..19: note = Description of Artificial Sequence: Synthetic peptide
  REGION 1..19: note = XENP018127 vhCDR2
EIRLKSNNYATHYAEPVKG

SEQ ID NO: 16695 - protein, 11 aa, synthetic construct
  REGION 1..11: note = Description of Artificial Sequence: Synthetic peptide
  REGION 1..11: note = XENP018127 vhCDR3
YYGNYGGYFDV

SEQ ID NO: 16696 - protein, 214 aa, synthetic construct; identical to SEQ ID NO: 16226
  REGION 1..214: note = Description of Artificial Sequence: Synthetic polypeptide
  REGION 1..214: note = XENP018127 1G6_H1.30_L1_IgG1_PVA_/S267K Light Chain

SEQ ID NO: 16697 - protein, 107 aa, synthetic construct; identical to SEQ ID NO: 10923
  REGION 1..107: note = Description of Artificial Sequence: Synthetic polypeptide
  REGION 1..107: note = VL of XENP018127

SEQ ID NO: 16698 - protein, 11 aa, synthetic construct
  REGION 1..11: note = Description of Artificial Sequence: Synthetic peptide
  REGION 1..11: note = XENP018127 vlCDR1
RASQSVSNDVA

SEQ ID NO: 16699 - protein, 7 aa, synthetic construct
  REGION 1..7: note = Description of Artificial Sequence: Synthetic peptide
  REGION 1..7: note = XENP018127 vlCDR2
YASHRYT

SEQ ID NO: 16700 - protein, 9 aa, synthetic construct
  REGION 1..9: note = Description of Artificial Sequence: Synthetic peptide
  REGION 1..9: note = XENP018127 vlCDR3
QQDYSSPRT

SEQ ID NO: 16701 - protein, 451 aa, synthetic construct
  REGION 1..451: note = Description of Artificial Sequence: Synthetic polypeptide
  REGION 1..451: note = XENP018128 1G6_H1.31_L1_IgG1_PVA_/S267K Heavy Chain
EVQLVESGGGLVKPGGSLRLSCAASGFTFSNWWMNWVRQAPGKGLEWVGEIRLKSNNYATHYAEPVKGRFTISRDDSKSTVYLQMNSLKTEDTAVYYCTRYYGNYGGYFDVWGAGTLVTVSSASTKGPSVFPLAPSSKSTSGGTAALGCLVKDYFPEPVTVSWNSGALTSGVHTFPAVLQSSGLYSLSSVVTVPSSSLGTQTYICNVNHKPSNTKVDKKVEPKSCDKTHTCPPCPAPPVAGPSVFLFPPKPKDTLMISRTPEVTCVVVDVKHEDPEVKFNWYVDGVEVHNAKTKPREEQYNSTYRVVSVLTVLHQDWLNGKEYKCKVSNKALPAPIEKTISKAKGQPREPQVYTLPPSREEMTKNQVSLTCLVKGFYPSDIAVEWESNGQPENNYKTTPPVLDSDGSFFLYSKLTVDKSRWQQGNVFSCSVMHEALHNHYTQKSLSLSPGK

SEQ ID NO: 16702 - protein, 122 aa, synthetic construct; identical to SEQ ID NO: 11309
  REGION 1..122: note = Description of Artificial Sequence: Synthetic polypeptide
  REGION 1..122: note = VH of XENP018128

SEQ ID NO: 16703 - protein, 5 aa, synthetic construct
  REGION 1..5: note = Description of Artificial Sequence: Synthetic peptide
  REGION 1..5: note = XENP018128 vhCDR1
NWWMN

SEQ ID NO: 16704 - protein, 19 aa, synthetic construct
  REGION 1..19: note = Description of Artificial Sequence: Synthetic peptide
  REGION 1..19: note = XENP018128 vhCDR2
EIRLKSNNYATHYAEPVKG

SEQ ID NO: 16705 - protein, 11 aa, synthetic construct
  REGION 1..11: note = Description of Artificial Sequence: Synthetic peptide
  REGION 1..11: note = XENP018128 vhCDR3
YYGNYGGYFDV

SEQ ID NO: 16706 - protein, 214 aa, synthetic construct; identical to SEQ ID NO: 16226
  REGION 1..214: note = Description of Artificial Sequence: Synthetic polypeptide
  REGION 1..214: note = XENP018128 1G6_H1.31_L1_IgG1_PVA_/S267K Light Chain

SEQ ID NO: 16707 - protein, 107 aa, synthetic construct; identical to SEQ ID NO: 10923
  REGION 1..107: note = Description of Artificial Sequence: Synthetic polypeptide
  REGION 1..107: note = VL of XENP018128

SEQ ID NO: 16708 - protein, 11 aa, synthetic construct
  REGION 1..11: note = Description of Artificial Sequence: Synthetic peptide
  REGION 1..11: note = XENP018128 vlCDR1
RASQSVSNDVA

SEQ ID NO: 16709 - protein, 7 aa, synthetic construct
  REGION 1..7: note = Description of Artificial Sequence: Synthetic peptide
  REGION 1..7: note = XENP018128 vlCDR2
YASHRYT

SEQ ID NO: 16710 - protein, 9 aa, synthetic construct
  REGION 1..9: note = Description of Artificial Sequence: Synthetic peptide
  REGION 1..9: note = XENP018128 vlCDR3
QQDYSSPRT

SEQ ID NO: 16711 - protein, 451 aa, synthetic construct
  REGION 1..451: note = Description of Artificial Sequence: Synthetic polypeptide
  REGION 1..451: note = XENP018129 1G6_H1.32_L1_IgG1_PVA_/S267K Heavy Chain
EVQLVESGGGLVKPGGSLRLSCAASGFTFSNVWMNWVRQAPGKGLEWVGEIRLKSNNYATHYAEPVKGRFTISRDDSKSTVYLQMNSLKTEDTAVYYCTRYYGNYGGYFDVWGAGTLVTVSSASTKGPSVFPLAPSSKSTSGGTAALGCLVKDYFPEPVTVSWNSGALTSGVHTFPAVLQSSGLYSLSSVVTVPSSSLGTQTYICNVNHKPSNTKVDKKVEPKSCDKTHTCPPCPAPPVAGPSVFLFPPKPKDTLMISRTPEVTCVVVDVKHEDPEVKFNWYVDGVEVHNAKTKPREEQYNSTYRVVSVLTVLHQDWLNGKEYKCKVSNKALPAPIEKTISKAKGQPREPQVYTLPPSREEMTKNQVSLTCLVKGFYPSDIAVEWESNGQPENNYKTTPPVLDSDGSFFLYSKLTVDKSRWQQGNVFSCSVMHEALHNHYTQKSLSLSPGK

SEQ ID NO: 16712 - protein, 122 aa, synthetic construct; identical to SEQ ID NO: 11318
  REGION 1..122: note = Description of Artificial Sequence: Synthetic polypeptide
  REGION 1..122: note = VH of XENP018129

SEQ ID NO: 16713 - protein, 5 aa, synthetic construct
  REGION 1..5: note = Description of Artificial Sequence: Synthetic peptide
  REGION 1..5: note = XENP018129 vhCDR1
NVWMN

SEQ ID NO: 16714 - protein, 19 aa, synthetic construct
  REGION 1..19: note = Description of Artificial Sequence: Synthetic peptide
  REGION 1..19: note = XENP018129 vhCDR2
EIRLKSNNYATHYAEPVKG

SEQ ID NO: 16715 - protein, 11 aa, synthetic construct
  REGION 1..11: note = Description of Artificial Sequence: Synthetic peptide
  REGION 1..11: note = XENP018129 vhCDR3
YYGNYGGYFDV

SEQ ID NO: 16716 - protein, 214 aa, synthetic construct; identical to SEQ ID NO: 16226
  REGION 1..214: note = Description of Artificial Sequence: Synthetic polypeptide
  REGION 1..214: note = XENP018129 1G6_H1.32_L1_IgG1_PVA_/S267K Light Chain

SEQ ID NO: 16717 - protein, 107 aa, synthetic construct; identical to SEQ ID NO: 10923
  REGION 1..107: note = Description of Artificial Sequence: Synthetic polypeptide
  REGION 1..107: note = VL of XENP018129

SEQ ID NO: 16718 - protein, 11 aa, synthetic construct
  REGION 1..11: note = Description of Artificial Sequence: Synthetic peptide
  REGION 1..11: note = XENP018129 vlCDR1
RASQSVSNDVA

SEQ ID NO: 16719 - protein, 7 aa, synthetic construct
  REGION 1..7: note = Description of Artificial Sequence: Synthetic peptide
  REGION 1..7: note = XENP018129 vlCDR2
YASHRYT

SEQ ID NO: 16720 - protein, 9 aa, synthetic construct
  REGION 1..9: note = Description of Artificial Sequence: Synthetic peptide
  REGION 1..9: note = XENP018129 vlCDR3
QQDYSSPRT

SEQ ID NO: 16721 - protein, 451 aa, synthetic construct
  REGION 1..451: note = Description of Artificial Sequence: Synthetic polypeptide
  REGION 1..451: note = XENP018130 1G6_H1.33_L1_IgG1_PVA_/S267K Heavy Chain
EVQLVESGGGLVKPGGSLRLSCAASGFTFSNAWMNWVRQAPGKGLEWVGEIRLKSNNYATHYAEPVKGRFTISRDDSKSTVYLQMNSLKTEDTAVYYCTRYYGNYGGYFDVWGAGTLVTVSSASTKGPSVFPLAPSSKSTSGGTAALGCLVKDYFPEPVTVSWNSGALTSGVHTFPAVLQSSGLYSLSSVVTVPSSSLGTQTYICNVNHKPSNTKVDKKVEPKSCDKTHTCPPCPAPPVAGPSVFLFPPKPKDTLMISRTPEVTCVVVDVKHEDPEVKFNWYVDGVEVHNAKTKPREEQYNSTYRVVSVLTVLHQDWLNGKEYKCKVSNKALPAPIEKTISKAKGQPREPQVYTLPPSREEMTKNQVSLTCLVKGFYPSDIAVEWESNGQPENNYKTTPPVLDSDGSFFLYSKLTVDKSRWQQGNVFSCSVMHEALHNHYTQKSLSLSPGK

SEQ ID NO: 16722 - protein, 122 aa, synthetic construct; identical to SEQ ID NO: 11327
  REGION 1..122: note = Description of Artificial Sequence: Synthetic polypeptide
  REGION 1..122: note = VH of XENP018130

SEQ ID NO: 16723 - protein, 5 aa, synthetic construct
  REGION 1..5: note = Description of Artificial Sequence: Synthetic peptide
  REGION 1..5: note = XENP018130 vhCDR1
NAWMN

SEQ ID NO: 16724 - protein, 19 aa, synthetic construct
  REGION 1..19: note = Description of Artificial Sequence: Synthetic peptide
  REGION 1..19: note = XENP018130 vhCDR2
EIRLKSNNYATHYAEPVKG

SEQ ID NO: 16725 - protein, 11 aa, synthetic construct
  REGION 1..11: note = Description of Artificial Sequence: Synthetic peptide
  REGION 1..11: note = XENP018130 vhCDR3
YYGNYGGYFDV

SEQ ID NO: 16726 - protein, 214 aa, synthetic construct; identical to SEQ ID NO: 16226
  REGION 1..214: note = Description of Artificial Sequence: Synthetic polypeptide
  REGION 1..214: note = XENP018130 1G6_H1.33_L1_IgG1_PVA_/S267K Light Chain

SEQ ID NO: 16727 - protein, 107 aa, synthetic construct; identical to SEQ ID NO: 10923
  REGION 1..107: note = Description of Artificial Sequence: Synthetic polypeptide
  REGION 1..107: note = VL of XENP018130

SEQ ID NO: 16728 - protein, 11 aa, synthetic construct
  REGION 1..11: note = Description of Artificial Sequence: Synthetic peptide
  REGION 1..11: note = XENP018130 vlCDR1
RASQSVSNDVA

SEQ ID NO: 16729 - protein, 7 aa, synthetic construct
  REGION 1..7: note = Description of Artificial Sequence: Synthetic peptide
  REGION 1..7: note = XENP018130 vlCDR2
YASHRYT

SEQ ID NO: 16730 - protein, 9 aa, synthetic construct
  REGION 1..9: note = Description of Artificial Sequence: Synthetic peptide
  REGION 1..9: note = XENP018130 vlCDR3
QQDYSSPRT

SEQ ID NO: 16731 - protein, 451 aa, synthetic construct
  REGION 1..451: note = Description of Artificial Sequence: Synthetic polypeptide
  REGION 1..451: note = XENP018131 1G6_H1.34_L1_IgG1_PVA_/S267K Heavy Chain
EVQLVESGGGLVKPGGSLRLSCAASGFTFSNQWMNWVRQAPGKGLEWVGEIRLKSNNYATHYAEPVKGRFTISRDDSKSTVYLQMNSLKTEDTAVYYCTRYYGNYGGYFDVWGAGTLVTVSSASTKGPSVFPLAPSSKSTSGGTAALGCLVKDYFPEPVTVSWNSGALTSGVHTFPAVLQSSGLYSLSSVVTVPSSSLGTQTYICNVNHKPSNTKVDKKVEPKSCDKTHTCPPCPAPPVAGPSVFLFPPKPKDTLMISRTPEVTCVVVDVKHEDPEVKFNWYVDGVEVHNAKTKPREEQYNSTYRVVSVLTVLHQDWLNGKEYKCKVSNKALPAPIEKTISKAKGQPREPQVYTLPPSREEMTKNQVSLTCLVKGFYPSDIAVEWESNGQPENNYKTTPPVLDSDGSFFLYSKLTVDKSRWQQGNVFSCSVMHEALHNHYTQKSLSLSPGK

SEQ ID NO: 16732 - protein, 122 aa, synthetic construct; identical to SEQ ID NO: 11336
  REGION 1..122: note = Description of Artificial Sequence: Synthetic polypeptide
  REGION 1..122: note = VH of XENP018131

SEQ ID NO: 16733 - protein, 5 aa, synthetic construct
  REGION 1..5: note = Description of Artificial Sequence: Synthetic peptide
  REGION 1..5: note = XENP018131 vhCDR1
NQWMN

SEQ ID NO: 16734 - protein, 19 aa, synthetic construct
  REGION 1..19: note = Description of Artificial Sequence: Synthetic peptide
  REGION 1..19: note = XENP018131 vhCDR2
EIRLKSNNYATHYAEPVKG

SEQ ID NO: 16735 - protein, 11 aa, synthetic construct
  REGION 1..11: note = Description of Artificial Sequence: Synthetic peptide
  REGION 1..11: note = XENP018131 vhCDR3
YYGNYGGYFDV

SEQ ID NO: 16736 - protein, 214 aa, synthetic construct; identical to SEQ ID NO: 16226
  REGION 1..214: note = Description of Artificial Sequence: Synthetic polypeptide
  REGION 1..214: note = XENP018131 1G6_H1.34_L1_IgG1_PVA_/S267K Light Chain

SEQ ID NO: 16737 - protein, 107 aa, synthetic construct; identical to SEQ ID NO: 10923
  REGION 1..107: note = Description of Artificial Sequence: Synthetic polypeptide
  REGION 1..107: note = VL of XENP018131

SEQ ID NO: 16738 - protein, 11 aa, synthetic construct
  REGION 1..11: note = Description of Artificial Sequence: Synthetic peptide
  REGION 1..11: note = XENP018131 vlCDR1
RASQSVSNDVA

SEQ ID NO: 16739 - protein, 7 aa, synthetic construct
  REGION 1..7: note = Description of Artificial Sequence: Synthetic peptide
  REGION 1..7: note = XENP018131 vlCDR2
YASHRYT

SEQ ID NO: 16740 - protein, 9 aa, synthetic construct
  REGION 1..9: note = Description of Artificial Sequence: Synthetic peptide
  REGION 1..9: note = XENP018131 vlCDR3
QQDYSSPRT

SEQ ID NO: 16741 - protein, 451 aa, synthetic construct
  REGION 1..451: note = Description of Artificial Sequence: Synthetic polypeptide
  REGION 1..451: note = XENP018132 1G6_H1.35_L1_IgG1_PVA_/S267K Heavy Chain
EVQLVESGGGLVKPGGSLRLSCAASGFTFSNDWMNWVRQAPGKGLEWVGEIRLKSNNYATHYAEPVKGRFTISRDDSKSTVYLQMNSLKTEDTAVYYCTRYYGNYGGYFDVWGAGTLVTVSSASTKGPSVFPLAPSSKSTSGGTAALGCLVKDYFPEPVTVSWNSGALTSGVHTFPAVLQSSGLYSLSSVVTVPSSSLGTQTYICNVNHKPSNTKVDKKVEPKSCDKTHTCPPCPAPPVAGPSVFLFPPKPKDTLMISRTPEVTCVVVDVKHEDPEVKFNWYVDGVEVHNAKTKPREEQYNSTYRVVSVLTVLHQDWLNGKEYKCKVSNKALPAPIEKTISKAKGQPREPQVYTLPPSREEMTKNQVSLTCLVKGFYPSDIAVEWESNGQPENNYKTTPPVLDSDGSFFLYSKLTVDKSRWQQGNVFSCSVMHEALHNHYTQKSLSLSPGK

SEQ ID NO: 16742 - protein, 122 aa, synthetic construct; identical to SEQ ID NO: 11345
  REGION 1..122: note = Description of Artificial Sequence: Synthetic polypeptide
  REGION 1..122: note = VH of XENP018132

SEQ ID NO: 16743 - protein, 5 aa, synthetic construct
  REGION 1..5: note = Description of Artificial Sequence: Synthetic peptide
  REGION 1..5: note = XENP018132 vhCDR1
NDWMN

SEQ ID NO: 16744 - protein, 19 aa, synthetic construct
  REGION 1..19: note = Description of Artificial Sequence: Synthetic peptide
  REGION 1..19: note = XENP018132 vhCDR2
EIRLKSNNYATHYAEPVKG

SEQ ID NO: 16745 - protein, 11 aa, synthetic construct
  REGION 1..11: note = Description of Artificial Sequence: Synthetic peptide
  REGION 1..11: note = XENP018132 vhCDR3
YYGNYGGYFDV

SEQ ID NO: 16746 - protein, 214 aa, synthetic construct; identical to SEQ ID NO: 16226
  REGION 1..214: note = Description of Artificial Sequence: Synthetic polypeptide
  REGION 1..214: note = XENP018132 1G6_H1.35_L1_IgG1_PVA_/S267K Light Chain

SEQ ID NO: 16747 - protein, 107 aa, synthetic construct; identical to SEQ ID NO: 10923
  REGION 1..107: note = Description of Artificial Sequence: Synthetic polypeptide
  REGION 1..107: note = VL of XENP018132

SEQ ID NO: 16748 - protein, 11 aa, synthetic construct
  REGION 1..11: note = Description of Artificial Sequence: Synthetic peptide
  REGION 1..11: note = XENP018132 vlCDR1
RASQSVSNDVA

SEQ ID NO: 16749 - protein, 7 aa, synthetic construct
  REGION 1..7: note = Description of Artificial Sequence: Synthetic peptide
  REGION 1..7: note = XENP018132 vlCDR2
YASHRYT

SEQ ID NO: 16750 - protein, 9 aa, synthetic construct
  REGION 1..9: note = Description of Artificial Sequence: Synthetic peptide
  REGION 1..9: note = XENP018132 vlCDR3
QQDYSSPRT

SEQ ID NO: 16751 - protein, 451 aa, synthetic construct
  REGION 1..451: note = Description of Artificial Sequence: Synthetic polypeptide
  REGION 1..451: note = XENP018133 1G6_H1.36_L1_IgG1_PVA_/S267K Heavy Chain
EVQLVESGGGLVKPGGSLRLSCAASGFTFSNKWMNWVRQAPGKGLEWVGEIRLKSNNYATHYAEPVKGRFTISRDDSKSTVYLQMNSLKTEDTAVYYCTRYYGNYGGYFDVWGAGTLVTVSSASTKGPSVFPLAPSSKSTSGGTAALGCLVKDYFPEPVTVSWNSGALTSGVHTFPAVLQSSGLYSLSSVVTVPSSSLGTQTYICNVNHKPSNTKVDKKVEPKSCDKTHTCPPCPAPPVAGPSVFLFPPKPKDTLMISRTPEVTCVVVDVKHEDPEVKFNWYVDGVEVHNAKTKPREEQYNSTYRVVSVLTVLHQDWLNGKEYKCKVSNKALPAPIEKTISKAKGQPREPQVYTLPPSREEMTKNQVSLTCLVKGFYPSDIAVEWESNGQPENNYKTTPPVLDSDGSFFLYSKLTVDKSRWQQGNVFSCSVMHEALHNHYTQKSLSLSPGK

SEQ ID NO: 16752 - protein, 122 aa, synthetic construct; identical to SEQ ID NO: 11354
  REGION 1..122: note = Description of Artificial Sequence: Synthetic polypeptide
  REGION 1..122: note = VH of XENP018133

SEQ ID NO: 16753 - protein, 5 aa, synthetic construct
  REGION 1..5: note = Description of Artificial Sequence: Synthetic peptide
  REGION 1..5: note = XENP018133 vhCDR1
NKWMN

SEQ ID NO: 16754 - protein, 19 aa, synthetic construct
  REGION 1..19: note = Description of Artificial Sequence: Synthetic peptide
  REGION 1..19: note = XENP018133 vhCDR2
EIRLKSNNYATHYAEPVKG

SEQ ID NO: 16755 - protein, 11 aa, synthetic construct
  REGION 1..11: note = Description of Artificial Sequence: Synthetic peptide
  REGION 1..11: note = XENP018133 vhCDR3
YYGNYGGYFDV

SEQ ID NO: 16756 - protein, 214 aa, synthetic construct; identical to SEQ ID NO: 16226
  REGION 1..214: note = Description of Artificial Sequence: Synthetic polypeptide
  REGION 1..214: note = XENP018133 1G6_H1.36_L1_IgG1_PVA_/S267K Light Chain

SEQ ID NO: 16757 - protein, 107 aa, synthetic construct; identical to SEQ ID NO: 10923
  REGION 1..107: note = Description of Artificial Sequence: Synthetic polypeptide
  REGION 1..107: note = VL of XENP018133

SEQ ID NO: 16758 - protein, 11 aa, synthetic construct
  REGION 1..11: note = Description of Artificial Sequence: Synthetic peptide
  REGION 1..11: note = XENP018133 vlCDR1
RASQSVSNDVA

SEQ ID NO: 16759 - protein, 7 aa, synthetic construct
  REGION 1..7: note = Description of Artificial Sequence: Synthetic peptide
  REGION 1..7: note = XENP018133 vlCDR2
YASHRYT

SEQ ID NO: 16760 - protein, 9 aa, synthetic construct
  REGION 1..9: note = Description of Artificial Sequence: Synthetic peptide
  REGION 1..9: note = XENP018133 vlCDR3
QQDYSSPRT

SEQ ID NO: 16761 - protein, 451 aa, synthetic construct
  REGION 1..451: note = Description of Artificial Sequence: Synthetic polypeptide
  REGION 1..451: note = XENP018134 1G6_H1.37_L1_IgG1_PVA_/S267K Heavy Chain
EVQLVESGGGLVKPGGSLRLSCAASGFTFSNYGMNWVRQAPGKGLEWVGEIRLKSNNYATHYAEPVKGRFTISRDDSKSTVYLQMNSLKTEDTAVYYCTRYYGNYGGYFDVWGAGTLVTVSSASTKGPSVFPLAPSSKSTSGGTAALGCLVKDYFPEPVTVSWNSGALTSGVHTFPAVLQSSGLYSLSSVVTVPSSSLGTQTYICNVNHKPSNTKVDKKVEPKSCDKTHTCPPCPAPPVAGPSVFLFPPKPKDTLMISRTPEVTCVVVDVKHEDPEVKFNWYVDGVEVHNAKTKPREEQYNSTYRVVSVLTVLHQDWLNGKEYKCKVSNKALPAPIEKTISKAKGQPREPQVYTLPPSREEMTKNQVSLTCLVKGFYPSDIAVEWESNGQPENNYKTTPPVLDSDGSFFLYSKLTVDKSRWQQGNVFSCSVMHEALHNHYTQKSLSLSPGK

SEQ ID NO: 16762 - protein, 122 aa, synthetic construct; identical to SEQ ID NO: 11363
  REGION 1..122: note = Description of Artificial Sequence: Synthetic polypeptide
  REGION 1..122: note = VH of XENP018134

SEQ ID NO: 16763 - protein, 5 aa, synthetic construct
  REGION 1..5: note = Description of Artificial Sequence: Synthetic peptide
  REGION 1..5: note = XENP018134 vhCDR1
NYGMN

SEQ ID NO: 16764 - protein, 19 aa, synthetic construct
  REGION 1..19: note = Description of Artificial Sequence: Synthetic peptide
  REGION 1..19: note = XENP018134 vhCDR2
EIRLKSNNYATHYAEPVKG

SEQ ID NO: 16765 - protein, 11 aa, synthetic construct
  REGION 1..11: note = Description of Artificial Sequence: Synthetic peptide
  REGION 1..11: note = XENP018134 vhCDR3
YYGNYGGYFDV

SEQ ID NO: 16766 - protein, 214 aa, synthetic construct; identical to SEQ ID NO: 16226
  REGION 1..214: note = Description of Artificial Sequence: Synthetic polypeptide
  REGION 1..214: note = XENP018134 1G6_H1.37_L1_IgG1_PVA_/S267K Light Chain

SEQ ID NO: 16767 - protein, 107 aa, synthetic construct; identical to SEQ ID NO: 10923
  REGION 1..107: note = Description of Artificial Sequence: Synthetic polypeptide
  REGION 1..107: note = VL of XENP018134

SEQ ID NO: 16768 - protein, 11 aa, synthetic construct
  REGION 1..11: note = Description of Artificial Sequence: Synthetic peptide
  REGION 1..11: note = XENP018134 vlCDR1
RASQSVSNDVA

SEQ ID NO: 16769 - protein, 7 aa, synthetic construct
  REGION 1..7: note = Description of Artificial Sequence: Synthetic peptide
  REGION 1..7: note = XENP018134 vlCDR2
YASHRYT

SEQ ID NO: 16770 - protein, 9 aa, synthetic construct
  REGION 1..9: note = Description of Artificial Sequence: Synthetic peptide
  REGION 1..9: note = XENP018134 vlCDR3
QQDYSSPRT

SEQ ID NO: 16771 - protein, 451 aa, synthetic construct
  REGION 1..451: note = Description of Artificial Sequence: Synthetic polypeptide
  REGION 1..451: note = XENP018135 1G6_H1.38_L1_IgG1_PVA_/S267K Heavy Chain
EVQLVESGGGLVKPGGSLRLSCAASGFTFSNYAMNWVRQAPGKGLEWVGEIRLKSNNYATHYAEPVKGRFTISRDDSKSTVYLQMNSLKTEDTAVYYCTRYYGNYGGYFDVWGAGTLVTVSSASTKGPSVFPLAPSSKSTSGGTAALGCLVKDYFPEPVTVSWNSGALTSGVHTFPAVLQSSGLYSLSSVVTVPSSSLGTQTYICNVNHKPSNTKVDKKVEPKSCDKTHTCPPCPAPPVAGPSVFLFPPKPKDTLMISRTPEVTCVVVDVKHEDPEVKFNWYVDGVEVHNAKTKPREEQYNSTYRVVSVLTVLHQDWLNGKEYKCKVSNKALPAPIEKTISKAKGQPREPQVYTLPPSREEMTKNQVSLTCLVKGFYPSDIAVEWESNGQPENNYKTTPPVLDSDGSFFLYSKLTVDKSRWQQGNVFSCSVMHEALHNHYTQKSLSLSPGK

SEQ ID NO: 16772 - protein, 122 aa, synthetic construct; identical to SEQ ID NO: 11372
  REGION 1..122: note = Description of Artificial Sequence: Synthetic polypeptide
  REGION 1..122: note = VH of XENP018135

SEQ ID NO: 16773 - protein, 5 aa, synthetic construct
  REGION 1..5: note = Description of Artificial Sequence: Synthetic peptide
  REGION 1..5: note = XENP018135 vhCDR1
NYAMN

SEQ ID NO: 16774 - protein, 19 aa, synthetic construct
  REGION 1..19: note = Description of Artificial Sequence: Synthetic peptide
  REGION 1..19: note = XENP018135 vhCDR2
EIRLKSNNYATHYAEPVKG

SEQ ID NO: 16775 - protein, 11 aa, synthetic construct
  REGION 1..11: note = Description of Artificial Sequence: Synthetic peptide
  REGION 1..11: note = XENP018135 vhCDR3
YYGNYGGYFDV

SEQ ID NO: 16776 - protein, 214 aa, synthetic construct; identical to SEQ ID NO: 16226
  REGION 1..214: note = Description of Artificial Sequence: Synthetic polypeptide
  REGION 1..214: note = XENP018135 1G6_H1.38_L1_IgG1_PVA_/S267K Light Chain

SEQ ID NO: 16777 - protein, 107 aa, synthetic construct; identical to SEQ ID NO: 10923
  REGION 1..107: note = Description of Artificial Sequence: Synthetic polypeptide
  REGION 1..107: note = VL of XENP018135

SEQ ID NO: 16778 - protein, 11 aa, synthetic construct
  REGION 1..11: note = Description of Artificial Sequence: Synthetic peptide
  REGION 1..11: note = XENP018135 vlCDR1
RASQSVSNDVA

SEQ ID NO: 16779 - protein, 7 aa, synthetic construct
  REGION 1..7: note = Description of Artificial Sequence: Synthetic peptide
  REGION 1..7: note = XENP018135 vlCDR2
YASHRYT

SEQ ID NO: 16780 - protein, 9 aa, synthetic construct
  REGION 1..9: note = Description of Artificial Sequence: Synthetic peptide
  REGION 1..9: note = XENP018135 vlCDR3
QQDYSSPRT

SEQ ID NO: 16781 - protein, 451 aa, synthetic construct
  REGION 1..451: note = Description of Artificial Sequence: Synthetic polypeptide
  REGION 1..451: note = XENP018136 1G6_H1.39_L1_IgG1_PVA_/S267K Heavy Chain
EVQLVESGGGLVKPGGSLRLSCAASGFTFSNYYMNWVRQAPGKGLEWVGEIRLKSNNYATHYAEPVKGRFTISRDDSKSTVYLQMNSLKTEDTAVYYCTRYYGNYGGYFDVWGAGTLVTVSSASTKGPSVFPLAPSSKSTSGGTAALGCLVKDYFPEPVTVSWNSGALTSGVHTFPAVLQSSGLYSLSSVVTVPSSSLGTQTYICNVNHKPSNTKVDKKVEPKSCDKTHTCPPCPAPPVAGPSVFLFPPKPKDTLMISRTPEVTCVVVDVKHEDPEVKFNWYVDGVEVHNAKTKPREEQYNSTYRVVSVLTVLHQDWLNGKEYKCKVSNKALPAPIEKTISKAKGQPREPQVYTLPPSREEMTKNQVSLTCLVKGFYPSDIAVEWESNGQPENNYKTTPPVLDSDGSFFLYSKLTVDKSRWQQGNVFSCSVMHEALHNHYTQKSLSLSPGK

SEQ ID NO: 16782 - protein, 122 aa, synthetic construct; identical to SEQ ID NO: 11381
  REGION 1..122: note = Description of Artificial Sequence: Synthetic polypeptide
  REGION 1..122: note = VH of XENP018136

SEQ ID NO: 16783 - protein, 5 aa, synthetic construct
  REGION 1..5: note = Description of Artificial Sequence: Synthetic peptide
  REGION 1..5: note = XENP018136 vhCDR1
NYYMN

SEQ ID NO: 16784 - protein, 19 aa, synthetic construct
  REGION 1..19: note = Description of Artificial Sequence: Synthetic peptide
  REGION 1..19: note = XENP018136 vhCDR2
EIRLKSNNYATHYAEPVKG

SEQ ID NO: 16785 - protein, 11 aa, synthetic construct
  REGION 1..11: note = Description of Artificial Sequence: Synthetic peptide
  REGION 1..11: note = XENP018136 vhCDR3
YYGNYGGYFDV

SEQ ID NO: 16786 - protein, 214 aa, synthetic construct; identical to SEQ ID NO: 16226
  REGION 1..214: note = Description of Artificial Sequence: Synthetic polypeptide
  REGION 1..214: note = XENP018136 1G6_H1.39_L1_IgG1_PVA_/S267K Light Chain

SEQ ID NO: 16787 - protein, 107 aa, synthetic construct; identical to SEQ ID NO: 10923
  REGION 1..107: note = Description of Artificial Sequence: Synthetic polypeptide
  REGION 1..107: note = VL of XENP018136

SEQ ID NO: 16788 - protein, 11 aa, synthetic construct
  REGION 1..11: note = Description of Artificial Sequence: Synthetic peptide
  REGION 1..11: note = XENP018136 vlCDR1
RASQSVSNDVA

SEQ ID NO: 16789 - protein, 7 aa, synthetic construct
  REGION 1..7: note = Description of Artificial Sequence: Synthetic peptide
  REGION 1..7: note = XENP018136 vlCDR2
YASHRYT

SEQ ID NO: 16790 - protein, 9 aa, synthetic construct
  REGION 1..9: note = Description of Artificial Sequence: Synthetic peptide
  REGION 1..9: note = XENP018136 vlCDR3
QQDYSSPRT

SEQ ID NO: 16791 - protein, 451 aa, synthetic construct
  REGION 1..451: note = Description of Artificial Sequence: Synthetic polypeptide
  REGION 1..451: note = XENP018137 1G6_H1.40_L1_IgG1_PVA_/S267K Heavy Chain
EVQLVESGGGLVKPGGSLRLSCAASGFTFSNYDMNWVRQAPGKGLEWVGEIRLKSNNYATHYAEPVKGRFTISRDDSKSTVYLQMNSLKTEDTAVYYCTRYYGNYGGYFDVWGAGTLVTVSSASTKGPSVFPLAPSSKSTSGGTAALGCLVKDYFPEPVTVSWNSGALTSGVHTFPAVLQSSGLYSLSSVVTVPSSSLGTQTYICNVNHKPSNTKVDKKVEPKSCDKTHTCPPCPAPPVAGPSVFLFPPKPKDTLMISRTPEVTCVVVDVKHEDPEVKFNWYVDGVEVHNAKTKPREEQYNSTYRVVSVLTVLHQDWLNGKEYKCKVSNKALPAPIEKTISKAKGQPREPQVYTLPPSREEMTKNQVSLTCLVKGFYPSDIAVEWESNGQPENNYKTTPPVLDSDGSFFLYSKLTVDKSRWQQGNVFSCSVMHEALHNHYTQKSLSLSPGK

SEQ ID NO: 16792 - protein, 122 aa, synthetic construct; identical to SEQ ID NO: 11390
  REGION 1..122: note = Description of Artificial Sequence: Synthetic polypeptide
  REGION 1..122: note = VH of XENP018137

SEQ ID NO: 16793 - protein, 5 aa, synthetic construct
  REGION 1..5: note = Description of Artificial Sequence: Synthetic peptide
  REGION 1..5: note = XENP018137 vhCDR1
NYDMN

SEQ ID NO: 16794 - protein, 19 aa, synthetic construct
  REGION 1..19: note = Description of Artificial Sequence: Synthetic peptide
  REGION 1..19: note = XENP018137 vhCDR2
EIRLKSNNYATHYAEPVKG

SEQ ID NO: 16795 - protein, 11 aa, synthetic construct
  REGION 1..11: note = Description of Artificial Sequence: Synthetic peptide
  REGION 1..11: note = XENP018137 vhCDR3
YYGNYGGYFDV

SEQ ID NO: 16796 - protein, 214 aa, synthetic construct; identical to SEQ ID NO: 16226
  REGION 1..214: note = Description of Artificial Sequence: Synthetic polypeptide
  REGION 1..214: note = XENP018137 1G6_H1.40_L1_IgG1_PVA_/S267K Light Chain

SEQ ID NO: 16797 - protein, 107 aa, synthetic construct; identical to SEQ ID NO: 10923
  REGION 1..107: note = Description of Artificial Sequence: Synthetic polypeptide
  REGION 1..107: note = VL of XENP018137

SEQ ID NO: 16798 - protein, 11 aa, synthetic construct
  REGION 1..11: note = Description of Artificial Sequence: Synthetic peptide
  REGION 1..11: note = XENP018137 vlCDR1
RASQSVSNDVA

SEQ ID NO: 16799 - protein, 7 aa, synthetic construct
  REGION 1..7: note = Description of Artificial Sequence: Synthetic peptide
  REGION 1..7: note = XENP018137 vlCDR2
YASHRYT

SEQ ID NO: 16800 - protein, 9 aa, synthetic construct
  REGION 1..9: note = Description of Artificial Sequence: Synthetic peptide
  REGION 1..9: note = XENP018137 vlCDR3
QQDYSSPRT

SEQ ID NO: 16801 - protein, 451 aa, synthetic construct
  REGION 1..451: note = Description of Artificial Sequence: Synthetic polypeptide
  REGION 1..451: note = XENP018138 1G6_H1.41_L1_IgG1_PVA_/S267K Heavy Chain
EVQLVESGGGLVKPGGSLRLSCAASGFTFSNYWMSWVRQAPGKGLEWVGEIRLKSNNYATHYAEPVKGRFTISRDDSKSTVYLQMNSLKTEDTAVYYCTRYYGNYGGYFDVWGAGTLVTVSSASTKGPSVFPLAPSSKSTSGGTAALGCLVKDYFPEPVTVSWNSGALTSGVHTFPAVLQSSGLYSLSSVVTVPSSSLGTQTYICNVNHKPSNTKVDKKVEPKSCDKTHTCPPCPAPPVAGPSVFLFPPKPKDTLMISRTPEVTCVVVDVKHEDPEVKFNWYVDGVEVHNAKTKPREEQYNSTYRVVSVLTVLHQDWLNGKEYKCKVSNKALPAPIEKTISKAKGQPREPQVYTLPPSREEMTKNQVSLTCLVKGFYPSDIAVEWESNGQPENNYKTTPPVLDSDGSFFLYSKLTVDKSRWQQGNVFSCSVMHEALHNHYTQKSLSLSPGK

SEQ ID NO: 16802 - protein, 122 aa, synthetic construct; identical to SEQ ID NO: 11399
  REGION 1..122: note = Description of Artificial Sequence: Synthetic polypeptide
  REGION 1..122: note = VH of XENP018138

SEQ ID NO: 16803 - protein, 5 aa, synthetic construct
  REGION 1..5: note = Description of Artificial Sequence: Synthetic peptide
  REGION 1..5: note = XENP018138 vhCDR1
NYWMS

SEQ ID NO: 16804 - protein, 19 aa, synthetic construct
  REGION 1..19: note = Description of Artificial Sequence: Synthetic peptide
  REGION 1..19: note = XENP018138 vhCDR2
EIRLKSNNYATHYAEPVKG

SEQ ID NO: 16805 - protein, 11 aa, synthetic construct
  REGION 1..11: note = Description of Artificial Sequence: Synthetic peptide
  REGION 1..11: note = XENP018138 vhCDR3
YYGNYGGYFDV

SEQ ID NO: 16806 - protein, 214 aa, synthetic construct; identical to SEQ ID NO: 16226
  REGION 1..214: note = Description of Artificial Sequence: Synthetic polypeptide
  REGION 1..214: note = XENP018138 1G6_H1.41_L1_IgG1_PVA_/S267K Light Chain

SEQ ID NO: 16807 - protein, 107 aa, synthetic construct; identical to SEQ ID NO: 10923
  REGION 1..107: note = Description of Artificial Sequence: Synthetic polypeptide
  REGION 1..107: note = VL of XENP018138

SEQ ID NO: 16808 - protein, 11 aa, synthetic construct
  REGION 1..11: note = Description of Artificial Sequence: Synthetic peptide
  REGION 1..11: note = XENP018138 vlCDR1
RASQSVSNDVA

SEQ ID NO: 16809 - protein, 7 aa, synthetic construct
  REGION 1..7: note = Description of Artificial Sequence: Synthetic peptide
  REGION 1..7: note = XENP018138 vlCDR2
YASHRYT

SEQ ID NO: 16810 - protein, 9 aa, synthetic construct
  REGION 1..9: note = Description of Artificial Sequence: Synthetic peptide
  REGION 1..9: note = XENP018138 vlCDR3
QQDYSSPRT

SEQ ID NO: 16811 - protein, 451 aa, synthetic construct
  REGION 1..451: note = Description of Artificial Sequence: Synthetic polypeptide
  REGION 1..451: note = XENP018139 1G6_H1.42_L1_IgG1_PVA_/S267K Heavy Chain
EVQLVESGGGLVKPGGSLRLSCAASGFTFSNYWMHWVRQAPGKGLEWVGEIRLKSNNYATHYAEPVKGRFTISRDDSKSTVYLQMNSLKTEDTAVYYCTRYYGNYGGYFDVWGAGTLVTVSSASTKGPSVFPLAPSSKSTSGGTAALGCLVKDYFPEPVTVSWNSGALTSGVHTFPAVLQSSGLYSLSSVVTVPSSSLGTQTYICNVNHKPSNTKVDKKVEPKSCDKTHTCPPCPAPPVAGPSVFLFPPKPKDTLMISRTPEVTCVVVDVKHEDPEVKFNWYVDGVEVHNAKTKPREEQYNSTYRVVSVLTVLHQDWLNGKEYKCKVSNKALPAPIEKTISKAKGQPREPQVYTLPPSREEMTKNQVSLTCLVKGFYPSDIAVEWESNGQPENNYKTTPPVLDSDGSFFLYSKLTVDKSRWQQGNVFSCSVMHEALHNHYTQKSLSLSPGK

SEQ ID NO: 16812 - protein, 122 aa, synthetic construct; identical to SEQ ID NO: 11408
  REGION 1..122: note = Description of Artificial Sequence: Synthetic polypeptide
  REGION 1..122: note = VH of XENP018139

SEQ ID NO: 16813 - protein, 5 aa, synthetic construct
  REGION 1..5: note = Description of Artificial Sequence: Synthetic peptide
  REGION 1..5: note = XENP018139 vhCDR1
NYWMH

SEQ ID NO: 16814 - protein, 19 aa, synthetic construct
  REGION 1..19: note = Description of Artificial Sequence: Synthetic peptide
  REGION 1..19: note = XENP018139 vhCDR2
EIRLKSNNYATHYAEPVKG

SEQ ID NO: 16815 - protein, 11 aa, synthetic construct
  REGION 1..11: note = Description of Artificial Sequence: Synthetic peptide
  REGION 1..11: note = XENP018139 vhCDR3
YYGNYGGYFDV

SEQ ID NO: 16816 - protein, 214 aa, synthetic construct; identical to SEQ ID NO: 16226
  REGION 1..214: note = Description of Artificial Sequence: Synthetic polypeptide
  REGION 1..214: note = XENP018139 1G6_H1.42_L1_IgG1_PVA_/S267K Light Chain

SEQ ID NO: 16817 - protein, 107 aa, synthetic construct; identical to SEQ ID NO: 10923
  REGION 1..107: note = Description of Artificial Sequence: Synthetic polypeptide
  REGION 1..107: note = VL of XENP018139

SEQ ID NO: 16818 - protein, 11 aa, synthetic construct
  REGION 1..11: note = Description of Artificial Sequence: Synthetic peptide
  REGION 1..11: note = XENP018139 vlCDR1
RASQSVSNDVA

SEQ ID NO: 16819 - protein, 7 aa, synthetic construct
  REGION 1..7: note = Description of Artificial Sequence: Synthetic peptide
  REGION 1..7: note = XENP018139 vlCDR2
YASHRYT

SEQ ID NO: 16820 - protein, 9 aa, synthetic construct
  REGION 1..9: note = Description of Artificial Sequence: Synthetic peptide
  REGION 1..9: note = XENP018139 vlCDR3
QQDYSSPRT

SEQ ID NO: 16821 - protein, 451 aa, synthetic construct
  REGION 1..451: note = Description of Artificial Sequence: Synthetic polypeptide
  REGION 1..451: note = XENP018140 1G6_H1.43_L1_IgG1_PVA_/S267K Heavy Chain
EVQLVESGGGLVKPGGSLRLSCAASGFTFSNYWMDWVRQAPGKGLEWVGEIRLKSNNYATHYAEPVKGRFTISRDDSKSTVYLQMNSLKTEDTAVYYCTRYYGNYGGYFDVWGAGTLVTVSSASTKGPSVFPLAPSSKSTSGGTAALGCLVKDYFPEPVTVSWNSGALTSGVHTFPAVLQSSGLYSLSSVVTVPSSSLGTQTYICNVNHKPSNTKVDKKVEPKSCDKTHTCPPCPAPPVAGPSVFLFPPKPKDTLMISRTPEVTCVVVDVKHEDPEVKFNWYVDGVEVHNAKTKPREEQYNSTYRVVSVLTVLHQDWLNGKEYKCKVSNKALPAPIEKTISKAKGQPREPQVYTLPPSREEMTKNQVSLTCLVKGFYPSDIAVEWESNGQPENNYKTTPPVLDSDGSFFLYSKLTVDKSRWQQGNVFSCSVMHEALHNHYTQKSLSLSPGK

SEQ ID NO: 16822 - protein, 122 aa, synthetic construct; identical to SEQ ID NO: 11417
  REGION 1..122: note = Description of Artificial Sequence: Synthetic polypeptide
  REGION 1..122: note = VH of XENP018140

SEQ ID NO: 16823 - protein, 5 aa, synthetic construct
  REGION 1..5: note = Description of Artificial Sequence: Synthetic peptide
  REGION 1..5: note = XENP018140 vhCDR1
NYWMD

SEQ ID NO: 16824 - protein, 19 aa, synthetic construct
  REGION 1..19: note = Description of Artificial Sequence: Synthetic peptide
  REGION 1..19: note = XENP018140 vhCDR2
EIRLKSNNYATHYAEPVKG

SEQ ID NO: 16825 - protein, 11 aa, synthetic construct
  REGION 1..11: note = Description of Artificial Sequence: Synthetic peptide
  REGION 1..11: note = XENP018140 vhCDR3
YYGNYGGYFDV

SEQ ID NO: 16826 - protein, 214 aa, synthetic construct; identical to SEQ ID NO: 16226
  REGION 1..214: note = Description of Artificial Sequence: Synthetic polypeptide
  REGION 1..214: note = XENP018140 1G6_H1.43_L1_IgG1_PVA_/S267K Light Chain

SEQ ID NO: 16827 - protein, 107 aa, synthetic construct; identical to SEQ ID NO: 10923
  REGION 1..107: note = Description of Artificial Sequence: Synthetic polypeptide
  REGION 1..107: note = VL of XENP018140

SEQ ID NO: 16828 - protein, 11 aa, synthetic construct
  REGION 1..11: note = Description of Artificial Sequence: Synthetic peptide
  REGION 1..11: note = XENP018140 vlCDR1
RASQSVSNDVA

SEQ ID NO: 16829 - protein, 7 aa, synthetic construct
  REGION 1..7: note = Description of Artificial Sequence: Synthetic peptide
  REGION 1..7: note = XENP018140 vlCDR2
YASHRYT

SEQ ID NO: 16830 - protein, 9 aa, synthetic construct
  REGION 1..9: note = Description of Artificial Sequence: Synthetic peptide
  REGION 1..9: note = XENP018140 vlCDR3
QQDYSSPRT

SEQ ID NO: 16831 - protein, 451 aa, synthetic construct
  REGION 1..451: note = Description of Artificial Sequence: Synthetic polypeptide
  REGION 1..451: note = XENP018141 1G6_H1.44_L1_IgG1_PVA_/S267K Heavy Chain
EVQLVESGGGLVKPGGSLRLSCAASGFTFSNYWMGWVRQAPGKGLEWVGEIRLKSNNYATHYAEPVKGRFTISRDDSKSTVYLQMNSLKTEDTAVYYCTRYYGNYGGYFDVWGAGTLVTVSSASTKGPSVFPLAPSSKSTSGGTAALGCLVKDYFPEPVTVSWNSGALTSGVHTFPAVLQSSGLYSLSSVVTVPSSSLGTQTYICNVNHKPSNTKVDKKVEPKSCDKTHTCPPCPAPPVAGPSVFLFPPKPKDTLMISRTPEVTCVVVDVKHEDPEVKFNWYVDGVEVHNAKTKPREEQYNSTYRVVSVLTVLHQDWLNGKEYKCKVSNKALPAPIEKTISKAKGQPREPQVYTLPPSREEMTKNQVSLTCLVKGFYPSDIAVEWESNGQPENNYKTTPPVLDSDGSFFLYSKLTVDKSRWQQGNVFSCSVMHEALHNHYTQKSLSLSPGK

SEQ ID NO: 16832 - protein, 122 aa, synthetic construct; identical to SEQ ID NO: 11426
  REGION 1..122: note = Description of Artificial Sequence: Synthetic polypeptide
  REGION 1..122: note = VH of XENP018141

SEQ ID NO: 16833 - protein, 5 aa, synthetic construct
  REGION 1..5: note = Description of Artificial Sequence: Synthetic peptide
  REGION 1..5: note = XENP018141 vhCDR1
NYWMG

SEQ ID NO: 16834 - protein, 18 aa, synthetic construct
  REGION 1..18: note = Description of Artificial Sequence: Synthetic peptide
  REGION 1..18: note = XENP018141 vhCDR2
EIRLKSNNYATHYAEPVK

SEQ ID NO: 16835 - protein, 11 aa, synthetic construct
  REGION 1..11: note = Description of Artificial Sequence: Synthetic peptide
  REGION 1..11: note = XENP018141 vhCDR3
YYGNYGGYFDV

SEQ ID NO: 16836 - protein, 214 aa, synthetic construct; identical to SEQ ID NO: 16226
  REGION 1..214: note = Description of Artificial Sequence: Synthetic polypeptide
  REGION 1..214: note = XENP018141 1G6_H1.44_L1_IgG1_PVA_/S267K Light Chain

SEQ ID NO: 16837 - protein, 107 aa, synthetic construct; identical to SEQ ID NO: 10923
  REGION 1..107: note = Description of Artificial Sequence: Synthetic polypeptide
  REGION 1..107: note = VL of XENP018141

SEQ ID NO: 16838 - protein, 11 aa, synthetic construct
  REGION 1..11: note = Description of Artificial Sequence: Synthetic peptide
  REGION 1..11: note = XENP018141 vlCDR1
RASQSVSNDVA

SEQ ID NO: 16839 - protein, 7 aa, synthetic construct
  REGION 1..7: note = Description of Artificial Sequence: Synthetic peptide
  REGION 1..7: note = XENP018141 vlCDR2
YASHRYT

SEQ ID NO: 16840 - protein, 9 aa, synthetic construct
  REGION 1..9: note = Description of Artificial Sequence: Synthetic peptide
  REGION 1..9: note = XENP018141 vlCDR3
QQDYSSPRT

SEQ ID NO: 16841 - protein, 451 aa, synthetic construct
  REGION 1..451: note = Description of Artificial Sequence: Synthetic polypeptide
  REGION 1..451: note = XENP018142 1G6_H1.45_L1_IgG1_PVA_/S267K Heavy Chain
EVQLVESGGGLVKPGGSLRLSCAASGFTFSNYWMNWARQAPGKGLEWVGEIRLKSNNYATHYAEPVKGRFTISRDDSKSTVYLQMNSLKTEDTAVYYCTRYYGNYGGYFDVWGAGTLVTVSSASTKGPSVFPLAPSSKSTSGGTAALGCLVKDYFPEPVTVSWNSGALTSGVHTFPAVLQSSGLYSLSSVVTVPSSSLGTQTYICNVNHKPSNTKVDKKVEPKSCDKTHTCPPCPAPPVAGPSVFLFPPKPKDTLMISRTPEVTCVVVDVKHEDPEVKFNWYVDGVEVHNAKTKPREEQYNSTYRVVSVLTVLHQDWLNGKEYKCKVSNKALPAPIEKTISKAKGQPREPQVYTLPPSREEMTKNQVSLTCLVKGFYPSDIAVEWESNGQPENNYKTTPPVLDSDGSFFLYSKLTVDKSRWQQGNVFSCSVMHEALHNHYTQKSLSLSPGK

SEQ ID NO: 16842 - protein, 122 aa, synthetic construct; identical to SEQ ID NO: 11435
  REGION 1..122: note = Description of Artificial Sequence: Synthetic polypeptide
  REGION 1..122: note = VH of XENP018142

SEQ ID NO: 16843 - protein, 5 aa, synthetic construct
  REGION 1..5: note = Description of Artificial Sequence: Synthetic peptide
  REGION 1..5: note = XENP018142 vhCDR1
NYWMN

SEQ ID NO: 16844 - protein, 19 aa, synthetic construct
  REGION 1..19: note = Description of Artificial Sequence: Synthetic peptide
  REGION 1..19: note = XENP018142 vhCDR2
EIRLKSNNYATHYAEPVKG

SEQ ID NO: 16845 - protein, 11 aa, synthetic construct
  REGION 1..11: note = Description of Artificial Sequence: Synthetic peptide
  REGION 1..11: note = XENP018142 vhCDR3
YYGNYGGYFDV

SEQ ID NO: 16846 - protein, 214 aa, synthetic construct; identical to SEQ ID NO: 16226
  REGION 1..214: note = Description of Artificial Sequence: Synthetic polypeptide
  REGION 1..214: note = XENP018142 1G6_H1.45_L1_IgG1_PVA_/S267K Light Chain

SEQ ID NO: 16847 - protein, 107 aa, synthetic construct; identical to SEQ ID NO: 10923
  REGION 1..107: note = Description of Artificial Sequence: Synthetic polypeptide
  REGION 1..107: note = VL of XENP018142

SEQ ID NO: 16848 - protein, 11 aa, synthetic construct
  REGION 1..11: note = Description of Artificial Sequence: Synthetic peptide
  REGION 1..11: note = XENP018142 vlCDR1
RASQSVSNDVA

SEQ ID NO: 16849 - protein, 7 aa, synthetic construct
  REGION 1..7: note = Description of Artificial Sequence: Synthetic peptide
  REGION 1..7: note = XENP018142 vlCDR2
YASHRYT

SEQ ID NO: 16850 - protein, 9 aa, synthetic construct
  REGION 1..9: note = Description of Artificial Sequence: Synthetic peptide
  REGION 1..9: note = XENP018142 vlCDR3
QQDYSSPRT

SEQ ID NO: 16851 - protein, 451 aa, synthetic construct
  REGION 1..451: note = Description of Artificial Sequence: Synthetic polypeptide
  REGION 1..451: note = XENP018143 1G6_H1.46_L1_IgG1_PVA_/S267K Heavy Chain
EVQLVESGGGLVKPGGSLRLSCAASGFTFSNYWMNWIRQAPGKGLEWVGEIRLKSNNYATHYAEPVKGRFTISRDDSKSTVYLQMNSLKTEDTAVYYCTRYYGNYGGYFDVWGAGTLVTVSSASTKGPSVFPLAPSSKSTSGGTAALGCLVKDYFPEPVTVSWNSGALTSGVHTFPAVLQSSGLYSLSSVVTVPSSSLGTQTYICNVNHKPSNTKVDKKVEPKSCDKTHTCPPCPAPPVAGPSVFLFPPKPKDTLMISRTPEVTCVVVDVKHEDPEVKFNWYVDGVEVHNAKTKPREEQYNSTYRVVSVLTVLHQDWLNGKEYKCKVSNKALPAPIEKTISKAKGQPREPQVYTLPPSREEMTKNQVSLTCLVKGFYPSDIAVEWESNGQPENNYKTTPPVLDSDGSFFLYSKLTVDKSRWQQGNVFSCSVMHEALHNHYTQKSLSLSPGK

SEQ ID NO: 16852 - protein, 122 aa, synthetic construct; identical to SEQ ID NO: 11444
  REGION 1..122: note = Description of Artificial Sequence: Synthetic polypeptide
  REGION 1..122: note = VH of XENP018143

SEQ ID NO: 16853 - protein, 5 aa, synthetic construct
  REGION 1..5: note = Description of Artificial Sequence: Synthetic peptide
  REGION 1..5: note = XENP018143 vhCDR1
NYWMN

SEQ ID NO: 16854 - protein, 19 aa, synthetic construct
  REGION 1..19: note = Description of Artificial Sequence: Synthetic peptide
  REGION 1..19: note = XENP018143 vhCDR2
EIRLKSNNYATHYAEPVKG

SEQ ID NO: 16855 - protein, 11 aa, synthetic construct
  REGION 1..11: note = Description of Artificial Sequence: Synthetic peptide
  REGION 1..11: note = XENP018143 vhCDR3
YYGNYGGYFDV

SEQ ID NO: 16856 - protein, 214 aa, synthetic construct; identical to SEQ ID NO: 16226
  REGION 1..214: note = Description of Artificial Sequence: Synthetic polypeptide
  REGION 1..214: note = XENP018143 1G6_H1.46_L1_IgG1_PVA_/S267K Light Chain

SEQ ID NO: 16857 - protein, 107 aa, synthetic construct; identical to SEQ ID NO: 10923
  REGION 1..107: note = Description of Artificial Sequence: Synthetic polypeptide
  REGION 1..107: note = VL of XENP018143

SEQ ID NO: 16858 - protein, 11 aa, synthetic construct
  REGION 1..11: note = Description of Artificial Sequence: Synthetic peptide
  REGION 1..11: note = XENP018143 vlCDR1
RASQSVSNDVA

SEQ ID NO: 16859 - protein, 7 aa, synthetic construct
  REGION 1..7: note = Description of Artificial Sequence: Synthetic peptide
  REGION 1..7: note = XENP018143 vlCDR2
YASHRYT

SEQ ID NO: 16860 - protein, 9 aa, synthetic construct
  REGION 1..9: note = Description of Artificial Sequence: Synthetic peptide
  REGION 1..9: note = XENP018143 vlCDR3
QQDYSSPRT

SEQ ID NO: 16861 - protein, 451 aa, synthetic construct
  REGION 1..451: note = Description of Artificial Sequence: Synthetic polypeptide
  REGION 1..451: note = XENP018144 1G6_H1.47_L1_IgG1_PVA_/S267K Heavy Chain
EVQLVESGGGLVKPGGSLRLSCAASGFTFSNYWMNWFRQAPGKGLEWVGEIRLKSNNYATHYAEPVKGRFTISRDDSKSTVYLQMNSLKTEDTAVYYCTRYYGNYGGYFDVWGAGTLVTVSSASTKGPSVFPLAPSSKSTSGGTAALGCLVKDYFPEPVTVSWNSGALTSGVHTFPAVLQSSGLYSLSSVVTVPSSSLGTQTYICNVNHKPSNTKVDKKVEPKSCDKTHTCPPCPAPPVAGPSVFLFPPKPKDTLMISRTPEVTCVVVDVKHEDPEVKFNWYVDGVEVHNAKTKPREEQYNSTYRVVSVLTVLHQDWLNGKEYKCKVSNKALPAPIEKTISKAKGQPREPQVYTLPPSREEMTKNQVSLTCLVKGFYPSDIAVEWESNGQPENNYKTTPPVLDSDGSFFLYSKLTVDKSRWQQGNVFSCSVMHEALHNHYTQKSLSLSPGK

SEQ ID NO: 16862 - protein, 122 aa, synthetic construct; identical to SEQ ID NO: 11453
  REGION 1..122: note = Description of Artificial Sequence: Synthetic polypeptide
  REGION 1..122: note = VH of XENP018144

SEQ ID NO: 16863 - protein, 5 aa, synthetic construct
  REGION 1..5: note = Description of Artificial Sequence: Synthetic peptide
  REGION 1..5: note = XENP018144 vhCDR1
NYWMN

SEQ ID NO: 16864 - protein, 19 aa, synthetic construct
  REGION 1..19: note = Description of Artificial Sequence: Synthetic peptide
  REGION 1..19: note = XENP018144 vhCDR2
EIRLKSNNYATHYAEPVKG

SEQ ID NO: 16865 - protein, 11 aa, synthetic construct
  REGION 1..11: note = Description of Artificial Sequence: Synthetic peptide
  REGION 1..11: note = XENP018144 vhCDR3
YYGNYGGYFDV

SEQ ID NO: 16866 - protein, 214 aa, synthetic construct; identical to SEQ ID NO: 16226
  REGION 1..214: note = Description of Artificial Sequence: Synthetic polypeptide
  REGION 1..214: note = XENP018144 1G6_H1.47_L1_IgG1_PVA_/S267K Light Chain

SEQ ID NO: 16867 - protein, 107 aa, synthetic construct; identical to SEQ ID NO: 10923
  REGION 1..107: note = Description of Artificial Sequence: Synthetic polypeptide
  REGION 1..107: note = VL of XENP018144

SEQ ID NO: 16868 - protein, 11 aa, synthetic construct
  REGION 1..11: note = Description of Artificial Sequence: Synthetic peptide
  REGION 1..11: note = XENP018144 vlCDR1
RASQSVSNDVA

SEQ ID NO: 16869 - protein, 7 aa, synthetic construct
  REGION 1..7: note = Description of Artificial Sequence: Synthetic peptide
  REGION 1..7: note = XENP018144 vlCDR2
YASHRYT

SEQ ID NO: 16870 - protein, 9 aa, synthetic construct
  REGION 1..9: note = Description of Artificial Sequence: Synthetic peptide
  REGION 1..9: note = XENP018144 vlCDR3
QQDYSSPRT

SEQ ID NO: 16871 - protein, 451 aa, synthetic construct
  REGION 1..451: note = Description of Artificial Sequence: Synthetic polypeptide
  REGION 1..451: note = XENP018145 1G6_H1.48_L1_IgG1_PVA_/S267K Heavy Chain
EVQLVESGGGLVKPGGSLRLSCAASGFTFSNYWMNWVRKAPGKGLEWVGEIRLKSNNYATHYAEPVKGRFTISRDDSKSTVYLQMNSLKTEDTAVYYCTRYYGNYGGYFDVWGAGTLVTVSSASTKGPSVFPLAPSSKSTSGGTAALGCLVKDYFPEPVTVSWNSGALTSGVHTFPAVLQSSGLYSLSSVVTVPSSSLGTQTYICNVNHKPSNTKVDKKVEPKSCDKTHTCPPCPAPPVAGPSVFLFPPKPKDTLMISRTPEVTCVVVDVKHEDPEVKFNWYVDGVEVHNAKTKPREEQYNSTYRVVSVLTVLHQDWLNGKEYKCKVSNKALPAPIEKTISKAKGQPREPQVYTLPPSREEMTKNQVSLTCLVKGFYPSDIAVEWESNGQPENNYKTTPPVLDSDGSFFLYSKLTVDKSRWQQGNVFSCSVMHEALHNHYTQKSLSLSPGK

SEQ ID NO: 16872 - protein, 122 aa, synthetic construct; identical to SEQ ID NO: 11462
  REGION 1..122: note = Description of Artificial Sequence: Synthetic polypeptide
  REGION 1..122: note = VH of XENP018145

SEQ ID NO: 16873 - protein, 5 aa, synthetic construct
  REGION 1..5: note = Description of Artificial Sequence: Synthetic peptide
  REGION 1..5: note = XENP018145 vhCDR1
NYWMN

SEQ ID NO: 16874 - protein, 19 aa, synthetic construct
  REGION 1..19: note = Description of Artificial Sequence: Synthetic peptide
  REGION 1..19: note = XENP018145 vhCDR2
EIRLKSNNYATHYAEPVKG

SEQ ID NO: 16875 - protein, 11 aa, synthetic construct
  REGION 1..11: note = Description of Artificial Sequence: Synthetic peptide
  REGION 1..11: note = XENP018145 vhCDR3
YYGNYGGYFDV

SEQ ID NO: 16876 - protein, 214 aa, synthetic construct; identical to SEQ ID NO: 16226
  REGION 1..214: note = Description of Artificial Sequence: Synthetic polypeptide
  REGION 1..214: note = XENP018145 1G6_H1.48_L1_IgG1_PVA_/S267K Light Chain

SEQ ID NO: 16877 - protein, 107 aa, synthetic construct; identical to SEQ ID NO: 10923
  REGION 1..107: note = Description of Artificial Sequence: Synthetic polypeptide
  REGION 1..107: note = VL of XENP018145

SEQ ID NO: 16878 - protein, 11 aa, synthetic construct
  REGION 1..11: note = Description of Artificial Sequence: Synthetic peptide
  REGION 1..11: note = XENP018145 vlCDR1
RASQSVSNDVA

SEQ ID NO: 16879 - protein, 7 aa, synthetic construct
  REGION 1..7: note = Description of Artificial Sequence: Synthetic peptide
  REGION 1..7: note = XENP018145 vlCDR2
YASHRYT

SEQ ID NO: 16880 - protein, 9 aa, synthetic construct
  REGION 1..9: note = Description of Artificial Sequence: Synthetic peptide
  REGION 1..9: note = XENP018145 vlCDR3
QQDYSSPRT

SEQ ID NO: 16881 - protein, 451 aa, synthetic construct
  REGION 1..451: note = Description of Artificial Sequence: Synthetic polypeptide
  REGION 1..451: note = XENP018146 1G6_H1.49_L1_IgG1_PVA_/S267K Heavy Chain
EVQLVESGGGLVKPGGSLRLSCAASGFTFSNYWMNWVRQSPGKGLEWVGEIRLKSNNYATHYAEPVKGRFTISRDDSKSTVYLQMNSLKTEDTAVYYCTRYYGNYGGYFDVWGAGTLVTVSSASTKGPSVFPLAPSSKSTSGGTAALGCLVKDYFPEPVTVSWNSGALTSGVHTFPAVLQSSGLYSLSSVVTVPSSSLGTQTYICNVNHKPSNTKVDKKVEPKSCDKTHTCPPCPAPPVAGPSVFLFPPKPKDTLMISRTPEVTCVVVDVKHEDPEVKFNWYVDGVEVHNAKTKPREEQYNSTYRVVSVLTVLHQDWLNGKEYKCKVSNKALPAPIEKTISKAKGQPREPQVYTLPPSREEMTKNQVSLTCLVKGFYPSDIAVEWESNGQPENNYKTTPPVLDSDGSFFLYSKLTVDKSRWQQGNVFSCSVMHEALHNHYTQKSLSLSPGK

SEQ ID NO: 16882 - protein, 122 aa, synthetic construct; identical to SEQ ID NO: 11468
  REGION 1..122: note = Description of Artificial Sequence: Synthetic polypeptide
  REGION 1..122: note = VH of XENP018146

SEQ ID NO: 16883 - protein, 5 aa, synthetic construct
  REGION 1..5: note = Description of Artificial Sequence: Synthetic peptide
  REGION 1..5: note = XENP018146 vhCDR1
NYWMN

SEQ ID NO: 16884 - protein, 19 aa, synthetic construct
  REGION 1..19: note = Description of Artificial Sequence: Synthetic peptide
  REGION 1..19: note = XENP018146 vhCDR2
EIRLKSNNYATHYAEPVKG

SEQ ID NO: 16885 - protein, 11 aa, synthetic construct
  REGION 1..11: note = Description of Artificial Sequence: Synthetic peptide
  REGION 1..11: note = XENP018146 vhCDR3
YYGNYGGYFDV

SEQ ID NO: 16886 - protein, 214 aa, synthetic construct; identical to SEQ ID NO: 16226
  REGION 1..214: note = Description of Artificial Sequence: Synthetic polypeptide
  REGION 1..214: note = XENP018146 1G6_H1.49_L1_IgG1_PVA_/S267K Light Chain

SEQ ID NO: 16887 - protein, 107 aa, synthetic construct; identical to SEQ ID NO: 10923
  REGION 1..107: note = Description of Artificial Sequence: Synthetic polypeptide
  REGION 1..107: note = VL of XENP018146

SEQ ID NO: 16888 - protein, 11 aa, synthetic construct
  REGION 1..11: note = Description of Artificial Sequence: Synthetic peptide
  REGION 1..11: note = XENP018146 vlCDR1
RASQSVSNDVA

SEQ ID NO: 16889 - protein, 7 aa, synthetic construct
  REGION 1..7: note = Description of Artificial Sequence: Synthetic peptide
  REGION 1..7: note = XENP018146 vlCDR2
YASHRYT

SEQ ID NO: 16890 - protein, 9 aa, synthetic construct
  REGION 1..9: note = Description of Artificial Sequence: Synthetic peptide
  REGION 1..9: note = XENP018146 vlCDR3
QQDYSSPRT

SEQ ID NO: 16891 - protein, 451 aa, synthetic construct
  REGION 1..451: note = Description of Artificial Sequence: Synthetic polypeptide
  REGION 1..451: note = XENP018147 1G6_H1.50_L1_IgG1_PVA_/S267K Heavy Chain
EVQLVESGGGLVKPGGSLRLSCAASGFTFSNYWMNWVRQAPEKGLEWVGEIRLKSNNYATHYAEPVKGRFTISRDDSKSTVYLQMNSLKTEDTAVYYCTRYYGNYGGYFDVWGAGTLVTVSSASTKGPSVFPLAPSSKSTSGGTAALGCLVKDYFPEPVTVSWNSGALTSGVHTFPAVLQSSGLYSLSSVVTVPSSSLGTQTYICNVNHKPSNTKVDKKVEPKSCDKTHTCPPCPAPPVAGPSVFLFPPKPKDTLMISRTPEVTCVVVDVKHEDPEVKFNWYVDGVEVHNAKTKPREEQYNSTYRVVSVLTVLHQDWLNGKEYKCKVSNKALPAPIEKTISKAKGQPREPQVYTLPPSREEMTKNQVSLTCLVKGFYPSDIAVEWESNGQPENNYKTTPPVLDSDGSFFLYSKLTVDKSRWQQGNVFSCSVMHEALHNHYTQKSLSLSPGK

SEQ ID NO: 16892 - protein, 122 aa, synthetic construct; identical to SEQ ID NO: 11477
  REGION 1..122: note = Description of Artificial Sequence: Synthetic polypeptide
  REGION 1..122: note = VH of XENP018147

SEQ ID NO: 16893 - protein, 5 aa, synthetic construct
  REGION 1..5: note = Description of Artificial Sequence: Synthetic peptide
  REGION 1..5: note = XENP018147 vhCDR1
NYWMN

SEQ ID NO: 16894 - protein, 19 aa, synthetic construct
  REGION 1..19: note = Description of Artificial Sequence: Synthetic peptide
  REGION 1..19: note = XENP018147 vhCDR2
EIRLKSNNYATHYAEPVKG

SEQ ID NO: 16895 - protein, 11 aa, synthetic construct
  REGION 1..11: note = Description of Artificial Sequence: Synthetic peptide
  REGION 1..11: note = XENP018147 vhCDR3
YYGNYGGYFDV

SEQ ID NO: 16896 - protein, 214 aa, synthetic construct; identical to SEQ ID NO: 16226
  REGION 1..214: note = Description of Artificial Sequence: Synthetic polypeptide
  REGION 1..214: note = XENP018147 1G6_H1.50_L1_IgG1_PVA_/S267K Light Chain

SEQ ID NO: 16897 - protein, 107 aa, synthetic construct; identical to SEQ ID NO: 10923
  REGION 1..107: note = Description of Artificial Sequence: Synthetic polypeptide
  REGION 1..107: note = VL of XENP018147

SEQ ID NO: 16898 - protein, 11 aa, synthetic construct
  REGION 1..11: note = Description of Artificial Sequence: Synthetic peptide
  REGION 1..11: note = XENP018147 vlCDR1
RASQSVSNDVA

SEQ ID NO: 16899 - protein, 7 aa, synthetic construct
  REGION 1..7: note = Description of Artificial Sequence: Synthetic peptide
  REGION 1..7: note = XENP018147 vlCDR2
YASHRYT

SEQ ID NO: 16900 - protein, 9 aa, synthetic construct
  REGION 1..9: note = Description of Artificial Sequence: Synthetic peptide
  REGION 1..9: note = XENP018147 vlCDR3
QQDYSSPRT

SEQ ID NO: 16901 - protein, 451 aa, synthetic construct
  REGION 1..451: note = Description of Artificial Sequence: Synthetic polypeptide
  REGION 1..451: note = XENP018148 1G6_H1.51_L1_IgG1_PVA_/S267K Heavy Chain
EVQLVESGGGLVKPGGSLRLSCAASGFTFSNYWMNWVRQAPGKGLEYVGEIRLKSNNYATHYAEPVKGRFTISRDDSKSTVYLQMNSLKTEDTAVYYCTRYYGNYGGYFDVWGAGTLVTVSSASTKGPSVFPLAPSSKSTSGGTAALGCLVKDYFPEPVTVSWNSGALTSGVHTFPAVLQSSGLYSLSSVVTVPSSSLGTQTYICNVNHKPSNTKVDKKVEPKSCDKTHTCPPCPAPPVAGPSVFLFPPKPKDTLMISRTPEVTCVVVDVKHEDPEVKFNWYVDGVEVHNAKTKPREEQYNSTYRVVSVLTVLHQDWLNGKEYKCKVSNKALPAPIEKTISKAKGQPREPQVYTLPPSREEMTKNQVSLTCLVKGFYPSDIAVEWESNGQPENNYKTTPPVLDSDGSFFLYSKLTVDKSRWQQGNVFSCSVMHEALHNHYTQKSLSLSPGK

SEQ ID NO: 16902 - protein, 122 aa, synthetic construct; identical to SEQ ID NO: 11486
  REGION 1..122: note = Description of Artificial Sequence: Synthetic polypeptide
  REGION 1..122: note = VH of XENP018148

SEQ ID NO: 16903 - protein, 5 aa, synthetic construct
  REGION 1..5: note = Description of Artificial Sequence: Synthetic peptide
  REGION 1..5: note = XENP018148 vhCDR1
NYWMN

SEQ ID NO: 16904 - protein, 19 aa, synthetic construct
  REGION 1..19: note = Description of Artificial Sequence: Synthetic peptide
  REGION 1..19: note = XENP018148 vhCDR2
EIRLKSNNYATHYAEPVKG

SEQ ID NO: 16905 - protein, 11 aa, synthetic construct
  REGION 1..11: note = Description of Artificial Sequence: Synthetic peptide
  REGION 1..11: note = XENP018148 vhCDR3
YYGNYGGYFDV

SEQ ID NO: 16906 - protein, 214 aa, synthetic construct; identical to SEQ ID NO: 16226
  REGION 1..214: note = Description of Artificial Sequence: Synthetic polypeptide
  REGION 1..214: note = XENP018148 1G6_H1.51_L1_IgG1_PVA_/S267K Light Chain

SEQ ID NO: 16907 - protein, 107 aa, synthetic construct; identical to SEQ ID NO: 10923
  REGION 1..107: note = Description of Artificial Sequence: Synthetic polypeptide
  REGION 1..107: note = VL of XENP018148

SEQ ID NO: 16908 - protein, 11 aa, synthetic construct
  REGION 1..11: note = Description of Artificial Sequence: Synthetic peptide
  REGION 1..11: note = XENP018148 vlCDR1
RASQSVSNDVA

SEQ ID NO: 16909 - protein, 7 aa, synthetic construct
  REGION 1..7: note = Description of Artificial Sequence: Synthetic peptide
  REGION 1..7: note = XENP018148 vlCDR2
YASHRYT

SEQ ID NO: 16910 - protein, 9 aa, synthetic construct
  REGION 1..9: note = Description of Artificial Sequence: Synthetic peptide
  REGION 1..9: note = XENP018148 vlCDR3
QQDYSSPRT

SEQ ID NO: 16911 - protein, 451 aa, synthetic construct
  REGION 1..451: note = Description of Artificial Sequence: Synthetic polypeptide
  REGION 1..451: note = XENP018149 1G6_H1.52_L1_IgG1_PVA_/S267K Heavy Chain
EVQLVESGGGLVKPGGSLRLSCAASGFTFSNYWMNWVRQAPGKGLEWVAEIRLKSNNYATHYAEPVKGRFTISRDDSKSTVYLQMNSLKTEDTAVYYCTRYYGNYGGYFDVWGAGTLVTVSSASTKGPSVFPLAPSSKSTSGGTAALGCLVKDYFPEPVTVSWNSGALTSGVHTFPAVLQSSGLYSLSSVVTVPSSSLGTQTYICNVNHKPSNTKVDKKVEPKSCDKTHTCPPCPAPPVAGPSVFLFPPKPKDTLMISRTPEVTCVVVDVKHEDPEVKFNWYVDGVEVHNAKTKPREEQYNSTYRVVSVLTVLHQDWLNGKEYKCKVSNKALPAPIEKTISKAKGQPREPQVYTLPPSREEMTKNQVSLTCLVKGFYPSDIAVEWESNGQPENNYKTTPPVLDSDGSFFLYSKLTVDKSRWQQGNVFSCSVMHEALHNHYTQKSLSLSPGK

SEQ ID NO: 16912 - protein, 122 aa, synthetic construct; identical to SEQ ID NO: 11495
  REGION 1..122: note = Description of Artificial Sequence: Synthetic polypeptide
  REGION 1..122: note = VH of XENP018149

SEQ ID NO: 16913 - protein, 5 aa, synthetic construct
  REGION 1..5: note = Description of Artificial Sequence: Synthetic peptide
  REGION 1..5: note = XENP018149 vhCDR1
NYWMN

SEQ ID NO: 16914 - protein, 19 aa, synthetic construct
  REGION 1..19: note = Description of Artificial Sequence: Synthetic peptide
  REGION 1..19: note = XENP018149 vhCDR2
EIRLKSNNYATHYAEPVKG

SEQ ID NO: 16915 - protein, 11 aa, synthetic construct
  REGION 1..11: note = Description of Artificial Sequence: Synthetic peptide
  REGION 1..11: note = XENP018149 vhCDR3
YYGNYGGYFDV

SEQ ID NO: 16916 - protein, 214 aa, synthetic construct; identical to SEQ ID NO: 16226
  REGION 1..214: note = Description of Artificial Sequence: Synthetic polypeptide
  REGION 1..214: note = XENP018149 1G6_H1.52_L1_IgG1_PVA_/S267K Light Chain

SEQ ID NO: 16917 - protein, 107 aa, synthetic construct; identical to SEQ ID NO: 10923
  REGION 1..107: note = Description of Artificial Sequence: Synthetic polypeptide
  REGION 1..107: note = VL of XENP018149

SEQ ID NO: 16918 - protein, 11 aa, synthetic construct
  REGION 1..11: note = Description of Artificial Sequence: Synthetic peptide
  REGION 1..11: note = XENP018149 vlCDR1
RASQSVSNDVA

SEQ ID NO: 16919 - protein, 7 aa, synthetic construct
  REGION 1..7: note = Description of Artificial Sequence: Synthetic peptide
  REGION 1..7: note = XENP018149 vlCDR2
YASHRYT

SEQ ID NO: 16920 - protein, 9 aa, synthetic construct
  REGION 1..9: note = Description of Artificial Sequence: Synthetic peptide
  REGION 1..9: note = XENP018149 vlCDR3
QQDYSSPRT

SEQ ID NO: 16921 - protein, 451 aa, synthetic construct
  REGION 1..451: note = Description of Artificial Sequence: Synthetic polypeptide
  REGION 1..451: note = XENP018150 1G6_H1.53_L1_IgG1_PVA_/S267K Heavy Chain
EVQLVESGGGLVKPGGSLRLSCAASGFTFSNYWMNWVRQAPGKGLEWVSEIRLKSNNYATHYAEPVKGRFTISRDDSKSTVYLQMNSLKTEDTAVYYCTRYYGNYGGYFDVWGAGTLVTVSSASTKGPSVFPLAPSSKSTSGGTAALGCLVKDYFPEPVTVSWNSGALTSGVHTFPAVLQSSGLYSLSSVVTVPSSSLGTQTYICNVNHKPSNTKVDKKVEPKSCDKTHTCPPCPAPPVAGPSVFLFPPKPKDTLMISRTPEVTCVVVDVKHEDPEVKFNWYVDGVEVHNAKTKPREEQYNSTYRVVSVLTVLHQDWLNGKEYKCKVSNKALPAPIEKTISKAKGQPREPQVYTLPPSREEMTKNQVSLTCLVKGFYPSDIAVEWESNGQPENNYKTTPPVLDSDGSFFLYSKLTVDKSRWQQGNVFSCSVMHEALHNHYTQKSLSLSPGK

SEQ ID NO: 16922 - protein, 122 aa, synthetic construct; identical to SEQ ID NO: 11504
  REGION 1..122: note = Description of Artificial Sequence: Synthetic polypeptide
  REGION 1..122: note = VH of XENP018150

SEQ ID NO: 16923 - protein, 5 aa, synthetic construct
  REGION 1..5: note = Description of Artificial Sequence: Synthetic peptide
  REGION 1..5: note = XENP018150 vhCDR1
NYWMN

SEQ ID NO: 16924 - protein, 19 aa, synthetic construct
  REGION 1..19: note = Description of Artificial Sequence: Synthetic peptide
  REGION 1..19: note = XENP018150 vhCDR2
EIRLKSNNYATHYAEPVKG

SEQ ID NO: 16925 - protein, 11 aa, synthetic construct
  REGION 1..11: note = Description of Artificial Sequence: Synthetic peptide
  REGION 1..11: note = XENP018150 vhCDR3
YYGNYGGYFDV

SEQ ID NO: 16926 - protein, 214 aa, synthetic construct; identical to SEQ ID NO: 16226
  REGION 1..214: note = Description of Artificial Sequence: Synthetic polypeptide
  REGION 1..214: note = XENP018150 1G6_H1.53_L1_IgG1_PVA_/S267K Light Chain

SEQ ID NO: 16927 - protein, 107 aa, synthetic construct; identical to SEQ ID NO: 10923
  REGION 1..107: note = Description of Artificial Sequence: Synthetic polypeptide
  REGION 1..107: note = VL of XENP018150

SEQ ID NO: 16928 - protein, 11 aa, synthetic construct
  REGION 1..11: note = Description of Artificial Sequence: Synthetic peptide
  REGION 1..11: note = XENP018150 vlCDR1
RASQSVSNDVA

SEQ ID NO: 16929 - protein, 7 aa, synthetic construct
  REGION 1..7: note = Description of Artificial Sequence: Synthetic peptide
  REGION 1..7: note = XENP018150 vlCDR2
YASHRYT

SEQ ID NO: 16930 - protein, 9 aa, synthetic construct
  REGION 1..9: note = Description of Artificial Sequence: Synthetic peptide
  REGION 1..9: note = XENP018150 vlCDR3
QQDYSSPRT

SEQ ID NO: 16931 - protein, 451 aa, synthetic construct
  REGION 1..451: note = Description of Artificial Sequence: Synthetic polypeptide
  REGION 1..451: note = XENP018151 1G6_H1.54_L1_IgG1_PVA_/S267K Heavy Chain
EVQLVESGGGLVKPGGSLRLSCAASGFTFSNYWMNWVRQAPGKGLEWVGQIRLKSNNYATHYAEPVKGRFTISRDDSKSTVYLQMNSLKTEDTAVYYCTRYYGNYGGYFDVWGAGTLVTVSSASTKGPSVFPLAPSSKSTSGGTAALGCLVKDYFPEPVTVSWNSGALTSGVHTFPAVLQSSGLYSLSSVVTVPSSSLGTQTYICNVNHKPSNTKVDKKVEPKSCDKTHTCPPCPAPPVAGPSVFLFPPKPKDTLMISRTPEVTCVVVDVKHEDPEVKFNWYVDGVEVHNAKTKPREEQYNSTYRVVSVLTVLHQDWLNGKEYKCKVSNKALPAPIEKTISKAKGQPREPQVYTLPPSREEMTKNQVSLTCLVKGFYPSDIAVEWESNGQPENNYKTTPPVLDSDGSFFLYSKLTVDKSRWQQGNVFSCSVMHEALHNHYTQKSLSLSPGK

SEQ ID NO: 16932 - protein, 122 aa, synthetic construct; identical to SEQ ID NO: 11513
  REGION 1..122: note = Description of Artificial Sequence: Synthetic polypeptide
  REGION 1..122: note = VH of XENP018151

SEQ ID NO: 16933 - protein, 5 aa, synthetic construct
  REGION 1..5: note = Description of Artificial Sequence: Synthetic peptide
  REGION 1..5: note = XENP018151 vhCDR1
NYWMN

SEQ ID NO: 16934 - protein, 19 aa, synthetic construct
  REGION 1..19: note = Description of Artificial Sequence: Synthetic peptide
  REGION 1..19: note = XENP018151 vhCDR2
QIRLKSNNYATHYAEPVKG

SEQ ID NO: 16935 - protein, 11 aa, synthetic construct
  REGION 1..11: note = Description of Artificial Sequence: Synthetic peptide
  REGION 1..11: note = XENP018151 vhCDR3
YYGNYGGYFDV

SEQ ID NO: 16936 - protein, 214 aa, synthetic construct; identical to SEQ ID NO: 16226
  REGION 1..214: note = Description of Artificial Sequence: Synthetic polypeptide
  REGION 1..214: note = XENP018151 1G6_H1.54_L1_IgG1_PVA_/S267K Light Chain

SEQ ID NO: 16937 - protein, 107 aa, synthetic construct; identical to SEQ ID NO: 10923
  REGION 1..107: note = Description of Artificial Sequence: Synthetic polypeptide
  REGION 1..107: note = VL of XENP018151

SEQ ID NO: 16938 - protein, 11 aa, synthetic construct
  REGION 1..11: note = Description of Artificial Sequence: Synthetic peptide
  REGION 1..11: note = XENP018151 vlCDR1
RASQSVSNDVA

SEQ ID NO: 16939 - protein, 7 aa, synthetic construct
  REGION 1..7: note = Description of Artificial Sequence: Synthetic peptide
  REGION 1..7: note = XENP018151 vlCDR2
YASHRYT

SEQ ID NO: 16940 - protein, 9 aa, synthetic construct
  REGION 1..9: note = Description of Artificial Sequence: Synthetic peptide
  REGION 1..9: note = XENP018151 vlCDR3
QQDYSSPRT

SEQ ID NO: 16941 - protein, 451 aa, synthetic construct
  REGION 1..451: note = Description of Artificial Sequence: Synthetic polypeptide
  REGION 1..451: note = XENP018152 1G6_H1.55_L1_IgG1_PVA_/S267K Heavy Chain
EVQLVESGGGLVKPGGSLRLSCAASGFTFSNYWMNWVRQAPGKGLEWVGDIRLKSNNYATHYAEPVKGRFTISRDDSKSTVYLQMNSLKTEDTAVYYCTRYYGNYGGYFDVWGAGTLVTVSSASTKGPSVFPLAPSSKSTSGGTAALGCLVKDYFPEPVTVSWNSGALTSGVHTFPAVLQSSGLYSLSSVVTVPSSSLGTQTYICNVNHKPSNTKVDKKVEPKSCDKTHTCPPCPAPPVAGPSVFLFPPKPKDTLMISRTPEVTCVVVDVKHEDPEVKFNWYVDGVEVHNAKTKPREEQYNSTYRVVSVLTVLHQDWLNGKEYKCKVSNKALPAPIEKTISKAKGQPREPQVYTLPPSREEMTKNQVSLTCLVKGFYPSDIAVEWESNGQPENNYKTTPPVLDSDGSFFLYSKLTVDKSRWQQGNVFSCSVMHEALHNHYTQKSLSLSPGK

SEQ ID NO: 16942 - protein, 122 aa, synthetic construct; identical to SEQ ID NO: 11522
  REGION 1..122: note = Description of Artificial Sequence: Synthetic polypeptide
  REGION 1..122: note = VH of XENP018152

SEQ ID NO: 16943 - protein, 5 aa, synthetic construct
  REGION 1..5: note = Description of Artificial Sequence: Synthetic peptide
  REGION 1..5: note = XENP018152 vhCDR1
NYWMN

SEQ ID NO: 16944 - protein, 19 aa, synthetic construct
  REGION 1..19: note = Description of Artificial Sequence: Synthetic peptide
  REGION 1..19: note = XENP018152 vhCDR2
DIRLKSNNYATHYAEPVKG

SEQ ID NO: 16945 - protein, 11 aa, synthetic construct
  REGION 1..11: note = Description of Artificial Sequence: Synthetic peptide
  REGION 1..11: note = XENP018152 vhCDR3
YYGNYGGYFDV

SEQ ID NO: 16946 - protein, 214 aa, synthetic construct; identical to SEQ ID NO: 16226
  REGION 1..214: note = Description of Artificial Sequence: Synthetic polypeptide
  REGION 1..214: note = XENP018152 1G6_H1.55_L1_IgG1_PVA_/S267K Light Chain

SEQ ID NO: 16947 - protein, 107 aa, synthetic construct; identical to SEQ ID NO: 10923
  REGION 1..107: note = Description of Artificial Sequence: Synthetic polypeptide
  REGION 1..107: note = VL of XENP018152

SEQ ID NO: 16948 - protein, 11 aa, synthetic construct
  REGION 1..11: note = Description of Artificial Sequence: Synthetic peptide
  REGION 1..11: note = XENP018152 vlCDR1
RASQSVSNDVA

SEQ ID NO: 16949 - protein, 7 aa, synthetic construct
  REGION 1..7: note = Description of Artificial Sequence: Synthetic peptide
  REGION 1..7: note = XENP018152 vlCDR2
YASHRYT

SEQ ID NO: 16950 - protein, 9 aa, synthetic construct
  REGION 1..9: note = Description of Artificial Sequence: Synthetic peptide
  REGION 1..9: note = XENP018152 vlCDR3
QQDYSSPRT

SEQ ID NO: 16951 - protein, 451 aa, synthetic construct
  REGION 1..451: note = Description of Artificial Sequence: Synthetic polypeptide
  REGION 1..451: note = XENP018153 1G6_H1.56_L1_IgG1_PVA_/S267K Heavy Chain
EVQLVESGGGLVKPGGSLRLSCAASGFTFSNYWMNWVRQAPGKGLEWVGKIRLKSNNYATHYAEPVKGRFTISRDDSKSTVYLQMNSLKTEDTAVYYCTRYYGNYGGYFDVWGAGTLVTVSSASTKGPSVFPLAPSSKSTSGGTAALGCLVKDYFPEPVTVSWNSGALTSGVHTFPAVLQSSGLYSLSSVVTVPSSSLGTQTYICNVNHKPSNTKVDKKVEPKSCDKTHTCPPCPAPPVAGPSVFLFPPKPKDTLMISRTPEVTCVVVDVKHEDPEVKFNWYVDGVEVHNAKTKPREEQYNSTYRVVSVLTVLHQDWLNGKEYKCKVSNKALPAPIEKTISKAKGQPREPQVYTLPPSREEMTKNQVSLTCLVKGFYPSDIAVEWESNGQPENNYKTTPPVLDSDGSFFLYSKLTVDKSRWQQGNVFSCSVMHEALHNHYTQKSLSLSPGK

SEQ ID NO: 16952 - protein, 122 aa, synthetic construct; identical to SEQ ID NO: 11531
  REGION 1..122: note = Description of Artificial Sequence: Synthetic polypeptide
  REGION 1..122: note = VH of XENP018153

SEQ ID NO: 16953 - protein, 5 aa, synthetic construct
  REGION 1..5: note = Description of Artificial Sequence: Synthetic peptide
  REGION 1..5: note = XENP018153 vhCDR1
NYWMN

SEQ ID NO: 16954 - protein, 19 aa, synthetic construct
  REGION 1..19: note = Description of Artificial Sequence: Synthetic peptide
  REGION 1..19: note = XENP018153 vhCDR2
KIRLKSNNYATHYAEPVKG

SEQ ID NO: 16955 - protein, 11 aa, synthetic construct
  REGION 1..11: note = Description of Artificial Sequence: Synthetic peptide
  REGION 1..11: note = XENP018153 vhCDR3
YYGNYGGYFDV

SEQ ID NO: 16956 - protein, 214 aa, synthetic construct; identical to SEQ ID NO: 16226
  REGION 1..214: note = Description of Artificial Sequence: Synthetic polypeptide
  REGION 1..214: note = XENP018153 1G6_H1.56_L1_IgG1_PVA_/S267K Light Chain

SEQ ID NO: 16957 - protein, 107 aa, synthetic construct; identical to SEQ ID NO: 10923
  REGION 1..107: note = Description of Artificial Sequence: Synthetic polypeptide
  REGION 1..107: note = VL of XENP018153

SEQ ID NO: 16958 - protein, 11 aa, synthetic construct
  REGION 1..11: note = Description of Artificial Sequence: Synthetic peptide
  REGION 1..11: note = XENP018153 vlCDR1
RASQSVSNDVA

SEQ ID NO: 16959 - protein, 7 aa, synthetic construct
  REGION 1..7: note = Description of Artificial Sequence: Synthetic peptide
  REGION 1..7: note = XENP018153 vlCDR2
YASHRYT

SEQ ID NO: 16960 - protein, 9 aa, synthetic construct
  REGION 1..9: note = Description of Artificial Sequence: Synthetic peptide
  REGION 1..9: note = XENP018153 vlCDR3
QQDYSSPRT

SEQ ID NO: 16961 - protein, 451 aa, synthetic construct
  REGION 1..451: note = Description of Artificial Sequence: Synthetic polypeptide
  REGION 1..451: note = XENP018154 1G6_H1.57_L1_IgG1_PVA_/S267K Heavy Chain
EVQLVESGGGLVKPGGSLRLSCAASGFTFSNYWMNWVRQAPGKGLEWVGSIRLKSNNYATHYAEPVKGRFTISRDDSKSTVYLQMNSLKTEDTAVYYCTRYYGNYGGYFDVWGAGTLVTVSSASTKGPSVFPLAPSSKSTSGGTAALGCLVKDYFPEPVTVSWNSGALTSGVHTFPAVLQSSGLYSLSSVVTVPSSSLGTQTYICNVNHKPSNTKVDKKVEPKSCDKTHTCPPCPAPPVAGPSVFLFPPKPKDTLMISRTPEVTCVVVDVKHEDPEVKFNWYVDGVEVHNAKTKPREEQYNSTYRVVSVLTVLHQDWLNGKEYKCKVSNKALPAPIEKTISKAKGQPREPQVYTLPPSREEMTKNQVSLTCLVKGFYPSDIAVEWESNGQPENNYKTTPPVLDSDGSFFLYSKLTVDKSRWQQGNVFSCSVMHEALHNHYTQKSLSLSPGK

SEQ ID NO: 16962 - protein, 122 aa, synthetic construct; identical to SEQ ID NO: 11540
  REGION 1..122: note = Description of Artificial Sequence: Synthetic polypeptide
  REGION 1..122: note = VH of XENP018154

SEQ ID NO: 16963 - protein, 5 aa, synthetic construct
  REGION 1..5: note = Description of Artificial Sequence: Synthetic peptide
  REGION 1..5: note = XENP018154 vhCDR1
NYWMN

SEQ ID NO: 16964 - protein, 19 aa, synthetic construct
  REGION 1..19: note = Description of Artificial Sequence: Synthetic peptide
  REGION 1..19: note = XENP018154 vhCDR2
SIRLKSNNYATHYAEPVKG

SEQ ID NO: 16965 - protein, 11 aa, synthetic construct
  REGION 1..11: note = Description of Artificial Sequence: Synthetic peptide
  REGION 1..11: note = XENP018154 vhCDR3
YYGNYGGYFDV

SEQ ID NO: 16966 - protein, 214 aa, synthetic construct; identical to SEQ ID NO: 16226
  REGION 1..214: note = Description of Artificial Sequence: Synthetic polypeptide
  REGION 1..214: note = XENP018154 1G6_H1.57_L1_IgG1_PVA_/S267K Light Chain

SEQ ID NO: 16967 - protein, 107 aa, synthetic construct; identical to SEQ ID NO: 10923
  REGION 1..107: note = Description of Artificial Sequence: Synthetic polypeptide
  REGION 1..107: note = VL of XENP018154

SEQ ID NO: 16968 - protein, 11 aa, synthetic construct
  REGION 1..11: note = Description of Artificial Sequence: Synthetic peptide
  REGION 1..11: note = XENP018154 vlCDR1
RASQSVSNDVA

SEQ ID NO: 16969 - protein, 7 aa, synthetic construct
  REGION 1..7: note = Description of Artificial Sequence: Synthetic peptide
  REGION 1..7: note = XENP018154 vlCDR2
YASHRYT

SEQ ID NO: 16970 - protein, 9 aa, synthetic construct
  REGION 1..9: note = Description of Artificial Sequence: Synthetic peptide
  REGION 1..9: note = XENP018154 vlCDR3
QQDYSSPRT

SEQ ID NO: 16971 - protein, 451 aa, synthetic construct
  REGION 1..451: note = Description of Artificial Sequence: Synthetic polypeptide
  REGION 1..451: note = XENP018155 1G6_H1.58_L1_IgG1_PVA_/S267K Heavy Chain
EVQLVESGGGLVKPGGSLRLSCAASGFTFSNYWMNWVRQAPGKGLEWVGHIRLKSNNYATHYAEPVKGRFTISRDDSKSTVYLQMNSLKTEDTAVYYCTRYYGNYGGYFDVWGAGTLVTVSSASTKGPSVFPLAPSSKSTSGGTAALGCLVKDYFPEPVTVSWNSGALTSGVHTFPAVLQSSGLYSLSSVVTVPSSSLGTQTYICNVNHKPSNTKVDKKVEPKSCDKTHTCPPCPAPPVAGPSVFLFPPKPKDTLMISRTPEVTCVVVDVKHEDPEVKFNWYVDGVEVHNAKTKPREEQYNSTYRVVSVLTVLHQDWLNGKEYKCKVSNKALPAPIEKTISKAKGQPREPQVYTLPPSREEMTKNQVSLTCLVKGFYPSDIAVEWESNGQPENNYKTTPPVLDSDGSFFLYSKLTVDKSRWQQGNVFSCSVMHEALHNHYTQKSLSLSPGK

SEQ ID NO: 16972 - protein, 122 aa, synthetic construct; identical to SEQ ID NO: 11549
  REGION 1..122: note = Description of Artificial Sequence: Synthetic polypeptide
  REGION 1..122: note = VH of XENP018155

SEQ ID NO: 16973 - protein, 5 aa, synthetic construct
  REGION 1..5: note = Description of Artificial Sequence: Synthetic peptide
  REGION 1..5: note = XENP018155 vhCDR1
NYWMN

SEQ ID NO: 16974 - protein, 19 aa, synthetic construct
  REGION 1..19: note = Description of Artificial Sequence: Synthetic peptide
  REGION 1..19: note = XENP018155 vhCDR2
HIRLKSNNYATHYAEPVKG

SEQ ID NO: 16975 - protein, 11 aa, synthetic construct
  REGION 1..11: note = Description of Artificial Sequence: Synthetic peptide
  REGION 1..11: note = XENP018155 vhCDR3
YYGNYGGYFDV

SEQ ID NO: 16976 - protein, 214 aa, synthetic construct; identical to SEQ ID NO: 16226
  REGION 1..214: note = Description of Artificial Sequence: Synthetic polypeptide
  REGION 1..214: note = XENP018155 1G6_H1.58_L1_IgG1_PVA_/S267K Light Chain

SEQ ID NO: 16977 - protein, 107 aa, synthetic construct; identical to SEQ ID NO: 10923
  REGION 1..107: note = Description of Artificial Sequence: Synthetic polypeptide
  REGION 1..107: note = VL of XENP018155

SEQ ID NO: 16978 - protein, 11 aa, synthetic construct
  REGION 1..11: note = Description of Artificial Sequence: Synthetic peptide
  REGION 1..11: note = XENP018155 vlCDR1
RASQSVSNDVA

SEQ ID NO: 16979 - protein, 7 aa, synthetic construct
  REGION 1..7: note = Description of Artificial Sequence: Synthetic peptide
  REGION 1..7: note = XENP018155 vlCDR2
YASHRYT

SEQ ID NO: 16980 - protein, 9 aa, synthetic construct
  REGION 1..9: note = Description of Artificial Sequence: Synthetic peptide
  REGION 1..9: note = XENP018155 vlCDR3
QQDYSSPRT

SEQ ID NO: 16981 - protein, 451 aa, synthetic construct
  REGION 1..451: note = Description of Artificial Sequence: Synthetic polypeptide
  REGION 1..451: note = XENP018156 1G6_H1.59_L1_IgG1_PVA_/S267K Heavy Chain
EVQLVESGGGLVKPGGSLRLSCAASGFTFSNYWMNWVRQAPGKGLEWVGAIRLKSNNYATHYAEPVKGRFTISRDDSKSTVYLQMNSLKTEDTAVYYCTRYYGNYGGYFDVWGAGTLVTVSSASTKGPSVFPLAPSSKSTSGGTAALGCLVKDYFPEPVTVSWNSGALTSGVHTFPAVLQSSGLYSLSSVVTVPSSSLGTQTYICNVNHKPSNTKVDKKVEPKSCDKTHTCPPCPAPPVAGPSVFLFPPKPKDTLMISRTPEVTCVVVDVKHEDPEVKFNWYVDGVEVHNAKTKPREEQYNSTYRVVSVLTVLHQDWLNGKEYKCKVSNKALPAPIEKTISKAKGQPREPQVYTLPPSREEMTKNQVSLTCLVKGFYPSDIAVEWESNGQPENNYKTTPPVLDSDGSFFLYSKLTVDKSRWQQGNVFSCSVMHEALHNHYTQKSLSLSPGK

SEQ ID NO: 16982 - protein, 122 aa, synthetic construct; identical to SEQ ID NO: 11558
  REGION 1..122: note = Description of Artificial Sequence: Synthetic polypeptide
  REGION 1..122: note = VH of XENP018156

SEQ ID NO: 16983 - protein, 5 aa, synthetic construct
  REGION 1..5: note = Description of Artificial Sequence: Synthetic peptide
  REGION 1..5: note = XENP018156 vhCDR1
NYWMN

SEQ ID NO: 16984 - protein, 19 aa, synthetic construct
  REGION 1..19: note = Description of Artificial Sequence: Synthetic peptide
  REGION 1..19: note = XENP018156 vhCDR2
AIRLKSNNYATHYAEPVKG

SEQ ID NO: 16985 - protein, 11 aa, synthetic construct
  REGION 1..11: note = Description of Artificial Sequence: Synthetic peptide
  REGION 1..11: note = XENP018156 vhCDR3
YYGNYGGYFDV

SEQ ID NO: 16986 - protein, 214 aa, synthetic construct; identical to SEQ ID NO: 16226
  REGION 1..214: note = Description of Artificial Sequence: Synthetic polypeptide
  REGION 1..214: note = XENP018156 1G6_H1.59_L1_IgG1_PVA_/S267K Light Chain

SEQ ID NO: 16987 - protein, 107 aa, synthetic construct; identical to SEQ ID NO: 10923
  REGION 1..107: note = Description of Artificial Sequence: Synthetic polypeptide
  REGION 1..107: note = VL of XENP018156

SEQ ID NO: 16988 - protein, 11 aa, synthetic construct
  REGION 1..11: note = Description of Artificial Sequence: Synthetic peptide
  REGION 1..11: note = XENP018156 vlCDR1
RASQSVSNDVA

SEQ ID NO: 16989 - protein, 7 aa, synthetic construct
  REGION 1..7: note = Description of Artificial Sequence: Synthetic peptide
  REGION 1..7: note = XENP018156 vlCDR2
YASHRYT

SEQ ID NO: 16990 - protein, 9 aa, synthetic construct
  REGION 1..9: note = Description of Artificial Sequence: Synthetic peptide
  REGION 1..9: note = XENP018156 vlCDR3
QQDYSSPRT

SEQ ID NO: 16991 - protein, 451 aa, synthetic construct
  REGION 1..451: note = Description of Artificial Sequence: Synthetic polypeptide
  REGION 1..451: note = XENP018157 1G6_H1.60_L1_IgG1_PVA_/S267K Heavy Chain
EVQLVESGGGLVKPGGSLRLSCAASGFTFSNYWMNWVRQAPGKGLEWVGGIRLKSNNYATHYAEPVKGRFTISRDDSKSTVYLQMNSLKTEDTAVYYCTRYYGNYGGYFDVWGAGTLVTVSSASTKGPSVFPLAPSSKSTSGGTAALGCLVKDYFPEPVTVSWNSGALTSGVHTFPAVLQSSGLYSLSSVVTVPSSSLGTQTYICNVNHKPSNTKVDKKVEPKSCDKTHTCPPCPAPPVAGPSVFLFPPKPKDTLMISRTPEVTCVVVDVKHEDPEVKFNWYVDGVEVHNAKTKPREEQYNSTYRVVSVLTVLHQDWLNGKEYKCKVSNKALPAPIEKTISKAKGQPREPQVYTLPPSREEMTKNQVSLTCLVKGFYPSDIAVEWESNGQPENNYKTTPPVLDSDGSFFLYSKLTVDKSRWQQGNVFSCSVMHEALHNHYTQKSLSLSPGK

SEQ ID NO: 16992 - protein, 122 aa, synthetic construct; identical to SEQ ID NO: 11567
  REGION 1..122: note = Description of Artificial Sequence: Synthetic polypeptide
  REGION 1..122: note = VH of XENP018157

SEQ ID NO: 16993 - protein, 5 aa, synthetic construct
  REGION 1..5: note = Description of Artificial Sequence: Synthetic peptide
  REGION 1..5: note = XENP018157 vhCDR1
NYWMN

SEQ ID NO: 16994 - protein, 19 aa, synthetic construct
  REGION 1..19: note = Description of Artificial Sequence: Synthetic peptide
  REGION 1..19: note = XENP018157 vhCDR2
GIRLKSNNYATHYAEPVKG

SEQ ID NO: 16995 - protein, 11 aa, synthetic construct
  REGION 1..11: note = Description of Artificial Sequence: Synthetic peptide
  REGION 1..11: note = XENP018157 vhCDR3
YYGNYGGYFDV

SEQ ID NO: 16996 - protein, 214 aa, synthetic construct; identical to SEQ ID NO: 16226
  REGION 1..214: note = Description of Artificial Sequence: Synthetic polypeptide
  REGION 1..214: note = XENP018157 1G6_H1.60_L1_IgG1_PVA_/S267K Light Chain

SEQ ID NO: 16997 - protein, 107 aa, synthetic construct; identical to SEQ ID NO: 10923
  REGION 1..107: note = Description of Artificial Sequence: Synthetic polypeptide
  REGION 1..107: note = VL of XENP018157

SEQ ID NO: 16998 - protein, 11 aa, synthetic construct
  REGION 1..11: note = Description of Artificial Sequence: Synthetic peptide
  REGION 1..11: note = XENP018157 vlCDR1
RASQSVSNDVA

SEQ ID NO: 16999 - protein, 7 aa, synthetic construct
  REGION 1..7: note = Description of Artificial Sequence: Synthetic peptide
  REGION 1..7: note = XENP018157 vlCDR2
YASHRYT

SEQ ID NO: 17000 - protein, 9 aa, synthetic construct
  REGION 1..9: note = Description of Artificial Sequence: Synthetic peptide
  REGION 1..9: note = XENP018157 vlCDR3
QQDYSSPRT

SEQ ID NO: 17001 - protein, 451 aa, synthetic construct
  REGION 1..451: note = Description of Artificial Sequence: Synthetic polypeptide
  REGION 1..451: note = XENP018158 1G6_H1.61_L1_IgG1_PVA_/S267K Heavy Chain
EVQLVESGGGLVKPGGSLRLSCAASGFTFSNYWMNWVRQAPGKGLEWVGYIRLKSNNYATHYAEPVKGRFTISRDDSKSTVYLQMNSLKTEDTAVYYCTRYYGNYGGYFDVWGAGTLVTVSSASTKGPSVFPLAPSSKSTSGGTAALGCLVKDYFPEPVTVSWNSGALTSGVHTFPAVLQSSGLYSLSSVVTVPSSSLGTQTYICNVNHKPSNTKVDKKVEPKSCDKTHTCPPCPAPPVAGPSVFLFPPKPKDTLMISRTPEVTCVVVDVKHEDPEVKFNWYVDGVEVHNAKTKPREEQYNSTYRVVSVLTVLHQDWLNGKEYKCKVSNKALPAPIEKTISKAKGQPREPQVYTLPPSREEMTKNQVSLTCLVKGFYPSDIAVEWESNGQPENNYKTTPPVLDSDGSFFLYSKLTVDKSRWQQGNVFSCSVMHEALHNHYTQKSLSLSPGK

SEQ ID NO: 17002 - protein, 122 aa, synthetic construct; identical to SEQ ID NO: 11576
  REGION 1..122: note = Description of Artificial Sequence: Synthetic polypeptide
  REGION 1..122: note = VH of XENP018158

SEQ ID NO: 17003 - protein, 5 aa, synthetic construct
  REGION 1..5: note = Description of Artificial Sequence: Synthetic peptide
  REGION 1..5: note = XENP018158 vhCDR1
NYWMN

SEQ ID NO: 17004 - protein, 19 aa, synthetic construct
  REGION 1..19: note = Description of Artificial Sequence: Synthetic peptide
  REGION 1..19: note = XENP018158 vhCDR2
YIRLKSNNYATHYAEPVKG

SEQ ID NO: 17005 - protein, 11 aa, synthetic construct
  REGION 1..11: note = Description of Artificial Sequence: Synthetic peptide
  REGION 1..11: note = XENP018158 vhCDR3
YYGNYGGYFDV

SEQ ID NO: 17006 - protein, 214 aa, synthetic construct; identical to SEQ ID NO: 16226
  REGION 1..214: note = Description of Artificial Sequence: Synthetic polypeptide
  REGION 1..214: note = XENP018158 1G6_H1.61_L1_IgG1_PVA_/S267K Light Chain

SEQ ID NO: 17007 - protein, 107 aa, synthetic construct; identical to SEQ ID NO: 10923
  REGION 1..107: note = Description of Artificial Sequence: Synthetic polypeptide
  REGION 1..107: note = VL of XENP018158

SEQ ID NO: 17008 - protein, 11 aa, synthetic construct
  REGION 1..11: note = Description of Artificial Sequence: Synthetic peptide
  REGION 1..11: note = XENP018158 vlCDR1
RASQSVSNDVA

SEQ ID NO: 17009 - protein, 7 aa, synthetic construct
  REGION 1..7: note = Description of Artificial Sequence: Synthetic peptide
  REGION 1..7: note = XENP018158 vlCDR2
YASHRYT

SEQ ID NO: 17010 - protein, 9 aa, synthetic construct
  REGION 1..9: note = Description of Artificial Sequence: Synthetic peptide
  REGION 1..9: note = XENP018158 vlCDR3
QQDYSSPRT

SEQ ID NO: 17011 - protein, 451 aa, synthetic construct
  REGION 1..451: note = Description of Artificial Sequence: Synthetic polypeptide
  REGION 1..451: note = XENP018159 1G6_H1.62_L1_IgG1_PVA_/S267K Heavy Chain
EVQLVESGGGLVKPGGSLRLSCAASGFTFSNYWMNWVRQAPGKGLEWVGIIRLKSNNYATHYAEPVKGRFTISRDDSKSTVYLQMNSLKTEDTAVYYCTRYYGNYGGYFDVWGAGTLVTVSSASTKGPSVFPLAPSSKSTSGGTAALGCLVKDYFPEPVTVSWNSGALTSGVHTFPAVLQSSGLYSLSSVVTVPSSSLGTQTYICNVNHKPSNTKVDKKVEPKSCDKTHTCPPCPAPPVAGPSVFLFPPKPKDTLMISRTPEVTCVVVDVKHEDPEVKFNWYVDGVEVHNAKTKPREEQYNSTYRVVSVLTVLHQDWLNGKEYKCKVSNKALPAPIEKTISKAKGQPREPQVYTLPPSREEMTKNQVSLTCLVKGFYPSDIAVEWESNGQPENNYKTTPPVLDSDGSFFLYSKLTVDKSRWQQGNVFSCSVMHEALHNHYTQKSLSLSPGK

SEQ ID NO: 17012 - protein, 122 aa, synthetic construct; identical to SEQ ID NO: 11585
  REGION 1..122: note = Description of Artificial Sequence: Synthetic polypeptide
  REGION 1..122: note = VH of XENP018159

SEQ ID NO: 17013 - protein, 5 aa, synthetic construct
  REGION 1..5: note = Description of Artificial Sequence: Synthetic peptide
  REGION 1..5: note = XENP018159 vhCDR1
NYWMN

SEQ ID NO: 17014 - protein, 19 aa, synthetic construct
  REGION 1..19: note = Description of Artificial Sequence: Synthetic peptide
  REGION 1..19: note = XENP018159 vhCDR2
IIRLKSNNYATHYAEPVKG

SEQ ID NO: 17015 - protein, 11 aa, synthetic construct
  REGION 1..11: note = Description of Artificial Sequence: Synthetic peptide
  REGION 1..11: note = XENP018159 vhCDR3
YYGNYGGYFDV

SEQ ID NO: 17016 - protein, 214 aa, synthetic construct; identical to SEQ ID NO: 16226
  REGION 1..214: note = Description of Artificial Sequence: Synthetic polypeptide
  REGION 1..214: note = XENP018159 1G6_H1.62_L1_IgG1_PVA_/S267K Light Chain

SEQ ID NO: 17017 - protein, 107 aa, synthetic construct; identical to SEQ ID NO: 10923
  REGION 1..107: note = Description of Artificial Sequence: Synthetic polypeptide
  REGION 1..107: note = VL of XENP018159

SEQ ID NO: 17018 - protein, 11 aa, synthetic construct
  REGION 1..11: note = Description of Artificial Sequence: Synthetic peptide
  REGION 1..11: note = XENP018159 vlCDR1
RASQSVSNDVA

SEQ ID NO: 17019 - protein, 7 aa, synthetic construct
  REGION 1..7: note = Description of Artificial Sequence: Synthetic peptide
  REGION 1..7: note = XENP018159 vlCDR2
YASHRYT

SEQ ID NO: 17020 - protein, 9 aa, synthetic construct
  REGION 1..9: note = Description of Artificial Sequence: Synthetic peptide
  REGION 1..9: note = XENP018159 vlCDR3
QQDYSSPRT

SEQ ID NO: 17021 - protein, 451 aa, synthetic construct
  REGION 1..451: note = Description of Artificial Sequence: Synthetic polypeptide
  REGION 1..451: note = XENP018160 1G6_H1.63_L1_IgG1_PVA_/S267K Heavy Chain
EVQLVESGGGLVKPGGSLRLSCAASGFTFSNYWMNWVRQAPGKGLEWVGEVRLKSNNYATHYAEPVKGRFTISRDDSKSTVYLQMNSLKTEDTAVYYCTRYYGNYGGYFDVWGAGTLVTVSSASTKGPSVFPLAPSSKSTSGGTAALGCLVKDYFPEPVTVSWNSGALTSGVHTFPAVLQSSGLYSLSSVVTVPSSSLGTQTYICNVNHKPSNTKVDKKVEPKSCDKTHTCPPCPAPPVAGPSVFLFPPKPKDTLMISRTPEVTCVVVDVKHEDPEVKFNWYVDGVEVHNAKTKPREEQYNSTYRVVSVLTVLHQDWLNGKEYKCKVSNKALPAPIEKTISKAKGQPREPQVYTLPPSREEMTKNQVSLTCLVKGFYPSDIAVEWESNGQPENNYKTTPPVLDSDGSFFLYSKLTVDKSRWQQGNVFSCSVMHEALHNHYTQKSLSLSPGK

SEQ ID NO: 17022 - protein, 122 aa, synthetic construct; identical to SEQ ID NO: 11594
  REGION 1..122: note = Description of Artificial Sequence: Synthetic polypeptide
  REGION 1..122: note = VH of XENP018160

SEQ ID NO: 17023 - protein, 5 aa, synthetic construct
  REGION 1..5: note = Description of Artificial Sequence: Synthetic peptide
  REGION 1..5: note = XENP018160 vhCDR1
NYWMN

SEQ ID NO: 17024 - protein, 19 aa, synthetic construct
  REGION 1..19: note = Description of Artificial Sequence: Synthetic peptide
  REGION 1..19: note = XENP018160 vhCDR2
EVRLKSNNYATHYAEPVKG

SEQ ID NO: 17025 - protein, 11 aa, synthetic construct
  REGION 1..11: note = Description of Artificial Sequence: Synthetic peptide
  REGION 1..11: note = XENP018160 vhCDR3
YYGNYGGYFDV

SEQ ID NO: 17026 - protein, 214 aa, synthetic construct; identical to SEQ ID NO: 16226
  REGION 1..214: note = Description of Artificial Sequence: Synthetic polypeptide
  REGION 1..214: note = XENP018160 1G6_H1.63_L1_IgG1_PVA_/S267K Light Chain

SEQ ID NO: 17027 - protein, 107 aa, synthetic construct; identical to SEQ ID NO: 10923
  REGION 1..107: note = Description of Artificial Sequence: Synthetic polypeptide
  REGION 1..107: note = VL of XENP018160

SEQ ID NO: 17028 - protein, 11 aa, synthetic construct
  REGION 1..11: note = Description of Artificial Sequence: Synthetic peptide
  REGION 1..11: note = XENP018160 vlCDR1
RASQSVSNDVA

SEQ ID NO: 17029 - protein, 7 aa, synthetic construct
  REGION 1..7: note = Description of Artificial Sequence: Synthetic peptide
  REGION 1..7: note = XENP018160 vlCDR2
YASHRYT

SEQ ID NO: 17030 - protein, 9 aa, synthetic construct
  REGION 1..9: note = Description of Artificial Sequence: Synthetic peptide
  REGION 1..9: note = XENP018160 vlCDR3
QQDYSSPRT

SEQ ID NO: 17031 - protein, 451 aa, synthetic construct
  REGION 1..451: note = Description of Artificial Sequence: Synthetic polypeptide
  REGION 1..451: note = XENP018161 1G6_H1.64_L1_IgG1_PVA_/S267K Heavy Chain
EVQLVESGGGLVKPGGSLRLSCAASGFTFSNYWMNWVRQAPGKGLEWVGEITLKSNNYATHYAEPVKGRFTISRDDSKSTVYLQMNSLKTEDTAVYYCTRYYGNYGGYFDVWGAGTLVTVSSASTKGPSVFPLAPSSKSTSGGTAALGCLVKDYFPEPVTVSWNSGALTSGVHTFPAVLQSSGLYSLSSVVTVPSSSLGTQTYICNVNHKPSNTKVDKKVEPKSCDKTHTCPPCPAPPVAGPSVFLFPPKPKDTLMISRTPEVTCVVVDVKHEDPEVKFNWYVDGVEVHNAKTKPREEQYNSTYRVVSVLTVLHQDWLNGKEYKCKVSNKALPAPIEKTISKAKGQPREPQVYTLPPSREEMTKNQVSLTCLVKGFYPSDIAVEWESNGQPENNYKTTPPVLDSDGSFFLYSKLTVDKSRWQQGNVFSCSVMHEALHNHYTQKSLSLSPGK

SEQ ID NO: 17032 - protein, 122 aa, synthetic construct; identical to SEQ ID NO: 11603
  REGION 1..122: note = Description of Artificial Sequence: Synthetic polypeptide
  REGION 1..122: note = VH of XENP018161

SEQ ID NO: 17033 - protein, 5 aa, synthetic construct
  REGION 1..5: note = Description of Artificial Sequence: Synthetic peptide
  REGION 1..5: note = XENP018161 vhCDR1
NYWMN

SEQ ID NO: 17034 - protein, 19 aa, synthetic construct
  REGION 1..19: note = Description of Artificial Sequence: Synthetic peptide
  REGION 1..19: note = XENP018161 vhCDR2
EITLKSNNYATHYAEPVKG

SEQ ID NO: 17035 - protein, 11 aa, synthetic construct
  REGION 1..11: note = Description of Artificial Sequence: Synthetic peptide
  REGION 1..11: note = XENP018161 vhCDR3
YYGNYGGYFDV

SEQ ID NO: 17036 - protein, 214 aa, synthetic construct; identical to SEQ ID NO: 16226
  REGION 1..214: note = Description of Artificial Sequence: Synthetic polypeptide
  REGION 1..214: note = XENP018161 1G6_H1.64_L1_IgG1_PVA_/S267K Light Chain

SEQ ID NO: 17037 - protein, 107 aa, synthetic construct; identical to SEQ ID NO: 10923
  REGION 1..107: note = Description of Artificial Sequence: Synthetic polypeptide
  REGION 1..107: note = VL of XENP018161

SEQ ID NO: 17038 - protein, 11 aa, synthetic construct
  REGION 1..11: note = Description of Artificial Sequence: Synthetic peptide
  REGION 1..11: note = XENP018161 vlCDR1
RASQSVSNDVA

SEQ ID NO: 17039 - protein, 7 aa, synthetic construct
  REGION 1..7: note = Description of Artificial Sequence: Synthetic peptide
  REGION 1..7: note = XENP018161 vlCDR2
YASHRYT

SEQ ID NO: 17040 - protein, 9 aa, synthetic construct
  REGION 1..9: note = Description of Artificial Sequence: Synthetic peptide
  REGION 1..9: note = XENP018161 vlCDR3
QQDYSSPRT

SEQ ID NO: 17041 - protein, 451 aa, synthetic construct
  REGION 1..451: note = Description of Artificial Sequence: Synthetic polypeptide
  REGION 1..451: note = XENP018162 1G6_H1.65_L1_IgG1_PVA_/S267K Heavy Chain
EVQLVESGGGLVKPGGSLRLSCAASGFTFSNYWMNWVRQAPGKGLEWVGEIKLKSNNYATHYAEPVKGRFTISRDDSKSTVYLQMNSLKTEDTAVYYCTRYYGNYGGYFDVWGAGTLVTVSSASTKGPSVFPLAPSSKSTSGGTAALGCLVKDYFPEPVTVSWNSGALTSGVHTFPAVLQSSGLYSLSSVVTVPSSSLGTQTYICNVNHKPSNTKVDKKVEPKSCDKTHTCPPCPAPPVAGPSVFLFPPKPKDTLMISRTPEVTCVVVDVKHEDPEVKFNWYVDGVEVHNAKTKPREEQYNSTYRVVSVLTVLHQDWLNGKEYKCKVSNKALPAPIEKTISKAKGQPREPQVYTLPPSREEMTKNQVSLTCLVKGFYPSDIAVEWESNGQPENNYKTTPPVLDSDGSFFLYSKLTVDKSRWQQGNVFSCSVMHEALHNHYTQKSLSLSPGK

SEQ ID NO: 17042 - protein, 122 aa, synthetic construct; identical to SEQ ID NO: 11612
  REGION 1..122: note = Description of Artificial Sequence: Synthetic polypeptide
  REGION 1..122: note = VH of XENP018162

SEQ ID NO: 17043 - protein, 5 aa, synthetic construct
  REGION 1..5: note = Description of Artificial Sequence: Synthetic peptide
  REGION 1..5: note = XENP018162 vhCDR1
NYWMN

SEQ ID NO: 17044 - protein, 19 aa, synthetic construct
  REGION 1..19: note = Description of Artificial Sequence: Synthetic peptide
  REGION 1..19: note = XENP018162 vhCDR2
EIKLKSNNYATHYAEPVKG

SEQ ID NO: 17045 - protein, 11 aa, synthetic construct
  REGION 1..11: note = Description of Artificial Sequence: Synthetic peptide
  REGION 1..11: note = XENP018162 vhCDR3
YYGNYGGYFDV

SEQ ID NO: 17046 - protein, 214 aa, synthetic construct; identical to SEQ ID NO: 16226
  REGION 1..214: note = Description of Artificial Sequence: Synthetic polypeptide
  REGION 1..214: note = XENP018162 1G6_H1.65_L1_IgG1_PVA_/S267K Light Chain

SEQ ID NO: 17047 - protein, 107 aa, synthetic construct; identical to SEQ ID NO: 10923
  REGION 1..107: note = Description of Artificial Sequence: Synthetic polypeptide
  REGION 1..107: note = VL of XENP018162

SEQ ID NO: 17048 - protein, 11 aa, synthetic construct
  REGION 1..11: note = Description of Artificial Sequence: Synthetic peptide
  REGION 1..11: note = XENP018162 vlCDR1
RASQSVSNDVA

SEQ ID NO: 17049 - protein, 7 aa, synthetic construct
  REGION 1..7: note = Description of Artificial Sequence: Synthetic peptide
  REGION 1..7: note = XENP018162 vlCDR2
YASHRYT

SEQ ID NO: 17050 - protein, 9 aa, synthetic construct
  REGION 1..9: note = Description of Artificial Sequence: Synthetic peptide
  REGION 1..9: note = XENP018162 vlCDR3
QQDYSSPRT

SEQ ID NO: 17051 - protein, 451 aa, synthetic construct
  REGION 1..451: note = Description of Artificial Sequence: Synthetic polypeptide
  REGION 1..451: note = XENP018163 1G6_H1.66_L1_IgG1_PVA_/S267K Heavy Chain
EVQLVESGGGLVKPGGSLRLSCAASGFTFSNYWMNWVRQAPGKGLEWVGEIELKSNNYATHYAEPVKGRFTISRDDSKSTVYLQMNSLKTEDTAVYYCTRYYGNYGGYFDVWGAGTLVTVSSASTKGPSVFPLAPSSKSTSGGTAALGCLVKDYFPEPVTVSWNSGALTSGVHTFPAVLQSSGLYSLSSVVTVPSSSLGTQTYICNVNHKPSNTKVDKKVEPKSCDKTHTCPPCPAPPVAGPSVFLFPPKPKDTLMISRTPEVTCVVVDVKHEDPEVKFNWYVDGVEVHNAKTKPREEQYNSTYRVVSVLTVLHQDWLNGKEYKCKVSNKALPAPIEKTISKAKGQPREPQVYTLPPSREEMTKNQVSLTCLVKGFYPSDIAVEWESNGQPENNYKTTPPVLDSDGSFFLYSKLTVDKSRWQQGNVFSCSVMHEALHNHYTQKSLSLSPGK

SEQ ID NO: 17052 - protein, 122 aa, synthetic construct; identical to SEQ ID NO: 11621
  REGION 1..122: note = Description of Artificial Sequence: Synthetic polypeptide
  REGION 1..122: note = VH of XENP018163

SEQ ID NO: 17053 - protein, 5 aa, synthetic construct
  REGION 1..5: note = Description of Artificial Sequence: Synthetic peptide
  REGION 1..5: note = XENP018163 vhCDR1
NYWMN

SEQ ID NO: 17054 - protein, 19 aa, synthetic construct
  REGION 1..19: note = Description of Artificial Sequence: Synthetic peptide
  REGION 1..19: note = XENP018163 vhCDR2
EIELKSNNYATHYAEPVKG

SEQ ID NO: 17055 - protein, 11 aa, synthetic construct
  REGION 1..11: note = Description of Artificial Sequence: Synthetic peptide
  REGION 1..11: note = XENP018163 vhCDR3
YYGNYGGYFDV

SEQ ID NO: 17056 - protein, 214 aa, synthetic construct; identical to SEQ ID NO: 16226
  REGION 1..214: note = Description of Artificial Sequence: Synthetic polypeptide
  REGION 1..214: note = XENP018163 1G6_H1.66_L1_IgG1_PVA_/S267K Light Chain

SEQ ID NO: 17057 - protein, 107 aa, synthetic construct; identical to SEQ ID NO: 10923
  REGION 1..107: note = Description of Artificial Sequence: Synthetic polypeptide
  REGION 1..107: note = VL of XENP018163

SEQ ID NO: 17058 - protein, 11 aa, synthetic construct
  REGION 1..11: note = Description of Artificial Sequence: Synthetic peptide
  REGION 1..11: note = XENP018163 vlCDR1
RASQSVSNDVA

SEQ ID NO: 17059 - protein, 7 aa, synthetic construct
  REGION 1..7: note = Description of Artificial Sequence: Synthetic peptide
  REGION 1..7: note = XENP018163 vlCDR2
YASHRYT

SEQ ID NO: 17060 - protein, 9 aa, synthetic construct
  REGION 1..9: note = Description of Artificial Sequence: Synthetic peptide
  REGION 1..9: note = XENP018163 vlCDR3
QQDYSSPRT

SEQ ID NO: 17061 - protein, 451 aa, synthetic construct
  REGION 1..451: note = Description of Artificial Sequence: Synthetic polypeptide
  REGION 1..451: note = XENP018164 1G6_H1.67_L1_IgG1_PVA_/S267K Heavy Chain
EVQLVESGGGLVKPGGSLRLSCAASGFTFSNYWMNWVRQAPGKGLEWVGEIDLKSNNYATHYAEPVKGRFTISRDDSKSTVYLQMNSLKTEDTAVYYCTRYYGNYGGYFDVWGAGTLVTVSSASTKGPSVFPLAPSSKSTSGGTAALGCLVKDYFPEPVTVSWNSGALTSGVHTFPAVLQSSGLYSLSSVVTVPSSSLGTQTYICNVNHKPSNTKVDKKVEPKSCDKTHTCPPCPAPPVAGPSVFLFPPKPKDTLMISRTPEVTCVVVDVKHEDPEVKFNWYVDGVEVHNAKTKPREEQYNSTYRVVSVLTVLHQDWLNGKEYKCKVSNKALPAPIEKTISKAKGQPREPQVYTLPPSREEMTKNQVSLTCLVKGFYPSDIAVEWESNGQPENNYKTTPPVLDSDGSFFLYSKLTVDKSRWQQGNVFSCSVMHEALHNHYTQKSLSLSPGK

SEQ ID NO: 17062 - protein, 122 aa, synthetic construct; identical to SEQ ID NO: 11630
  REGION 1..122: note = Description of Artificial Sequence: Synthetic polypeptide
  REGION 1..122: note = VH of XENP018164

SEQ ID NO: 17063 - protein, 5 aa, synthetic construct
  REGION 1..5: note = Description of Artificial Sequence: Synthetic peptide
  REGION 1..5: note = XENP018164 vhCDR1
NYWMN

SEQ ID NO: 17064 - protein, 19 aa, synthetic construct
  REGION 1..19: note = Description of Artificial Sequence: Synthetic peptide
  REGION 1..19: note = XENP018164 vhCDR2
EIDLKSNNYATHYAEPVKG

SEQ ID NO: 17065 - protein, 11 aa, synthetic construct
  REGION 1..11: note = Description of Artificial Sequence: Synthetic peptide
  REGION 1..11: note = XENP018164 vhCDR3
YYGNYGGYFDV

SEQ ID NO: 17066 - protein, 214 aa, synthetic construct; identical to SEQ ID NO: 16226
  REGION 1..214: note = Description of Artificial Sequence: Synthetic polypeptide
  REGION 1..214: note = XENP018164 1G6_H1.67_L1_IgG1_PVA_/S267K Light Chain

SEQ ID NO: 17067 - protein, 107 aa, synthetic construct; identical to SEQ ID NO: 10923
  REGION 1..107: note = Description of Artificial Sequence: Synthetic polypeptide
  REGION 1..107: note = VL of XENP018164

SEQ ID NO: 17068 - protein, 11 aa, synthetic construct
  REGION 1..11: note = Description of Artificial Sequence: Synthetic peptide
  REGION 1..11: note = XENP018164 vlCDR1
RASQSVSNDVA

SEQ ID NO: 17069 - protein, 7 aa, synthetic construct
  REGION 1..7: note = Description of Artificial Sequence: Synthetic peptide
  REGION 1..7: note = XENP018164 vlCDR2
YASHRYT

SEQ ID NO: 17070 - protein, 9 aa, synthetic construct
  REGION 1..9: note = Description of Artificial Sequence: Synthetic peptide
  REGION 1..9: note = XENP018164 vlCDR3
QQDYSSPRT

SEQ ID NO: 17071 - protein, 451 aa, synthetic construct
  REGION 1..451: note = Description of Artificial Sequence: Synthetic polypeptide
  REGION 1..451: note = XENP018165 1G6_H1.68_L1_IgG1_PVA_/S267K Heavy Chain
EVQLVESGGGLVKPGGSLRLSCAASGFTFSNYWMNWVRQAPGKGLEWVGEIHLKSNNYATHYAEPVKGRFTISRDDSKSTVYLQMNSLKTEDTAVYYCTRYYGNYGGYFDVWGAGTLVTVSSASTKGPSVFPLAPSSKSTSGGTAALGCLVKDYFPEPVTVSWNSGALTSGVHTFPAVLQSSGLYSLSSVVTVPSSSLGTQTYICNVNHKPSNTKVDKKVEPKSCDKTHTCPPCPAPPVAGPSVFLFPPKPKDTLMISRTPEVTCVVVDVKHEDPEVKFNWYVDGVEVHNAKTKPREEQYNSTYRVVSVLTVLHQDWLNGKEYKCKVSNKALPAPIEKTISKAKGQPREPQVYTLPPSREEMTKNQVSLTCLVKGFYPSDIAVEWESNGQPENNYKTTPPVLDSDGSFFLYSKLTVDKSRWQQGNVFSCSVMHEALHNHYTQKSLSLSPGK

SEQ ID NO: 17072 - protein, 122 aa, synthetic construct; identical to SEQ ID NO: 11639
  REGION 1..122: note = Description of Artificial Sequence: Synthetic polypeptide
  REGION 1..122: note = VH of XENP018165

SEQ ID NO: 17073 - protein, 5 aa, synthetic construct
  REGION 1..5: note = Description of Artificial Sequence: Synthetic peptide
  REGION 1..5: note = XENP018165 vhCDR1
NYWMN

SEQ ID NO: 17074 - protein, 19 aa, synthetic construct
  REGION 1..19: note = Description of Artificial Sequence: Synthetic peptide
  REGION 1..19: note = XENP018165 vhCDR2
EIHLKSNNYATHYAEPVKG

SEQ ID NO: 17075 - protein, 11 aa, synthetic construct
  REGION 1..11: note = Description of Artificial Sequence: Synthetic peptide
  REGION 1..11: note = XENP018165 vhCDR3
YYGNYGGYFDV

SEQ ID NO: 17076 - protein, 214 aa, synthetic construct; identical to SEQ ID NO: 16226
  REGION 1..214: note = Description of Artificial Sequence: Synthetic polypeptide
  REGION 1..214: note = XENP018165 1G6_H1.68_L1_IgG1_PVA_/S267K Light Chain

SEQ ID NO: 17077 - protein, 107 aa, synthetic construct; identical to SEQ ID NO: 10923
  REGION 1..107: note = Description of Artificial Sequence: Synthetic polypeptide
  REGION 1..107: note = VL of XENP018165

SEQ ID NO: 17078 - protein, 11 aa, synthetic construct
  REGION 1..11: note = Description of Artificial Sequence: Synthetic peptide
  REGION 1..11: note = XENP018165 vlCDR1
RASQSVSNDVA

SEQ ID NO: 17079 - protein, 7 aa, synthetic construct
  REGION 1..7: note = Description of Artificial Sequence: Synthetic peptide
  REGION 1..7: note = XENP018165 vlCDR2
YASHRYT

SEQ ID NO: 17080 - protein, 9 aa, synthetic construct
  REGION 1..9: note = Description of Artificial Sequence: Synthetic peptide
  REGION 1..9: note = XENP018165 vlCDR3
QQDYSSPRT

SEQ ID NO: 17081 - protein, 451 aa, synthetic construct
  REGION 1..451: note = Description of Artificial Sequence: Synthetic polypeptide
  REGION 1..451: note = XENP018166 1G6_H1.69_L1_IgG1_PVA_/S267K Heavy Chain
EVQLVESGGGLVKPGGSLRLSCAASGFTFSNYWMNWVRQAPGKGLEWVGEISLKSNNYATHYAEPVKGRFTISRDDSKSTVYLQMNSLKTEDTAVYYCTRYYGNYGGYFDVWGAGTLVTVSSASTKGPSVFPLAPSSKSTSGGTAALGCLVKDYFPEPVTVSWNSGALTSGVHTFPAVLQSSGLYSLSSVVTVPSSSLGTQTYICNVNHKPSNTKVDKKVEPKSCDKTHTCPPCPAPPVAGPSVFLFPPKPKDTLMISRTPEVTCVVVDVKHEDPEVKFNWYVDGVEVHNAKTKPREEQYNSTYRVVSVLTVLHQDWLNGKEYKCKVSNKALPAPIEKTISKAKGQPREPQVYTLPPSREEMTKNQVSLTCLVKGFYPSDIAVEWESNGQPENNYKTTPPVLDSDGSFFLYSKLTVDKSRWQQGNVFSCSVMHEALHNHYTQKSLSLSPGK

SEQ ID NO: 17082 - protein, 122 aa, synthetic construct; identical to SEQ ID NO: 11648
  REGION 1..122: note = Description of Artificial Sequence: Synthetic polypeptide
  REGION 1..122: note = VH of XENP018166

SEQ ID NO: 17083 - protein, 5 aa, synthetic construct
  REGION 1..5: note = Description of Artificial Sequence: Synthetic peptide
  REGION 1..5: note = XENP018166 vhCDR1
NYWMN

SEQ ID NO: 17084 - protein, 19 aa, synthetic construct
  REGION 1..19: note = Description of Artificial Sequence: Synthetic peptide
  REGION 1..19: note = XENP018166 vhCDR2
EISLKSNNYATHYAEPVKG

SEQ ID NO: 17085 - protein, 11 aa, synthetic construct
  REGION 1..11: note = Description of Artificial Sequence: Synthetic peptide
  REGION 1..11: note = XENP018166 vhCDR3
YYGNYGGYFDV

SEQ ID NO: 17086 - protein, 214 aa, synthetic construct; identical to SEQ ID NO: 16226
  REGION 1..214: note = Description of Artificial Sequence: Synthetic polypeptide
  REGION 1..214: note = XENP018166 1G6_H1.69_L1_IgG1_PVA_/S267K Light Chain

SEQ ID NO: 17087 - protein, 107 aa, synthetic construct; identical to SEQ ID NO: 10923
  REGION 1..107: note = Description of Artificial Sequence: Synthetic polypeptide
  REGION 1..107: note = VL of XENP018166

SEQ ID NO: 17088 - protein, 11 aa, synthetic construct
  REGION 1..11: note = Description of Artificial Sequence: Synthetic peptide
  REGION 1..11: note = XENP018166 vlCDR1
RASQSVSNDVA

SEQ ID NO: 17089 - protein, 7 aa, synthetic construct
  REGION 1..7: note = Description of Artificial Sequence: Synthetic peptide
  REGION 1..7: note = XENP018166 vlCDR2
YASHRYT

SEQ ID NO: 17090 - protein, 9 aa, synthetic construct
  REGION 1..9: note = Description of Artificial Sequence: Synthetic peptide
  REGION 1..9: note = XENP018166 vlCDR3
QQDYSSPRT

SEQ ID NO: 17091 - protein, 451 aa, synthetic construct
  REGION 1..451: note = Description of Artificial Sequence: Synthetic polypeptide
  REGION 1..451: note = XENP018167 1G6_H1.70_L1_IgG1_PVA_/S267K Heavy Chain
EVQLVESGGGLVKPGGSLRLSCAASGFTFSNYWMNWVRQAPGKGLEWVGEIGLKSNNYATHYAEPVKGRFTISRDDSKSTVYLQMNSLKTEDTAVYYCTRYYGNYGGYFDVWGAGTLVTVSSASTKGPSVFPLAPSSKSTSGGTAALGCLVKDYFPEPVTVSWNSGALTSGVHTFPAVLQSSGLYSLSSVVTVPSSSLGTQTYICNVNHKPSNTKVDKKVEPKSCDKTHTCPPCPAPPVAGPSVFLFPPKPKDTLMISRTPEVTCVVVDVKHEDPEVKFNWYVDGVEVHNAKTKPREEQYNSTYRVVSVLTVLHQDWLNGKEYKCKVSNKALPAPIEKTISKAKGQPREPQVYTLPPSREEMTKNQVSLTCLVKGFYPSDIAVEWESNGQPENNYKTTPPVLDSDGSFFLYSKLTVDKSRWQQGNVFSCSVMHEALHNHYTQKSLSLSPGK

SEQ ID NO: 17092 - protein, 122 aa, synthetic construct; identical to SEQ ID NO: 11657
  REGION 1..122: note = Description of Artificial Sequence: Synthetic polypeptide
  REGION 1..122: note = VH of XENP018167

SEQ ID NO: 17093 - protein, 5 aa, synthetic construct
  REGION 1..5: note = Description of Artificial Sequence: Synthetic peptide
  REGION 1..5: note = XENP018167 vhCDR1
NYWMN

SEQ ID NO: 17094 - protein, 19 aa, synthetic construct
  REGION 1..19: note = Description of Artificial Sequence: Synthetic peptide
  REGION 1..19: note = XENP018167 vhCDR2
EIGLKSNNYATHYAEPVKG

SEQ ID NO: 17095 - protein, 11 aa, synthetic construct
  REGION 1..11: note = Description of Artificial Sequence: Synthetic peptide
  REGION 1..11: note = XENP018167 vhCDR3
YYGNYGGYFDV

SEQ ID NO: 17096 - protein, 214 aa, synthetic construct; identical to SEQ ID NO: 16226
  REGION 1..214: note = Description of Artificial Sequence: Synthetic polypeptide
  REGION 1..214: note = XENP018167 1G6_H1.70_L1_IgG1_PVA_/S267K Light Chain

SEQ ID NO: 17097 - protein, 107 aa, synthetic construct; identical to SEQ ID NO: 10923
  REGION 1..107: note = Description of Artificial Sequence: Synthetic polypeptide
  REGION 1..107: note = VL of XENP018167

SEQ ID NO: 17098 - protein, 11 aa, synthetic construct
  REGION 1..11: note = Description of Artificial Sequence: Synthetic peptide
  REGION 1..11: note = XENP018167 vlCDR1
RASQSVSNDVA

SEQ ID NO: 17099 - protein, 7 aa, synthetic construct
  REGION 1..7: note = Description of Artificial Sequence: Synthetic peptide
  REGION 1..7: note = XENP018167 vlCDR2
YASHRYT

SEQ ID NO: 17100 - protein, 9 aa, synthetic construct
  REGION 1..9: note = Description of Artificial Sequence: Synthetic peptide
  REGION 1..9: note = XENP018167 vlCDR3
QQDYSSPRT

SEQ ID NO: 17101 - protein, 451 aa, synthetic construct
  REGION 1..451: note = Description of Artificial Sequence: Synthetic polypeptide
  REGION 1..451: note = XENP018168 1G6_H1.71_L1_IgG1_PVA_/S267K Heavy Chain
EVQLVESGGGLVKPGGSLRLSCAASGFTFSNYWMNWVRQAPGKGLEWVGEIYLKSNNYATHYAEPVKGRFTISRDDSKSTVYLQMNSLKTEDTAVYYCTRYYGNYGGYFDVWGAGTLVTVSSASTKGPSVFPLAPSSKSTSGGTAALGCLVKDYFPEPVTVSWNSGALTSGVHTFPAVLQSSGLYSLSSVVTVPSSSLGTQTYICNVNHKPSNTKVDKKVEPKSCDKTHTCPPCPAPPVAGPSVFLFPPKPKDTLMISRTPEVTCVVVDVKHEDPEVKFNWYVDGVEVHNAKTKPREEQYNSTYRVVSVLTVLHQDWLNGKEYKCKVSNKALPAPIEKTISKAKGQPREPQVYTLPPSREEMTKNQVSLTCLVKGFYPSDIAVEWESNGQPENNYKTTPPVLDSDGSFFLYSKLTVDKSRWQQGNVFSCSVMHEALHNHYTQKSLSLSPGK

SEQ ID NO: 17102 - protein, 122 aa, synthetic construct; identical to SEQ ID NO: 11666
  REGION 1..122: note = Description of Artificial Sequence: Synthetic polypeptide
  REGION 1..122: note = VH of XENP018168

SEQ ID NO: 17103 - protein, 5 aa, synthetic construct
  REGION 1..5: note = Description of Artificial Sequence: Synthetic peptide
  REGION 1..5: note = XENP018168 vhCDR1
NYWMN

SEQ ID NO: 17104 - protein, 19 aa, synthetic construct
  REGION 1..19: note = Description of Artificial Sequence: Synthetic peptide
  REGION 1..19: note = XENP018168 vhCDR2
EIYLKSNNYATHYAEPVKG

SEQ ID NO: 17105 - protein, 11 aa, synthetic construct
  REGION 1..11: note = Description of Artificial Sequence: Synthetic peptide
  REGION 1..11: note = XENP018168 vhCDR3
YYGNYGGYFDV

SEQ ID NO: 17106 - protein, 214 aa, synthetic construct; identical to SEQ ID NO: 16226
  REGION 1..214: note = Description of Artificial Sequence: Synthetic polypeptide
  REGION 1..214: note = XENP018168 1G6_H1.71_L1_IgG1_PVA_/S267K Light Chain

SEQ ID NO: 17107 - protein, 107 aa, synthetic construct; identical to SEQ ID NO: 10923
  REGION 1..107: note = Description of Artificial Sequence: Synthetic polypeptide
  REGION 1..107: note = VL of XENP018168

SEQ ID NO: 17108 - protein, 11 aa, synthetic construct
  REGION 1..11: note = Description of Artificial Sequence: Synthetic peptide
  REGION 1..11: note = XENP018168 vlCDR1
RASQSVSNDVA

SEQ ID NO: 17109 - protein, 7 aa, synthetic construct
  REGION 1..7: note = Description of Artificial Sequence: Synthetic peptide
  REGION 1..7: note = XENP018168 vlCDR2
YASHRYT

SEQ ID NO: 17110 - protein, 9 aa, synthetic construct
  REGION 1..9: note = Description of Artificial Sequence: Synthetic peptide
  REGION 1..9: note = XENP018168 vlCDR3
QQDYSSPRT

SEQ ID NO: 17111 - protein, 451 aa, synthetic construct
  REGION 1..451: note = Description of Artificial Sequence: Synthetic polypeptide
  REGION 1..451: note = XENP018169 1G6_H1.72_L1_IgG1_PVA_/S267K Heavy Chain
EVQLVESGGGLVKPGGSLRLSCAASGFTFSNYWMNWVRQAPGKGLEWVGEIILKSNNYATHYAEPVKGRFTISRDDSKSTVYLQMNSLKTEDTAVYYCTRYYGNYGGYFDVWGAGTLVTVSSASTKGPSVFPLAPSSKSTSGGTAALGCLVKDYFPEPVTVSWNSGALTSGVHTFPAVLQSSGLYSLSSVVTVPSSSLGTQTYICNVNHKPSNTKVDKKVEPKSCDKTHTCPPCPAPPVAGPSVFLFPPKPKDTLMISRTPEVTCVVVDVKHEDPEVKFNWYVDGVEVHNAKTKPREEQYNSTYRVVSVLTVLHQDWLNGKEYKCKVSNKALPAPIEKTISKAKGQPREPQVYTLPPSREEMTKNQVSLTCLVKGFYPSDIAVEWESNGQPENNYKTTPPVLDSDGSFFLYSKLTVDKSRWQQGNVFSCSVMHEALHNHYTQKSLSLSPGK

SEQ ID NO: 17112 - protein, 122 aa, synthetic construct; identical to SEQ ID NO: 11675
  REGION 1..122: note = Description of Artificial Sequence: Synthetic polypeptide
  REGION 1..122: note = VH of XENP018169

SEQ ID NO: 17113 - protein, 5 aa, synthetic construct
  REGION 1..5: note = Description of Artificial Sequence: Synthetic peptide
  REGION 1..5: note = XENP018169 vhCDR1
NYWMN

SEQ ID NO: 17114 - protein, 19 aa, synthetic construct
  REGION 1..19: note = Description of Artificial Sequence: Synthetic peptide
  REGION 1..19: note = XENP018169 vhCDR2
EIILKSNNYATHYAEPVKG

SEQ ID NO: 17115 - protein, 11 aa, synthetic construct
  REGION 1..11: note = Description of Artificial Sequence: Synthetic peptide
  REGION 1..11: note = XENP018169 vhCDR3
YYGNYGGYFDV

SEQ ID NO: 17116 - protein, 214 aa, synthetic construct; identical to SEQ ID NO: 16226
  REGION 1..214: note = Description of Artificial Sequence: Synthetic polypeptide
  REGION 1..214: note = XENP018169 1G6_H1.72_L1_IgG1_PVA_/S267K Light Chain

SEQ ID NO: 17117 - protein, 107 aa, synthetic construct; identical to SEQ ID NO: 10923
  REGION 1..107: note = Description of Artificial Sequence: Synthetic polypeptide
  REGION 1..107: note = VL of XENP018169

SEQ ID NO: 17118 - protein, 11 aa, synthetic construct
  REGION 1..11: note = Description of Artificial Sequence: Synthetic peptide
  REGION 1..11: note = XENP018169 vlCDR1
RASQSVSNDVA

SEQ ID NO: 17119 - protein, 7 aa, synthetic construct
  REGION 1..7: note = Description of Artificial Sequence: Synthetic peptide
  REGION 1..7: note = XENP018169 vlCDR2
YASHRYT

SEQ ID NO: 17120 - protein, 9 aa, synthetic construct
  REGION 1..9: note = Description of Artificial Sequence: Synthetic peptide
  REGION 1..9: note = XENP018169 vlCDR3
QQDYSSPRT

SEQ ID NO: 17121 - protein, 451 aa, synthetic construct
  REGION 1..451: note = Description of Artificial Sequence: Synthetic polypeptide
  REGION 1..451: note = XENP018170 1G6_H1.73_L1_IgG1_PVA_/S267K Heavy Chain
EVQLVESGGGLVKPGGSLRLSCAASGFTFSNYWMNWVRQAPGKGLEWVGEIWLKSNNYATHYAEPVKGRFTISRDDSKSTVYLQMNSLKTEDTAVYYCTRYYGNYGGYFDVWGAGTLVTVSSASTKGPSVFPLAPSSKSTSGGTAALGCLVKDYFPEPVTVSWNSGALTSGVHTFPAVLQSSGLYSLSSVVTVPSSSLGTQTYICNVNHKPSNTKVDKKVEPKSCDKTHTCPPCPAPPVAGPSVFLFPPKPKDTLMISRTPEVTCVVVDVKHEDPEVKFNWYVDGVEVHNAKTKPREEQYNSTYRVVSVLTVLHQDWLNGKEYKCKVSNKALPAPIEKTISKAKGQPREPQVYTLPPSREEMTKNQVSLTCLVKGFYPSDIAVEWESNGQPENNYKTTPPVLDSDGSFFLYSKLTVDKSRWQQGNVFSCSVMHEALHNHYTQKSLSLSPGK

SEQ ID NO: 17122 - protein, 122 aa, synthetic construct; identical to SEQ ID NO: 11684
  REGION 1..122: note = Description of Artificial Sequence: Synthetic polypeptide
  REGION 1..122: note = VH of XENP018170

SEQ ID NO: 17123 - protein, 5 aa, synthetic construct
  REGION 1..5: note = Description of Artificial Sequence: Synthetic peptide
  REGION 1..5: note = XENP018170 vhCDR1
NYWMN

SEQ ID NO: 17124 - protein, 19 aa, synthetic construct
  REGION 1..19: note = Description of Artificial Sequence: Synthetic peptide
  REGION 1..19: note = XENP018170 vhCDR2
EIWLKSNNYATHYAEPVKG

SEQ ID NO: 17125 - protein, 11 aa, synthetic construct
  REGION 1..11: note = Description of Artificial Sequence: Synthetic peptide
  REGION 1..11: note = XENP018170 vhCDR3
YYGNYGGYFDV

SEQ ID NO: 17126 - protein, 214 aa, synthetic construct; identical to SEQ ID NO: 16226
  REGION 1..214: note = Description of Artificial Sequence: Synthetic polypeptide
  REGION 1..214: note = XENP018170 1G6_H1.73_L1_IgG1_PVA_/S267K Light Chain

SEQ ID NO: 17127 - protein, 107 aa, synthetic construct; identical to SEQ ID NO: 10923
  REGION 1..107: note = Description of Artificial Sequence: Synthetic polypeptide
  REGION 1..107: note = VL of XENP018170

SEQ ID NO: 17128 - protein, 11 aa, synthetic construct
  REGION 1..11: note = Description of Artificial Sequence: Synthetic peptide
  REGION 1..11: note = XENP018170 vlCDR1
RASQSVSNDVA

SEQ ID NO: 17129 - protein, 7 aa, synthetic construct
  REGION 1..7: note = Description of Artificial Sequence: Synthetic peptide
  REGION 1..7: note = XENP018170 vlCDR2
YASHRYT

SEQ ID NO: 17130 - protein, 9 aa, synthetic construct
  REGION 1..9: note = Description of Artificial Sequence: Synthetic peptide
  REGION 1..9: note = XENP018170 vlCDR3
QQDYSSPRT

SEQ ID NO: 17131 - protein, 451 aa, synthetic construct
  REGION 1..451: note = Description of Artificial Sequence: Synthetic polypeptide
  REGION 1..451: note = XENP018171 1G6_H1.74_L1_IgG1_PVA_/S267K Heavy Chain
EVQLVESGGGLVKPGGSLRLSCAASGFTFSNYWMNWVRQAPGKGLEWVGEIRIKSNNYATHYAEPVKGRFTISRDDSKSTVYLQMNSLKTEDTAVYYCTRYYGNYGGYFDVWGAGTLVTVSSASTKGPSVFPLAPSSKSTSGGTAALGCLVKDYFPEPVTVSWNSGALTSGVHTFPAVLQSSGLYSLSSVVTVPSSSLGTQTYICNVNHKPSNTKVDKKVEPKSCDKTHTCPPCPAPPVAGPSVFLFPPKPKDTLMISRTPEVTCVVVDVKHEDPEVKFNWYVDGVEVHNAKTKPREEQYNSTYRVVSVLTVLHQDWLNGKEYKCKVSNKALPAPIEKTISKAKGQPREPQVYTLPPSREEMTKNQVSLTCLVKGFYPSDIAVEWESNGQPENNYKTTPPVLDSDGSFFLYSKLTVDKSRWQQGNVFSCSVMHEALHNHYTQKSLSLSPGK

SEQ ID NO: 17132 - protein, 122 aa, synthetic construct; identical to SEQ ID NO: 11693
  REGION 1..122: note = Description of Artificial Sequence: Synthetic polypeptide
  REGION 1..122: note = VH of XENP018171

SEQ ID NO: 17133 - protein, 5 aa, synthetic construct
  REGION 1..5: note = Description of Artificial Sequence: Synthetic peptide
  REGION 1..5: note = XENP018171 vhCDR1
NYWMN

SEQ ID NO: 17134 - protein, 19 aa, synthetic construct
  REGION 1..19: note = Description of Artificial Sequence: Synthetic peptide
  REGION 1..19: note = XENP018171 vhCDR2
EIRIKSNNYATHYAEPVKG

SEQ ID NO: 17135 - protein, 11 aa, synthetic construct
  REGION 1..11: note = Description of Artificial Sequence: Synthetic peptide
  REGION 1..11: note = XENP018171 vhCDR3
YYGNYGGYFDV

SEQ ID NO: 17136 - protein, 214 aa, synthetic construct; identical to SEQ ID NO: 16226
  REGION 1..214: note = Description of Artificial Sequence: Synthetic polypeptide
  REGION 1..214: note = XENP018171 1G6_H1.74_L1_IgG1_PVA_/S267K Light Chain

SEQ ID NO: 17137 - protein, 107 aa, synthetic construct; identical to SEQ ID NO: 10923
  REGION 1..107: note = Description of Artificial Sequence: Synthetic polypeptide
  REGION 1..107: note = VL of XENP018171

SEQ ID NO: 17138 - protein, 11 aa, synthetic construct
  REGION 1..11: note = Description of Artificial Sequence: Synthetic peptide
  REGION 1..11: note = XENP018171 vlCDR1
RASQSVSNDVA

SEQ ID NO: 17139 - protein, 7 aa, synthetic construct
  REGION 1..7: note = Description of Artificial Sequence: Synthetic peptide
  REGION 1..7: note = XENP018171 vlCDR2
YASHRYT

SEQ ID NO: 17140 - protein, 9 aa, synthetic construct
  REGION 1..9: note = Description of Artificial Sequence: Synthetic peptide
  REGION 1..9: note = XENP018171 vlCDR3
QQDYSSPRT

SEQ ID NO: 17141 - protein, 451 aa, synthetic construct
  REGION 1..451: note = Description of Artificial Sequence: Synthetic polypeptide
  REGION 1..451: note = XENP018172 1G6_H1.75_L1_IgG1_PVA_/S267K Heavy Chain
EVQLVESGGGLVKPGGSLRLSCAASGFTFSNYWMNWVRQAPGKGLEWVGEIRFKSNNYATHYAEPVKGRFTISRDDSKSTVYLQMNSLKTEDTAVYYCTRYYGNYGGYFDVWGAGTLVTVSSASTKGPSVFPLAPSSKSTSGGTAALGCLVKDYFPEPVTVSWNSGALTSGVHTFPAVLQSSGLYSLSSVVTVPSSSLGTQTYICNVNHKPSNTKVDKKVEPKSCDKTHTCPPCPAPPVAGPSVFLFPPKPKDTLMISRTPEVTCVVVDVKHEDPEVKFNWYVDGVEVHNAKTKPREEQYNSTYRVVSVLTVLHQDWLNGKEYKCKVSNKALPAPIEKTISKAKGQPREPQVYTLPPSREEMTKNQVSLTCLVKGFYPSDIAVEWESNGQPENNYKTTPPVLDSDGSFFLYSKLTVDKSRWQQGNVFSCSVMHEALHNHYTQKSLSLSPGK

SEQ ID NO: 17142 - protein, 122 aa, synthetic construct; identical to SEQ ID NO: 11702
  REGION 1..122: note = Description of Artificial Sequence: Synthetic polypeptide
  REGION 1..122: note = VH of XENP018172

SEQ ID NO: 17143 - protein, 5 aa, synthetic construct
  REGION 1..5: note = Description of Artificial Sequence: Synthetic peptide
  REGION 1..5: note = XENP018172 vhCDR1
NYWMN

SEQ ID NO: 17144 - protein, 19 aa, synthetic construct
  REGION 1..19: note = Description of Artificial Sequence: Synthetic peptide
  REGION 1..19: note = XENP018172 vhCDR2
EIRFKSNNYATHYAEPVKG

SEQ ID NO: 17145 - protein, 11 aa, synthetic construct
  REGION 1..11: note = Description of Artificial Sequence: Synthetic peptide
  REGION 1..11: note = XENP018172 vhCDR3
YYGNYGGYFDV

SEQ ID NO: 17146 - protein, 214 aa, synthetic construct; identical to SEQ ID NO: 16226
  REGION 1..214: note = Description of Artificial Sequence: Synthetic polypeptide
  REGION 1..214: note = XENP018172 1G6_H1.75_L1_IgG1_PVA_/S267K Light Chain

SEQ ID NO: 17147 - protein, 107 aa, synthetic construct; identical to SEQ ID NO: 10923
  REGION 1..107: note = Description of Artificial Sequence: Synthetic polypeptide
  REGION 1..107: note = VL of XENP018172

SEQ ID NO: 17148 - protein, 11 aa, synthetic construct
  REGION 1..11: note = Description of Artificial Sequence: Synthetic peptide
  REGION 1..11: note = XENP018172 vlCDR1
RASQSVSNDVA

SEQ ID NO: 17149 - protein, 7 aa, synthetic construct
  REGION 1..7: note = Description of Artificial Sequence: Synthetic peptide
  REGION 1..7: note = XENP018172 vlCDR2
YASHRYT

SEQ ID NO: 17150 - protein, 9 aa, synthetic construct
  REGION 1..9: note = Description of Artificial Sequence: Synthetic peptide
  REGION 1..9: note = XENP018172 vlCDR3
QQDYSSPRT

SEQ ID NO: 17151 - protein, 451 aa, synthetic construct
  REGION 1..451: note = Description of Artificial Sequence: Synthetic polypeptide
  REGION 1..451: note = XENP018173 1G6_H1.76_L1_IgG1_PVA_/S267K Heavy Chain
EVQLVESGGGLVKPGGSLRLSCAASGFTFSNYWMNWVRQAPGKGLEWVGEIRVKSNNYATHYAEPVKGRFTISRDDSKSTVYLQMNSLKTEDTAVYYCTRYYGNYGGYFDVWGAGTLVTVSSASTKGPSVFPLAPSSKSTSGGTAALGCLVKDYFPEPVTVSWNSGALTSGVHTFPAVLQSSGLYSLSSVVTVPSSSLGTQTYICNVNHKPSNTKVDKKVEPKSCDKTHTCPPCPAPPVAGPSVFLFPPKPKDTLMISRTPEVTCVVVDVKHEDPEVKFNWYVDGVEVHNAKTKPREEQYNSTYRVVSVLTVLHQDWLNGKEYKCKVSNKALPAPIEKTISKAKGQPREPQVYTLPPSREEMTKNQVSLTCLVKGFYPSDIAVEWESNGQPENNYKTTPPVLDSDGSFFLYSKLTVDKSRWQQGNVFSCSVMHEALHNHYTQKSLSLSPGK

SEQ ID NO: 17152 - protein, 122 aa, synthetic construct; identical to SEQ ID NO: 11711
  REGION 1..122: note = Description of Artificial Sequence: Synthetic polypeptide
  REGION 1..122: note = VH of XENP018173

SEQ ID NO: 17153 - protein, 5 aa, synthetic construct
  REGION 1..5: note = Description of Artificial Sequence: Synthetic peptide
  REGION 1..5: note = XENP018173 vhCDR1
NYWMN

SEQ ID NO: 17154 - protein, 19 aa, synthetic construct
  REGION 1..19: note = Description of Artificial Sequence: Synthetic peptide
  REGION 1..19: note = XENP018173 vhCDR2
EIRVKSNNYATHYAEPVKG

SEQ ID NO: 17155 - protein, 11 aa, synthetic construct
  REGION 1..11: note = Description of Artificial Sequence: Synthetic peptide
  REGION 1..11: note = XENP018173 vhCDR3
YYGNYGGYFDV

SEQ ID NO: 17156 - protein, 214 aa, synthetic construct; identical to SEQ ID NO: 16226
  REGION 1..214: note = Description of Artificial Sequence: Synthetic polypeptide
  REGION 1..214: note = XENP018173 1G6_H1.76_L1_IgG1_PVA_/S267K Light Chain

SEQ ID NO: 17157 - protein, 107 aa, synthetic construct; identical to SEQ ID NO: 10923
  REGION 1..107: note = Description of Artificial Sequence: Synthetic polypeptide
  REGION 1..107: note = VL of XENP018173

SEQ ID NO: 17158 - protein, 11 aa, synthetic construct
  REGION 1..11: note = Description of Artificial Sequence: Synthetic peptide
  REGION 1..11: note = XENP018173 vlCDR1
RASQSVSNDVA

SEQ ID NO: 17159 - protein, 7 aa, synthetic construct
  REGION 1..7: note = Description of Artificial Sequence: Synthetic peptide
  REGION 1..7: note = XENP018173 vlCDR2
YASHRYT

SEQ ID NO: 17160 - protein, 9 aa, synthetic construct
  REGION 1..9: note = Description of Artificial Sequence: Synthetic peptide
  REGION 1..9: note = XENP018173 vlCDR3
QQDYSSPRT

SEQ ID NO: 17161 - protein, 451 aa, synthetic construct
  REGION 1..451: note = Description of Artificial Sequence: Synthetic polypeptide
  REGION 1..451: note = XENP018174 1G6_H1.77_L1_IgG1_PVA_/S267K Heavy Chain
EVQLVESGGGLVKPGGSLRLSCAASGFTFSNYWMNWVRQAPGKGLEWVGEIRYKSNNYATHYAEPVKGRFTISRDDSKSTVYLQMNSLKTEDTAVYYCTRYYGNYGGYFDVWGAGTLVTVSSASTKGPSVFPLAPSSKSTSGGTAALGCLVKDYFPEPVTVSWNSGALTSGVHTFPAVLQSSGLYSLSSVVTVPSSSLGTQTYICNVNHKPSNTKVDKKVEPKSCDKTHTCPPCPAPPVAGPSVFLFPPKPKDTLMISRTPEVTCVVVDVKHEDPEVKFNWYVDGVEVHNAKTKPREEQYNSTYRVVSVLTVLHQDWLNGKEYKCKVSNKALPAPIEKTISKAKGQPREPQVYTLPPSREEMTKNQVSLTCLVKGFYPSDIAVEWESNGQPENNYKTTPPVLDSDGSFFLYSKLTVDKSRWQQGNVFSCSVMHEALHNHYTQKSLSLSPGK

SEQ ID NO: 17162 - protein, 122 aa, synthetic construct; identical to SEQ ID NO: 11720
  REGION 1..122: note = Description of Artificial Sequence: Synthetic polypeptide
  REGION 1..122: note = VH of XENP018174

SEQ ID NO: 17163 - protein, 5 aa, synthetic construct
  REGION 1..5: note = Description of Artificial Sequence: Synthetic peptide
  REGION 1..5: note = XENP018174 vhCDR1
NYWMN

SEQ ID NO: 17164 - protein, 19 aa, synthetic construct
  REGION 1..19: note = Description of Artificial Sequence: Synthetic peptide
  REGION 1..19: note = XENP018174 vhCDR2
EIRYKSNNYATHYAEPVKG

SEQ ID NO: 17165 - protein, 11 aa, synthetic construct
  REGION 1..11: note = Description of Artificial Sequence: Synthetic peptide
  REGION 1..11: note = XENP018174 vhCDR3
YYGNYGGYFDV

SEQ ID NO: 17166 - protein, 214 aa, synthetic construct; identical to SEQ ID NO: 16226
  REGION 1..214: note = Description of Artificial Sequence: Synthetic polypeptide
  REGION 1..214: note = XENP018174 1G6_H1.77_L1_IgG1_PVA_/S267K Light Chain

SEQ ID NO: 17167 - protein, 107 aa, synthetic construct; identical to SEQ ID NO: 10923
  REGION 1..107: note = Description of Artificial Sequence: Synthetic polypeptide
  REGION 1..107: note = VL of XENP018174

SEQ ID NO: 17168 - protein, 11 aa, synthetic construct
  REGION 1..11: note = Description of Artificial Sequence: Synthetic peptide
  REGION 1..11: note = XENP018174 vlCDR1
RASQSVSNDVA

SEQ ID NO: 17169 - protein, 7 aa, synthetic construct
  REGION 1..7: note = Description of Artificial Sequence: Synthetic peptide
  REGION 1..7: note = XENP018174 vlCDR2
YASHRYT

SEQ ID NO: 17170 - protein, 9 aa, synthetic construct
  REGION 1..9: note = Description of Artificial Sequence: Synthetic peptide
  REGION 1..9: note = XENP018174 vlCDR3
QQDYSSPRT

SEQ ID NO: 17171 - protein, 451 aa, synthetic construct
  REGION 1..451: note = Description of Artificial Sequence: Synthetic polypeptide
  REGION 1..451: note = XENP018175 1G6_H1.78_L1_IgG1_PVA_/S267K Heavy Chain
EVQLVESGGGLVKPGGSLRLSCAASGFTFSNYWMNWVRQAPGKGLEWVGEIRWKSNNYATHYAEPVKGRFTISRDDSKSTVYLQMNSLKTEDTAVYYCTRYYGNYGGYFDVWGAGTLVTVSSASTKGPSVFPLAPSSKSTSGGTAALGCLVKDYFPEPVTVSWNSGALTSGVHTFPAVLQSSGLYSLSSVVTVPSSSLGTQTYICNVNHKPSNTKVDKKVEPKSCDKTHTCPPCPAPPVAGPSVFLFPPKPKDTLMISRTPEVTCVVVDVKHEDPEVKFNWYVDGVEVHNAKTKPREEQYNSTYRVVSVLTVLHQDWLNGKEYKCKVSNKALPAPIEKTISKAKGQPREPQVYTLPPSREEMTKNQVSLTCLVKGFYPSDIAVEWESNGQPENNYKTTPPVLDSDGSFFLYSKLTVDKSRWQQGNVFSCSVMHEALHNHYTQKSLSLSPGK

SEQ ID NO: 17172 - protein, 122 aa, synthetic construct; identical to SEQ ID NO: 11729
  REGION 1..122: note = Description of Artificial Sequence: Synthetic polypeptide
  REGION 1..122: note = VH of XENP018175

SEQ ID NO: 17173 - protein, 5 aa, synthetic construct
  REGION 1..5: note = Description of Artificial Sequence: Synthetic peptide
  REGION 1..5: note = XENP018175 vhCDR1
NYWMN

SEQ ID NO: 17174 - protein, 19 aa, synthetic construct
  REGION 1..19: note = Description of Artificial Sequence: Synthetic peptide
  REGION 1..19: note = XENP018175 vhCDR2
EIRWKSNNYATHYAEPVKG

SEQ ID NO: 17175 - protein, 11 aa, synthetic construct
  REGION 1..11: note = Description of Artificial Sequence: Synthetic peptide
  REGION 1..11: note = XENP018175 vhCDR3
YYGNYGGYFDV

SEQ ID NO: 17176 - protein, 214 aa, synthetic construct; identical to SEQ ID NO: 16226
  REGION 1..214: note = Description of Artificial Sequence: Synthetic polypeptide
  REGION 1..214: note = XENP018175 1G6_H1.78_L1_IgG1_PVA_/S267K Light Chain

SEQ ID NO: 17177 - protein, 107 aa, synthetic construct; identical to SEQ ID NO: 10923
  REGION 1..107: note = Description of Artificial Sequence: Synthetic polypeptide
  REGION 1..107: note = VL of XENP018175

SEQ ID NO: 17178 - protein, 11 aa, synthetic construct
  REGION 1..11: note = Description of Artificial Sequence: Synthetic peptide
  REGION 1..11: note = XENP018175 vlCDR1
RASQSVSNDVA

SEQ ID NO: 17179 - protein, 7 aa, synthetic construct
  REGION 1..7: note = Description of Artificial Sequence: Synthetic peptide
  REGION 1..7: note = XENP018175 vlCDR2
YASHRYT

SEQ ID NO: 17180 - protein, 9 aa, synthetic construct
  REGION 1..9: note = Description of Artificial Sequence: Synthetic peptide
  REGION 1..9: note = XENP018175 vlCDR3
QQDYSSPRT

SEQ ID NO: 17181 - protein, 451 aa, synthetic construct
  REGION 1..451: note = Description of Artificial Sequence: Synthetic polypeptide
  REGION 1..451: note = XENP018176 1G6_H1.79_L1_IgG1_PVA_/S267K Heavy Chain
EVQLVESGGGLVKPGGSLRLSCAASGFTFSNYWMNWVRQAPGKGLEWVGEIRDKSNNYATHYAEPVKGRFTISRDDSKSTVYLQMNSLKTEDTAVYYCTRYYGNYGGYFDVWGAGTLVTVSSASTKGPSVFPLAPSSKSTSGGTAALGCLVKDYFPEPVTVSWNSGALTSGVHTFPAVLQSSGLYSLSSVVTVPSSSLGTQTYICNVNHKPSNTKVDKKVEPKSCDKTHTCPPCPAPPVAGPSVFLFPPKPKDTLMISRTPEVTCVVVDVKHEDPEVKFNWYVDGVEVHNAKTKPREEQYNSTYRVVSVLTVLHQDWLNGKEYKCKVSNKALPAPIEKTISKAKGQPREPQVYTLPPSREEMTKNQVSLTCLVKGFYPSDIAVEWESNGQPENNYKTTPPVLDSDGSFFLYSKLTVDKSRWQQGNVFSCSVMHEALHNHYTQKSLSLSPGK

SEQ ID NO: 17182 - protein, 122 aa, synthetic construct; identical to SEQ ID NO: 11738
  REGION 1..122: note = Description of Artificial Sequence: Synthetic polypeptide
  REGION 1..122: note = VH of XENP018176

SEQ ID NO: 17183 - protein, 5 aa, synthetic construct
  REGION 1..5: note = Description of Artificial Sequence: Synthetic peptide
  REGION 1..5: note = XENP018176 vhCDR1
NYWMN

SEQ ID NO: 17184 - protein, 19 aa, synthetic construct
  REGION 1..19: note = Description of Artificial Sequence: Synthetic peptide
  REGION 1..19: note = XENP018176 vhCDR2
EIRDKSNNYATHYAEPVKG

SEQ ID NO: 17185 - protein, 11 aa, synthetic construct
  REGION 1..11: note = Description of Artificial Sequence: Synthetic peptide
  REGION 1..11: note = XENP018176 vhCDR3
YYGNYGGYFDV

SEQ ID NO: 17186 - protein, 214 aa, synthetic construct; identical to SEQ ID NO: 16226
  REGION 1..214: note = Description of Artificial Sequence: Synthetic polypeptide
  REGION 1..214: note = XENP018176 1G6_H1.79_L1_IgG1_PVA_/S267K Light Chain

SEQ ID NO: 17187 - protein, 107 aa, synthetic construct; identical to SEQ ID NO: 10923
  REGION 1..107: note = Description of Artificial Sequence: Synthetic polypeptide
  REGION 1..107: note = VL of XENP018176

SEQ ID NO: 17188 - protein, 11 aa, synthetic construct
  REGION 1..11: note = Description of Artificial Sequence: Synthetic peptide
  REGION 1..11: note = XENP018176 vlCDR1
RASQSVSNDVA

SEQ ID NO: 17189 - protein, 7 aa, synthetic construct
  REGION 1..7: note = Description of Artificial Sequence: Synthetic peptide
  REGION 1..7: note = XENP018176 vlCDR2
YASHRYT

SEQ ID NO: 17190 - protein, 9 aa, synthetic construct
  REGION 1..9: note = Description of Artificial Sequence: Synthetic peptide
  REGION 1..9: note = XENP018176 vlCDR3
QQDYSSPRT

SEQ ID NO: 17191 - protein, 451 aa, synthetic construct
  REGION 1..451: note = Description of Artificial Sequence: Synthetic polypeptide
  REGION 1..451: note = XENP018177 1G6_H1.80_L1_IgG1_PVA_/S267K Heavy Chain
EVQLVESGGGLVKPGGSLRLSCAASGFTFSNYWMNWVRQAPGKGLEWVGEIRAKSNNYATHYAEPVKGRFTISRDDSKSTVYLQMNSLKTEDTAVYYCTRYYGNYGGYFDVWGAGTLVTVSSASTKGPSVFPLAPSSKSTSGGTAALGCLVKDYFPEPVTVSWNSGALTSGVHTFPAVLQSSGLYSLSSVVTVPSSSLGTQTYICNVNHKPSNTKVDKKVEPKSCDKTHTCPPCPAPPVAGPSVFLFPPKPKDTLMISRTPEVTCVVVDVKHEDPEVKFNWYVDGVEVHNAKTKPREEQYNSTYRVVSVLTVLHQDWLNGKEYKCKVSNKALPAPIEKTISKAKGQPREPQVYTLPPSREEMTKNQVSLTCLVKGFYPSDIAVEWESNGQPENNYKTTPPVLDSDGSFFLYSKLTVDKSRWQQGNVFSCSVMHEALHNHYTQKSLSLSPGK

SEQ ID NO: 17192 - protein, 122 aa, synthetic construct; identical to SEQ ID NO: 11747
  REGION 1..122: note = Description of Artificial Sequence: Synthetic polypeptide
  REGION 1..122: note = VH of XENP018177

SEQ ID NO: 17193 - protein, 5 aa, synthetic construct
  REGION 1..5: note = Description of Artificial Sequence: Synthetic peptide
  REGION 1..5: note = XENP018177 vhCDR1
NYWMN

SEQ ID NO: 17194 - protein, 19 aa, synthetic construct
  REGION 1..19: note = Description of Artificial Sequence: Synthetic peptide
  REGION 1..19: note = XENP018177 vhCDR2
EIRAKSNNYATHYAEPVKG

SEQ ID NO: 17195 - protein, 11 aa, synthetic construct
  REGION 1..11: note = Description of Artificial Sequence: Synthetic peptide
  REGION 1..11: note = XENP018177 vhCDR3
YYGNYGGYFDV

SEQ ID NO: 17196 - protein, 214 aa, synthetic construct; identical to SEQ ID NO: 16226
  REGION 1..214: note = Description of Artificial Sequence: Synthetic polypeptide
  REGION 1..214: note = XENP018177 1G6_H1.80_L1_IgG1_PVA_/S267K Light Chain

SEQ ID NO: 17197 - protein, 107 aa, synthetic construct; identical to SEQ ID NO: 10923
  REGION 1..107: note = Description of Artificial Sequence: Synthetic polypeptide
  REGION 1..107: note = VL of XENP018177

SEQ ID NO: 17198 - protein, 11 aa, synthetic construct
  REGION 1..11: note = Description of Artificial Sequence: Synthetic peptide
  REGION 1..11: note = XENP018177 vlCDR1
RASQSVSNDVA

SEQ ID NO: 17199 - protein, 7 aa, synthetic construct
  REGION 1..7: note = Description of Artificial Sequence: Synthetic peptide
  REGION 1..7: note = XENP018177 vlCDR2
YASHRYT

SEQ ID NO: 17200 - protein, 9 aa, synthetic construct
  REGION 1..9: note = Description of Artificial Sequence: Synthetic peptide
  REGION 1..9: note = XENP018177 vlCDR3
QQDYSSPRT

SEQ ID NO: 17201 - protein, 451 aa, synthetic construct
  REGION 1..451: note = Description of Artificial Sequence: Synthetic polypeptide
  REGION 1..451: note = XENP018178 1G6_H1.81_L1_IgG1_PVA_/S267K Heavy Chain
EVQLVESGGGLVKPGGSLRLSCAASGFTFSNYWMNWVRQAPGKGLEWVGEIRQKSNNYATHYAEPVKGRFTISRDDSKSTVYLQMNSLKTEDTAVYYCTRYYGNYGGYFDVWGAGTLVTVSSASTKGPSVFPLAPSSKSTSGGTAALGCLVKDYFPEPVTVSWNSGALTSGVHTFPAVLQSSGLYSLSSVVTVPSSSLGTQTYICNVNHKPSNTKVDKKVEPKSCDKTHTCPPCPAPPVAGPSVFLFPPKPKDTLMISRTPEVTCVVVDVKHEDPEVKFNWYVDGVEVHNAKTKPREEQYNSTYRVVSVLTVLHQDWLNGKEYKCKVSNKALPAPIEKTISKAKGQPREPQVYTLPPSREEMTKNQVSLTCLVKGFYPSDIAVEWESNGQPENNYKTTPPVLDSDGSFFLYSKLTVDKSRWQQGNVFSCSVMHEALHNHYTQKSLSLSPGK

SEQ ID NO: 17202 - protein, 122 aa, synthetic construct; identical to SEQ ID NO: 11756
  REGION 1..122: note = Description of Artificial Sequence: Synthetic polypeptide
  REGION 1..122: note = VH of XENP018178

SEQ ID NO: 17203 - protein, 5 aa, synthetic construct
  REGION 1..5: note = Description of Artificial Sequence: Synthetic peptide
  REGION 1..5: note = XENP018178 vhCDR1
NYWMN

SEQ ID NO: 17204 - protein, 19 aa, synthetic construct
  REGION 1..19: note = Description of Artificial Sequence: Synthetic peptide
  REGION 1..19: note = XENP018178 vhCDR2
EIRQKSNNYATHYAEPVKG

SEQ ID NO: 17205 - protein, 11 aa, synthetic construct
  REGION 1..11: note = Description of Artificial Sequence: Synthetic peptide
  REGION 1..11: note = XENP018178 vhCDR3
YYGNYGGYFDV

SEQ ID NO: 17206 - protein, 214 aa, synthetic construct; identical to SEQ ID NO: 16226
  REGION 1..214: note = Description of Artificial Sequence: Synthetic polypeptide
  REGION 1..214: note = XENP018178 1G6_H1.81_L1_IgG1_PVA_/S267K Light Chain

SEQ ID NO: 17207 - protein, 107 aa, synthetic construct; identical to SEQ ID NO: 10923
  REGION 1..107: note = Description of Artificial Sequence: Synthetic polypeptide
  REGION 1..107: note = VL of XENP018178

SEQ ID NO: 17208 - protein, 11 aa, synthetic construct
  REGION 1..11: note = Description of Artificial Sequence: Synthetic peptide
  REGION 1..11: note = XENP018178 vlCDR1
RASQSVSNDVA

SEQ ID NO: 17209 - protein, 7 aa, synthetic construct
  REGION 1..7: note = Description of Artificial Sequence: Synthetic peptide
  REGION 1..7: note = XENP018178 vlCDR2
YASHRYT

SEQ ID NO: 17210 - protein, 9 aa, synthetic construct
  REGION 1..9: note = Description of Artificial Sequence: Synthetic peptide
  REGION 1..9: note = XENP018178 vlCDR3
QQDYSSPRT

SEQ ID NO: 17211 - protein, 451 aa, synthetic construct
  REGION 1..451: note = Description of Artificial Sequence: Synthetic polypeptide
  REGION 1..451: note = XENP018179 1G6_H1.82_L1_IgG1_PVA_/S267K Heavy Chain
EVQLVESGGGLVKPGGSLRLSCAASGFTFSNYWMNWVRQAPGKGLEWVGEIRKKSNNYATHYAEPVKGRFTISRDDSKSTVYLQMNSLKTEDTAVYYCTRYYGNYGGYFDVWGAGTLVTVSSASTKGPSVFPLAPSSKSTSGGTAALGCLVKDYFPEPVTVSWNSGALTSGVHTFPAVLQSSGLYSLSSVVTVPSSSLGTQTYICNVNHKPSNTKVDKKVEPKSCDKTHTCPPCPAPPVAGPSVFLFPPKPKDTLMISRTPEVTCVVVDVKHEDPEVKFNWYVDGVEVHNAKTKPREEQYNSTYRVVSVLTVLHQDWLNGKEYKCKVSNKALPAPIEKTISKAKGQPREPQVYTLPPSREEMTKNQVSLTCLVKGFYPSDIAVEWESNGQPENNYKTTPPVLDSDGSFFLYSKLTVDKSRWQQGNVFSCSVMHEALHNHYTQKSLSLSPGK

SEQ ID NO: 17212 - protein, 122 aa, synthetic construct; identical to SEQ ID NO: 11765
  REGION 1..122: note = Description of Artificial Sequence: Synthetic polypeptide
  REGION 1..122: note = VH of XENP018179

SEQ ID NO: 17213 - protein, 5 aa, synthetic construct
  REGION 1..5: note = Description of Artificial Sequence: Synthetic peptide
  REGION 1..5: note = XENP018179 vhCDR1
NYWMN

SEQ ID NO: 17214 - protein, 19 aa, synthetic construct
  REGION 1..19: note = Description of Artificial Sequence: Synthetic peptide
  REGION 1..19: note = XENP018179 vhCDR2
EIRKKSNNYATHYAEPVKG

SEQ ID NO: 17215 - protein, 11 aa, synthetic construct
  REGION 1..11: note = Description of Artificial Sequence: Synthetic peptide
  REGION 1..11: note = XENP018179 vhCDR3
YYGNYGGYFDV

SEQ ID NO: 17216 - protein, 214 aa, synthetic construct; identical to SEQ ID NO: 16226
  REGION 1..214: note = Description of Artificial Sequence: Synthetic polypeptide
  REGION 1..214: note = XENP018179 1G6_H1.82_L1_IgG1_PVA_/S267K Light Chain

SEQ ID NO: 17217 - protein, 107 aa, synthetic construct; identical to SEQ ID NO: 10923
  REGION 1..107: note = Description of Artificial Sequence: Synthetic polypeptide
  REGION 1..107: note = VL of XENP018179

SEQ ID NO: 17218 - protein, 11 aa, synthetic construct
  REGION 1..11: note = Description of Artificial Sequence: Synthetic peptide
  REGION 1..11: note = XENP018179 vlCDR1
RASQSVSNDVA

SEQ ID NO: 17219 - protein, 7 aa, synthetic construct
  REGION 1..7: note = Description of Artificial Sequence: Synthetic peptide
  REGION 1..7: note = XENP018179 vlCDR2
YASHRYT

SEQ ID NO: 17220 - protein, 9 aa, synthetic construct
  REGION 1..9: note = Description of Artificial Sequence: Synthetic peptide
  REGION 1..9: note = XENP018179 vlCDR3
QQDYSSPRT

SEQ ID NO: 17221 - protein, 451 aa, synthetic construct
  REGION 1..451: note = Description of Artificial Sequence: Synthetic polypeptide
  REGION 1..451: note = XENP018180 1G6_H1.83_L1_IgG1_PVA_/S267K Heavy Chain
EVQLVESGGGLVKPGGSLRLSCAASGFTFSNYWMNWVRQAPGKGLEWVGEIRLRSNNYATHYAEPVKGRFTISRDDSKSTVYLQMNSLKTEDTAVYYCTRYYGNYGGYFDVWGAGTLVTVSSASTKGPSVFPLAPSSKSTSGGTAALGCLVKDYFPEPVTVSWNSGALTSGVHTFPAVLQSSGLYSLSSVVTVPSSSLGTQTYICNVNHKPSNTKVDKKVEPKSCDKTHTCPPCPAPPVAGPSVFLFPPKPKDTLMISRTPEVTCVVVDVKHEDPEVKFNWYVDGVEVHNAKTKPREEQYNSTYRVVSVLTVLHQDWLNGKEYKCKVSNKALPAPIEKTISKAKGQPREPQVYTLPPSREEMTKNQVSLTCLVKGFYPSDIAVEWESNGQPENNYKTTPPVLDSDGSFFLYSKLTVDKSRWQQGNVFSCSVMHEALHNHYTQKSLSLSPGK

SEQ ID NO: 17222 - protein, 122 aa, synthetic construct; identical to SEQ ID NO: 11774
  REGION 1..122: note = Description of Artificial Sequence: Synthetic polypeptide
  REGION 1..122: note = VH of XENP018180

SEQ ID NO: 17223 - protein, 5 aa, synthetic construct
  REGION 1..5: note = Description of Artificial Sequence: Synthetic peptide
  REGION 1..5: note = XENP018180 vhCDR1
NYWMN

SEQ ID NO: 17224 - protein, 19 aa, synthetic construct
  REGION 1..19: note = Description of Artificial Sequence: Synthetic peptide
  REGION 1..19: note = XENP018180 vhCDR2
EIRLRSNNYATHYAEPVKG

SEQ ID NO: 17225 - protein, 11 aa, synthetic construct
  REGION 1..11: note = Description of Artificial Sequence: Synthetic peptide
  REGION 1..11: note = XENP018180 vhCDR3
YYGNYGGYFDV

SEQ ID NO: 17226 - protein, 214 aa, synthetic construct; identical to SEQ ID NO: 16226
  REGION 1..214: note = Description of Artificial Sequence: Synthetic polypeptide
  REGION 1..214: note = XENP018180 1G6_H1.83_L1_IgG1_PVA_/S267K Light Chain

SEQ ID NO: 17227 - protein, 107 aa, synthetic construct; identical to SEQ ID NO: 10923
  REGION 1..107: note = Description of Artificial Sequence: Synthetic polypeptide
  REGION 1..107: note = VL of XENP018180

SEQ ID NO: 17228 - protein, 11 aa, synthetic construct
  REGION 1..11: note = Description of Artificial Sequence: Synthetic peptide
  REGION 1..11: note = XENP018180 vlCDR1
RASQSVSNDVA

SEQ ID NO: 17229 - protein, 7 aa, synthetic construct
  REGION 1..7: note = Description of Artificial Sequence: Synthetic peptide
  REGION 1..7: note = XENP018180 vlCDR2
YASHRYT

SEQ ID NO: 17230 - protein, 9 aa, synthetic construct
  REGION 1..9: note = Description of Artificial Sequence: Synthetic peptide
  REGION 1..9: note = XENP018180 vlCDR3
QQDYSSPRT

SEQ ID NO: 17231 - protein, 451 aa, synthetic construct
  REGION 1..451: note = Description of Artificial Sequence: Synthetic polypeptide
  REGION 1..451: note = XENP018181 1G6_H1.84_L1_IgG1_PVA_/S267K Heavy Chain
EVQLVESGGGLVKPGGSLRLSCAASGFTFSNYWMNWVRQAPGKGLEWVGEIRLESNNYATHYAEPVKGRFTISRDDSKSTVYLQMNSLKTEDTAVYYCTRYYGNYGGYFDVWGAGTLVTVSSASTKGPSVFPLAPSSKSTSGGTAALGCLVKDYFPEPVTVSWNSGALTSGVHTFPAVLQSSGLYSLSSVVTVPSSSLGTQTYICNVNHKPSNTKVDKKVEPKSCDKTHTCPPCPAPPVAGPSVFLFPPKPKDTLMISRTPEVTCVVVDVKHEDPEVKFNWYVDGVEVHNAKTKPREEQYNSTYRVVSVLTVLHQDWLNGKEYKCKVSNKALPAPIEKTISKAKGQPREPQVYTLPPSREEMTKNQVSLTCLVKGFYPSDIAVEWESNGQPENNYKTTPPVLDSDGSFFLYSKLTVDKSRWQQGNVFSCSVMHEALHNHYTQKSLSLSPGK

SEQ ID NO: 17232 - protein, 122 aa, synthetic construct; identical to SEQ ID NO: 11783
  REGION 1..122: note = Description of Artificial Sequence: Synthetic polypeptide
  REGION 1..122: note = VH of XENP018181

SEQ ID NO: 17233 - protein, 5 aa, synthetic construct
  REGION 1..5: note = Description of Artificial Sequence: Synthetic peptide
  REGION 1..5: note = XENP018181 vhCDR1
NYWMN

SEQ ID NO: 17234 - protein, 19 aa, synthetic construct
  REGION 1..19: note = Description of Artificial Sequence: Synthetic peptide
  REGION 1..19: note = XENP018181 vhCDR2
EIRLESNNYATHYAEPVKG

SEQ ID NO: 17235 - protein, 11 aa, synthetic construct
  REGION 1..11: note = Description of Artificial Sequence: Synthetic peptide
  REGION 1..11: note = XENP018181 vhCDR3
YYGNYGGYFDV

SEQ ID NO: 17236 - protein, 214 aa, synthetic construct; identical to SEQ ID NO: 16226
  REGION 1..214: note = Description of Artificial Sequence: Synthetic polypeptide
  REGION 1..214: note = XENP018181 1G6_H1.84_L1_IgG1_PVA_/S267K Light Chain

SEQ ID NO: 17237 - protein, 107 aa, synthetic construct; identical to SEQ ID NO: 10923
  REGION 1..107: note = Description of Artificial Sequence: Synthetic polypeptide
  REGION 1..107: note = VL of XENP018181

SEQ ID NO: 17238 - protein, 11 aa, synthetic construct
  REGION 1..11: note = Description of Artificial Sequence: Synthetic peptide
  REGION 1..11: note = XENP018181 vlCDR1
RASQSVSNDVA

SEQ ID NO: 17239 - protein, 7 aa, synthetic construct
  REGION 1..7: note = Description of Artificial Sequence: Synthetic peptide
  REGION 1..7: note = XENP018181 vlCDR2
YASHRYT

SEQ ID NO: 17240 - protein, 9 aa, synthetic construct
  REGION 1..9: note = Description of Artificial Sequence: Synthetic peptide
  REGION 1..9: note = XENP018181 vlCDR3
QQDYSSPRT

SEQ ID NO: 17241 - protein, 451 aa, synthetic construct
  REGION 1..451: note = Description of Artificial Sequence: Synthetic polypeptide
  REGION 1..451: note = XENP018182 1G6_H1.85_L1_IgG1_PVA_/S267K Heavy Chain
EVQLVESGGGLVKPGGSLRLSCAASGFTFSNYWMNWVRQAPGKGLEWVGEIRLHSNNYATHYAEPVKGRFTISRDDSKSTVYLQMNSLKTEDTAVYYCTRYYGNYGGYFDVWGAGTLVTVSSASTKGPSVFPLAPSSKSTSGGTAALGCLVKDYFPEPVTVSWNSGALTSGVHTFPAVLQSSGLYSLSSVVTVPSSSLGTQTYICNVNHKPSNTKVDKKVEPKSCDKTHTCPPCPAPPVAGPSVFLFPPKPKDTLMISRTPEVTCVVVDVKHEDPEVKFNWYVDGVEVHNAKTKPREEQYNSTYRVVSVLTVLHQDWLNGKEYKCKVSNKALPAPIEKTISKAKGQPREPQVYTLPPSREEMTKNQVSLTCLVKGFYPSDIAVEWESNGQPENNYKTTPPVLDSDGSFFLYSKLTVDKSRWQQGNVFSCSVMHEALHNHYTQKSLSLSPGK

SEQ ID NO: 17242 - protein, 122 aa, synthetic construct; identical to SEQ ID NO: 11792
  REGION 1..122: note = Description of Artificial Sequence: Synthetic polypeptide
  REGION 1..122: note = VH of XENP018182

SEQ ID NO: 17243 - protein, 5 aa, synthetic construct
  REGION 1..5: note = Description of Artificial Sequence: Synthetic peptide
  REGION 1..5: note = XENP018182 vhCDR1
NYWMN

SEQ ID NO: 17244 - protein, 19 aa, synthetic construct
  REGION 1..19: note = Description of Artificial Sequence: Synthetic peptide
  REGION 1..19: note = XENP018182 vhCDR2
EIRLHSNNYATHYAEPVKG

SEQ ID NO: 17245 - protein, 11 aa, synthetic construct
  REGION 1..11: note = Description of Artificial Sequence: Synthetic peptide
  REGION 1..11: note = XENP018182 vhCDR3
YYGNYGGYFDV

SEQ ID NO: 17246 - protein, 214 aa, synthetic construct; identical to SEQ ID NO: 16226
  REGION 1..214: note = Description of Artificial Sequence: Synthetic polypeptide
  REGION 1..214: note = XENP018182 1G6_H1.85_L1_IgG1_PVA_/S267K Light Chain

SEQ ID NO: 17247 - protein, 107 aa, synthetic construct; identical to SEQ ID NO: 10923
  REGION 1..107: note = Description of Artificial Sequence: Synthetic polypeptide
  REGION 1..107: note = VL of XENP018182

SEQ ID NO: 17248 - protein, 11 aa, synthetic construct
  REGION 1..11: note = Description of Artificial Sequence: Synthetic peptide
  REGION 1..11: note = XENP018182 vlCDR1
RASQSVSNDVA

SEQ ID NO: 17249 - protein, 7 aa, synthetic construct
  REGION 1..7: note = Description of Artificial Sequence: Synthetic peptide
  REGION 1..7: note = XENP018182 vlCDR2
YASHRYT

SEQ ID NO: 17250 - protein, 9 aa, synthetic construct
  REGION 1..9: note = Description of Artificial Sequence: Synthetic peptide
  REGION 1..9: note = XENP018182 vlCDR3
QQDYSSPRT

SEQ ID NO: 17251 - protein, 451 aa, synthetic construct
  REGION 1..451: note = Description of Artificial Sequence: Synthetic polypeptide
  REGION 1..451: note = XENP018183 1G6_H1.86_L1_IgG1_PVA_/S267K Heavy Chain
EVQLVESGGGLVKPGGSLRLSCAASGFTFSNYWMNWVRQAPGKGLEWVGEIRLSSNNYATHYAEPVKGRFTISRDDSKSTVYLQMNSLKTEDTAVYYCTRYYGNYGGYFDVWGAGTLVTVSSASTKGPSVFPLAPSSKSTSGGTAALGCLVKDYFPEPVTVSWNSGALTSGVHTFPAVLQSSGLYSLSSVVTVPSSSLGTQTYICNVNHKPSNTKVDKKVEPKSCDKTHTCPPCPAPPVAGPSVFLFPPKPKDTLMISRTPEVTCVVVDVKHEDPEVKFNWYVDGVEVHNAKTKPREEQYNSTYRVVSVLTVLHQDWLNGKEYKCKVSNKALPAPIEKTISKAKGQPREPQVYTLPPSREEMTKNQVSLTCLVKGFYPSDIAVEWESNGQPENNYKTTPPVLDSDGSFFLYSKLTVDKSRWQQGNVFSCSVMHEALHNHYTQKSLSLSPGK

SEQ ID NO: 17252 - protein, 122 aa, synthetic construct; identical to SEQ ID NO: 11801
  REGION 1..122: note = Description of Artificial Sequence: Synthetic polypeptide
  REGION 1..122: note = VH of XENP018183

SEQ ID NO: 17253 - protein, 5 aa, synthetic construct
  REGION 1..5: note = Description of Artificial Sequence: Synthetic peptide
  REGION 1..5: note = XENP018183 vhCDR1
NYWMN

SEQ ID NO: 17254 - protein, 19 aa, synthetic construct
  REGION 1..19: note = Description of Artificial Sequence: Synthetic peptide
  REGION 1..19: note = XENP018183 vhCDR2
EIRLSSNNYATHYAEPVKG

SEQ ID NO: 17255 - protein, 11 aa, synthetic construct
  REGION 1..11: note = Description of Artificial Sequence: Synthetic peptide
  REGION 1..11: note = XENP018183 vhCDR3
YYGNYGGYFDV

SEQ ID NO: 17256 - protein, 214 aa, synthetic construct; identical to SEQ ID NO: 16226
  REGION 1..214: note = Description of Artificial Sequence: Synthetic polypeptide
  REGION 1..214: note = XENP018183 1G6_H1.86_L1_IgG1_PVA_/S267K Light Chain

SEQ ID NO: 17257 - protein, 107 aa, synthetic construct; identical to SEQ ID NO: 10923
  REGION 1..107: note = Description of Artificial Sequence: Synthetic polypeptide
  REGION 1..107: note = VL of XENP018183

SEQ ID NO: 17258 - protein, 11 aa, synthetic construct
  REGION 1..11: note = Description of Artificial Sequence: Synthetic peptide
  REGION 1..11: note = XENP018183 vlCDR1
RASQSVSNDVA

SEQ ID NO: 17259 - protein, 7 aa, synthetic construct
  REGION 1..7: note = Description of Artificial Sequence: Synthetic peptide
  REGION 1..7: note = XENP018183 vlCDR2
YASHRYT

SEQ ID NO: 17260 - protein, 9 aa, synthetic construct
  REGION 1..9: note = Description of Artificial Sequence: Synthetic peptide
  REGION 1..9: note = XENP018183 vlCDR3
QQDYSSPRT

SEQ ID NO: 17261 - protein, 451 aa, synthetic construct
  REGION 1..451: note = Description of Artificial Sequence: Synthetic polypeptide
  REGION 1..451: note = XENP018184 1G6_H1.87_L1_IgG1_PVA_/S267K Heavy Chain
EVQLVESGGGLVKPGGSLRLSCAASGFTFSNYWMNWVRQAPGKGLEWVGEIRLDSNNYATHYAEPVKGRFTISRDDSKSTVYLQMNSLKTEDTAVYYCTRYYGNYGGYFDVWGAGTLVTVSSASTKGPSVFPLAPSSKSTSGGTAALGCLVKDYFPEPVTVSWNSGALTSGVHTFPAVLQSSGLYSLSSVVTVPSSSLGTQTYICNVNHKPSNTKVDKKVEPKSCDKTHTCPPCPAPPVAGPSVFLFPPKPKDTLMISRTPEVTCVVVDVKHEDPEVKFNWYVDGVEVHNAKTKPREEQYNSTYRVVSVLTVLHQDWLNGKEYKCKVSNKALPAPIEKTISKAKGQPREPQVYTLPPSREEMTKNQVSLTCLVKGFYPSDIAVEWESNGQPENNYKTTPPVLDSDGSFFLYSKLTVDKSRWQQGNVFSCSVMHEALHNHYTQKSLSLSPGK

SEQ ID NO: 17262 - protein, 122 aa, synthetic construct; identical to SEQ ID NO: 11810
  REGION 1..122: note = Description of Artificial Sequence: Synthetic polypeptide
  REGION 1..122: note = VH of XENP018184

SEQ ID NO: 17263 - protein, 5 aa, synthetic construct
  REGION 1..5: note = Description of Artificial Sequence: Synthetic peptide
  REGION 1..5: note = XENP018184 vhCDR1
NYWMN

SEQ ID NO: 17264 - protein, 19 aa, synthetic construct
  REGION 1..19: note = Description of Artificial Sequence: Synthetic peptide
  REGION 1..19: note = XENP018184 vhCDR2
EIRLDSNNYATHYAEPVKG

SEQ ID NO: 17265 - protein, 11 aa, synthetic construct
  REGION 1..11: note = Description of Artificial Sequence: Synthetic peptide
  REGION 1..11: note = XENP018184 vhCDR3
YYGNYGGYFDV

SEQ ID NO: 17266 - protein, 214 aa, synthetic construct; identical to SEQ ID NO: 16226
  REGION 1..214: note = Description of Artificial Sequence: Synthetic polypeptide
  REGION 1..214: note = XENP018184 1G6_H1.87_L1_IgG1_PVA_/S267K Light Chain

SEQ ID NO: 17267 - protein, 107 aa, synthetic construct; identical to SEQ ID NO: 10923
  REGION 1..107: note = Description of Artificial Sequence: Synthetic polypeptide
  REGION 1..107: note = VL of XENP018184

SEQ ID NO: 17268 - protein, 11 aa, synthetic construct
  REGION 1..11: note = Description of Artificial Sequence: Synthetic peptide
  REGION 1..11: note = XENP018184 vlCDR1
RASQSVSNDVA

SEQ ID NO: 17269 - protein, 7 aa, synthetic construct
  REGION 1..7: note = Description of Artificial Sequence: Synthetic peptide
  REGION 1..7: note = XENP018184 vlCDR2
YASHRYT

SEQ ID NO: 17270 - protein, 9 aa, synthetic construct
  REGION 1..9: note = Description of Artificial Sequence: Synthetic peptide
  REGION 1..9: note = XENP018184 vlCDR3
QQDYSSPRT

SEQ ID NO: 17271 - protein, 451 aa, synthetic construct
  REGION 1..451: note = Description of Artificial Sequence: Synthetic polypeptide
  REGION 1..451: note = XENP018185 1G6_H1.88_L1_IgG1_PVA_/S267K Heavy Chain
EVQLVESGGGLVKPGGSLRLSCAASGFTFSNYWMNWVRQAPGKGLEWVGEIRLASNNYATHYAEPVKGRFTISRDDSKSTVYLQMNSLKTEDTAVYYCTRYYGNYGGYFDVWGAGTLVTVSSASTKGPSVFPLAPSSKSTSGGTAALGCLVKDYFPEPVTVSWNSGALTSGVHTFPAVLQSSGLYSLSSVVTVPSSSLGTQTYICNVNHKPSNTKVDKKVEPKSCDKTHTCPPCPAPPVAGPSVFLFPPKPKDTLMISRTPEVTCVVVDVKHEDPEVKFNWYVDGVEVHNAKTKPREEQYNSTYRVVSVLTVLHQDWLNGKEYKCKVSNKALPAPIEKTISKAKGQPREPQVYTLPPSREEMTKNQVSLTCLVKGFYPSDIAVEWESNGQPENNYKTTPPVLDSDGSFFLYSKLTVDKSRWQQGNVFSCSVMHEALHNHYTQKSLSLSPGK

SEQ ID NO: 17272 - protein, 122 aa, synthetic construct; identical to SEQ ID NO: 11819
  REGION 1..122: note = Description of Artificial Sequence: Synthetic polypeptide
  REGION 1..122: note = VH of XENP018185

SEQ ID NO: 17273 - protein, 5 aa, synthetic construct
  REGION 1..5: note = Description of Artificial Sequence: Synthetic peptide
  REGION 1..5: note = XENP018185 vhCDR1
NYWMN

SEQ ID NO: 17274 - protein, 19 aa, synthetic construct
  REGION 1..19: note = Description of Artificial Sequence: Synthetic peptide
  REGION 1..19: note = XENP018185 vhCDR2
EIRLASNNYATHYAEPVKG

SEQ ID NO: 17275 - protein, 11 aa, synthetic construct
  REGION 1..11: note = Description of Artificial Sequence: Synthetic peptide
  REGION 1..11: note = XENP018185 vhCDR3
YYGNYGGYFDV

SEQ ID NO: 17276 - protein, 214 aa, synthetic construct; identical to SEQ ID NO: 16226
  REGION 1..214: note = Description of Artificial Sequence: Synthetic polypeptide
  REGION 1..214: note = XENP018185 1G6_H1.88_L1_IgG1_PVA_/S267K Light Chain

SEQ ID NO: 17277 - protein, 107 aa, synthetic construct; identical to SEQ ID NO: 10923
  REGION 1..107: note = Description of Artificial Sequence: Synthetic polypeptide
  REGION 1..107: note = VL of XENP018185

SEQ ID NO: 17278 - protein, 11 aa, synthetic construct
  REGION 1..11: note = Description of Artificial Sequence: Synthetic peptide
  REGION 1..11: note = XENP018185 vlCDR1
RASQSVSNDVA

SEQ ID NO: 17279 - protein, 7 aa, synthetic construct
  REGION 1..7: note = Description of Artificial Sequence: Synthetic peptide
  REGION 1..7: note = XENP018185 vlCDR2
YASHRYT

SEQ ID NO: 17280 - protein, 9 aa, synthetic construct
  REGION 1..9: note = Description of Artificial Sequence: Synthetic peptide
  REGION 1..9: note = XENP018185 vlCDR3
QQDYSSPRT

SEQ ID NO: 17281 - protein, 451 aa, synthetic construct
  REGION 1..451: note = Description of Artificial Sequence: Synthetic polypeptide
  REGION 1..451: note = XENP018186 1G6_H1.89_L1_IgG1_PVA_/S267K Heavy Chain
EVQLVESGGGLVKPGGSLRLSCAASGFTFSNYWMNWVRQAPGKGLEWVGEIRLGSNNYATHYAEPVKGRFTISRDDSKSTVYLQMNSLKTEDTAVYYCTRYYGNYGGYFDVWGAGTLVTVSSASTKGPSVFPLAPSSKSTSGGTAALGCLVKDYFPEPVTVSWNSGALTSGVHTFPAVLQSSGLYSLSSVVTVPSSSLGTQTYICNVNHKPSNTKVDKKVEPKSCDKTHTCPPCPAPPVAGPSVFLFPPKPKDTLMISRTPEVTCVVVDVKHEDPEVKFNWYVDGVEVHNAKTKPREEQYNSTYRVVSVLTVLHQDWLNGKEYKCKVSNKALPAPIEKTISKAKGQPREPQVYTLPPSREEMTKNQVSLTCLVKGFYPSDIAVEWESNGQPENNYKTTPPVLDSDGSFFLYSKLTVDKSRWQQGNVFSCSVMHEALHNHYTQKSLSLSPGK

SEQ ID NO: 17282 - protein, 122 aa, synthetic construct; identical to SEQ ID NO: 11828
  REGION 1..122: note = Description of Artificial Sequence: Synthetic polypeptide
  REGION 1..122: note = VH of XENP018186

SEQ ID NO: 17283 - protein, 5 aa, synthetic construct
  REGION 1..5: note = Description of Artificial Sequence: Synthetic peptide
  REGION 1..5: note = XENP018186 vhCDR1
NYWMN

SEQ ID NO: 17284 - protein, 19 aa, synthetic construct
  REGION 1..19: note = Description of Artificial Sequence: Synthetic peptide
  REGION 1..19: note = XENP018186 vhCDR2
EIRLGSNNYATHYAEPVKG

SEQ ID NO: 17285 - protein, 11 aa, synthetic construct
  REGION 1..11: note = Description of Artificial Sequence: Synthetic peptide
  REGION 1..11: note = XENP018186 vhCDR3
YYGNYGGYFDV

SEQ ID NO: 17286 - protein, 214 aa, synthetic construct; identical to SEQ ID NO: 16226
  REGION 1..214: note = Description of Artificial Sequence: Synthetic polypeptide
  REGION 1..214: note = XENP018186 1G6_H1.89_L1_IgG1_PVA_/S267K Light Chain

SEQ ID NO: 17287 - protein, 107 aa, synthetic construct; identical to SEQ ID NO: 10923
  REGION 1..107: note = Description of Artificial Sequence: Synthetic polypeptide
  REGION 1..107: note = VL of XENP018186

SEQ ID NO: 17288 - protein, 11 aa, synthetic construct
  REGION 1..11: note = Description of Artificial Sequence: Synthetic peptide
  REGION 1..11: note = XENP018186 vlCDR1
RASQSVSNDVA

SEQ ID NO: 17289 - protein, 7 aa, synthetic construct
  REGION 1..7: note = Description of Artificial Sequence: Synthetic peptide
  REGION 1..7: note = XENP018186 vlCDR2
YASHRYT

SEQ ID NO: 17290 - protein, 9 aa, synthetic construct
  REGION 1..9: note = Description of Artificial Sequence: Synthetic peptide
  REGION 1..9: note = XENP018186 vlCDR3
QQDYSSPRT

SEQ ID NO: 17291 - protein, 451 aa, synthetic construct
  REGION 1..451: note = Description of Artificial Sequence: Synthetic polypeptide
  REGION 1..451: note = XENP018187 1G6_H1.90_L1_IgG1_PVA_/S267K Heavy Chain
EVQLVESGGGLVKPGGSLRLSCAASGFTFSNYWMNWVRQAPGKGLEWVGEIRLYSNNYATHYAEPVKGRFTISRDDSKSTVYLQMNSLKTEDTAVYYCTRYYGNYGGYFDVWGAGTLVTVSSASTKGPSVFPLAPSSKSTSGGTAALGCLVKDYFPEPVTVSWNSGALTSGVHTFPAVLQSSGLYSLSSVVTVPSSSLGTQTYICNVNHKPSNTKVDKKVEPKSCDKTHTCPPCPAPPVAGPSVFLFPPKPKDTLMISRTPEVTCVVVDVKHEDPEVKFNWYVDGVEVHNAKTKPREEQYNSTYRVVSVLTVLHQDWLNGKEYKCKVSNKALPAPIEKTISKAKGQPREPQVYTLPPSREEMTKNQVSLTCLVKGFYPSDIAVEWESNGQPENNYKTTPPVLDSDGSFFLYSKLTVDKSRWQQGNVFSCSVMHEALHNHYTQKSLSLSPGK

SEQ ID NO: 17292 - protein, 122 aa, synthetic construct; identical to SEQ ID NO: 11837
  REGION 1..122: note = Description of Artificial Sequence: Synthetic polypeptide
  REGION 1..122: note = VH of XENP018187

SEQ ID NO: 17293 - protein, 5 aa, synthetic construct
  REGION 1..5: note = Description of Artificial Sequence: Synthetic peptide
  REGION 1..5: note = XENP018187 vhCDR1
NYWMN

SEQ ID NO: 17294 - protein, 19 aa, synthetic construct
  REGION 1..19: note = Description of Artificial Sequence: Synthetic peptide
  REGION 1..19: note = XENP018187 vhCDR2
EIRLYSNNYATHYAEPVKG

SEQ ID NO: 17295 - protein, 11 aa, synthetic construct
  REGION 1..11: note = Description of Artificial Sequence: Synthetic peptide
  REGION 1..11: note = XENP018187 vhCDR3
YYGNYGGYFDV

SEQ ID NO: 17296 - protein, 214 aa, synthetic construct; identical to SEQ ID NO: 16226
  REGION 1..214: note = Description of Artificial Sequence: Synthetic polypeptide
  REGION 1..214: note = XENP018187 1G6_H1.90_L1_IgG1_PVA_/S267K Light Chain

SEQ ID NO: 17297 - protein, 107 aa, synthetic construct; identical to SEQ ID NO: 10923
  REGION 1..107: note = Description of Artificial Sequence: Synthetic polypeptide
  REGION 1..107: note = VL of XENP018187

SEQ ID NO: 17298 - protein, 11 aa, synthetic construct
  REGION 1..11: note = Description of Artificial Sequence: Synthetic peptide
  REGION 1..11: note = XENP018187 vlCDR1
RASQSVSNDVA

SEQ ID NO: 17299 - protein, 7 aa, synthetic construct
  REGION 1..7: note = Description of Artificial Sequence: Synthetic peptide
  REGION 1..7: note = XENP018187 vlCDR2
YASHRYT

SEQ ID NO: 17300 - protein, 9 aa, synthetic construct
  REGION 1..9: note = Description of Artificial Sequence: Synthetic peptide
  REGION 1..9: note = XENP018187 vlCDR3
QQDYSSPRT

SEQ ID NO: 17301 - protein, 451 aa, synthetic construct
  REGION 1..451: note = Description of Artificial Sequence: Synthetic polypeptide
  REGION 1..451: note = XENP018188 1G6_H1.91_L1_IgG1_PVA_/S267K Heavy Chain
EVQLVESGGGLVKPGGSLRLSCAASGFTFSNYWMNWVRQAPGKGLEWVGEIRLISNNYATHYAEPVKGRFTISRDDSKSTVYLQMNSLKTEDTAVYYCTRYYGNYGGYFDVWGAGTLVTVSSASTKGPSVFPLAPSSKSTSGGTAALGCLVKDYFPEPVTVSWNSGALTSGVHTFPAVLQSSGLYSLSSVVTVPSSSLGTQTYICNVNHKPSNTKVDKKVEPKSCDKTHTCPPCPAPPVAGPSVFLFPPKPKDTLMISRTPEVTCVVVDVKHEDPEVKFNWYVDGVEVHNAKTKPREEQYNSTYRVVSVLTVLHQDWLNGKEYKCKVSNKALPAPIEKTISKAKGQPREPQVYTLPPSREEMTKNQVSLTCLVKGFYPSDIAVEWESNGQPENNYKTTPPVLDSDGSFFLYSKLTVDKSRWQQGNVFSCSVMHEALHNHYTQKSLSLSPGK

SEQ ID NO: 17302 - protein, 122 aa, synthetic construct; identical to SEQ ID NO: 11846
  REGION 1..122: note = Description of Artificial Sequence: Synthetic polypeptide
  REGION 1..122: note = VH of XENP018188

SEQ ID NO: 17303 - protein, 5 aa, synthetic construct
  REGION 1..5: note = Description of Artificial Sequence: Synthetic peptide
  REGION 1..5: note = XENP018188 vhCDR1
NYWMN

SEQ ID NO: 17304 - protein, 19 aa, synthetic construct
  REGION 1..19: note = Description of Artificial Sequence: Synthetic peptide
  REGION 1..19: note = XENP018188 vhCDR2
EIRLISNNYATHYAEPVKG

SEQ ID NO: 17305 - protein, 11 aa, synthetic construct
  REGION 1..11: note = Description of Artificial Sequence: Synthetic peptide
  REGION 1..11: note = XENP018188 vhCDR3
YYGNYGGYFDV

SEQ ID NO: 17306 - protein, 214 aa, synthetic construct; identical to SEQ ID NO: 16226
  REGION 1..214: note = Description of Artificial Sequence: Synthetic polypeptide
  REGION 1..214: note = XENP018188 1G6_H1.91_L1_IgG1_PVA_/S267K Light Chain

SEQ ID NO: 17307 - protein, 107 aa, synthetic construct; identical to SEQ ID NO: 10923
  REGION 1..107: note = Description of Artificial Sequence: Synthetic polypeptide
  REGION 1..107: note = VL of XENP018188

SEQ ID NO: 17308 - protein, 11 aa, synthetic construct
  REGION 1..11: note = Description of Artificial Sequence: Synthetic peptide
  REGION 1..11: note = XENP018188 vlCDR1
RASQSVSNDVA

SEQ ID NO: 17309 - protein, 7 aa, synthetic construct
  REGION 1..7: note = Description of Artificial Sequence: Synthetic peptide
  REGION 1..7: note = XENP018188 vlCDR2
YASHRYT

SEQ ID NO: 17310 - protein, 9 aa, synthetic construct
  REGION 1..9: note = Description of Artificial Sequence: Synthetic peptide
  REGION 1..9: note = XENP018188 vlCDR3
QQDYSSPRT

SEQ ID NO: 17311 - protein, 451 aa, synthetic construct
  REGION 1..451: note = Description of Artificial Sequence: Synthetic polypeptide
  REGION 1..451: note = XENP018189 1G6_H1.92_L1_IgG1_PVA_/S267K Heavy Chain
EVQLVESGGGLVKPGGSLRLSCAASGFTFSNYWMNWVRQAPGKGLEWVGEIRLKTNNYATHYAEPVKGRFTISRDDSKSTVYLQMNSLKTEDTAVYYCTRYYGNYGGYFDVWGAGTLVTVSSASTKGPSVFPLAPSSKSTSGGTAALGCLVKDYFPEPVTVSWNSGALTSGVHTFPAVLQSSGLYSLSSVVTVPSSSLGTQTYICNVNHKPSNTKVDKKVEPKSCDKTHTCPPCPAPPVAGPSVFLFPPKPKDTLMISRTPEVTCVVVDVKHEDPEVKFNWYVDGVEVHNAKTKPREEQYNSTYRVVSVLTVLHQDWLNGKEYKCKVSNKALPAPIEKTISKAKGQPREPQVYTLPPSREEMTKNQVSLTCLVKGFYPSDIAVEWESNGQPENNYKTTPPVLDSDGSFFLYSKLTVDKSRWQQGNVFSCSVMHEALHNHYTQKSLSLSPGK

SEQ ID NO: 17312 - protein, 122 aa, synthetic construct; identical to SEQ ID NO: 11855
  REGION 1..122: note = Description of Artificial Sequence: Synthetic polypeptide
  REGION 1..122: note = VH of XENP018189

SEQ ID NO: 17313 - protein, 5 aa, synthetic construct
  REGION 1..5: note = Description of Artificial Sequence: Synthetic peptide
  REGION 1..5: note = XENP018189 vhCDR1
NYWMN

SEQ ID NO: 17314 - protein, 19 aa, synthetic construct
  REGION 1..19: note = Description of Artificial Sequence: Synthetic peptide
  REGION 1..19: note = XENP018189 vhCDR2
EIRLKTNNYATHYAEPVKG

SEQ ID NO: 17315 - protein, 11 aa, synthetic construct
  REGION 1..11: note = Description of Artificial Sequence: Synthetic peptide
  REGION 1..11: note = XENP018189 vhCDR3
YYGNYGGYFDV

SEQ ID NO: 17316 - protein, 214 aa, synthetic construct; identical to SEQ ID NO: 16226
  REGION 1..214: note = Description of Artificial Sequence: Synthetic polypeptide
  REGION 1..214: note = XENP018189 1G6_H1.92_L1_IgG1_PVA_/S267K Light Chain

SEQ ID NO: 17317 - protein, 107 aa, synthetic construct; identical to SEQ ID NO: 10923
  REGION 1..107: note = Description of Artificial Sequence: Synthetic polypeptide
  REGION 1..107: note = VL of XENP018189

SEQ ID NO: 17318 - protein, 11 aa, synthetic construct
  REGION 1..11: note = Description of Artificial Sequence: Synthetic peptide
  REGION 1..11: note = XENP018189 vlCDR1
RASQSVSNDVA

SEQ ID NO: 17319 - protein, 7 aa, synthetic construct
  REGION 1..7: note = Description of Artificial Sequence: Synthetic peptide
  REGION 1..7: note = XENP018189 vlCDR2
YASHRYT

SEQ ID NO: 17320 - protein, 9 aa, synthetic construct
  REGION 1..9: note = Description of Artificial Sequence: Synthetic peptide
  REGION 1..9: note = XENP018189 vlCDR3
QQDYSSPRT

SEQ ID NO: 17321 - protein, 451 aa, synthetic construct
  REGION 1..451: note = Description of Artificial Sequence: Synthetic polypeptide
  REGION 1..451: note = XENP018190 1G6_H1.93_L1_IgG1_PVA_/S267K Heavy Chain
EVQLVESGGGLVKPGGSLRLSCAASGFTFSNYWMNWVRQAPGKGLEWVGEIRLKANNYATHYAEPVKGRFTISRDDSKSTVYLQMNSLKTEDTAVYYCTRYYGNYGGYFDVWGAGTLVTVSSASTKGPSVFPLAPSSKSTSGGTAALGCLVKDYFPEPVTVSWNSGALTSGVHTFPAVLQSSGLYSLSSVVTVPSSSLGTQTYICNVNHKPSNTKVDKKVEPKSCDKTHTCPPCPAPPVAGPSVFLFPPKPKDTLMISRTPEVTCVVVDVKHEDPEVKFNWYVDGVEVHNAKTKPREEQYNSTYRVVSVLTVLHQDWLNGKEYKCKVSNKALPAPIEKTISKAKGQPREPQVYTLPPSREEMTKNQVSLTCLVKGFYPSDIAVEWESNGQPENNYKTTPPVLDSDGSFFLYSKLTVDKSRWQQGNVFSCSVMHEALHNHYTQKSLSLSPGK

SEQ ID NO: 17322 - protein, 122 aa, synthetic construct; identical to SEQ ID NO: 11864
  REGION 1..122: note = Description of Artificial Sequence: Synthetic polypeptide
  REGION 1..122: note = VH of XENP018190

SEQ ID NO: 17323 - protein, 5 aa, synthetic construct
  REGION 1..5: note = Description of Artificial Sequence: Synthetic peptide
  REGION 1..5: note = XENP018190 vhCDR1
NYWMN

SEQ ID NO: 17324 - protein, 19 aa, synthetic construct
  REGION 1..19: note = Description of Artificial Sequence: Synthetic peptide
  REGION 1..19: note = XENP018190 vhCDR2
EIRLKANNYATHYAEPVKG

SEQ ID NO: 17325 - protein, 11 aa, synthetic construct
  REGION 1..11: note = Description of Artificial Sequence: Synthetic peptide
  REGION 1..11: note = XENP018190 vhCDR3
YYGNYGGYFDV

SEQ ID NO: 17326 - protein, 214 aa, synthetic construct; identical to SEQ ID NO: 16226
  REGION 1..214: note = Description of Artificial Sequence: Synthetic polypeptide
  REGION 1..214: note = XENP018190 1G6_H1.93_L1_IgG1_PVA_/S267K Light Chain

SEQ ID NO: 17327 - protein, 107 aa, synthetic construct; identical to SEQ ID NO: 10923
  REGION 1..107: note = Description of Artificial Sequence: Synthetic polypeptide
  REGION 1..107: note = VL of XENP018190

SEQ ID NO: 17328 - protein, 11 aa, synthetic construct
  REGION 1..11: note = Description of Artificial Sequence: Synthetic peptide
  REGION 1..11: note = XENP018190 vlCDR1
RASQSVSNDVA

SEQ ID NO: 17329 - protein, 7 aa, synthetic construct
  REGION 1..7: note = Description of Artificial Sequence: Synthetic peptide
  REGION 1..7: note = XENP018190 vlCDR2
YASHRYT

SEQ ID NO: 17330 - protein, 9 aa, synthetic construct
  REGION 1..9: note = Description of Artificial Sequence: Synthetic peptide
  REGION 1..9: note = XENP018190 vlCDR3
QQDYSSPRT

SEQ ID NO: 17331 - protein, 451 aa, synthetic construct
  REGION 1..451: note = Description of Artificial Sequence: Synthetic polypeptide
  REGION 1..451: note = XENP018191 1G6_H1.94_L1_IgG1_PVA_/S267K Heavy Chain
EVQLVESGGGLVKPGGSLRLSCAASGFTFSNYWMNWVRQAPGKGLEWVGEIRLKQNNYATHYAEPVKGRFTISRDDSKSTVYLQMNSLKTEDTAVYYCTRYYGNYGGYFDVWGAGTLVTVSSASTKGPSVFPLAPSSKSTSGGTAALGCLVKDYFPEPVTVSWNSGALTSGVHTFPAVLQSSGLYSLSSVVTVPSSSLGTQTYICNVNHKPSNTKVDKKVEPKSCDKTHTCPPCPAPPVAGPSVFLFPPKPKDTLMISRTPEVTCVVVDVKHEDPEVKFNWYVDGVEVHNAKTKPREEQYNSTYRVVSVLTVLHQDWLNGKEYKCKVSNKALPAPIEKTISKAKGQPREPQVYTLPPSREEMTKNQVSLTCLVKGFYPSDIAVEWESNGQPENNYKTTPPVLDSDGSFFLYSKLTVDKSRWQQGNVFSCSVMHEALHNHYTQKSLSLSPGK

SEQ ID NO: 17332 - protein, 122 aa, synthetic construct; identical to SEQ ID NO: 11873
  REGION 1..122: note = Description of Artificial Sequence: Synthetic polypeptide
  REGION 1..122: note = VH of XENP018191

SEQ ID NO: 17333 - protein, 5 aa, synthetic construct
  REGION 1..5: note = Description of Artificial Sequence: Synthetic peptide
  REGION 1..5: note = XENP018191 vhCDR1
NYWMN

SEQ ID NO: 17334 - protein, 19 aa, synthetic construct
  REGION 1..19: note = Description of Artificial Sequence: Synthetic peptide
  REGION 1..19: note = XENP018191 vhCDR2
EIRLKQNNYATHYAEPVKG

SEQ ID NO: 17335 - protein, 11 aa, synthetic construct
  REGION 1..11: note = Description of Artificial Sequence: Synthetic peptide
  REGION 1..11: note = XENP018191 vhCDR3
YYGNYGGYFDV

SEQ ID NO: 17336 - protein, 214 aa, synthetic construct; identical to SEQ ID NO: 16226
  REGION 1..214: note = Description of Artificial Sequence: Synthetic polypeptide
  REGION 1..214: note = XENP018191 1G6_H1.94_L1_IgG1_PVA_/S267K Light Chain

SEQ ID NO: 17337 - protein, 107 aa, synthetic construct; identical to SEQ ID NO: 10923
  REGION 1..107: note = Description of Artificial Sequence: Synthetic polypeptide
  REGION 1..107: note = VL of XENP018191

SEQ ID NO: 17338 - protein, 11 aa, synthetic construct
  REGION 1..11: note = Description of Artificial Sequence: Synthetic peptide
  REGION 1..11: note = XENP018191 vlCDR1
RASQSVSNDVA

SEQ ID NO: 17339 - protein, 7 aa, synthetic construct
  REGION 1..7: note = Description of Artificial Sequence: Synthetic peptide
  REGION 1..7: note = XENP018191 vlCDR2
YASHRYT

SEQ ID NO: 17340 - protein, 9 aa, synthetic construct
  REGION 1..9: note = Description of Artificial Sequence: Synthetic peptide
  REGION 1..9: note = XENP018191 vlCDR3
QQDYSSPRT

SEQ ID NO: 17341 - protein, 451 aa, synthetic construct
  REGION 1..451: note = Description of Artificial Sequence: Synthetic polypeptide
  REGION 1..451: note = XENP018192 1G6_H1.95_L1_IgG1_PVA_/S267K Heavy Chain
EVQLVESGGGLVKPGGSLRLSCAASGFTFSNYWMNWVRQAPGKGLEWVGEIRLKGNNYATHYAEPVKGRFTISRDDSKSTVYLQMNSLKTEDTAVYYCTRYYGNYGGYFDVWGAGTLVTVSSASTKGPSVFPLAPSSKSTSGGTAALGCLVKDYFPEPVTVSWNSGALTSGVHTFPAVLQSSGLYSLSSVVTVPSSSLGTQTYICNVNHKPSNTKVDKKVEPKSCDKTHTCPPCPAPPVAGPSVFLFPPKPKDTLMISRTPEVTCVVVDVKHEDPEVKFNWYVDGVEVHNAKTKPREEQYNSTYRVVSVLTVLHQDWLNGKEYKCKVSNKALPAPIEKTISKAKGQPREPQVYTLPPSREEMTKNQVSLTCLVKGFYPSDIAVEWESNGQPENNYKTTPPVLDSDGSFFLYSKLTVDKSRWQQGNVFSCSVMHEALHNHYTQKSLSLSPGK

SEQ ID NO: 17342 - protein, 122 aa, synthetic construct; identical to SEQ ID NO: 11882
  REGION 1..122: note = Description of Artificial Sequence: Synthetic polypeptide
  REGION 1..122: note = VH of XENP018192

SEQ ID NO: 17343 - protein, 5 aa, synthetic construct
  REGION 1..5: note = Description of Artificial Sequence: Synthetic peptide
  REGION 1..5: note = XENP018192 vhCDR1
NYWMN

SEQ ID NO: 17344 - protein, 19 aa, synthetic construct
  REGION 1..19: note = Description of Artificial Sequence: Synthetic peptide
  REGION 1..19: note = XENP018192 vhCDR2
EIRLKGNNYATHYAEPVKG

SEQ ID NO: 17345 - protein, 11 aa, synthetic construct
  REGION 1..11: note = Description of Artificial Sequence: Synthetic peptide
  REGION 1..11: note = XENP018192 vhCDR3
YYGNYGGYFDV

SEQ ID NO: 17346 - protein, 214 aa, synthetic construct; identical to SEQ ID NO: 16226
  REGION 1..214: note = Description of Artificial Sequence: Synthetic polypeptide
  REGION 1..214: note = XENP018192 1G6_H1.95_L1_IgG1_PVA_/S267K Light Chain

SEQ ID NO: 17347 - protein, 107 aa, synthetic construct; identical to SEQ ID NO: 10923
  REGION 1..107: note = Description of Artificial Sequence: Synthetic polypeptide
  REGION 1..107: note = VL of XENP018192

SEQ ID NO: 17348 - protein, 11 aa, synthetic construct
  REGION 1..11: note = Description of Artificial Sequence: Synthetic peptide
  REGION 1..11: note = XENP018192 vlCDR1
RASQSVSNDVA

SEQ ID NO: 17349 - protein, 7 aa, synthetic construct
  REGION 1..7: note = Description of Artificial Sequence: Synthetic peptide
  REGION 1..7: note = XENP018192 vlCDR2
YASHRYT

SEQ ID NO: 17350 - protein, 9 aa, synthetic construct
  REGION 1..9: note = Description of Artificial Sequence: Synthetic peptide
  REGION 1..9: note = XENP018192 vlCDR3
QQDYSSPRT

SEQ ID NO: 17351 - protein, 451 aa, synthetic construct
  REGION 1..451: note = Description of Artificial Sequence: Synthetic polypeptide
  REGION 1..451: note = XENP018193 1G6_H1.96_L1_IgG1_PVA_/S267K Heavy Chain
EVQLVESGGGLVKPGGSLRLSCAASGFTFSNYWMNWVRQAPGKGLEWVGEIRLKVNNYATHYAEPVKGRFTISRDDSKSTVYLQMNSLKTEDTAVYYCTRYYGNYGGYFDVWGAGTLVTVSSASTKGPSVFPLAPSSKSTSGGTAALGCLVKDYFPEPVTVSWNSGALTSGVHTFPAVLQSSGLYSLSSVVTVPSSSLGTQTYICNVNHKPSNTKVDKKVEPKSCDKTHTCPPCPAPPVAGPSVFLFPPKPKDTLMISRTPEVTCVVVDVKHEDPEVKFNWYVDGVEVHNAKTKPREEQYNSTYRVVSVLTVLHQDWLNGKEYKCKVSNKALPAPIEKTISKAKGQPREPQVYTLPPSREEMTKNQVSLTCLVKGFYPSDIAVEWESNGQPENNYKTTPPVLDSDGSFFLYSKLTVDKSRWQQGNVFSCSVMHEALHNHYTQKSLSLSPGK

SEQ ID NO: 17352 - protein, 122 aa, synthetic construct; identical to SEQ ID NO: 11891
  REGION 1..122: note = Description of Artificial Sequence: Synthetic polypeptide
  REGION 1..122: note = VH of XENP018193

SEQ ID NO: 17353 - protein, 5 aa, synthetic construct
  REGION 1..5: note = Description of Artificial Sequence: Synthetic peptide
  REGION 1..5: note = XENP018193 vhCDR1
NYWMN

SEQ ID NO: 17354 - protein, 19 aa, synthetic construct
  REGION 1..19: note = Description of Artificial Sequence: Synthetic peptide
  REGION 1..19: note = XENP018193 vhCDR2
EIRLKVNNYATHYAEPVKG

SEQ ID NO: 17355 - protein, 11 aa, synthetic construct
  REGION 1..11: note = Description of Artificial Sequence: Synthetic peptide
  REGION 1..11: note = XENP018193 vhCDR3
YYGNYGGYFDV

SEQ ID NO: 17356 - protein, 214 aa, synthetic construct; identical to SEQ ID NO: 16226
  REGION 1..214: note = Description of Artificial Sequence: Synthetic polypeptide
  REGION 1..214: note = XENP018193 1G6_H1.96_L1_IgG1_PVA_/S267K Light Chain

SEQ ID NO: 17357 - protein, 107 aa, synthetic construct; identical to SEQ ID NO: 10923
  REGION 1..107: note = Description of Artificial Sequence: Synthetic polypeptide
  REGION 1..107: note = VL of XENP018193

SEQ ID NO: 17358 - protein, 11 aa, synthetic construct
  REGION 1..11: note = Description of Artificial Sequence: Synthetic peptide
  REGION 1..11: note = XENP018193 vlCDR1
RASQSVSNDVA

SEQ ID NO: 17359 - protein, 7 aa, synthetic construct
  REGION 1..7: note = Description of Artificial Sequence: Synthetic peptide
  REGION 1..7: note = XENP018193 vlCDR2
YASHRYT

SEQ ID NO: 17360 - protein, 9 aa, synthetic construct
  REGION 1..9: note = Description of Artificial Sequence: Synthetic peptide
  REGION 1..9: note = XENP018193 vlCDR3
QQDYSSPRT

SEQ ID NO: 17361 - protein, 451 aa, synthetic construct
  REGION 1..451: note = Description of Artificial Sequence: Synthetic polypeptide
  REGION 1..451: note = XENP018194 1G6_H1.97_L1_IgG1_PVA_/S267K Heavy Chain
EVQLVESGGGLVKPGGSLRLSCAASGFTFSNYWMNWVRQAPGKGLEWVGEIRLKHNNYATHYAEPVKGRFTISRDDSKSTVYLQMNSLKTEDTAVYYCTRYYGNYGGYFDVWGAGTLVTVSSASTKGPSVFPLAPSSKSTSGGTAALGCLVKDYFPEPVTVSWNSGALTSGVHTFPAVLQSSGLYSLSSVVTVPSSSLGTQTYICNVNHKPSNTKVDKKVEPKSCDKTHTCPPCPAPPVAGPSVFLFPPKPKDTLMISRTPEVTCVVVDVKHEDPEVKFNWYVDGVEVHNAKTKPREEQYNSTYRVVSVLTVLHQDWLNGKEYKCKVSNKALPAPIEKTISKAKGQPREPQVYTLPPSREEMTKNQVSLTCLVKGFYPSDIAVEWESNGQPENNYKTTPPVLDSDGSFFLYSKLTVDKSRWQQGNVFSCSVMHEALHNHYTQKSLSLSPGK

SEQ ID NO: 17362 - protein, 122 aa, synthetic construct; identical to SEQ ID NO: 11900
  REGION 1..122: note = Description of Artificial Sequence: Synthetic polypeptide
  REGION 1..122: note = VH of XENP018194

SEQ ID NO: 17363 - protein, 5 aa, synthetic construct
  REGION 1..5: note = Description of Artificial Sequence: Synthetic peptide
  REGION 1..5: note = XENP018194 vhCDR1
NYWMN

SEQ ID NO: 17364 - protein, 19 aa, synthetic construct
  REGION 1..19: note = Description of Artificial Sequence: Synthetic peptide
  REGION 1..19: note = XENP018194 vhCDR2
EIRLKHNNYATHYAEPVKG

SEQ ID NO: 17365 - protein, 11 aa, synthetic construct
  REGION 1..11: note = Description of Artificial Sequence: Synthetic peptide
  REGION 1..11: note = XENP018194 vhCDR3
YYGNYGGYFDV

SEQ ID NO: 17366 - protein, 214 aa, synthetic construct; identical to SEQ ID NO: 16226
  REGION 1..214: note = Description of Artificial Sequence: Synthetic polypeptide
  REGION 1..214: note = XENP018194 1G6_H1.97_L1_IgG1_PVA_/S267K Light Chain

SEQ ID NO: 17367 - protein, 107 aa, synthetic construct; identical to SEQ ID NO: 10923
  REGION 1..107: note = Description of Artificial Sequence: Synthetic polypeptide
  REGION 1..107: note = VL of XENP018194

SEQ ID NO: 17368 - protein, 11 aa, synthetic construct
  REGION 1..11: note = Description of Artificial Sequence: Synthetic peptide
  REGION 1..11: note = XENP018194 vlCDR1
RASQSVSNDVA

SEQ ID NO: 17369 - protein, 7 aa, synthetic construct
  REGION 1..7: note = Description of Artificial Sequence: Synthetic peptide
  REGION 1..7: note = XENP018194 vlCDR2
YASHRYT

SEQ ID NO: 17370 - protein, 9 aa, synthetic construct
  REGION 1..9: note = Description of Artificial Sequence: Synthetic peptide
  REGION 1..9: note = XENP018194 vlCDR3
QQDYSSPRT

SEQ ID NO: 17371 - protein, 451 aa, synthetic construct
  REGION 1..451: note = Description of Artificial Sequence: Synthetic polypeptide
  REGION 1..451: note = XENP018195 1G6_H1.98_L1_IgG1_PVA_/S267K Heavy Chain
EVQLVESGGGLVKPGGSLRLSCAASGFTFSNYWMNWVRQAPGKGLEWVGEIRLKDNNYATHYAEPVKGRFTISRDDSKSTVYLQMNSLKTEDTAVYYCTRYYGNYGGYFDVWGAGTLVTVSSASTKGPSVFPLAPSSKSTSGGTAALGCLVKDYFPEPVTVSWNSGALTSGVHTFPAVLQSSGLYSLSSVVTVPSSSLGTQTYICNVNHKPSNTKVDKKVEPKSCDKTHTCPPCPAPPVAGPSVFLFPPKPKDTLMISRTPEVTCVVVDVKHEDPEVKFNWYVDGVEVHNAKTKPREEQYNSTYRVVSVLTVLHQDWLNGKEYKCKVSNKALPAPIEKTISKAKGQPREPQVYTLPPSREEMTKNQVSLTCLVKGFYPSDIAVEWESNGQPENNYKTTPPVLDSDGSFFLYSKLTVDKSRWQQGNVFSCSVMHEALHNHYTQKSLSLSPGK

SEQ ID NO: 17372 - protein, 122 aa, synthetic construct; identical to SEQ ID NO: 11909
  REGION 1..122: note = Description of Artificial Sequence: Synthetic polypeptide
  REGION 1..122: note = VH of XENP018195

SEQ ID NO: 17373 - protein, 5 aa, synthetic construct
  REGION 1..5: note = Description of Artificial Sequence: Synthetic peptide
  REGION 1..5: note = XENP018195 vhCDR1
NYWMN

SEQ ID NO: 17374 - protein, 19 aa, synthetic construct
  REGION 1..19: note = Description of Artificial Sequence: Synthetic peptide
  REGION 1..19: note = XENP018195 vhCDR2
EIRLKDNNYATHYAEPVKG

SEQ ID NO: 17375 - protein, 11 aa, synthetic construct
  REGION 1..11: note = Description of Artificial Sequence: Synthetic peptide
  REGION 1..11: note = XENP018195 vhCDR3
YYGNYGGYFDV

SEQ ID NO: 17376 - protein, 214 aa, synthetic construct; identical to SEQ ID NO: 16226
  REGION 1..214: note = Description of Artificial Sequence: Synthetic polypeptide
  REGION 1..214: note = XENP018195 1G6_H1.98_L1_IgG1_PVA_/S267K Light Chain

SEQ ID NO: 17377 - protein, 107 aa, synthetic construct; identical to SEQ ID NO: 10923
  REGION 1..107: note = Description of Artificial Sequence: Synthetic polypeptide
  REGION 1..107: note = VL of XENP018195

SEQ ID NO: 17378 - protein, 11 aa, synthetic construct
  REGION 1..11: note = Description of Artificial Sequence: Synthetic peptide
  REGION 1..11: note = XENP018195 vlCDR1
RASQSVSNDVA

SEQ ID NO: 17379 - protein, 7 aa, synthetic construct
  REGION 1..7: note = Description of Artificial Sequence: Synthetic peptide
  REGION 1..7: note = XENP018195 vlCDR2
YASHRYT

SEQ ID NO: 17380 - protein, 9 aa, synthetic construct
  REGION 1..9: note = Description of Artificial Sequence: Synthetic peptide
  REGION 1..9: note = XENP018195 vlCDR3
QQDYSSPRT

SEQ ID NO: 17381 - protein, 451 aa, synthetic construct
  REGION 1..451: note = Description of Artificial Sequence: Synthetic polypeptide
  REGION 1..451: note = XENP018196 1G6_H1.99_L1_IgG1_PVA_/S267K Heavy Chain
EVQLVESGGGLVKPGGSLRLSCAASGFTFSNYWMNWVRQAPGKGLEWVGEIRLKKNNYATHYAEPVKGRFTISRDDSKSTVYLQMNSLKTEDTAVYYCTRYYGNYGGYFDVWGAGTLVTVSSASTKGPSVFPLAPSSKSTSGGTAALGCLVKDYFPEPVTVSWNSGALTSGVHTFPAVLQSSGLYSLSSVVTVPSSSLGTQTYICNVNHKPSNTKVDKKVEPKSCDKTHTCPPCPAPPVAGPSVFLFPPKPKDTLMISRTPEVTCVVVDVKHEDPEVKFNWYVDGVEVHNAKTKPREEQYNSTYRVVSVLTVLHQDWLNGKEYKCKVSNKALPAPIEKTISKAKGQPREPQVYTLPPSREEMTKNQVSLTCLVKGFYPSDIAVEWESNGQPENNYKTTPPVLDSDGSFFLYSKLTVDKSRWQQGNVFSCSVMHEALHNHYTQKSLSLSPGK

SEQ ID NO: 17382 - protein, 122 aa, synthetic construct; identical to SEQ ID NO: 11918
  REGION 1..122: note = Description of Artificial Sequence: Synthetic polypeptide
  REGION 1..122: note = VH of XENP018196

SEQ ID NO: 17383 - protein, 5 aa, synthetic construct
  REGION 1..5: note = Description of Artificial Sequence: Synthetic peptide
  REGION 1..5: note = XENP018196 vhCDR1
NYWMN

SEQ ID NO: 17384 - protein, 19 aa, synthetic construct
  REGION 1..19: note = Description of Artificial Sequence: Synthetic peptide
  REGION 1..19: note = XENP018196 vhCDR2
EIRLKKNNYATHYAEPVKG

SEQ ID NO: 17385 - protein, 11 aa, synthetic construct
  REGION 1..11: note = Description of Artificial Sequence: Synthetic peptide
  REGION 1..11: note = XENP018196 vhCDR3
YYGNYGGYFDV

SEQ ID NO: 17386 - protein, 214 aa, synthetic construct; identical to SEQ ID NO: 16226
  REGION 1..214: note = Description of Artificial Sequence: Synthetic polypeptide
  REGION 1..214: note = XENP018196 1G6_H1.99_L1_IgG1_PVA_/S267K Light Chain

SEQ ID NO: 17387 - protein, 107 aa, synthetic construct; identical to SEQ ID NO: 10923
  REGION 1..107: note = Description of Artificial Sequence: Synthetic polypeptide
  REGION 1..107: note = VL of XENP018196

SEQ ID NO: 17388 - protein, 11 aa, synthetic construct
  REGION 1..11: note = Description of Artificial Sequence: Synthetic peptide
  REGION 1..11: note = XENP018196 vlCDR1
RASQSVSNDVA

SEQ ID NO: 17389 - protein, 7 aa, synthetic construct
  REGION 1..7: note = Description of Artificial Sequence: Synthetic peptide
  REGION 1..7: note = XENP018196 vlCDR2
YASHRYT

SEQ ID NO: 17390 - protein, 9 aa, synthetic construct
  REGION 1..9: note = Description of Artificial Sequence: Synthetic peptide
  REGION 1..9: note = XENP018196 vlCDR3
QQDYSSPRT

SEQ ID NO: 17391 - protein, 451 aa, synthetic construct
  REGION 1..451: note = Description of Artificial Sequence: Synthetic polypeptide
  REGION 1..451: note = XENP018201 1G6_H1.100_L1_IgG1_PVA_/S267K Heavy Chain
EVQLVESGGGLVKPGGSLRLSCAASGFTFSNYWMNWVRQAPGKGLEWVGEIRLKYNNYATHYAEPVKGRFTISRDDSKSTVYLQMNSLKTEDTAVYYCTRYYGNYGGYFDVWGAGTLVTVSSASTKGPSVFPLAPSSKSTSGGTAALGCLVKDYFPEPVTVSWNSGALTSGVHTFPAVLQSSGLYSLSSVVTVPSSSLGTQTYICNVNHKPSNTKVDKKVEPKSCDKTHTCPPCPAPPVAGPSVFLFPPKPKDTLMISRTPEVTCVVVDVKHEDPEVKFNWYVDGVEVHNAKTKPREEQYNSTYRVVSVLTVLHQDWLNGKEYKCKVSNKALPAPIEKTISKAKGQPREPQVYTLPPSREEMTKNQVSLTCLVKGFYPSDIAVEWESNGQPENNYKTTPPVLDSDGSFFLYSKLTVDKSRWQQGNVFSCSVMHEALHNHYTQKSLSLSPGK

SEQ ID NO: 17392 - protein, 122 aa, synthetic construct; identical to SEQ ID NO: 11927
  REGION 1..122: note = Description of Artificial Sequence: Synthetic polypeptide
  REGION 1..122: note = VH of XENP018201

SEQ ID NO: 17393 - protein, 5 aa, synthetic construct
  REGION 1..5: note = Description of Artificial Sequence: Synthetic peptide
  REGION 1..5: note = XENP018201 vhCDR1
NYWMN

SEQ ID NO: 17394 - protein, 19 aa, synthetic construct
  REGION 1..19: note = Description of Artificial Sequence: Synthetic peptide
  REGION 1..19: note = XENP018201 vhCDR2
EIRLKYNNYATHYAEPVKG

SEQ ID NO: 17395 - protein, 11 aa, synthetic construct
  REGION 1..11: note = Description of Artificial Sequence: Synthetic peptide
  REGION 1..11: note = XENP018201 vhCDR3
YYGNYGGYFDV

SEQ ID NO: 17396 - protein, 214 aa, synthetic construct; identical to SEQ ID NO: 16226
  REGION 1..214: note = Description of Artificial Sequence: Synthetic polypeptide
  REGION 1..214: note = XENP018201 1G6_H1.100_L1_IgG1_PVA_/S267K Light Chain

SEQ ID NO: 17397 - protein, 107 aa, synthetic construct; identical to SEQ ID NO: 10923
  REGION 1..107: note = Description of Artificial Sequence: Synthetic polypeptide
  REGION 1..107: note = VL of XENP018201

SEQ ID NO: 17398 - protein, 11 aa, synthetic construct
  REGION 1..11: note = Description of Artificial Sequence: Synthetic peptide
  REGION 1..11: note = XENP018201 vlCDR1
RASQSVSNDVA

SEQ ID NO: 17399 - protein, 7 aa, synthetic construct
  REGION 1..7: note = Description of Artificial Sequence: Synthetic peptide
  REGION 1..7: note = XENP018201 vlCDR2
YASHRYT

SEQ ID NO: 17400 - protein, 9 aa, synthetic construct
  REGION 1..9: note = Description of Artificial Sequence: Synthetic peptide
  REGION 1..9: note = XENP018201 vlCDR3
QQDYSSPRT

SEQ ID NO: 17401 - protein, 451 aa, synthetic construct
  REGION 1..451: note = Description of Artificial Sequence: Synthetic polypeptide
  REGION 1..451: note = XENP018202 1G6_H1.101_L1_IgG1_PVA_/S267K Heavy Chain
EVQLVESGGGLVKPGGSLRLSCAASGFTFSNYWMNWVRQAPGKGLEWVGEIRLKSDNYATHYAEPVKGRFTISRDDSKSTVYLQMNSLKTEDTAVYYCTRYYGNYGGYFDVWGAGTLVTVSSASTKGPSVFPLAPSSKSTSGGTAALGCLVKDYFPEPVTVSWNSGALTSGVHTFPAVLQSSGLYSLSSVVTVPSSSLGTQTYICNVNHKPSNTKVDKKVEPKSCDKTHTCPPCPAPPVAGPSVFLFPPKPKDTLMISRTPEVTCVVVDVKHEDPEVKFNWYVDGVEVHNAKTKPREEQYNSTYRVVSVLTVLHQDWLNGKEYKCKVSNKALPAPIEKTISKAKGQPREPQVYTLPPSREEMTKNQVSLTCLVKGFYPSDIAVEWESNGQPENNYKTTPPVLDSDGSFFLYSKLTVDKSRWQQGNVFSCSVMHEALHNHYTQKSLSLSPGK

SEQ ID NO: 17402 - protein, 122 aa, synthetic construct; identical to SEQ ID NO: 11936
  REGION 1..122: note = Description of Artificial Sequence: Synthetic polypeptide
  REGION 1..122: note = VH of XENP018202

SEQ ID NO: 17403 - protein, 5 aa, synthetic construct
  REGION 1..5: note = Description of Artificial Sequence: Synthetic peptide
  REGION 1..5: note = XENP018202 vhCDR1
NYWMN

SEQ ID NO: 17404 - protein, 19 aa, synthetic construct
  REGION 1..19: note = Description of Artificial Sequence: Synthetic peptide
  REGION 1..19: note = XENP018202 vhCDR2
EIRLKSDNYATHYAEPVKG

SEQ ID NO: 17405 - protein, 11 aa, synthetic construct
  REGION 1..11: note = Description of Artificial Sequence: Synthetic peptide
  REGION 1..11: note = XENP018202 vhCDR3
YYGNYGGYFDV

SEQ ID NO: 17406 - protein, 214 aa, synthetic construct; identical to SEQ ID NO: 16226
  REGION 1..214: note = Description of Artificial Sequence: Synthetic polypeptide
  REGION 1..214: note = XENP018202 1G6_H1.101_L1_IgG1_PVA_/S267K Light Chain

SEQ ID NO: 17407 - protein, 107 aa, synthetic construct; identical to SEQ ID NO: 10923
  REGION 1..107: note = Description of Artificial Sequence: Synthetic polypeptide
  REGION 1..107: note = VL of XENP018202

SEQ ID NO: 17408 - protein, 11 aa, synthetic construct
  REGION 1..11: note = Description of Artificial Sequence: Synthetic peptide
  REGION 1..11: note = XENP018202 vlCDR1
RASQSVSNDVA

SEQ ID NO: 17409 - protein, 7 aa, synthetic construct
  REGION 1..7: note = Description of Artificial Sequence: Synthetic peptide
  REGION 1..7: note = XENP018202 vlCDR2
YASHRYT

SEQ ID NO: 17410 - protein, 9 aa, synthetic construct
  REGION 1..9: note = Description of Artificial Sequence: Synthetic peptide
  REGION 1..9: note = XENP018202 vlCDR3
QQDYSSPRT

SEQ ID NO: 17411 - protein, 451 aa, synthetic construct
  REGION 1..451: note = Description of Artificial Sequence: Synthetic polypeptide
  REGION 1..451: note = XENP018203 1G6_H1.102_L1_IgG1_PVA_/S267K Heavy Chain
EVQLVESGGGLVKPGGSLRLSCAASGFTFSNYWMNWVRQAPGKGLEWVGEIRLKSHNYATHYAEPVKGRFTISRDDSKSTVYLQMNSLKTEDTAVYYCTRYYGNYGGYFDVWGAGTLVTVSSASTKGPSVFPLAPSSKSTSGGTAALGCLVKDYFPEPVTVSWNSGALTSGVHTFPAVLQSSGLYSLSSVVTVPSSSLGTQTYICNVNHKPSNTKVDKKVEPKSCDKTHTCPPCPAPPVAGPSVFLFPPKPKDTLMISRTPEVTCVVVDVKHEDPEVKFNWYVDGVEVHNAKTKPREEQYNSTYRVVSVLTVLHQDWLNGKEYKCKVSNKALPAPIEKTISKAKGQPREPQVYTLPPSREEMTKNQVSLTCLVKGFYPSDIAVEWESNGQPENNYKTTPPVLDSDGSFFLYSKLTVDKSRWQQGNVFSCSVMHEALHNHYTQKSLSLSPGK

SEQ ID NO: 17412 - protein, 122 aa, synthetic construct; identical to SEQ ID NO: 11945
  REGION 1..122: note = Description of Artificial Sequence: Synthetic polypeptide
  REGION 1..122: note = VH of XENP018203

SEQ ID NO: 17413 - protein, 5 aa, synthetic construct
  REGION 1..5: note = Description of Artificial Sequence: Synthetic peptide
  REGION 1..5: note = XENP018203 vhCDR1
NYWMN

SEQ ID NO: 17414 - protein, 19 aa, synthetic construct
  REGION 1..19: note = Description of Artificial Sequence: Synthetic peptide
  REGION 1..19: note = XENP018203 vhCDR2
EIRLKSHNYATHYAEPVKG

SEQ ID NO: 17415 - protein, 11 aa, synthetic construct
  REGION 1..11: note = Description of Artificial Sequence: Synthetic peptide
  REGION 1..11: note = XENP018203 vhCDR3
YYGNYGGYFDV

SEQ ID NO: 17416 - protein, 214 aa, synthetic construct; identical to SEQ ID NO: 16226
  REGION 1..214: note = Description of Artificial Sequence: Synthetic polypeptide
  REGION 1..214: note = XENP018203 1G6_H1.102_L1_IgG1_PVA_/S267K Light Chain

SEQ ID NO: 17417 - protein, 107 aa, synthetic construct; identical to SEQ ID NO: 10923
  REGION 1..107: note = Description of Artificial Sequence: Synthetic polypeptide
  REGION 1..107: note = VL of XENP018203

SEQ ID NO: 17418 - protein, 11 aa, synthetic construct
  REGION 1..11: note = Description of Artificial Sequence: Synthetic peptide
  REGION 1..11: note = XENP018203 vlCDR1
RASQSVSNDVA

SEQ ID NO: 17419 - protein, 7 aa, synthetic construct
  REGION 1..7: note = Description of Artificial Sequence: Synthetic peptide
  REGION 1..7: note = XENP018203 vlCDR2
YASHRYT

SEQ ID NO: 17420 - protein, 9 aa, synthetic construct
  REGION 1..9: note = Description of Artificial Sequence: Synthetic peptide
  REGION 1..9: note = XENP018203 vlCDR3
QQDYSSPRT

SEQ ID NO: 17421 - protein, 451 aa, synthetic construct
  REGION 1..451: note = Description of Artificial Sequence: Synthetic polypeptide
  REGION 1..451: note = XENP018204 1G6_H1.103_L1_IgG1_PVA_/S267K Heavy Chain
EVQLVESGGGLVKPGGSLRLSCAASGFTFSNYWMNWVRQAPGKGLEWVGEIRLKSENYATHYAEPVKGRFTISRDDSKSTVYLQMNSLKTEDTAVYYCTRYYGNYGGYFDVWGAGTLVTVSSASTKGPSVFPLAPSSKSTSGGTAALGCLVKDYFPEPVTVSWNSGALTSGVHTFPAVLQSSGLYSLSSVVTVPSSSLGTQTYICNVNHKPSNTKVDKKVEPKSCDKTHTCPPCPAPPVAGPSVFLFPPKPKDTLMISRTPEVTCVVVDVKHEDPEVKFNWYVDGVEVHNAKTKPREEQYNSTYRVVSVLTVLHQDWLNGKEYKCKVSNKALPAPIEKTISKAKGQPREPQVYTLPPSREEMTKNQVSLTCLVKGFYPSDIAVEWESNGQPENNYKTTPPVLDSDGSFFLYSKLTVDKSRWQQGNVFSCSVMHEALHNHYTQKSLSLSPGK

SEQ ID NO: 17422 - protein, 122 aa, synthetic construct; identical to SEQ ID NO: 11954
  REGION 1..122: note = Description of Artificial Sequence: Synthetic polypeptide
  REGION 1..122: note = VH of XENP018204

SEQ ID NO: 17423 - protein, 5 aa, synthetic construct
  REGION 1..5: note = Description of Artificial Sequence: Synthetic peptide
  REGION 1..5: note = XENP018204 vhCDR1
NYWMN

SEQ ID NO: 17424 - protein, 19 aa, synthetic construct
  REGION 1..19: note = Description of Artificial Sequence: Synthetic peptide
  REGION 1..19: note = XENP018204 vhCDR2
EIRLKSENYATHYAEPVKG

SEQ ID NO: 17425 - protein, 11 aa, synthetic construct
  REGION 1..11: note = Description of Artificial Sequence: Synthetic peptide
  REGION 1..11: note = XENP018204 vhCDR3
YYGNYGGYFDV

SEQ ID NO: 17426 - protein, 214 aa, synthetic construct; identical to SEQ ID NO: 16226
  REGION 1..214: note = Description of Artificial Sequence: Synthetic polypeptide
  REGION 1..214: note = XENP018204 1G6_H1.103_L1_IgG1_PVA_/S267K Light Chain

SEQ ID NO: 17427 - protein, 107 aa, synthetic construct; identical to SEQ ID NO: 10923
  REGION 1..107: note = Description of Artificial Sequence: Synthetic polypeptide
  REGION 1..107: note = VL of XENP018204

SEQ ID NO: 17428 - protein, 11 aa, synthetic construct
  REGION 1..11: note = Description of Artificial Sequence: Synthetic peptide
  REGION 1..11: note = XENP018204 vlCDR1
RASQSVSNDVA

SEQ ID NO: 17429 - protein, 7 aa, synthetic construct
  REGION 1..7: note = Description of Artificial Sequence: Synthetic peptide
  REGION 1..7: note = XENP018204 vlCDR2
YASHRYT

SEQ ID NO: 17430 - protein, 9 aa, synthetic construct
  REGION 1..9: note = Description of Artificial Sequence: Synthetic peptide
  REGION 1..9: note = XENP018204 vlCDR3
QQDYSSPRT

SEQ ID NO: 17431 - protein, 451 aa, synthetic construct
  REGION 1..451: note = Description of Artificial Sequence: Synthetic polypeptide
  REGION 1..451: note = XENP018205 1G6_H1.104_L1_IgG1_PVA_/S267K Heavy Chain
EVQLVESGGGLVKPGGSLRLSCAASGFTFSNYWMNWVRQAPGKGLEWVGEIRLKSSNYATHYAEPVKGRFTISRDDSKSTVYLQMNSLKTEDTAVYYCTRYYGNYGGYFDVWGAGTLVTVSSASTKGPSVFPLAPSSKSTSGGTAALGCLVKDYFPEPVTVSWNSGALTSGVHTFPAVLQSSGLYSLSSVVTVPSSSLGTQTYICNVNHKPSNTKVDKKVEPKSCDKTHTCPPCPAPPVAGPSVFLFPPKPKDTLMISRTPEVTCVVVDVKHEDPEVKFNWYVDGVEVHNAKTKPREEQYNSTYRVVSVLTVLHQDWLNGKEYKCKVSNKALPAPIEKTISKAKGQPREPQVYTLPPSREEMTKNQVSLTCLVKGFYPSDIAVEWESNGQPENNYKTTPPVLDSDGSFFLYSKLTVDKSRWQQGNVFSCSVMHEALHNHYTQKSLSLSPGK

SEQ ID NO: 17432 - protein, 122 aa, synthetic construct; identical to SEQ ID NO: 11963
  REGION 1..122: note = Description of Artificial Sequence: Synthetic polypeptide
  REGION 1..122: note = VH of XENP018205

SEQ ID NO: 17433 - protein, 5 aa, synthetic construct
  REGION 1..5: note = Description of Artificial Sequence: Synthetic peptide
  REGION 1..5: note = XENP018205 vhCDR1
NYWMN

SEQ ID NO: 17434 - protein, 19 aa, synthetic construct
  REGION 1..19: note = Description of Artificial Sequence: Synthetic peptide
  REGION 1..19: note = XENP018205 vhCDR2
EIRLKSSNYATHYAEPVKG

SEQ ID NO: 17435 - protein, 11 aa, synthetic construct
  REGION 1..11: note = Description of Artificial Sequence: Synthetic peptide
  REGION 1..11: note = XENP018205 vhCDR3
YYGNYGGYFDV

SEQ ID NO: 17436 - protein, 214 aa, synthetic construct; identical to SEQ ID NO: 16226
  REGION 1..214: note = Description of Artificial Sequence: Synthetic polypeptide
  REGION 1..214: note = XENP018205 1G6_H1.104_L1_IgG1_PVA_/S267K Light Chain

SEQ ID NO: 17437 - protein, 107 aa, synthetic construct; identical to SEQ ID NO: 10923
  REGION 1..107: note = Description of Artificial Sequence: Synthetic polypeptide
  REGION 1..107: note = VL of XENP018205

SEQ ID NO: 17438 - protein, 11 aa, synthetic construct
  REGION 1..11: note = Description of Artificial Sequence: Synthetic peptide
  REGION 1..11: note = XENP018205 vlCDR1
RASQSVSNDVA

SEQ ID NO: 17439 - protein, 7 aa, synthetic construct
  REGION 1..7: note = Description of Artificial Sequence: Synthetic peptide
  REGION 1..7: note = XENP018205 vlCDR2
YASHRYT

SEQ ID NO: 17440 - protein, 9 aa, synthetic construct
  REGION 1..9: note = Description of Artificial Sequence: Synthetic peptide
  REGION 1..9: note = XENP018205 vlCDR3
QQDYSSPRT

SEQ ID NO: 17441 - protein, 451 aa, synthetic construct
  REGION 1..451: note = Description of Artificial Sequence: Synthetic polypeptide
  REGION 1..451: note = XENP018206 1G6_H1.105_L1_IgG1_PVA_/S267K Heavy Chain
EVQLVESGGGLVKPGGSLRLSCAASGFTFSNYWMNWVRQAPGKGLEWVGEIRLKSRNYATHYAEPVKGRFTISRDDSKSTVYLQMNSLKTEDTAVYYCTRYYGNYGGYFDVWGAGTLVTVSSASTKGPSVFPLAPSSKSTSGGTAALGCLVKDYFPEPVTVSWNSGALTSGVHTFPAVLQSSGLYSLSSVVTVPSSSLGTQTYICNVNHKPSNTKVDKKVEPKSCDKTHTCPPCPAPPVAGPSVFLFPPKPKDTLMISRTPEVTCVVVDVKHEDPEVKFNWYVDGVEVHNAKTKPREEQYNSTYRVVSVLTVLHQDWLNGKEYKCKVSNKALPAPIEKTISKAKGQPREPQVYTLPPSREEMTKNQVSLTCLVKGFYPSDIAVEWESNGQPENNYKTTPPVLDSDGSFFLYSKLTVDKSRWQQGNVFSCSVMHEALHNHYTQKSLSLSPGK

SEQ ID NO: 17442 - protein, 122 aa, synthetic construct; identical to SEQ ID NO: 11972
  REGION 1..122: note = Description of Artificial Sequence: Synthetic polypeptide
  REGION 1..122: note = VH of XENP018206

SEQ ID NO: 17443 - protein, 5 aa, synthetic construct
  REGION 1..5: note = Description of Artificial Sequence: Synthetic peptide
  REGION 1..5: note = XENP018206 vhCDR1
NYWMN

SEQ ID NO: 17444 - protein, 19 aa, synthetic construct
  REGION 1..19: note = Description of Artificial Sequence: Synthetic peptide
  REGION 1..19: note = XENP018206 vhCDR2
EIRLKSRNYATHYAEPVKG

SEQ ID NO: 17445 - protein, 11 aa, synthetic construct
  REGION 1..11: note = Description of Artificial Sequence: Synthetic peptide
  REGION 1..11: note = XENP018206 vhCDR3
YYGNYGGYFDV

SEQ ID NO: 17446 - protein, 214 aa, synthetic construct; identical to SEQ ID NO: 16226
  REGION 1..214: note = Description of Artificial Sequence: Synthetic polypeptide
  REGION 1..214: note = XENP018206 1G6_H1.105_L1_IgG1_PVA_/S267K Light Chain

SEQ ID NO: 17447 - protein, 107 aa, synthetic construct; identical to SEQ ID NO: 10923
  REGION 1..107: note = Description of Artificial Sequence: Synthetic polypeptide
  REGION 1..107: note = VL of XENP018206

SEQ ID NO: 17448 - protein, 11 aa, synthetic construct
  REGION 1..11: note = Description of Artificial Sequence: Synthetic peptide
  REGION 1..11: note = XENP018206 vlCDR1
RASQSVSNDVA

SEQ ID NO: 17449 - protein, 7 aa, synthetic construct
  REGION 1..7: note = Description of Artificial Sequence: Synthetic peptide
  REGION 1..7: note = XENP018206 vlCDR2
YASHRYT

SEQ ID NO: 17450 - protein, 9 aa, synthetic construct
  REGION 1..9: note = Description of Artificial Sequence: Synthetic peptide
  REGION 1..9: note = XENP018206 vlCDR3
QQDYSSPRT

SEQ ID NO: 17451 - protein, 451 aa, synthetic construct
  REGION 1..451: note = Description of Artificial Sequence: Synthetic polypeptide
  REGION 1..451: note = XENP018207 1G6_H1.106_L1_IgG1_PVA_/S267K Heavy Chain
EVQLVESGGGLVKPGGSLRLSCAASGFTFSNYWMNWVRQAPGKGLEWVGEIRLKSLNYATHYAEPVKGRFTISRDDSKSTVYLQMNSLKTEDTAVYYCTRYYGNYGGYFDVWGAGTLVTVSSASTKGPSVFPLAPSSKSTSGGTAALGCLVKDYFPEPVTVSWNSGALTSGVHTFPAVLQSSGLYSLSSVVTVPSSSLGTQTYICNVNHKPSNTKVDKKVEPKSCDKTHTCPPCPAPPVAGPSVFLFPPKPKDTLMISRTPEVTCVVVDVKHEDPEVKFNWYVDGVEVHNAKTKPREEQYNSTYRVVSVLTVLHQDWLNGKEYKCKVSNKALPAPIEKTISKAKGQPREPQVYTLPPSREEMTKNQVSLTCLVKGFYPSDIAVEWESNGQPENNYKTTPPVLDSDGSFFLYSKLTVDKSRWQQGNVFSCSVMHEALHNHYTQKSLSLSPGK

SEQ ID NO: 17452 - protein, 122 aa, synthetic construct; identical to SEQ ID NO: 11981
  REGION 1..122: note = Description of Artificial Sequence: Synthetic polypeptide
  REGION 1..122: note = VH of XENP018207

SEQ ID NO: 17453 - protein, 5 aa, synthetic construct
  REGION 1..5: note = Description of Artificial Sequence: Synthetic peptide
  REGION 1..5: note = XENP018207 vhCDR1
NYWMN

SEQ ID NO: 17454 - protein, 19 aa, synthetic construct
  REGION 1..19: note = Description of Artificial Sequence: Synthetic peptide
  REGION 1..19: note = XENP018207 vhCDR2
EIRLKSLNYATHYAEPVKG

SEQ ID NO: 17455 - protein, 11 aa, synthetic construct
  REGION 1..11: note = Description of Artificial Sequence: Synthetic peptide
  REGION 1..11: note = XENP018207 vhCDR3
YYGNYGGYFDV

SEQ ID NO: 17456 - protein, 214 aa, synthetic construct; identical to SEQ ID NO: 16226
  REGION 1..214: note = Description of Artificial Sequence: Synthetic polypeptide
  REGION 1..214: note = XENP018207 1G6_H1.106_L1_IgG1_PVA_/S267K Light Chain

SEQ ID NO: 17457 - protein, 107 aa, synthetic construct; identical to SEQ ID NO: 10923
  REGION 1..107: note = Description of Artificial Sequence: Synthetic polypeptide
  REGION 1..107: note = VL of XENP018207

SEQ ID NO: 17458 - protein, 11 aa, synthetic construct
  REGION 1..11: note = Description of Artificial Sequence: Synthetic peptide
  REGION 1..11: note = XENP018207 vlCDR1
RASQSVSNDVA

SEQ ID NO: 17459 - protein, 7 aa, synthetic construct
  REGION 1..7: note = Description of Artificial Sequence: Synthetic peptide
  REGION 1..7: note = XENP018207 vlCDR2
YASHRYT

SEQ ID NO: 17460 - protein, 9 aa, synthetic construct
  REGION 1..9: note = Description of Artificial Sequence: Synthetic peptide
  REGION 1..9: note = XENP018207 vlCDR3
QQDYSSPRT

SEQ ID NO: 17461 - protein, 451 aa, synthetic construct
  REGION 1..451: note = Description of Artificial Sequence: Synthetic polypeptide
  REGION 1..451: note = XENP018208 1G6_H1.107_L1_IgG1_PVA_/S267K Heavy Chain
EVQLVESGGGLVKPGGSLRLSCAASGFTFSNYWMNWVRQAPGKGLEWVGEIRLKSTNYATHYAEPVKGRFTISRDDSKSTVYLQMNSLKTEDTAVYYCTRYYGNYGGYFDVWGAGTLVTVSSASTKGPSVFPLAPSSKSTSGGTAALGCLVKDYFPEPVTVSWNSGALTSGVHTFPAVLQSSGLYSLSSVVTVPSSSLGTQTYICNVNHKPSNTKVDKKVEPKSCDKTHTCPPCPAPPVAGPSVFLFPPKPKDTLMISRTPEVTCVVVDVKHEDPEVKFNWYVDGVEVHNAKTKPREEQYNSTYRVVSVLTVLHQDWLNGKEYKCKVSNKALPAPIEKTISKAKGQPREPQVYTLPPSREEMTKNQVSLTCLVKGFYPSDIAVEWESNGQPENNYKTTPPVLDSDGSFFLYSKLTVDKSRWQQGNVFSCSVMHEALHNHYTQKSLSLSPGK

SEQ ID NO: 17462 - protein, 122 aa, synthetic construct; identical to SEQ ID NO: 11990
  REGION 1..122: note = Description of Artificial Sequence: Synthetic polypeptide
  REGION 1..122: note = VH of XENP018208

SEQ ID NO: 17463 - protein, 5 aa, synthetic construct
  REGION 1..5: note = Description of Artificial Sequence: Synthetic peptide
  REGION 1..5: note = XENP018208 vhCDR1
NYWMN

SEQ ID NO: 17464 - protein, 19 aa, synthetic construct
  REGION 1..19: note = Description of Artificial Sequence: Synthetic peptide
  REGION 1..19: note = XENP018208 vhCDR2
EIRLKSTNYATHYAEPVKG

SEQ ID NO: 17465 - protein, 11 aa, synthetic construct
  REGION 1..11: note = Description of Artificial Sequence: Synthetic peptide
  REGION 1..11: note = XENP018208 vhCDR3
YYGNYGGYFDV

SEQ ID NO: 17466 - protein, 214 aa, synthetic construct; identical to SEQ ID NO: 16226
  REGION 1..214: note = Description of Artificial Sequence: Synthetic polypeptide
  REGION 1..214: note = XENP018208 1G6_H1.107_L1_IgG1_PVA_/S267K Light Chain

SEQ ID NO: 17467 - protein, 107 aa, synthetic construct; identical to SEQ ID NO: 10923
  REGION 1..107: note = Description of Artificial Sequence: Synthetic polypeptide
  REGION 1..107: note = VL of XENP018208

SEQ ID NO: 17468 - protein, 11 aa, synthetic construct
  REGION 1..11: note = Description of Artificial Sequence: Synthetic peptide
  REGION 1..11: note = XENP018208 vlCDR1
RASQSVSNDVA

SEQ ID NO: 17469 - protein, 7 aa, synthetic construct
  REGION 1..7: note = Description of Artificial Sequence: Synthetic peptide
  REGION 1..7: note = XENP018208 vlCDR2
YASHRYT

SEQ ID NO: 17470 - protein, 9 aa, synthetic construct
  REGION 1..9: note = Description of Artificial Sequence: Synthetic peptide
  REGION 1..9: note = XENP018208 vlCDR3
QQDYSSPRT

SEQ ID NO: 17471 - protein, 451 aa, synthetic construct
  REGION 1..451: note = Description of Artificial Sequence: Synthetic polypeptide
  REGION 1..451: note = XENP018209 1G6_H1.108_L1_IgG1_PVA_/S267K Heavy Chain
EVQLVESGGGLVKPGGSLRLSCAASGFTFSNYWMNWVRQAPGKGLEWVGEIRLKSGNYATHYAEPVKGRFTISRDDSKSTVYLQMNSLKTEDTAVYYCTRYYGNYGGYFDVWGAGTLVTVSSASTKGPSVFPLAPSSKSTSGGTAALGCLVKDYFPEPVTVSWNSGALTSGVHTFPAVLQSSGLYSLSSVVTVPSSSLGTQTYICNVNHKPSNTKVDKKVEPKSCDKTHTCPPCPAPPVAGPSVFLFPPKPKDTLMISRTPEVTCVVVDVKHEDPEVKFNWYVDGVEVHNAKTKPREEQYNSTYRVVSVLTVLHQDWLNGKEYKCKVSNKALPAPIEKTISKAKGQPREPQVYTLPPSREEMTKNQVSLTCLVKGFYPSDIAVEWESNGQPENNYKTTPPVLDSDGSFFLYSKLTVDKSRWQQGNVFSCSVMHEALHNHYTQKSLSLSPGK

SEQ ID NO: 17472 - protein, 122 aa, synthetic construct; identical to SEQ ID NO: 11999
  REGION 1..122: note = Description of Artificial Sequence: Synthetic polypeptide
  REGION 1..122: note = VH of XENP018209

SEQ ID NO: 17473 - protein, 5 aa, synthetic construct
  REGION 1..5: note = Description of Artificial Sequence: Synthetic peptide
  REGION 1..5: note = XENP018209 vhCDR1
NYWMN

SEQ ID NO: 17474 - protein, 19 aa, synthetic construct
  REGION 1..19: note = Description of Artificial Sequence: Synthetic peptide
  REGION 1..19: note = XENP018209 vhCDR2
EIRLKSGNYATHYAEPVKG

SEQ ID NO: 17475 - protein, 11 aa, synthetic construct
  REGION 1..11: note = Description of Artificial Sequence: Synthetic peptide
  REGION 1..11: note = XENP018209 vhCDR3
YYGNYGGYFDV

SEQ ID NO: 17476 - protein, 214 aa, synthetic construct; identical to SEQ ID NO: 16226
  REGION 1..214: note = Description of Artificial Sequence: Synthetic polypeptide
  REGION 1..214: note = XENP018209 1G6_H1.108_L1_IgG1_PVA_/S267K Light Chain

SEQ ID NO: 17477 - protein, 107 aa, synthetic construct; identical to SEQ ID NO: 10923
  REGION 1..107: note = Description of Artificial Sequence: Synthetic polypeptide
  REGION 1..107: note = VL of XENP018209

SEQ ID NO: 17478 - protein, 11 aa, synthetic construct
  REGION 1..11: note = Description of Artificial Sequence: Synthetic peptide
  REGION 1..11: note = XENP018209 vlCDR1
RASQSVSNDVA

SEQ ID NO: 17479 - protein, 7 aa, synthetic construct
  REGION 1..7: note = Description of Artificial Sequence: Synthetic peptide
  REGION 1..7: note = XENP018209 vlCDR2
YASHRYT

SEQ ID NO: 17480 - protein, 9 aa, synthetic construct
  REGION 1..9: note = Description of Artificial Sequence: Synthetic peptide
  REGION 1..9: note = XENP018209 vlCDR3
QQDYSSPRT

SEQ ID NO: 17481 - protein, 451 aa, synthetic construct
  REGION 1..451: note = Description of Artificial Sequence: Synthetic polypeptide
  REGION 1..451: note = XENP018210 1G6_H1.109_L1_IgG1_PVA_/S267K Heavy Chain
EVQLVESGGGLVKPGGSLRLSCAASGFTFSNYWMNWVRQAPGKGLEWVGEIRLKSYNYATHYAEPVKGRFTISRDDSKSTVYLQMNSLKTEDTAVYYCTRYYGNYGGYFDVWGAGTLVTVSSASTKGPSVFPLAPSSKSTSGGTAALGCLVKDYFPEPVTVSWNSGALTSGVHTFPAVLQSSGLYSLSSVVTVPSSSLGTQTYICNVNHKPSNTKVDKKVEPKSCDKTHTCPPCPAPPVAGPSVFLFPPKPKDTLMISRTPEVTCVVVDVKHEDPEVKFNWYVDGVEVHNAKTKPREEQYNSTYRVVSVLTVLHQDWLNGKEYKCKVSNKALPAPIEKTISKAKGQPREPQVYTLPPSREEMTKNQVSLTCLVKGFYPSDIAVEWESNGQPENNYKTTPPVLDSDGSFFLYSKLTVDKSRWQQGNVFSCSVMHEALHNHYTQKSLSLSPGK

SEQ ID NO: 17482 - protein, 122 aa, synthetic construct; identical to SEQ ID NO: 12008
  REGION 1..122: note = Description of Artificial Sequence: Synthetic polypeptide
  REGION 1..122: note = VH of XENP018210

SEQ ID NO: 17483 - protein, 5 aa, synthetic construct
  REGION 1..5: note = Description of Artificial Sequence: Synthetic peptide
  REGION 1..5: note = XENP018210 vhCDR1
NYWMN

SEQ ID NO: 17484 - protein, 19 aa, synthetic construct
  REGION 1..19: note = Description of Artificial Sequence: Synthetic peptide
  REGION 1..19: note = XENP018210 vhCDR2
EIRLKSYNYATHYAEPVKG

SEQ ID NO: 17485 - protein, 11 aa, synthetic construct
  REGION 1..11: note = Description of Artificial Sequence: Synthetic peptide
  REGION 1..11: note = XENP018210 vhCDR3
YYGNYGGYFDV

SEQ ID NO: 17486 - protein, 214 aa, synthetic construct; identical to SEQ ID NO: 16226
  REGION 1..214: note = Description of Artificial Sequence: Synthetic polypeptide
  REGION 1..214: note = XENP018210 1G6_H1.109_L1_IgG1_PVA_/S267K Light Chain

SEQ ID NO: 17487 - protein, 107 aa, synthetic construct; identical to SEQ ID NO: 10923
  REGION 1..107: note = Description of Artificial Sequence: Synthetic polypeptide
  REGION 1..107: note = VL of XENP018210

SEQ ID NO: 17488 - protein, 11 aa, synthetic construct
  REGION 1..11: note = Description of Artificial Sequence: Synthetic peptide
  REGION 1..11: note = XENP018210 vlCDR1
RASQSVSNDVA

SEQ ID NO: 17489 - protein, 7 aa, synthetic construct
  REGION 1..7: note = Description of Artificial Sequence: Synthetic peptide
  REGION 1..7: note = XENP018210 vlCDR2
YASHRYT

SEQ ID NO: 17490 - protein, 9 aa, synthetic construct
  REGION 1..9: note = Description of Artificial Sequence: Synthetic peptide
  REGION 1..9: note = XENP018210 vlCDR3
QQDYSSPRT

SEQ ID NO: 17491 - protein, 451 aa, synthetic construct
  REGION 1..451: note = Description of Artificial Sequence: Synthetic polypeptide
  REGION 1..451: note = XENP018211 1G6_H1.110_L1_IgG1_PVA_/S267K Heavy Chain
EVQLVESGGGLVKPGGSLRLSCAASGFTFSNYWMNWVRQAPGKGLEWVGEIRLKSNDYATHYAEPVKGRFTISRDDSKSTVYLQMNSLKTEDTAVYYCTRYYGNYGGYFDVWGAGTLVTVSSASTKGPSVFPLAPSSKSTSGGTAALGCLVKDYFPEPVTVSWNSGALTSGVHTFPAVLQSSGLYSLSSVVTVPSSSLGTQTYICNVNHKPSNTKVDKKVEPKSCDKTHTCPPCPAPPVAGPSVFLFPPKPKDTLMISRTPEVTCVVVDVKHEDPEVKFNWYVDGVEVHNAKTKPREEQYNSTYRVVSVLTVLHQDWLNGKEYKCKVSNKALPAPIEKTISKAKGQPREPQVYTLPPSREEMTKNQVSLTCLVKGFYPSDIAVEWESNGQPENNYKTTPPVLDSDGSFFLYSKLTVDKSRWQQGNVFSCSVMHEALHNHYTQKSLSLSPGK

SEQ ID NO: 17492 - protein, 122 aa, synthetic construct; identical to SEQ ID NO: 12017
  REGION 1..122: note = Description of Artificial Sequence: Synthetic polypeptide
  REGION 1..122: note = VH of XENP018211

SEQ ID NO: 17493 - protein, 5 aa, synthetic construct
  REGION 1..5: note = Description of Artificial Sequence: Synthetic peptide
  REGION 1..5: note = XENP018211 vhCDR1
NYWMN

SEQ ID NO: 17494 - protein, 19 aa, synthetic construct
  REGION 1..19: note = Description of Artificial Sequence: Synthetic peptide
  REGION 1..19: note = XENP018211 vhCDR2
EIRLKSNDYATHYAEPVKG

SEQ ID NO: 17495 - protein, 11 aa, synthetic construct
  REGION 1..11: note = Description of Artificial Sequence: Synthetic peptide
  REGION 1..11: note = XENP018211 vhCDR3
YYGNYGGYFDV

SEQ ID NO: 17496 - protein, 214 aa, synthetic construct; identical to SEQ ID NO: 16226
  REGION 1..214: note = Description of Artificial Sequence: Synthetic polypeptide
  REGION 1..214: note = XENP018211 1G6_H1.110_L1_IgG1_PVA_/S267K Light Chain

SEQ ID NO: 17497 - protein, 107 aa, synthetic construct; identical to SEQ ID NO: 10923
  REGION 1..107: note = Description of Artificial Sequence: Synthetic polypeptide
  REGION 1..107: note = VL of XENP018211

SEQ ID NO: 17498 - protein, 11 aa, synthetic construct
  REGION 1..11: note = Description of Artificial Sequence: Synthetic peptide
  REGION 1..11: note = XENP018211 vlCDR1
RASQSVSNDVA

SEQ ID NO: 17499 - protein, 7 aa, synthetic construct
  REGION 1..7: note = Description of Artificial Sequence: Synthetic peptide
  REGION 1..7: note = XENP018211 vlCDR2
YASHRYT

SEQ ID NO: 17500 - protein, 9 aa, synthetic construct
  REGION 1..9: note = Description of Artificial Sequence: Synthetic peptide
  REGION 1..9: note = XENP018211 vlCDR3
QQDYSSPRT

SEQ ID NO: 17501 - protein, 451 aa, synthetic construct
  REGION 1..451: note = Description of Artificial Sequence: Synthetic polypeptide
  REGION 1..451: note = XENP018212 1G6_H1.111_L1_IgG1_PVA_/S267K Heavy Chain
EVQLVESGGGLVKPGGSLRLSCAASGFTFSNYWMNWVRQAPGKGLEWVGEIRLKSNHYATHYAEPVKGRFTISRDDSKSTVYLQMNSLKTEDTAVYYCTRYYGNYGGYFDVWGAGTLVTVSSASTKGPSVFPLAPSSKSTSGGTAALGCLVKDYFPEPVTVSWNSGALTSGVHTFPAVLQSSGLYSLSSVVTVPSSSLGTQTYICNVNHKPSNTKVDKKVEPKSCDKTHTCPPCPAPPVAGPSVFLFPPKPKDTLMISRTPEVTCVVVDVKHEDPEVKFNWYVDGVEVHNAKTKPREEQYNSTYRVVSVLTVLHQDWLNGKEYKCKVSNKALPAPIEKTISKAKGQPREPQVYTLPPSREEMTKNQVSLTCLVKGFYPSDIAVEWESNGQPENNYKTTPPVLDSDGSFFLYSKLTVDKSRWQQGNVFSCSVMHEALHNHYTQKSLSLSPGK

SEQ ID NO: 17502 - protein, 122 aa, synthetic construct; identical to SEQ ID NO: 12026
  REGION 1..122: note = Description of Artificial Sequence: Synthetic polypeptide
  REGION 1..122: note = VH of XENP018212

SEQ ID NO: 17503 - protein, 5 aa, synthetic construct
  REGION 1..5: note = Description of Artificial Sequence: Synthetic peptide
  REGION 1..5: note = XENP018212 vhCDR1
NYWMN

SEQ ID NO: 17504 - protein, 19 aa, synthetic construct
  REGION 1..19: note = Description of Artificial Sequence: Synthetic peptide
  REGION 1..19: note = XENP018212 vhCDR2
EIRLKSNHYATHYAEPVKG

SEQ ID NO: 17505 - protein, 11 aa, synthetic construct
  REGION 1..11: note = Description of Artificial Sequence: Synthetic peptide
  REGION 1..11: note = XENP018212 vhCDR3
YYGNYGGYFDV

SEQ ID NO: 17506 - protein, 214 aa, synthetic construct; identical to SEQ ID NO: 16226
  REGION 1..214: note = Description of Artificial Sequence: Synthetic polypeptide
  REGION 1..214: note = XENP018212 1G6_H1.111_L1_IgG1_PVA_/S267K Light Chain

SEQ ID NO: 17507 - protein, 107 aa, synthetic construct; identical to SEQ ID NO: 10923
  REGION 1..107: note = Description of Artificial Sequence: Synthetic polypeptide
  REGION 1..107: note = VL of XENP018212

SEQ ID NO: 17508 - protein, 11 aa, synthetic construct
  REGION 1..11: note = Description of Artificial Sequence: Synthetic peptide
  REGION 1..11: note = XENP018212 vlCDR1
RASQSVSNDVA

SEQ ID NO: 17509 - protein, 7 aa, synthetic construct
  REGION 1..7: note = Description of Artificial Sequence: Synthetic peptide
  REGION 1..7: note = XENP018212 vlCDR2
YASHRYT

SEQ ID NO: 17510 - protein, 9 aa, synthetic construct
  REGION 1..9: note = Description of Artificial Sequence: Synthetic peptide
  REGION 1..9: note = XENP018212 vlCDR3
QQDYSSPRT

SEQ ID NO: 17511 - protein, 451 aa, synthetic construct
  REGION 1..451: note = Description of Artificial Sequence: Synthetic polypeptide
  REGION 1..451: note = XENP018213 1G6_H1.112_L1_IgG1_PVA_/S267K Heavy Chain
EVQLVESGGGLVKPGGSLRLSCAASGFTFSNYWMNWVRQAPGKGLEWVGEIRLKSNEYATHYAEPVKGRFTISRDDSKSTVYLQMNSLKTEDTAVYYCTRYYGNYGGYFDVWGAGTLVTVSSASTKGPSVFPLAPSSKSTSGGTAALGCLVKDYFPEPVTVSWNSGALTSGVHTFPAVLQSSGLYSLSSVVTVPSSSLGTQTYICNVNHKPSNTKVDKKVEPKSCDKTHTCPPCPAPPVAGPSVFLFPPKPKDTLMISRTPEVTCVVVDVKHEDPEVKFNWYVDGVEVHNAKTKPREEQYNSTYRVVSVLTVLHQDWLNGKEYKCKVSNKALPAPIEKTISKAKGQPREPQVYTLPPSREEMTKNQVSLTCLVKGFYPSDIAVEWESNGQPENNYKTTPPVLDSDGSFFLYSKLTVDKSRWQQGNVFSCSVMHEALHNHYTQKSLSLSPGK

SEQ ID NO: 17512 - protein, 122 aa, synthetic construct; identical to SEQ ID NO: 12035
  REGION 1..122: note = Description of Artificial Sequence: Synthetic polypeptide
  REGION 1..122: note = VH of XENP018213

SEQ ID NO: 17513 - protein, 5 aa, synthetic construct
  REGION 1..5: note = Description of Artificial Sequence: Synthetic peptide
  REGION 1..5: note = XENP018213 vhCDR1
NYWMN

SEQ ID NO: 17514 - protein, 19 aa, synthetic construct
  REGION 1..19: note = Description of Artificial Sequence: Synthetic peptide
  REGION 1..19: note = XENP018213 vhCDR2
EIRLKSNEYATHYAEPVKG

SEQ ID NO: 17515 - protein, 11 aa, synthetic construct
  REGION 1..11: note = Description of Artificial Sequence: Synthetic peptide
  REGION 1..11: note = XENP018213 vhCDR3
YYGNYGGYFDV

SEQ ID NO: 17516 - protein, 214 aa, synthetic construct; identical to SEQ ID NO: 16226
  REGION 1..214: note = Description of Artificial Sequence: Synthetic polypeptide
  REGION 1..214: note = XENP018213 1G6_H1.112_L1_IgG1_PVA_/S267K Light Chain

SEQ ID NO: 17517 - protein, 107 aa, synthetic construct; identical to SEQ ID NO: 10923
  REGION 1..107: note = Description of Artificial Sequence: Synthetic polypeptide
  REGION 1..107: note = VL of XENP018213

SEQ ID NO: 17518 - protein, 11 aa, synthetic construct
  REGION 1..11: note = Description of Artificial Sequence: Synthetic peptide
  REGION 1..11: note = XENP018213 vlCDR1
RASQSVSNDVA

SEQ ID NO: 17519 - protein, 7 aa, synthetic construct
  REGION 1..7: note = Description of Artificial Sequence: Synthetic peptide
  REGION 1..7: note = XENP018213 vlCDR2
YASHRYT

SEQ ID NO: 17520 - protein, 9 aa, synthetic construct
  REGION 1..9: note = Description of Artificial Sequence: Synthetic peptide
  REGION 1..9: note = XENP018213 vlCDR3
QQDYSSPRT

SEQ ID NO: 17521 - protein, 451 aa, synthetic construct
  REGION 1..451: note = Description of Artificial Sequence: Synthetic polypeptide
  REGION 1..451: note = XENP018214 1G6_H1.113_L1_IgG1_PVA_/S267K Heavy Chain
EVQLVESGGGLVKPGGSLRLSCAASGFTFSNYWMNWVRQAPGKGLEWVGEIRLKSNSYATHYAEPVKGRFTISRDDSKSTVYLQMNSLKTEDTAVYYCTRYYGNYGGYFDVWGAGTLVTVSSASTKGPSVFPLAPSSKSTSGGTAALGCLVKDYFPEPVTVSWNSGALTSGVHTFPAVLQSSGLYSLSSVVTVPSSSLGTQTYICNVNHKPSNTKVDKKVEPKSCDKTHTCPPCPAPPVAGPSVFLFPPKPKDTLMISRTPEVTCVVVDVKHEDPEVKFNWYVDGVEVHNAKTKPREEQYNSTYRVVSVLTVLHQDWLNGKEYKCKVSNKALPAPIEKTISKAKGQPREPQVYTLPPSREEMTKNQVSLTCLVKGFYPSDIAVEWESNGQPENNYKTTPPVLDSDGSFFLYSKLTVDKSRWQQGNVFSCSVMHEALHNHYTQKSLSLSPGK

SEQ ID NO: 17522 - protein, 122 aa, synthetic construct; identical to SEQ ID NO: 12044
  REGION 1..122: note = Description of Artificial Sequence: Synthetic polypeptide
  REGION 1..122: note = VH of XENP018214

SEQ ID NO: 17523 - protein, 5 aa, synthetic construct
  REGION 1..5: note = Description of Artificial Sequence: Synthetic peptide
  REGION 1..5: note = XENP018214 vhCDR1
NYWMN

SEQ ID NO: 17524 - protein, 19 aa, synthetic construct
  REGION 1..19: note = Description of Artificial Sequence: Synthetic peptide
  REGION 1..19: note = XENP018214 vhCDR2
EIRLKSNSYATHYAEPVKG

SEQ ID NO: 17525 - protein, 11 aa, synthetic construct
  REGION 1..11: note = Description of Artificial Sequence: Synthetic peptide
  REGION 1..11: note = XENP018214 vhCDR3
YYGNYGGYFDV

SEQ ID NO: 17526 - protein, 214 aa, synthetic construct; identical to SEQ ID NO: 16226
  REGION 1..214: note = Description of Artificial Sequence: Synthetic polypeptide
  REGION 1..214: note = XENP018214 1G6_H1.113_L1_IgG1_PVA_/S267K Light Chain

SEQ ID NO: 17527 - protein, 107 aa, synthetic construct; identical to SEQ ID NO: 10923
  REGION 1..107: note = Description of Artificial Sequence: Synthetic polypeptide
  REGION 1..107: note = VL of XENP018214

SEQ ID NO: 17528 - protein, 11 aa, synthetic construct
  REGION 1..11: note = Description of Artificial Sequence: Synthetic peptide
  REGION 1..11: note = XENP018214 vlCDR1
RASQSVSNDVA

SEQ ID NO: 17529 - protein, 7 aa, synthetic construct
  REGION 1..7: note = Description of Artificial Sequence: Synthetic peptide
  REGION 1..7: note = XENP018214 vlCDR2
YASHRYT

SEQ ID NO: 17530 - protein, 9 aa, synthetic construct
  REGION 1..9: note = Description of Artificial Sequence: Synthetic peptide
  REGION 1..9: note = XENP018214 vlCDR3
QQDYSSPRT

SEQ ID NO: 17531 - protein, 451 aa, synthetic construct
  REGION 1..451: note = Description of Artificial Sequence: Synthetic polypeptide
  REGION 1..451: note = XENP018215 1G6_H1.114_L1_IgG1_PVA_/S267K Heavy Chain
EVQLVESGGGLVKPGGSLRLSCAASGFTFSNYWMNWVRQAPGKGLEWVGEIRLKSNRYATHYAEPVKGRFTISRDDSKSTVYLQMNSLKTEDTAVYYCTRYYGNYGGYFDVWGAGTLVTVSSASTKGPSVFPLAPSSKSTSGGTAALGCLVKDYFPEPVTVSWNSGALTSGVHTFPAVLQSSGLYSLSSVVTVPSSSLGTQTYICNVNHKPSNTKVDKKVEPKSCDKTHTCPPCPAPPVAGPSVFLFPPKPKDTLMISRTPEVTCVVVDVKHEDPEVKFNWYVDGVEVHNAKTKPREEQYNSTYRVVSVLTVLHQDWLNGKEYKCKVSNKALPAPIEKTISKAKGQPREPQVYTLPPSREEMTKNQVSLTCLVKGFYPSDIAVEWESNGQPENNYKTTPPVLDSDGSFFLYSKLTVDKSRWQQGNVFSCSVMHEALHNHYTQKSLSLSPGK

SEQ ID NO: 17532 - protein, 122 aa, synthetic construct; identical to SEQ ID NO: 12053
  REGION 1..122: note = Description of Artificial Sequence: Synthetic polypeptide
  REGION 1..122: note = VH of XENP018215

SEQ ID NO: 17533 - protein, 5 aa, synthetic construct
  REGION 1..5: note = Description of Artificial Sequence: Synthetic peptide
  REGION 1..5: note = XENP018215 vhCDR1
NYWMN

SEQ ID NO: 17534 - protein, 19 aa, synthetic construct
  REGION 1..19: note = Description of Artificial Sequence: Synthetic peptide
  REGION 1..19: note = XENP018215 vhCDR2
EIRLKSNRYATHYAEPVKG

SEQ ID NO: 17535 - protein, 11 aa, synthetic construct
  REGION 1..11: note = Description of Artificial Sequence: Synthetic peptide
  REGION 1..11: note = XENP018215 vhCDR3
YYGNYGGYFDV

SEQ ID NO: 17536 - protein, 214 aa, synthetic construct; identical to SEQ ID NO: 16226
  REGION 1..214: note = Description of Artificial Sequence: Synthetic polypeptide
  REGION 1..214: note = XENP018215 1G6_H1.114_L1_IgG1_PVA_/S267K Light Chain

SEQ ID NO: 17537 - protein, 107 aa, synthetic construct; identical to SEQ ID NO: 10923
  REGION 1..107: note = Description of Artificial Sequence: Synthetic polypeptide
  REGION 1..107: note = VL of XENP018215

SEQ ID NO: 17538 - protein, 11 aa, synthetic construct
  REGION 1..11: note = Description of Artificial Sequence: Synthetic peptide
  REGION 1..11: note = XENP018215 vlCDR1
RASQSVSNDVA

SEQ ID NO: 17539 - protein, 7 aa, synthetic construct
  REGION 1..7: note = Description of Artificial Sequence: Synthetic peptide
  REGION 1..7: note = XENP018215 vlCDR2
YASHRYT

SEQ ID NO: 17540 - protein, 9 aa, synthetic construct
  REGION 1..9: note = Description of Artificial Sequence: Synthetic peptide
  REGION 1..9: note = XENP018215 vlCDR3
QQDYSSPRT

SEQ ID NO: 17541 - protein, 451 aa, synthetic construct
  REGION 1..451: note = Description of Artificial Sequence: Synthetic polypeptide
  REGION 1..451: note = XENP018216 1G6_H1.115_L1_IgG1_PVA_/S267K Heavy Chain
EVQLVESGGGLVKPGGSLRLSCAASGFTFSNYWMNWVRQAPGKGLEWVGEIRLKSNLYATHYAEPVKGRFTISRDDSKSTVYLQMNSLKTEDTAVYYCTRYYGNYGGYFDVWGAGTLVTVSSASTKGPSVFPLAPSSKSTSGGTAALGCLVKDYFPEPVTVSWNSGALTSGVHTFPAVLQSSGLYSLSSVVTVPSSSLGTQTYICNVNHKPSNTKVDKKVEPKSCDKTHTCPPCPAPPVAGPSVFLFPPKPKDTLMISRTPEVTCVVVDVKHEDPEVKFNWYVDGVEVHNAKTKPREEQYNSTYRVVSVLTVLHQDWLNGKEYKCKVSNKALPAPIEKTISKAKGQPREPQVYTLPPSREEMTKNQVSLTCLVKGFYPSDIAVEWESNGQPENNYKTTPPVLDSDGSFFLYSKLTVDKSRWQQGNVFSCSVMHEALHNHYTQKSLSLSPGK

SEQ ID NO: 17542 - protein, 122 aa, synthetic construct; identical to SEQ ID NO: 12062
  REGION 1..122: note = Description of Artificial Sequence: Synthetic polypeptide
  REGION 1..122: note = VH of XENP018216

SEQ ID NO: 17543 - protein, 5 aa, synthetic construct
  REGION 1..5: note = Description of Artificial Sequence: Synthetic peptide
  REGION 1..5: note = XENP018216 vhCDR1
NYWMN

SEQ ID NO: 17544 - protein, 19 aa, synthetic construct
  REGION 1..19: note = Description of Artificial Sequence: Synthetic peptide
  REGION 1..19: note = XENP018216 vhCDR2
EIRLKSNLYATHYAEPVKG

SEQ ID NO: 17545 - protein, 11 aa, synthetic construct
  REGION 1..11: note = Description of Artificial Sequence: Synthetic peptide
  REGION 1..11: note = XENP018216 vhCDR3
YYGNYGGYFDV

SEQ ID NO: 17546 - protein, 214 aa, synthetic construct; identical to SEQ ID NO: 16226
  REGION 1..214: note = Description of Artificial Sequence: Synthetic polypeptide
  REGION 1..214: note = XENP018216 1G6_H1.115_L1_IgG1_PVA_/S267K Light Chain

SEQ ID NO: 17547 - protein, 107 aa, synthetic construct; identical to SEQ ID NO: 10923
  REGION 1..107: note = Description of Artificial Sequence: Synthetic polypeptide
  REGION 1..107: note = VL of XENP018216

SEQ ID NO: 17548 - protein, 11 aa, synthetic construct
  REGION 1..11: note = Description of Artificial Sequence: Synthetic peptide
  REGION 1..11: note = XENP018216 vlCDR1
RASQSVSNDVA

SEQ ID NO: 17549 - protein, 7 aa, synthetic construct
  REGION 1..7: note = Description of Artificial Sequence: Synthetic peptide
  REGION 1..7: note = XENP018216 vlCDR2
YASHRYT

SEQ ID NO: 17550 - protein, 9 aa, synthetic construct
  REGION 1..9: note = Description of Artificial Sequence: Synthetic peptide
  REGION 1..9: note = XENP018216 vlCDR3
QQDYSSPRT

SEQ ID NO: 17551 - protein, 451 aa, synthetic construct
  REGION 1..451: note = Description of Artificial Sequence: Synthetic polypeptide
  REGION 1..451: note = XENP018217 1G6_H1.116_L1_IgG1_PVA_/S267K Heavy Chain
EVQLVESGGGLVKPGGSLRLSCAASGFTFSNYWMNWVRQAPGKGLEWVGEIRLKSNTYATHYAEPVKGRFTISRDDSKSTVYLQMNSLKTEDTAVYYCTRYYGNYGGYFDVWGAGTLVTVSSASTKGPSVFPLAPSSKSTSGGTAALGCLVKDYFPEPVTVSWNSGALTSGVHTFPAVLQSSGLYSLSSVVTVPSSSLGTQTYICNVNHKPSNTKVDKKVEPKSCDKTHTCPPCPAPPVAGPSVFLFPPKPKDTLMISRTPEVTCVVVDVKHEDPEVKFNWYVDGVEVHNAKTKPREEQYNSTYRVVSVLTVLHQDWLNGKEYKCKVSNKALPAPIEKTISKAKGQPREPQVYTLPPSREEMTKNQVSLTCLVKGFYPSDIAVEWESNGQPENNYKTTPPVLDSDGSFFLYSKLTVDKSRWQQGNVFSCSVMHEALHNHYTQKSLSLSPGK

SEQ ID NO: 17552 - protein, 122 aa, synthetic construct; identical to SEQ ID NO: 12071
  REGION 1..122: note = Description of Artificial Sequence: Synthetic polypeptide
  REGION 1..122: note = VH of XENP018217

SEQ ID NO: 17553 - protein, 5 aa, synthetic construct
  REGION 1..5: note = Description of Artificial Sequence: Synthetic peptide
  REGION 1..5: note = XENP018217 vhCDR1
NYWMN

SEQ ID NO: 17554 - protein, 19 aa, synthetic construct
  REGION 1..19: note = Description of Artificial Sequence: Synthetic peptide
  REGION 1..19: note = XENP018217 vhCDR2
EIRLKSNTYATHYAEPVKG

SEQ ID NO: 17555 - protein, 11 aa, synthetic construct
  REGION 1..11: note = Description of Artificial Sequence: Synthetic peptide
  REGION 1..11: note = XENP018217 vhCDR3
YYGNYGGYFDV

SEQ ID NO: 17556 - protein, 214 aa, synthetic construct; identical to SEQ ID NO: 16226
  REGION 1..214: note = Description of Artificial Sequence: Synthetic polypeptide
  REGION 1..214: note = XENP018217 1G6_H1.116_L1_IgG1_PVA_/S267K Light Chain

SEQ ID NO: 17557 - protein, 107 aa, synthetic construct; identical to SEQ ID NO: 10923
  REGION 1..107: note = Description of Artificial Sequence: Synthetic polypeptide
  REGION 1..107: note = VL of XENP018217

SEQ ID NO: 17558 - protein, 11 aa, synthetic construct
  REGION 1..11: note = Description of Artificial Sequence: Synthetic peptide
  REGION 1..11: note = XENP018217 vlCDR1
RASQSVSNDVA

SEQ ID NO: 17559 - protein, 7 aa, synthetic construct
  REGION 1..7: note = Description of Artificial Sequence: Synthetic peptide
  REGION 1..7: note = XENP018217 vlCDR2
YASHRYT

SEQ ID NO: 17560 - protein, 9 aa, synthetic construct
  REGION 1..9: note = Description of Artificial Sequence: Synthetic peptide
  REGION 1..9: note = XENP018217 vlCDR3
QQDYSSPRT

SEQ ID NO: 17561 - protein, 451 aa, synthetic construct
  REGION 1..451: note = Description of Artificial Sequence: Synthetic polypeptide
  REGION 1..451: note = XENP018218 1G6_H1.117_L1_IgG1_PVA_/S267K Heavy Chain
EVQLVESGGGLVKPGGSLRLSCAASGFTFSNYWMNWVRQAPGKGLEWVGEIRLKSNGYATHYAEPVKGRFTISRDDSKSTVYLQMNSLKTEDTAVYYCTRYYGNYGGYFDVWGAGTLVTVSSASTKGPSVFPLAPSSKSTSGGTAALGCLVKDYFPEPVTVSWNSGALTSGVHTFPAVLQSSGLYSLSSVVTVPSSSLGTQTYICNVNHKPSNTKVDKKVEPKSCDKTHTCPPCPAPPVAGPSVFLFPPKPKDTLMISRTPEVTCVVVDVKHEDPEVKFNWYVDGVEVHNAKTKPREEQYNSTYRVVSVLTVLHQDWLNGKEYKCKVSNKALPAPIEKTISKAKGQPREPQVYTLPPSREEMTKNQVSLTCLVKGFYPSDIAVEWESNGQPENNYKTTPPVLDSDGSFFLYSKLTVDKSRWQQGNVFSCSVMHEALHNHYTQKSLSLSPGK

SEQ ID NO: 17562 - protein, 122 aa, synthetic construct; identical to SEQ ID NO: 12080
  REGION 1..122: note = Description of Artificial Sequence: Synthetic polypeptide
  REGION 1..122: note = VH of XENP018218

SEQ ID NO: 17563 - protein, 5 aa, synthetic construct
  REGION 1..5: note = Description of Artificial Sequence: Synthetic peptide
  REGION 1..5: note = XENP018218 vhCDR1
NYWMN

SEQ ID NO: 17564 - protein, 19 aa, synthetic construct
  REGION 1..19: note = Description of Artificial Sequence: Synthetic peptide
  REGION 1..19: note = XENP018218 vhCDR2
EIRLKSNGYATHYAEPVKG

SEQ ID NO: 17565 - protein, 11 aa, synthetic construct
  REGION 1..11: note = Description of Artificial Sequence: Synthetic peptide
  REGION 1..11: note = XENP018218 vhCDR3
YYGNYGGYFDV

SEQ ID NO: 17566 - protein, 214 aa, synthetic construct; identical to SEQ ID NO: 16226
  REGION 1..214: note = Description of Artificial Sequence: Synthetic polypeptide
  REGION 1..214: note = XENP018218 1G6_H1.117_L1_IgG1_PVA_/S267K Light Chain

SEQ ID NO: 17567 - protein, 107 aa, synthetic construct; identical to SEQ ID NO: 10923
  REGION 1..107: note = Description of Artificial Sequence: Synthetic polypeptide
  REGION 1..107: note = VL of XENP018218

SEQ ID NO: 17568 - protein, 11 aa, synthetic construct
  REGION 1..11: note = Description of Artificial Sequence: Synthetic peptide
  REGION 1..11: note = XENP018218 vlCDR1
RASQSVSNDVA

SEQ ID NO: 17569 - protein, 7 aa, synthetic construct
  REGION 1..7: note = Description of Artificial Sequence: Synthetic peptide
  REGION 1..7: note = XENP018218 vlCDR2
YASHRYT

SEQ ID NO: 17570 - protein, 9 aa, synthetic construct
  REGION 1..9: note = Description of Artificial Sequence: Synthetic peptide
  REGION 1..9: note = XENP018218 vlCDR3
QQDYSSPRT

SEQ ID NO: 17571 - protein, 451 aa, synthetic construct
  REGION 1..451: note = Description of Artificial Sequence: Synthetic polypeptide
  REGION 1..451: note = XENP018219 1G6_H1.118_L1_IgG1_PVA_/S267K Heavy Chain
EVQLVESGGGLVKPGGSLRLSCAASGFTFSNYWMNWVRQAPGKGLEWVGEIRLKSNYYATHYAEPVKGRFTISRDDSKSTVYLQMNSLKTEDTAVYYCTRYYGNYGGYFDVWGAGTLVTVSSASTKGPSVFPLAPSSKSTSGGTAALGCLVKDYFPEPVTVSWNSGALTSGVHTFPAVLQSSGLYSLSSVVTVPSSSLGTQTYICNVNHKPSNTKVDKKVEPKSCDKTHTCPPCPAPPVAGPSVFLFPPKPKDTLMISRTPEVTCVVVDVKHEDPEVKFNWYVDGVEVHNAKTKPREEQYNSTYRVVSVLTVLHQDWLNGKEYKCKVSNKALPAPIEKTISKAKGQPREPQVYTLPPSREEMTKNQVSLTCLVKGFYPSDIAVEWESNGQPENNYKTTPPVLDSDGSFFLYSKLTVDKSRWQQGNVFSCSVMHEALHNHYTQKSLSLSPGK

SEQ ID NO: 17572 - protein, 122 aa, synthetic construct; identical to SEQ ID NO: 12089
  REGION 1..122: note = Description of Artificial Sequence: Synthetic polypeptide
  REGION 1..122: note = VH of XENP018219

SEQ ID NO: 17573 - protein, 5 aa, synthetic construct
  REGION 1..5: note = Description of Artificial Sequence: Synthetic peptide
  REGION 1..5: note = XENP018219 vhCDR1
NYWMN

SEQ ID NO: 17574 - protein, 19 aa, synthetic construct
  REGION 1..19: note = Description of Artificial Sequence: Synthetic peptide
  REGION 1..19: note = XENP018219 vhCDR2
EIRLKSNYYATHYAEPVKG

SEQ ID NO: 17575 - protein, 11 aa, synthetic construct
  REGION 1..11: note = Description of Artificial Sequence: Synthetic peptide
  REGION 1..11: note = XENP018219 vhCDR3
YYGNYGGYFDV

SEQ ID NO: 17576 - protein, 214 aa, synthetic construct; identical to SEQ ID NO: 16226
  REGION 1..214: note = Description of Artificial Sequence: Synthetic polypeptide
  REGION 1..214: note = XENP018219 1G6_H1.118_L1_IgG1_PVA_/S267K Light Chain

SEQ ID NO: 17577 - protein, 107 aa, synthetic construct; identical to SEQ ID NO: 10923
  REGION 1..107: note = Description of Artificial Sequence: Synthetic polypeptide
  REGION 1..107: note = VL of XENP018219

SEQ ID NO: 17578 - protein, 11 aa, synthetic construct
  REGION 1..11: note = Description of Artificial Sequence: Synthetic peptide
  REGION 1..11: note = XENP018219 vlCDR1
RASQSVSNDVA

SEQ ID NO: 17579 - protein, 7 aa, synthetic construct
  REGION 1..7: note = Description of Artificial Sequence: Synthetic peptide
  REGION 1..7: note = XENP018219 vlCDR2
YASHRYT

SEQ ID NO: 17580 - protein, 9 aa, synthetic construct
  REGION 1..9: note = Description of Artificial Sequence: Synthetic peptide
  REGION 1..9: note = XENP018219 vlCDR3
QQDYSSPRT

SEQ ID NO: 17581 - protein, 451 aa, synthetic construct
  REGION 1..451: note = Description of Artificial Sequence: Synthetic polypeptide
  REGION 1..451: note = XENP018220 1G6_H1.119_L1_IgG1_PVA_/S267K Heavy Chain
EVQLVESGGGLVKPGGSLRLSCAASGFTFSNYWMNWVRQAPGKGLEWVGEIRLKSNNFATHYAEPVKGRFTISRDDSKSTVYLQMNSLKTEDTAVYYCTRYYGNYGGYFDVWGAGTLVTVSSASTKGPSVFPLAPSSKSTSGGTAALGCLVKDYFPEPVTVSWNSGALTSGVHTFPAVLQSSGLYSLSSVVTVPSSSLGTQTYICNVNHKPSNTKVDKKVEPKSCDKTHTCPPCPAPPVAGPSVFLFPPKPKDTLMISRTPEVTCVVVDVKHEDPEVKFNWYVDGVEVHNAKTKPREEQYNSTYRVVSVLTVLHQDWLNGKEYKCKVSNKALPAPIEKTISKAKGQPREPQVYTLPPSREEMTKNQVSLTCLVKGFYPSDIAVEWESNGQPENNYKTTPPVLDSDGSFFLYSKLTVDKSRWQQGNVFSCSVMHEALHNHYTQKSLSLSPGK

SEQ ID NO: 17582 - protein, 122 aa, synthetic construct; identical to SEQ ID NO: 12098
  REGION 1..122: note = Description of Artificial Sequence: Synthetic polypeptide
  REGION 1..122: note = VH of XENP018220

SEQ ID NO: 17583 - protein, 5 aa, synthetic construct
  REGION 1..5: note = Description of Artificial Sequence: Synthetic peptide
  REGION 1..5: note = XENP018220 vhCDR1
NYWMN

SEQ ID NO: 17584 - protein, 19 aa, synthetic construct
  REGION 1..19: note = Description of Artificial Sequence: Synthetic peptide
  REGION 1..19: note = XENP018220 vhCDR2
EIRLKSNNFATHYAEPVKG

SEQ ID NO: 17585 - protein, 11 aa, synthetic construct
  REGION 1..11: note = Description of Artificial Sequence: Synthetic peptide
  REGION 1..11: note = XENP018220 vhCDR3
YYGNYGGYFDV

SEQ ID NO: 17586 - protein, 214 aa, synthetic construct; identical to SEQ ID NO: 16226
  REGION 1..214: note = Description of Artificial Sequence: Synthetic polypeptide
  REGION 1..214: note = XENP018220 1G6_H1.119_L1_IgG1_PVA_/S267K Light Chain

SEQ ID NO: 17587 - protein, 107 aa, synthetic construct; identical to SEQ ID NO: 10923
  REGION 1..107: note = Description of Artificial Sequence: Synthetic polypeptide
  REGION 1..107: note = VL of XENP018220

SEQ ID NO: 17588 - protein, 11 aa, synthetic construct
  REGION 1..11: note = Description of Artificial Sequence: Synthetic peptide
  REGION 1..11: note = XENP018220 vlCDR1
RASQSVSNDVA

SEQ ID NO: 17589 - protein, 7 aa, synthetic construct
  REGION 1..7: note = Description of Artificial Sequence: Synthetic peptide
  REGION 1..7: note = XENP018220 vlCDR2
YASHRYT

SEQ ID NO: 17590 - protein, 9 aa, synthetic construct
  REGION 1..9: note = Description of Artificial Sequence: Synthetic peptide
  REGION 1..9: note = XENP018220 vlCDR3
QQDYSSPRT

SEQ ID NO: 17591 - protein, 451 aa, synthetic construct
  REGION 1..451: note = Description of Artificial Sequence: Synthetic polypeptide
  REGION 1..451: note = XENP018221 1G6_H1.120_L1_IgG1_PVA_/S267K Heavy Chain
EVQLVESGGGLVKPGGSLRLSCAASGFTFSNYWMNWVRQAPGKGLEWVGEIRLKSNNHATHYAEPVKGRFTISRDDSKSTVYLQMNSLKTEDTAVYYCTRYYGNYGGYFDVWGAGTLVTVSSASTKGPSVFPLAPSSKSTSGGTAALGCLVKDYFPEPVTVSWNSGALTSGVHTFPAVLQSSGLYSLSSVVTVPSSSLGTQTYICNVNHKPSNTKVDKKVEPKSCDKTHTCPPCPAPPVAGPSVFLFPPKPKDTLMISRTPEVTCVVVDVKHEDPEVKFNWYVDGVEVHNAKTKPREEQYNSTYRVVSVLTVLHQDWLNGKEYKCKVSNKALPAPIEKTISKAKGQPREPQVYTLPPSREEMTKNQVSLTCLVKGFYPSDIAVEWESNGQPENNYKTTPPVLDSDGSFFLYSKLTVDKSRWQQGNVFSCSVMHEALHNHYTQKSLSLSPGK

SEQ ID NO: 17592 - protein, 122 aa, synthetic construct; identical to SEQ ID NO: 12107
  REGION 1..122: note = Description of Artificial Sequence: Synthetic polypeptide
  REGION 1..122: note = VH of XENP018221

SEQ ID NO: 17593 - protein, 5 aa, synthetic construct
  REGION 1..5: note = Description of Artificial Sequence: Synthetic peptide
  REGION 1..5: note = XENP018221 vhCDR1
NYWMN

SEQ ID NO: 17594 - protein, 19 aa, synthetic construct
  REGION 1..19: note = Description of Artificial Sequence: Synthetic peptide
  REGION 1..19: note = XENP018221 vhCDR2
EIRLKSNNHATHYAEPVKG

SEQ ID NO: 17595 - protein, 11 aa, synthetic construct
  REGION 1..11: note = Description of Artificial Sequence: Synthetic peptide
  REGION 1..11: note = XENP018221 vhCDR3
YYGNYGGYFDV

SEQ ID NO: 17596 - protein, 214 aa, synthetic construct; identical to SEQ ID NO: 16226
  REGION 1..214: note = Description of Artificial Sequence: Synthetic polypeptide
  REGION 1..214: note = XENP018221 1G6_H1.120_L1_IgG1_PVA_/S267K Light Chain

SEQ ID NO: 17597 - protein, 107 aa, synthetic construct; identical to SEQ ID NO: 10923
  REGION 1..107: note = Description of Artificial Sequence: Synthetic polypeptide
  REGION 1..107: note = VL of XENP018221

SEQ ID NO: 17598 - protein, 11 aa, synthetic construct
  REGION 1..11: note = Description of Artificial Sequence: Synthetic peptide
  REGION 1..11: note = XENP018221 vlCDR1
RASQSVSNDVA

SEQ ID NO: 17599 - protein, 7 aa, synthetic construct
  REGION 1..7: note = Description of Artificial Sequence: Synthetic peptide
  REGION 1..7: note = XENP018221 vlCDR2
YASHRYT

SEQ ID NO: 17600 - protein, 9 aa, synthetic construct
  REGION 1..9: note = Description of Artificial Sequence: Synthetic peptide
  REGION 1..9: note = XENP018221 vlCDR3
QQDYSSPRT

SEQ ID NO: 17601 - protein, 451 aa, synthetic construct
  REGION 1..451: note = Description of Artificial Sequence: Synthetic polypeptide
  REGION 1..451: note = XENP018222 1G6_H1.121_L1_IgG1_PVA_/S267K Heavy Chain
EVQLVESGGGLVKPGGSLRLSCAASGFTFSNYWMNWVRQAPGKGLEWVGEIRLKSNNLATHYAEPVKGRFTISRDDSKSTVYLQMNSLKTEDTAVYYCTRYYGNYGGYFDVWGAGTLVTVSSASTKGPSVFPLAPSSKSTSGGTAALGCLVKDYFPEPVTVSWNSGALTSGVHTFPAVLQSSGLYSLSSVVTVPSSSLGTQTYICNVNHKPSNTKVDKKVEPKSCDKTHTCPPCPAPPVAGPSVFLFPPKPKDTLMISRTPEVTCVVVDVKHEDPEVKFNWYVDGVEVHNAKTKPREEQYNSTYRVVSVLTVLHQDWLNGKEYKCKVSNKALPAPIEKTISKAKGQPREPQVYTLPPSREEMTKNQVSLTCLVKGFYPSDIAVEWESNGQPENNYKTTPPVLDSDGSFFLYSKLTVDKSRWQQGNVFSCSVMHEALHNHYTQKSLSLSPGK

SEQ ID NO: 17602 - protein, 122 aa, synthetic construct; identical to SEQ ID NO: 12116
  REGION 1..122: note = Description of Artificial Sequence: Synthetic polypeptide
  REGION 1..122: note = VH of XENP018222

SEQ ID NO: 17603 - protein, 5 aa, synthetic construct
  REGION 1..5: note = Description of Artificial Sequence: Synthetic peptide
  REGION 1..5: note = XENP018222 vhCDR1
NYWMN

SEQ ID NO: 17604 - protein, 19 aa, synthetic construct
  REGION 1..19: note = Description of Artificial Sequence: Synthetic peptide
  REGION 1..19: note = XENP018222 vhCDR2
EIRLKSNNLATHYAEPVKG

SEQ ID NO: 17605 - protein, 11 aa, synthetic construct
  REGION 1..11: note = Description of Artificial Sequence: Synthetic peptide
  REGION 1..11: note = XENP018222 vhCDR3
YYGNYGGYFDV

SEQ ID NO: 17606 - protein, 214 aa, synthetic construct; identical to SEQ ID NO: 16226
  REGION 1..214: note = Description of Artificial Sequence: Synthetic polypeptide
  REGION 1..214: note = XENP018222 1G6_H1.121_L1_IgG1_PVA_/S267K Light Chain

SEQ ID NO: 17607 - protein, 107 aa, synthetic construct; identical to SEQ ID NO: 10923
  REGION 1..107: note = Description of Artificial Sequence: Synthetic polypeptide
  REGION 1..107: note = VL of XENP018222

SEQ ID NO: 17608 - protein, 11 aa, synthetic construct
  REGION 1..11: note = Description of Artificial Sequence: Synthetic peptide
  REGION 1..11: note = XENP018222 vlCDR1
RASQSVSNDVA

SEQ ID NO: 17609 - protein, 7 aa, synthetic construct
  REGION 1..7: note = Description of Artificial Sequence: Synthetic peptide
  REGION 1..7: note = XENP018222 vlCDR2
YASHRYT

SEQ ID NO: 17610 - protein, 9 aa, synthetic construct
  REGION 1..9: note = Description of Artificial Sequence: Synthetic peptide
  REGION 1..9: note = XENP018222 vlCDR3
QQDYSSPRT

SEQ ID NO: 17611 - protein, 451 aa, synthetic construct
  REGION 1..451: note = Description of Artificial Sequence: Synthetic polypeptide
  REGION 1..451: note = XENP018223 1G6_H1.122_L1_IgG1_PVA_/S267K Heavy Chain
EVQLVESGGGLVKPGGSLRLSCAASGFTFSNYWMNWVRQAPGKGLEWVGEIRLKSNNWATHYAEPVKGRFTISRDDSKSTVYLQMNSLKTEDTAVYYCTRYYGNYGGYFDVWGAGTLVTVSSASTKGPSVFPLAPSSKSTSGGTAALGCLVKDYFPEPVTVSWNSGALTSGVHTFPAVLQSSGLYSLSSVVTVPSSSLGTQTYICNVNHKPSNTKVDKKVEPKSCDKTHTCPPCPAPPVAGPSVFLFPPKPKDTLMISRTPEVTCVVVDVKHEDPEVKFNWYVDGVEVHNAKTKPREEQYNSTYRVVSVLTVLHQDWLNGKEYKCKVSNKALPAPIEKTISKAKGQPREPQVYTLPPSREEMTKNQVSLTCLVKGFYPSDIAVEWESNGQPENNYKTTPPVLDSDGSFFLYSKLTVDKSRWQQGNVFSCSVMHEALHNHYTQKSLSLSPGK

SEQ ID NO: 17612 - protein, 122 aa, synthetic construct; identical to SEQ ID NO: 12125
  REGION 1..122: note = Description of Artificial Sequence: Synthetic polypeptide
  REGION 1..122: note = VH of XENP018223

SEQ ID NO: 17613 - protein, 5 aa, synthetic construct
  REGION 1..5: note = Description of Artificial Sequence: Synthetic peptide
  REGION 1..5: note = XENP018223 vhCDR1
NYWMN

SEQ ID NO: 17614 - protein, 19 aa, synthetic construct
  REGION 1..19: note = Description of Artificial Sequence: Synthetic peptide
  REGION 1..19: note = XENP018223 vhCDR2
EIRLKSNNWATHYAEPVKG

SEQ ID NO: 17615 - protein, 11 aa, synthetic construct
  REGION 1..11: note = Description of Artificial Sequence: Synthetic peptide
  REGION 1..11: note = XENP018223 vhCDR3
YYGNYGGYFDV

SEQ ID NO: 17616 - protein, 214 aa, synthetic construct; identical to SEQ ID NO: 16226
  REGION 1..214: note = Description of Artificial Sequence: Synthetic polypeptide
  REGION 1..214: note = XENP018223 1G6_H1.122_L1_IgG1_PVA_/S267K Light Chain

SEQ ID NO: 17617 - protein, 107 aa, synthetic construct; identical to SEQ ID NO: 10923
  REGION 1..107: note = Description of Artificial Sequence: Synthetic polypeptide
  REGION 1..107: note = VL of XENP018223

SEQ ID NO: 17618 - protein, 11 aa, synthetic construct
  REGION 1..11: note = Description of Artificial Sequence: Synthetic peptide
  REGION 1..11: note = XENP018223 vlCDR1
RASQSVSNDVA

SEQ ID NO: 17619 - protein, 7 aa, synthetic construct
  REGION 1..7: note = Description of Artificial Sequence: Synthetic peptide
  REGION 1..7: note = XENP018223 vlCDR2
YASHRYT

SEQ ID NO: 17620 - protein, 9 aa, synthetic construct
  REGION 1..9: note = Description of Artificial Sequence: Synthetic peptide
  REGION 1..9: note = XENP018223 vlCDR3
QQDYSSPRT

SEQ ID NO: 17621 - protein, 451 aa, synthetic construct
  REGION 1..451: note = Description of Artificial Sequence: Synthetic polypeptide
  REGION 1..451: note = XENP018224 1G6_H1.123_L1_IgG1_PVA_/S267K Heavy Chain
EVQLVESGGGLVKPGGSLRLSCAASGFTFSNYWMNWVRQAPGKGLEWVGEIRLKSNNVATHYAEPVKGRFTISRDDSKSTVYLQMNSLKTEDTAVYYCTRYYGNYGGYFDVWGAGTLVTVSSASTKGPSVFPLAPSSKSTSGGTAALGCLVKDYFPEPVTVSWNSGALTSGVHTFPAVLQSSGLYSLSSVVTVPSSSLGTQTYICNVNHKPSNTKVDKKVEPKSCDKTHTCPPCPAPPVAGPSVFLFPPKPKDTLMISRTPEVTCVVVDVKHEDPEVKFNWYVDGVEVHNAKTKPREEQYNSTYRVVSVLTVLHQDWLNGKEYKCKVSNKALPAPIEKTISKAKGQPREPQVYTLPPSREEMTKNQVSLTCLVKGFYPSDIAVEWESNGQPENNYKTTPPVLDSDGSFFLYSKLTVDKSRWQQGNVFSCSVMHEALHNHYTQKSLSLSPGK

SEQ ID NO: 17622 - protein, 122 aa, synthetic construct; identical to SEQ ID NO: 12134
  REGION 1..122: note = Description of Artificial Sequence: Synthetic polypeptide
  REGION 1..122: note = VH of XENP018224

SEQ ID NO: 17623 - protein, 5 aa, synthetic construct
  REGION 1..5: note = Description of Artificial Sequence: Synthetic peptide
  REGION 1..5: note = XENP018224 vhCDR1
NYWMN

SEQ ID NO: 17624 - protein, 19 aa, synthetic construct
  REGION 1..19: note = Description of Artificial Sequence: Synthetic peptide
  REGION 1..19: note = XENP018224 vhCDR2
EIRLKSNNVATHYAEPVKG

SEQ ID NO: 17625 - protein, 11 aa, synthetic construct
  REGION 1..11: note = Description of Artificial Sequence: Synthetic peptide
  REGION 1..11: note = XENP018224 vhCDR3
YYGNYGGYFDV

SEQ ID NO: 17626 - protein, 214 aa, synthetic construct; identical to SEQ ID NO: 16226
  REGION 1..214: note = Description of Artificial Sequence: Synthetic polypeptide
  REGION 1..214: note = XENP018224 1G6_H1.123_L1_IgG1_PVA_/S267K Light Chain

SEQ ID NO: 17627 - protein, 107 aa, synthetic construct; identical to SEQ ID NO: 10923
  REGION 1..107: note = Description of Artificial Sequence: Synthetic polypeptide
  REGION 1..107: note = VL of XENP018224

SEQ ID NO: 17628 - protein, 11 aa, synthetic construct
  REGION 1..11: note = Description of Artificial Sequence: Synthetic peptide
  REGION 1..11: note = XENP018224 vlCDR1
RASQSVSNDVA

SEQ ID NO: 17629 - protein, 7 aa, synthetic construct
  REGION 1..7: note = Description of Artificial Sequence: Synthetic peptide
  REGION 1..7: note = XENP018224 vlCDR2
YASHRYT

SEQ ID NO: 17630 - protein, 9 aa, synthetic construct
  REGION 1..9: note = Description of Artificial Sequence: Synthetic peptide
  REGION 1..9: note = XENP018224 vlCDR3
QQDYSSPRT

SEQ ID NO: 17631 - protein, 451 aa, synthetic construct
  REGION 1..451: note = Description of Artificial Sequence: Synthetic polypeptide
  REGION 1..451: note = XENP018225 1G6_H1.124_L1_IgG1_PVA_/S267K Heavy Chain
EVQLVESGGGLVKPGGSLRLSCAASGFTFSNYWMNWVRQAPGKGLEWVGEIRLKSNNAATHYAEPVKGRFTISRDDSKSTVYLQMNSLKTEDTAVYYCTRYYGNYGGYFDVWGAGTLVTVSSASTKGPSVFPLAPSSKSTSGGTAALGCLVKDYFPEPVTVSWNSGALTSGVHTFPAVLQSSGLYSLSSVVTVPSSSLGTQTYICNVNHKPSNTKVDKKVEPKSCDKTHTCPPCPAPPVAGPSVFLFPPKPKDTLMISRTPEVTCVVVDVKHEDPEVKFNWYVDGVEVHNAKTKPREEQYNSTYRVVSVLTVLHQDWLNGKEYKCKVSNKALPAPIEKTISKAKGQPREPQVYTLPPSREEMTKNQVSLTCLVKGFYPSDIAVEWESNGQPENNYKTTPPVLDSDGSFFLYSKLTVDKSRWQQGNVFSCSVMHEALHNHYTQKSLSLSPGK

SEQ ID NO: 17632 - protein, 122 aa, synthetic construct; identical to SEQ ID NO: 12143
  REGION 1..122: note = Description of Artificial Sequence: Synthetic polypeptide
  REGION 1..122: note = VH of XENP018225

SEQ ID NO: 17633 - protein, 5 aa, synthetic construct
  REGION 1..5: note = Description of Artificial Sequence: Synthetic peptide
  REGION 1..5: note = XENP018225 vhCDR1
NYWMN

SEQ ID NO: 17634 - protein, 19 aa, synthetic construct
  REGION 1..19: note = Description of Artificial Sequence: Synthetic peptide
  REGION 1..19: note = XENP018225 vhCDR2
EIRLKSNNAATHYAEPVKG

SEQ ID NO: 17635 - protein, 11 aa, synthetic construct
  REGION 1..11: note = Description of Artificial Sequence: Synthetic peptide
  REGION 1..11: note = XENP018225 vhCDR3
YYGNYGGYFDV

SEQ ID NO: 17636 - protein, 214 aa, synthetic construct; identical to SEQ ID NO: 16226
  REGION 1..214: note = Description of Artificial Sequence: Synthetic polypeptide
  REGION 1..214: note = XENP018225 1G6_H1.124_L1_IgG1_PVA_/S267K Light Chain

SEQ ID NO: 17637 - protein, 107 aa, synthetic construct; identical to SEQ ID NO: 10923
  REGION 1..107: note = Description of Artificial Sequence: Synthetic polypeptide
  REGION 1..107: note = VL of XENP018225

SEQ ID NO: 17638 - protein, 11 aa, synthetic construct
  REGION 1..11: note = Description of Artificial Sequence: Synthetic peptide
  REGION 1..11: note = XENP018225 vlCDR1
RASQSVSNDVA

SEQ ID NO: 17639 - protein, 7 aa, synthetic construct
  REGION 1..7: note = Description of Artificial Sequence: Synthetic peptide
  REGION 1..7: note = XENP018225 vlCDR2
YASHRYT

SEQ ID NO: 17640 - protein, 9 aa, synthetic construct
  REGION 1..9: note = Description of Artificial Sequence: Synthetic peptide
  REGION 1..9: note = XENP018225 vlCDR3
QQDYSSPRT

SEQ ID NO: 17641 - protein, 451 aa, synthetic construct
  REGION 1..451: note = Description of Artificial Sequence: Synthetic polypeptide
  REGION 1..451: note = XENP018226 1G6_H1.125_L1_IgG1_PVA_/S267K Heavy Chain
EVQLVESGGGLVKPGGSLRLSCAASGFTFSNYWMNWVRQAPGKGLEWVGEIRLKSNNQATHYAEPVKGRFTISRDDSKSTVYLQMNSLKTEDTAVYYCTRYYGNYGGYFDVWGAGTLVTVSSASTKGPSVFPLAPSSKSTSGGTAALGCLVKDYFPEPVTVSWNSGALTSGVHTFPAVLQSSGLYSLSSVVTVPSSSLGTQTYICNVNHKPSNTKVDKKVEPKSCDKTHTCPPCPAPPVAGPSVFLFPPKPKDTLMISRTPEVTCVVVDVKHEDPEVKFNWYVDGVEVHNAKTKPREEQYNSTYRVVSVLTVLHQDWLNGKEYKCKVSNKALPAPIEKTISKAKGQPREPQVYTLPPSREEMTKNQVSLTCLVKGFYPSDIAVEWESNGQPENNYKTTPPVLDSDGSFFLYSKLTVDKSRWQQGNVFSCSVMHEALHNHYTQKSLSLSPGK

SEQ ID NO: 17642 - protein, 122 aa, synthetic construct; identical to SEQ ID NO: 12152
  REGION 1..122: note = Description of Artificial Sequence: Synthetic polypeptide
  REGION 1..122: note = VH of XENP018226

SEQ ID NO: 17643 - protein, 5 aa, synthetic construct
  REGION 1..5: note = Description of Artificial Sequence: Synthetic peptide
  REGION 1..5: note = XENP018226 vhCDR1
NYWMN

SEQ ID NO: 17644 - protein, 19 aa, synthetic construct
  REGION 1..19: note = Description of Artificial Sequence: Synthetic peptide
  REGION 1..19: note = XENP018226 vhCDR2
EIRLKSNNQATHYAEPVKG

SEQ ID NO: 17645 - protein, 11 aa, synthetic construct
  REGION 1..11: note = Description of Artificial Sequence: Synthetic peptide
  REGION 1..11: note = XENP018226 vhCDR3
YYGNYGGYFDV

SEQ ID NO: 17646 - protein, 214 aa, synthetic construct; identical to SEQ ID NO: 16226
  REGION 1..214: note = Description of Artificial Sequence: Synthetic polypeptide
  REGION 1..214: note = XENP018226 1G6_H1.125_L1_IgG1_PVA_/S267K Light Chain

SEQ ID NO: 17647 - protein, 107 aa, synthetic construct; identical to SEQ ID NO: 10923
  REGION 1..107: note = Description of Artificial Sequence: Synthetic polypeptide
  REGION 1..107: note = VL of XENP018226

SEQ ID NO: 17648 - protein, 11 aa, synthetic construct
  REGION 1..11: note = Description of Artificial Sequence: Synthetic peptide
  REGION 1..11: note = XENP018226 vlCDR1
RASQSVSNDVA

SEQ ID NO: 17649 - protein, 7 aa, synthetic construct
  REGION 1..7: note = Description of Artificial Sequence: Synthetic peptide
  REGION 1..7: note = XENP018226 vlCDR2
YASHRYT

SEQ ID NO: 17650 - protein, 9 aa, synthetic construct
  REGION 1..9: note = Description of Artificial Sequence: Synthetic peptide
  REGION 1..9: note = XENP018226 vlCDR3
QQDYSSPRT

SEQ ID NO: 17651 - protein, 451 aa, synthetic construct
  REGION 1..451: note = Description of Artificial Sequence: Synthetic polypeptide
  REGION 1..451: note = XENP018227 1G6_H1.126_L1_IgG1_PVA_/S267K Heavy Chain
EVQLVESGGGLVKPGGSLRLSCAASGFTFSNYWMNWVRQAPGKGLEWVGEIRLKSNNDATHYAEPVKGRFTISRDDSKSTVYLQMNSLKTEDTAVYYCTRYYGNYGGYFDVWGAGTLVTVSSASTKGPSVFPLAPSSKSTSGGTAALGCLVKDYFPEPVTVSWNSGALTSGVHTFPAVLQSSGLYSLSSVVTVPSSSLGTQTYICNVNHKPSNTKVDKKVEPKSCDKTHTCPPCPAPPVAGPSVFLFPPKPKDTLMISRTPEVTCVVVDVKHEDPEVKFNWYVDGVEVHNAKTKPREEQYNSTYRVVSVLTVLHQDWLNGKEYKCKVSNKALPAPIEKTISKAKGQPREPQVYTLPPSREEMTKNQVSLTCLVKGFYPSDIAVEWESNGQPENNYKTTPPVLDSDGSFFLYSKLTVDKSRWQQGNVFSCSVMHEALHNHYTQKSLSLSPGK

SEQ ID NO: 17652 - protein, 122 aa, synthetic construct; identical to SEQ ID NO: 12161
  REGION 1..122: note = Description of Artificial Sequence: Synthetic polypeptide
  REGION 1..122: note = VH of XENP018227

SEQ ID NO: 17653 - protein, 5 aa, synthetic construct
  REGION 1..5: note = Description of Artificial Sequence: Synthetic peptide
  REGION 1..5: note = XENP018227 vhCDR1
NYWMN

SEQ ID NO: 17654 - protein, 19 aa, synthetic construct
  REGION 1..19: note = Description of Artificial Sequence: Synthetic peptide
  REGION 1..19: note = XENP018227 vhCDR2
EIRLKSNNDATHYAEPVKG

SEQ ID NO: 17655 - protein, 11 aa, synthetic construct
  REGION 1..11: note = Description of Artificial Sequence: Synthetic peptide
  REGION 1..11: note = XENP018227 vhCDR3
YYGNYGGYFDV

SEQ ID NO: 17656 - protein, 214 aa, synthetic construct; identical to SEQ ID NO: 16226
  REGION 1..214: note = Description of Artificial Sequence: Synthetic polypeptide
  REGION 1..214: note = XENP018227 1G6_H1.126_L1_IgG1_PVA_/S267K Light Chain

SEQ ID NO: 17657 - protein, 107 aa, synthetic construct; identical to SEQ ID NO: 10923
  REGION 1..107: note = Description of Artificial Sequence: Synthetic polypeptide
  REGION 1..107: note = VL of XENP018227

SEQ ID NO: 17658 - protein, 11 aa, synthetic construct
  REGION 1..11: note = Description of Artificial Sequence: Synthetic peptide
  REGION 1..11: note = XENP018227 vlCDR1
RASQSVSNDVA

SEQ ID NO: 17659 - protein, 7 aa, synthetic construct
  REGION 1..7: note = Description of Artificial Sequence: Synthetic peptide
  REGION 1..7: note = XENP018227 vlCDR2
YASHRYT

SEQ ID NO: 17660 - protein, 9 aa, synthetic construct
  REGION 1..9: note = Description of Artificial Sequence: Synthetic peptide
  REGION 1..9: note = XENP018227 vlCDR3
QQDYSSPRT

SEQ ID NO: 17661 - protein, 451 aa, synthetic construct
  REGION 1..451: note = Description of Artificial Sequence: Synthetic polypeptide
  REGION 1..451: note = XENP018228 1G6_H1.127_L1_IgG1_PVA_/S267K Heavy Chain
EVQLVESGGGLVKPGGSLRLSCAASGFTFSNYWMNWVRQAPGKGLEWVGEIRLKSNNKATHYAEPVKGRFTISRDDSKSTVYLQMNSLKTEDTAVYYCTRYYGNYGGYFDVWGAGTLVTVSSASTKGPSVFPLAPSSKSTSGGTAALGCLVKDYFPEPVTVSWNSGALTSGVHTFPAVLQSSGLYSLSSVVTVPSSSLGTQTYICNVNHKPSNTKVDKKVEPKSCDKTHTCPPCPAPPVAGPSVFLFPPKPKDTLMISRTPEVTCVVVDVKHEDPEVKFNWYVDGVEVHNAKTKPREEQYNSTYRVVSVLTVLHQDWLNGKEYKCKVSNKALPAPIEKTISKAKGQPREPQVYTLPPSREEMTKNQVSLTCLVKGFYPSDIAVEWESNGQPENNYKTTPPVLDSDGSFFLYSKLTVDKSRWQQGNVFSCSVMHEALHNHYTQKSLSLSPGK

SEQ ID NO: 17662 - protein, 122 aa, synthetic construct; identical to SEQ ID NO: 12170
  REGION 1..122: note = Description of Artificial Sequence: Synthetic polypeptide
  REGION 1..122: note = VH of XENP018228

SEQ ID NO: 17663 - protein, 5 aa, synthetic construct
  REGION 1..5: note = Description of Artificial Sequence: Synthetic peptide
  REGION 1..5: note = XENP018228 vhCDR1
NYWMN

SEQ ID NO: 17664 - protein, 19 aa, synthetic construct
  REGION 1..19: note = Description of Artificial Sequence: Synthetic peptide
  REGION 1..19: note = XENP018228 vhCDR2
EIRLKSNNKATHYAEPVKG

SEQ ID NO: 17665 - protein, 11 aa, synthetic construct
  REGION 1..11: note = Description of Artificial Sequence: Synthetic peptide
  REGION 1..11: note = XENP018228 vhCDR3
YYGNYGGYFDV

SEQ ID NO: 17666 - protein, 214 aa, synthetic construct; identical to SEQ ID NO: 16226
  REGION 1..214: note = Description of Artificial Sequence: Synthetic polypeptide
  REGION 1..214: note = XENP018228 1G6_H1.127_L1_IgG1_PVA_/S267K Light Chain

SEQ ID NO: 17667 - protein, 107 aa, synthetic construct; identical to SEQ ID NO: 10923
  REGION 1..107: note = Description of Artificial Sequence: Synthetic polypeptide
  REGION 1..107: note = VL of XENP018228

SEQ ID NO: 17668 - protein, 11 aa, synthetic construct
  REGION 1..11: note = Description of Artificial Sequence: Synthetic peptide
  REGION 1..11: note = XENP018228 vlCDR1
RASQSVSNDVA

SEQ ID NO: 17669 - protein, 7 aa, synthetic construct
  REGION 1..7: note = Description of Artificial Sequence: Synthetic peptide
  REGION 1..7: note = XENP018228 vlCDR2
YASHRYT

SEQ ID NO: 17670 - protein, 9 aa, synthetic construct
  REGION 1..9: note = Description of Artificial Sequence: Synthetic peptide
  REGION 1..9: note = XENP018228 vlCDR3
QQDYSSPRT

SEQ ID NO: 17671 - protein, 451 aa, synthetic construct
  REGION 1..451: note = Description of Artificial Sequence: Synthetic polypeptide
  REGION 1..451: note = XENP018229 1G6_H1.128_L1_IgG1_PVA_/S267K Heavy Chain
EVQLVESGGGLVKPGGSLRLSCAASGFTFSNYWMNWVRQAPGKGLEWVGEIRLKSNNYGTHYAEPVKGRFTISRDDSKSTVYLQMNSLKTEDTAVYYCTRYYGNYGGYFDVWGAGTLVTVSSASTKGPSVFPLAPSSKSTSGGTAALGCLVKDYFPEPVTVSWNSGALTSGVHTFPAVLQSSGLYSLSSVVTVPSSSLGTQTYICNVNHKPSNTKVDKKVEPKSCDKTHTCPPCPAPPVAGPSVFLFPPKPKDTLMISRTPEVTCVVVDVKHEDPEVKFNWYVDGVEVHNAKTKPREEQYNSTYRVVSVLTVLHQDWLNGKEYKCKVSNKALPAPIEKTISKAKGQPREPQVYTLPPSREEMTKNQVSLTCLVKGFYPSDIAVEWESNGQPENNYKTTPPVLDSDGSFFLYSKLTVDKSRWQQGNVFSCSVMHEALHNHYTQKSLSLSPGK

SEQ ID NO: 17672 - protein, 122 aa, synthetic construct; identical to SEQ ID NO: 12179
  REGION 1..122: note = Description of Artificial Sequence: Synthetic polypeptide
  REGION 1..122: note = VH of XENP018229

SEQ ID NO: 17673 - protein, 5 aa, synthetic construct
  REGION 1..5: note = Description of Artificial Sequence: Synthetic peptide
  REGION 1..5: note = XENP018229 vhCDR1
NYWMN

SEQ ID NO: 17674 - protein, 19 aa, synthetic construct
  REGION 1..19: note = Description of Artificial Sequence: Synthetic peptide
  REGION 1..19: note = XENP018229 vhCDR2
EIRLKSNNYGTHYAEPVKG

SEQ ID NO: 17675 - protein, 11 aa, synthetic construct
  REGION 1..11: note = Description of Artificial Sequence: Synthetic peptide
  REGION 1..11: note = XENP018229 vhCDR3
YYGNYGGYFDV

SEQ ID NO: 17676 - protein, 214 aa, synthetic construct; identical to SEQ ID NO: 16226
  REGION 1..214: note = Description of Artificial Sequence: Synthetic polypeptide
  REGION 1..214: note = XENP018229 1G6_H1.128_L1_IgG1_PVA_/S267K Light Chain

SEQ ID NO: 17677 - protein, 107 aa, synthetic construct; identical to SEQ ID NO: 10923
  REGION 1..107: note = Description of Artificial Sequence: Synthetic polypeptide
  REGION 1..107: note = VL of XENP018229

SEQ ID NO: 17678 - protein, 11 aa, synthetic construct
  REGION 1..11: note = Description of Artificial Sequence: Synthetic peptide
  REGION 1..11: note = XENP018229 vlCDR1
RASQSVSNDVA

SEQ ID NO: 17679 - protein, 7 aa, synthetic construct
  REGION 1..7: note = Description of Artificial Sequence: Synthetic peptide
  REGION 1..7: note = XENP018229 vlCDR2
YASHRYT

SEQ ID NO: 17680 - protein, 9 aa, synthetic construct
  REGION 1..9: note = Description of Artificial Sequence: Synthetic peptide
  REGION 1..9: note = XENP018229 vlCDR3
QQDYSSPRT

SEQ ID NO: 17681 - protein, 451 aa, synthetic construct
  REGION 1..451: note = Description of Artificial Sequence: Synthetic polypeptide
  REGION 1..451: note = XENP018230 1G6_H1.129_L1_IgG1_PVA_/S267K Heavy Chain
EVQLVESGGGLVKPGGSLRLSCAASGFTFSNYWMNWVRQAPGKGLEWVGEIRLKSNNYHTHYAEPVKGRFTISRDDSKSTVYLQMNSLKTEDTAVYYCTRYYGNYGGYFDVWGAGTLVTVSSASTKGPSVFPLAPSSKSTSGGTAALGCLVKDYFPEPVTVSWNSGALTSGVHTFPAVLQSSGLYSLSSVVTVPSSSLGTQTYICNVNHKPSNTKVDKKVEPKSCDKTHTCPPCPAPPVAGPSVFLFPPKPKDTLMISRTPEVTCVVVDVKHEDPEVKFNWYVDGVEVHNAKTKPREEQYNSTYRVVSVLTVLHQDWLNGKEYKCKVSNKALPAPIEKTISKAKGQPREPQVYTLPPSREEMTKNQVSLTCLVKGFYPSDIAVEWESNGQPENNYKTTPPVLDSDGSFFLYSKLTVDKSRWQQGNVFSCSVMHEALHNHYTQKSLSLSPGK

SEQ ID NO: 17682 - protein, 122 aa, synthetic construct; identical to SEQ ID NO: 12188
  REGION 1..122: note = Description of Artificial Sequence: Synthetic polypeptide
  REGION 1..122: note = VH of XENP018230

SEQ ID NO: 17683 - protein, 5 aa, synthetic construct
  REGION 1..5: note = Description of Artificial Sequence: Synthetic peptide
  REGION 1..5: note = XENP018230 vhCDR1
NYWMN

SEQ ID NO: 17684 - protein, 19 aa, synthetic construct
  REGION 1..19: note = Description of Artificial Sequence: Synthetic peptide
  REGION 1..19: note = XENP018230 vhCDR2
EIRLKSNNYHTHYAEPVKG

SEQ ID NO: 17685 - protein, 11 aa, synthetic construct
  REGION 1..11: note = Description of Artificial Sequence: Synthetic peptide
  REGION 1..11: note = XENP018230 vhCDR3
YYGNYGGYFDV

SEQ ID NO: 17686 - protein, 214 aa, synthetic construct; identical to SEQ ID NO: 16226
  REGION 1..214: note = Description of Artificial Sequence: Synthetic polypeptide
  REGION 1..214: note = XENP018230 1G6_H1.129_L1_IgG1_PVA_/S267K Light Chain

SEQ ID NO: 17687 - protein, 107 aa, synthetic construct; identical to SEQ ID NO: 10923
  REGION 1..107: note = Description of Artificial Sequence: Synthetic polypeptide
  REGION 1..107: note = VL of XENP018230

SEQ ID NO: 17688 - protein, 11 aa, synthetic construct
  REGION 1..11: note = Description of Artificial Sequence: Synthetic peptide
  REGION 1..11: note = XENP018230 vlCDR1
RASQSVSNDVA

SEQ ID NO: 17689 - protein, 7 aa, synthetic construct
  REGION 1..7: note = Description of Artificial Sequence: Synthetic peptide
  REGION 1..7: note = XENP018230 vlCDR2
YASHRYT

SEQ ID NO: 17690 - protein, 9 aa, synthetic construct
  REGION 1..9: note = Description of Artificial Sequence: Synthetic peptide
  REGION 1..9: note = XENP018230 vlCDR3
QQDYSSPRT

SEQ ID NO: 17691 - protein, 451 aa, synthetic construct
  REGION 1..451: note = Description of Artificial Sequence: Synthetic polypeptide
  REGION 1..451: note = XENP018231 1G6_H1.130_L1_IgG1_PVA_/S267K Heavy Chain
EVQLVESGGGLVKPGGSLRLSCAASGFTFSNYWMNWVRQAPGKGLEWVGEIRLKSNNYQTHYAEPVKGRFTISRDDSKSTVYLQMNSLKTEDTAVYYCTRYYGNYGGYFDVWGAGTLVTVSSASTKGPSVFPLAPSSKSTSGGTAALGCLVKDYFPEPVTVSWNSGALTSGVHTFPAVLQSSGLYSLSSVVTVPSSSLGTQTYICNVNHKPSNTKVDKKVEPKSCDKTHTCPPCPAPPVAGPSVFLFPPKPKDTLMISRTPEVTCVVVDVKHEDPEVKFNWYVDGVEVHNAKTKPREEQYNSTYRVVSVLTVLHQDWLNGKEYKCKVSNKALPAPIEKTISKAKGQPREPQVYTLPPSREEMTKNQVSLTCLVKGFYPSDIAVEWESNGQPENNYKTTPPVLDSDGSFFLYSKLTVDKSRWQQGNVFSCSVMHEALHNHYTQKSLSLSPGK

SEQ ID NO: 17692 - protein, 122 aa, synthetic construct; identical to SEQ ID NO: 12197
  REGION 1..122: note = Description of Artificial Sequence: Synthetic polypeptide
  REGION 1..122: note = VH of XENP018231

SEQ ID NO: 17693 - protein, 5 aa, synthetic construct
  REGION 1..5: note = Description of Artificial Sequence: Synthetic peptide
  REGION 1..5: note = XENP018231 vhCDR1
NYWMN

SEQ ID NO: 17694 - protein, 19 aa, synthetic construct
  REGION 1..19: note = Description of Artificial Sequence: Synthetic peptide
  REGION 1..19: note = XENP018231 vhCDR2
EIRLKSNNYQTHYAEPVKG

SEQ ID NO: 17695 - protein, 11 aa, synthetic construct
  REGION 1..11: note = Description of Artificial Sequence: Synthetic peptide
  REGION 1..11: note = XENP018231 vhCDR3
YYGNYGGYFDV

SEQ ID NO: 17696 - protein, 214 aa, synthetic construct; identical to SEQ ID NO: 16226
  REGION 1..214: note = Description of Artificial Sequence: Synthetic polypeptide
  REGION 1..214: note = XENP018231 1G6_H1.130_L1_IgG1_PVA_/S267K Light Chain

SEQ ID NO: 17697 - protein, 107 aa, synthetic construct; identical to SEQ ID NO: 10923
  REGION 1..107: note = Description of Artificial Sequence: Synthetic polypeptide
  REGION 1..107: note = VL of XENP018231

SEQ ID NO: 17698 - protein, 11 aa, synthetic construct
  REGION 1..11: note = Description of Artificial Sequence: Synthetic peptide
  REGION 1..11: note = XENP018231 vlCDR1
RASQSVSNDVA

SEQ ID NO: 17699 - protein, 7 aa, synthetic construct
  REGION 1..7: note = Description of Artificial Sequence: Synthetic peptide
  REGION 1..7: note = XENP018231 vlCDR2
YASHRYT

SEQ ID NO: 17700 - protein, 9 aa, synthetic construct
  REGION 1..9: note = Description of Artificial Sequence: Synthetic peptide
  REGION 1..9: note = XENP018231 vlCDR3
QQDYSSPRT

SEQ ID NO: 17701 - protein, 451 aa, synthetic construct
  REGION 1..451: note = Description of Artificial Sequence: Synthetic polypeptide
  REGION 1..451: note = XENP018232 1G6_H1.131_L1_IgG1_PVA_/S267K Heavy Chain
EVQLVESGGGLVKPGGSLRLSCAASGFTFSNYWMNWVRQAPGKGLEWVGEIRLKSNNYDTHYAEPVKGRFTISRDDSKSTVYLQMNSLKTEDTAVYYCTRYYGNYGGYFDVWGAGTLVTVSSASTKGPSVFPLAPSSKSTSGGTAALGCLVKDYFPEPVTVSWNSGALTSGVHTFPAVLQSSGLYSLSSVVTVPSSSLGTQTYICNVNHKPSNTKVDKKVEPKSCDKTHTCPPCPAPPVAGPSVFLFPPKPKDTLMISRTPEVTCVVVDVKHEDPEVKFNWYVDGVEVHNAKTKPREEQYNSTYRVVSVLTVLHQDWLNGKEYKCKVSNKALPAPIEKTISKAKGQPREPQVYTLPPSREEMTKNQVSLTCLVKGFYPSDIAVEWESNGQPENNYKTTPPVLDSDGSFFLYSKLTVDKSRWQQGNVFSCSVMHEALHNHYTQKSLSLSPGK

SEQ ID NO: 17702 - protein, 122 aa, synthetic construct; identical to SEQ ID NO: 12206
  REGION 1..122: note = Description of Artificial Sequence: Synthetic polypeptide
  REGION 1..122: note = VH of XENP018232

SEQ ID NO: 17703 - protein, 5 aa, synthetic construct
  REGION 1..5: note = Description of Artificial Sequence: Synthetic peptide
  REGION 1..5: note = XENP018232 vhCDR1
NYWMN

SEQ ID NO: 17704 - protein, 19 aa, synthetic construct
  REGION 1..19: note = Description of Artificial Sequence: Synthetic peptide
  REGION 1..19: note = XENP018232 vhCDR2
EIRLKSNNYDTHYAEPVKG

SEQ ID NO: 17705 - protein, 11 aa, synthetic construct
  REGION 1..11: note = Description of Artificial Sequence: Synthetic peptide
  REGION 1..11: note = XENP018232 vhCDR3
YYGNYGGYFDV

SEQ ID NO: 17706 - protein, 214 aa, synthetic construct; identical to SEQ ID NO: 16226
  REGION 1..214: note = Description of Artificial Sequence: Synthetic polypeptide
  REGION 1..214: note = XENP018232 1G6_H1.131_L1_IgG1_PVA_/S267K Light Chain

SEQ ID NO: 17707 - protein, 107 aa, synthetic construct; identical to SEQ ID NO: 10923
  REGION 1..107: note = Description of Artificial Sequence: Synthetic polypeptide
  REGION 1..107: note = VL of XENP018232

SEQ ID NO: 17708 - protein, 11 aa, synthetic construct
  REGION 1..11: note = Description of Artificial Sequence: Synthetic peptide
  REGION 1..11: note = XENP018232 vlCDR1
RASQSVSNDVA

SEQ ID NO: 17709 - protein, 7 aa, synthetic construct
  REGION 1..7: note = Description of Artificial Sequence: Synthetic peptide
  REGION 1..7: note = XENP018232 vlCDR2
YASHRYT

SEQ ID NO: 17710 - protein, 9 aa, synthetic construct
  REGION 1..9: note = Description of Artificial Sequence: Synthetic peptide
  REGION 1..9: note = XENP018232 vlCDR3
QQDYSSPRT

SEQ ID NO: 17711 - protein, 451 aa, synthetic construct
  REGION 1..451: note = Description of Artificial Sequence: Synthetic polypeptide
  REGION 1..451: note = XENP018233 1G6_H1.132_L1_IgG1_PVA_/S267K Heavy Chain
EVQLVESGGGLVKPGGSLRLSCAASGFTFSNYWMNWVRQAPGKGLEWVGEIRLKSNNYLTHYAEPVKGRFTISRDDSKSTVYLQMNSLKTEDTAVYYCTRYYGNYGGYFDVWGAGTLVTVSSASTKGPSVFPLAPSSKSTSGGTAALGCLVKDYFPEPVTVSWNSGALTSGVHTFPAVLQSSGLYSLSSVVTVPSSSLGTQTYICNVNHKPSNTKVDKKVEPKSCDKTHTCPPCPAPPVAGPSVFLFPPKPKDTLMISRTPEVTCVVVDVKHEDPEVKFNWYVDGVEVHNAKTKPREEQYNSTYRVVSVLTVLHQDWLNGKEYKCKVSNKALPAPIEKTISKAKGQPREPQVYTLPPSREEMTKNQVSLTCLVKGFYPSDIAVEWESNGQPENNYKTTPPVLDSDGSFFLYSKLTVDKSRWQQGNVFSCSVMHEALHNHYTQKSLSLSPGK

SEQ ID NO: 17712 - protein, 122 aa, synthetic construct; identical to SEQ ID NO: 12215
  REGION 1..122: note = Description of Artificial Sequence: Synthetic polypeptide
  REGION 1..122: note = VH of XENP018233

SEQ ID NO: 17713 - protein, 5 aa, synthetic construct
  REGION 1..5: note = Description of Artificial Sequence: Synthetic peptide
  REGION 1..5: note = XENP018233 vhCDR1
NYWMN

SEQ ID NO: 17714 - protein, 19 aa, synthetic construct
  REGION 1..19: note = Description of Artificial Sequence: Synthetic peptide
  REGION 1..19: note = XENP018233 vhCDR2
EIRLKSNNYLTHYAEPVKG

SEQ ID NO: 17715 - protein, 11 aa, synthetic construct
  REGION 1..11: note = Description of Artificial Sequence: Synthetic peptide
  REGION 1..11: note = XENP018233 vhCDR3
YYGNYGGYFDV

SEQ ID NO: 17716 - protein, 214 aa, synthetic construct; identical to SEQ ID NO: 16226
  REGION 1..214: note = Description of Artificial Sequence: Synthetic polypeptide
  REGION 1..214: note = XENP018233 1G6_H1.132_L1_IgG1_PVA_/S267K Light Chain

SEQ ID NO: 17717 - protein, 107 aa, synthetic construct; identical to SEQ ID NO: 10923
  REGION 1..107: note = Description of Artificial Sequence: Synthetic polypeptide
  REGION 1..107: note = VL of XENP018233

SEQ ID NO: 17718 - protein, 11 aa, synthetic construct
  REGION 1..11: note = Description of Artificial Sequence: Synthetic peptide
  REGION 1..11: note = XENP018233 vlCDR1
RASQSVSNDVA

SEQ ID NO: 17719 - protein, 7 aa, synthetic construct
  REGION 1..7: note = Description of Artificial Sequence: Synthetic peptide
  REGION 1..7: note = XENP018233 vlCDR2
YASHRYT

SEQ ID NO: 17720 - protein, 9 aa, synthetic construct
  REGION 1..9: note = Description of Artificial Sequence: Synthetic peptide
  REGION 1..9: note = XENP018233 vlCDR3
QQDYSSPRT

SEQ ID NO: 17721 - protein, 451 aa, synthetic construct
  REGION 1..451: note = Description of Artificial Sequence: Synthetic polypeptide
  REGION 1..451: note = XENP018234 1G6_H1.133_L1_IgG1_PVA_/S267K Heavy Chain
EVQLVESGGGLVKPGGSLRLSCAASGFTFSNYWMNWVRQAPGKGLEWVGEIRLKSNNYKTHYAEPVKGRFTISRDDSKSTVYLQMNSLKTEDTAVYYCTRYYGNYGGYFDVWGAGTLVTVSSASTKGPSVFPLAPSSKSTSGGTAALGCLVKDYFPEPVTVSWNSGALTSGVHTFPAVLQSSGLYSLSSVVTVPSSSLGTQTYICNVNHKPSNTKVDKKVEPKSCDKTHTCPPCPAPPVAGPSVFLFPPKPKDTLMISRTPEVTCVVVDVKHEDPEVKFNWYVDGVEVHNAKTKPREEQYNSTYRVVSVLTVLHQDWLNGKEYKCKVSNKALPAPIEKTISKAKGQPREPQVYTLPPSREEMTKNQVSLTCLVKGFYPSDIAVEWESNGQPENNYKTTPPVLDSDGSFFLYSKLTVDKSRWQQGNVFSCSVMHEALHNHYTQKSLSLSPGK

SEQ ID NO: 17722 - protein, 122 aa, synthetic construct; identical to SEQ ID NO: 12224
  REGION 1..122: note = Description of Artificial Sequence: Synthetic polypeptide
  REGION 1..122: note = VH of XENP018234

SEQ ID NO: 17723 - protein, 5 aa, synthetic construct
  REGION 1..5: note = Description of Artificial Sequence: Synthetic peptide
  REGION 1..5: note = XENP018234 vhCDR1
NYWMN

SEQ ID NO: 17724 - protein, 19 aa, synthetic construct
  REGION 1..19: note = Description of Artificial Sequence: Synthetic peptide
  REGION 1..19: note = XENP018234 vhCDR2
EIRLKSNNYKTHYAEPVKG

SEQ ID NO: 17725 - protein, 11 aa, synthetic construct
  REGION 1..11: note = Description of Artificial Sequence: Synthetic peptide
  REGION 1..11: note = XENP018234 vhCDR3
YYGNYGGYFDV

SEQ ID NO: 17726 - protein, 214 aa, synthetic construct; identical to SEQ ID NO: 16226
  REGION 1..214: note = Description of Artificial Sequence: Synthetic polypeptide
  REGION 1..214: note = XENP018234 1G6_H1.133_L1_IgG1_PVA_/S267K Light Chain

SEQ ID NO: 17727 - protein, 107 aa, synthetic construct; identical to SEQ ID NO: 10923
  REGION 1..107: note = Description of Artificial Sequence: Synthetic polypeptide
  REGION 1..107: note = VL of XENP018234

SEQ ID NO: 17728 - protein, 11 aa, synthetic construct
  REGION 1..11: note = Description of Artificial Sequence: Synthetic peptide
  REGION 1..11: note = XENP018234 vlCDR1
RASQSVSNDVA

SEQ ID NO: 17729 - protein, 7 aa, synthetic construct
  REGION 1..7: note = Description of Artificial Sequence: Synthetic peptide
  REGION 1..7: note = XENP018234 vlCDR2
YASHRYT

SEQ ID NO: 17730 - protein, 9 aa, synthetic construct
  REGION 1..9: note = Description of Artificial Sequence: Synthetic peptide
  REGION 1..9: note = XENP018234 vlCDR3
QQDYSSPRT

SEQ ID NO: 17731 - protein, 451 aa, synthetic construct
  REGION 1..451: note = Description of Artificial Sequence: Synthetic polypeptide
  REGION 1..451: note = XENP018235 1G6_H1.134_L1_IgG1_PVA_/S267K Heavy Chain
EVQLVESGGGLVKPGGSLRLSCAASGFTFSNYWMNWVRQAPGKGLEWVGEIRLKSNNYYTHYAEPVKGRFTISRDDSKSTVYLQMNSLKTEDTAVYYCTRYYGNYGGYFDVWGAGTLVTVSSASTKGPSVFPLAPSSKSTSGGTAALGCLVKDYFPEPVTVSWNSGALTSGVHTFPAVLQSSGLYSLSSVVTVPSSSLGTQTYICNVNHKPSNTKVDKKVEPKSCDKTHTCPPCPAPPVAGPSVFLFPPKPKDTLMISRTPEVTCVVVDVKHEDPEVKFNWYVDGVEVHNAKTKPREEQYNSTYRVVSVLTVLHQDWLNGKEYKCKVSNKALPAPIEKTISKAKGQPREPQVYTLPPSREEMTKNQVSLTCLVKGFYPSDIAVEWESNGQPENNYKTTPPVLDSDGSFFLYSKLTVDKSRWQQGNVFSCSVMHEALHNHYTQKSLSLSPGK

SEQ ID NO: 17732 - protein, 122 aa, synthetic construct; identical to SEQ ID NO: 12233
  REGION 1..122: note = Description of Artificial Sequence: Synthetic polypeptide
  REGION 1..122: note = VH of XENP018235

SEQ ID NO: 17733 - protein, 5 aa, synthetic construct
  REGION 1..5: note = Description of Artificial Sequence: Synthetic peptide
  REGION 1..5: note = XENP018235 vhCDR1
NYWMN

SEQ ID NO: 17734 - protein, 19 aa, synthetic construct
  REGION 1..19: note = Description of Artificial Sequence: Synthetic peptide
  REGION 1..19: note = XENP018235 vhCDR2
EIRLKSNNYYTHYAEPVKG

SEQ ID NO: 17735 - protein, 11 aa, synthetic construct
  REGION 1..11: note = Description of Artificial Sequence: Synthetic peptide
  REGION 1..11: note = XENP018235 vhCDR3
YYGNYGGYFDV

SEQ ID NO: 17736 - protein, 214 aa, synthetic construct; identical to SEQ ID NO: 16226
  REGION 1..214: note = Description of Artificial Sequence: Synthetic polypeptide
  REGION 1..214: note = XENP018235 1G6_H1.134_L1_IgG1_PVA_/S267K Light Chain

SEQ ID NO: 17737 - protein, 107 aa, synthetic construct; identical to SEQ ID NO: 10923
  REGION 1..107: note = Description of Artificial Sequence: Synthetic polypeptide
  REGION 1..107: note = VL of XENP018235

SEQ ID NO: 17738 - protein, 11 aa, synthetic construct
  REGION 1..11: note = Description of Artificial Sequence: Synthetic peptide
  REGION 1..11: note = XENP018235 vlCDR1
RASQSVSNDVA

SEQ ID NO: 17739 - protein, 7 aa, synthetic construct
  REGION 1..7: note = Description of Artificial Sequence: Synthetic peptide
  REGION 1..7: note = XENP018235 vlCDR2
YASHRYT

SEQ ID NO: 17740 - protein, 9 aa, synthetic construct
  REGION 1..9: note = Description of Artificial Sequence: Synthetic peptide
  REGION 1..9: note = XENP018235 vlCDR3
QQDYSSPRT

SEQ ID NO: 17741 - protein, 451 aa, synthetic construct
  REGION 1..451: note = Description of Artificial Sequence: Synthetic polypeptide
  REGION 1..451: note = XENP018236 1G6_H1.135_L1_IgG1_PVA_/S267K Heavy Chain
EVQLVESGGGLVKPGGSLRLSCAASGFTFSNYWMNWVRQAPGKGLEWVGEIRLKSNNYAKHYAEPVKGRFTISRDDSKSTVYLQMNSLKTEDTAVYYCTRYYGNYGGYFDVWGAGTLVTVSSASTKGPSVFPLAPSSKSTSGGTAALGCLVKDYFPEPVTVSWNSGALTSGVHTFPAVLQSSGLYSLSSVVTVPSSSLGTQTYICNVNHKPSNTKVDKKVEPKSCDKTHTCPPCPAPPVAGPSVFLFPPKPKDTLMISRTPEVTCVVVDVKHEDPEVKFNWYVDGVEVHNAKTKPREEQYNSTYRVVSVLTVLHQDWLNGKEYKCKVSNKALPAPIEKTISKAKGQPREPQVYTLPPSREEMTKNQVSLTCLVKGFYPSDIAVEWESNGQPENNYKTTPPVLDSDGSFFLYSKLTVDKSRWQQGNVFSCSVMHEALHNHYTQKSLSLSPGK

SEQ ID NO: 17742 - protein, 122 aa, synthetic construct; identical to SEQ ID NO: 12242
  REGION 1..122: note = Description of Artificial Sequence: Synthetic polypeptide
  REGION 1..122: note = VH of XENP018236

SEQ ID NO: 17743 - protein, 5 aa, synthetic construct
  REGION 1..5: note = Description of Artificial Sequence: Synthetic peptide
  REGION 1..5: note = XENP018236 vhCDR1
NYWMN

SEQ ID NO: 17744 - protein, 19 aa, synthetic construct
  REGION 1..19: note = Description of Artificial Sequence: Synthetic peptide
  REGION 1..19: note = XENP018236 vhCDR2
EIRLKSNNYAKHYAEPVKG

SEQ ID NO: 17745 - protein, 11 aa, synthetic construct
  REGION 1..11: note = Description of Artificial Sequence: Synthetic peptide
  REGION 1..11: note = XENP018236 vhCDR3
YYGNYGGYFDV

SEQ ID NO: 17746 - protein, 214 aa, synthetic construct; identical to SEQ ID NO: 16226
  REGION 1..214: note = Description of Artificial Sequence: Synthetic polypeptide
  REGION 1..214: note = XENP018236 1G6_H1.135_L1_IgG1_PVA_/S267K Light Chain

SEQ ID NO: 17747 - protein, 107 aa, synthetic construct; identical to SEQ ID NO: 10923
  REGION 1..107: note = Description of Artificial Sequence: Synthetic polypeptide
  REGION 1..107: note = VL of XENP018236

SEQ ID NO: 17748 - protein, 11 aa, synthetic construct
  REGION 1..11: note = Description of Artificial Sequence: Synthetic peptide
  REGION 1..11: note = XENP018236 vlCDR1
RASQSVSNDVA

SEQ ID NO: 17749 - protein, 7 aa, synthetic construct
  REGION 1..7: note = Description of Artificial Sequence: Synthetic peptide
  REGION 1..7: note = XENP018236 vlCDR2
YASHRYT

SEQ ID NO: 17750 - protein, 9 aa, synthetic construct
  REGION 1..9: note = Description of Artificial Sequence: Synthetic peptide
  REGION 1..9: note = XENP018236 vlCDR3
QQDYSSPRT

SEQ ID NO: 17751 - protein, 451 aa, synthetic construct
  REGION 1..451: note = Description of Artificial Sequence: Synthetic polypeptide
  REGION 1..451: note = XENP018237 1G6_H1.136_L1_IgG1_PVA_/S267K Heavy Chain
EVQLVESGGGLVKPGGSLRLSCAASGFTFSNYWMNWVRQAPGKGLEWVGEIRLKSNNYAIHYAEPVKGRFTISRDDSKSTVYLQMNSLKTEDTAVYYCTRYYGNYGGYFDVWGAGTLVTVSSASTKGPSVFPLAPSSKSTSGGTAALGCLVKDYFPEPVTVSWNSGALTSGVHTFPAVLQSSGLYSLSSVVTVPSSSLGTQTYICNVNHKPSNTKVDKKVEPKSCDKTHTCPPCPAPPVAGPSVFLFPPKPKDTLMISRTPEVTCVVVDVKHEDPEVKFNWYVDGVEVHNAKTKPREEQYNSTYRVVSVLTVLHQDWLNGKEYKCKVSNKALPAPIEKTISKAKGQPREPQVYTLPPSREEMTKNQVSLTCLVKGFYPSDIAVEWESNGQPENNYKTTPPVLDSDGSFFLYSKLTVDKSRWQQGNVFSCSVMHEALHNHYTQKSLSLSPGK

SEQ ID NO: 17752 - protein, 122 aa, synthetic construct; identical to SEQ ID NO: 12251
  REGION 1..122: note = Description of Artificial Sequence: Synthetic polypeptide
  REGION 1..122: note = VH of XENP018237

SEQ ID NO: 17753 - protein, 5 aa, synthetic construct
  REGION 1..5: note = Description of Artificial Sequence: Synthetic peptide
  REGION 1..5: note = XENP018237 vhCDR1
NYWMN

SEQ ID NO: 17754 - protein, 19 aa, synthetic construct
  REGION 1..19: note = Description of Artificial Sequence: Synthetic peptide
  REGION 1..19: note = XENP018237 vhCDR2
EIRLKSNNYAIHYAEPVKG

SEQ ID NO: 17755 - protein, 11 aa, synthetic construct
  REGION 1..11: note = Description of Artificial Sequence: Synthetic peptide
  REGION 1..11: note = XENP018237 vhCDR3
YYGNYGGYFDV

SEQ ID NO: 17756 - protein, 214 aa, synthetic construct; identical to SEQ ID NO: 16226
  REGION 1..214: note = Description of Artificial Sequence: Synthetic polypeptide
  REGION 1..214: note = XENP018237 1G6_H1.136_L1_IgG1_PVA_/S267K Light Chain

SEQ ID NO: 17757 - protein, 107 aa, synthetic construct; identical to SEQ ID NO: 10923
  REGION 1..107: note = Description of Artificial Sequence: Synthetic polypeptide
  REGION 1..107: note = VL of XENP018237

SEQ ID NO: 17758 - protein, 11 aa, synthetic construct
  REGION 1..11: note = Description of Artificial Sequence: Synthetic peptide
  REGION 1..11: note = XENP018237 vlCDR1
RASQSVSNDVA

SEQ ID NO: 17759 - protein, 7 aa, synthetic construct
  REGION 1..7: note = Description of Artificial Sequence: Synthetic peptide
  REGION 1..7: note = XENP018237 vlCDR2
YASHRYT

SEQ ID NO: 17760 - protein, 9 aa, synthetic construct
  REGION 1..9: note = Description of Artificial Sequence: Synthetic peptide
  REGION 1..9: note = XENP018237 vlCDR3
QQDYSSPRT

SEQ ID NO: 17761 - protein, 451 aa, synthetic construct
  REGION 1..451: note = Description of Artificial Sequence: Synthetic polypeptide
  REGION 1..451: note = XENP018238 1G6_H1.137_L1_IgG1_PVA_/S267K Heavy Chain
EVQLVESGGGLVKPGGSLRLSCAASGFTFSNYWMNWVRQAPGKGLEWVGEIRLKSNNYATYYAEPVKGRFTISRDDSKSTVYLQMNSLKTEDTAVYYCTRYYGNYGGYFDVWGAGTLVTVSSASTKGPSVFPLAPSSKSTSGGTAALGCLVKDYFPEPVTVSWNSGALTSGVHTFPAVLQSSGLYSLSSVVTVPSSSLGTQTYICNVNHKPSNTKVDKKVEPKSCDKTHTCPPCPAPPVAGPSVFLFPPKPKDTLMISRTPEVTCVVVDVKHEDPEVKFNWYVDGVEVHNAKTKPREEQYNSTYRVVSVLTVLHQDWLNGKEYKCKVSNKALPAPIEKTISKAKGQPREPQVYTLPPSREEMTKNQVSLTCLVKGFYPSDIAVEWESNGQPENNYKTTPPVLDSDGSFFLYSKLTVDKSRWQQGNVFSCSVMHEALHNHYTQKSLSLSPGK

SEQ ID NO: 17762 - protein, 122 aa, synthetic construct; identical to SEQ ID NO: 12260
  REGION 1..122: note = Description of Artificial Sequence: Synthetic polypeptide
  REGION 1..122: note = VH of XENP018238

SEQ ID NO: 17763 - protein, 5 aa, synthetic construct
  REGION 1..5: note = Description of Artificial Sequence: Synthetic peptide
  REGION 1..5: note = XENP018238 vhCDR1
NYWMN

SEQ ID NO: 17764 - protein, 19 aa, synthetic construct
  REGION 1..19: note = Description of Artificial Sequence: Synthetic peptide
  REGION 1..19: note = XENP018238 vhCDR2
EIRLKSNNYATYYAEPVKG

SEQ ID NO: 17765 - protein, 11 aa, synthetic construct
  REGION 1..11: note = Description of Artificial Sequence: Synthetic peptide
  REGION 1..11: note = XENP018238 vhCDR3
YYGNYGGYFDV

SEQ ID NO: 17766 - protein, 214 aa, synthetic construct; identical to SEQ ID NO: 16226
  REGION 1..214: note = Description of Artificial Sequence: Synthetic polypeptide
  REGION 1..214: note = XENP018238 1G6_H1.137_L1_IgG1_PVA_/S267K Light Chain

SEQ ID NO: 17767 - protein, 107 aa, synthetic construct; identical to SEQ ID NO: 10923
  REGION 1..107: note = Description of Artificial Sequence: Synthetic polypeptide
  REGION 1..107: note = VL of XENP018238

SEQ ID NO: 17768 - protein, 11 aa, synthetic construct
  REGION 1..11: note = Description of Artificial Sequence: Synthetic peptide
  REGION 1..11: note = XENP018238 vlCDR1
RASQSVSNDVA

SEQ ID NO: 17769 - protein, 7 aa, synthetic construct
  REGION 1..7: note = Description of Artificial Sequence: Synthetic peptide
  REGION 1..7: note = XENP018238 vlCDR2
YASHRYT

SEQ ID NO: 17770 - protein, 9 aa, synthetic construct
  REGION 1..9: note = Description of Artificial Sequence: Synthetic peptide
  REGION 1..9: note = XENP018238 vlCDR3
QQDYSSPRT

SEQ ID NO: 17771 - protein, 451 aa, synthetic construct
  REGION 1..451: note = Description of Artificial Sequence: Synthetic polypeptide
  REGION 1..451: note = XENP018239 1G6_H1.138_L1_IgG1_PVA_/S267K Heavy Chain
EVQLVESGGGLVKPGGSLRLSCAASGFTFSNYWMNWVRQAPGKGLEWVGEIRLKSNNYATQYAEPVKGRFTISRDDSKSTVYLQMNSLKTEDTAVYYCTRYYGNYGGYFDVWGAGTLVTVSSASTKGPSVFPLAPSSKSTSGGTAALGCLVKDYFPEPVTVSWNSGALTSGVHTFPAVLQSSGLYSLSSVVTVPSSSLGTQTYICNVNHKPSNTKVDKKVEPKSCDKTHTCPPCPAPPVAGPSVFLFPPKPKDTLMISRTPEVTCVVVDVKHEDPEVKFNWYVDGVEVHNAKTKPREEQYNSTYRVVSVLTVLHQDWLNGKEYKCKVSNKALPAPIEKTISKAKGQPREPQVYTLPPSREEMTKNQVSLTCLVKGFYPSDIAVEWESNGQPENNYKTTPPVLDSDGSFFLYSKLTVDKSRWQQGNVFSCSVMHEALHNHYTQKSLSLSPGK

SEQ ID NO: 17772 - protein, 122 aa, synthetic construct; identical to SEQ ID NO: 12269
  REGION 1..122: note = Description of Artificial Sequence: Synthetic polypeptide
  REGION 1..122: note = VH of XENP018239

SEQ ID NO: 17773 - protein, 5 aa, synthetic construct
  REGION 1..5: note = Description of Artificial Sequence: Synthetic peptide
  REGION 1..5: note = XENP018239 vhCDR1
NYWMN

SEQ ID NO: 17774 - protein, 19 aa, synthetic construct
  REGION 1..19: note = Description of Artificial Sequence: Synthetic peptide
  REGION 1..19: note = XENP018239 vhCDR2
EIRLKSNNYATQYAEPVKG

SEQ ID NO: 17775 - protein, 11 aa, synthetic construct
  REGION 1..11: note = Description of Artificial Sequence: Synthetic peptide
  REGION 1..11: note = XENP018239 vhCDR3
YYGNYGGYFDV

SEQ ID NO: 17776 - protein, 214 aa, synthetic construct; identical to SEQ ID NO: 16226
  REGION 1..214: note = Description of Artificial Sequence: Synthetic polypeptide
  REGION 1..214: note = XENP018239 1G6_H1.138_L1_IgG1_PVA_/S267K Light Chain

SEQ ID NO: 17777 - protein, 107 aa, synthetic construct; identical to SEQ ID NO: 10923
  REGION 1..107: note = Description of Artificial Sequence: Synthetic polypeptide
  REGION 1..107: note = VL of XENP018239

SEQ ID NO: 17778 - protein, 11 aa, synthetic construct
  REGION 1..11: note = Description of Artificial Sequence: Synthetic peptide
  REGION 1..11: note = XENP018239 vlCDR1
RASQSVSNDVA

SEQ ID NO: 17779 - protein, 7 aa, synthetic construct
  REGION 1..7: note = Description of Artificial Sequence: Synthetic peptide
  REGION 1..7: note = XENP018239 vlCDR2
YASHRYT

SEQ ID NO: 17780 - protein, 9 aa, synthetic construct
  REGION 1..9: note = Description of Artificial Sequence: Synthetic peptide
  REGION 1..9: note = XENP018239 vlCDR3
QQDYSSPRT

SEQ ID NO: 17781 - protein, 451 aa, synthetic construct
  REGION 1..451: note = Description of Artificial Sequence: Synthetic polypeptide
  REGION 1..451: note = XENP018240 1G6_H1.139_L1_IgG1_PVA_/S267K Heavy Chain
EVQLVESGGGLVKPGGSLRLSCAASGFTFSNYWMNWVRQAPGKGLEWVGEIRLKSNNYATDYAEPVKGRFTISRDDSKSTVYLQMNSLKTEDTAVYYCTRYYGNYGGYFDVWGAGTLVTVSSASTKGPSVFPLAPSSKSTSGGTAALGCLVKDYFPEPVTVSWNSGALTSGVHTFPAVLQSSGLYSLSSVVTVPSSSLGTQTYICNVNHKPSNTKVDKKVEPKSCDKTHTCPPCPAPPVAGPSVFLFPPKPKDTLMISRTPEVTCVVVDVKHEDPEVKFNWYVDGVEVHNAKTKPREEQYNSTYRVVSVLTVLHQDWLNGKEYKCKVSNKALPAPIEKTISKAKGQPREPQVYTLPPSREEMTKNQVSLTCLVKGFYPSDIAVEWESNGQPENNYKTTPPVLDSDGSFFLYSKLTVDKSRWQQGNVFSCSVMHEALHNHYTQKSLSLSPGK

SEQ ID NO: 17782 - protein, 122 aa, synthetic construct; identical to SEQ ID NO: 12278
  REGION 1..122: note = Description of Artificial Sequence: Synthetic polypeptide
  REGION 1..122: note = VH of XENP018240

SEQ ID NO: 17783 - protein, 5 aa, synthetic construct
  REGION 1..5: note = Description of Artificial Sequence: Synthetic peptide
  REGION 1..5: note = XENP018240 vhCDR1
NYWMN

SEQ ID NO: 17784 - protein, 19 aa, synthetic construct
  REGION 1..19: note = Description of Artificial Sequence: Synthetic peptide
  REGION 1..19: note = XENP018240 vhCDR2
EIRLKSNNYATDYAEPVKG

SEQ ID NO: 17785 - protein, 11 aa, synthetic construct
  REGION 1..11: note = Description of Artificial Sequence: Synthetic peptide
  REGION 1..11: note = XENP018240 vhCDR3
YYGNYGGYFDV

SEQ ID NO: 17786 - protein, 214 aa, synthetic construct; identical to SEQ ID NO: 16226
  REGION 1..214: note = Description of Artificial Sequence: Synthetic polypeptide
  REGION 1..214: note = XENP018240 1G6_H1.139_L1_IgG1_PVA_/S267K Light Chain

SEQ ID NO: 17787 - protein, 107 aa, synthetic construct; identical to SEQ ID NO: 10923
  REGION 1..107: note = Description of Artificial Sequence: Synthetic polypeptide
  REGION 1..107: note = VL of XENP018240

SEQ ID NO: 17788 - protein, 11 aa, synthetic construct
  REGION 1..11: note = Description of Artificial Sequence: Synthetic peptide
  REGION 1..11: note = XENP018240 vlCDR1
RASQSVSNDVA

SEQ ID NO: 17789 - protein, 7 aa, synthetic construct
  REGION 1..7: note = Description of Artificial Sequence: Synthetic peptide
  REGION 1..7: note = XENP018240 vlCDR2
YASHRYT

SEQ ID NO: 17790 - protein, 9 aa, synthetic construct
  REGION 1..9: note = Description of Artificial Sequence: Synthetic peptide
  REGION 1..9: note = XENP018240 vlCDR3
QQDYSSPRT

SEQ ID NO: 17791 - protein, 451 aa, synthetic construct
  REGION 1..451: note = Description of Artificial Sequence: Synthetic polypeptide
  REGION 1..451: note = XENP018241 1G6_H1.140_L1_IgG1_PVA_/S267K Heavy Chain
EVQLVESGGGLVKPGGSLRLSCAASGFTFSNYWMNWVRQAPGKGLEWVGEIRLKSNNYATFYAEPVKGRFTISRDDSKSTVYLQMNSLKTEDTAVYYCTRYYGNYGGYFDVWGAGTLVTVSSASTKGPSVFPLAPSSKSTSGGTAALGCLVKDYFPEPVTVSWNSGALTSGVHTFPAVLQSSGLYSLSSVVTVPSSSLGTQTYICNVNHKPSNTKVDKKVEPKSCDKTHTCPPCPAPPVAGPSVFLFPPKPKDTLMISRTPEVTCVVVDVKHEDPEVKFNWYVDGVEVHNAKTKPREEQYNSTYRVVSVLTVLHQDWLNGKEYKCKVSNKALPAPIEKTISKAKGQPREPQVYTLPPSREEMTKNQVSLTCLVKGFYPSDIAVEWESNGQPENNYKTTPPVLDSDGSFFLYSKLTVDKSRWQQGNVFSCSVMHEALHNHYTQKSLSLSPGK

SEQ ID NO: 17792 - protein, 122 aa, synthetic construct; identical to SEQ ID NO: 12287
  REGION 1..122: note = Description of Artificial Sequence: Synthetic polypeptide
  REGION 1..122: note = VH of XENP018241

SEQ ID NO: 17793 - protein, 5 aa, synthetic construct
  REGION 1..5: note = Description of Artificial Sequence: Synthetic peptide
  REGION 1..5: note = XENP018241 vhCDR1
NYWMN

SEQ ID NO: 17794 - protein, 19 aa, synthetic construct
  REGION 1..19: note = Description of Artificial Sequence: Synthetic peptide
  REGION 1..19: note = XENP018241 vhCDR2
EIRLKSNNYATFYAEPVKG

SEQ ID NO: 17795 - protein, 11 aa, synthetic construct
  REGION 1..11: note = Description of Artificial Sequence: Synthetic peptide
  REGION 1..11: note = XENP018241 vhCDR3
YYGNYGGYFDV

SEQ ID NO: 17796 - protein, 214 aa, synthetic construct; identical to SEQ ID NO: 16226
  REGION 1..214: note = Description of Artificial Sequence: Synthetic polypeptide
  REGION 1..214: note = XENP018241 1G6_H1.140_L1_IgG1_PVA_/S267K Light Chain

SEQ ID NO: 17797 - protein, 107 aa, synthetic construct; identical to SEQ ID NO: 10923
  REGION 1..107: note = Description of Artificial Sequence: Synthetic polypeptide
  REGION 1..107: note = VL of XENP018241

SEQ ID NO: 17798 - protein, 11 aa, synthetic construct
  REGION 1..11: note = Description of Artificial Sequence: Synthetic peptide
  REGION 1..11: note = XENP018241 vlCDR1
RASQSVSNDVA

SEQ ID NO: 17799 - protein, 7 aa, synthetic construct
  REGION 1..7: note = Description of Artificial Sequence: Synthetic peptide
  REGION 1..7: note = XENP018241 vlCDR2
YASHRYT

SEQ ID NO: 17800 - protein, 9 aa, synthetic construct
  REGION 1..9: note = Description of Artificial Sequence: Synthetic peptide
  REGION 1..9: note = XENP018241 vlCDR3
QQDYSSPRT

SEQ ID NO: 17801 - protein, 451 aa, synthetic construct
  REGION 1..451: note = Description of Artificial Sequence: Synthetic polypeptide
  REGION 1..451: note = XENP018242 1G6_H1.141_L1_IgG1_PVA_/S267K Heavy Chain
EVQLVESGGGLVKPGGSLRLSCAASGFTFSNYWMNWVRQAPGKGLEWVGEIRLKSNNYATAYAEPVKGRFTISRDDSKSTVYLQMNSLKTEDTAVYYCTRYYGNYGGYFDVWGAGTLVTVSSASTKGPSVFPLAPSSKSTSGGTAALGCLVKDYFPEPVTVSWNSGALTSGVHTFPAVLQSSGLYSLSSVVTVPSSSLGTQTYICNVNHKPSNTKVDKKVEPKSCDKTHTCPPCPAPPVAGPSVFLFPPKPKDTLMISRTPEVTCVVVDVKHEDPEVKFNWYVDGVEVHNAKTKPREEQYNSTYRVVSVLTVLHQDWLNGKEYKCKVSNKALPAPIEKTISKAKGQPREPQVYTLPPSREEMTKNQVSLTCLVKGFYPSDIAVEWESNGQPENNYKTTPPVLDSDGSFFLYSKLTVDKSRWQQGNVFSCSVMHEALHNHYTQKSLSLSPGK

SEQ ID NO: 17802 - protein, 122 aa, synthetic construct; identical to SEQ ID NO: 12296
  REGION 1..122: note = Description of Artificial Sequence: Synthetic polypeptide
  REGION 1..122: note = VH of XENP018242

SEQ ID NO: 17803 - protein, 5 aa, synthetic construct
  REGION 1..5: note = Description of Artificial Sequence: Synthetic peptide
  REGION 1..5: note = XENP018242 vhCDR1
NYWMN

SEQ ID NO: 17804 - protein, 19 aa, synthetic construct
  REGION 1..19: note = Description of Artificial Sequence: Synthetic peptide
  REGION 1..19: note = XENP018242 vhCDR2
EIRLKSNNYATAYAEPVKG

SEQ ID NO: 17805 - protein, 11 aa, synthetic construct
  REGION 1..11: note = Description of Artificial Sequence: Synthetic peptide
  REGION 1..11: note = XENP018242 vhCDR3
YYGNYGGYFDV

SEQ ID NO: 17806 - protein, 214 aa, synthetic construct; identical to SEQ ID NO: 16226
  REGION 1..214: note = Description of Artificial Sequence: Synthetic polypeptide
  REGION 1..214: note = XENP018242 1G6_H1.141_L1_IgG1_PVA_/S267K Light Chain

SEQ ID NO: 17807 - protein, 107 aa, synthetic construct; identical to SEQ ID NO: 10923
  REGION 1..107: note = Description of Artificial Sequence: Synthetic polypeptide
  REGION 1..107: note = VL of XENP018242

SEQ ID NO: 17808 - protein, 11 aa, synthetic construct
  REGION 1..11: note = Description of Artificial Sequence: Synthetic peptide
  REGION 1..11: note = XENP018242 vlCDR1
RASQSVSNDVA

SEQ ID NO: 17809 - protein, 7 aa, synthetic construct
  REGION 1..7: note = Description of Artificial Sequence: Synthetic peptide
  REGION 1..7: note = XENP018242 vlCDR2
YASHRYT

SEQ ID NO: 17810 - protein, 9 aa, synthetic construct
  REGION 1..9: note = Description of Artificial Sequence: Synthetic peptide
  REGION 1..9: note = XENP018242 vlCDR3
QQDYSSPRT

SEQ ID NO: 17811 - protein, 451 aa, synthetic construct
  REGION 1..451: note = Description of Artificial Sequence: Synthetic polypeptide
  REGION 1..451: note = XENP018243 1G6_H1.142_L1_IgG1_PVA_/S267K Heavy Chain
EVQLVESGGGLVKPGGSLRLSCAASGFTFSNYWMNWVRQAPGKGLEWVGEIRLKSNNYATTYAEPVKGRFTISRDDSKSTVYLQMNSLKTEDTAVYYCTRYYGNYGGYFDVWGAGTLVTVSSASTKGPSVFPLAPSSKSTSGGTAALGCLVKDYFPEPVTVSWNSGALTSGVHTFPAVLQSSGLYSLSSVVTVPSSSLGTQTYICNVNHKPSNTKVDKKVEPKSCDKTHTCPPCPAPPVAGPSVFLFPPKPKDTLMISRTPEVTCVVVDVKHEDPEVKFNWYVDGVEVHNAKTKPREEQYNSTYRVVSVLTVLHQDWLNGKEYKCKVSNKALPAPIEKTISKAKGQPREPQVYTLPPSREEMTKNQVSLTCLVKGFYPSDIAVEWESNGQPENNYKTTPPVLDSDGSFFLYSKLTVDKSRWQQGNVFSCSVMHEALHNHYTQKSLSLSPGK

SEQ ID NO: 17812 - protein, 122 aa, synthetic construct; identical to SEQ ID NO: 12305
  REGION 1..122: note = Description of Artificial Sequence: Synthetic polypeptide
  REGION 1..122: note = VH of XENP018243

SEQ ID NO: 17813 - protein, 5 aa, synthetic construct
  REGION 1..5: note = Description of Artificial Sequence: Synthetic peptide
  REGION 1..5: note = XENP018243 vhCDR1
NYWMN

SEQ ID NO: 17814 - protein, 19 aa, synthetic construct
  REGION 1..19: note = Description of Artificial Sequence: Synthetic peptide
  REGION 1..19: note = XENP018243 vhCDR2
EIRLKSNNYATTYAEPVKG

SEQ ID NO: 17815 - protein, 11 aa, synthetic construct
  REGION 1..11: note = Description of Artificial Sequence: Synthetic peptide
  REGION 1..11: note = XENP018243 vhCDR3
YYGNYGGYFDV

SEQ ID NO: 17816 - protein, 214 aa, synthetic construct; identical to SEQ ID NO: 16226
  REGION 1..214: note = Description of Artificial Sequence: Synthetic polypeptide
  REGION 1..214: note = XENP018243 1G6_H1.142_L1_IgG1_PVA_/S267K Light Chain

SEQ ID NO: 17817 - protein, 107 aa, synthetic construct; identical to SEQ ID NO: 10923
  REGION 1..107: note = Description of Artificial Sequence: Synthetic polypeptide
  REGION 1..107: note = VL of XENP018243

SEQ ID NO: 17818 - protein, 11 aa, synthetic construct
  REGION 1..11: note = Description of Artificial Sequence: Synthetic peptide
  REGION 1..11: note = XENP018243 vlCDR1
RASQSVSNDVA

SEQ ID NO: 17819 - protein, 7 aa, synthetic construct
  REGION 1..7: note = Description of Artificial Sequence: Synthetic peptide
  REGION 1..7: note = XENP018243 vlCDR2
YASHRYT

SEQ ID NO: 17820 - protein, 9 aa, synthetic construct
  REGION 1..9: note = Description of Artificial Sequence: Synthetic peptide
  REGION 1..9: note = XENP018243 vlCDR3
QQDYSSPRT

SEQ ID NO: 17821 - protein, 451 aa, synthetic construct
  REGION 1..451: note = Description of Artificial Sequence: Synthetic polypeptide
  REGION 1..451: note = XENP018244 1G6_H1.143_L1_IgG1_PVA_/S267K Heavy Chain
EVQLVESGGGLVKPGGSLRLSCAASGFTFSNYWMNWVRQAPGKGLEWVGEIRLKSNNYATKYAEPVKGRFTISRDDSKSTVYLQMNSLKTEDTAVYYCTRYYGNYGGYFDVWGAGTLVTVSSASTKGPSVFPLAPSSKSTSGGTAALGCLVKDYFPEPVTVSWNSGALTSGVHTFPAVLQSSGLYSLSSVVTVPSSSLGTQTYICNVNHKPSNTKVDKKVEPKSCDKTHTCPPCPAPPVAGPSVFLFPPKPKDTLMISRTPEVTCVVVDVKHEDPEVKFNWYVDGVEVHNAKTKPREEQYNSTYRVVSVLTVLHQDWLNGKEYKCKVSNKALPAPIEKTISKAKGQPREPQVYTLPPSREEMTKNQVSLTCLVKGFYPSDIAVEWESNGQPENNYKTTPPVLDSDGSFFLYSKLTVDKSRWQQGNVFSCSVMHEALHNHYTQKSLSLSPGK

SEQ ID NO: 17822 - protein, 122 aa, synthetic construct; identical to SEQ ID NO: 12314
  REGION 1..122: note = Description of Artificial Sequence: Synthetic polypeptide
  REGION 1..122: note = VH of XENP018244

SEQ ID NO: 17823 - protein, 5 aa, synthetic construct
  REGION 1..5: note = Description of Artificial Sequence: Synthetic peptide
  REGION 1..5: note = XENP018244 vhCDR1
NYWMN

SEQ ID NO: 17824 - protein, 19 aa, synthetic construct
  REGION 1..19: note = Description of Artificial Sequence: Synthetic peptide
  REGION 1..19: note = XENP018244 vhCDR2
EIRLKSNNYATKYAEPVKG

SEQ ID NO: 17825 - protein, 11 aa, synthetic construct
  REGION 1..11: note = Description of Artificial Sequence: Synthetic peptide
  REGION 1..11: note = XENP018244 vhCDR3
YYGNYGGYFDV

SEQ ID NO: 17826 - protein, 214 aa, synthetic construct; identical to SEQ ID NO: 16226
  REGION 1..214: note = Description of Artificial Sequence: Synthetic polypeptide
  REGION 1..214: note = XENP018244 1G6_H1.143_L1_IgG1_PVA_/S267K Light Chain

SEQ ID NO: 17827 - protein, 107 aa, synthetic construct; identical to SEQ ID NO: 10923
  REGION 1..107: note = Description of Artificial Sequence: Synthetic polypeptide
  REGION 1..107: note = VL of XENP018244

SEQ ID NO: 17828 - protein, 11 aa, synthetic construct
  REGION 1..11: note = Description of Artificial Sequence: Synthetic peptide
  REGION 1..11: note = XENP018244 vlCDR1
RASQSVSNDVA

SEQ ID NO: 17829 - protein, 7 aa, synthetic construct
  REGION 1..7: note = Description of Artificial Sequence: Synthetic peptide
  REGION 1..7: note = XENP018244 vlCDR2
YASHRYT

SEQ ID NO: 17830 - protein, 9 aa, synthetic construct
  REGION 1..9: note = Description of Artificial Sequence: Synthetic peptide
  REGION 1..9: note = XENP018244 vlCDR3
QQDYSSPRT

SEQ ID NO: 17831 - protein, 451 aa, synthetic construct
  REGION 1..451: note = Description of Artificial Sequence: Synthetic polypeptide
  REGION 1..451: note = XENP018245 1G6_H1.144_L1_IgG1_PVA_/S267K Heavy Chain
EVQLVESGGGLVKPGGSLRLSCAASGFTFSNYWMNWVRQAPGKGLEWVGEIRLKSNNYATGYAEPVKGRFTISRDDSKSTVYLQMNSLKTEDTAVYYCTRYYGNYGGYFDVWGAGTLVTVSSASTKGPSVFPLAPSSKSTSGGTAALGCLVKDYFPEPVTVSWNSGALTSGVHTFPAVLQSSGLYSLSSVVTVPSSSLGTQTYICNVNHKPSNTKVDKKVEPKSCDKTHTCPPCPAPPVAGPSVFLFPPKPKDTLMISRTPEVTCVVVDVKHEDPEVKFNWYVDGVEVHNAKTKPREEQYNSTYRVVSVLTVLHQDWLNGKEYKCKVSNKALPAPIEKTISKAKGQPREPQVYTLPPSREEMTKNQVSLTCLVKGFYPSDIAVEWESNGQPENNYKTTPPVLDSDGSFFLYSKLTVDKSRWQQGNVFSCSVMHEALHNHYTQKSLSLSPGK

SEQ ID NO: 17832 - protein, 122 aa, synthetic construct; identical to SEQ ID NO: 12323
  REGION 1..122: note = Description of Artificial Sequence: Synthetic polypeptide
  REGION 1..122: note = VH of XENP018245

SEQ ID NO: 17833 - protein, 5 aa, synthetic construct
  REGION 1..5: note = Description of Artificial Sequence: Synthetic peptide
  REGION 1..5: note = XENP018245 vhCDR1
NYWMN

SEQ ID NO: 17834 - protein, 19 aa, synthetic construct
  REGION 1..19: note = Description of Artificial Sequence: Synthetic peptide
  REGION 1..19: note = XENP018245 vhCDR2
EIRLKSNNYATGYAEPVKG

SEQ ID NO: 17835 - protein, 11 aa, synthetic construct
  REGION 1..11: note = Description of Artificial Sequence: Synthetic peptide
  REGION 1..11: note = XENP018245 vhCDR3
YYGNYGGYFDV

SEQ ID NO: 17836 - protein, 214 aa, synthetic construct; identical to SEQ ID NO: 16226
  REGION 1..214: note = Description of Artificial Sequence: Synthetic polypeptide
  REGION 1..214: note = XENP018245 1G6_H1.144_L1_IgG1_PVA_/S267K Light Chain

SEQ ID NO: 17837 - protein, 107 aa, synthetic construct; identical to SEQ ID NO: 10923
  REGION 1..107: note = Description of Artificial Sequence: Synthetic polypeptide
  REGION 1..107: note = VL of XENP018245

SEQ ID NO: 17838 - protein, 11 aa, synthetic construct
  REGION 1..11: note = Description of Artificial Sequence: Synthetic peptide
  REGION 1..11: note = XENP018245 vlCDR1
RASQSVSNDVA

SEQ ID NO: 17839 - protein, 7 aa, synthetic construct
  REGION 1..7: note = Description of Artificial Sequence: Synthetic peptide
  REGION 1..7: note = XENP018245 vlCDR2
YASHRYT

SEQ ID NO: 17840 - protein, 9 aa, synthetic construct
  REGION 1..9: note = Description of Artificial Sequence: Synthetic peptide
  REGION 1..9: note = XENP018245 vlCDR3
QQDYSSPRT

SEQ ID NO: 17841 - protein, 451 aa, synthetic construct
  REGION 1..451: note = Description of Artificial Sequence: Synthetic polypeptide
  REGION 1..451: note = XENP018246 1G6_H1.145_L1_IgG1_PVA_/S267K Heavy Chain
EVQLVESGGGLVKPGGSLRLSCAASGFTFSNYWMNWVRQAPGKGLEWVGEIRLKSNNYATLYAEPVKGRFTISRDDSKSTVYLQMNSLKTEDTAVYYCTRYYGNYGGYFDVWGAGTLVTVSSASTKGPSVFPLAPSSKSTSGGTAALGCLVKDYFPEPVTVSWNSGALTSGVHTFPAVLQSSGLYSLSSVVTVPSSSLGTQTYICNVNHKPSNTKVDKKVEPKSCDKTHTCPPCPAPPVAGPSVFLFPPKPKDTLMISRTPEVTCVVVDVKHEDPEVKFNWYVDGVEVHNAKTKPREEQYNSTYRVVSVLTVLHQDWLNGKEYKCKVSNKALPAPIEKTISKAKGQPREPQVYTLPPSREEMTKNQVSLTCLVKGFYPSDIAVEWESNGQPENNYKTTPPVLDSDGSFFLYSKLTVDKSRWQQGNVFSCSVMHEALHNHYTQKSLSLSPGK

SEQ ID NO: 17842 - protein, 122 aa, synthetic construct; identical to SEQ ID NO: 12332
  REGION 1..122: note = Description of Artificial Sequence: Synthetic polypeptide
  REGION 1..122: note = VH of XENP018246

SEQ ID NO: 17843 - protein, 5 aa, synthetic construct
  REGION 1..5: note = Description of Artificial Sequence: Synthetic peptide
  REGION 1..5: note = XENP018246 vhCDR1
NYWMN

SEQ ID NO: 17844 - protein, 19 aa, synthetic construct
  REGION 1..19: note = Description of Artificial Sequence: Synthetic peptide
  REGION 1..19: note = XENP018246 vhCDR2
EIRLKSNNYATLYAEPVKG

SEQ ID NO: 17845 - protein, 11 aa, synthetic construct
  REGION 1..11: note = Description of Artificial Sequence: Synthetic peptide
  REGION 1..11: note = XENP018246 vhCDR3
YYGNYGGYFDV

SEQ ID NO: 17846 - protein, 214 aa, synthetic construct; identical to SEQ ID NO: 16226
  REGION 1..214: note = Description of Artificial Sequence: Synthetic polypeptide
  REGION 1..214: note = XENP018246 1G6_H1.145_L1_IgG1_PVA_/S267K Light Chain

SEQ ID NO: 17847 - protein, 107 aa, synthetic construct; identical to SEQ ID NO: 10923
  REGION 1..107: note = Description of Artificial Sequence: Synthetic polypeptide
  REGION 1..107: note = VL of XENP018246

SEQ ID NO: 17848 - protein, 11 aa, synthetic construct
  REGION 1..11: note = Description of Artificial Sequence: Synthetic peptide
  REGION 1..11: note = XENP018246 vlCDR1
RASQSVSNDVA

SEQ ID NO: 17849 - protein, 7 aa, synthetic construct
  REGION 1..7: note = Description of Artificial Sequence: Synthetic peptide
  REGION 1..7: note = XENP018246 vlCDR2
YASHRYT

SEQ ID NO: 17850 - protein, 9 aa, synthetic construct
  REGION 1..9: note = Description of Artificial Sequence: Synthetic peptide
  REGION 1..9: note = XENP018246 vlCDR3
QQDYSSPRT

SEQ ID NO: 17851 - protein, 451 aa, synthetic construct
  REGION 1..451: note = Description of Artificial Sequence: Synthetic polypeptide
  REGION 1..451: note = XENP018247 1G6_H1.146_L1_IgG1_PVA_/S267K Heavy Chain
EVQLVESGGGLVKPGGSLRLSCAASGFTFSNYWMNWVRQAPGKGLEWVGEIRLKSNNYATHYPEPVKGRFTISRDDSKSTVYLQMNSLKTEDTAVYYCTRYYGNYGGYFDVWGAGTLVTVSSASTKGPSVFPLAPSSKSTSGGTAALGCLVKDYFPEPVTVSWNSGALTSGVHTFPAVLQSSGLYSLSSVVTVPSSSLGTQTYICNVNHKPSNTKVDKKVEPKSCDKTHTCPPCPAPPVAGPSVFLFPPKPKDTLMISRTPEVTCVVVDVKHEDPEVKFNWYVDGVEVHNAKTKPREEQYNSTYRVVSVLTVLHQDWLNGKEYKCKVSNKALPAPIEKTISKAKGQPREPQVYTLPPSREEMTKNQVSLTCLVKGFYPSDIAVEWESNGQPENNYKTTPPVLDSDGSFFLYSKLTVDKSRWQQGNVFSCSVMHEALHNHYTQKSLSLSPGK

SEQ ID NO: 17852 - protein, 122 aa, synthetic construct; identical to SEQ ID NO: 12341
  REGION 1..122: note = Description of Artificial Sequence: Synthetic polypeptide
  REGION 1..122: note = VH of XENP018247

SEQ ID NO: 17853 - protein, 5 aa, synthetic construct
  REGION 1..5: note = Description of Artificial Sequence: Synthetic peptide
  REGION 1..5: note = XENP018247 vhCDR1
NYWMN

SEQ ID NO: 17854 - protein, 19 aa, synthetic construct
  REGION 1..19: note = Description of Artificial Sequence: Synthetic peptide
  REGION 1..19: note = XENP018247 vhCDR2
EIRLKSNNYATHYPEPVKG

SEQ ID NO: 17855 - protein, 11 aa, synthetic construct
  REGION 1..11: note = Description of Artificial Sequence: Synthetic peptide
  REGION 1..11: note = XENP018247 vhCDR3
YYGNYGGYFDV

SEQ ID NO: 17856 - protein, 214 aa, synthetic construct; identical to SEQ ID NO: 16226
  REGION 1..214: note = Description of Artificial Sequence: Synthetic polypeptide
  REGION 1..214: note = XENP018247 1G6_H1.146_L1_IgG1_PVA_/S267K Light Chain

SEQ ID NO: 17857 - protein, 107 aa, synthetic construct; identical to SEQ ID NO: 10923
  REGION 1..107: note = Description of Artificial Sequence: Synthetic polypeptide
  REGION 1..107: note = VL of XENP018247

SEQ ID NO: 17858 - protein, 11 aa, synthetic construct
  REGION 1..11: note = Description of Artificial Sequence: Synthetic peptide
  REGION 1..11: note = XENP018247 vlCDR1
RASQSVSNDVA

SEQ ID NO: 17859 - protein, 7 aa, synthetic construct
  REGION 1..7: note = Description of Artificial Sequence: Synthetic peptide
  REGION 1..7: note = XENP018247 vlCDR2
YASHRYT

SEQ ID NO: 17860 - protein, 9 aa, synthetic construct
  REGION 1..9: note = Description of Artificial Sequence: Synthetic peptide
  REGION 1..9: note = XENP018247 vlCDR3
QQDYSSPRT

SEQ ID NO: 17861 - protein, 451 aa, synthetic construct
  REGION 1..451: note = Description of Artificial Sequence: Synthetic polypeptide
  REGION 1..451: note = XENP018248 1G6_H1.147_L1_IgG1_PVA_/S267K Heavy Chain
EVQLVESGGGLVKPGGSLRLSCAASGFTFSNYWMNWVRQAPGKGLEWVGEIRLKSNNYATHYVEPVKGRFTISRDDSKSTVYLQMNSLKTEDTAVYYCTRYYGNYGGYFDVWGAGTLVTVSSASTKGPSVFPLAPSSKSTSGGTAALGCLVKDYFPEPVTVSWNSGALTSGVHTFPAVLQSSGLYSLSSVVTVPSSSLGTQTYICNVNHKPSNTKVDKKVEPKSCDKTHTCPPCPAPPVAGPSVFLFPPKPKDTLMISRTPEVTCVVVDVKHEDPEVKFNWYVDGVEVHNAKTKPREEQYNSTYRVVSVLTVLHQDWLNGKEYKCKVSNKALPAPIEKTISKAKGQPREPQVYTLPPSREEMTKNQVSLTCLVKGFYPSDIAVEWESNGQPENNYKTTPPVLDSDGSFFLYSKLTVDKSRWQQGNVFSCSVMHEALHNHYTQKSLSLSPGK

SEQ ID NO: 17862 - protein, 122 aa, synthetic construct; identical to SEQ ID NO: 12350
  REGION 1..122: note = Description of Artificial Sequence: Synthetic polypeptide
  REGION 1..122: note = VH of XENP018248

SEQ ID NO: 17863 - protein, 5 aa, synthetic construct
  REGION 1..5: note = Description of Artificial Sequence: Synthetic peptide
  REGION 1..5: note = XENP018248 vhCDR1
NYWMN

SEQ ID NO: 17864 - protein, 19 aa, synthetic construct
  REGION 1..19: note = Description of Artificial Sequence: Synthetic peptide
  REGION 1..19: note = XENP018248 vhCDR2
EIRLKSNNYATHYVEPVKG

SEQ ID NO: 17865 - protein, 11 aa, synthetic construct
  REGION 1..11: note = Description of Artificial Sequence: Synthetic peptide
  REGION 1..11: note = XENP018248 vhCDR3
YYGNYGGYFDV

SEQ ID NO: 17866 - protein, 214 aa, synthetic construct; identical to SEQ ID NO: 16226
  REGION 1..214: note = Description of Artificial Sequence: Synthetic polypeptide
  REGION 1..214: note = XENP018248 1G6_H1.147_L1_IgG1_PVA_/S267K Light Chain

SEQ ID NO: 17867 - protein, 107 aa, synthetic construct; identical to SEQ ID NO: 10923
  REGION 1..107: note = Description of Artificial Sequence: Synthetic polypeptide
  REGION 1..107: note = VL of XENP018248

SEQ ID NO: 17868 - protein, 11 aa, synthetic construct
  REGION 1..11: note = Description of Artificial Sequence: Synthetic peptide
  REGION 1..11: note = XENP018248 vlCDR1
RASQSVSNDVA

SEQ ID NO: 17869 - protein, 7 aa, synthetic construct
  REGION 1..7: note = Description of Artificial Sequence: Synthetic peptide
  REGION 1..7: note = XENP018248 vlCDR2
YASHRYT

SEQ ID NO: 17870 - protein, 9 aa, synthetic construct
  REGION 1..9: note = Description of Artificial Sequence: Synthetic peptide
  REGION 1..9: note = XENP018248 vlCDR3
QQDYSSPRT

SEQ ID NO: 17871 - protein, 451 aa, synthetic construct
  REGION 1..451: note = Description of Artificial Sequence: Synthetic polypeptide
  REGION 1..451: note = XENP018249 1G6_H1.148_L1_IgG1_PVA_/S267K Heavy Chain
EVQLVESGGGLVKPGGSLRLSCAASGFTFSNYWMNWVRQAPGKGLEWVGEIRLKSNNYATHYADPVKGRFTISRDDSKSTVYLQMNSLKTEDTAVYYCTRYYGNYGGYFDVWGAGTLVTVSSASTKGPSVFPLAPSSKSTSGGTAALGCLVKDYFPEPVTVSWNSGALTSGVHTFPAVLQSSGLYSLSSVVTVPSSSLGTQTYICNVNHKPSNTKVDKKVEPKSCDKTHTCPPCPAPPVAGPSVFLFPPKPKDTLMISRTPEVTCVVVDVKHEDPEVKFNWYVDGVEVHNAKTKPREEQYNSTYRVVSVLTVLHQDWLNGKEYKCKVSNKALPAPIEKTISKAKGQPREPQVYTLPPSREEMTKNQVSLTCLVKGFYPSDIAVEWESNGQPENNYKTTPPVLDSDGSFFLYSKLTVDKSRWQQGNVFSCSVMHEALHNHYTQKSLSLSPGK

SEQ ID NO: 17872 - protein, 122 aa, synthetic construct; identical to SEQ ID NO: 12359
  REGION 1..122: note = Description of Artificial Sequence: Synthetic polypeptide
  REGION 1..122: note = VH of XENP018249

SEQ ID NO: 17873 - protein, 5 aa, synthetic construct
  REGION 1..5: note = Description of Artificial Sequence: Synthetic peptide
  REGION 1..5: note = XENP018249 vhCDR1
NYWMN

SEQ ID NO: 17874 - protein, 19 aa, synthetic construct
  REGION 1..19: note = Description of Artificial Sequence: Synthetic peptide
  REGION 1..19: note = XENP018249 vhCDR2
EIRLKSNNYATHYADPVKG

SEQ ID NO: 17875 - protein, 11 aa, synthetic construct
  REGION 1..11: note = Description of Artificial Sequence: Synthetic peptide
  REGION 1..11: note = XENP018249 vhCDR3
YYGNYGGYFDV

SEQ ID NO: 17876 - protein, 214 aa, synthetic construct; identical to SEQ ID NO: 16226
  REGION 1..214: note = Description of Artificial Sequence: Synthetic polypeptide
  REGION 1..214: note = XENP018249 1G6_H1.148_L1_IgG1_PVA_/S267K Light Chain

SEQ ID NO: 17877 - protein, 107 aa, synthetic construct; identical to SEQ ID NO: 10923
  REGION 1..107: note = Description of Artificial Sequence: Synthetic polypeptide
  REGION 1..107: note = VL of XENP018249

SEQ ID NO: 17878 - protein, 11 aa, synthetic construct
  REGION 1..11: note = Description of Artificial Sequence: Synthetic peptide
  REGION 1..11: note = XENP018249 vlCDR1
RASQSVSNDVA

SEQ ID NO: 17879 - protein, 7 aa, synthetic construct
  REGION 1..7: note = Description of Artificial Sequence: Synthetic peptide
  REGION 1..7: note = XENP018249 vlCDR2
YASHRYT

SEQ ID NO: 17880 - protein, 9 aa, synthetic construct
  REGION 1..9: note = Description of Artificial Sequence: Synthetic peptide
  REGION 1..9: note = XENP018249 vlCDR3
QQDYSSPRT

SEQ ID NO: 17881 - protein, 451 aa, synthetic construct
  REGION 1..451: note = Description of Artificial Sequence: Synthetic polypeptide
  REGION 1..451: note = XENP018250 1G6_H1.149_L1_IgG1_PVA_/S267K Heavy Chain
EVQLVESGGGLVKPGGSLRLSCAASGFTFSNYWMNWVRQAPGKGLEWVGEIRLKSNNYATHYAGPVKGRFTISRDDSKSTVYLQMNSLKTEDTAVYYCTRYYGNYGGYFDVWGAGTLVTVSSASTKGPSVFPLAPSSKSTSGGTAALGCLVKDYFPEPVTVSWNSGALTSGVHTFPAVLQSSGLYSLSSVVTVPSSSLGTQTYICNVNHKPSNTKVDKKVEPKSCDKTHTCPPCPAPPVAGPSVFLFPPKPKDTLMISRTPEVTCVVVDVKHEDPEVKFNWYVDGVEVHNAKTKPREEQYNSTYRVVSVLTVLHQDWLNGKEYKCKVSNKALPAPIEKTISKAKGQPREPQVYTLPPSREEMTKNQVSLTCLVKGFYPSDIAVEWESNGQPENNYKTTPPVLDSDGSFFLYSKLTVDKSRWQQGNVFSCSVMHEALHNHYTQKSLSLSPGK

SEQ ID NO: 17882 - protein, 122 aa, synthetic construct; identical to SEQ ID NO: 12368
  REGION 1..122: note = Description of Artificial Sequence: Synthetic polypeptide
  REGION 1..122: note = VH of XENP018250

SEQ ID NO: 17883 - protein, 5 aa, synthetic construct
  REGION 1..5: note = Description of Artificial Sequence: Synthetic peptide
  REGION 1..5: note = XENP018250 vhCDR1
NYWMN

SEQ ID NO: 17884 - protein, 19 aa, synthetic construct
  REGION 1..19: note = Description of Artificial Sequence: Synthetic peptide
  REGION 1..19: note = XENP018250 vhCDR2
EIRLKSNNYATHYAGPVKG

SEQ ID NO: 17885 - protein, 11 aa, synthetic construct
  REGION 1..11: note = Description of Artificial Sequence: Synthetic peptide
  REGION 1..11: note = XENP018250 vhCDR3
YYGNYGGYFDV

SEQ ID NO: 17886 - protein, 214 aa, synthetic construct; identical to SEQ ID NO: 16226
  REGION 1..214: note = Description of Artificial Sequence: Synthetic polypeptide
  REGION 1..214: note = XENP018250 1G6_H1.149_L1_IgG1_PVA_/S267K Light Chain

SEQ ID NO: 17887 - protein, 107 aa, synthetic construct; identical to SEQ ID NO: 10923
  REGION 1..107: note = Description of Artificial Sequence: Synthetic polypeptide
  REGION 1..107: note = VL of XENP018250

SEQ ID NO: 17888 - protein, 11 aa, synthetic construct
  REGION 1..11: note = Description of Artificial Sequence: Synthetic peptide
  REGION 1..11: note = XENP018250 vlCDR1
RASQSVSNDVA

SEQ ID NO: 17889 - protein, 7 aa, synthetic construct
  REGION 1..7: note = Description of Artificial Sequence: Synthetic peptide
  REGION 1..7: note = XENP018250 vlCDR2
YASHRYT

SEQ ID NO: 17890 - protein, 9 aa, synthetic construct
  REGION 1..9: note = Description of Artificial Sequence: Synthetic peptide
  REGION 1..9: note = XENP018250 vlCDR3
QQDYSSPRT

SEQ ID NO: 17891 - protein, 451 aa, synthetic construct
  REGION 1..451: note = Description of Artificial Sequence: Synthetic polypeptide
  REGION 1..451: note = XENP018251 1G6_H1.150_L1_IgG1_PVA_/S267K Heavy Chain
EVQLVESGGGLVKPGGSLRLSCAASGFTFSNYWMNWVRQAPGKGLEWVGEIRLKSNNYATHYAAPVKGRFTISRDDSKSTVYLQMNSLKTEDTAVYYCTRYYGNYGGYFDVWGAGTLVTVSSASTKGPSVFPLAPSSKSTSGGTAALGCLVKDYFPEPVTVSWNSGALTSGVHTFPAVLQSSGLYSLSSVVTVPSSSLGTQTYICNVNHKPSNTKVDKKVEPKSCDKTHTCPPCPAPPVAGPSVFLFPPKPKDTLMISRTPEVTCVVVDVKHEDPEVKFNWYVDGVEVHNAKTKPREEQYNSTYRVVSVLTVLHQDWLNGKEYKCKVSNKALPAPIEKTISKAKGQPREPQVYTLPPSREEMTKNQVSLTCLVKGFYPSDIAVEWESNGQPENNYKTTPPVLDSDGSFFLYSKLTVDKSRWQQGNVFSCSVMHEALHNHYTQKSLSLSPGK

SEQ ID NO: 17892 - protein, 122 aa, synthetic construct; identical to SEQ ID NO: 12377
  REGION 1..122: note = Description of Artificial Sequence: Synthetic polypeptide
  REGION 1..122: note = VH of XENP018251

SEQ ID NO: 17893 - protein, 5 aa, synthetic construct
  REGION 1..5: note = Description of Artificial Sequence: Synthetic peptide
  REGION 1..5: note = XENP018251 vhCDR1
NYWMN

SEQ ID NO: 17894 - protein, 19 aa, synthetic construct
  REGION 1..19: note = Description of Artificial Sequence: Synthetic peptide
  REGION 1..19: note = XENP018251 vhCDR2
EIRLKSNNYATHYAAPVKG

SEQ ID NO: 17895 - protein, 11 aa, synthetic construct
  REGION 1..11: note = Description of Artificial Sequence: Synthetic peptide
  REGION 1..11: note = XENP018251 vhCDR3
YYGNYGGYFDV

SEQ ID NO: 17896 - protein, 214 aa, synthetic construct; identical to SEQ ID NO: 16226
  REGION 1..214: note = Description of Artificial Sequence: Synthetic polypeptide
  REGION 1..214: note = XENP018251 1G6_H1.150_L1_IgG1_PVA_/S267K Light Chain

SEQ ID NO: 17897 - protein, 107 aa, synthetic construct; identical to SEQ ID NO: 10923
  REGION 1..107: note = Description of Artificial Sequence: Synthetic polypeptide
  REGION 1..107: note = VL of XENP018251

SEQ ID NO: 17898 - protein, 11 aa, synthetic construct
  REGION 1..11: note = Description of Artificial Sequence: Synthetic peptide
  REGION 1..11: note = XENP018251 vlCDR1
RASQSVSNDVA

SEQ ID NO: 17899 - protein, 7 aa, synthetic construct
  REGION 1..7: note = Description of Artificial Sequence: Synthetic peptide
  REGION 1..7: note = XENP018251 vlCDR2
YASHRYT

SEQ ID NO: 17900 - protein, 9 aa, synthetic construct
  REGION 1..9: note = Description of Artificial Sequence: Synthetic peptide
  REGION 1..9: note = XENP018251 vlCDR3
QQDYSSPRT

SEQ ID NO: 17901 - protein, 451 aa, synthetic construct
  REGION 1..451: note = Description of Artificial Sequence: Synthetic polypeptide
  REGION 1..451: note = XENP018252 1G6_H1.151_L1_IgG1_PVA_/S267K Heavy Chain
EVQLVESGGGLVKPGGSLRLSCAASGFTFSNYWMNWVRQAPGKGLEWVGEIRLKSNNYATHYAESVKGRFTISRDDSKSTVYLQMNSLKTEDTAVYYCTRYYGNYGGYFDVWGAGTLVTVSSASTKGPSVFPLAPSSKSTSGGTAALGCLVKDYFPEPVTVSWNSGALTSGVHTFPAVLQSSGLYSLSSVVTVPSSSLGTQTYICNVNHKPSNTKVDKKVEPKSCDKTHTCPPCPAPPVAGPSVFLFPPKPKDTLMISRTPEVTCVVVDVKHEDPEVKFNWYVDGVEVHNAKTKPREEQYNSTYRVVSVLTVLHQDWLNGKEYKCKVSNKALPAPIEKTISKAKGQPREPQVYTLPPSREEMTKNQVSLTCLVKGFYPSDIAVEWESNGQPENNYKTTPPVLDSDGSFFLYSKLTVDKSRWQQGNVFSCSVMHEALHNHYTQKSLSLSPGK

SEQ ID NO: 17902 - protein, 122 aa, synthetic construct; identical to SEQ ID NO: 12386
  REGION 1..122: note = Description of Artificial Sequence: Synthetic polypeptide
  REGION 1..122: note = VH of XENP018252

SEQ ID NO: 17903 - protein, 5 aa, synthetic construct
  REGION 1..5: note = Description of Artificial Sequence: Synthetic peptide
  REGION 1..5: note = XENP018252 vhCDR1
NYWMN

SEQ ID NO: 17904 - protein, 19 aa, synthetic construct
  REGION 1..19: note = Description of Artificial Sequence: Synthetic peptide
  REGION 1..19: note = XENP018252 vhCDR2
EIRLKSNNYATHYAESVKG

SEQ ID NO: 17905 - protein, 11 aa, synthetic construct
  REGION 1..11: note = Description of Artificial Sequence: Synthetic peptide
  REGION 1..11: note = XENP018252 vhCDR3
YYGNYGGYFDV

SEQ ID NO: 17906 - protein, 214 aa, synthetic construct; identical to SEQ ID NO: 16226
  REGION 1..214: note = Description of Artificial Sequence: Synthetic polypeptide
  REGION 1..214: note = XENP018252 1G6_H1.151_L1_IgG1_PVA_/S267K Light Chain

SEQ ID NO: 17907 - protein, 107 aa, synthetic construct; identical to SEQ ID NO: 10923
  REGION 1..107: note = Description of Artificial Sequence: Synthetic polypeptide
  REGION 1..107: note = VL of XENP018252

SEQ ID NO: 17908 - protein, 11 aa, synthetic construct
  REGION 1..11: note = Description of Artificial Sequence: Synthetic peptide
  REGION 1..11: note = XENP018252 vlCDR1
RASQSVSNDVA

SEQ ID NO: 17909 - protein, 7 aa, synthetic construct
  REGION 1..7: note = Description of Artificial Sequence: Synthetic peptide
  REGION 1..7: note = XENP018252 vlCDR2
YASHRYT

SEQ ID NO: 17910 - protein, 9 aa, synthetic construct
  REGION 1..9: note = Description of Artificial Sequence: Synthetic peptide
  REGION 1..9: note = XENP018252 vlCDR3
QQDYSSPRT

SEQ ID NO: 17911 - protein, 451 aa, synthetic construct
  REGION 1..451: note = Description of Artificial Sequence: Synthetic polypeptide
  REGION 1..451: note = XENP018253 1G6_H1.152_L1_IgG1_PVA_/S267K Heavy Chain
EVQLVESGGGLVKPGGSLRLSCAASGFTFSNYWMNWVRQAPGKGLEWVGEIRLKSNNYATHYAEPVKGRFTISRDNSKSTVYLQMNSLKTEDTAVYYCTRYYGNYGGYFDVWGAGTLVTVSSASTKGPSVFPLAPSSKSTSGGTAALGCLVKDYFPEPVTVSWNSGALTSGVHTFPAVLQSSGLYSLSSVVTVPSSSLGTQTYICNVNHKPSNTKVDKKVEPKSCDKTHTCPPCPAPPVAGPSVFLFPPKPKDTLMISRTPEVTCVVVDVKHEDPEVKFNWYVDGVEVHNAKTKPREEQYNSTYRVVSVLTVLHQDWLNGKEYKCKVSNKALPAPIEKTISKAKGQPREPQVYTLPPSREEMTKNQVSLTCLVKGFYPSDIAVEWESNGQPENNYKTTPPVLDSDGSFFLYSKLTVDKSRWQQGNVFSCSVMHEALHNHYTQKSLSLSPGK

SEQ ID NO: 17912 - protein, 122 aa, synthetic construct; identical to SEQ ID NO: 12395
  REGION 1..122: note = Description of Artificial Sequence: Synthetic polypeptide
  REGION 1..122: note = VH of XENP018253

SEQ ID NO: 17913 - protein, 5 aa, synthetic construct
  REGION 1..5: note = Description of Artificial Sequence: Synthetic peptide
  REGION 1..5: note = XENP018253 vhCDR1
NYWMN

SEQ ID NO: 17914 - protein, 19 aa, synthetic construct
  REGION 1..19: note = Description of Artificial Sequence: Synthetic peptide
  REGION 1..19: note = XENP018253 vhCDR2
EIRLKSNNYATHYAEPVKG

SEQ ID NO: 17915 - protein, 11 aa, synthetic construct
  REGION 1..11: note = Description of Artificial Sequence: Synthetic peptide
  REGION 1..11: note = XENP018253 vhCDR3
YYGNYGGYFDV

SEQ ID NO: 17916 - protein, 214 aa, synthetic construct; identical to SEQ ID NO: 16226
  REGION 1..214: note = Description of Artificial Sequence: Synthetic polypeptide
  REGION 1..214: note = XENP018253 1G6_H1.152_L1_IgG1_PVA_/S267K Light Chain

SEQ ID NO: 17917 - protein, 107 aa, synthetic construct; identical to SEQ ID NO: 10923
  REGION 1..107: note = Description of Artificial Sequence: Synthetic polypeptide
  REGION 1..107: note = VL of XENP018253

SEQ ID NO: 17918 - protein, 11 aa, synthetic construct
  REGION 1..11: note = Description of Artificial Sequence: Synthetic peptide
  REGION 1..11: note = XENP018253 vlCDR1
RASQSVSNDVA

SEQ ID NO: 17919 - protein, 7 aa, synthetic construct
  REGION 1..7: note = Description of Artificial Sequence: Synthetic peptide
  REGION 1..7: note = XENP018253 vlCDR2
YASHRYT

SEQ ID NO: 17920 - protein, 9 aa, synthetic construct
  REGION 1..9: note = Description of Artificial Sequence: Synthetic peptide
  REGION 1..9: note = XENP018253 vlCDR3
QQDYSSPRT

SEQ ID NO: 17921 - protein, 451 aa, synthetic construct
  REGION 1..451: note = Description of Artificial Sequence: Synthetic polypeptide
  REGION 1..451: note = XENP018254 1G6_H1.153_L1_IgG1_PVA_/S267K Heavy Chain
EVQLVESGGGLVKPGGSLRLSCAASGFTFSNYWMNWVRQAPGKGLEWVGEIRLKSNNYATHYAEPVKGRFTISRDDSKNTVYLQMNSLKTEDTAVYYCTRYYGNYGGYFDVWGAGTLVTVSSASTKGPSVFPLAPSSKSTSGGTAALGCLVKDYFPEPVTVSWNSGALTSGVHTFPAVLQSSGLYSLSSVVTVPSSSLGTQTYICNVNHKPSNTKVDKKVEPKSCDKTHTCPPCPAPPVAGPSVFLFPPKPKDTLMISRTPEVTCVVVDVKHEDPEVKFNWYVDGVEVHNAKTKPREEQYNSTYRVVSVLTVLHQDWLNGKEYKCKVSNKALPAPIEKTISKAKGQPREPQVYTLPPSREEMTKNQVSLTCLVKGFYPSDIAVEWESNGQPENNYKTTPPVLDSDGSFFLYSKLTVDKSRWQQGNVFSCSVMHEALHNHYTQKSLSLSPGK

SEQ ID NO: 17922 - protein, 122 aa, synthetic construct; identical to SEQ ID NO: 12404
  REGION 1..122: note = Description of Artificial Sequence: Synthetic polypeptide
  REGION 1..122: note = VH of XENP018254

SEQ ID NO: 17923 - protein, 5 aa, synthetic construct
  REGION 1..5: note = Description of Artificial Sequence: Synthetic peptide
  REGION 1..5: note = XENP018254 vhCDR1
NYWMN

SEQ ID NO: 17924 - protein, 19 aa, synthetic construct
  REGION 1..19: note = Description of Artificial Sequence: Synthetic peptide
  REGION 1..19: note = XENP018254 vhCDR2
EIRLKSNNYATHYAEPVKG

SEQ ID NO: 17925 - protein, 11 aa, synthetic construct
  REGION 1..11: note = Description of Artificial Sequence: Synthetic peptide
  REGION 1..11: note = XENP018254 vhCDR3
YYGNYGGYFDV

SEQ ID NO: 17926 - protein, 214 aa, synthetic construct; identical to SEQ ID NO: 16226
  REGION 1..214: note = Description of Artificial Sequence: Synthetic polypeptide
  REGION 1..214: note = XENP018254 1G6_H1.153_L1_IgG1_PVA_/S267K Light Chain

SEQ ID NO: 17927 - protein, 107 aa, synthetic construct; identical to SEQ ID NO: 10923
  REGION 1..107: note = Description of Artificial Sequence: Synthetic polypeptide
  REGION 1..107: note = VL of XENP018254

SEQ ID NO: 17928 - protein, 11 aa, synthetic construct
  REGION 1..11: note = Description of Artificial Sequence: Synthetic peptide
  REGION 1..11: note = XENP018254 vlCDR1
RASQSVSNDVA

SEQ ID NO: 17929 - protein, 7 aa, synthetic construct
  REGION 1..7: note = Description of Artificial Sequence: Synthetic peptide
  REGION 1..7: note = XENP018254 vlCDR2
YASHRYT

SEQ ID NO: 17930 - protein, 9 aa, synthetic construct
  REGION 1..9: note = Description of Artificial Sequence: Synthetic peptide
  REGION 1..9: note = XENP018254 vlCDR3
QQDYSSPRT

SEQ ID NO: 17931 - protein, 451 aa, synthetic construct
  REGION 1..451: note = Description of Artificial Sequence: Synthetic polypeptide
  REGION 1..451: note = XENP018255 1G6_H1.154_L1_IgG1_PVA_/S267K Heavy Chain
EVQLVESGGGLVKPGGSLRLSCAASGFTFSNYWMNWVRQAPGKGLEWVGEIRLKSNNYATHYAEPVKGRFTISRDDSKSSVYLQMNSLKTEDTAVYYCTRYYGNYGGYFDVWGAGTLVTVSSASTKGPSVFPLAPSSKSTSGGTAALGCLVKDYFPEPVTVSWNSGALTSGVHTFPAVLQSSGLYSLSSVVTVPSSSLGTQTYICNVNHKPSNTKVDKKVEPKSCDKTHTCPPCPAPPVAGPSVFLFPPKPKDTLMISRTPEVTCVVVDVKHEDPEVKFNWYVDGVEVHNAKTKPREEQYNSTYRVVSVLTVLHQDWLNGKEYKCKVSNKALPAPIEKTISKAKGQPREPQVYTLPPSREEMTKNQVSLTCLVKGFYPSDIAVEWESNGQPENNYKTTPPVLDSDGSFFLYSKLTVDKSRWQQGNVFSCSVMHEALHNHYTQKSLSLSPGK

SEQ ID NO: 17932 - protein, 122 aa, synthetic construct; identical to SEQ ID NO: 12413
  REGION 1..122: note = Description of Artificial Sequence: Synthetic polypeptide
  REGION 1..122: note = VH of XENP018255

SEQ ID NO: 17933 - protein, 5 aa, synthetic construct
  REGION 1..5: note = Description of Artificial Sequence: Synthetic peptide
  REGION 1..5: note = XENP018255 vhCDR1
NYWMN

SEQ ID NO: 17934 - protein, 19 aa, synthetic construct
  REGION 1..19: note = Description of Artificial Sequence: Synthetic peptide
  REGION 1..19: note = XENP018255 vhCDR2
EIRLKSNNYATHYAEPVKG

SEQ ID NO: 17935 - protein, 11 aa, synthetic construct
  REGION 1..11: note = Description of Artificial Sequence: Synthetic peptide
  REGION 1..11: note = XENP018255 vhCDR3
YYGNYGGYFDV

SEQ ID NO: 17936 - protein, 214 aa, synthetic construct; identical to SEQ ID NO: 16226
  REGION 1..214: note = Description of Artificial Sequence: Synthetic polypeptide
  REGION 1..214: note = XENP018255 1G6_H1.154_L1_IgG1_PVA_/S267K Light Chain

SEQ ID NO: 17937 - protein, 107 aa, synthetic construct; identical to SEQ ID NO: 10923
  REGION 1..107: note = Description of Artificial Sequence: Synthetic polypeptide
  REGION 1..107: note = VL of XENP018255

SEQ ID NO: 17938 - protein, 11 aa, synthetic construct
  REGION 1..11: note = Description of Artificial Sequence: Synthetic peptide
  REGION 1..11: note = XENP018255 vlCDR1
RASQSVSNDVA

SEQ ID NO: 17939 - protein, 7 aa, synthetic construct
  REGION 1..7: note = Description of Artificial Sequence: Synthetic peptide
  REGION 1..7: note = XENP018255 vlCDR2
YASHRYT

SEQ ID NO: 17940 - protein, 9 aa, synthetic construct
  REGION 1..9: note = Description of Artificial Sequence: Synthetic peptide
  REGION 1..9: note = XENP018255 vlCDR3
QQDYSSPRT

SEQ ID NO: 17941 - protein, 451 aa, synthetic construct
  REGION 1..451: note = Description of Artificial Sequence: Synthetic polypeptide
  REGION 1..451: note = XENP018256 1G6_H1.155_L1_IgG1_PVA_/S267K Heavy Chain
EVQLVESGGGLVKPGGSLRLSCAASGFTFSNYWMNWVRQAPGKGLEWVGEIRLKSNNYATHYAEPVKGRFTISRDDSKSTLYLQMNSLKTEDTAVYYCTRYYGNYGGYFDVWGAGTLVTVSSASTKGPSVFPLAPSSKSTSGGTAALGCLVKDYFPEPVTVSWNSGALTSGVHTFPAVLQSSGLYSLSSVVTVPSSSLGTQTYICNVNHKPSNTKVDKKVEPKSCDKTHTCPPCPAPPVAGPSVFLFPPKPKDTLMISRTPEVTCVVVDVKHEDPEVKFNWYVDGVEVHNAKTKPREEQYNSTYRVVSVLTVLHQDWLNGKEYKCKVSNKALPAPIEKTISKAKGQPREPQVYTLPPSREEMTKNQVSLTCLVKGFYPSDIAVEWESNGQPENNYKTTPPVLDSDGSFFLYSKLTVDKSRWQQGNVFSCSVMHEALHNHYTQKSLSLSPGK

SEQ ID NO: 17942 - protein, 122 aa, synthetic construct; identical to SEQ ID NO: 12422
  REGION 1..122: note = Description of Artificial Sequence: Synthetic polypeptide
  REGION 1..122: note = VH of XENP018256

SEQ ID NO: 17943 - protein, 5 aa, synthetic construct
  REGION 1..5: note = Description of Artificial Sequence: Synthetic peptide
  REGION 1..5: note = XENP018256 vhCDR1
NYWMN

SEQ ID NO: 17944 - protein, 19 aa, synthetic construct
  REGION 1..19: note = Description of Artificial Sequence: Synthetic peptide
  REGION 1..19: note = XENP018256 vhCDR2
EIRLKSNNYATHYAEPVKG

SEQ ID NO: 17945 - protein, 11 aa, synthetic construct
  REGION 1..11: note = Description of Artificial Sequence: Synthetic peptide
  REGION 1..11: note = XENP018256 vhCDR3
YYGNYGGYFDV

SEQ ID NO: 17946 - protein, 214 aa, synthetic construct; identical to SEQ ID NO: 16226
  REGION 1..214: note = Description of Artificial Sequence: Synthetic polypeptide
  REGION 1..214: note = XENP018256 1G6_H1.155_L1_IgG1_PVA_/S267K Light Chain

SEQ ID NO: 17947 - protein, 107 aa, synthetic construct; identical to SEQ ID NO: 10923
  REGION 1..107: note = Description of Artificial Sequence: Synthetic polypeptide
  REGION 1..107: note = VL of XENP018256

SEQ ID NO: 17948 - protein, 11 aa, synthetic construct
  REGION 1..11: note = Description of Artificial Sequence: Synthetic peptide
  REGION 1..11: note = XENP018256 vlCDR1
RASQSVSNDVA

SEQ ID NO: 17949 - protein, 7 aa, synthetic construct
  REGION 1..7: note = Description of Artificial Sequence: Synthetic peptide
  REGION 1..7: note = XENP018256 vlCDR2
YASHRYT

SEQ ID NO: 17950 - protein, 9 aa, synthetic construct
  REGION 1..9: note = Description of Artificial Sequence: Synthetic peptide
  REGION 1..9: note = XENP018256 vlCDR3
QQDYSSPRT

SEQ ID NO: 17951 - protein, 451 aa, synthetic construct
  REGION 1..451: note = Description of Artificial Sequence: Synthetic polypeptide
  REGION 1..451: note = XENP018257 1G6_H1.156_L1_IgG1_PVA_/S267K Heavy Chain
EVQLVESGGGLVKPGGSLRLSCAASGFTFSNYWMNWVRQAPGKGLEWVGEIRLKSNNYATHYAEPVKGRFTISRDDSKSTAYLQMNSLKTEDTAVYYCTRYYGNYGGYFDVWGAGTLVTVSSASTKGPSVFPLAPSSKSTSGGTAALGCLVKDYFPEPVTVSWNSGALTSGVHTFPAVLQSSGLYSLSSVVTVPSSSLGTQTYICNVNHKPSNTKVDKKVEPKSCDKTHTCPPCPAPPVAGPSVFLFPPKPKDTLMISRTPEVTCVVVDVKHEDPEVKFNWYVDGVEVHNAKTKPREEQYNSTYRVVSVLTVLHQDWLNGKEYKCKVSNKALPAPIEKTISKAKGQPREPQVYTLPPSREEMTKNQVSLTCLVKGFYPSDIAVEWESNGQPENNYKTTPPVLDSDGSFFLYSKLTVDKSRWQQGNVFSCSVMHEALHNHYTQKSLSLSPGK

SEQ ID NO: 17952 - protein, 122 aa, synthetic construct; identical to SEQ ID NO: 12431
  REGION 1..122: note = Description of Artificial Sequence: Synthetic polypeptide
  REGION 1..122: note = VH of XENP018257

SEQ ID NO: 17953 - protein, 5 aa, synthetic construct
  REGION 1..5: note = Description of Artificial Sequence: Synthetic peptide
  REGION 1..5: note = XENP018257 vhCDR1
NYWMN

SEQ ID NO: 17954 - protein, 19 aa, synthetic construct
  REGION 1..19: note = Description of Artificial Sequence: Synthetic peptide
  REGION 1..19: note = XENP018257 vhCDR2
EIRLKSNNYATHYAEPVKG

SEQ ID NO: 17955 - protein, 11 aa, synthetic construct
  REGION 1..11: note = Description of Artificial Sequence: Synthetic peptide
  REGION 1..11: note = XENP018257 vhCDR3
YYGNYGGYFDV

SEQ ID NO: 17956 - protein, 214 aa, synthetic construct; identical to SEQ ID NO: 16226
  REGION 1..214: note = Description of Artificial Sequence: Synthetic polypeptide
  REGION 1..214: note = XENP018257 1G6_H1.156_L1_IgG1_PVA_/S267K Light Chain

SEQ ID NO: 17957 - protein, 107 aa, synthetic construct; identical to SEQ ID NO: 10923
  REGION 1..107: note = Description of Artificial Sequence: Synthetic polypeptide
  REGION 1..107: note = VL of XENP018257

SEQ ID NO: 17958 - protein, 11 aa, synthetic construct
  REGION 1..11: note = Description of Artificial Sequence: Synthetic peptide
  REGION 1..11: note = XENP018257 vlCDR1
RASQSVSNDVA

SEQ ID NO: 17959 - protein, 7 aa, synthetic construct
  REGION 1..7: note = Description of Artificial Sequence: Synthetic peptide
  REGION 1..7: note = XENP018257 vlCDR2
YASHRYT

SEQ ID NO: 17960 - protein, 9 aa, synthetic construct
  REGION 1..9: note = Description of Artificial Sequence: Synthetic peptide
  REGION 1..9: note = XENP018257 vlCDR3
QQDYSSPRT

SEQ ID NO: 17961 - protein, 451 aa, synthetic construct
  REGION 1..451: note = Description of Artificial Sequence: Synthetic polypeptide
  REGION 1..451: note = XENP018258 1G6_H1.157_L1_IgG1_PVA_/S267K Heavy Chain
EVQLVESGGGLVKPGGSLRLSCAASGFTFSNYWMNWVRQAPGKGLEWVGEIRLKSNNYATHYAEPVKGRFTISRDDSKSTVYLQMNNLKTEDTAVYYCTRYYGNYGGYFDVWGAGTLVTVSSASTKGPSVFPLAPSSKSTSGGTAALGCLVKDYFPEPVTVSWNSGALTSGVHTFPAVLQSSGLYSLSSVVTVPSSSLGTQTYICNVNHKPSNTKVDKKVEPKSCDKTHTCPPCPAPPVAGPSVFLFPPKPKDTLMISRTPEVTCVVVDVKHEDPEVKFNWYVDGVEVHNAKTKPREEQYNSTYRVVSVLTVLHQDWLNGKEYKCKVSNKALPAPIEKTISKAKGQPREPQVYTLPPSREEMTKNQVSLTCLVKGFYPSDIAVEWESNGQPENNYKTTPPVLDSDGSFFLYSKLTVDKSRWQQGNVFSCSVMHEALHNHYTQKSLSLSPGK

SEQ ID NO: 17962 - protein, 122 aa, synthetic construct; identical to SEQ ID NO: 12440
  REGION 1..122: note = Description of Artificial Sequence: Synthetic polypeptide
  REGION 1..122: note = VH of XENP018258

SEQ ID NO: 17963 - protein, 5 aa, synthetic construct
  REGION 1..5: note = Description of Artificial Sequence: Synthetic peptide
  REGION 1..5: note = XENP018258 vhCDR1
NYWMN

SEQ ID NO: 17964 - protein, 19 aa, synthetic construct
  REGION 1..19: note = Description of Artificial Sequence: Synthetic peptide
  REGION 1..19: note = XENP018258 vhCDR2
EIRLKSNNYATHYAEPVKG

SEQ ID NO: 17965 - protein, 11 aa, synthetic construct
  REGION 1..11: note = Description of Artificial Sequence: Synthetic peptide
  REGION 1..11: note = XENP018258 vhCDR3
YYGNYGGYFDV

SEQ ID NO: 17966 - protein, 214 aa, synthetic construct; identical to SEQ ID NO: 16226
  REGION 1..214: note = Description of Artificial Sequence: Synthetic polypeptide
  REGION 1..214: note = XENP018258 1G6_H1.157_L1_IgG1_PVA_/S267K Light Chain

SEQ ID NO: 17967 - protein, 107 aa, synthetic construct; identical to SEQ ID NO: 10923
  REGION 1..107: note = Description of Artificial Sequence: Synthetic polypeptide
  REGION 1..107: note = VL of XENP018258

SEQ ID NO: 17968 - protein, 11 aa, synthetic construct
  REGION 1..11: note = Description of Artificial Sequence: Synthetic peptide
  REGION 1..11: note = XENP018258 vlCDR1
RASQSVSNDVA

SEQ ID NO: 17969 - protein, 7 aa, synthetic construct
  REGION 1..7: note = Description of Artificial Sequence: Synthetic peptide
  REGION 1..7: note = XENP018258 vlCDR2
YASHRYT

SEQ ID NO: 17970 - protein, 9 aa, synthetic construct
  REGION 1..9: note = Description of Artificial Sequence: Synthetic peptide
  REGION 1..9: note = XENP018258 vlCDR3
QQDYSSPRT

SEQ ID NO: 17971 - protein, 451 aa, synthetic construct
  REGION 1..451: note = Description of Artificial Sequence: Synthetic polypeptide
  REGION 1..451: note = XENP018259 1G6_H1.158_L1_IgG1_PVA_/S267K Heavy Chain
EVQLVESGGGLVKPGGSLRLSCAASGFTFSNYWMNWVRQAPGKGLEWVGEIRLKSNNYATHYAEPVKGRFTISRDDSKSTVYLQMNSLRTEDTAVYYCTRYYGNYGGYFDVWGAGTLVTVSSASTKGPSVFPLAPSSKSTSGGTAALGCLVKDYFPEPVTVSWNSGALTSGVHTFPAVLQSSGLYSLSSVVTVPSSSLGTQTYICNVNHKPSNTKVDKKVEPKSCDKTHTCPPCPAPPVAGPSVFLFPPKPKDTLMISRTPEVTCVVVDVKHEDPEVKFNWYVDGVEVHNAKTKPREEQYNSTYRVVSVLTVLHQDWLNGKEYKCKVSNKALPAPIEKTISKAKGQPREPQVYTLPPSREEMTKNQVSLTCLVKGFYPSDIAVEWESNGQPENNYKTTPPVLDSDGSFFLYSKLTVDKSRWQQGNVFSCSVMHEALHNHYTQKSLSLSPGK

SEQ ID NO: 17972 - protein, 122 aa, synthetic construct; identical to SEQ ID NO: 12449
  REGION 1..122: note = Description of Artificial Sequence: Synthetic polypeptide
  REGION 1..122: note = VH of XENP018259

SEQ ID NO: 17973 - protein, 5 aa, synthetic construct
  REGION 1..5: note = Description of Artificial Sequence: Synthetic peptide
  REGION 1..5: note = XENP018259 vhCDR1
NYWMN

SEQ ID NO: 17974 - protein, 19 aa, synthetic construct
  REGION 1..19: note = Description of Artificial Sequence: Synthetic peptide
  REGION 1..19: note = XENP018259 vhCDR2
EIRLKSNNYATHYAEPVKG

SEQ ID NO: 17975 - protein, 11 aa, synthetic construct
  REGION 1..11: note = Description of Artificial Sequence: Synthetic peptide
  REGION 1..11: note = XENP018259 vhCDR3
YYGNYGGYFDV

SEQ ID NO: 17976 - protein, 214 aa, synthetic construct; identical to SEQ ID NO: 16226
  REGION 1..214: note = Description of Artificial Sequence: Synthetic polypeptide
  REGION 1..214: note = XENP018259 1G6_H1.158_L1_IgG1_PVA_/S267K Light Chain

SEQ ID NO: 17977 - protein, 107 aa, synthetic construct; identical to SEQ ID NO: 10923
  REGION 1..107: note = Description of Artificial Sequence: Synthetic polypeptide
  REGION 1..107: note = VL of XENP018259

SEQ ID NO: 17978 - protein, 11 aa, synthetic construct
  REGION 1..11: note = Description of Artificial Sequence: Synthetic peptide
  REGION 1..11: note = XENP018259 vlCDR1
RASQSVSNDVA

SEQ ID NO: 17979 - protein, 7 aa, synthetic construct
  REGION 1..7: note = Description of Artificial Sequence: Synthetic peptide
  REGION 1..7: note = XENP018259 vlCDR2
YASHRYT

SEQ ID NO: 17980 - protein, 9 aa, synthetic construct
  REGION 1..9: note = Description of Artificial Sequence: Synthetic peptide
  REGION 1..9: note = XENP018259 vlCDR3
QQDYSSPRT

SEQ ID NO: 17981 - protein, 451 aa, synthetic construct
  REGION 1..451: note = Description of Artificial Sequence: Synthetic polypeptide
  REGION 1..451: note = XENP018260 1G6_H1.159_L1_IgG1_PVA_/S267K Heavy Chain
EVQLVESGGGLVKPGGSLRLSCAASGFTFSNYWMNWVRQAPGKGLEWVGEIRLKSNNYATHYAEPVKGRFTISRDDSKSTVYLQMNSLKAEDTAVYYCTRYYGNYGGYFDVWGAGTLVTVSSASTKGPSVFPLAPSSKSTSGGTAALGCLVKDYFPEPVTVSWNSGALTSGVHTFPAVLQSSGLYSLSSVVTVPSSSLGTQTYICNVNHKPSNTKVDKKVEPKSCDKTHTCPPCPAPPVAGPSVFLFPPKPKDTLMISRTPEVTCVVVDVKHEDPEVKFNWYVDGVEVHNAKTKPREEQYNSTYRVVSVLTVLHQDWLNGKEYKCKVSNKALPAPIEKTISKAKGQPREPQVYTLPPSREEMTKNQVSLTCLVKGFYPSDIAVEWESNGQPENNYKTTPPVLDSDGSFFLYSKLTVDKSRWQQGNVFSCSVMHEALHNHYTQKSLSLSPGK

SEQ ID NO: 17982 - protein, 122 aa, synthetic construct; identical to SEQ ID NO: 12458
  REGION 1..122: note = Description of Artificial Sequence: Synthetic polypeptide
  REGION 1..122: note = VH of XENP018260

SEQ ID NO: 17983 - protein, 5 aa, synthetic construct
  REGION 1..5: note = Description of Artificial Sequence: Synthetic peptide
  REGION 1..5: note = XENP018260 vhCDR1
NYWMN

SEQ ID NO: 17984 - protein, 19 aa, synthetic construct
  REGION 1..19: note = Description of Artificial Sequence: Synthetic peptide
  REGION 1..19: note = XENP018260 vhCDR2
EIRLKSNNYATHYAEPVKG

SEQ ID NO: 17985 - protein, 11 aa, synthetic construct
  REGION 1..11: note = Description of Artificial Sequence: Synthetic peptide
  REGION 1..11: note = XENP018260 vhCDR3
YYGNYGGYFDV

SEQ ID NO: 17986 - protein, 214 aa, synthetic construct; identical to SEQ ID NO: 16226
  REGION 1..214: note = Description of Artificial Sequence: Synthetic polypeptide
  REGION 1..214: note = XENP018260 1G6_H1.159_L1_IgG1_PVA_/S267K Light Chain

SEQ ID NO: 17987 - protein, 107 aa, synthetic construct; identical to SEQ ID NO: 10923
  REGION 1..107: note = Description of Artificial Sequence: Synthetic polypeptide
  REGION 1..107: note = VL of XENP018260

SEQ ID NO: 17988 - protein, 11 aa, synthetic construct
  REGION 1..11: note = Description of Artificial Sequence: Synthetic peptide
  REGION 1..11: note = XENP018260 vlCDR1
RASQSVSNDVA

SEQ ID NO: 17989 - protein, 7 aa, synthetic construct
  REGION 1..7: note = Description of Artificial Sequence: Synthetic peptide
  REGION 1..7: note = XENP018260 vlCDR2
YASHRYT

SEQ ID NO: 17990 - protein, 9 aa, synthetic construct
  REGION 1..9: note = Description of Artificial Sequence: Synthetic peptide
  REGION 1..9: note = XENP018260 vlCDR3
QQDYSSPRT

SEQ ID NO: 17991 - protein, 451 aa, synthetic construct
  REGION 1..451: note = Description of Artificial Sequence: Synthetic polypeptide
  REGION 1..451: note = XENP018261 1G6_H1.160_L1_IgG1_PVA_/S267K Heavy Chain
EVQLVESGGGLVKPGGSLRLSCAASGFTFSNYWMNWVRQAPGKGLEWVGEIRLKSNNYATHYAEPVKGRFTISRDDSKSTVYLQMNSLKTEDTGVYYCTRYYGNYGGYFDVWGAGTLVTVSSASTKGPSVFPLAPSSKSTSGGTAALGCLVKDYFPEPVTVSWNSGALTSGVHTFPAVLQSSGLYSLSSVVTVPSSSLGTQTYICNVNHKPSNTKVDKKVEPKSCDKTHTCPPCPAPPVAGPSVFLFPPKPKDTLMISRTPEVTCVVVDVKHEDPEVKFNWYVDGVEVHNAKTKPREEQYNSTYRVVSVLTVLHQDWLNGKEYKCKVSNKALPAPIEKTISKAKGQPREPQVYTLPPSREEMTKNQVSLTCLVKGFYPSDIAVEWESNGQPENNYKTTPPVLDSDGSFFLYSKLTVDKSRWQQGNVFSCSVMHEALHNHYTQKSLSLSPGK

SEQ ID NO: 17992 - protein, 122 aa, synthetic construct; identical to SEQ ID NO: 12467
  REGION 1..122: note = Description of Artificial Sequence: Synthetic polypeptide
  REGION 1..122: note = VH of XENP018261

SEQ ID NO: 17993 - protein, 5 aa, synthetic construct
  REGION 1..5: note = Description of Artificial Sequence: Synthetic peptide
  REGION 1..5: note = XENP018261 vhCDR1
NYWMN

SEQ ID NO: 17994 - protein, 19 aa, synthetic construct
  REGION 1..19: note = Description of Artificial Sequence: Synthetic peptide
  REGION 1..19: note = XENP018261 vhCDR2
EIRLKSNNYATHYAEPVKG

SEQ ID NO: 17995 - protein, 11 aa, synthetic construct
  REGION 1..11: note = Description of Artificial Sequence: Synthetic peptide
  REGION 1..11: note = XENP018261 vhCDR3
YYGNYGGYFDV

SEQ ID NO: 17996 - protein, 214 aa, synthetic construct; identical to SEQ ID NO: 16226
  REGION 1..214: note = Description of Artificial Sequence: Synthetic polypeptide
  REGION 1..214: note = XENP018261 1G6_H1.160_L1_IgG1_PVA_/S267K Light Chain

SEQ ID NO: 17997 - protein, 107 aa, synthetic construct; identical to SEQ ID NO: 10923
  REGION 1..107: note = Description of Artificial Sequence: Synthetic polypeptide
  REGION 1..107: note = VL of XENP018261

SEQ ID NO: 17998 - protein, 11 aa, synthetic construct
  REGION 1..11: note = Description of Artificial Sequence: Synthetic peptide
  REGION 1..11: note = XENP018261 vlCDR1
RASQSVSNDVA

SEQ ID NO: 17999 - protein, 7 aa, synthetic construct
  REGION 1..7: note = Description of Artificial Sequence: Synthetic peptide
  REGION 1..7: note = XENP018261 vlCDR2
YASHRYT

SEQ ID NO: 18000 - protein, 9 aa, synthetic construct
  REGION 1..9: note = Description of Artificial Sequence: Synthetic peptide
  REGION 1..9: note = XENP018261 vlCDR3
QQDYSSPRT

SEQ ID NO: 18001 - protein, 451 aa, synthetic construct
  REGION 1..451: note = Description of Artificial Sequence: Synthetic polypeptide
  REGION 1..451: note = XENP018262 1G6_H1.161_L1_IgG1_PVA_/S267K Heavy Chain
EVQLVESGGGLVKPGGSLRLSCAASGFTFSNYWMNWVRQAPGKGLEWVGEIRLKSNNYATHYAEPVKGRFTISRDDSKSTVYLQMNSLKTEDTAIYYCTRYYGNYGGYFDVWGAGTLVTVSSASTKGPSVFPLAPSSKSTSGGTAALGCLVKDYFPEPVTVSWNSGALTSGVHTFPAVLQSSGLYSLSSVVTVPSSSLGTQTYICNVNHKPSNTKVDKKVEPKSCDKTHTCPPCPAPPVAGPSVFLFPPKPKDTLMISRTPEVTCVVVDVKHEDPEVKFNWYVDGVEVHNAKTKPREEQYNSTYRVVSVLTVLHQDWLNGKEYKCKVSNKALPAPIEKTISKAKGQPREPQVYTLPPSREEMTKNQVSLTCLVKGFYPSDIAVEWESNGQPENNYKTTPPVLDSDGSFFLYSKLTVDKSRWQQGNVFSCSVMHEALHNHYTQKSLSLSPGK

SEQ ID NO: 18002 - protein, 122 aa, synthetic construct; identical to SEQ ID NO: 12476
  REGION 1..122: note = Description of Artificial Sequence: Synthetic polypeptide
  REGION 1..122: note = VH of XENP018262

SEQ ID NO: 18003 - protein, 5 aa, synthetic construct
  REGION 1..5: note = Description of Artificial Sequence: Synthetic peptide
  REGION 1..5: note = XENP018262 vhCDR1
NYWMN

SEQ ID NO: 18004 - protein, 19 aa, synthetic construct
  REGION 1..19: note = Description of Artificial Sequence: Synthetic peptide
  REGION 1..19: note = XENP018262 vhCDR2
EIRLKSNNYATHYAEPVKG

SEQ ID NO: 18005 - protein, 11 aa, synthetic construct
  REGION 1..11: note = Description of Artificial Sequence: Synthetic peptide
  REGION 1..11: note = XENP018262 vhCDR3
YYGNYGGYFDV

SEQ ID NO: 18006 - protein, 214 aa, synthetic construct; identical to SEQ ID NO: 16226
  REGION 1..214: note = Description of Artificial Sequence: Synthetic polypeptide
  REGION 1..214: note = XENP018262 1G6_H1.161_L1_IgG1_PVA_/S267K Light Chain

SEQ ID NO: 18007 - protein, 107 aa, synthetic construct; identical to SEQ ID NO: 10923
  REGION 1..107: note = Description of Artificial Sequence: Synthetic polypeptide
  REGION 1..107: note = VL of XENP018262

SEQ ID NO: 18008 - protein, 11 aa, synthetic construct
  REGION 1..11: note = Description of Artificial Sequence: Synthetic peptide
  REGION 1..11: note = XENP018262 vlCDR1
RASQSVSNDVA

SEQ ID NO: 18009 - protein, 7 aa, synthetic construct
  REGION 1..7: note = Description of Artificial Sequence: Synthetic peptide
  REGION 1..7: note = XENP018262 vlCDR2
YASHRYT

SEQ ID NO: 18010 - protein, 9 aa, synthetic construct
  REGION 1..9: note = Description of Artificial Sequence: Synthetic peptide
  REGION 1..9: note = XENP018262 vlCDR3
QQDYSSPRT

SEQ ID NO: 18011 - protein, 451 aa, synthetic construct
  REGION 1..451: note = Description of Artificial Sequence: Synthetic polypeptide
  REGION 1..451: note = XENP018263 1G6_H1.162_L1_IgG1_PVA_/S267K Heavy Chain
EVQLVESGGGLVKPGGSLRLSCAASGFTFSNYWMNWVRQAPGKGLEWVGEIRLKSNNYATHYAEPVKGRFTISRDDSKSTVYLQMNSLKTEDTAVYHCTRYYGNYGGYFDVWGAGTLVTVSSASTKGPSVFPLAPSSKSTSGGTAALGCLVKDYFPEPVTVSWNSGALTSGVHTFPAVLQSSGLYSLSSVVTVPSSSLGTQTYICNVNHKPSNTKVDKKVEPKSCDKTHTCPPCPAPPVAGPSVFLFPPKPKDTLMISRTPEVTCVVVDVKHEDPEVKFNWYVDGVEVHNAKTKPREEQYNSTYRVVSVLTVLHQDWLNGKEYKCKVSNKALPAPIEKTISKAKGQPREPQVYTLPPSREEMTKNQVSLTCLVKGFYPSDIAVEWESNGQPENNYKTTPPVLDSDGSFFLYSKLTVDKSRWQQGNVFSCSVMHEALHNHYTQKSLSLSPGK

SEQ ID NO: 18012 - protein, 122 aa, synthetic construct; identical to SEQ ID NO: 12485
  REGION 1..122: note = Description of Artificial Sequence: Synthetic polypeptide
  REGION 1..122: note = VH of XENP018263

SEQ ID NO: 18013 - protein, 5 aa, synthetic construct
  REGION 1..5: note = Description of Artificial Sequence: Synthetic peptide
  REGION 1..5: note = XENP018263 vhCDR1
NYWMN

SEQ ID NO: 18014 - protein, 19 aa, synthetic construct
  REGION 1..19: note = Description of Artificial Sequence: Synthetic peptide
  REGION 1..19: note = XENP018263 vhCDR2
EIRLKSNNYATHYAEPVKG

SEQ ID NO: 18015 - protein, 11 aa, synthetic construct
  REGION 1..11: note = Description of Artificial Sequence: Synthetic peptide
  REGION 1..11: note = XENP018263 vhCDR3
YYGNYGGYFDV

SEQ ID NO: 18016 - protein, 214 aa, synthetic construct; identical to SEQ ID NO: 16226
  REGION 1..214: note = Description of Artificial Sequence: Synthetic polypeptide
  REGION 1..214: note = XENP018263 1G6_H1.162_L1_IgG1_PVA_/S267K Light Chain

SEQ ID NO: 18017 - protein, 107 aa, synthetic construct; identical to SEQ ID NO: 10923
  REGION 1..107: note = Description of Artificial Sequence: Synthetic polypeptide
  REGION 1..107: note = VL of XENP018263

SEQ ID NO: 18018 - protein, 11 aa, synthetic construct
  REGION 1..11: note = Description of Artificial Sequence: Synthetic peptide
  REGION 1..11: note = XENP018263 vlCDR1
RASQSVSNDVA

SEQ ID NO: 18019 - protein, 7 aa, synthetic construct
  REGION 1..7: note = Description of Artificial Sequence: Synthetic peptide
  REGION 1..7: note = XENP018263 vlCDR2
YASHRYT

SEQ ID NO: 18020 - protein, 9 aa, synthetic construct
  REGION 1..9: note = Description of Artificial Sequence: Synthetic peptide
  REGION 1..9: note = XENP018263 vlCDR3
QQDYSSPRT

SEQ ID NO: 18021 - protein, 451 aa, synthetic construct
  REGION 1..451: note = Description of Artificial Sequence: Synthetic polypeptide
  REGION 1..451: note = XENP018264 1G6_H1.163_L1_IgG1_PVA_/S267K Heavy Chain
EVQLVESGGGLVKPGGSLRLSCAASGFTFSNYWMNWVRQAPGKGLEWVGEIRLKSNNYATHYAEPVKGRFTISRDDSKSTVYLQMNSLKTEDTAVYYCARYYGNYGGYFDVWGAGTLVTVSSASTKGPSVFPLAPSSKSTSGGTAALGCLVKDYFPEPVTVSWNSGALTSGVHTFPAVLQSSGLYSLSSVVTVPSSSLGTQTYICNVNHKPSNTKVDKKVEPKSCDKTHTCPPCPAPPVAGPSVFLFPPKPKDTLMISRTPEVTCVVVDVKHEDPEVKFNWYVDGVEVHNAKTKPREEQYNSTYRVVSVLTVLHQDWLNGKEYKCKVSNKALPAPIEKTISKAKGQPREPQVYTLPPSREEMTKNQVSLTCLVKGFYPSDIAVEWESNGQPENNYKTTPPVLDSDGSFFLYSKLTVDKSRWQQGNVFSCSVMHEALHNHYTQKSLSLSPGK

SEQ ID NO: 18022 - protein, 122 aa, synthetic construct; identical to SEQ ID NO: 12494
  REGION 1..122: note = Description of Artificial Sequence: Synthetic polypeptide
  REGION 1..122: note = VH of XENP018264

SEQ ID NO: 18023 - protein, 5 aa, synthetic construct
  REGION 1..5: note = Description of Artificial Sequence: Synthetic peptide
  REGION 1..5: note = XENP018264 vhCDR1
NYWMN

SEQ ID NO: 18024 - protein, 19 aa, synthetic construct
  REGION 1..19: note = Description of Artificial Sequence: Synthetic peptide
  REGION 1..19: note = XENP018264 vhCDR2
EIRLKSNNYATHYAEPVKG

SEQ ID NO: 18025 - protein, 11 aa, synthetic construct
  REGION 1..11: note = Description of Artificial Sequence: Synthetic peptide
  REGION 1..11: note = XENP018264 vhCDR3
YYGNYGGYFDV

SEQ ID NO: 18026 - protein, 214 aa, synthetic construct; identical to SEQ ID NO: 16226
  REGION 1..214: note = Description of Artificial Sequence: Synthetic polypeptide
  REGION 1..214: note = XENP018264 1G6_H1.163_L1_IgG1_PVA_/S267K Light Chain

SEQ ID NO: 18027 - protein, 107 aa, synthetic construct; identical to SEQ ID NO: 10923
  REGION 1..107: note = Description of Artificial Sequence: Synthetic polypeptide
  REGION 1..107: note = VL of XENP018264

SEQ ID NO: 18028 - protein, 11 aa, synthetic construct
  REGION 1..11: note = Description of Artificial Sequence: Synthetic peptide
  REGION 1..11: note = XENP018264 vlCDR1
RASQSVSNDVA

SEQ ID NO: 18029 - protein, 7 aa, synthetic construct
  REGION 1..7: note = Description of Artificial Sequence: Synthetic peptide
  REGION 1..7: note = XENP018264 vlCDR2
YASHRYT

SEQ ID NO: 18030 - protein, 9 aa, synthetic construct
  REGION 1..9: note = Description of Artificial Sequence: Synthetic peptide
  REGION 1..9: note = XENP018264 vlCDR3
QQDYSSPRT

SEQ ID NO: 18031 - protein, 451 aa, synthetic construct
  REGION 1..451: note = Description of Artificial Sequence: Synthetic polypeptide
  REGION 1..451: note = XENP018265 1G6_H1.164_L1_IgG1_PVA_/S267K Heavy Chain
EVQLVESGGGLVKPGGSLRLSCAASGFTFSNYWMNWVRQAPGKGLEWVGEIRLKSNNYATHYAEPVKGRFTISRDDSKSTVYLQMNSLKTEDTAVYYCVRYYGNYGGYFDVWGAGTLVTVSSASTKGPSVFPLAPSSKSTSGGTAALGCLVKDYFPEPVTVSWNSGALTSGVHTFPAVLQSSGLYSLSSVVTVPSSSLGTQTYICNVNHKPSNTKVDKKVEPKSCDKTHTCPPCPAPPVAGPSVFLFPPKPKDTLMISRTPEVTCVVVDVKHEDPEVKFNWYVDGVEVHNAKTKPREEQYNSTYRVVSVLTVLHQDWLNGKEYKCKVSNKALPAPIEKTISKAKGQPREPQVYTLPPSREEMTKNQVSLTCLVKGFYPSDIAVEWESNGQPENNYKTTPPVLDSDGSFFLYSKLTVDKSRWQQGNVFSCSVMHEALHNHYTQKSLSLSPGK

SEQ ID NO: 18032 - protein, 122 aa, synthetic construct; identical to SEQ ID NO: 12503
  REGION 1..122: note = Description of Artificial Sequence: Synthetic polypeptide
  REGION 1..122: note = VH of XENP018265

SEQ ID NO: 18033 - protein, 5 aa, synthetic construct
  REGION 1..5: note = Description of Artificial Sequence: Synthetic peptide
  REGION 1..5: note = XENP018265 vhCDR1
NYWMN

SEQ ID NO: 18034 - protein, 19 aa, synthetic construct
  REGION 1..19: note = Description of Artificial Sequence: Synthetic peptide
  REGION 1..19: note = XENP018265 vhCDR2
EIRLKSNNYATHYAEPVKG

SEQ ID NO: 18035 - protein, 11 aa, synthetic construct
  REGION 1..11: note = Description of Artificial Sequence: Synthetic peptide
  REGION 1..11: note = XENP018265 vhCDR3
YYGNYGGYFDV

SEQ ID NO: 18036 - protein, 214 aa, synthetic construct; identical to SEQ ID NO: 16226
  REGION 1..214: note = Description of Artificial Sequence: Synthetic polypeptide
  REGION 1..214: note = XENP018265 1G6_H1.164_L1_IgG1_PVA_/S267K Light Chain

SEQ ID NO: 18037 - protein, 107 aa, synthetic construct; identical to SEQ ID NO: 10923
  REGION 1..107: note = Description of Artificial Sequence: Synthetic polypeptide
  REGION 1..107: note = VL of XENP018265

SEQ ID NO: 18038 - protein, 11 aa, synthetic construct
  REGION 1..11: note = Description of Artificial Sequence: Synthetic peptide
  REGION 1..11: note = XENP018265 vlCDR1
RASQSVSNDVA

SEQ ID NO: 18039 - protein, 7 aa, synthetic construct
  REGION 1..7: note = Description of Artificial Sequence: Synthetic peptide
  REGION 1..7: note = XENP018265 vlCDR2
YASHRYT

SEQ ID NO: 18040 - protein, 9 aa, synthetic construct
  REGION 1..9: note = Description of Artificial Sequence: Synthetic peptide
  REGION 1..9: note = XENP018265 vlCDR3
QQDYSSPRT

SEQ ID NO: 18041 - protein, 451 aa, synthetic construct
  REGION 1..451: note = Description of Artificial Sequence: Synthetic polypeptide
  REGION 1..451: note = XENP018266 1G6_H1.165_L1_IgG1_PVA_/S267K Heavy Chain
EVQLVESGGGLVKPGGSLRLSCAASGFTFSNYWMNWVRQAPGKGLEWVGEIRLKSNNYATHYAEPVKGRFTISRDDSKSTVYLQMNSLKTEDTAVYYCTTYYGNYGGYFDVWGAGTLVTVSSASTKGPSVFPLAPSSKSTSGGTAALGCLVKDYFPEPVTVSWNSGALTSGVHTFPAVLQSSGLYSLSSVVTVPSSSLGTQTYICNVNHKPSNTKVDKKVEPKSCDKTHTCPPCPAPPVAGPSVFLFPPKPKDTLMISRTPEVTCVVVDVKHEDPEVKFNWYVDGVEVHNAKTKPREEQYNSTYRVVSVLTVLHQDWLNGKEYKCKVSNKALPAPIEKTISKAKGQPREPQVYTLPPSREEMTKNQVSLTCLVKGFYPSDIAVEWESNGQPENNYKTTPPVLDSDGSFFLYSKLTVDKSRWQQGNVFSCSVMHEALHNHYTQKSLSLSPGK

SEQ ID NO: 18042 - protein, 122 aa, synthetic construct; identical to SEQ ID NO: 12512
  REGION 1..122: note = Description of Artificial Sequence: Synthetic polypeptide
  REGION 1..122: note = VH of XENP018266

SEQ ID NO: 18043 - protein, 5 aa, synthetic construct
  REGION 1..5: note = Description of Artificial Sequence: Synthetic peptide
  REGION 1..5: note = XENP018266 vhCDR1
NYWMN

SEQ ID NO: 18044 - protein, 19 aa, synthetic construct
  REGION 1..19: note = Description of Artificial Sequence: Synthetic peptide
  REGION 1..19: note = XENP018266 vhCDR2
EIRLKSNNYATHYAEPVKG

SEQ ID NO: 18045 - protein, 11 aa, synthetic construct
  REGION 1..11: note = Description of Artificial Sequence: Synthetic peptide
  REGION 1..11: note = XENP018266 vhCDR3
YYGNYGGYFDV

SEQ ID NO: 18046 - protein, 214 aa, synthetic construct; identical to SEQ ID NO: 16226
  REGION 1..214: note = Description of Artificial Sequence: Synthetic polypeptide
  REGION 1..214: note = XENP018266 1G6_H1.165_L1_IgG1_PVA_/S267K Light Chain

SEQ ID NO: 18047 - protein, 107 aa, synthetic construct; identical to SEQ ID NO: 10923
  REGION 1..107: note = Description of Artificial Sequence: Synthetic polypeptide
  REGION 1..107: note = VL of XENP018266

SEQ ID NO: 18048 - protein, 11 aa, synthetic construct
  REGION 1..11: note = Description of Artificial Sequence: Synthetic peptide
  REGION 1..11: note = XENP018266 vlCDR1
RASQSVSNDVA

SEQ ID NO: 18049 - protein, 7 aa, synthetic construct
  REGION 1..7: note = Description of Artificial Sequence: Synthetic peptide
  REGION 1..7: note = XENP018266 vlCDR2
YASHRYT

SEQ ID NO: 18050 - protein, 9 aa, synthetic construct
  REGION 1..9: note = Description of Artificial Sequence: Synthetic peptide
  REGION 1..9: note = XENP018266 vlCDR3
QQDYSSPRT

SEQ ID NO: 18051 - protein, 451 aa, synthetic construct
  REGION 1..451: note = Description of Artificial Sequence: Synthetic polypeptide
  REGION 1..451: note = XENP018267 1G6_H1.166_L1_IgG1_PVA_/S267K Heavy Chain
EVQLVESGGGLVKPGGSLRLSCAASGFTFSNYWMNWVRQAPGKGLEWVGEIRLKSNNYATHYAEPVKGRFTISRDDSKSTVYLQMNSLKTEDTAVYYCTKYYGNYGGYFDVWGAGTLVTVSSASTKGPSVFPLAPSSKSTSGGTAALGCLVKDYFPEPVTVSWNSGALTSGVHTFPAVLQSSGLYSLSSVVTVPSSSLGTQTYICNVNHKPSNTKVDKKVEPKSCDKTHTCPPCPAPPVAGPSVFLFPPKPKDTLMISRTPEVTCVVVDVKHEDPEVKFNWYVDGVEVHNAKTKPREEQYNSTYRVVSVLTVLHQDWLNGKEYKCKVSNKALPAPIEKTISKAKGQPREPQVYTLPPSREEMTKNQVSLTCLVKGFYPSDIAVEWESNGQPENNYKTTPPVLDSDGSFFLYSKLTVDKSRWQQGNVFSCSVMHEALHNHYTQKSLSLSPGK

SEQ ID NO: 18052 - protein, 122 aa, synthetic construct; identical to SEQ ID NO: 12521
  REGION 1..122: note = Description of Artificial Sequence: Synthetic polypeptide
  REGION 1..122: note = VH of XENP018267

SEQ ID NO: 18053 - protein, 5 aa, synthetic construct
  REGION 1..5: note = Description of Artificial Sequence: Synthetic peptide
  REGION 1..5: note = XENP018267 vhCDR1
NYWMN

SEQ ID NO: 18054 - protein, 19 aa, synthetic construct
  REGION 1..19: note = Description of Artificial Sequence: Synthetic peptide
  REGION 1..19: note = XENP018267 vhCDR2
EIRLKSNNYATHYAEPVKG

SEQ ID NO: 18055 - protein, 11 aa, synthetic construct
  REGION 1..11: note = Description of Artificial Sequence: Synthetic peptide
  REGION 1..11: note = XENP018267 vhCDR3
YYGNYGGYFDV

SEQ ID NO: 18056 - protein, 214 aa, synthetic construct; identical to SEQ ID NO: 16226
  REGION 1..214: note = Description of Artificial Sequence: Synthetic polypeptide
  REGION 1..214: note = XENP018267 1G6_H1.166_L1_IgG1_PVA_/S267K Light Chain

SEQ ID NO: 18057 - protein, 107 aa, synthetic construct; identical to SEQ ID NO: 10923
  REGION 1..107: note = Description of Artificial Sequence: Synthetic polypeptide
  REGION 1..107: note = VL of XENP018267

SEQ ID NO: 18058 - protein, 11 aa, synthetic construct
  REGION 1..11: note = Description of Artificial Sequence: Synthetic peptide
  REGION 1..11: note = XENP018267 vlCDR1
RASQSVSNDVA

SEQ ID NO: 18059 - protein, 7 aa, synthetic construct
  REGION 1..7: note = Description of Artificial Sequence: Synthetic peptide
  REGION 1..7: note = XENP018267 vlCDR2
YASHRYT

SEQ ID NO: 18060 - protein, 9 aa, synthetic construct
  REGION 1..9: note = Description of Artificial Sequence: Synthetic peptide
  REGION 1..9: note = XENP018267 vlCDR3
QQDYSSPRT

SEQ ID NO: 18061 - protein, 451 aa, synthetic construct
  REGION 1..451: note = Description of Artificial Sequence: Synthetic polypeptide
  REGION 1..451: note = XENP018268 1G6_H1.167_L1_IgG1_PVA_/S267K Heavy Chain
EVQLVESGGGLVKPGGSLRLSCAASGFTFSNYWMNWVRQAPGKGLEWVGEIRLKSNNYATHYAEPVKGRFTISRDDSKSTVYLQMNSLKTEDTAVYYCTRFYGNYGGYFDVWGAGTLVTVSSASTKGPSVFPLAPSSKSTSGGTAALGCLVKDYFPEPVTVSWNSGALTSGVHTFPAVLQSSGLYSLSSVVTVPSSSLGTQTYICNVNHKPSNTKVDKKVEPKSCDKTHTCPPCPAPPVAGPSVFLFPPKPKDTLMISRTPEVTCVVVDVKHEDPEVKFNWYVDGVEVHNAKTKPREEQYNSTYRVVSVLTVLHQDWLNGKEYKCKVSNKALPAPIEKTISKAKGQPREPQVYTLPPSREEMTKNQVSLTCLVKGFYPSDIAVEWESNGQPENNYKTTPPVLDSDGSFFLYSKLTVDKSRWQQGNVFSCSVMHEALHNHYTQKSLSLSPGK

SEQ ID NO: 18062 - protein, 122 aa, synthetic construct; identical to SEQ ID NO: 12530
  REGION 1..122: note = Description of Artificial Sequence: Synthetic polypeptide
  REGION 1..122: note = VH of XENP018268

SEQ ID NO: 18063 - protein, 5 aa, synthetic construct
  REGION 1..5: note = Description of Artificial Sequence: Synthetic peptide
  REGION 1..5: note = XENP018268 vhCDR1
NYWMN

SEQ ID NO: 18064 - protein, 19 aa, synthetic construct
  REGION 1..19: note = Description of Artificial Sequence: Synthetic peptide
  REGION 1..19: note = XENP018268 vhCDR2
EIRLKSNNYATHYAEPVKG

SEQ ID NO: 18065 - protein, 11 aa, synthetic construct
  REGION 1..11: note = Description of Artificial Sequence: Synthetic peptide
  REGION 1..11: note = XENP018268 vhCDR3
FYGNYGGYFDV

SEQ ID NO: 18066 - protein, 214 aa, synthetic construct; identical to SEQ ID NO: 16226
  REGION 1..214: note = Description of Artificial Sequence: Synthetic polypeptide
  REGION 1..214: note = XENP018268 1G6_H1.167_L1_IgG1_PVA_/S267K Light Chain

SEQ ID NO: 18067 - protein, 107 aa, synthetic construct; identical to SEQ ID NO: 10923
  REGION 1..107: note = Description of Artificial Sequence: Synthetic polypeptide
  REGION 1..107: note = VL of XENP018268

SEQ ID NO: 18068 - protein, 11 aa, synthetic construct
  REGION 1..11: note = Description of Artificial Sequence: Synthetic peptide
  REGION 1..11: note = XENP018268 vlCDR1
RASQSVSNDVA

SEQ ID NO: 18069 - protein, 7 aa, synthetic construct
  REGION 1..7: note = Description of Artificial Sequence: Synthetic peptide
  REGION 1..7: note = XENP018268 vlCDR2
YASHRYT

SEQ ID NO: 18070 - protein, 9 aa, synthetic construct
  REGION 1..9: note = Description of Artificial Sequence: Synthetic peptide
  REGION 1..9: note = XENP018268 vlCDR3
QQDYSSPRT

SEQ ID NO: 18071 - protein, 451 aa, synthetic construct
  REGION 1..451: note = Description of Artificial Sequence: Synthetic polypeptide
  REGION 1..451: note = XENP018269 1G6_H1.168_L1_IgG1_PVA_/S267K Heavy Chain
EVQLVESGGGLVKPGGSLRLSCAASGFTFSNYWMNWVRQAPGKGLEWVGEIRLKSNNYATHYAEPVKGRFTISRDDSKSTVYLQMNSLKTEDTAVYYCTRHYGNYGGYFDVWGAGTLVTVSSASTKGPSVFPLAPSSKSTSGGTAALGCLVKDYFPEPVTVSWNSGALTSGVHTFPAVLQSSGLYSLSSVVTVPSSSLGTQTYICNVNHKPSNTKVDKKVEPKSCDKTHTCPPCPAPPVAGPSVFLFPPKPKDTLMISRTPEVTCVVVDVKHEDPEVKFNWYVDGVEVHNAKTKPREEQYNSTYRVVSVLTVLHQDWLNGKEYKCKVSNKALPAPIEKTISKAKGQPREPQVYTLPPSREEMTKNQVSLTCLVKGFYPSDIAVEWESNGQPENNYKTTPPVLDSDGSFFLYSKLTVDKSRWQQGNVFSCSVMHEALHNHYTQKSLSLSPGK

SEQ ID NO: 18072 - protein, 122 aa, synthetic construct; identical to SEQ ID NO: 12539
  REGION 1..122: note = Description of Artificial Sequence: Synthetic polypeptide
  REGION 1..122: note = VH of XENP018269

SEQ ID NO: 18073 - protein, 5 aa, synthetic construct
  REGION 1..5: note = Description of Artificial Sequence: Synthetic peptide
  REGION 1..5: note = XENP018269 vhCDR1
NYWMN

SEQ ID NO: 18074 - protein, 19 aa, synthetic construct
  REGION 1..19: note = Description of Artificial Sequence: Synthetic peptide
  REGION 1..19: note = XENP018269 vhCDR2
EIRLKSNNYATHYAEPVKG

SEQ ID NO: 18075 - protein, 11 aa, synthetic construct
  REGION 1..11: note = Description of Artificial Sequence: Synthetic peptide
  REGION 1..11: note = XENP018269 vhCDR3
HYGNYGGYFDV

SEQ ID NO: 18076 - protein, 214 aa, synthetic construct; identical to SEQ ID NO: 16226
  REGION 1..214: note = Description of Artificial Sequence: Synthetic polypeptide
  REGION 1..214: note = XENP018269 1G6_H1.168_L1_IgG1_PVA_/S267K Light Chain

SEQ ID NO: 18077 - protein, 107 aa, synthetic construct; identical to SEQ ID NO: 10923
  REGION 1..107: note = Description of Artificial Sequence: Synthetic polypeptide
  REGION 1..107: note = VL of XENP018269

SEQ ID NO: 18078 - protein, 11 aa, synthetic construct
  REGION 1..11: note = Description of Artificial Sequence: Synthetic peptide
  REGION 1..11: note = XENP018269 vlCDR1
RASQSVSNDVA

SEQ ID NO: 18079 - protein, 7 aa, synthetic construct
  REGION 1..7: note = Description of Artificial Sequence: Synthetic peptide
  REGION 1..7: note = XENP018269 vlCDR2
YASHRYT

SEQ ID NO: 18080 - protein, 9 aa, synthetic construct
  REGION 1..9: note = Description of Artificial Sequence: Synthetic peptide
  REGION 1..9: note = XENP018269 vlCDR3
QQDYSSPRT

SEQ ID NO: 18081 - protein, 451 aa, synthetic construct
  REGION 1..451: note = Description of Artificial Sequence: Synthetic polypeptide
  REGION 1..451: note = XENP018270 1G6_H1.169_L1_IgG1_PVA_/S267K Heavy Chain
EVQLVESGGGLVKPGGSLRLSCAASGFTFSNYWMNWVRQAPGKGLEWVGEIRLKSNNYATHYAEPVKGRFTISRDDSKSTVYLQMNSLKTEDTAVYYCTRLYGNYGGYFDVWGAGTLVTVSSASTKGPSVFPLAPSSKSTSGGTAALGCLVKDYFPEPVTVSWNSGALTSGVHTFPAVLQSSGLYSLSSVVTVPSSSLGTQTYICNVNHKPSNTKVDKKVEPKSCDKTHTCPPCPAPPVAGPSVFLFPPKPKDTLMISRTPEVTCVVVDVKHEDPEVKFNWYVDGVEVHNAKTKPREEQYNSTYRVVSVLTVLHQDWLNGKEYKCKVSNKALPAPIEKTISKAKGQPREPQVYTLPPSREEMTKNQVSLTCLVKGFYPSDIAVEWESNGQPENNYKTTPPVLDSDGSFFLYSKLTVDKSRWQQGNVFSCSVMHEALHNHYTQKSLSLSPGK

SEQ ID NO: 18082 - protein, 122 aa, synthetic construct; identical to SEQ ID NO: 12548
  REGION 1..122: note = Description of Artificial Sequence: Synthetic polypeptide
  REGION 1..122: note = VH of XENP018270

SEQ ID NO: 18083 - protein, 5 aa, synthetic construct
  REGION 1..5: note = Description of Artificial Sequence: Synthetic peptide
  REGION 1..5: note = XENP018270 vhCDR1
NYWMN

SEQ ID NO: 18084 - protein, 19 aa, synthetic construct
  REGION 1..19: note = Description of Artificial Sequence: Synthetic peptide
  REGION 1..19: note = XENP018270 vhCDR2
EIRLKSNNYATHYAEPVKG

SEQ ID NO: 18085 - protein, 11 aa, synthetic construct
  REGION 1..11: note = Description of Artificial Sequence: Synthetic peptide
  REGION 1..11: note = XENP018270 vhCDR3
LYGNYGGYFDV

SEQ ID NO: 18086 - protein, 214 aa, synthetic construct; identical to SEQ ID NO: 16226
  REGION 1..214: note = Description of Artificial Sequence: Synthetic polypeptide
  REGION 1..214: note = XENP018270 1G6_H1.169_L1_IgG1_PVA_/S267K Light Chain

SEQ ID NO: 18087 - protein, 107 aa, synthetic construct; identical to SEQ ID NO: 10923
  REGION 1..107: note = Description of Artificial Sequence: Synthetic polypeptide
  REGION 1..107: note = VL of XENP018270

SEQ ID NO: 18088 - protein, 11 aa, synthetic construct
  REGION 1..11: note = Description of Artificial Sequence: Synthetic peptide
  REGION 1..11: note = XENP018270 vlCDR1
RASQSVSNDVA

SEQ ID NO: 18089 - protein, 7 aa, synthetic construct
  REGION 1..7: note = Description of Artificial Sequence: Synthetic peptide
  REGION 1..7: note = XENP018270 vlCDR2
YASHRYT

SEQ ID NO: 18090 - protein, 9 aa, synthetic construct
  REGION 1..9: note = Description of Artificial Sequence: Synthetic peptide
  REGION 1..9: note = XENP018270 vlCDR3
QQDYSSPRT

SEQ ID NO: 18091 - protein, 451 aa, synthetic construct
  REGION 1..451: note = Description of Artificial Sequence: Synthetic polypeptide
  REGION 1..451: note = XENP018271 1G6_H1.170_L1_IgG1_PVA_/S267K Heavy Chain
EVQLVESGGGLVKPGGSLRLSCAASGFTFSNYWMNWVRQAPGKGLEWVGEIRLKSNNYATHYAEPVKGRFTISRDDSKSTVYLQMNSLKTEDTAVYYCTRWYGNYGGYFDVWGAGTLVTVSSASTKGPSVFPLAPSSKSTSGGTAALGCLVKDYFPEPVTVSWNSGALTSGVHTFPAVLQSSGLYSLSSVVTVPSSSLGTQTYICNVNHKPSNTKVDKKVEPKSCDKTHTCPPCPAPPVAGPSVFLFPPKPKDTLMISRTPEVTCVVVDVKHEDPEVKFNWYVDGVEVHNAKTKPREEQYNSTYRVVSVLTVLHQDWLNGKEYKCKVSNKALPAPIEKTISKAKGQPREPQVYTLPPSREEMTKNQVSLTCLVKGFYPSDIAVEWESNGQPENNYKTTPPVLDSDGSFFLYSKLTVDKSRWQQGNVFSCSVMHEALHNHYTQKSLSLSPGK

SEQ ID NO: 18092 - protein, 122 aa, synthetic construct; identical to SEQ ID NO: 12557
  REGION 1..122: note = Description of Artificial Sequence: Synthetic polypeptide
  REGION 1..122: note = VH of XENP018271

SEQ ID NO: 18093 - protein, 5 aa, synthetic construct
  REGION 1..5: note = Description of Artificial Sequence: Synthetic peptide
  REGION 1..5: note = XENP018271 vhCDR1
NYWMN

SEQ ID NO: 18094 - protein, 19 aa, synthetic construct
  REGION 1..19: note = Description of Artificial Sequence: Synthetic peptide
  REGION 1..19: note = XENP018271 vhCDR2
EIRLKSNNYATHYAEPVKG

SEQ ID NO: 18095 - protein, 11 aa, synthetic construct
  REGION 1..11: note = Description of Artificial Sequence: Synthetic peptide
  REGION 1..11: note = XENP018271 vhCDR3
WYGNYGGYFDV

SEQ ID NO: 18096 - protein, 214 aa, synthetic construct; identical to SEQ ID NO: 16226
  REGION 1..214: note = Description of Artificial Sequence: Synthetic polypeptide
  REGION 1..214: note = XENP018271 1G6_H1.170_L1_IgG1_PVA_/S267K Light Chain

SEQ ID NO: 18097 - protein, 107 aa, synthetic construct; identical to SEQ ID NO: 10923
  REGION 1..107: note = Description of Artificial Sequence: Synthetic polypeptide
  REGION 1..107: note = VL of XENP018271

SEQ ID NO: 18098 - protein, 11 aa, synthetic construct
  REGION 1..11: note = Description of Artificial Sequence: Synthetic peptide
  REGION 1..11: note = XENP018271 vlCDR1
RASQSVSNDVA

SEQ ID NO: 18099 - protein, 7 aa, synthetic construct
  REGION 1..7: note = Description of Artificial Sequence: Synthetic peptide
  REGION 1..7: note = XENP018271 vlCDR2
YASHRYT

SEQ ID NO: 18100 - protein, 9 aa, synthetic construct
  REGION 1..9: note = Description of Artificial Sequence: Synthetic peptide
  REGION 1..9: note = XENP018271 vlCDR3
QQDYSSPRT

SEQ ID NO: 18101 - protein, 451 aa, synthetic construct
  REGION 1..451: note = Description of Artificial Sequence: Synthetic polypeptide
  REGION 1..451: note = XENP018272 1G6_H1.171_L1_IgG1_PVA_/S267K Heavy Chain
EVQLVESGGGLVKPGGSLRLSCAASGFTFSNYWMNWVRQAPGKGLEWVGEIRLKSNNYATHYAEPVKGRFTISRDDSKSTVYLQMNSLKTEDTAVYYCTRVYGNYGGYFDVWGAGTLVTVSSASTKGPSVFPLAPSSKSTSGGTAALGCLVKDYFPEPVTVSWNSGALTSGVHTFPAVLQSSGLYSLSSVVTVPSSSLGTQTYICNVNHKPSNTKVDKKVEPKSCDKTHTCPPCPAPPVAGPSVFLFPPKPKDTLMISRTPEVTCVVVDVKHEDPEVKFNWYVDGVEVHNAKTKPREEQYNSTYRVVSVLTVLHQDWLNGKEYKCKVSNKALPAPIEKTISKAKGQPREPQVYTLPPSREEMTKNQVSLTCLVKGFYPSDIAVEWESNGQPENNYKTTPPVLDSDGSFFLYSKLTVDKSRWQQGNVFSCSVMHEALHNHYTQKSLSLSPGK

SEQ ID NO: 18102 - protein, 122 aa, synthetic construct; identical to SEQ ID NO: 12566
  REGION 1..122: note = Description of Artificial Sequence: Synthetic polypeptide
  REGION 1..122: note = VH of XENP018272

SEQ ID NO: 18103 - protein, 5 aa, synthetic construct
  REGION 1..5: note = Description of Artificial Sequence: Synthetic peptide
  REGION 1..5: note = XENP018272 vhCDR1
NYWMN

SEQ ID NO: 18104 - protein, 19 aa, synthetic construct
  REGION 1..19: note = Description of Artificial Sequence: Synthetic peptide
  REGION 1..19: note = XENP018272 vhCDR2
EIRLKSNNYATHYAEPVKG

SEQ ID NO: 18105 - protein, 11 aa, synthetic construct
  REGION 1..11: note = Description of Artificial Sequence: Synthetic peptide
  REGION 1..11: note = XENP018272 vhCDR3
VYGNYGGYFDV

SEQ ID NO: 18106 - protein, 214 aa, synthetic construct; identical to SEQ ID NO: 16226
  REGION 1..214: note = Description of Artificial Sequence: Synthetic polypeptide
  REGION 1..214: note = XENP018272 1G6_H1.171_L1_IgG1_PVA_/S267K Light Chain

SEQ ID NO: 18107 - protein, 107 aa, synthetic construct; identical to SEQ ID NO: 10923
  REGION 1..107: note = Description of Artificial Sequence: Synthetic polypeptide
  REGION 1..107: note = VL of XENP018272

SEQ ID NO: 18108 - protein, 11 aa, synthetic construct
  REGION 1..11: note = Description of Artificial Sequence: Synthetic peptide
  REGION 1..11: note = XENP018272 vlCDR1
RASQSVSNDVA

SEQ ID NO: 18109 - protein, 7 aa, synthetic construct
  REGION 1..7: note = Description of Artificial Sequence: Synthetic peptide
  REGION 1..7: note = XENP018272 vlCDR2
YASHRYT

SEQ ID NO: 18110 - protein, 9 aa, synthetic construct
  REGION 1..9: note = Description of Artificial Sequence: Synthetic peptide
  REGION 1..9: note = XENP018272 vlCDR3
QQDYSSPRT

SEQ ID NO: 18111 - protein, 451 aa, synthetic construct
  REGION 1..451: note = Description of Artificial Sequence: Synthetic polypeptide
  REGION 1..451: note = XENP018273 1G6_H1.172_L1_IgG1_PVA_/S267K Heavy Chain
EVQLVESGGGLVKPGGSLRLSCAASGFTFSNYWMNWVRQAPGKGLEWVGEIRLKSNNYATHYAEPVKGRFTISRDDSKSTVYLQMNSLKTEDTAVYYCTRAYGNYGGYFDVWGAGTLVTVSSASTKGPSVFPLAPSSKSTSGGTAALGCLVKDYFPEPVTVSWNSGALTSGVHTFPAVLQSSGLYSLSSVVTVPSSSLGTQTYICNVNHKPSNTKVDKKVEPKSCDKTHTCPPCPAPPVAGPSVFLFPPKPKDTLMISRTPEVTCVVVDVKHEDPEVKFNWYVDGVEVHNAKTKPREEQYNSTYRVVSVLTVLHQDWLNGKEYKCKVSNKALPAPIEKTISKAKGQPREPQVYTLPPSREEMTKNQVSLTCLVKGFYPSDIAVEWESNGQPENNYKTTPPVLDSDGSFFLYSKLTVDKSRWQQGNVFSCSVMHEALHNHYTQKSLSLSPGK

SEQ ID NO: 18112 - protein, 122 aa, synthetic construct; identical to SEQ ID NO: 12575
  REGION 1..122: note = Description of Artificial Sequence: Synthetic polypeptide
  REGION 1..122: note = VH of XENP018273

SEQ ID NO: 18113 - protein, 5 aa, synthetic construct
  REGION 1..5: note = Description of Artificial Sequence: Synthetic peptide
  REGION 1..5: note = XENP018273 vhCDR1
NYWMN

SEQ ID NO: 18114 - protein, 19 aa, synthetic construct
  REGION 1..19: note = Description of Artificial Sequence: Synthetic peptide
  REGION 1..19: note = XENP018273 vhCDR2
EIRLKSNNYATHYAEPVKG

SEQ ID NO: 18115 - protein, 11 aa, synthetic construct
  REGION 1..11: note = Description of Artificial Sequence: Synthetic peptide
  REGION 1..11: note = XENP018273 vhCDR3
AYGNYGGYFDV

SEQ ID NO: 18116 - protein, 214 aa, synthetic construct; identical to SEQ ID NO: 16226
  REGION 1..214: note = Description of Artificial Sequence: Synthetic polypeptide
  REGION 1..214: note = XENP018273 1G6_H1.172_L1_IgG1_PVA_/S267K Light Chain

SEQ ID NO: 18117 - protein, 107 aa, synthetic construct; identical to SEQ ID NO: 10923
  REGION 1..107: note = Description of Artificial Sequence: Synthetic polypeptide
  REGION 1..107: note = VL of XENP018273

SEQ ID NO: 18118 - protein, 11 aa, synthetic construct
  REGION 1..11: note = Description of Artificial Sequence: Synthetic peptide
  REGION 1..11: note = XENP018273 vlCDR1
RASQSVSNDVA

SEQ ID NO: 18119 - protein, 7 aa, synthetic construct
  REGION 1..7: note = Description of Artificial Sequence: Synthetic peptide
  REGION 1..7: note = XENP018273 vlCDR2
YASHRYT

SEQ ID NO: 18120 - protein, 9 aa, synthetic construct
  REGION 1..9: note = Description of Artificial Sequence: Synthetic peptide
  REGION 1..9: note = XENP018273 vlCDR3
QQDYSSPRT

SEQ ID NO: 18121 - protein, 451 aa, synthetic construct
  REGION 1..451: note = Description of Artificial Sequence: Synthetic polypeptide
  REGION 1..451: note = XENP018274 1G6_H1.173_L1_IgG1_PVA_/S267K Heavy Chain
EVQLVESGGGLVKPGGSLRLSCAASGFTFSNYWMNWVRQAPGKGLEWVGEIRLKSNNYATHYAEPVKGRFTISRDDSKSTVYLQMNSLKTEDTAVYYCTRQYGNYGGYFDVWGAGTLVTVSSASTKGPSVFPLAPSSKSTSGGTAALGCLVKDYFPEPVTVSWNSGALTSGVHTFPAVLQSSGLYSLSSVVTVPSSSLGTQTYICNVNHKPSNTKVDKKVEPKSCDKTHTCPPCPAPPVAGPSVFLFPPKPKDTLMISRTPEVTCVVVDVKHEDPEVKFNWYVDGVEVHNAKTKPREEQYNSTYRVVSVLTVLHQDWLNGKEYKCKVSNKALPAPIEKTISKAKGQPREPQVYTLPPSREEMTKNQVSLTCLVKGFYPSDIAVEWESNGQPENNYKTTPPVLDSDGSFFLYSKLTVDKSRWQQGNVFSCSVMHEALHNHYTQKSLSLSPGK

SEQ ID NO: 18122 - protein, 122 aa, synthetic construct; identical to SEQ ID NO: 12584
  REGION 1..122: note = Description of Artificial Sequence: Synthetic polypeptide
  REGION 1..122: note = VH of XENP018274

SEQ ID NO: 18123 - protein, 5 aa, synthetic construct
  REGION 1..5: note = Description of Artificial Sequence: Synthetic peptide
  REGION 1..5: note = XENP018274 vhCDR1
NYWMN

SEQ ID NO: 18124 - protein, 19 aa, synthetic construct
  REGION 1..19: note = Description of Artificial Sequence: Synthetic peptide
  REGION 1..19: note = XENP018274 vhCDR2
EIRLKSNNYATHYAEPVKG

SEQ ID NO: 18125 - protein, 11 aa, synthetic construct
  REGION 1..11: note = Description of Artificial Sequence: Synthetic peptide
  REGION 1..11: note = XENP018274 vhCDR3
QYGNYGGYFDV

SEQ ID NO: 18126 - protein, 214 aa, synthetic construct; identical to SEQ ID NO: 16226
  REGION 1..214: note = Description of Artificial Sequence: Synthetic polypeptide
  REGION 1..214: note = XENP018274 1G6_H1.173_L1_IgG1_PVA_/S267K Light Chain

SEQ ID NO: 18127 - protein, 107 aa, synthetic construct; identical to SEQ ID NO: 10923
  REGION 1..107: note = Description of Artificial Sequence: Synthetic polypeptide
  REGION 1..107: note = VL of XENP018274

SEQ ID NO: 18128 - protein, 11 aa, synthetic construct
  REGION 1..11: note = Description of Artificial Sequence: Synthetic peptide
  REGION 1..11: note = XENP018274 vlCDR1
RASQSVSNDVA

SEQ ID NO: 18129 - protein, 7 aa, synthetic construct
  REGION 1..7: note = Description of Artificial Sequence: Synthetic peptide
  REGION 1..7: note = XENP018274 vlCDR2
YASHRYT

SEQ ID NO: 18130 - protein, 9 aa, synthetic construct
  REGION 1..9: note = Description of Artificial Sequence: Synthetic peptide
  REGION 1..9: note = XENP018274 vlCDR3
QQDYSSPRT

SEQ ID NO: 18131 - protein, 451 aa, synthetic construct
  REGION 1..451: note = Description of Artificial Sequence: Synthetic polypeptide
  REGION 1..451: note = XENP018275 1G6_H1.174_L1_IgG1_PVA_/S267K Heavy Chain
EVQLVESGGGLVKPGGSLRLSCAASGFTFSNYWMNWVRQAPGKGLEWVGEIRLKSNNYATHYAEPVKGRFTISRDDSKSTVYLQMNSLKTEDTAVYYCTRDYGNYGGYFDVWGAGTLVTVSSASTKGPSVFPLAPSSKSTSGGTAALGCLVKDYFPEPVTVSWNSGALTSGVHTFPAVLQSSGLYSLSSVVTVPSSSLGTQTYICNVNHKPSNTKVDKKVEPKSCDKTHTCPPCPAPPVAGPSVFLFPPKPKDTLMISRTPEVTCVVVDVKHEDPEVKFNWYVDGVEVHNAKTKPREEQYNSTYRVVSVLTVLHQDWLNGKEYKCKVSNKALPAPIEKTISKAKGQPREPQVYTLPPSREEMTKNQVSLTCLVKGFYPSDIAVEWESNGQPENNYKTTPPVLDSDGSFFLYSKLTVDKSRWQQGNVFSCSVMHEALHNHYTQKSLSLSPGK

SEQ ID NO: 18132 - protein, 122 aa, synthetic construct; identical to SEQ ID NO: 12593
  REGION 1..122: note = Description of Artificial Sequence: Synthetic polypeptide
  REGION 1..122: note = VH of XENP018275

SEQ ID NO: 18133 - protein, 5 aa, synthetic construct
  REGION 1..5: note = Description of Artificial Sequence: Synthetic peptide
  REGION 1..5: note = XENP018275 vhCDR1
NYWMN

SEQ ID NO: 18134 - protein, 19 aa, synthetic construct
  REGION 1..19: note = Description of Artificial Sequence: Synthetic peptide
  REGION 1..19: note = XENP018275 vhCDR2
EIRLKSNNYATHYAEPVKG

SEQ ID NO: 18135 - protein, 11 aa, synthetic construct
  REGION 1..11: note = Description of Artificial Sequence: Synthetic peptide
  REGION 1..11: note = XENP018275 vhCDR3
DYGNYGGYFDV

SEQ ID NO: 18136 - protein, 214 aa, synthetic construct; identical to SEQ ID NO: 16226
  REGION 1..214: note = Description of Artificial Sequence: Synthetic polypeptide
  REGION 1..214: note = XENP018275 1G6_H1.174_L1_IgG1_PVA_/S267K Light Chain

SEQ ID NO: 18137 - protein, 107 aa, synthetic construct; identical to SEQ ID NO: 10923
  REGION 1..107: note = Description of Artificial Sequence: Synthetic polypeptide
  REGION 1..107: note = VL of XENP018275

SEQ ID NO: 18138 - protein, 11 aa, synthetic construct
  REGION 1..11: note = Description of Artificial Sequence: Synthetic peptide
  REGION 1..11: note = XENP018275 vlCDR1
RASQSVSNDVA

SEQ ID NO: 18139 - protein, 7 aa, synthetic construct
  REGION 1..7: note = Description of Artificial Sequence: Synthetic peptide
  REGION 1..7: note = XENP018275 vlCDR2
YASHRYT

SEQ ID NO: 18140 - protein, 9 aa, synthetic construct
  REGION 1..9: note = Description of Artificial Sequence: Synthetic peptide
  REGION 1..9: note = XENP018275 vlCDR3
QQDYSSPRT

SEQ ID NO: 18141 - protein, 451 aa, synthetic construct
  REGION 1..451: note = Description of Artificial Sequence: Synthetic polypeptide
  REGION 1..451: note = XENP018276 1G6_H1.175_L1_IgG1_PVA_/S267K Heavy Chain
EVQLVESGGGLVKPGGSLRLSCAASGFTFSNYWMNWVRQAPGKGLEWVGEIRLKSNNYATHYAEPVKGRFTISRDDSKSTVYLQMNSLKTEDTAVYYCTRKYGNYGGYFDVWGAGTLVTVSSASTKGPSVFPLAPSSKSTSGGTAALGCLVKDYFPEPVTVSWNSGALTSGVHTFPAVLQSSGLYSLSSVVTVPSSSLGTQTYICNVNHKPSNTKVDKKVEPKSCDKTHTCPPCPAPPVAGPSVFLFPPKPKDTLMISRTPEVTCVVVDVKHEDPEVKFNWYVDGVEVHNAKTKPREEQYNSTYRVVSVLTVLHQDWLNGKEYKCKVSNKALPAPIEKTISKAKGQPREPQVYTLPPSREEMTKNQVSLTCLVKGFYPSDIAVEWESNGQPENNYKTTPPVLDSDGSFFLYSKLTVDKSRWQQGNVFSCSVMHEALHNHYTQKSLSLSPGK

SEQ ID NO: 18142 - protein, 122 aa, synthetic construct; identical to SEQ ID NO: 12602
  REGION 1..122: note = Description of Artificial Sequence: Synthetic polypeptide
  REGION 1..122: note = VH of XENP018276

SEQ ID NO: 18143 - protein, 5 aa, synthetic construct
  REGION 1..5: note = Description of Artificial Sequence: Synthetic peptide
  REGION 1..5: note = XENP018276 vhCDR1
NYWMN

SEQ ID NO: 18144 - protein, 19 aa, synthetic construct
  REGION 1..19: note = Description of Artificial Sequence: Synthetic peptide
  REGION 1..19: note = XENP018276 vhCDR2
EIRLKSNNYATHYAEPVKG

SEQ ID NO: 18145 - protein, 11 aa, synthetic construct
  REGION 1..11: note = Description of Artificial Sequence: Synthetic peptide
  REGION 1..11: note = XENP018276 vhCDR3
KYGNYGGYFDV

SEQ ID NO: 18146 - protein, 214 aa, synthetic construct; identical to SEQ ID NO: 16226
  REGION 1..214: note = Description of Artificial Sequence: Synthetic polypeptide
  REGION 1..214: note = XENP018276 1G6_H1.175_L1_IgG1_PVA_/S267K Light Chain

SEQ ID NO: 18147 - protein, 107 aa, synthetic construct; identical to SEQ ID NO: 10923
  REGION 1..107: note = Description of Artificial Sequence: Synthetic polypeptide
  REGION 1..107: note = VL of XENP018276

SEQ ID NO: 18148 - protein, 11 aa, synthetic construct
  REGION 1..11: note = Description of Artificial Sequence: Synthetic peptide
  REGION 1..11: note = XENP018276 vlCDR1
RASQSVSNDVA

SEQ ID NO: 18149 - protein, 7 aa, synthetic construct
  REGION 1..7: note = Description of Artificial Sequence: Synthetic peptide
  REGION 1..7: note = XENP018276 vlCDR2
YASHRYT

SEQ ID NO: 18150 - protein, 9 aa, synthetic construct
  REGION 1..9: note = Description of Artificial Sequence: Synthetic peptide
  REGION 1..9: note = XENP018276 vlCDR3
QQDYSSPRT

SEQ ID NO: 18151 - protein, 451 aa, synthetic construct
  REGION 1..451: note = Description of Artificial Sequence: Synthetic polypeptide
  REGION 1..451: note = XENP018277 1G6_H1.176_L1_IgG1_PVA_/S267K Heavy Chain
EVQLVESGGGLVKPGGSLRLSCAASGFTFSNYWMNWVRQAPGKGLEWVGEIRLKSNNYATHYAEPVKGRFTISRDDSKSTVYLQMNSLKTEDTAVYYCTRYFGNYGGYFDVWGAGTLVTVSSASTKGPSVFPLAPSSKSTSGGTAALGCLVKDYFPEPVTVSWNSGALTSGVHTFPAVLQSSGLYSLSSVVTVPSSSLGTQTYICNVNHKPSNTKVDKKVEPKSCDKTHTCPPCPAPPVAGPSVFLFPPKPKDTLMISRTPEVTCVVVDVKHEDPEVKFNWYVDGVEVHNAKTKPREEQYNSTYRVVSVLTVLHQDWLNGKEYKCKVSNKALPAPIEKTISKAKGQPREPQVYTLPPSREEMTKNQVSLTCLVKGFYPSDIAVEWESNGQPENNYKTTPPVLDSDGSFFLYSKLTVDKSRWQQGNVFSCSVMHEALHNHYTQKSLSLSPGK

SEQ ID NO: 18152 - protein, 122 aa, synthetic construct; identical to SEQ ID NO: 12611
  REGION 1..122: note = Description of Artificial Sequence: Synthetic polypeptide
  REGION 1..122: note = VH of XENP018277

SEQ ID NO: 18153 - protein, 5 aa, synthetic construct
  REGION 1..5: note = Description of Artificial Sequence: Synthetic peptide
  REGION 1..5: note = XENP018277 vhCDR1
NYWMN

SEQ ID NO: 18154 - protein, 19 aa, synthetic construct
  REGION 1..19: note = Description of Artificial Sequence: Synthetic peptide
  REGION 1..19: note = XENP018277 vhCDR2
EIRLKSNNYATHYAEPVKG

SEQ ID NO: 18155 - protein, 11 aa, synthetic construct
  REGION 1..11: note = Description of Artificial Sequence: Synthetic peptide
  REGION 1..11: note = XENP018277 vhCDR3
YFGNYGGYFDV

SEQ ID NO: 18156 - protein, 214 aa, synthetic construct; identical to SEQ ID NO: 16226
  REGION 1..214: note = Description of Artificial Sequence: Synthetic polypeptide
  REGION 1..214: note = XENP018277 1G6_H1.176_L1_IgG1_PVA_/S267K Light Chain

SEQ ID NO: 18157 - protein, 107 aa, synthetic construct; identical to SEQ ID NO: 10923
  REGION 1..107: note = Description of Artificial Sequence: Synthetic polypeptide
  REGION 1..107: note = VL of XENP018277

SEQ ID NO: 18158 - protein, 11 aa, synthetic construct
  REGION 1..11: note = Description of Artificial Sequence: Synthetic peptide
  REGION 1..11: note = XENP018277 vlCDR1
RASQSVSNDVA

SEQ ID NO: 18159 - protein, 7 aa, synthetic construct
  REGION 1..7: note = Description of Artificial Sequence: Synthetic peptide
  REGION 1..7: note = XENP018277 vlCDR2
YASHRYT

SEQ ID NO: 18160 - protein, 9 aa, synthetic construct
  REGION 1..9: note = Description of Artificial Sequence: Synthetic peptide
  REGION 1..9: note = XENP018277 vlCDR3
QQDYSSPRT

SEQ ID NO: 18161 - protein, 451 aa, synthetic construct
  REGION 1..451: note = Description of Artificial Sequence: Synthetic polypeptide
  REGION 1..451: note = XENP018278 1G6_H1.177_L1_IgG1_PVA_/S267K Heavy Chain
EVQLVESGGGLVKPGGSLRLSCAASGFTFSNYWMNWVRQAPGKGLEWVGEIRLKSNNYATHYAEPVKGRFTISRDDSKSTVYLQMNSLKTEDTAVYYCTRYHGNYGGYFDVWGAGTLVTVSSASTKGPSVFPLAPSSKSTSGGTAALGCLVKDYFPEPVTVSWNSGALTSGVHTFPAVLQSSGLYSLSSVVTVPSSSLGTQTYICNVNHKPSNTKVDKKVEPKSCDKTHTCPPCPAPPVAGPSVFLFPPKPKDTLMISRTPEVTCVVVDVKHEDPEVKFNWYVDGVEVHNAKTKPREEQYNSTYRVVSVLTVLHQDWLNGKEYKCKVSNKALPAPIEKTISKAKGQPREPQVYTLPPSREEMTKNQVSLTCLVKGFYPSDIAVEWESNGQPENNYKTTPPVLDSDGSFFLYSKLTVDKSRWQQGNVFSCSVMHEALHNHYTQKSLSLSPGK

SEQ ID NO: 18162 - protein, 122 aa, synthetic construct; identical to SEQ ID NO: 12620
  REGION 1..122: note = Description of Artificial Sequence: Synthetic polypeptide
  REGION 1..122: note = VH of XENP018278

SEQ ID NO: 18163 - protein, 5 aa, synthetic construct
  REGION 1..5: note = Description of Artificial Sequence: Synthetic peptide
  REGION 1..5: note = XENP018278 vhCDR1
NYWMN

SEQ ID NO: 18164 - protein, 19 aa, synthetic construct
  REGION 1..19: note = Description of Artificial Sequence: Synthetic peptide
  REGION 1..19: note = XENP018278 vhCDR2
EIRLKSNNYATHYAEPVKG

SEQ ID NO: 18165 - protein, 11 aa, synthetic construct
  REGION 1..11: note = Description of Artificial Sequence: Synthetic peptide
  REGION 1..11: note = XENP018278 vhCDR3
YHGNYGGYFDV

SEQ ID NO: 18166 - protein, 214 aa, synthetic construct; identical to SEQ ID NO: 16226
  REGION 1..214: note = Description of Artificial Sequence: Synthetic polypeptide
  REGION 1..214: note = XENP018278 1G6_H1.177_L1_IgG1_PVA_/S267K Light Chain

SEQ ID NO: 18167 - protein, 107 aa, synthetic construct; identical to SEQ ID NO: 10923
  REGION 1..107: note = Description of Artificial Sequence: Synthetic polypeptide
  REGION 1..107: note = VL of XENP018278

SEQ ID NO: 18168 - protein, 11 aa, synthetic construct
  REGION 1..11: note = Description of Artificial Sequence: Synthetic peptide
  REGION 1..11: note = XENP018278 vlCDR1
RASQSVSNDVA

SEQ ID NO: 18169 - protein, 7 aa, synthetic construct
  REGION 1..7: note = Description of Artificial Sequence: Synthetic peptide
  REGION 1..7: note = XENP018278 vlCDR2
YASHRYT

SEQ ID NO: 18170 - protein, 9 aa, synthetic construct
  REGION 1..9: note = Description of Artificial Sequence: Synthetic peptide
  REGION 1..9: note = XENP018278 vlCDR3
QQDYSSPRT

SEQ ID NO: 18171 - protein, 451 aa, synthetic construct
  REGION 1..451: note = Description of Artificial Sequence: Synthetic polypeptide
  REGION 1..451: note = XENP018279 1G6_H1.178_L1_IgG1_PVA_/S267K Heavy Chain
EVQLVESGGGLVKPGGSLRLSCAASGFTFSNYWMNWVRQAPGKGLEWVGEIRLKSNNYATHYAEPVKGRFTISRDDSKSTVYLQMNSLKTEDTAVYYCTRYLGNYGGYFDVWGAGTLVTVSSASTKGPSVFPLAPSSKSTSGGTAALGCLVKDYFPEPVTVSWNSGALTSGVHTFPAVLQSSGLYSLSSVVTVPSSSLGTQTYICNVNHKPSNTKVDKKVEPKSCDKTHTCPPCPAPPVAGPSVFLFPPKPKDTLMISRTPEVTCVVVDVKHEDPEVKFNWYVDGVEVHNAKTKPREEQYNSTYRVVSVLTVLHQDWLNGKEYKCKVSNKALPAPIEKTISKAKGQPREPQVYTLPPSREEMTKNQVSLTCLVKGFYPSDIAVEWESNGQPENNYKTTPPVLDSDGSFFLYSKLTVDKSRWQQGNVFSCSVMHEALHNHYTQKSLSLSPGK

SEQ ID NO: 18172 - protein, 122 aa, synthetic construct; identical to SEQ ID NO: 12629
  REGION 1..122: note = Description of Artificial Sequence: Synthetic polypeptide
  REGION 1..122: note = VH of XENP018279

SEQ ID NO: 18173 - protein, 5 aa, synthetic construct
  REGION 1..5: note = Description of Artificial Sequence: Synthetic peptide
  REGION 1..5: note = XENP018279 vhCDR1
NYWMN

SEQ ID NO: 18174 - protein, 19 aa, synthetic construct
  REGION 1..19: note = Description of Artificial Sequence: Synthetic peptide
  REGION 1..19: note = XENP018279 vhCDR2
EIRLKSNNYATHYAEPVKG

SEQ ID NO: 18175 - protein, 11 aa, synthetic construct
  REGION 1..11: note = Description of Artificial Sequence: Synthetic peptide
  REGION 1..11: note = XENP018279 vhCDR3
YLGNYGGYFDV

SEQ ID NO: 18176 - protein, 214 aa, synthetic construct; identical to SEQ ID NO: 16226
  REGION 1..214: note = Description of Artificial Sequence: Synthetic polypeptide
  REGION 1..214: note = XENP018279 1G6_H1.178_L1_IgG1_PVA_/S267K Light Chain

SEQ ID NO: 18177 - protein, 107 aa, synthetic construct; identical to SEQ ID NO: 10923
  REGION 1..107: note = Description of Artificial Sequence: Synthetic polypeptide
  REGION 1..107: note = VL of XENP018279

SEQ ID NO: 18178 - protein, 11 aa, synthetic construct
  REGION 1..11: note = Description of Artificial Sequence: Synthetic peptide
  REGION 1..11: note = XENP018279 vlCDR1
RASQSVSNDVA

SEQ ID NO: 18179 - protein, 7 aa, synthetic construct
  REGION 1..7: note = Description of Artificial Sequence: Synthetic peptide
  REGION 1..7: note = XENP018279 vlCDR2
YASHRYT

SEQ ID NO: 18180 - protein, 9 aa, synthetic construct
  REGION 1..9: note = Description of Artificial Sequence: Synthetic peptide
  REGION 1..9: note = XENP018279 vlCDR3
QQDYSSPRT

SEQ ID NO: 18181 - protein, 451 aa, synthetic construct
  REGION 1..451: note = Description of Artificial Sequence: Synthetic polypeptide
  REGION 1..451: note = XENP018280 1G6_H1.179_L1_IgG1_PVA_/S267K Heavy Chain
EVQLVESGGGLVKPGGSLRLSCAASGFTFSNYWMNWVRQAPGKGLEWVGEIRLKSNNYATHYAEPVKGRFTISRDDSKSTVYLQMNSLKTEDTAVYYCTRYWGNYGGYFDVWGAGTLVTVSSASTKGPSVFPLAPSSKSTSGGTAALGCLVKDYFPEPVTVSWNSGALTSGVHTFPAVLQSSGLYSLSSVVTVPSSSLGTQTYICNVNHKPSNTKVDKKVEPKSCDKTHTCPPCPAPPVAGPSVFLFPPKPKDTLMISRTPEVTCVVVDVKHEDPEVKFNWYVDGVEVHNAKTKPREEQYNSTYRVVSVLTVLHQDWLNGKEYKCKVSNKALPAPIEKTISKAKGQPREPQVYTLPPSREEMTKNQVSLTCLVKGFYPSDIAVEWESNGQPENNYKTTPPVLDSDGSFFLYSKLTVDKSRWQQGNVFSCSVMHEALHNHYTQKSLSLSPGK

SEQ ID NO: 18182 - protein, 122 aa, synthetic construct; identical to SEQ ID NO: 12638
  REGION 1..122: note = Description of Artificial Sequence: Synthetic polypeptide
  REGION 1..122: note = VH of XENP018280

SEQ ID NO: 18183 - protein, 5 aa, synthetic construct
  REGION 1..5: note = Description of Artificial Sequence: Synthetic peptide
  REGION 1..5: note = XENP018280 vhCDR1
NYWMN

SEQ ID NO: 18184 - protein, 19 aa, synthetic construct
  REGION 1..19: note = Description of Artificial Sequence: Synthetic peptide
  REGION 1..19: note = XENP018280 vhCDR2
EIRLKSNNYATHYAEPVKG

SEQ ID NO: 18185 - protein, 11 aa, synthetic construct
  REGION 1..11: note = Description of Artificial Sequence: Synthetic peptide
  REGION 1..11: note = XENP018280 vhCDR3
YWGNYGGYFDV

SEQ ID NO: 18186 - protein, 214 aa, synthetic construct; identical to SEQ ID NO: 16226
  REGION 1..214: note = Description of Artificial Sequence: Synthetic polypeptide
  REGION 1..214: note = XENP018280 1G6_H1.179_L1_IgG1_PVA_/S267K Light Chain

SEQ ID NO: 18187 - protein, 107 aa, synthetic construct; identical to SEQ ID NO: 10923
  REGION 1..107: note = Description of Artificial Sequence: Synthetic polypeptide
  REGION 1..107: note = VL of XENP018280

SEQ ID NO: 18188 - protein, 11 aa, synthetic construct
  REGION 1..11: note = Description of Artificial Sequence: Synthetic peptide
  REGION 1..11: note = XENP018280 vlCDR1
RASQSVSNDVA

SEQ ID NO: 18189 - protein, 7 aa, synthetic construct
  REGION 1..7: note = Description of Artificial Sequence: Synthetic peptide
  REGION 1..7: note = XENP018280 vlCDR2
YASHRYT

SEQ ID NO: 18190 - protein, 9 aa, synthetic construct
  REGION 1..9: note = Description of Artificial Sequence: Synthetic peptide
  REGION 1..9: note = XENP018280 vlCDR3
QQDYSSPRT

SEQ ID NO: 18191 - protein, 451 aa, synthetic construct
  REGION 1..451: note = Description of Artificial Sequence: Synthetic polypeptide
  REGION 1..451: note = XENP018281 1G6_H1.180_L1_IgG1_PVA_/S267K Heavy Chain
EVQLVESGGGLVKPGGSLRLSCAASGFTFSNYWMNWVRQAPGKGLEWVGEIRLKSNNYATHYAEPVKGRFTISRDDSKSTVYLQMNSLKTEDTAVYYCTRYVGNYGGYFDVWGAGTLVTVSSASTKGPSVFPLAPSSKSTSGGTAALGCLVKDYFPEPVTVSWNSGALTSGVHTFPAVLQSSGLYSLSSVVTVPSSSLGTQTYICNVNHKPSNTKVDKKVEPKSCDKTHTCPPCPAPPVAGPSVFLFPPKPKDTLMISRTPEVTCVVVDVKHEDPEVKFNWYVDGVEVHNAKTKPREEQYNSTYRVVSVLTVLHQDWLNGKEYKCKVSNKALPAPIEKTISKAKGQPREPQVYTLPPSREEMTKNQVSLTCLVKGFYPSDIAVEWESNGQPENNYKTTPPVLDSDGSFFLYSKLTVDKSRWQQGNVFSCSVMHEALHNHYTQKSLSLSPGK

SEQ ID NO: 18192 - protein, 122 aa, synthetic construct; identical to SEQ ID NO: 12647
  REGION 1..122: note = Description of Artificial Sequence: Synthetic polypeptide
  REGION 1..122: note = VH of XENP018281

SEQ ID NO: 18193 - protein, 5 aa, synthetic construct
  REGION 1..5: note = Description of Artificial Sequence: Synthetic peptide
  REGION 1..5: note = XENP018281 vhCDR1
NYWMN

SEQ ID NO: 18194 - protein, 19 aa, synthetic construct
  REGION 1..19: note = Description of Artificial Sequence: Synthetic peptide
  REGION 1..19: note = XENP018281 vhCDR2
EIRLKSNNYATHYAEPVKG

SEQ ID NO: 18195 - protein, 11 aa, synthetic construct
  REGION 1..11: note = Description of Artificial Sequence: Synthetic peptide
  REGION 1..11: note = XENP018281 vhCDR3
YVGNYGGYFDV

SEQ ID NO: 18196 - protein, 214 aa, synthetic construct; identical to SEQ ID NO: 16226
  REGION 1..214: note = Description of Artificial Sequence: Synthetic polypeptide
  REGION 1..214: note = XENP018281 1G6_H1.180_L1_IgG1_PVA_/S267K Light Chain

SEQ ID NO: 18197 - protein, 107 aa, synthetic construct; identical to SEQ ID NO: 10923
  REGION 1..107: note = Description of Artificial Sequence: Synthetic polypeptide
  REGION 1..107: note = VL of XENP018281

SEQ ID NO: 18198 - protein, 11 aa, synthetic construct
  REGION 1..11: note = Description of Artificial Sequence: Synthetic peptide
  REGION 1..11: note = XENP018281 vlCDR1
RASQSVSNDVA

SEQ ID NO: 18199 - protein, 7 aa, synthetic construct
  REGION 1..7: note = Description of Artificial Sequence: Synthetic peptide
  REGION 1..7: note = XENP018281 vlCDR2
YASHRYT

SEQ ID NO: 18200 - protein, 9 aa, synthetic construct
  REGION 1..9: note = Description of Artificial Sequence: Synthetic peptide
  REGION 1..9: note = XENP018281 vlCDR3
QQDYSSPRT

SEQ ID NO: 18201 - protein, 451 aa, synthetic construct
  REGION 1..451: note = Description of Artificial Sequence: Synthetic polypeptide
  REGION 1..451: note = XENP018282 1G6_H1.181_L1_IgG1_PVA_/S267K Heavy Chain
EVQLVESGGGLVKPGGSLRLSCAASGFTFSNYWMNWVRQAPGKGLEWVGEIRLKSNNYATHYAEPVKGRFTISRDDSKSTVYLQMNSLKTEDTAVYYCTRYAGNYGGYFDVWGAGTLVTVSSASTKGPSVFPLAPSSKSTSGGTAALGCLVKDYFPEPVTVSWNSGALTSGVHTFPAVLQSSGLYSLSSVVTVPSSSLGTQTYICNVNHKPSNTKVDKKVEPKSCDKTHTCPPCPAPPVAGPSVFLFPPKPKDTLMISRTPEVTCVVVDVKHEDPEVKFNWYVDGVEVHNAKTKPREEQYNSTYRVVSVLTVLHQDWLNGKEYKCKVSNKALPAPIEKTISKAKGQPREPQVYTLPPSREEMTKNQVSLTCLVKGFYPSDIAVEWESNGQPENNYKTTPPVLDSDGSFFLYSKLTVDKSRWQQGNVFSCSVMHEALHNHYTQKSLSLSPGK

SEQ ID NO: 18202 - protein, 122 aa, synthetic construct; identical to SEQ ID NO: 12656
  REGION 1..122: note = Description of Artificial Sequence: Synthetic polypeptide
  REGION 1..122: note = VH of XENP018282

SEQ ID NO: 18203 - protein, 5 aa, synthetic construct
  REGION 1..5: note = Description of Artificial Sequence: Synthetic peptide
  REGION 1..5: note = XENP018282 vhCDR1
NYWMN

SEQ ID NO: 18204 - protein, 19 aa, synthetic construct
  REGION 1..19: note = Description of Artificial Sequence: Synthetic peptide
  REGION 1..19: note = XENP018282 vhCDR2
EIRLKSNNYATHYAEPVKG

SEQ ID NO: 18205 - protein, 11 aa, synthetic construct
  REGION 1..11: note = Description of Artificial Sequence: Synthetic peptide
  REGION 1..11: note = XENP018282 vhCDR3
YAGNYGGYFDV

SEQ ID NO: 18206 - protein, 214 aa, synthetic construct; identical to SEQ ID NO: 16226
  REGION 1..214: note = Description of Artificial Sequence: Synthetic polypeptide
  REGION 1..214: note = XENP018282 1G6_H1.181_L1_IgG1_PVA_/S267K Light Chain

SEQ ID NO: 18207 - protein, 107 aa, synthetic construct; identical to SEQ ID NO: 10923
  REGION 1..107: note = Description of Artificial Sequence: Synthetic polypeptide
  REGION 1..107: note = VL of XENP018282

SEQ ID NO: 18208 - protein, 11 aa, synthetic construct
  REGION 1..11: note = Description of Artificial Sequence: Synthetic peptide
  REGION 1..11: note = XENP018282 vlCDR1
RASQSVSNDVA

SEQ ID NO: 18209 - protein, 7 aa, synthetic construct
  REGION 1..7: note = Description of Artificial Sequence: Synthetic peptide
  REGION 1..7: note = XENP018282 vlCDR2
YASHRYT

SEQ ID NO: 18210 - protein, 9 aa, synthetic construct
  REGION 1..9: note = Description of Artificial Sequence: Synthetic peptide
  REGION 1..9: note = XENP018282 vlCDR3
QQDYSSPRT

SEQ ID NO: 18211 - protein, 451 aa, synthetic construct
  REGION 1..451: note = Description of Artificial Sequence: Synthetic polypeptide
  REGION 1..451: note = XENP018283 1G6_H1.182_L1_IgG1_PVA_/S267K Heavy Chain
EVQLVESGGGLVKPGGSLRLSCAASGFTFSNYWMNWVRQAPGKGLEWVGEIRLKSNNYATHYAEPVKGRFTISRDDSKSTVYLQMNSLKTEDTAVYYCTRYQGNYGGYFDVWGAGTLVTVSSASTKGPSVFPLAPSSKSTSGGTAALGCLVKDYFPEPVTVSWNSGALTSGVHTFPAVLQSSGLYSLSSVVTVPSSSLGTQTYICNVNHKPSNTKVDKKVEPKSCDKTHTCPPCPAPPVAGPSVFLFPPKPKDTLMISRTPEVTCVVVDVKHEDPEVKFNWYVDGVEVHNAKTKPREEQYNSTYRVVSVLTVLHQDWLNGKEYKCKVSNKALPAPIEKTISKAKGQPREPQVYTLPPSREEMTKNQVSLTCLVKGFYPSDIAVEWESNGQPENNYKTTPPVLDSDGSFFLYSKLTVDKSRWQQGNVFSCSVMHEALHNHYTQKSLSLSPGK

SEQ ID NO: 18212 - protein, 122 aa, synthetic construct; identical to SEQ ID NO: 12665
  REGION 1..122: note = Description of Artificial Sequence: Synthetic polypeptide
  REGION 1..122: note = VH of XENP018283

SEQ ID NO: 18213 - protein, 5 aa, synthetic construct
  REGION 1..5: note = Description of Artificial Sequence: Synthetic peptide
  REGION 1..5: note = XENP018283 vhCDR1
NYWMN

SEQ ID NO: 18214 - protein, 19 aa, synthetic construct
  REGION 1..19: note = Description of Artificial Sequence: Synthetic peptide
  REGION 1..19: note = XENP018283 vhCDR2
EIRLKSNNYATHYAEPVKG

SEQ ID NO: 18215 - protein, 11 aa, synthetic construct
  REGION 1..11: note = Description of Artificial Sequence: Synthetic peptide
  REGION 1..11: note = XENP018283 vhCDR3
YQGNYGGYFDV

SEQ ID NO: 18216 - protein, 214 aa, synthetic construct; identical to SEQ ID NO: 16226
  REGION 1..214: note = Description of Artificial Sequence: Synthetic polypeptide
  REGION 1..214: note = XENP018283 1G6_H1.182_L1_IgG1_PVA_/S267K Light Chain

SEQ ID NO: 18217 - protein, 107 aa, synthetic construct; identical to SEQ ID NO: 10923
  REGION 1..107: note = Description of Artificial Sequence: Synthetic polypeptide
  REGION 1..107: note = VL of XENP018283

SEQ ID NO: 18218 - protein, 11 aa, synthetic construct
  REGION 1..11: note = Description of Artificial Sequence: Synthetic peptide
  REGION 1..11: note = XENP018283 vlCDR1
RASQSVSNDVA

SEQ ID NO: 18219 - protein, 7 aa, synthetic construct
  REGION 1..7: note = Description of Artificial Sequence: Synthetic peptide
  REGION 1..7: note = XENP018283 vlCDR2
YASHRYT

SEQ ID NO: 18220 - protein, 9 aa, synthetic construct
  REGION 1..9: note = Description of Artificial Sequence: Synthetic peptide
  REGION 1..9: note = XENP018283 vlCDR3
QQDYSSPRT

SEQ ID NO: 18221 - protein, 451 aa, synthetic construct
  REGION 1..451: note = Description of Artificial Sequence: Synthetic polypeptide
  REGION 1..451: note = XENP018284 1G6_H1.183_L1_IgG1_PVA_/S267K Heavy Chain
EVQLVESGGGLVKPGGSLRLSCAASGFTFSNYWMNWVRQAPGKGLEWVGEIRLKSNNYATHYAEPVKGRFTISRDDSKSTVYLQMNSLKTEDTAVYYCTRYDGNYGGYFDVWGAGTLVTVSSASTKGPSVFPLAPSSKSTSGGTAALGCLVKDYFPEPVTVSWNSGALTSGVHTFPAVLQSSGLYSLSSVVTVPSSSLGTQTYICNVNHKPSNTKVDKKVEPKSCDKTHTCPPCPAPPVAGPSVFLFPPKPKDTLMISRTPEVTCVVVDVKHEDPEVKFNWYVDGVEVHNAKTKPREEQYNSTYRVVSVLTVLHQDWLNGKEYKCKVSNKALPAPIEKTISKAKGQPREPQVYTLPPSREEMTKNQVSLTCLVKGFYPSDIAVEWESNGQPENNYKTTPPVLDSDGSFFLYSKLTVDKSRWQQGNVFSCSVMHEALHNHYTQKSLSLSPGK

SEQ ID NO: 18222 - protein, 122 aa, synthetic construct; identical to SEQ ID NO: 12674
  REGION 1..122: note = Description of Artificial Sequence: Synthetic polypeptide
  REGION 1..122: note = VH of XENP018284

SEQ ID NO: 18223 - protein, 5 aa, synthetic construct
  REGION 1..5: note = Description of Artificial Sequence: Synthetic peptide
  REGION 1..5: note = XENP018284 vhCDR1
NYWMN

SEQ ID NO: 18224 - protein, 19 aa, synthetic construct
  REGION 1..19: note = Description of Artificial Sequence: Synthetic peptide
  REGION 1..19: note = XENP018284 vhCDR2
EIRLKSNNYATHYAEPVKG

SEQ ID NO: 18225 - protein, 11 aa, synthetic construct
  REGION 1..11: note = Description of Artificial Sequence: Synthetic peptide
  REGION 1..11: note = XENP018284 vhCDR3
YDGNYGGYFDV

SEQ ID NO: 18226 - protein, 214 aa, synthetic construct; identical to SEQ ID NO: 16226
  REGION 1..214: note = Description of Artificial Sequence: Synthetic polypeptide
  REGION 1..214: note = XENP018284 1G6_H1.183_L1_IgG1_PVA_/S267K Light Chain

SEQ ID NO: 18227 - protein, 107 aa, synthetic construct; identical to SEQ ID NO: 10923
  REGION 1..107: note = Description of Artificial Sequence: Synthetic polypeptide
  REGION 1..107: note = VL of XENP018284

SEQ ID NO: 18228 - protein, 11 aa, synthetic construct
  REGION 1..11: note = Description of Artificial Sequence: Synthetic peptide
  REGION 1..11: note = XENP018284 vlCDR1
RASQSVSNDVA

SEQ ID NO: 18229 - protein, 7 aa, synthetic construct
  REGION 1..7: note = Description of Artificial Sequence: Synthetic peptide
  REGION 1..7: note = XENP018284 vlCDR2
YASHRYT

SEQ ID NO: 18230 - protein, 9 aa, synthetic construct
  REGION 1..9: note = Description of Artificial Sequence: Synthetic peptide
  REGION 1..9: note = XENP018284 vlCDR3
QQDYSSPRT

SEQ ID NO: 18231 - protein, 451 aa, synthetic construct
  REGION 1..451: note = Description of Artificial Sequence: Synthetic polypeptide
  REGION 1..451: note = XENP018285 1G6_H1.184_L1_IgG1_PVA_/S267K Heavy Chain
EVQLVESGGGLVKPGGSLRLSCAASGFTFSNYWMNWVRQAPGKGLEWVGEIRLKSNNYATHYAEPVKGRFTISRDDSKSTVYLQMNSLKTEDTAVYYCTRYKGNYGGYFDVWGAGTLVTVSSASTKGPSVFPLAPSSKSTSGGTAALGCLVKDYFPEPVTVSWNSGALTSGVHTFPAVLQSSGLYSLSSVVTVPSSSLGTQTYICNVNHKPSNTKVDKKVEPKSCDKTHTCPPCPAPPVAGPSVFLFPPKPKDTLMISRTPEVTCVVVDVKHEDPEVKFNWYVDGVEVHNAKTKPREEQYNSTYRVVSVLTVLHQDWLNGKEYKCKVSNKALPAPIEKTISKAKGQPREPQVYTLPPSREEMTKNQVSLTCLVKGFYPSDIAVEWESNGQPENNYKTTPPVLDSDGSFFLYSKLTVDKSRWQQGNVFSCSVMHEALHNHYTQKSLSLSPGK

SEQ ID NO: 18232 - protein, 122 aa, synthetic construct; identical to SEQ ID NO: 12683
  REGION 1..122: note = Description of Artificial Sequence: Synthetic polypeptide
  REGION 1..122: note = VH of XENP018285

SEQ ID NO: 18233 - protein, 5 aa, synthetic construct
  REGION 1..5: note = Description of Artificial Sequence: Synthetic peptide
  REGION 1..5: note = XENP018285 vhCDR1
NYWMN

SEQ ID NO: 18234 - protein, 19 aa, synthetic construct
  REGION 1..19: note = Description of Artificial Sequence: Synthetic peptide
  REGION 1..19: note = XENP018285 vhCDR2
EIRLKSNNYATHYAEPVKG

SEQ ID NO: 18235 - protein, 11 aa, synthetic construct
  REGION 1..11: note = Description of Artificial Sequence: Synthetic peptide
  REGION 1..11: note = XENP018285 vhCDR3
YKGNYGGYFDV

SEQ ID NO: 18236 - protein, 214 aa, synthetic construct; identical to SEQ ID NO: 16226
  REGION 1..214: note = Description of Artificial Sequence: Synthetic polypeptide
  REGION 1..214: note = XENP018285 1G6_H1.184_L1_IgG1_PVA_/S267K Light Chain

SEQ ID NO: 18237 - protein, 107 aa, synthetic construct; identical to SEQ ID NO: 10923
  REGION 1..107: note = Description of Artificial Sequence: Synthetic polypeptide
  REGION 1..107: note = VL of XENP018285

SEQ ID NO: 18238 - protein, 11 aa, synthetic construct
  REGION 1..11: note = Description of Artificial Sequence: Synthetic peptide
  REGION 1..11: note = XENP018285 vlCDR1
RASQSVSNDVA

SEQ ID NO: 18239 - protein, 7 aa, synthetic construct
  REGION 1..7: note = Description of Artificial Sequence: Synthetic peptide
  REGION 1..7: note = XENP018285 vlCDR2
YASHRYT

SEQ ID NO: 18240 - protein, 9 aa, synthetic construct
  REGION 1..9: note = Description of Artificial Sequence: Synthetic peptide
  REGION 1..9: note = XENP018285 vlCDR3
QQDYSSPRT

SEQ ID NO: 18241 - protein, 451 aa, synthetic construct
  REGION 1..451: note = Description of Artificial Sequence: Synthetic polypeptide
  REGION 1..451: note = XENP018286 1G6_H1.185_L1_IgG1_PVA_/S267K Heavy Chain
EVQLVESGGGLVKPGGSLRLSCAASGFTFSNYWMNWVRQAPGKGLEWVGEIRLKSNNYATHYAEPVKGRFTISRDDSKSTVYLQMNSLKTEDTAVYYCTRYYANYGGYFDVWGAGTLVTVSSASTKGPSVFPLAPSSKSTSGGTAALGCLVKDYFPEPVTVSWNSGALTSGVHTFPAVLQSSGLYSLSSVVTVPSSSLGTQTYICNVNHKPSNTKVDKKVEPKSCDKTHTCPPCPAPPVAGPSVFLFPPKPKDTLMISRTPEVTCVVVDVKHEDPEVKFNWYVDGVEVHNAKTKPREEQYNSTYRVVSVLTVLHQDWLNGKEYKCKVSNKALPAPIEKTISKAKGQPREPQVYTLPPSREEMTKNQVSLTCLVKGFYPSDIAVEWESNGQPENNYKTTPPVLDSDGSFFLYSKLTVDKSRWQQGNVFSCSVMHEALHNHYTQKSLSLSPGK

SEQ ID NO: 18242 - protein, 122 aa, synthetic construct; identical to SEQ ID NO: 12692
  REGION 1..122: note = Description of Artificial Sequence: Synthetic polypeptide
  REGION 1..122: note = VH of XENP018286

SEQ ID NO: 18243 - protein, 5 aa, synthetic construct
  REGION 1..5: note = Description of Artificial Sequence: Synthetic peptide
  REGION 1..5: note = XENP018286 vhCDR1
NYWMN

SEQ ID NO: 18244 - protein, 19 aa, synthetic construct
  REGION 1..19: note = Description of Artificial Sequence: Synthetic peptide
  REGION 1..19: note = XENP018286 vhCDR2
EIRLKSNNYATHYAEPVKG

SEQ ID NO: 18245 - protein, 11 aa, synthetic construct
  REGION 1..11: note = Description of Artificial Sequence: Synthetic peptide
  REGION 1..11: note = XENP018286 vhCDR3
YYANYGGYFDV

SEQ ID NO: 18246 - protein, 214 aa, synthetic construct; identical to SEQ ID NO: 16226
  REGION 1..214: note = Description of Artificial Sequence: Synthetic polypeptide
  REGION 1..214: note = XENP018286 1G6_H1.185_L1_IgG1_PVA_/S267K Light Chain

SEQ ID NO: 18247 - protein, 107 aa, synthetic construct; identical to SEQ ID NO: 10923
  REGION 1..107: note = Description of Artificial Sequence: Synthetic polypeptide
  REGION 1..107: note = VL of XENP018286

SEQ ID NO: 18248 - protein, 11 aa, synthetic construct
  REGION 1..11: note = Description of Artificial Sequence: Synthetic peptide
  REGION 1..11: note = XENP018286 vlCDR1
RASQSVSNDVA

SEQ ID NO: 18249 - protein, 7 aa, synthetic construct
  REGION 1..7: note = Description of Artificial Sequence: Synthetic peptide
  REGION 1..7: note = XENP018286 vlCDR2
YASHRYT

SEQ ID NO: 18250 - protein, 9 aa, synthetic construct
  REGION 1..9: note = Description of Artificial Sequence: Synthetic peptide
  REGION 1..9: note = XENP018286 vlCDR3
QQDYSSPRT

SEQ ID NO: 18251 - protein, 451 aa, synthetic construct
  REGION 1..451: note = Description of Artificial Sequence: Synthetic polypeptide
  REGION 1..451: note = XENP018287 1G6_H1.186_L1_IgG1_PVA_/S267K Heavy Chain
EVQLVESGGGLVKPGGSLRLSCAASGFTFSNYWMNWVRQAPGKGLEWVGEIRLKSNNYATHYAEPVKGRFTISRDDSKSTVYLQMNSLKTEDTAVYYCTRYYSNYGGYFDVWGAGTLVTVSSASTKGPSVFPLAPSSKSTSGGTAALGCLVKDYFPEPVTVSWNSGALTSGVHTFPAVLQSSGLYSLSSVVTVPSSSLGTQTYICNVNHKPSNTKVDKKVEPKSCDKTHTCPPCPAPPVAGPSVFLFPPKPKDTLMISRTPEVTCVVVDVKHEDPEVKFNWYVDGVEVHNAKTKPREEQYNSTYRVVSVLTVLHQDWLNGKEYKCKVSNKALPAPIEKTISKAKGQPREPQVYTLPPSREEMTKNQVSLTCLVKGFYPSDIAVEWESNGQPENNYKTTPPVLDSDGSFFLYSKLTVDKSRWQQGNVFSCSVMHEALHNHYTQKSLSLSPGK

SEQ ID NO: 18252 - protein, 122 aa, synthetic construct; identical to SEQ ID NO: 12701
  REGION 1..122: note = Description of Artificial Sequence: Synthetic polypeptide
  REGION 1..122: note = VH of XENP018287

SEQ ID NO: 18253 - protein, 5 aa, synthetic construct
  REGION 1..5: note = Description of Artificial Sequence: Synthetic peptide
  REGION 1..5: note = XENP018287 vhCDR1
NYWMN

SEQ ID NO: 18254 - protein, 19 aa, synthetic construct
  REGION 1..19: note = Description of Artificial Sequence: Synthetic peptide
  REGION 1..19: note = XENP018287 vhCDR2
EIRLKSNNYATHYAEPVKG

SEQ ID NO: 18255 - protein, 11 aa, synthetic construct
  REGION 1..11: note = Description of Artificial Sequence: Synthetic peptide
  REGION 1..11: note = XENP018287 vhCDR3
YYSNYGGYFDV

SEQ ID NO: 18256 - protein, 214 aa, synthetic construct; identical to SEQ ID NO: 16226
  REGION 1..214: note = Description of Artificial Sequence: Synthetic polypeptide
  REGION 1..214: note = XENP018287 1G6_H1.186_L1_IgG1_PVA_/S267K Light Chain

SEQ ID NO: 18257 - protein, 107 aa, synthetic construct; identical to SEQ ID NO: 10923
  REGION 1..107: note = Description of Artificial Sequence: Synthetic polypeptide
  REGION 1..107: note = VL of XENP018287

SEQ ID NO: 18258 - protein, 11 aa, synthetic construct
  REGION 1..11: note = Description of Artificial Sequence: Synthetic peptide
  REGION 1..11: note = XENP018287 vlCDR1
RASQSVSNDVA

SEQ ID NO: 18259 - protein, 7 aa, synthetic construct
  REGION 1..7: note = Description of Artificial Sequence: Synthetic peptide
  REGION 1..7: note = XENP018287 vlCDR2
YASHRYT

SEQ ID NO: 18260 - protein, 9 aa, synthetic construct
  REGION 1..9: note = Description of Artificial Sequence: Synthetic peptide
  REGION 1..9: note = XENP018287 vlCDR3
QQDYSSPRT

SEQ ID NO: 18261 - protein, 451 aa, synthetic construct
  REGION 1..451: note = Description of Artificial Sequence: Synthetic polypeptide
  REGION 1..451: note = XENP018288 1G6_H1.187_L1_IgG1_PVA_/S267K Heavy Chain
EVQLVESGGGLVKPGGSLRLSCAASGFTFSNYWMNWVRQAPGKGLEWVGEIRLKSNNYATHYAEPVKGRFTISRDDSKSTVYLQMNSLKTEDTAVYYCTRYYTNYGGYFDVWGAGTLVTVSSASTKGPSVFPLAPSSKSTSGGTAALGCLVKDYFPEPVTVSWNSGALTSGVHTFPAVLQSSGLYSLSSVVTVPSSSLGTQTYICNVNHKPSNTKVDKKVEPKSCDKTHTCPPCPAPPVAGPSVFLFPPKPKDTLMISRTPEVTCVVVDVKHEDPEVKFNWYVDGVEVHNAKTKPREEQYNSTYRVVSVLTVLHQDWLNGKEYKCKVSNKALPAPIEKTISKAKGQPREPQVYTLPPSREEMTKNQVSLTCLVKGFYPSDIAVEWESNGQPENNYKTTPPVLDSDGSFFLYSKLTVDKSRWQQGNVFSCSVMHEALHNHYTQKSLSLSPGK

SEQ ID NO: 18262 - protein, 122 aa, synthetic construct; identical to SEQ ID NO: 12710
  REGION 1..122: note = Description of Artificial Sequence: Synthetic polypeptide
  REGION 1..122: note = VH of XENP018288

SEQ ID NO: 18263 - protein, 5 aa, synthetic construct
  REGION 1..5: note = Description of Artificial Sequence: Synthetic peptide
  REGION 1..5: note = XENP018288 vhCDR1
NYWMN

SEQ ID NO: 18264 - protein, 19 aa, synthetic construct
  REGION 1..19: note = Description of Artificial Sequence: Synthetic peptide
  REGION 1..19: note = XENP018288 vhCDR2
EIRLKSNNYATHYAEPVKG

SEQ ID NO: 18265 - protein, 11 aa, synthetic construct
  REGION 1..11: note = Description of Artificial Sequence: Synthetic peptide
  REGION 1..11: note = XENP018288 vhCDR3
YYTNYGGYFDV

SEQ ID NO: 18266 - protein, 214 aa, synthetic construct; identical to SEQ ID NO: 16226
  REGION 1..214: note = Description of Artificial Sequence: Synthetic polypeptide
  REGION 1..214: note = XENP018288 1G6_H1.187_L1_IgG1_PVA_/S267K Light Chain

SEQ ID NO: 18267 - protein, 107 aa, synthetic construct; identical to SEQ ID NO: 10923
  REGION 1..107: note = Description of Artificial Sequence: Synthetic polypeptide
  REGION 1..107: note = VL of XENP018288

SEQ ID NO: 18268 - protein, 11 aa, synthetic construct
  REGION 1..11: note = Description of Artificial Sequence: Synthetic peptide
  REGION 1..11: note = XENP018288 vlCDR1
RASQSVSNDVA

SEQ ID NO: 18269 - protein, 7 aa, synthetic construct
  REGION 1..7: note = Description of Artificial Sequence: Synthetic peptide
  REGION 1..7: note = XENP018288 vlCDR2
YASHRYT

SEQ ID NO: 18270 - protein, 9 aa, synthetic construct
  REGION 1..9: note = Description of Artificial Sequence: Synthetic peptide
  REGION 1..9: note = XENP018288 vlCDR3
QQDYSSPRT

SEQ ID NO: 18271 - protein, 451 aa, synthetic construct
  REGION 1..451: note = Description of Artificial Sequence: Synthetic polypeptide
  REGION 1..451: note = XENP018289 1G6_H1.188_L1_IgG1_PVA_/S267K Heavy Chain
EVQLVESGGGLVKPGGSLRLSCAASGFTFSNYWMNWVRQAPGKGLEWVGEIRLKSNNYATHYAEPVKGRFTISRDDSKSTVYLQMNSLKTEDTAVYYCTRYYQNYGGYFDVWGAGTLVTVSSASTKGPSVFPLAPSSKSTSGGTAALGCLVKDYFPEPVTVSWNSGALTSGVHTFPAVLQSSGLYSLSSVVTVPSSSLGTQTYICNVNHKPSNTKVDKKVEPKSCDKTHTCPPCPAPPVAGPSVFLFPPKPKDTLMISRTPEVTCVVVDVKHEDPEVKFNWYVDGVEVHNAKTKPREEQYNSTYRVVSVLTVLHQDWLNGKEYKCKVSNKALPAPIEKTISKAKGQPREPQVYTLPPSREEMTKNQVSLTCLVKGFYPSDIAVEWESNGQPENNYKTTPPVLDSDGSFFLYSKLTVDKSRWQQGNVFSCSVMHEALHNHYTQKSLSLSPGK

SEQ ID NO: 18272 - protein, 122 aa, synthetic construct; identical to SEQ ID NO: 12719
  REGION 1..122: note = Description of Artificial Sequence: Synthetic polypeptide
  REGION 1..122: note = VH of XENP018289

SEQ ID NO: 18273 - protein, 5 aa, synthetic construct
  REGION 1..5: note = Description of Artificial Sequence: Synthetic peptide
  REGION 1..5: note = XENP018289 vhCDR1
NYWMN

SEQ ID NO: 18274 - protein, 19 aa, synthetic construct
  REGION 1..19: note = Description of Artificial Sequence: Synthetic peptide
  REGION 1..19: note = XENP018289 vhCDR2
EIRLKSNNYATHYAEPVKG

SEQ ID NO: 18275 - protein, 11 aa, synthetic construct
  REGION 1..11: note = Description of Artificial Sequence: Synthetic peptide
  REGION 1..11: note = XENP018289 vhCDR3
YYQNYGGYFDV

SEQ ID NO: 18276 - protein, 214 aa, synthetic construct; identical to SEQ ID NO: 16226
  REGION 1..214: note = Description of Artificial Sequence: Synthetic polypeptide
  REGION 1..214: note = XENP018289 1G6_H1.188_L1_IgG1_PVA_/S267K Light Chain

SEQ ID NO: 18277 - protein, 107 aa, synthetic construct; identical to SEQ ID NO: 10923
  REGION 1..107: note = Description of Artificial Sequence: Synthetic polypeptide
  REGION 1..107: note = VL of XENP018289

SEQ ID NO: 18278 - protein, 11 aa, synthetic construct
  REGION 1..11: note = Description of Artificial Sequence: Synthetic peptide
  REGION 1..11: note = XENP018289 vlCDR1
RASQSVSNDVA

SEQ ID NO: 18279 - protein, 7 aa, synthetic construct
  REGION 1..7: note = Description of Artificial Sequence: Synthetic peptide
  REGION 1..7: note = XENP018289 vlCDR2
YASHRYT

SEQ ID NO: 18280 - protein, 9 aa, synthetic construct
  REGION 1..9: note = Description of Artificial Sequence: Synthetic peptide
  REGION 1..9: note = XENP018289 vlCDR3
QQDYSSPRT

SEQ ID NO: 18281 - protein, 451 aa, synthetic construct
  REGION 1..451: note = Description of Artificial Sequence: Synthetic polypeptide
  REGION 1..451: note = XENP018290 1G6_H1.189_L1_IgG1_PVA_/S267K Heavy Chain
EVQLVESGGGLVKPGGSLRLSCAASGFTFSNYWMNWVRQAPGKGLEWVGEIRLKSNNYATHYAEPVKGRFTISRDDSKSTVYLQMNSLKTEDTAVYYCTRYYHNYGGYFDVWGAGTLVTVSSASTKGPSVFPLAPSSKSTSGGTAALGCLVKDYFPEPVTVSWNSGALTSGVHTFPAVLQSSGLYSLSSVVTVPSSSLGTQTYICNVNHKPSNTKVDKKVEPKSCDKTHTCPPCPAPPVAGPSVFLFPPKPKDTLMISRTPEVTCVVVDVKHEDPEVKFNWYVDGVEVHNAKTKPREEQYNSTYRVVSVLTVLHQDWLNGKEYKCKVSNKALPAPIEKTISKAKGQPREPQVYTLPPSREEMTKNQVSLTCLVKGFYPSDIAVEWESNGQPENNYKTTPPVLDSDGSFFLYSKLTVDKSRWQQGNVFSCSVMHEALHNHYTQKSLSLSPGK

SEQ ID NO: 18282 - protein, 122 aa, synthetic construct; identical to SEQ ID NO: 12728
  REGION 1..122: note = Description of Artificial Sequence: Synthetic polypeptide
  REGION 1..122: note = VH of XENP018290

SEQ ID NO: 18283 - protein, 5 aa, synthetic construct
  REGION 1..5: note = Description of Artificial Sequence: Synthetic peptide
  REGION 1..5: note = XENP018290 vhCDR1
NYWMN

SEQ ID NO: 18284 - protein, 19 aa, synthetic construct
  REGION 1..19: note = Description of Artificial Sequence: Synthetic peptide
  REGION 1..19: note = XENP018290 vhCDR2
EIRLKSNNYATHYAEPVKG

SEQ ID NO: 18285 - protein, 11 aa, synthetic construct
  REGION 1..11: note = Description of Artificial Sequence: Synthetic peptide
  REGION 1..11: note = XENP018290 vhCDR3
YYHNYGGYFDV

SEQ ID NO: 18286 - protein, 214 aa, synthetic construct; identical to SEQ ID NO: 16226
  REGION 1..214: note = Description of Artificial Sequence: Synthetic polypeptide
  REGION 1..214: note = XENP018290 1G6_H1.189_L1_IgG1_PVA_/S267K Light Chain

SEQ ID NO: 18287 - protein, 107 aa, synthetic construct; identical to SEQ ID NO: 10923
  REGION 1..107: note = Description of Artificial Sequence: Synthetic polypeptide
  REGION 1..107: note = VL of XENP018290

SEQ ID NO: 18288 - protein, 11 aa, synthetic construct
  REGION 1..11: note = Description of Artificial Sequence: Synthetic peptide
  REGION 1..11: note = XENP018290 vlCDR1
RASQSVSNDVA

SEQ ID NO: 18289 - protein, 7 aa, synthetic construct
  REGION 1..7: note = Description of Artificial Sequence: Synthetic peptide
  REGION 1..7: note = XENP018290 vlCDR2
YASHRYT

SEQ ID NO: 18290 - protein, 9 aa, synthetic construct
  REGION 1..9: note = Description of Artificial Sequence: Synthetic peptide
  REGION 1..9: note = XENP018290 vlCDR3
QQDYSSPRT

SEQ ID NO: 18291 - protein, 451 aa, synthetic construct
  REGION 1..451: note = Description of Artificial Sequence: Synthetic polypeptide
  REGION 1..451: note = XENP018291 1G6_H1.190_L1_IgG1_PVA_/S267K Heavy Chain
EVQLVESGGGLVKPGGSLRLSCAASGFTFSNYWMNWVRQAPGKGLEWVGEIRLKSNNYATHYAEPVKGRFTISRDDSKSTVYLQMNSLKTEDTAVYYCTRYYDNYGGYFDVWGAGTLVTVSSASTKGPSVFPLAPSSKSTSGGTAALGCLVKDYFPEPVTVSWNSGALTSGVHTFPAVLQSSGLYSLSSVVTVPSSSLGTQTYICNVNHKPSNTKVDKKVEPKSCDKTHTCPPCPAPPVAGPSVFLFPPKPKDTLMISRTPEVTCVVVDVKHEDPEVKFNWYVDGVEVHNAKTKPREEQYNSTYRVVSVLTVLHQDWLNGKEYKCKVSNKALPAPIEKTISKAKGQPREPQVYTLPPSREEMTKNQVSLTCLVKGFYPSDIAVEWESNGQPENNYKTTPPVLDSDGSFFLYSKLTVDKSRWQQGNVFSCSVMHEALHNHYTQKSLSLSPGK

SEQ ID NO: 18292 - protein, 122 aa, synthetic construct; identical to SEQ ID NO: 12737
  REGION 1..122: note = Description of Artificial Sequence: Synthetic polypeptide
  REGION 1..122: note = VH of XENP018291

SEQ ID NO: 18293 - protein, 5 aa, synthetic construct
  REGION 1..5: note = Description of Artificial Sequence: Synthetic peptide
  REGION 1..5: note = XENP018291 vhCDR1
NYWMN

SEQ ID NO: 18294 - protein, 19 aa, synthetic construct
  REGION 1..19: note = Description of Artificial Sequence: Synthetic peptide
  REGION 1..19: note = XENP018291 vhCDR2
EIRLKSNNYATHYAEPVKG

SEQ ID NO: 18295 - protein, 11 aa, synthetic construct
  REGION 1..11: note = Description of Artificial Sequence: Synthetic peptide
  REGION 1..11: note = XENP018291 vhCDR3
YYDNYGGYFDV

SEQ ID NO: 18296 - protein, 214 aa, synthetic construct; identical to SEQ ID NO: 16226
  REGION 1..214: note = Description of Artificial Sequence: Synthetic polypeptide
  REGION 1..214: note = XENP018291 1G6_H1.190_L1_IgG1_PVA_/S267K Light Chain

SEQ ID NO: 18297 - protein, 107 aa, synthetic construct; identical to SEQ ID NO: 10923
  REGION 1..107: note = Description of Artificial Sequence: Synthetic polypeptide
  REGION 1..107: note = VL of XENP018291

SEQ ID NO: 18298 - protein, 11 aa, synthetic construct
  REGION 1..11: note = Description of Artificial Sequence: Synthetic peptide
  REGION 1..11: note = XENP018291 vlCDR1
RASQSVSNDVA

SEQ ID NO: 18299 - protein, 7 aa, synthetic construct
  REGION 1..7: note = Description of Artificial Sequence: Synthetic peptide
  REGION 1..7: note = XENP018291 vlCDR2
YASHRYT

SEQ ID NO: 18300 - protein, 9 aa, synthetic construct
  REGION 1..9: note = Description of Artificial Sequence: Synthetic peptide
  REGION 1..9: note = XENP018291 vlCDR3
QQDYSSPRT

SEQ ID NO: 18301 - protein, 451 aa, synthetic construct
  REGION 1..451: note = Description of Artificial Sequence: Synthetic polypeptide
  REGION 1..451: note = XENP018292 1G6_H1.191_L1_IgG1_PVA_/S267K Heavy Chain
EVQLVESGGGLVKPGGSLRLSCAASGFTFSNYWMNWVRQAPGKGLEWVGEIRLKSNNYATHYAEPVKGRFTISRDDSKSTVYLQMNSLKTEDTAVYYCTRYYKNYGGYFDVWGAGTLVTVSSASTKGPSVFPLAPSSKSTSGGTAALGCLVKDYFPEPVTVSWNSGALTSGVHTFPAVLQSSGLYSLSSVVTVPSSSLGTQTYICNVNHKPSNTKVDKKVEPKSCDKTHTCPPCPAPPVAGPSVFLFPPKPKDTLMISRTPEVTCVVVDVKHEDPEVKFNWYVDGVEVHNAKTKPREEQYNSTYRVVSVLTVLHQDWLNGKEYKCKVSNKALPAPIEKTISKAKGQPREPQVYTLPPSREEMTKNQVSLTCLVKGFYPSDIAVEWESNGQPENNYKTTPPVLDSDGSFFLYSKLTVDKSRWQQGNVFSCSVMHEALHNHYTQKSLSLSPGK

SEQ ID NO: 18302 - protein, 122 aa, synthetic construct; identical to SEQ ID NO: 12746
  REGION 1..122: note = Description of Artificial Sequence: Synthetic polypeptide
  REGION 1..122: note = VH of XENP018292

SEQ ID NO: 18303 - protein, 5 aa, synthetic construct
  REGION 1..5: note = Description of Artificial Sequence: Synthetic peptide
  REGION 1..5: note = XENP018292 vhCDR1
NYWMN

SEQ ID NO: 18304 - protein, 19 aa, synthetic construct
  REGION 1..19: note = Description of Artificial Sequence: Synthetic peptide
  REGION 1..19: note = XENP018292 vhCDR2
EIRLKSNNYATHYAEPVKG

SEQ ID NO: 18305 - protein, 11 aa, synthetic construct
  REGION 1..11: note = Description of Artificial Sequence: Synthetic peptide
  REGION 1..11: note = XENP018292 vhCDR3
YYKNYGGYFDV

SEQ ID NO: 18306 - protein, 214 aa, synthetic construct; identical to SEQ ID NO: 16226
  REGION 1..214: note = Description of Artificial Sequence: Synthetic polypeptide
  REGION 1..214: note = XENP018292 1G6_H1.191_L1_IgG1_PVA_/S267K Light Chain

SEQ ID NO: 18307 - protein, 107 aa, synthetic construct; identical to SEQ ID NO: 10923
  REGION 1..107: note = Description of Artificial Sequence: Synthetic polypeptide
  REGION 1..107: note = VL of XENP018292

SEQ ID NO: 18308 - protein, 11 aa, synthetic construct
  REGION 1..11: note = Description of Artificial Sequence: Synthetic peptide
  REGION 1..11: note = XENP018292 vlCDR1
RASQSVSNDVA

SEQ ID NO: 18309 - protein, 7 aa, synthetic construct
  REGION 1..7: note = Description of Artificial Sequence: Synthetic peptide
  REGION 1..7: note = XENP018292 vlCDR2
YASHRYT

SEQ ID NO: 18310 - protein, 9 aa, synthetic construct
  REGION 1..9: note = Description of Artificial Sequence: Synthetic peptide
  REGION 1..9: note = XENP018292 vlCDR3
QQDYSSPRT

SEQ ID NO: 18311 - protein, 451 aa, synthetic construct
  REGION 1..451: note = Description of Artificial Sequence: Synthetic polypeptide
  REGION 1..451: note = XENP018293 1G6_H1.192_L1_IgG1_PVA_/S267K Heavy Chain
EVQLVESGGGLVKPGGSLRLSCAASGFTFSNYWMNWVRQAPGKGLEWVGEIRLKSNNYATHYAEPVKGRFTISRDDSKSTVYLQMNSLKTEDTAVYYCTRYYLNYGGYFDVWGAGTLVTVSSASTKGPSVFPLAPSSKSTSGGTAALGCLVKDYFPEPVTVSWNSGALTSGVHTFPAVLQSSGLYSLSSVVTVPSSSLGTQTYICNVNHKPSNTKVDKKVEPKSCDKTHTCPPCPAPPVAGPSVFLFPPKPKDTLMISRTPEVTCVVVDVKHEDPEVKFNWYVDGVEVHNAKTKPREEQYNSTYRVVSVLTVLHQDWLNGKEYKCKVSNKALPAPIEKTISKAKGQPREPQVYTLPPSREEMTKNQVSLTCLVKGFYPSDIAVEWESNGQPENNYKTTPPVLDSDGSFFLYSKLTVDKSRWQQGNVFSCSVMHEALHNHYTQKSLSLSPGK

SEQ ID NO: 18312 - protein, 122 aa, synthetic construct; identical to SEQ ID NO: 12755
  REGION 1..122: note = Description of Artificial Sequence: Synthetic polypeptide
  REGION 1..122: note = VH of XENP018293

SEQ ID NO: 18313 - protein, 5 aa, synthetic construct
  REGION 1..5: note = Description of Artificial Sequence: Synthetic peptide
  REGION 1..5: note = XENP018293 vhCDR1
NYWMN

SEQ ID NO: 18314 - protein, 19 aa, synthetic construct
  REGION 1..19: note = Description of Artificial Sequence: Synthetic peptide
  REGION 1..19: note = XENP018293 vhCDR2
EIRLKSNNYATHYAEPVKG

SEQ ID NO: 18315 - protein, 11 aa, synthetic construct
  REGION 1..11: note = Description of Artificial Sequence: Synthetic peptide
  REGION 1..11: note = XENP018293 vhCDR3
YYLNYGGYFDV

SEQ ID NO: 18316 - protein, 214 aa, synthetic construct; identical to SEQ ID NO: 16226
  REGION 1..214: note = Description of Artificial Sequence: Synthetic polypeptide
  REGION 1..214: note = XENP018293 1G6_H1.192_L1_IgG1_PVA_/S267K Light Chain

SEQ ID NO: 18317 - protein, 107 aa, synthetic construct; identical to SEQ ID NO: 10923
  REGION 1..107: note = Description of Artificial Sequence: Synthetic polypeptide
  REGION 1..107: note = VL of XENP018293

SEQ ID NO: 18318 - protein, 11 aa, synthetic construct
  REGION 1..11: note = Description of Artificial Sequence: Synthetic peptide
  REGION 1..11: note = XENP018293 vlCDR1
RASQSVSNDVA

SEQ ID NO: 18319 - protein, 7 aa, synthetic construct
  REGION 1..7: note = Description of Artificial Sequence: Synthetic peptide
  REGION 1..7: note = XENP018293 vlCDR2
YASHRYT

SEQ ID NO: 18320 - protein, 9 aa, synthetic construct
  REGION 1..9: note = Description of Artificial Sequence: Synthetic peptide
  REGION 1..9: note = XENP018293 vlCDR3
QQDYSSPRT

SEQ ID NO: 18321 - protein, 451 aa, synthetic construct
  REGION 1..451: note = Description of Artificial Sequence: Synthetic polypeptide
  REGION 1..451: note = XENP018294 1G6_H1.193_L1_IgG1_PVA_/S267K Heavy Chain
EVQLVESGGGLVKPGGSLRLSCAASGFTFSNYWMNWVRQAPGKGLEWVGEIRLKSNNYATHYAEPVKGRFTISRDDSKSTVYLQMNSLKTEDTAVYYCTRYYFNYGGYFDVWGAGTLVTVSSASTKGPSVFPLAPSSKSTSGGTAALGCLVKDYFPEPVTVSWNSGALTSGVHTFPAVLQSSGLYSLSSVVTVPSSSLGTQTYICNVNHKPSNTKVDKKVEPKSCDKTHTCPPCPAPPVAGPSVFLFPPKPKDTLMISRTPEVTCVVVDVKHEDPEVKFNWYVDGVEVHNAKTKPREEQYNSTYRVVSVLTVLHQDWLNGKEYKCKVSNKALPAPIEKTISKAKGQPREPQVYTLPPSREEMTKNQVSLTCLVKGFYPSDIAVEWESNGQPENNYKTTPPVLDSDGSFFLYSKLTVDKSRWQQGNVFSCSVMHEALHNHYTQKSLSLSPGK

SEQ ID NO: 18322 - protein, 122 aa, synthetic construct; identical to SEQ ID NO: 12764
  REGION 1..122: note = Description of Artificial Sequence: Synthetic polypeptide
  REGION 1..122: note = VH of XENP018294

SEQ ID NO: 18323 - protein, 5 aa, synthetic construct
  REGION 1..5: note = Description of Artificial Sequence: Synthetic peptide
  REGION 1..5: note = XENP018294 vhCDR1
NYWMN

SEQ ID NO: 18324 - protein, 19 aa, synthetic construct
  REGION 1..19: note = Description of Artificial Sequence: Synthetic peptide
  REGION 1..19: note = XENP018294 vhCDR2
EIRLKSNNYATHYAEPVKG

SEQ ID NO: 18325 - protein, 11 aa, synthetic construct
  REGION 1..11: note = Description of Artificial Sequence: Synthetic peptide
  REGION 1..11: note = XENP018294 vhCDR3
YYFNYGGYFDV

SEQ ID NO: 18326 - protein, 214 aa, synthetic construct; identical to SEQ ID NO: 16226
  REGION 1..214: note = Description of Artificial Sequence: Synthetic polypeptide
  REGION 1..214: note = XENP018294 1G6_H1.193_L1_IgG1_PVA_/S267K Light Chain

SEQ ID NO: 18327 - protein, 107 aa, synthetic construct; identical to SEQ ID NO: 10923
  REGION 1..107: note = Description of Artificial Sequence: Synthetic polypeptide
  REGION 1..107: note = VL of XENP018294

SEQ ID NO: 18328 - protein, 11 aa, synthetic construct
  REGION 1..11: note = Description of Artificial Sequence: Synthetic peptide
  REGION 1..11: note = XENP018294 vlCDR1
RASQSVSNDVA

SEQ ID NO: 18329 - protein, 7 aa, synthetic construct
  REGION 1..7: note = Description of Artificial Sequence: Synthetic peptide
  REGION 1..7: note = XENP018294 vlCDR2
YASHRYT

SEQ ID NO: 18330 - protein, 9 aa, synthetic construct
  REGION 1..9: note = Description of Artificial Sequence: Synthetic peptide
  REGION 1..9: note = XENP018294 vlCDR3
QQDYSSPRT

SEQ ID NO: 18331 - protein, 451 aa, synthetic construct
  REGION 1..451: note = Description of Artificial Sequence: Synthetic polypeptide
  REGION 1..451: note = XENP018295 1G6_H1.194_L1_IgG1_PVA_/S267K Heavy Chain
EVQLVESGGGLVKPGGSLRLSCAASGFTFSNYWMNWVRQAPGKGLEWVGEIRLKSNNYATHYAEPVKGRFTISRDDSKSTVYLQMNSLKTEDTAVYYCTRYYGDYGGYFDVWGAGTLVTVSSASTKGPSVFPLAPSSKSTSGGTAALGCLVKDYFPEPVTVSWNSGALTSGVHTFPAVLQSSGLYSLSSVVTVPSSSLGTQTYICNVNHKPSNTKVDKKVEPKSCDKTHTCPPCPAPPVAGPSVFLFPPKPKDTLMISRTPEVTCVVVDVKHEDPEVKFNWYVDGVEVHNAKTKPREEQYNSTYRVVSVLTVLHQDWLNGKEYKCKVSNKALPAPIEKTISKAKGQPREPQVYTLPPSREEMTKNQVSLTCLVKGFYPSDIAVEWESNGQPENNYKTTPPVLDSDGSFFLYSKLTVDKSRWQQGNVFSCSVMHEALHNHYTQKSLSLSPGK

SEQ ID NO: 18332 - protein, 122 aa, synthetic construct; identical to SEQ ID NO: 12773
  REGION 1..122: note = Description of Artificial Sequence: Synthetic polypeptide
  REGION 1..122: note = VH of XENP018295

SEQ ID NO: 18333 - protein, 5 aa, synthetic construct
  REGION 1..5: note = Description of Artificial Sequence: Synthetic peptide
  REGION 1..5: note = XENP018295 vhCDR1
NYWMN

SEQ ID NO: 18334 - protein, 19 aa, synthetic construct
  REGION 1..19: note = Description of Artificial Sequence: Synthetic peptide
  REGION 1..19: note = XENP018295 vhCDR2
EIRLKSNNYATHYAEPVKG

SEQ ID NO: 18335 - protein, 11 aa, synthetic construct
  REGION 1..11: note = Description of Artificial Sequence: Synthetic peptide
  REGION 1..11: note = XENP018295 vhCDR3
YYGDYGGYFDV

SEQ ID NO: 18336 - protein, 214 aa, synthetic construct; identical to SEQ ID NO: 16226
  REGION 1..214: note = Description of Artificial Sequence: Synthetic polypeptide
  REGION 1..214: note = XENP018295 1G6_H1.194_L1_IgG1_PVA_/S267K Light Chain

SEQ ID NO: 18337 - protein, 107 aa, synthetic construct; identical to SEQ ID NO: 10923
  REGION 1..107: note = Description of Artificial Sequence: Synthetic polypeptide
  REGION 1..107: note = VL of XENP018295

SEQ ID NO: 18338 - protein, 11 aa, synthetic construct
  REGION 1..11: note = Description of Artificial Sequence: Synthetic peptide
  REGION 1..11: note = XENP018295 vlCDR1
RASQSVSNDVA

SEQ ID NO: 18339 - protein, 7 aa, synthetic construct
  REGION 1..7: note = Description of Artificial Sequence: Synthetic peptide
  REGION 1..7: note = XENP018295 vlCDR2
YASHRYT

SEQ ID NO: 18340 - protein, 9 aa, synthetic construct
  REGION 1..9: note = Description of Artificial Sequence: Synthetic peptide
  REGION 1..9: note = XENP018295 vlCDR3
QQDYSSPRT

SEQ ID NO: 18341 - protein, 451 aa, synthetic construct
  REGION 1..451: note = Description of Artificial Sequence: Synthetic polypeptide
  REGION 1..451: note = XENP018296 1G6_H1.195_L1_IgG1_PVA_/S267K Heavy Chain
EVQLVESGGGLVKPGGSLRLSCAASGFTFSNYWMNWVRQAPGKGLEWVGEIRLKSNNYATHYAEPVKGRFTISRDDSKSTVYLQMNSLKTEDTAVYYCTRYYGHYGGYFDVWGAGTLVTVSSASTKGPSVFPLAPSSKSTSGGTAALGCLVKDYFPEPVTVSWNSGALTSGVHTFPAVLQSSGLYSLSSVVTVPSSSLGTQTYICNVNHKPSNTKVDKKVEPKSCDKTHTCPPCPAPPVAGPSVFLFPPKPKDTLMISRTPEVTCVVVDVKHEDPEVKFNWYVDGVEVHNAKTKPREEQYNSTYRVVSVLTVLHQDWLNGKEYKCKVSNKALPAPIEKTISKAKGQPREPQVYTLPPSREEMTKNQVSLTCLVKGFYPSDIAVEWESNGQPENNYKTTPPVLDSDGSFFLYSKLTVDKSRWQQGNVFSCSVMHEALHNHYTQKSLSLSPGK

SEQ ID NO: 18342 - protein, 122 aa, synthetic construct; identical to SEQ ID NO: 12782
  REGION 1..122: note = Description of Artificial Sequence: Synthetic polypeptide
  REGION 1..122: note = VH of XENP018296

SEQ ID NO: 18343 - protein, 5 aa, synthetic construct
  REGION 1..5: note = Description of Artificial Sequence: Synthetic peptide
  REGION 1..5: note = XENP018296 vhCDR1
NYWMN

SEQ ID NO: 18344 - protein, 19 aa, synthetic construct
  REGION 1..19: note = Description of Artificial Sequence: Synthetic peptide
  REGION 1..19: note = XENP018296 vhCDR2
EIRLKSNNYATHYAEPVKG

SEQ ID NO: 18345 - protein, 11 aa, synthetic construct
  REGION 1..11: note = Description of Artificial Sequence: Synthetic peptide
  REGION 1..11: note = XENP018296 vhCDR3
YYGHYGGYFDV

SEQ ID NO: 18346 - protein, 214 aa, synthetic construct; identical to SEQ ID NO: 16226
  REGION 1..214: note = Description of Artificial Sequence: Synthetic polypeptide
  REGION 1..214: note = XENP018296 1G6_H1.195_L1_IgG1_PVA_/S267K Light Chain

SEQ ID NO: 18347 - protein, 107 aa, synthetic construct; identical to SEQ ID NO: 10923
  REGION 1..107: note = Description of Artificial Sequence: Synthetic polypeptide
  REGION 1..107: note = VL of XENP018296

SEQ ID NO: 18348 - protein, 11 aa, synthetic construct
  REGION 1..11: note = Description of Artificial Sequence: Synthetic peptide
  REGION 1..11: note = XENP018296 vlCDR1
RASQSVSNDVA

SEQ ID NO: 18349 - protein, 7 aa, synthetic construct
  REGION 1..7: note = Description of Artificial Sequence: Synthetic peptide
  REGION 1..7: note = XENP018296 vlCDR2
YASHRYT

SEQ ID NO: 18350 - protein, 9 aa, synthetic construct
  REGION 1..9: note = Description of Artificial Sequence: Synthetic peptide
  REGION 1..9: note = XENP018296 vlCDR3
QQDYSSPRT

SEQ ID NO: 18351 - protein, 451 aa, synthetic construct
  REGION 1..451: note = Description of Artificial Sequence: Synthetic polypeptide
  REGION 1..451: note = XENP018301 1G6_H1.196_L1_IgG1_PVA_/S267K Heavy Chain
EVQLVESGGGLVKPGGSLRLSCAASGFTFSNYWMNWVRQAPGKGLEWVGEIRLKSNNYATHYAEPVKGRFTISRDDSKSTVYLQMNSLKTEDTAVYYCTRYYGEYGGYFDVWGAGTLVTVSSASTKGPSVFPLAPSSKSTSGGTAALGCLVKDYFPEPVTVSWNSGALTSGVHTFPAVLQSSGLYSLSSVVTVPSSSLGTQTYICNVNHKPSNTKVDKKVEPKSCDKTHTCPPCPAPPVAGPSVFLFPPKPKDTLMISRTPEVTCVVVDVKHEDPEVKFNWYVDGVEVHNAKTKPREEQYNSTYRVVSVLTVLHQDWLNGKEYKCKVSNKALPAPIEKTISKAKGQPREPQVYTLPPSREEMTKNQVSLTCLVKGFYPSDIAVEWESNGQPENNYKTTPPVLDSDGSFFLYSKLTVDKSRWQQGNVFSCSVMHEALHNHYTQKSLSLSPGK

SEQ ID NO: 18352 - protein, 122 aa, synthetic construct; identical to SEQ ID NO: 12791
  REGION 1..122: note = Description of Artificial Sequence: Synthetic polypeptide
  REGION 1..122: note = VH of XENP018301

SEQ ID NO: 18353 - protein, 5 aa, synthetic construct
  REGION 1..5: note = Description of Artificial Sequence: Synthetic peptide
  REGION 1..5: note = XENP018301 vhCDR1
NYWMN

SEQ ID NO: 18354 - protein, 19 aa, synthetic construct
  REGION 1..19: note = Description of Artificial Sequence: Synthetic peptide
  REGION 1..19: note = XENP018301 vhCDR2
EIRLKSNNYATHYAEPVKG

SEQ ID NO: 18355 - protein, 11 aa, synthetic construct
  REGION 1..11: note = Description of Artificial Sequence: Synthetic peptide
  REGION 1..11: note = XENP018301 vhCDR3
YYGEYGGYFDV

SEQ ID NO: 18356 - protein, 214 aa, synthetic construct; identical to SEQ ID NO: 16226
  REGION 1..214: note = Description of Artificial Sequence: Synthetic polypeptide
  REGION 1..214: note = XENP018301 1G6_H1.196_L1_IgG1_PVA_/S267K Light Chain

SEQ ID NO: 18357 - protein, 107 aa, synthetic construct; identical to SEQ ID NO: 10923
  REGION 1..107: note = Description of Artificial Sequence: Synthetic polypeptide
  REGION 1..107: note = VL of XENP018301

SEQ ID NO: 18358 - protein, 11 aa, synthetic construct
  REGION 1..11: note = Description of Artificial Sequence: Synthetic peptide
  REGION 1..11: note = XENP018301 vlCDR1
RASQSVSNDVA

SEQ ID NO: 18359 - protein, 7 aa, synthetic construct
  REGION 1..7: note = Description of Artificial Sequence: Synthetic peptide
  REGION 1..7: note = XENP018301 vlCDR2
YASHRYT

SEQ ID NO: 18360 - protein, 9 aa, synthetic construct
  REGION 1..9: note = Description of Artificial Sequence: Synthetic peptide
  REGION 1..9: note = XENP018301 vlCDR3
QQDYSSPRT

SEQ ID NO: 18361 - protein, 451 aa, synthetic construct
  REGION 1..451: note = Description of Artificial Sequence: Synthetic polypeptide
  REGION 1..451: note = XENP018302 1G6_H1.197_L1_IgG1_PVA_/S267K Heavy Chain
EVQLVESGGGLVKPGGSLRLSCAASGFTFSNYWMNWVRQAPGKGLEWVGEIRLKSNNYATHYAEPVKGRFTISRDDSKSTVYLQMNSLKTEDTAVYYCTRYYGSYGGYFDVWGAGTLVTVSSASTKGPSVFPLAPSSKSTSGGTAALGCLVKDYFPEPVTVSWNSGALTSGVHTFPAVLQSSGLYSLSSVVTVPSSSLGTQTYICNVNHKPSNTKVDKKVEPKSCDKTHTCPPCPAPPVAGPSVFLFPPKPKDTLMISRTPEVTCVVVDVKHEDPEVKFNWYVDGVEVHNAKTKPREEQYNSTYRVVSVLTVLHQDWLNGKEYKCKVSNKALPAPIEKTISKAKGQPREPQVYTLPPSREEMTKNQVSLTCLVKGFYPSDIAVEWESNGQPENNYKTTPPVLDSDGSFFLYSKLTVDKSRWQQGNVFSCSVMHEALHNHYTQKSLSLSPGK

SEQ ID NO: 18362 - protein, 122 aa, synthetic construct; identical to SEQ ID NO: 12800
  REGION 1..122: note = Description of Artificial Sequence: Synthetic polypeptide
  REGION 1..122: note = VH of XENP018302

SEQ ID NO: 18363 - protein, 5 aa, synthetic construct
  REGION 1..5: note = Description of Artificial Sequence: Synthetic peptide
  REGION 1..5: note = XENP018302 vhCDR1
NYWMN

SEQ ID NO: 18364 - protein, 19 aa, synthetic construct
  REGION 1..19: note = Description of Artificial Sequence: Synthetic peptide
  REGION 1..19: note = XENP018302 vhCDR2
EIRLKSNNYATHYAEPVKG

SEQ ID NO: 18365 - protein, 11 aa, synthetic construct
  REGION 1..11: note = Description of Artificial Sequence: Synthetic peptide
  REGION 1..11: note = XENP018302 vhCDR3
YYGSYGGYFDV

SEQ ID NO: 18366 - protein, 214 aa, synthetic construct; identical to SEQ ID NO: 16226
  REGION 1..214: note = Description of Artificial Sequence: Synthetic polypeptide
  REGION 1..214: note = XENP018302 1G6_H1.197_L1_IgG1_PVA_/S267K Light Chain

SEQ ID NO: 18367 - protein, 107 aa, synthetic construct; identical to SEQ ID NO: 10923
  REGION 1..107: note = Description of Artificial Sequence: Synthetic polypeptide
  REGION 1..107: note = VL of XENP018302

SEQ ID NO: 18368 - protein, 11 aa, synthetic construct
  REGION 1..11: note = Description of Artificial Sequence: Synthetic peptide
  REGION 1..11: note = XENP018302 vlCDR1
RASQSVSNDVA

SEQ ID NO: 18369 - protein, 7 aa, synthetic construct
  REGION 1..7: note = Description of Artificial Sequence: Synthetic peptide
  REGION 1..7: note = XENP018302 vlCDR2
YASHRYT

SEQ ID NO: 18370 - protein, 9 aa, synthetic construct
  REGION 1..9: note = Description of Artificial Sequence: Synthetic peptide
  REGION 1..9: note = XENP018302 vlCDR3
QQDYSSPRT

SEQ ID NO: 18371 - protein, 451 aa, synthetic construct
  REGION 1..451: note = Description of Artificial Sequence: Synthetic polypeptide
  REGION 1..451: note = XENP018303 1G6_H1.198_L1_IgG1_PVA_/S267K Heavy Chain
EVQLVESGGGLVKPGGSLRLSCAASGFTFSNYWMNWVRQAPGKGLEWVGEIRLKSNNYATHYAEPVKGRFTISRDDSKSTVYLQMNSLKTEDTAVYYCTRYYGRYGGYFDVWGAGTLVTVSSASTKGPSVFPLAPSSKSTSGGTAALGCLVKDYFPEPVTVSWNSGALTSGVHTFPAVLQSSGLYSLSSVVTVPSSSLGTQTYICNVNHKPSNTKVDKKVEPKSCDKTHTCPPCPAPPVAGPSVFLFPPKPKDTLMISRTPEVTCVVVDVKHEDPEVKFNWYVDGVEVHNAKTKPREEQYNSTYRVVSVLTVLHQDWLNGKEYKCKVSNKALPAPIEKTISKAKGQPREPQVYTLPPSREEMTKNQVSLTCLVKGFYPSDIAVEWESNGQPENNYKTTPPVLDSDGSFFLYSKLTVDKSRWQQGNVFSCSVMHEALHNHYTQKSLSLSPGK

SEQ ID NO: 18372 - protein, 122 aa, synthetic construct; identical to SEQ ID NO: 12809
  REGION 1..122: note = Description of Artificial Sequence: Synthetic polypeptide
  REGION 1..122: note = VH of XENP018303

SEQ ID NO: 18373 - protein, 5 aa, synthetic construct
  REGION 1..5: note = Description of Artificial Sequence: Synthetic peptide
  REGION 1..5: note = XENP018303 vhCDR1
NYWMN

SEQ ID NO: 18374 - protein, 19 aa, synthetic construct
  REGION 1..19: note = Description of Artificial Sequence: Synthetic peptide
  REGION 1..19: note = XENP018303 vhCDR2
EIRLKSNNYATHYAEPVKG

SEQ ID NO: 18375 - protein, 11 aa, synthetic construct
  REGION 1..11: note = Description of Artificial Sequence: Synthetic peptide
  REGION 1..11: note = XENP018303 vhCDR3
YYGRYGGYFDV

SEQ ID NO: 18376 - protein, 214 aa, synthetic construct; identical to SEQ ID NO: 16226
  REGION 1..214: note = Description of Artificial Sequence: Synthetic polypeptide
  REGION 1..214: note = XENP018303 1G6_H1.198_L1_IgG1_PVA_/S267K Light Chain

SEQ ID NO: 18377 - protein, 107 aa, synthetic construct; identical to SEQ ID NO: 10923
  REGION 1..107: note = Description of Artificial Sequence: Synthetic polypeptide
  REGION 1..107: note = VL of XENP018303

SEQ ID NO: 18378 - protein, 11 aa, synthetic construct
  REGION 1..11: note = Description of Artificial Sequence: Synthetic peptide
  REGION 1..11: note = XENP018303 vlCDR1
RASQSVSNDVA

SEQ ID NO: 18379 - protein, 7 aa, synthetic construct
  REGION 1..7: note = Description of Artificial Sequence: Synthetic peptide
  REGION 1..7: note = XENP018303 vlCDR2
YASHRYT

SEQ ID NO: 18380 - protein, 9 aa, synthetic construct
  REGION 1..9: note = Description of Artificial Sequence: Synthetic peptide
  REGION 1..9: note = XENP018303 vlCDR3
QQDYSSPRT

SEQ ID NO: 18381 - protein, 451 aa, synthetic construct
  REGION 1..451: note = Description of Artificial Sequence: Synthetic polypeptide
  REGION 1..451: note = XENP018304 1G6_H1.199_L1_IgG1_PVA_/S267K Heavy Chain
EVQLVESGGGLVKPGGSLRLSCAASGFTFSNYWMNWVRQAPGKGLEWVGEIRLKSNNYATHYAEPVKGRFTISRDDSKSTVYLQMNSLKTEDTAVYYCTRYYGLYGGYFDVWGAGTLVTVSSASTKGPSVFPLAPSSKSTSGGTAALGCLVKDYFPEPVTVSWNSGALTSGVHTFPAVLQSSGLYSLSSVVTVPSSSLGTQTYICNVNHKPSNTKVDKKVEPKSCDKTHTCPPCPAPPVAGPSVFLFPPKPKDTLMISRTPEVTCVVVDVKHEDPEVKFNWYVDGVEVHNAKTKPREEQYNSTYRVVSVLTVLHQDWLNGKEYKCKVSNKALPAPIEKTISKAKGQPREPQVYTLPPSREEMTKNQVSLTCLVKGFYPSDIAVEWESNGQPENNYKTTPPVLDSDGSFFLYSKLTVDKSRWQQGNVFSCSVMHEALHNHYTQKSLSLSPGK

SEQ ID NO: 18382 - protein, 122 aa, synthetic construct; identical to SEQ ID NO: 12818
  REGION 1..122: note = Description of Artificial Sequence: Synthetic polypeptide
  REGION 1..122: note = VH of XENP018304

SEQ ID NO: 18383 - protein, 5 aa, synthetic construct
  REGION 1..5: note = Description of Artificial Sequence: Synthetic peptide
  REGION 1..5: note = XENP018304 vhCDR1
NYWMN

SEQ ID NO: 18384 - protein, 19 aa, synthetic construct
  REGION 1..19: note = Description of Artificial Sequence: Synthetic peptide
  REGION 1..19: note = XENP018304 vhCDR2
EIRLKSNNYATHYAEPVKG

SEQ ID NO: 18385 - protein, 11 aa, synthetic construct
  REGION 1..11: note = Description of Artificial Sequence: Synthetic peptide
  REGION 1..11: note = XENP018304 vhCDR3
YYGLYGGYFDV

SEQ ID NO: 18386 - protein, 214 aa, synthetic construct; identical to SEQ ID NO: 16226
  REGION 1..214: note = Description of Artificial Sequence: Synthetic polypeptide
  REGION 1..214: note = XENP018304 1G6_H1.199_L1_IgG1_PVA_/S267K Light Chain

SEQ ID NO: 18387 - protein, 107 aa, synthetic construct; identical to SEQ ID NO: 10923
  REGION 1..107: note = Description of Artificial Sequence: Synthetic polypeptide
  REGION 1..107: note = VL of XENP018304

SEQ ID NO: 18388 - protein, 11 aa, synthetic construct
  REGION 1..11: note = Description of Artificial Sequence: Synthetic peptide
  REGION 1..11: note = XENP018304 vlCDR1
RASQSVSNDVA

SEQ ID NO: 18389 - protein, 7 aa, synthetic construct
  REGION 1..7: note = Description of Artificial Sequence: Synthetic peptide
  REGION 1..7: note = XENP018304 vlCDR2
YASHRYT

SEQ ID NO: 18390 - protein, 9 aa, synthetic construct
  REGION 1..9: note = Description of Artificial Sequence: Synthetic peptide
  REGION 1..9: note = XENP018304 vlCDR3
QQDYSSPRT

SEQ ID NO: 18391 - protein, 451 aa, synthetic construct
  REGION 1..451: note = Description of Artificial Sequence: Synthetic polypeptide
  REGION 1..451: note = XENP018305 1G6_H1.200_L1_IgG1_PVA_/S267K Heavy Chain
EVQLVESGGGLVKPGGSLRLSCAASGFTFSNYWMNWVRQAPGKGLEWVGEIRLKSNNYATHYAEPVKGRFTISRDDSKSTVYLQMNSLKTEDTAVYYCTRYYGTYGGYFDVWGAGTLVTVSSASTKGPSVFPLAPSSKSTSGGTAALGCLVKDYFPEPVTVSWNSGALTSGVHTFPAVLQSSGLYSLSSVVTVPSSSLGTQTYICNVNHKPSNTKVDKKVEPKSCDKTHTCPPCPAPPVAGPSVFLFPPKPKDTLMISRTPEVTCVVVDVKHEDPEVKFNWYVDGVEVHNAKTKPREEQYNSTYRVVSVLTVLHQDWLNGKEYKCKVSNKALPAPIEKTISKAKGQPREPQVYTLPPSREEMTKNQVSLTCLVKGFYPSDIAVEWESNGQPENNYKTTPPVLDSDGSFFLYSKLTVDKSRWQQGNVFSCSVMHEALHNHYTQKSLSLSPGK

SEQ ID NO: 18392 - protein, 122 aa, synthetic construct; identical to SEQ ID NO: 12827
  REGION 1..122: note = Description of Artificial Sequence: Synthetic polypeptide
  REGION 1..122: note = VH of XENP018305

SEQ ID NO: 18393 - protein, 5 aa, synthetic construct
  REGION 1..5: note = Description of Artificial Sequence: Synthetic peptide
  REGION 1..5: note = XENP018305 vhCDR1
NYWMN

SEQ ID NO: 18394 - protein, 19 aa, synthetic construct
  REGION 1..19: note = Description of Artificial Sequence: Synthetic peptide
  REGION 1..19: note = XENP018305 vhCDR2
EIRLKSNNYATHYAEPVKG

SEQ ID NO: 18395 - protein, 11 aa, synthetic construct
  REGION 1..11: note = Description of Artificial Sequence: Synthetic peptide
  REGION 1..11: note = XENP018305 vhCDR3
YYGTYGGYFDV

SEQ ID NO: 18396 - protein, 214 aa, synthetic construct; identical to SEQ ID NO: 16226
  REGION 1..214: note = Description of Artificial Sequence: Synthetic polypeptide
  REGION 1..214: note = XENP018305 1G6_H1.200_L1_IgG1_PVA_/S267K Light Chain

SEQ ID NO: 18397 - protein, 107 aa, synthetic construct; identical to SEQ ID NO: 10923
  REGION 1..107: note = Description of Artificial Sequence: Synthetic polypeptide
  REGION 1..107: note = VL of XENP018305

SEQ ID NO: 18398 - protein, 11 aa, synthetic construct
  REGION 1..11: note = Description of Artificial Sequence: Synthetic peptide
  REGION 1..11: note = XENP018305 vlCDR1
RASQSVSNDVA

SEQ ID NO: 18399 - protein, 7 aa, synthetic construct
  REGION 1..7: note = Description of Artificial Sequence: Synthetic peptide
  REGION 1..7: note = XENP018305 vlCDR2
YASHRYT

SEQ ID NO: 18400 - protein, 9 aa, synthetic construct
  REGION 1..9: note = Description of Artificial Sequence: Synthetic peptide
  REGION 1..9: note = XENP018305 vlCDR3
QQDYSSPRT

SEQ ID NO: 18401 - protein, 451 aa, synthetic construct
  REGION 1..451: note = Description of Artificial Sequence: Synthetic polypeptide
  REGION 1..451: note = XENP018306 1G6_H1.201_L1_IgG1_PVA_/S267K Heavy Chain
EVQLVESGGGLVKPGGSLRLSCAASGFTFSNYWMNWVRQAPGKGLEWVGEIRLKSNNYATHYAEPVKGRFTISRDDSKSTVYLQMNSLKTEDTAVYYCTRYYGGYGGYFDVWGAGTLVTVSSASTKGPSVFPLAPSSKSTSGGTAALGCLVKDYFPEPVTVSWNSGALTSGVHTFPAVLQSSGLYSLSSVVTVPSSSLGTQTYICNVNHKPSNTKVDKKVEPKSCDKTHTCPPCPAPPVAGPSVFLFPPKPKDTLMISRTPEVTCVVVDVKHEDPEVKFNWYVDGVEVHNAKTKPREEQYNSTYRVVSVLTVLHQDWLNGKEYKCKVSNKALPAPIEKTISKAKGQPREPQVYTLPPSREEMTKNQVSLTCLVKGFYPSDIAVEWESNGQPENNYKTTPPVLDSDGSFFLYSKLTVDKSRWQQGNVFSCSVMHEALHNHYTQKSLSLSPGK

SEQ ID NO: 18402 - protein, 122 aa, synthetic construct; identical to SEQ ID NO: 12836
  REGION 1..122: note = Description of Artificial Sequence: Synthetic polypeptide
  REGION 1..122: note = VH of XENP018306

SEQ ID NO: 18403 - protein, 5 aa, synthetic construct
  REGION 1..5: note = Description of Artificial Sequence: Synthetic peptide
  REGION 1..5: note = XENP018306 vhCDR1
NYWMN

SEQ ID NO: 18404 - protein, 19 aa, synthetic construct
  REGION 1..19: note = Description of Artificial Sequence: Synthetic peptide
  REGION 1..19: note = XENP018306 vhCDR2
EIRLKSNNYATHYAEPVKG

SEQ ID NO: 18405 - protein, 11 aa, synthetic construct
  REGION 1..11: note = Description of Artificial Sequence: Synthetic peptide
  REGION 1..11: note = XENP018306 vhCDR3
YYGGYGGYFDV

SEQ ID NO: 18406 - protein, 214 aa, synthetic construct; identical to SEQ ID NO: 16226
  REGION 1..214: note = Description of Artificial Sequence: Synthetic polypeptide
  REGION 1..214: note = XENP018306 1G6_H1.201_L1_IgG1_PVA_/S267K Light Chain

SEQ ID NO: 18407 - protein, 107 aa, synthetic construct; identical to SEQ ID NO: 10923
  REGION 1..107: note = Description of Artificial Sequence: Synthetic polypeptide
  REGION 1..107: note = VL of XENP018306

SEQ ID NO: 18408 - protein, 11 aa, synthetic construct
  REGION 1..11: note = Description of Artificial Sequence: Synthetic peptide
  REGION 1..11: note = XENP018306 vlCDR1
RASQSVSNDVA

SEQ ID NO: 18409 - protein, 7 aa, synthetic construct
  REGION 1..7: note = Description of Artificial Sequence: Synthetic peptide
  REGION 1..7: note = XENP018306 vlCDR2
YASHRYT

SEQ ID NO: 18410 - protein, 9 aa, synthetic construct
  REGION 1..9: note = Description of Artificial Sequence: Synthetic peptide
  REGION 1..9: note = XENP018306 vlCDR3
QQDYSSPRT

SEQ ID NO: 18411 - protein, 451 aa, synthetic construct
  REGION 1..451: note = Description of Artificial Sequence: Synthetic polypeptide
  REGION 1..451: note = XENP018307 1G6_H1.202_L1_IgG1_PVA_/S267K Heavy Chain
EVQLVESGGGLVKPGGSLRLSCAASGFTFSNYWMNWVRQAPGKGLEWVGEIRLKSNNYATHYAEPVKGRFTISRDDSKSTVYLQMNSLKTEDTAVYYCTRYYGFYGGYFDVWGAGTLVTVSSASTKGPSVFPLAPSSKSTSGGTAALGCLVKDYFPEPVTVSWNSGALTSGVHTFPAVLQSSGLYSLSSVVTVPSSSLGTQTYICNVNHKPSNTKVDKKVEPKSCDKTHTCPPCPAPPVAGPSVFLFPPKPKDTLMISRTPEVTCVVVDVKHEDPEVKFNWYVDGVEVHNAKTKPREEQYNSTYRVVSVLTVLHQDWLNGKEYKCKVSNKALPAPIEKTISKAKGQPREPQVYTLPPSREEMTKNQVSLTCLVKGFYPSDIAVEWESNGQPENNYKTTPPVLDSDGSFFLYSKLTVDKSRWQQGNVFSCSVMHEALHNHYTQKSLSLSPGK

SEQ ID NO: 18412 - protein, 122 aa, synthetic construct; identical to SEQ ID NO: 12845
  REGION 1..122: note = Description of Artificial Sequence: Synthetic polypeptide
  REGION 1..122: note = VH of XENP018307

SEQ ID NO: 18413 - protein, 5 aa, synthetic construct
  REGION 1..5: note = Description of Artificial Sequence: Synthetic peptide
  REGION 1..5: note = XENP018307 vhCDR1
NYWMN

SEQ ID NO: 18414 - protein, 19 aa, synthetic construct
  REGION 1..19: note = Description of Artificial Sequence: Synthetic peptide
  REGION 1..19: note = XENP018307 vhCDR2
EIRLKSNNYATHYAEPVKG

SEQ ID NO: 18415 - protein, 11 aa, synthetic construct
  REGION 1..11: note = Description of Artificial Sequence: Synthetic peptide
  REGION 1..11: note = XENP018307 vhCDR3
YYGFYGGYFDV

SEQ ID NO: 18416 - protein, 214 aa, synthetic construct; identical to SEQ ID NO: 16226
  REGION 1..214: note = Description of Artificial Sequence: Synthetic polypeptide
  REGION 1..214: note = XENP018307 1G6_H1.202_L1_IgG1_PVA_/S267K Light Chain

SEQ ID NO: 18417 - protein, 107 aa, synthetic construct; identical to SEQ ID NO: 10923
  REGION 1..107: note = Description of Artificial Sequence: Synthetic polypeptide
  REGION 1..107: note = VL of XENP018307

SEQ ID NO: 18418 - protein, 11 aa, synthetic construct
  REGION 1..11: note = Description of Artificial Sequence: Synthetic peptide
  REGION 1..11: note = XENP018307 vlCDR1
RASQSVSNDVA

SEQ ID NO: 18419 - protein, 7 aa, synthetic construct
  REGION 1..7: note = Description of Artificial Sequence: Synthetic peptide
  REGION 1..7: note = XENP018307 vlCDR2
YASHRYT

SEQ ID NO: 18420 - protein, 9 aa, synthetic construct
  REGION 1..9: note = Description of Artificial Sequence: Synthetic peptide
  REGION 1..9: note = XENP018307 vlCDR3
QQDYSSPRT

SEQ ID NO: 18421 - protein, 451 aa, synthetic construct
  REGION 1..451: note = Description of Artificial Sequence: Synthetic polypeptide
  REGION 1..451: note = XENP018308 1G6_H1.203_L1_IgG1_PVA_/S267K Heavy Chain
EVQLVESGGGLVKPGGSLRLSCAASGFTFSNYWMNWVRQAPGKGLEWVGEIRLKSNNYATHYAEPVKGRFTISRDDSKSTVYLQMNSLKTEDTAVYYCTRYYGNFGGYFDVWGAGTLVTVSSASTKGPSVFPLAPSSKSTSGGTAALGCLVKDYFPEPVTVSWNSGALTSGVHTFPAVLQSSGLYSLSSVVTVPSSSLGTQTYICNVNHKPSNTKVDKKVEPKSCDKTHTCPPCPAPPVAGPSVFLFPPKPKDTLMISRTPEVTCVVVDVKHEDPEVKFNWYVDGVEVHNAKTKPREEQYNSTYRVVSVLTVLHQDWLNGKEYKCKVSNKALPAPIEKTISKAKGQPREPQVYTLPPSREEMTKNQVSLTCLVKGFYPSDIAVEWESNGQPENNYKTTPPVLDSDGSFFLYSKLTVDKSRWQQGNVFSCSVMHEALHNHYTQKSLSLSPGK

SEQ ID NO: 18422 - protein, 122 aa, synthetic construct; identical to SEQ ID NO: 12854
  REGION 1..122: note = Description of Artificial Sequence: Synthetic polypeptide
  REGION 1..122: note = VH of XENP018308

SEQ ID NO: 18423 - protein, 5 aa, synthetic construct
  REGION 1..5: note = Description of Artificial Sequence: Synthetic peptide
  REGION 1..5: note = XENP018308 vhCDR1
NYWMN

SEQ ID NO: 18424 - protein, 19 aa, synthetic construct
  REGION 1..19: note = Description of Artificial Sequence: Synthetic peptide
  REGION 1..19: note = XENP018308 vhCDR2
EIRLKSNNYATHYAEPVKG

SEQ ID NO: 18425 - protein, 11 aa, synthetic construct
  REGION 1..11: note = Description of Artificial Sequence: Synthetic peptide
  REGION 1..11: note = XENP018308 vhCDR3
YYGNFGGYFDV

SEQ ID NO: 18426 - protein, 214 aa, synthetic construct; identical to SEQ ID NO: 16226
  REGION 1..214: note = Description of Artificial Sequence: Synthetic polypeptide
  REGION 1..214: note = XENP018308 1G6_H1.203_L1_IgG1_PVA_/S267K Light Chain

SEQ ID NO: 18427 - protein, 107 aa, synthetic construct; identical to SEQ ID NO: 10923
  REGION 1..107: note = Description of Artificial Sequence: Synthetic polypeptide
  REGION 1..107: note = VL of XENP018308

SEQ ID NO: 18428 - protein, 11 aa, synthetic construct
  REGION 1..11: note = Description of Artificial Sequence: Synthetic peptide
  REGION 1..11: note = XENP018308 vlCDR1
RASQSVSNDVA

SEQ ID NO: 18429 - protein, 7 aa, synthetic construct
  REGION 1..7: note = Description of Artificial Sequence: Synthetic peptide
  REGION 1..7: note = XENP018308 vlCDR2
YASHRYT

SEQ ID NO: 18430 - protein, 9 aa, synthetic construct
  REGION 1..9: note = Description of Artificial Sequence: Synthetic peptide
  REGION 1..9: note = XENP018308 vlCDR3
QQDYSSPRT

SEQ ID NO: 18431 - protein, 451 aa, synthetic construct
  REGION 1..451: note = Description of Artificial Sequence: Synthetic polypeptide
  REGION 1..451: note = XENP018309 1G6_H1.204_L1_IgG1_PVA_/S267K Heavy Chain
EVQLVESGGGLVKPGGSLRLSCAASGFTFSNYWMNWVRQAPGKGLEWVGEIRLKSNNYATHYAEPVKGRFTISRDDSKSTVYLQMNSLKTEDTAVYYCTRYYGNHGGYFDVWGAGTLVTVSSASTKGPSVFPLAPSSKSTSGGTAALGCLVKDYFPEPVTVSWNSGALTSGVHTFPAVLQSSGLYSLSSVVTVPSSSLGTQTYICNVNHKPSNTKVDKKVEPKSCDKTHTCPPCPAPPVAGPSVFLFPPKPKDTLMISRTPEVTCVVVDVKHEDPEVKFNWYVDGVEVHNAKTKPREEQYNSTYRVVSVLTVLHQDWLNGKEYKCKVSNKALPAPIEKTISKAKGQPREPQVYTLPPSREEMTKNQVSLTCLVKGFYPSDIAVEWESNGQPENNYKTTPPVLDSDGSFFLYSKLTVDKSRWQQGNVFSCSVMHEALHNHYTQKSLSLSPGK

SEQ ID NO: 18432 - protein, 122 aa, synthetic construct; identical to SEQ ID NO: 12863
  REGION 1..122: note = Description of Artificial Sequence: Synthetic polypeptide
  REGION 1..122: note = VH of XENP018309

SEQ ID NO: 18433 - protein, 5 aa, synthetic construct
  REGION 1..5: note = Description of Artificial Sequence: Synthetic peptide
  REGION 1..5: note = XENP018309 vhCDR1
NYWMN

SEQ ID NO: 18434 - protein, 19 aa, synthetic construct
  REGION 1..19: note = Description of Artificial Sequence: Synthetic peptide
  REGION 1..19: note = XENP018309 vhCDR2
EIRLKSNNYATHYAEPVKG

SEQ ID NO: 18435 - protein, 11 aa, synthetic construct
  REGION 1..11: note = Description of Artificial Sequence: Synthetic peptide
  REGION 1..11: note = XENP018309 vhCDR3
YYGNHGGYFDV

SEQ ID NO: 18436 - protein, 214 aa, synthetic construct; identical to SEQ ID NO: 16226
  REGION 1..214: note = Description of Artificial Sequence: Synthetic polypeptide
  REGION 1..214: note = XENP018309 1G6_H1.204_L1_IgG1_PVA_/S267K Light Chain

SEQ ID NO: 18437 - protein, 107 aa, synthetic construct; identical to SEQ ID NO: 10923
  REGION 1..107: note = Description of Artificial Sequence: Synthetic polypeptide
  REGION 1..107: note = VL of XENP018309

SEQ ID NO: 18438 - protein, 11 aa, synthetic construct
  REGION 1..11: note = Description of Artificial Sequence: Synthetic peptide
  REGION 1..11: note = XENP018309 vlCDR1
RASQSVSNDVA

SEQ ID NO: 18439 - protein, 7 aa, synthetic construct
  REGION 1..7: note = Description of Artificial Sequence: Synthetic peptide
  REGION 1..7: note = XENP018309 vlCDR2
YASHRYT

SEQ ID NO: 18440 - protein, 9 aa, synthetic construct
  REGION 1..9: note = Description of Artificial Sequence: Synthetic peptide
  REGION 1..9: note = XENP018309 vlCDR3
QQDYSSPRT

SEQ ID NO: 18441 - protein, 451 aa, synthetic construct
  REGION 1..451: note = Description of Artificial Sequence: Synthetic polypeptide
  REGION 1..451: note = XENP018310 1G6_H1.205_L1_IgG1_PVA_/S267K Heavy Chain
EVQLVESGGGLVKPGGSLRLSCAASGFTFSNYWMNWVRQAPGKGLEWVGEIRLKSNNYATHYAEPVKGRFTISRDDSKSTVYLQMNSLKTEDTAVYYCTRYYGNLGGYFDVWGAGTLVTVSSASTKGPSVFPLAPSSKSTSGGTAALGCLVKDYFPEPVTVSWNSGALTSGVHTFPAVLQSSGLYSLSSVVTVPSSSLGTQTYICNVNHKPSNTKVDKKVEPKSCDKTHTCPPCPAPPVAGPSVFLFPPKPKDTLMISRTPEVTCVVVDVKHEDPEVKFNWYVDGVEVHNAKTKPREEQYNSTYRVVSVLTVLHQDWLNGKEYKCKVSNKALPAPIEKTISKAKGQPREPQVYTLPPSREEMTKNQVSLTCLVKGFYPSDIAVEWESNGQPENNYKTTPPVLDSDGSFFLYSKLTVDKSRWQQGNVFSCSVMHEALHNHYTQKSLSLSPGK

SEQ ID NO: 18442 - protein, 122 aa, synthetic construct; identical to SEQ ID NO: 12872
  REGION 1..122: note = Description of Artificial Sequence: Synthetic polypeptide
  REGION 1..122: note = VH of XENP018310

SEQ ID NO: 18443 - protein, 5 aa, synthetic construct
  REGION 1..5: note = Description of Artificial Sequence: Synthetic peptide
  REGION 1..5: note = XENP018310 vhCDR1
NYWMN

SEQ ID NO: 18444 - protein, 19 aa, synthetic construct
  REGION 1..19: note = Description of Artificial Sequence: Synthetic peptide
  REGION 1..19: note = XENP018310 vhCDR2
EIRLKSNNYATHYAEPVKG

SEQ ID NO: 18445 - protein, 11 aa, synthetic construct
  REGION 1..11: note = Description of Artificial Sequence: Synthetic peptide
  REGION 1..11: note = XENP018310 vhCDR3
YYGNLGGYFDV

SEQ ID NO: 18446 - protein, 214 aa, synthetic construct; identical to SEQ ID NO: 16226
  REGION 1..214: note = Description of Artificial Sequence: Synthetic polypeptide
  REGION 1..214: note = XENP018310 1G6_H1.205_L1_IgG1_PVA_/S267K Light Chain

SEQ ID NO: 18447 - protein, 107 aa, synthetic construct; identical to SEQ ID NO: 10923
  REGION 1..107: note = Description of Artificial Sequence: Synthetic polypeptide
  REGION 1..107: note = VL of XENP018310

SEQ ID NO: 18448 - protein, 11 aa, synthetic construct
  REGION 1..11: note = Description of Artificial Sequence: Synthetic peptide
  REGION 1..11: note = XENP018310 vlCDR1
RASQSVSNDVA

SEQ ID NO: 18449 - protein, 7 aa, synthetic construct
  REGION 1..7: note = Description of Artificial Sequence: Synthetic peptide
  REGION 1..7: note = XENP018310 vlCDR2
YASHRYT

SEQ ID NO: 18450 - protein, 9 aa, synthetic construct
  REGION 1..9: note = Description of Artificial Sequence: Synthetic peptide
  REGION 1..9: note = XENP018310 vlCDR3
QQDYSSPRT

SEQ ID NO: 18451 - protein, 451 aa, synthetic construct
  REGION 1..451: note = Description of Artificial Sequence: Synthetic polypeptide
  REGION 1..451: note = XENP018311 1G6_H1.206_L1_IgG1_PVA_/S267K Heavy Chain
EVQLVESGGGLVKPGGSLRLSCAASGFTFSNYWMNWVRQAPGKGLEWVGEIRLKSNNYATHYAEPVKGRFTISRDDSKSTVYLQMNSLKTEDTAVYYCTRYYGNWGGYFDVWGAGTLVTVSSASTKGPSVFPLAPSSKSTSGGTAALGCLVKDYFPEPVTVSWNSGALTSGVHTFPAVLQSSGLYSLSSVVTVPSSSLGTQTYICNVNHKPSNTKVDKKVEPKSCDKTHTCPPCPAPPVAGPSVFLFPPKPKDTLMISRTPEVTCVVVDVKHEDPEVKFNWYVDGVEVHNAKTKPREEQYNSTYRVVSVLTVLHQDWLNGKEYKCKVSNKALPAPIEKTISKAKGQPREPQVYTLPPSREEMTKNQVSLTCLVKGFYPSDIAVEWESNGQPENNYKTTPPVLDSDGSFFLYSKLTVDKSRWQQGNVFSCSVMHEALHNHYTQKSLSLSPGK

SEQ ID NO: 18452 - protein, 122 aa, synthetic construct; identical to SEQ ID NO: 12881
  REGION 1..122: note = Description of Artificial Sequence: Synthetic polypeptide
  REGION 1..122: note = VH of XENP018311

SEQ ID NO: 18453 - protein, 5 aa, synthetic construct
  REGION 1..5: note = Description of Artificial Sequence: Synthetic peptide
  REGION 1..5: note = XENP018311 vhCDR1
NYWMN

SEQ ID NO: 18454 - protein, 19 aa, synthetic construct
  REGION 1..19: note = Description of Artificial Sequence: Synthetic peptide
  REGION 1..19: note = XENP018311 vhCDR2
EIRLKSNNYATHYAEPVKG

SEQ ID NO: 18455 - protein, 11 aa, synthetic construct
  REGION 1..11: note = Description of Artificial Sequence: Synthetic peptide
  REGION 1..11: note = XENP018311 vhCDR3
YYGNWGGYFDV

SEQ ID NO: 18456 - protein, 214 aa, synthetic construct; identical to SEQ ID NO: 16226
  REGION 1..214: note = Description of Artificial Sequence: Synthetic polypeptide
  REGION 1..214: note = XENP018311 1G6_H1.206_L1_IgG1_PVA_/S267K Light Chain

SEQ ID NO: 18457 - protein, 107 aa, synthetic construct; identical to SEQ ID NO: 10923
  REGION 1..107: note = Description of Artificial Sequence: Synthetic polypeptide
  REGION 1..107: note = VL of XENP018311

SEQ ID NO: 18458 - protein, 11 aa, synthetic construct
  REGION 1..11: note = Description of Artificial Sequence: Synthetic peptide
  REGION 1..11: note = XENP018311 vlCDR1
RASQSVSNDVA

SEQ ID NO: 18459 - protein, 7 aa, synthetic construct
  REGION 1..7: note = Description of Artificial Sequence: Synthetic peptide
  REGION 1..7: note = XENP018311 vlCDR2
YASHRYT

SEQ ID NO: 18460 - protein, 9 aa, synthetic construct
  REGION 1..9: note = Description of Artificial Sequence: Synthetic peptide
  REGION 1..9: note = XENP018311 vlCDR3
QQDYSSPRT

SEQ ID NO: 18461 - protein, 451 aa, synthetic construct
  REGION 1..451: note = Description of Artificial Sequence: Synthetic polypeptide
  REGION 1..451: note = XENP018312 1G6_H1.207_L1_IgG1_PVA_/S267K Heavy Chain
EVQLVESGGGLVKPGGSLRLSCAASGFTFSNYWMNWVRQAPGKGLEWVGEIRLKSNNYATHYAEPVKGRFTISRDDSKSTVYLQMNSLKTEDTAVYYCTRYYGNVGGYFDVWGAGTLVTVSSASTKGPSVFPLAPSSKSTSGGTAALGCLVKDYFPEPVTVSWNSGALTSGVHTFPAVLQSSGLYSLSSVVTVPSSSLGTQTYICNVNHKPSNTKVDKKVEPKSCDKTHTCPPCPAPPVAGPSVFLFPPKPKDTLMISRTPEVTCVVVDVKHEDPEVKFNWYVDGVEVHNAKTKPREEQYNSTYRVVSVLTVLHQDWLNGKEYKCKVSNKALPAPIEKTISKAKGQPREPQVYTLPPSREEMTKNQVSLTCLVKGFYPSDIAVEWESNGQPENNYKTTPPVLDSDGSFFLYSKLTVDKSRWQQGNVFSCSVMHEALHNHYTQKSLSLSPGK

SEQ ID NO: 18462 - protein, 122 aa, synthetic construct; identical to SEQ ID NO: 12890
  REGION 1..122: note = Description of Artificial Sequence: Synthetic polypeptide
  REGION 1..122: note = VH of XENP018312

SEQ ID NO: 18463 - protein, 5 aa, synthetic construct
  REGION 1..5: note = Description of Artificial Sequence: Synthetic peptide
  REGION 1..5: note = XENP018312 vhCDR1
NYWMN

SEQ ID NO: 18464 - protein, 19 aa, synthetic construct
  REGION 1..19: note = Description of Artificial Sequence: Synthetic peptide
  REGION 1..19: note = XENP018312 vhCDR2
EIRLKSNNYATHYAEPVKG

SEQ ID NO: 18465 - protein, 11 aa, synthetic construct
  REGION 1..11: note = Description of Artificial Sequence: Synthetic peptide
  REGION 1..11: note = XENP018312 vhCDR3
YYGNVGGYFDV

SEQ ID NO: 18466 - protein, 214 aa, synthetic construct; identical to SEQ ID NO: 16226
  REGION 1..214: note = Description of Artificial Sequence: Synthetic polypeptide
  REGION 1..214: note = XENP018312 1G6_H1.207_L1_IgG1_PVA_/S267K Light Chain

SEQ ID NO: 18467 - protein, 107 aa, synthetic construct; identical to SEQ ID NO: 10923
  REGION 1..107: note = Description of Artificial Sequence: Synthetic polypeptide
  REGION 1..107: note = VL of XENP018312

SEQ ID NO: 18468 - protein, 11 aa, synthetic construct
  REGION 1..11: note = Description of Artificial Sequence: Synthetic peptide
  REGION 1..11: note = XENP018312 vlCDR1
RASQSVSNDVA

SEQ ID NO: 18469 - protein, 7 aa, synthetic construct
  REGION 1..7: note = Description of Artificial Sequence: Synthetic peptide
  REGION 1..7: note = XENP018312 vlCDR2
YASHRYT

SEQ ID NO: 18470 - protein, 9 aa, synthetic construct
  REGION 1..9: note = Description of Artificial Sequence: Synthetic peptide
  REGION 1..9: note = XENP018312 vlCDR3
QQDYSSPRT

SEQ ID NO: 18471 - protein, 451 aa, synthetic construct
  REGION 1..451: note = Description of Artificial Sequence: Synthetic polypeptide
  REGION 1..451: note = XENP018313 1G6_H1.208_L1_IgG1_PVA_/S267K Heavy Chain
EVQLVESGGGLVKPGGSLRLSCAASGFTFSNYWMNWVRQAPGKGLEWVGEIRLKSNNYATHYAEPVKGRFTISRDDSKSTVYLQMNSLKTEDTAVYYCTRYYGNAGGYFDVWGAGTLVTVSSASTKGPSVFPLAPSSKSTSGGTAALGCLVKDYFPEPVTVSWNSGALTSGVHTFPAVLQSSGLYSLSSVVTVPSSSLGTQTYICNVNHKPSNTKVDKKVEPKSCDKTHTCPPCPAPPVAGPSVFLFPPKPKDTLMISRTPEVTCVVVDVKHEDPEVKFNWYVDGVEVHNAKTKPREEQYNSTYRVVSVLTVLHQDWLNGKEYKCKVSNKALPAPIEKTISKAKGQPREPQVYTLPPSREEMTKNQVSLTCLVKGFYPSDIAVEWESNGQPENNYKTTPPVLDSDGSFFLYSKLTVDKSRWQQGNVFSCSVMHEALHNHYTQKSLSLSPGK

SEQ ID NO: 18472 - protein, 122 aa, synthetic construct; identical to SEQ ID NO: 12899
  REGION 1..122: note = Description of Artificial Sequence: Synthetic polypeptide
  REGION 1..122: note = VH of XENP018313

SEQ ID NO: 18473 - protein, 5 aa, synthetic construct
  REGION 1..5: note = Description of Artificial Sequence: Synthetic peptide
  REGION 1..5: note = XENP018313 vhCDR1
NYWMN

SEQ ID NO: 18474 - protein, 19 aa, synthetic construct
  REGION 1..19: note = Description of Artificial Sequence: Synthetic peptide
  REGION 1..19: note = XENP018313 vhCDR2
EIRLKSNNYATHYAEPVKG

SEQ ID NO: 18475 - protein, 11 aa, synthetic construct
  REGION 1..11: note = Description of Artificial Sequence: Synthetic peptide
  REGION 1..11: note = XENP018313 vhCDR3
YYGNAGGYFDV

SEQ ID NO: 18476 - protein, 214 aa, synthetic construct; identical to SEQ ID NO: 16226
  REGION 1..214: note = Description of Artificial Sequence: Synthetic polypeptide
  REGION 1..214: note = XENP018313 1G6_H1.208_L1_IgG1_PVA_/S267K Light Chain

SEQ ID NO: 18477 - protein, 107 aa, synthetic construct; identical to SEQ ID NO: 10923
  REGION 1..107: note = Description of Artificial Sequence: Synthetic polypeptide
  REGION 1..107: note = VL of XENP018313

SEQ ID NO: 18478 - protein, 11 aa, synthetic construct
  REGION 1..11: note = Description of Artificial Sequence: Synthetic peptide
  REGION 1..11: note = XENP018313 vlCDR1
RASQSVSNDVA

SEQ ID NO: 18479 - protein, 7 aa, synthetic construct
  REGION 1..7: note = Description of Artificial Sequence: Synthetic peptide
  REGION 1..7: note = XENP018313 vlCDR2
YASHRYT

SEQ ID NO: 18480 - protein, 9 aa, synthetic construct
  REGION 1..9: note = Description of Artificial Sequence: Synthetic peptide
  REGION 1..9: note = XENP018313 vlCDR3
QQDYSSPRT

SEQ ID NO: 18481 - protein, 451 aa, synthetic construct
  REGION 1..451: note = Description of Artificial Sequence: Synthetic polypeptide
  REGION 1..451: note = XENP018314 1G6_H1.209_L1_IgG1_PVA_/S267K Heavy Chain
EVQLVESGGGLVKPGGSLRLSCAASGFTFSNYWMNWVRQAPGKGLEWVGEIRLKSNNYATHYAEPVKGRFTISRDDSKSTVYLQMNSLKTEDTAVYYCTRYYGNQGGYFDVWGAGTLVTVSSASTKGPSVFPLAPSSKSTSGGTAALGCLVKDYFPEPVTVSWNSGALTSGVHTFPAVLQSSGLYSLSSVVTVPSSSLGTQTYICNVNHKPSNTKVDKKVEPKSCDKTHTCPPCPAPPVAGPSVFLFPPKPKDTLMISRTPEVTCVVVDVKHEDPEVKFNWYVDGVEVHNAKTKPREEQYNSTYRVVSVLTVLHQDWLNGKEYKCKVSNKALPAPIEKTISKAKGQPREPQVYTLPPSREEMTKNQVSLTCLVKGFYPSDIAVEWESNGQPENNYKTTPPVLDSDGSFFLYSKLTVDKSRWQQGNVFSCSVMHEALHNHYTQKSLSLSPGK

SEQ ID NO: 18482 - protein, 122 aa, synthetic construct; identical to SEQ ID NO: 12908
  REGION 1..122: note = Description of Artificial Sequence: Synthetic polypeptide
  REGION 1..122: note = VH of XENP018314

SEQ ID NO: 18483 - protein, 5 aa, synthetic construct
  REGION 1..5: note = Description of Artificial Sequence: Synthetic peptide
  REGION 1..5: note = XENP018314 vhCDR1
NYWMN

SEQ ID NO: 18484 - protein, 19 aa, synthetic construct
  REGION 1..19: note = Description of Artificial Sequence: Synthetic peptide
  REGION 1..19: note = XENP018314 vhCDR2
EIRLKSNNYATHYAEPVKG

SEQ ID NO: 18485 - protein, 11 aa, synthetic construct
  REGION 1..11: note = Description of Artificial Sequence: Synthetic peptide
  REGION 1..11: note = XENP018314 vhCDR3
YYGNQGGYFDV

SEQ ID NO: 18486 - protein, 214 aa, synthetic construct; identical to SEQ ID NO: 16226
  REGION 1..214: note = Description of Artificial Sequence: Synthetic polypeptide
  REGION 1..214: note = XENP018314 1G6_H1.209_L1_IgG1_PVA_/S267K Light Chain

SEQ ID NO: 18487 - protein, 107 aa, synthetic construct; identical to SEQ ID NO: 10923
  REGION 1..107: note = Description of Artificial Sequence: Synthetic polypeptide
  REGION 1..107: note = VL of XENP018314

SEQ ID NO: 18488 - protein, 11 aa, synthetic construct
  REGION 1..11: note = Description of Artificial Sequence: Synthetic peptide
  REGION 1..11: note = XENP018314 vlCDR1
RASQSVSNDVA

SEQ ID NO: 18489 - protein, 7 aa, synthetic construct
  REGION 1..7: note = Description of Artificial Sequence: Synthetic peptide
  REGION 1..7: note = XENP018314 vlCDR2
YASHRYT

SEQ ID NO: 18490 - protein, 9 aa, synthetic construct
  REGION 1..9: note = Description of Artificial Sequence: Synthetic peptide
  REGION 1..9: note = XENP018314 vlCDR3
QQDYSSPRT

SEQ ID NO: 18491 - protein, 451 aa, synthetic construct
  REGION 1..451: note = Description of Artificial Sequence: Synthetic polypeptide
  REGION 1..451: note = XENP018315 1G6_H1.210_L1_IgG1_PVA_/S267K Heavy Chain
EVQLVESGGGLVKPGGSLRLSCAASGFTFSNYWMNWVRQAPGKGLEWVGEIRLKSNNYATHYAEPVKGRFTISRDDSKSTVYLQMNSLKTEDTAVYYCTRYYGNEGGYFDVWGAGTLVTVSSASTKGPSVFPLAPSSKSTSGGTAALGCLVKDYFPEPVTVSWNSGALTSGVHTFPAVLQSSGLYSLSSVVTVPSSSLGTQTYICNVNHKPSNTKVDKKVEPKSCDKTHTCPPCPAPPVAGPSVFLFPPKPKDTLMISRTPEVTCVVVDVKHEDPEVKFNWYVDGVEVHNAKTKPREEQYNSTYRVVSVLTVLHQDWLNGKEYKCKVSNKALPAPIEKTISKAKGQPREPQVYTLPPSREEMTKNQVSLTCLVKGFYPSDIAVEWESNGQPENNYKTTPPVLDSDGSFFLYSKLTVDKSRWQQGNVFSCSVMHEALHNHYTQKSLSLSPGK

SEQ ID NO: 18492 - protein, 122 aa, synthetic construct; identical to SEQ ID NO: 12917
  REGION 1..122: note = Description of Artificial Sequence: Synthetic polypeptide
  REGION 1..122: note = VH of XENP018315

SEQ ID NO: 18493 - protein, 5 aa, synthetic construct
  REGION 1..5: note = Description of Artificial Sequence: Synthetic peptide
  REGION 1..5: note = XENP018315 vhCDR1
NYWMN

SEQ ID NO: 18494 - protein, 19 aa, synthetic construct
  REGION 1..19: note = Description of Artificial Sequence: Synthetic peptide
  REGION 1..19: note = XENP018315 vhCDR2
EIRLKSNNYATHYAEPVKG

SEQ ID NO: 18495 - protein, 11 aa, synthetic construct
  REGION 1..11: note = Description of Artificial Sequence: Synthetic peptide
  REGION 1..11: note = XENP018315 vhCDR3
YYGNEGGYFDV

SEQ ID NO: 18496 - protein, 214 aa, synthetic construct; identical to SEQ ID NO: 16226
  REGION 1..214: note = Description of Artificial Sequence: Synthetic polypeptide
  REGION 1..214: note = XENP018315 1G6_H1.210_L1_IgG1_PVA_/S267K Light Chain

SEQ ID NO: 18497 - protein, 107 aa, synthetic construct; identical to SEQ ID NO: 10923
  REGION 1..107: note = Description of Artificial Sequence: Synthetic polypeptide
  REGION 1..107: note = VL of XENP018315

SEQ ID NO: 18498 - protein, 11 aa, synthetic construct
  REGION 1..11: note = Description of Artificial Sequence: Synthetic peptide
  REGION 1..11: note = XENP018315 vlCDR1
RASQSVSNDVA

SEQ ID NO: 18499 - protein, 7 aa, synthetic construct
  REGION 1..7: note = Description of Artificial Sequence: Synthetic peptide
  REGION 1..7: note = XENP018315 vlCDR2
YASHRYT

SEQ ID NO: 18500 - protein, 9 aa, synthetic construct
  REGION 1..9: note = Description of Artificial Sequence: Synthetic peptide
  REGION 1..9: note = XENP018315 vlCDR3
QQDYSSPRT

SEQ ID NO: 18501 - protein, 451 aa, synthetic construct
  REGION 1..451: note = Description of Artificial Sequence: Synthetic polypeptide
  REGION 1..451: note = XENP018316 1G6_H1.211_L1_IgG1_PVA_/S267K Heavy Chain
EVQLVESGGGLVKPGGSLRLSCAASGFTFSNYWMNWVRQAPGKGLEWVGEIRLKSNNYATHYAEPVKGRFTISRDDSKSTVYLQMNSLKTEDTAVYYCTRYYGNKGGYFDVWGAGTLVTVSSASTKGPSVFPLAPSSKSTSGGTAALGCLVKDYFPEPVTVSWNSGALTSGVHTFPAVLQSSGLYSLSSVVTVPSSSLGTQTYICNVNHKPSNTKVDKKVEPKSCDKTHTCPPCPAPPVAGPSVFLFPPKPKDTLMISRTPEVTCVVVDVKHEDPEVKFNWYVDGVEVHNAKTKPREEQYNSTYRVVSVLTVLHQDWLNGKEYKCKVSNKALPAPIEKTISKAKGQPREPQVYTLPPSREEMTKNQVSLTCLVKGFYPSDIAVEWESNGQPENNYKTTPPVLDSDGSFFLYSKLTVDKSRWQQGNVFSCSVMHEALHNHYTQKSLSLSPGK

SEQ ID NO: 18502 - protein, 122 aa, synthetic construct; identical to SEQ ID NO: 12926
  REGION 1..122: note = Description of Artificial Sequence: Synthetic polypeptide
  REGION 1..122: note = VH of XENP018316

SEQ ID NO: 18503 - protein, 5 aa, synthetic construct
  REGION 1..5: note = Description of Artificial Sequence: Synthetic peptide
  REGION 1..5: note = XENP018316 vhCDR1
NYWMN

SEQ ID NO: 18504 - protein, 19 aa, synthetic construct
  REGION 1..19: note = Description of Artificial Sequence: Synthetic peptide
  REGION 1..19: note = XENP018316 vhCDR2
EIRLKSNNYATHYAEPVKG

SEQ ID NO: 18505 - protein, 11 aa, synthetic construct
  REGION 1..11: note = Description of Artificial Sequence: Synthetic peptide
  REGION 1..11: note = XENP018316 vhCDR3
YYGNKGGYFDV

SEQ ID NO: 18506 - protein, 214 aa, synthetic construct; identical to SEQ ID NO: 16226
  REGION 1..214: note = Description of Artificial Sequence: Synthetic polypeptide
  REGION 1..214: note = XENP018316 1G6_H1.211_L1_IgG1_PVA_/S267K Light Chain

SEQ ID NO: 18507 - protein, 107 aa, synthetic construct; identical to SEQ ID NO: 10923
  REGION 1..107: note = Description of Artificial Sequence: Synthetic polypeptide
  REGION 1..107: note = VL of XENP018316

SEQ ID NO: 18508 - protein, 11 aa, synthetic construct
  REGION 1..11: note = Description of Artificial Sequence: Synthetic peptide
  REGION 1..11: note = XENP018316 vlCDR1
RASQSVSNDVA

SEQ ID NO: 18509 - protein, 7 aa, synthetic construct
  REGION 1..7: note = Description of Artificial Sequence: Synthetic peptide
  REGION 1..7: note = XENP018316 vlCDR2
YASHRYT

SEQ ID NO: 18510 - protein, 9 aa, synthetic construct
  REGION 1..9: note = Description of Artificial Sequence: Synthetic peptide
  REGION 1..9: note = XENP018316 vlCDR3
QQDYSSPRT

SEQ ID NO: 18511 - protein, 451 aa, synthetic construct
  REGION 1..451: note = Description of Artificial Sequence: Synthetic polypeptide
  REGION 1..451: note = XENP018317 1G6_H1.212_L1_IgG1_PVA_/S267K Heavy Chain
EVQLVESGGGLVKPGGSLRLSCAASGFTFSNYWMNWVRQAPGKGLEWVGEIRLKSNNYATHYAEPVKGRFTISRDDSKSTVYLQMNSLKTEDTAVYYCTRYYGNYAGYFDVWGAGTLVTVSSASTKGPSVFPLAPSSKSTSGGTAALGCLVKDYFPEPVTVSWNSGALTSGVHTFPAVLQSSGLYSLSSVVTVPSSSLGTQTYICNVNHKPSNTKVDKKVEPKSCDKTHTCPPCPAPPVAGPSVFLFPPKPKDTLMISRTPEVTCVVVDVKHEDPEVKFNWYVDGVEVHNAKTKPREEQYNSTYRVVSVLTVLHQDWLNGKEYKCKVSNKALPAPIEKTISKAKGQPREPQVYTLPPSREEMTKNQVSLTCLVKGFYPSDIAVEWESNGQPENNYKTTPPVLDSDGSFFLYSKLTVDKSRWQQGNVFSCSVMHEALHNHYTQKSLSLSPGK

SEQ ID NO: 18512 - protein, 122 aa, synthetic construct; identical to SEQ ID NO: 12935
  REGION 1..122: note = Description of Artificial Sequence: Synthetic polypeptide
  REGION 1..122: note = VH of XENP018317

SEQ ID NO: 18513 - protein, 5 aa, synthetic construct
  REGION 1..5: note = Description of Artificial Sequence: Synthetic peptide
  REGION 1..5: note = XENP018317 vhCDR1
NYWMN

SEQ ID NO: 18514 - protein, 19 aa, synthetic construct
  REGION 1..19: note = Description of Artificial Sequence: Synthetic peptide
  REGION 1..19: note = XENP018317 vhCDR2
EIRLKSNNYATHYAEPVKG

SEQ ID NO: 18515 - protein, 11 aa, synthetic construct
  REGION 1..11: note = Description of Artificial Sequence: Synthetic peptide
  REGION 1..11: note = XENP018317 vhCDR3
YYGNYAGYFDV

SEQ ID NO: 18516 - protein, 214 aa, synthetic construct; identical to SEQ ID NO: 16226
  REGION 1..214: note = Description of Artificial Sequence: Synthetic polypeptide
  REGION 1..214: note = XENP018317 1G6_H1.212_L1_IgG1_PVA_/S267K Light Chain

SEQ ID NO: 18517 - protein, 107 aa, synthetic construct; identical to SEQ ID NO: 10923
  REGION 1..107: note = Description of Artificial Sequence: Synthetic polypeptide
  REGION 1..107: note = VL of XENP018317

SEQ ID NO: 18518 - protein, 11 aa, synthetic construct
  REGION 1..11: note = Description of Artificial Sequence: Synthetic peptide
  REGION 1..11: note = XENP018317 vlCDR1
RASQSVSNDVA

SEQ ID NO: 18519 - protein, 7 aa, synthetic construct
  REGION 1..7: note = Description of Artificial Sequence: Synthetic peptide
  REGION 1..7: note = XENP018317 vlCDR2
YASHRYT

SEQ ID NO: 18520 - protein, 9 aa, synthetic construct
  REGION 1..9: note = Description of Artificial Sequence: Synthetic peptide
  REGION 1..9: note = XENP018317 vlCDR3
QQDYSSPRT

SEQ ID NO: 18521 - protein, 451 aa, synthetic construct
  REGION 1..451: note = Description of Artificial Sequence: Synthetic polypeptide
  REGION 1..451: note = XENP018318 1G6_H1.213_L1_IgG1_PVA_/S267K Heavy Chain
EVQLVESGGGLVKPGGSLRLSCAASGFTFSNYWMNWVRQAPGKGLEWVGEIRLKSNNYATHYAEPVKGRFTISRDDSKSTVYLQMNSLKTEDTAVYYCTRYYGNYQGYFDVWGAGTLVTVSSASTKGPSVFPLAPSSKSTSGGTAALGCLVKDYFPEPVTVSWNSGALTSGVHTFPAVLQSSGLYSLSSVVTVPSSSLGTQTYICNVNHKPSNTKVDKKVEPKSCDKTHTCPPCPAPPVAGPSVFLFPPKPKDTLMISRTPEVTCVVVDVKHEDPEVKFNWYVDGVEVHNAKTKPREEQYNSTYRVVSVLTVLHQDWLNGKEYKCKVSNKALPAPIEKTISKAKGQPREPQVYTLPPSREEMTKNQVSLTCLVKGFYPSDIAVEWESNGQPENNYKTTPPVLDSDGSFFLYSKLTVDKSRWQQGNVFSCSVMHEALHNHYTQKSLSLSPGK

SEQ ID NO: 18522 - protein, 122 aa, synthetic construct; identical to SEQ ID NO: 12944
  REGION 1..122: note = Description of Artificial Sequence: Synthetic polypeptide
  REGION 1..122: note = VH of XENP018318

SEQ ID NO: 18523 - protein, 5 aa, synthetic construct
  REGION 1..5: note = Description of Artificial Sequence: Synthetic peptide
  REGION 1..5: note = XENP018318 vhCDR1
NYWMN

SEQ ID NO: 18524 - protein, 19 aa, synthetic construct
  REGION 1..19: note = Description of Artificial Sequence: Synthetic peptide
  REGION 1..19: note = XENP018318 vhCDR2
EIRLKSNNYATHYAEPVKG

SEQ ID NO: 18525 - protein, 11 aa, synthetic construct
  REGION 1..11: note = Description of Artificial Sequence: Synthetic peptide
  REGION 1..11: note = XENP018318 vhCDR3
YYGNYQGYFDV

SEQ ID NO: 18526 - protein, 214 aa, synthetic construct; identical to SEQ ID NO: 16226
  REGION 1..214: note = Description of Artificial Sequence: Synthetic polypeptide
  REGION 1..214: note = XENP018318 1G6_H1.213_L1_IgG1_PVA_/S267K Light Chain

SEQ ID NO: 18527 - protein, 107 aa, synthetic construct; identical to SEQ ID NO: 10923
  REGION 1..107: note = Description of Artificial Sequence: Synthetic polypeptide
  REGION 1..107: note = VL of XENP018318

SEQ ID NO: 18528 - protein, 11 aa, synthetic construct
  REGION 1..11: note = Description of Artificial Sequence: Synthetic peptide
  REGION 1..11: note = XENP018318 vlCDR1
RASQSVSNDVA

SEQ ID NO: 18529 - protein, 7 aa, synthetic construct
  REGION 1..7: note = Description of Artificial Sequence: Synthetic peptide
  REGION 1..7: note = XENP018318 vlCDR2
YASHRYT

SEQ ID NO: 18530 - protein, 9 aa, synthetic construct
  REGION 1..9: note = Description of Artificial Sequence: Synthetic peptide
  REGION 1..9: note = XENP018318 vlCDR3
QQDYSSPRT

SEQ ID NO: 18531 - protein, 451 aa, synthetic construct
  REGION 1..451: note = Description of Artificial Sequence: Synthetic polypeptide
  REGION 1..451: note = XENP018319 1G6_H1.214_L1_IgG1_PVA_/S267K Heavy Chain
EVQLVESGGGLVKPGGSLRLSCAASGFTFSNYWMNWVRQAPGKGLEWVGEIRLKSNNYATHYAEPVKGRFTISRDDSKSTVYLQMNSLKTEDTAVYYCTRYYGNYHGYFDVWGAGTLVTVSSASTKGPSVFPLAPSSKSTSGGTAALGCLVKDYFPEPVTVSWNSGALTSGVHTFPAVLQSSGLYSLSSVVTVPSSSLGTQTYICNVNHKPSNTKVDKKVEPKSCDKTHTCPPCPAPPVAGPSVFLFPPKPKDTLMISRTPEVTCVVVDVKHEDPEVKFNWYVDGVEVHNAKTKPREEQYNSTYRVVSVLTVLHQDWLNGKEYKCKVSNKALPAPIEKTISKAKGQPREPQVYTLPPSREEMTKNQVSLTCLVKGFYPSDIAVEWESNGQPENNYKTTPPVLDSDGSFFLYSKLTVDKSRWQQGNVFSCSVMHEALHNHYTQKSLSLSPGK

SEQ ID NO: 18532 - protein, 122 aa, synthetic construct; identical to SEQ ID NO: 12953
  REGION 1..122: note = Description of Artificial Sequence: Synthetic polypeptide
  REGION 1..122: note = VH of XENP018319

SEQ ID NO: 18533 - protein, 5 aa, synthetic construct
  REGION 1..5: note = Description of Artificial Sequence: Synthetic peptide
  REGION 1..5: note = XENP018319 vhCDR1
NYWMN

SEQ ID NO: 18534 - protein, 19 aa, synthetic construct
  REGION 1..19: note = Description of Artificial Sequence: Synthetic peptide
  REGION 1..19: note = XENP018319 vhCDR2
EIRLKSNNYATHYAEPVKG

SEQ ID NO: 18535 - protein, 11 aa, synthetic construct
  REGION 1..11: note = Description of Artificial Sequence: Synthetic peptide
  REGION 1..11: note = XENP018319 vhCDR3
YYGNYHGYFDV

SEQ ID NO: 18536 - protein, 214 aa, synthetic construct; identical to SEQ ID NO: 16226
  REGION 1..214: note = Description of Artificial Sequence: Synthetic polypeptide
  REGION 1..214: note = XENP018319 1G6_H1.214_L1_IgG1_PVA_/S267K Light Chain

SEQ ID NO: 18537 - protein, 107 aa, synthetic construct; identical to SEQ ID NO: 10923
  REGION 1..107: note = Description of Artificial Sequence: Synthetic polypeptide
  REGION 1..107: note = VL of XENP018319

SEQ ID NO: 18538 - protein, 11 aa, synthetic construct
  REGION 1..11: note = Description of Artificial Sequence: Synthetic peptide
  REGION 1..11: note = XENP018319 vlCDR1
RASQSVSNDVA

SEQ ID NO: 18539 - protein, 7 aa, synthetic construct
  REGION 1..7: note = Description of Artificial Sequence: Synthetic peptide
  REGION 1..7: note = XENP018319 vlCDR2
YASHRYT

SEQ ID NO: 18540 - protein, 9 aa, synthetic construct
  REGION 1..9: note = Description of Artificial Sequence: Synthetic peptide
  REGION 1..9: note = XENP018319 vlCDR3
QQDYSSPRT

SEQ ID NO: 18541 - protein, 451 aa, synthetic construct
  REGION 1..451: note = Description of Artificial Sequence: Synthetic polypeptide
  REGION 1..451: note = XENP018320 1G6_H1.215_L1_IgG1_PVA_/S267K Heavy Chain
EVQLVESGGGLVKPGGSLRLSCAASGFTFSNYWMNWVRQAPGKGLEWVGEIRLKSNNYATHYAEPVKGRFTISRDDSKSTVYLQMNSLKTEDTAVYYCTRYYGNYDGYFDVWGAGTLVTVSSASTKGPSVFPLAPSSKSTSGGTAALGCLVKDYFPEPVTVSWNSGALTSGVHTFPAVLQSSGLYSLSSVVTVPSSSLGTQTYICNVNHKPSNTKVDKKVEPKSCDKTHTCPPCPAPPVAGPSVFLFPPKPKDTLMISRTPEVTCVVVDVKHEDPEVKFNWYVDGVEVHNAKTKPREEQYNSTYRVVSVLTVLHQDWLNGKEYKCKVSNKALPAPIEKTISKAKGQPREPQVYTLPPSREEMTKNQVSLTCLVKGFYPSDIAVEWESNGQPENNYKTTPPVLDSDGSFFLYSKLTVDKSRWQQGNVFSCSVMHEALHNHYTQKSLSLSPGK

SEQ ID NO: 18542 - protein, 122 aa, synthetic construct; identical to SEQ ID NO: 12962
  REGION 1..122: note = Description of Artificial Sequence: Synthetic polypeptide
  REGION 1..122: note = VH of XENP018320

SEQ ID NO: 18543 - protein, 5 aa, synthetic construct
  REGION 1..5: note = Description of Artificial Sequence: Synthetic peptide
  REGION 1..5: note = XENP018320 vhCDR1
NYWMN

SEQ ID NO: 18544 - protein, 19 aa, synthetic construct
  REGION 1..19: note = Description of Artificial Sequence: Synthetic peptide
  REGION 1..19: note = XENP018320 vhCDR2
EIRLKSNNYATHYAEPVKG

SEQ ID NO: 18545 - protein, 11 aa, synthetic construct
  REGION 1..11: note = Description of Artificial Sequence: Synthetic peptide
  REGION 1..11: note = XENP018320 vhCDR3
YYGNYDGYFDV

SEQ ID NO: 18546 - protein, 214 aa, synthetic construct; identical to SEQ ID NO: 16226
  REGION 1..214: note = Description of Artificial Sequence: Synthetic polypeptide
  REGION 1..214: note = XENP018320 1G6_H1.215_L1_IgG1_PVA_/S267K Light Chain

SEQ ID NO: 18547 - protein, 107 aa, synthetic construct; identical to SEQ ID NO: 10923
  REGION 1..107: note = Description of Artificial Sequence: Synthetic polypeptide
  REGION 1..107: note = VL of XENP018320

SEQ ID NO: 18548 - protein, 11 aa, synthetic construct
  REGION 1..11: note = Description of Artificial Sequence: Synthetic peptide
  REGION 1..11: note = XENP018320 vlCDR1
RASQSVSNDVA

SEQ ID NO: 18549 - protein, 7 aa, synthetic construct
  REGION 1..7: note = Description of Artificial Sequence: Synthetic peptide
  REGION 1..7: note = XENP018320 vlCDR2
YASHRYT

SEQ ID NO: 18550 - protein, 9 aa, synthetic construct
  REGION 1..9: note = Description of Artificial Sequence: Synthetic peptide
  REGION 1..9: note = XENP018320 vlCDR3
QQDYSSPRT

SEQ ID NO: 18551 - protein, 451 aa, synthetic construct
  REGION 1..451: note = Description of Artificial Sequence: Synthetic polypeptide
  REGION 1..451: note = XENP018321 1G6_H1.216_L1_IgG1_PVA_/S267K Heavy Chain
EVQLVESGGGLVKPGGSLRLSCAASGFTFSNYWMNWVRQAPGKGLEWVGEIRLKSNNYATHYAEPVKGRFTISRDDSKSTVYLQMNSLKTEDTAVYYCTRYYGNYKGYFDVWGAGTLVTVSSASTKGPSVFPLAPSSKSTSGGTAALGCLVKDYFPEPVTVSWNSGALTSGVHTFPAVLQSSGLYSLSSVVTVPSSSLGTQTYICNVNHKPSNTKVDKKVEPKSCDKTHTCPPCPAPPVAGPSVFLFPPKPKDTLMISRTPEVTCVVVDVKHEDPEVKFNWYVDGVEVHNAKTKPREEQYNSTYRVVSVLTVLHQDWLNGKEYKCKVSNKALPAPIEKTISKAKGQPREPQVYTLPPSREEMTKNQVSLTCLVKGFYPSDIAVEWESNGQPENNYKTTPPVLDSDGSFFLYSKLTVDKSRWQQGNVFSCSVMHEALHNHYTQKSLSLSPGK

SEQ ID NO: 18552 - protein, 122 aa, synthetic construct; identical to SEQ ID NO: 12971
  REGION 1..122: note = Description of Artificial Sequence: Synthetic polypeptide
  REGION 1..122: note = VH of XENP018321

SEQ ID NO: 18553 - protein, 5 aa, synthetic construct
  REGION 1..5: note = Description of Artificial Sequence: Synthetic peptide
  REGION 1..5: note = XENP018321 vhCDR1
NYWMN

SEQ ID NO: 18554 - protein, 19 aa, synthetic construct
  REGION 1..19: note = Description of Artificial Sequence: Synthetic peptide
  REGION 1..19: note = XENP018321 vhCDR2
EIRLKSNNYATHYAEPVKG

SEQ ID NO: 18555 - protein, 11 aa, synthetic construct
  REGION 1..11: note = Description of Artificial Sequence: Synthetic peptide
  REGION 1..11: note = XENP018321 vhCDR3
YYGNYKGYFDV

SEQ ID NO: 18556 - protein, 214 aa, synthetic construct; identical to SEQ ID NO: 16226
  REGION 1..214: note = Description of Artificial Sequence: Synthetic polypeptide
  REGION 1..214: note = XENP018321 1G6_H1.216_L1_IgG1_PVA_/S267K Light Chain

SEQ ID NO: 18557 - protein, 107 aa, synthetic construct; identical to SEQ ID NO: 10923
  REGION 1..107: note = Description of Artificial Sequence: Synthetic polypeptide
  REGION 1..107: note = VL of XENP018321

SEQ ID NO: 18558 - protein, 11 aa, synthetic construct
  REGION 1..11: note = Description of Artificial Sequence: Synthetic peptide
  REGION 1..11: note = XENP018321 vlCDR1
RASQSVSNDVA

SEQ ID NO: 18559 - protein, 7 aa, synthetic construct
  REGION 1..7: note = Description of Artificial Sequence: Synthetic peptide
  REGION 1..7: note = XENP018321 vlCDR2
YASHRYT

SEQ ID NO: 18560 - protein, 9 aa, synthetic construct
  REGION 1..9: note = Description of Artificial Sequence: Synthetic peptide
  REGION 1..9: note = XENP018321 vlCDR3
QQDYSSPRT

SEQ ID NO: 18561 - protein, 451 aa, synthetic construct
  REGION 1..451: note = Description of Artificial Sequence: Synthetic polypeptide
  REGION 1..451: note = XENP018322 1G6_H1.217_L1_IgG1_PVA_/S267K Heavy Chain
EVQLVESGGGLVKPGGSLRLSCAASGFTFSNYWMNWVRQAPGKGLEWVGEIRLKSNNYATHYAEPVKGRFTISRDDSKSTVYLQMNSLKTEDTAVYYCTRYYGNYLGYFDVWGAGTLVTVSSASTKGPSVFPLAPSSKSTSGGTAALGCLVKDYFPEPVTVSWNSGALTSGVHTFPAVLQSSGLYSLSSVVTVPSSSLGTQTYICNVNHKPSNTKVDKKVEPKSCDKTHTCPPCPAPPVAGPSVFLFPPKPKDTLMISRTPEVTCVVVDVKHEDPEVKFNWYVDGVEVHNAKTKPREEQYNSTYRVVSVLTVLHQDWLNGKEYKCKVSNKALPAPIEKTISKAKGQPREPQVYTLPPSREEMTKNQVSLTCLVKGFYPSDIAVEWESNGQPENNYKTTPPVLDSDGSFFLYSKLTVDKSRWQQGNVFSCSVMHEALHNHYTQKSLSLSPGK

SEQ ID NO: 18562 - protein, 122 aa, synthetic construct; identical to SEQ ID NO: 12980
  REGION 1..122: note = Description of Artificial Sequence: Synthetic polypeptide
  REGION 1..122: note = VH of XENP018322

SEQ ID NO: 18563 - protein, 5 aa, synthetic construct
  REGION 1..5: note = Description of Artificial Sequence: Synthetic peptide
  REGION 1..5: note = XENP018322 vhCDR1
NYWMN

SEQ ID NO: 18564 - protein, 19 aa, synthetic construct
  REGION 1..19: note = Description of Artificial Sequence: Synthetic peptide
  REGION 1..19: note = XENP018322 vhCDR2
EIRLKSNNYATHYAEPVKG

SEQ ID NO: 18565 - protein, 11 aa, synthetic construct
  REGION 1..11: note = Description of Artificial Sequence: Synthetic peptide
  REGION 1..11: note = XENP018322 vhCDR3
YYGNYLGYFDV

SEQ ID NO: 18566 - protein, 214 aa, synthetic construct; identical to SEQ ID NO: 16226
  REGION 1..214: note = Description of Artificial Sequence: Synthetic polypeptide
  REGION 1..214: note = XENP018322 1G6_H1.217_L1_IgG1_PVA_/S267K Light Chain

SEQ ID NO: 18567 - protein, 107 aa, synthetic construct; identical to SEQ ID NO: 10923
  REGION 1..107: note = Description of Artificial Sequence: Synthetic polypeptide
  REGION 1..107: note = VL of XENP018322

SEQ ID NO: 18568 - protein, 11 aa, synthetic construct
  REGION 1..11: note = Description of Artificial Sequence: Synthetic peptide
  REGION 1..11: note = XENP018322 vlCDR1
RASQSVSNDVA

SEQ ID NO: 18569 - protein, 7 aa, synthetic construct
  REGION 1..7: note = Description of Artificial Sequence: Synthetic peptide
  REGION 1..7: note = XENP018322 vlCDR2
YASHRYT

SEQ ID NO: 18570 - protein, 9 aa, synthetic construct
  REGION 1..9: note = Description of Artificial Sequence: Synthetic peptide
  REGION 1..9: note = XENP018322 vlCDR3
QQDYSSPRT

SEQ ID NO: 18571 - protein, 451 aa, synthetic construct
  REGION 1..451: note = Description of Artificial Sequence: Synthetic polypeptide
  REGION 1..451: note = XENP018323 1G6_H1.218_L1_IgG1_PVA_/S267K Heavy Chain
EVQLVESGGGLVKPGGSLRLSCAASGFTFSNYWMNWVRQAPGKGLEWVGEIRLKSNNYATHYAEPVKGRFTISRDDSKSTVYLQMNSLKTEDTAVYYCTRYYGNYFGYFDVWGAGTLVTVSSASTKGPSVFPLAPSSKSTSGGTAALGCLVKDYFPEPVTVSWNSGALTSGVHTFPAVLQSSGLYSLSSVVTVPSSSLGTQTYICNVNHKPSNTKVDKKVEPKSCDKTHTCPPCPAPPVAGPSVFLFPPKPKDTLMISRTPEVTCVVVDVKHEDPEVKFNWYVDGVEVHNAKTKPREEQYNSTYRVVSVLTVLHQDWLNGKEYKCKVSNKALPAPIEKTISKAKGQPREPQVYTLPPSREEMTKNQVSLTCLVKGFYPSDIAVEWESNGQPENNYKTTPPVLDSDGSFFLYSKLTVDKSRWQQGNVFSCSVMHEALHNHYTQKSLSLSPGK

SEQ ID NO: 18572 - protein, 122 aa, synthetic construct; identical to SEQ ID NO: 12989
  REGION 1..122: note = Description of Artificial Sequence: Synthetic polypeptide
  REGION 1..122: note = VH of XENP018323

SEQ ID NO: 18573 - protein, 5 aa, synthetic construct
  REGION 1..5: note = Description of Artificial Sequence: Synthetic peptide
  REGION 1..5: note = XENP018323 vhCDR1
NYWMN

SEQ ID NO: 18574 - protein, 19 aa, synthetic construct
  REGION 1..19: note = Description of Artificial Sequence: Synthetic peptide
  REGION 1..19: note = XENP018323 vhCDR2
EIRLKSNNYATHYAEPVKG

SEQ ID NO: 18575 - protein, 11 aa, synthetic construct
  REGION 1..11: note = Description of Artificial Sequence: Synthetic peptide
  REGION 1..11: note = XENP018323 vhCDR3
YYGNYFGYFDV

SEQ ID NO: 18576 - protein, 214 aa, synthetic construct; identical to SEQ ID NO: 16226
  REGION 1..214: note = Description of Artificial Sequence: Synthetic polypeptide
  REGION 1..214: note = XENP018323 1G6_H1.218_L1_IgG1_PVA_/S267K Light Chain

SEQ ID NO: 18577 - protein, 107 aa, synthetic construct; identical to SEQ ID NO: 10923
  REGION 1..107: note = Description of Artificial Sequence: Synthetic polypeptide
  REGION 1..107: note = VL of XENP018323

SEQ ID NO: 18578 - protein, 11 aa, synthetic construct
  REGION 1..11: note = Description of Artificial Sequence: Synthetic peptide
  REGION 1..11: note = XENP018323 vlCDR1
RASQSVSNDVA

SEQ ID NO: 18579 - protein, 7 aa, synthetic construct
  REGION 1..7: note = Description of Artificial Sequence: Synthetic peptide
  REGION 1..7: note = XENP018323 vlCDR2
YASHRYT

SEQ ID NO: 18580 - protein, 9 aa, synthetic construct
  REGION 1..9: note = Description of Artificial Sequence: Synthetic peptide
  REGION 1..9: note = XENP018323 vlCDR3
QQDYSSPRT

SEQ ID NO: 18581 - protein, 451 aa, synthetic construct
  REGION 1..451: note = Description of Artificial Sequence: Synthetic polypeptide
  REGION 1..451: note = XENP018324 1G6_H1.219_L1_IgG1_PVA_/S267K Heavy Chain
EVQLVESGGGLVKPGGSLRLSCAASGFTFSNYWMNWVRQAPGKGLEWVGEIRLKSNNYATHYAEPVKGRFTISRDDSKSTVYLQMNSLKTEDTAVYYCTRYYGNYGAYFDVWGAGTLVTVSSASTKGPSVFPLAPSSKSTSGGTAALGCLVKDYFPEPVTVSWNSGALTSGVHTFPAVLQSSGLYSLSSVVTVPSSSLGTQTYICNVNHKPSNTKVDKKVEPKSCDKTHTCPPCPAPPVAGPSVFLFPPKPKDTLMISRTPEVTCVVVDVKHEDPEVKFNWYVDGVEVHNAKTKPREEQYNSTYRVVSVLTVLHQDWLNGKEYKCKVSNKALPAPIEKTISKAKGQPREPQVYTLPPSREEMTKNQVSLTCLVKGFYPSDIAVEWESNGQPENNYKTTPPVLDSDGSFFLYSKLTVDKSRWQQGNVFSCSVMHEALHNHYTQKSLSLSPGK

SEQ ID NO: 18582 - protein, 122 aa, synthetic construct; identical to SEQ ID NO: 12998
  REGION 1..122: note = Description of Artificial Sequence: Synthetic polypeptide
  REGION 1..122: note = VH of XENP018324

SEQ ID NO: 18583 - protein, 5 aa, synthetic construct
  REGION 1..5: note = Description of Artificial Sequence: Synthetic peptide
  REGION 1..5: note = XENP018324 vhCDR1
NYWMN

SEQ ID NO: 18584 - protein, 19 aa, synthetic construct
  REGION 1..19: note = Description of Artificial Sequence: Synthetic peptide
  REGION 1..19: note = XENP018324 vhCDR2
EIRLKSNNYATHYAEPVKG

SEQ ID NO: 18585 - protein, 11 aa, synthetic construct
  REGION 1..11: note = Description of Artificial Sequence: Synthetic peptide
  REGION 1..11: note = XENP018324 vhCDR3
YYGNYGAYFDV

SEQ ID NO: 18586 - protein, 214 aa, synthetic construct; identical to SEQ ID NO: 16226
  REGION 1..214: note = Description of Artificial Sequence: Synthetic polypeptide
  REGION 1..214: note = XENP018324 1G6_H1.219_L1_IgG1_PVA_/S267K Light Chain

SEQ ID NO: 18587 - protein, 107 aa, synthetic construct; identical to SEQ ID NO: 10923
  REGION 1..107: note = Description of Artificial Sequence: Synthetic polypeptide
  REGION 1..107: note = VL of XENP018324

SEQ ID NO: 18588 - protein, 11 aa, synthetic construct
  REGION 1..11: note = Description of Artificial Sequence: Synthetic peptide
  REGION 1..11: note = XENP018324 vlCDR1
RASQSVSNDVA

SEQ ID NO: 18589 - protein, 7 aa, synthetic construct
  REGION 1..7: note = Description of Artificial Sequence: Synthetic peptide
  REGION 1..7: note = XENP018324 vlCDR2
YASHRYT

SEQ ID NO: 18590 - protein, 9 aa, synthetic construct
  REGION 1..9: note = Description of Artificial Sequence: Synthetic peptide
  REGION 1..9: note = XENP018324 vlCDR3
QQDYSSPRT

SEQ ID NO: 18591 - protein, 451 aa, synthetic construct
  REGION 1..451: note = Description of Artificial Sequence: Synthetic polypeptide
  REGION 1..451: note = XENP018325 1G6_H1.220_L1_IgG1_PVA_/S267K Heavy Chain
EVQLVESGGGLVKPGGSLRLSCAASGFTFSNYWMNWVRQAPGKGLEWVGEIRLKSNNYATHYAEPVKGRFTISRDDSKSTVYLQMNSLKTEDTAVYYCTRYYGNYGSYFDVWGAGTLVTVSSASTKGPSVFPLAPSSKSTSGGTAALGCLVKDYFPEPVTVSWNSGALTSGVHTFPAVLQSSGLYSLSSVVTVPSSSLGTQTYICNVNHKPSNTKVDKKVEPKSCDKTHTCPPCPAPPVAGPSVFLFPPKPKDTLMISRTPEVTCVVVDVKHEDPEVKFNWYVDGVEVHNAKTKPREEQYNSTYRVVSVLTVLHQDWLNGKEYKCKVSNKALPAPIEKTISKAKGQPREPQVYTLPPSREEMTKNQVSLTCLVKGFYPSDIAVEWESNGQPENNYKTTPPVLDSDGSFFLYSKLTVDKSRWQQGNVFSCSVMHEALHNHYTQKSLSLSPGK

SEQ ID NO: 18592 - protein, 122 aa, synthetic construct; identical to SEQ ID NO: 13007
  REGION 1..122: note = Description of Artificial Sequence: Synthetic polypeptide
  REGION 1..122: note = VH of XENP018325

SEQ ID NO: 18593 - protein, 5 aa, synthetic construct
  REGION 1..5: note = Description of Artificial Sequence: Synthetic peptide
  REGION 1..5: note = XENP018325 vhCDR1
NYWMN

SEQ ID NO: 18594 - protein, 19 aa, synthetic construct
  REGION 1..19: note = Description of Artificial Sequence: Synthetic peptide
  REGION 1..19: note = XENP018325 vhCDR2
EIRLKSNNYATHYAEPVKG

SEQ ID NO: 18595 - protein, 11 aa, synthetic construct
  REGION 1..11: note = Description of Artificial Sequence: Synthetic peptide
  REGION 1..11: note = XENP018325 vhCDR3
YYGNYGSYFDV

SEQ ID NO: 18596 - protein, 214 aa, synthetic construct; identical to SEQ ID NO: 16226
  REGION 1..214: note = Description of Artificial Sequence: Synthetic polypeptide
  REGION 1..214: note = XENP018325 1G6_H1.220_L1_IgG1_PVA_/S267K Light Chain

SEQ ID NO: 18597 - protein, 107 aa, synthetic construct; identical to SEQ ID NO: 10923
  REGION 1..107: note = Description of Artificial Sequence: Synthetic polypeptide
  REGION 1..107: note = VL of XENP018325

SEQ ID NO: 18598 - protein, 11 aa, synthetic construct
  REGION 1..11: note = Description of Artificial Sequence: Synthetic peptide
  REGION 1..11: note = XENP018325 vlCDR1
RASQSVSNDVA

SEQ ID NO: 18599 - protein, 7 aa, synthetic construct
  REGION 1..7: note = Description of Artificial Sequence: Synthetic peptide
  REGION 1..7: note = XENP018325 vlCDR2
YASHRYT

SEQ ID NO: 18600 - protein, 9 aa, synthetic construct
  REGION 1..9: note = Description of Artificial Sequence: Synthetic peptide
  REGION 1..9: note = XENP018325 vlCDR3
QQDYSSPRT

SEQ ID NO: 18601 - protein, 451 aa, synthetic construct
  REGION 1..451: note = Description of Artificial Sequence: Synthetic polypeptide
  REGION 1..451: note = XENP018326 1G6_H1.221_L1_IgG1_PVA_/S267K Heavy Chain
EVQLVESGGGLVKPGGSLRLSCAASGFTFSNYWMNWVRQAPGKGLEWVGEIRLKSNNYATHYAEPVKGRFTISRDDSKSTVYLQMNSLKTEDTAVYYCTRYYGNYGTYFDVWGAGTLVTVSSASTKGPSVFPLAPSSKSTSGGTAALGCLVKDYFPEPVTVSWNSGALTSGVHTFPAVLQSSGLYSLSSVVTVPSSSLGTQTYICNVNHKPSNTKVDKKVEPKSCDKTHTCPPCPAPPVAGPSVFLFPPKPKDTLMISRTPEVTCVVVDVKHEDPEVKFNWYVDGVEVHNAKTKPREEQYNSTYRVVSVLTVLHQDWLNGKEYKCKVSNKALPAPIEKTISKAKGQPREPQVYTLPPSREEMTKNQVSLTCLVKGFYPSDIAVEWESNGQPENNYKTTPPVLDSDGSFFLYSKLTVDKSRWQQGNVFSCSVMHEALHNHYTQKSLSLSPGK

SEQ ID NO: 18602 - protein, 122 aa, synthetic construct; identical to SEQ ID NO: 13016
  REGION 1..122: note = Description of Artificial Sequence: Synthetic polypeptide
  REGION 1..122: note = VH of XENP018326

SEQ ID NO: 18603 - protein, 5 aa, synthetic construct
  REGION 1..5: note = Description of Artificial Sequence: Synthetic peptide
  REGION 1..5: note = XENP018326 vhCDR1
NYWMN

SEQ ID NO: 18604 - protein, 19 aa, synthetic construct
  REGION 1..19: note = Description of Artificial Sequence: Synthetic peptide
  REGION 1..19: note = XENP018326 vhCDR2
EIRLKSNNYATHYAEPVKG

SEQ ID NO: 18605 - protein, 11 aa, synthetic construct
  REGION 1..11: note = Description of Artificial Sequence: Synthetic peptide
  REGION 1..11: note = XENP018326 vhCDR3
YYGNYGTYFDV

SEQ ID NO: 18606 - protein, 214 aa, synthetic construct; identical to SEQ ID NO: 16226
  REGION 1..214: note = Description of Artificial Sequence: Synthetic polypeptide
  REGION 1..214: note = XENP018326 1G6_H1.221_L1_IgG1_PVA_/S267K Light Chain

SEQ ID NO: 18607 - protein, 107 aa, synthetic construct; identical to SEQ ID NO: 10923
  REGION 1..107: note = Description of Artificial Sequence: Synthetic polypeptide
  REGION 1..107: note = VL of XENP018326

SEQ ID NO: 18608 - protein, 11 aa, synthetic construct
  REGION 1..11: note = Description of Artificial Sequence: Synthetic peptide
  REGION 1..11: note = XENP018326 vlCDR1
RASQSVSNDVA

SEQ ID NO: 18609 - protein, 7 aa, synthetic construct
  REGION 1..7: note = Description of Artificial Sequence: Synthetic peptide
  REGION 1..7: note = XENP018326 vlCDR2
YASHRYT

SEQ ID NO: 18610 - protein, 9 aa, synthetic construct
  REGION 1..9: note = Description of Artificial Sequence: Synthetic peptide
  REGION 1..9: note = XENP018326 vlCDR3
QQDYSSPRT

SEQ ID NO: 18611 - protein, 451 aa, synthetic construct
  REGION 1..451: note = Description of Artificial Sequence: Synthetic polypeptide
  REGION 1..451: note = XENP018327 1G6_H1.222_L1_IgG1_PVA_/S267K Heavy Chain
EVQLVESGGGLVKPGGSLRLSCAASGFTFSNYWMNWVRQAPGKGLEWVGEIRLKSNNYATHYAEPVKGRFTISRDDSKSTVYLQMNSLKTEDTAVYYCTRYYGNYGNYFDVWGAGTLVTVSSASTKGPSVFPLAPSSKSTSGGTAALGCLVKDYFPEPVTVSWNSGALTSGVHTFPAVLQSSGLYSLSSVVTVPSSSLGTQTYICNVNHKPSNTKVDKKVEPKSCDKTHTCPPCPAPPVAGPSVFLFPPKPKDTLMISRTPEVTCVVVDVKHEDPEVKFNWYVDGVEVHNAKTKPREEQYNSTYRVVSVLTVLHQDWLNGKEYKCKVSNKALPAPIEKTISKAKGQPREPQVYTLPPSREEMTKNQVSLTCLVKGFYPSDIAVEWESNGQPENNYKTTPPVLDSDGSFFLYSKLTVDKSRWQQGNVFSCSVMHEALHNHYTQKSLSLSPGK

SEQ ID NO: 18612 - protein, 122 aa, synthetic construct; identical to SEQ ID NO: 13025
  REGION 1..122: note = Description of Artificial Sequence: Synthetic polypeptide
  REGION 1..122: note = VH of XENP018327

SEQ ID NO: 18613 - protein, 5 aa, synthetic construct
  REGION 1..5: note = Description of Artificial Sequence: Synthetic peptide
  REGION 1..5: note = XENP018327 vhCDR1
NYWMN

SEQ ID NO: 18614 - protein, 19 aa, synthetic construct
  REGION 1..19: note = Description of Artificial Sequence: Synthetic peptide
  REGION 1..19: note = XENP018327 vhCDR2
EIRLKSNNYATHYAEPVKG

SEQ ID NO: 18615 - protein, 11 aa, synthetic construct
  REGION 1..11: note = Description of Artificial Sequence: Synthetic peptide
  REGION 1..11: note = XENP018327 vhCDR3
YYGNYGNYFDV

SEQ ID NO: 18616 - protein, 214 aa, synthetic construct; identical to SEQ ID NO: 16226
  REGION 1..214: note = Description of Artificial Sequence: Synthetic polypeptide
  REGION 1..214: note = XENP018327 1G6_H1.222_L1_IgG1_PVA_/S267K Light Chain

SEQ ID NO: 18617 - protein, 107 aa, synthetic construct; identical to SEQ ID NO: 10923
  REGION 1..107: note = Description of Artificial Sequence: Synthetic polypeptide
  REGION 1..107: note = VL of XENP018327

SEQ ID NO: 18618 - protein, 11 aa, synthetic construct
  REGION 1..11: note = Description of Artificial Sequence: Synthetic peptide
  REGION 1..11: note = XENP018327 vlCDR1
RASQSVSNDVA

SEQ ID NO: 18619 - protein, 7 aa, synthetic construct
  REGION 1..7: note = Description of Artificial Sequence: Synthetic peptide
  REGION 1..7: note = XENP018327 vlCDR2
YASHRYT

SEQ ID NO: 18620 - protein, 9 aa, synthetic construct
  REGION 1..9: note = Description of Artificial Sequence: Synthetic peptide
  REGION 1..9: note = XENP018327 vlCDR3
QQDYSSPRT

SEQ ID NO: 18621 - protein, 451 aa, synthetic construct
  REGION 1..451: note = Description of Artificial Sequence: Synthetic polypeptide
  REGION 1..451: note = XENP018328 1G6_H1.223_L1_IgG1_PVA_/S267K Heavy Chain
EVQLVESGGGLVKPGGSLRLSCAASGFTFSNYWMNWVRQAPGKGLEWVGEIRLKSNNYATHYAEPVKGRFTISRDDSKSTVYLQMNSLKTEDTAVYYCTRYYGNYGHYFDVWGAGTLVTVSSASTKGPSVFPLAPSSKSTSGGTAALGCLVKDYFPEPVTVSWNSGALTSGVHTFPAVLQSSGLYSLSSVVTVPSSSLGTQTYICNVNHKPSNTKVDKKVEPKSCDKTHTCPPCPAPPVAGPSVFLFPPKPKDTLMISRTPEVTCVVVDVKHEDPEVKFNWYVDGVEVHNAKTKPREEQYNSTYRVVSVLTVLHQDWLNGKEYKCKVSNKALPAPIEKTISKAKGQPREPQVYTLPPSREEMTKNQVSLTCLVKGFYPSDIAVEWESNGQPENNYKTTPPVLDSDGSFFLYSKLTVDKSRWQQGNVFSCSVMHEALHNHYTQKSLSLSPGK

SEQ ID NO: 18622 - protein, 122 aa, synthetic construct; identical to SEQ ID NO: 13034
  REGION 1..122: note = Description of Artificial Sequence: Synthetic polypeptide
  REGION 1..122: note = VH of XENP018328

SEQ ID NO: 18623 - protein, 5 aa, synthetic construct
  REGION 1..5: note = Description of Artificial Sequence: Synthetic peptide
  REGION 1..5: note = XENP018328 vhCDR1
NYWMN

SEQ ID NO: 18624 - protein, 19 aa, synthetic construct
  REGION 1..19: note = Description of Artificial Sequence: Synthetic peptide
  REGION 1..19: note = XENP018328 vhCDR2
EIRLKSNNYATHYAEPVKG

SEQ ID NO: 18625 - protein, 11 aa, synthetic construct
  REGION 1..11: note = Description of Artificial Sequence: Synthetic peptide
  REGION 1..11: note = XENP018328 vhCDR3
YYGNYGHYFDV

SEQ ID NO: 18626 - protein, 214 aa, synthetic construct; identical to SEQ ID NO: 16226
  REGION 1..214: note = Description of Artificial Sequence: Synthetic polypeptide
  REGION 1..214: note = XENP018328 1G6_H1.223_L1_IgG1_PVA_/S267K Light Chain

SEQ ID NO: 18627 - protein, 107 aa, synthetic construct; identical to SEQ ID NO: 10923
  REGION 1..107: note = Description of Artificial Sequence: Synthetic polypeptide
  REGION 1..107: note = VL of XENP018328

SEQ ID NO: 18628 - protein, 11 aa, synthetic construct
  REGION 1..11: note = Description of Artificial Sequence: Synthetic peptide
  REGION 1..11: note = XENP018328 vlCDR1
RASQSVSNDVA

SEQ ID NO: 18629 - protein, 7 aa, synthetic construct
  REGION 1..7: note = Description of Artificial Sequence: Synthetic peptide
  REGION 1..7: note = XENP018328 vlCDR2
YASHRYT

SEQ ID NO: 18630 - protein, 9 aa, synthetic construct
  REGION 1..9: note = Description of Artificial Sequence: Synthetic peptide
  REGION 1..9: note = XENP018328 vlCDR3
QQDYSSPRT

SEQ ID NO: 18631 - protein, 451 aa, synthetic construct
  REGION 1..451: note = Description of Artificial Sequence: Synthetic polypeptide
  REGION 1..451: note = XENP018329 1G6_H1.224_L1_IgG1_PVA_/S267K Heavy Chain
EVQLVESGGGLVKPGGSLRLSCAASGFTFSNYWMNWVRQAPGKGLEWVGEIRLKSNNYATHYAEPVKGRFTISRDDSKSTVYLQMNSLKTEDTAVYYCTRYYGNYGDYFDVWGAGTLVTVSSASTKGPSVFPLAPSSKSTSGGTAALGCLVKDYFPEPVTVSWNSGALTSGVHTFPAVLQSSGLYSLSSVVTVPSSSLGTQTYICNVNHKPSNTKVDKKVEPKSCDKTHTCPPCPAPPVAGPSVFLFPPKPKDTLMISRTPEVTCVVVDVKHEDPEVKFNWYVDGVEVHNAKTKPREEQYNSTYRVVSVLTVLHQDWLNGKEYKCKVSNKALPAPIEKTISKAKGQPREPQVYTLPPSREEMTKNQVSLTCLVKGFYPSDIAVEWESNGQPENNYKTTPPVLDSDGSFFLYSKLTVDKSRWQQGNVFSCSVMHEALHNHYTQKSLSLSPGK

SEQ ID NO: 18632 - protein, 122 aa, synthetic construct; identical to SEQ ID NO: 13043
  REGION 1..122: note = Description of Artificial Sequence: Synthetic polypeptide
  REGION 1..122: note = VH of XENP018329

SEQ ID NO: 18633 - protein, 5 aa, synthetic construct
  REGION 1..5: note = Description of Artificial Sequence: Synthetic peptide
  REGION 1..5: note = XENP018329 vhCDR1
NYWMN

SEQ ID NO: 18634 - protein, 19 aa, synthetic construct
  REGION 1..19: note = Description of Artificial Sequence: Synthetic peptide
  REGION 1..19: note = XENP018329 vhCDR2
EIRLKSNNYATHYAEPVKG

SEQ ID NO: 18635 - protein, 11 aa, synthetic construct
  REGION 1..11: note = Description of Artificial Sequence: Synthetic peptide
  REGION 1..11: note = XENP018329 vhCDR3
YYGNYGDYFDV

SEQ ID NO: 18636 - protein, 214 aa, synthetic construct; identical to SEQ ID NO: 16226
  REGION 1..214: note = Description of Artificial Sequence: Synthetic polypeptide
  REGION 1..214: note = XENP018329 1G6_H1.224_L1_IgG1_PVA_/S267K Light Chain

SEQ ID NO: 18637 - protein, 107 aa, synthetic construct; identical to SEQ ID NO: 10923
  REGION 1..107: note = Description of Artificial Sequence: Synthetic polypeptide
  REGION 1..107: note = VL of XENP018329

SEQ ID NO: 18638 - protein, 11 aa, synthetic construct
  REGION 1..11: note = Description of Artificial Sequence: Synthetic peptide
  REGION 1..11: note = XENP018329 vlCDR1
RASQSVSNDVA

SEQ ID NO: 18639 - protein, 7 aa, synthetic construct
  REGION 1..7: note = Description of Artificial Sequence: Synthetic peptide
  REGION 1..7: note = XENP018329 vlCDR2
YASHRYT

SEQ ID NO: 18640 - protein, 9 aa, synthetic construct
  REGION 1..9: note = Description of Artificial Sequence: Synthetic peptide
  REGION 1..9: note = XENP018329 vlCDR3
QQDYSSPRT

SEQ ID NO: 18641 - protein, 451 aa, synthetic construct
  REGION 1..451: note = Description of Artificial Sequence: Synthetic polypeptide
  REGION 1..451: note = XENP018330 1G6_H1.225_L1_IgG1_PVA_/S267K Heavy Chain
EVQLVESGGGLVKPGGSLRLSCAASGFTFSNYWMNWVRQAPGKGLEWVGEIRLKSNNYATHYAEPVKGRFTISRDDSKSTVYLQMNSLKTEDTAVYYCTRYYGNYGKYFDVWGAGTLVTVSSASTKGPSVFPLAPSSKSTSGGTAALGCLVKDYFPEPVTVSWNSGALTSGVHTFPAVLQSSGLYSLSSVVTVPSSSLGTQTYICNVNHKPSNTKVDKKVEPKSCDKTHTCPPCPAPPVAGPSVFLFPPKPKDTLMISRTPEVTCVVVDVKHEDPEVKFNWYVDGVEVHNAKTKPREEQYNSTYRVVSVLTVLHQDWLNGKEYKCKVSNKALPAPIEKTISKAKGQPREPQVYTLPPSREEMTKNQVSLTCLVKGFYPSDIAVEWESNGQPENNYKTTPPVLDSDGSFFLYSKLTVDKSRWQQGNVFSCSVMHEALHNHYTQKSLSLSPGK

SEQ ID NO: 18642 - protein, 122 aa, synthetic construct; identical to SEQ ID NO: 13052
  REGION 1..122: note = Description of Artificial Sequence: Synthetic polypeptide
  REGION 1..122: note = VH of XENP018330

SEQ ID NO: 18643 - protein, 5 aa, synthetic construct
  REGION 1..5: note = Description of Artificial Sequence: Synthetic peptide
  REGION 1..5: note = XENP018330 vhCDR1
NYWMN

SEQ ID NO: 18644 - protein, 19 aa, synthetic construct
  REGION 1..19: note = Description of Artificial Sequence: Synthetic peptide
  REGION 1..19: note = XENP018330 vhCDR2
EIRLKSNNYATHYAEPVKG

SEQ ID NO: 18645 - protein, 11 aa, synthetic construct
  REGION 1..11: note = Description of Artificial Sequence: Synthetic peptide
  REGION 1..11: note = XENP018330 vhCDR3
YYGNYGKYFDV

SEQ ID NO: 18646 - protein, 214 aa, synthetic construct; identical to SEQ ID NO: 16226
  REGION 1..214: note = Description of Artificial Sequence: Synthetic polypeptide
  REGION 1..214: note = XENP018330 1G6_H1.225_L1_IgG1_PVA_/S267K Light Chain

SEQ ID NO: 18647 - protein, 107 aa, synthetic construct; identical to SEQ ID NO: 10923
  REGION 1..107: note = Description of Artificial Sequence: Synthetic polypeptide
  REGION 1..107: note = VL of XENP018330

SEQ ID NO: 18648 - protein, 11 aa, synthetic construct
  REGION 1..11: note = Description of Artificial Sequence: Synthetic peptide
  REGION 1..11: note = XENP018330 vlCDR1
RASQSVSNDVA

SEQ ID NO: 18649 - protein, 7 aa, synthetic construct
  REGION 1..7: note = Description of Artificial Sequence: Synthetic peptide
  REGION 1..7: note = XENP018330 vlCDR2
YASHRYT

SEQ ID NO: 18650 - protein, 9 aa, synthetic construct
  REGION 1..9: note = Description of Artificial Sequence: Synthetic peptide
  REGION 1..9: note = XENP018330 vlCDR3
QQDYSSPRT

SEQ ID NO: 18651 - protein, 451 aa, synthetic construct
  REGION 1..451: note = Description of Artificial Sequence: Synthetic polypeptide
  REGION 1..451: note = XENP018331 1G6_H1.226_L1_IgG1_PVA_/S267K Heavy Chain
EVQLVESGGGLVKPGGSLRLSCAASGFTFSNYWMNWVRQAPGKGLEWVGEIRLKSNNYATHYAEPVKGRFTISRDDSKSTVYLQMNSLKTEDTAVYYCTRYYGNYGLYFDVWGAGTLVTVSSASTKGPSVFPLAPSSKSTSGGTAALGCLVKDYFPEPVTVSWNSGALTSGVHTFPAVLQSSGLYSLSSVVTVPSSSLGTQTYICNVNHKPSNTKVDKKVEPKSCDKTHTCPPCPAPPVAGPSVFLFPPKPKDTLMISRTPEVTCVVVDVKHEDPEVKFNWYVDGVEVHNAKTKPREEQYNSTYRVVSVLTVLHQDWLNGKEYKCKVSNKALPAPIEKTISKAKGQPREPQVYTLPPSREEMTKNQVSLTCLVKGFYPSDIAVEWESNGQPENNYKTTPPVLDSDGSFFLYSKLTVDKSRWQQGNVFSCSVMHEALHNHYTQKSLSLSPGK

SEQ ID NO: 18652 - protein, 122 aa, synthetic construct; identical to SEQ ID NO: 13061
  REGION 1..122: note = Description of Artificial Sequence: Synthetic polypeptide
  REGION 1..122: note = VH of XENP018331

SEQ ID NO: 18653 - protein, 5 aa, synthetic construct
  REGION 1..5: note = Description of Artificial Sequence: Synthetic peptide
  REGION 1..5: note = XENP018331 vhCDR1
NYWMN

SEQ ID NO: 18654 - protein, 19 aa, synthetic construct
  REGION 1..19: note = Description of Artificial Sequence: Synthetic peptide
  REGION 1..19: note = XENP018331 vhCDR2
EIRLKSNNYATHYAEPVKG

SEQ ID NO: 18655 - protein, 11 aa, synthetic construct
  REGION 1..11: note = Description of Artificial Sequence: Synthetic peptide
  REGION 1..11: note = XENP018331 vhCDR3
YYGNYGLYFDV

SEQ ID NO: 18656 - protein, 214 aa, synthetic construct; identical to SEQ ID NO: 16226
  REGION 1..214: note = Description of Artificial Sequence: Synthetic polypeptide
  REGION 1..214: note = XENP018331 1G6_H1.226_L1_IgG1_PVA_/S267K Light Chain

SEQ ID NO: 18657 - protein, 107 aa, synthetic construct; identical to SEQ ID NO: 10923
  REGION 1..107: note = Description of Artificial Sequence: Synthetic polypeptide
  REGION 1..107: note = VL of XENP018331

SEQ ID NO: 18658 - protein, 11 aa, synthetic construct
  REGION 1..11: note = Description of Artificial Sequence: Synthetic peptide
  REGION 1..11: note = XENP018331 vlCDR1
RASQSVSNDVA

SEQ ID NO: 18659 - protein, 7 aa, synthetic construct
  REGION 1..7: note = Description of Artificial Sequence: Synthetic peptide
  REGION 1..7: note = XENP018331 vlCDR2
YASHRYT

SEQ ID NO: 18660 - protein, 9 aa, synthetic construct
  REGION 1..9: note = Description of Artificial Sequence: Synthetic peptide
  REGION 1..9: note = XENP018331 vlCDR3
QQDYSSPRT

SEQ ID NO: 18661 - protein, 451 aa, synthetic construct
  REGION 1..451: note = Description of Artificial Sequence: Synthetic polypeptide
  REGION 1..451: note = XENP018332 1G6_H1.227_L1_IgG1_PVA_/S267K Heavy Chain
EVQLVESGGGLVKPGGSLRLSCAASGFTFSNYWMNWVRQAPGKGLEWVGEIRLKSNNYATHYAEPVKGRFTISRDDSKSTVYLQMNSLKTEDTAVYYCTRYYGNYGFYFDVWGAGTLVTVSSASTKGPSVFPLAPSSKSTSGGTAALGCLVKDYFPEPVTVSWNSGALTSGVHTFPAVLQSSGLYSLSSVVTVPSSSLGTQTYICNVNHKPSNTKVDKKVEPKSCDKTHTCPPCPAPPVAGPSVFLFPPKPKDTLMISRTPEVTCVVVDVKHEDPEVKFNWYVDGVEVHNAKTKPREEQYNSTYRVVSVLTVLHQDWLNGKEYKCKVSNKALPAPIEKTISKAKGQPREPQVYTLPPSREEMTKNQVSLTCLVKGFYPSDIAVEWESNGQPENNYKTTPPVLDSDGSFFLYSKLTVDKSRWQQGNVFSCSVMHEALHNHYTQKSLSLSPGK

SEQ ID NO: 18662 - protein, 122 aa, synthetic construct; identical to SEQ ID NO: 13070
  REGION 1..122: note = Description of Artificial Sequence: Synthetic polypeptide
  REGION 1..122: note = VH of XENP018332

SEQ ID NO: 18663 - protein, 5 aa, synthetic construct
  REGION 1..5: note = Description of Artificial Sequence: Synthetic peptide
  REGION 1..5: note = XENP018332 vhCDR1
NYWMN

SEQ ID NO: 18664 - protein, 19 aa, synthetic construct
  REGION 1..19: note = Description of Artificial Sequence: Synthetic peptide
  REGION 1..19: note = XENP018332 vhCDR2
EIRLKSNNYATHYAEPVKG

SEQ ID NO: 18665 - protein, 11 aa, synthetic construct
  REGION 1..11: note = Description of Artificial Sequence: Synthetic peptide
  REGION 1..11: note = XENP018332 vhCDR3
YYGNYGFYFDV

SEQ ID NO: 18666 - protein, 214 aa, synthetic construct; identical to SEQ ID NO: 16226
  REGION 1..214: note = Description of Artificial Sequence: Synthetic polypeptide
  REGION 1..214: note = XENP018332 1G6_H1.227_L1_IgG1_PVA_/S267K Light Chain

SEQ ID NO: 18667 - protein, 107 aa, synthetic construct; identical to SEQ ID NO: 10923
  REGION 1..107: note = Description of Artificial Sequence: Synthetic polypeptide
  REGION 1..107: note = VL of XENP018332

SEQ ID NO: 18668 - protein, 11 aa, synthetic construct
  REGION 1..11: note = Description of Artificial Sequence: Synthetic peptide
  REGION 1..11: note = XENP018332 vlCDR1
RASQSVSNDVA

SEQ ID NO: 18669 - protein, 7 aa, synthetic construct
  REGION 1..7: note = Description of Artificial Sequence: Synthetic peptide
  REGION 1..7: note = XENP018332 vlCDR2
YASHRYT

SEQ ID NO: 18670 - protein, 9 aa, synthetic construct
  REGION 1..9: note = Description of Artificial Sequence: Synthetic peptide
  REGION 1..9: note = XENP018332 vlCDR3
QQDYSSPRT

SEQ ID NO: 18671 - protein, 451 aa, synthetic construct
  REGION 1..451: note = Description of Artificial Sequence: Synthetic polypeptide
  REGION 1..451: note = XENP018333 1G6_H1.228_L1_IgG1_PVA_/S267K Heavy Chain
EVQLVESGGGLVKPGGSLRLSCAASGFTFSNYWMNWVRQAPGKGLEWVGEIRLKSNNYATHYAEPVKGRFTISRDDSKSTVYLQMNSLKTEDTAVYYCTRYYGNYGGFFDVWGAGTLVTVSSASTKGPSVFPLAPSSKSTSGGTAALGCLVKDYFPEPVTVSWNSGALTSGVHTFPAVLQSSGLYSLSSVVTVPSSSLGTQTYICNVNHKPSNTKVDKKVEPKSCDKTHTCPPCPAPPVAGPSVFLFPPKPKDTLMISRTPEVTCVVVDVKHEDPEVKFNWYVDGVEVHNAKTKPREEQYNSTYRVVSVLTVLHQDWLNGKEYKCKVSNKALPAPIEKTISKAKGQPREPQVYTLPPSREEMTKNQVSLTCLVKGFYPSDIAVEWESNGQPENNYKTTPPVLDSDGSFFLYSKLTVDKSRWQQGNVFSCSVMHEALHNHYTQKSLSLSPGK

SEQ ID NO: 18672 - protein, 122 aa, synthetic construct; identical to SEQ ID NO: 13079
  REGION 1..122: note = Description of Artificial Sequence: Synthetic polypeptide
  REGION 1..122: note = VH of XENP018333

SEQ ID NO: 18673 - protein, 5 aa, synthetic construct
  REGION 1..5: note = Description of Artificial Sequence: Synthetic peptide
  REGION 1..5: note = XENP018333 vhCDR1
NYWMN

SEQ ID NO: 18674 - protein, 19 aa, synthetic construct
  REGION 1..19: note = Description of Artificial Sequence: Synthetic peptide
  REGION 1..19: note = XENP018333 vhCDR2
EIRLKSNNYATHYAEPVKG

SEQ ID NO: 18675 - protein, 11 aa, synthetic construct
  REGION 1..11: note = Description of Artificial Sequence: Synthetic peptide
  REGION 1..11: note = XENP018333 vhCDR3
YYGNYGGFFDV

SEQ ID NO: 18676 - protein, 214 aa, synthetic construct; identical to SEQ ID NO: 16226
  REGION 1..214: note = Description of Artificial Sequence: Synthetic polypeptide
  REGION 1..214: note = XENP018333 1G6_H1.228_L1_IgG1_PVA_/S267K Light Chain

SEQ ID NO: 18677 - protein, 107 aa, synthetic construct; identical to SEQ ID NO: 10923
  REGION 1..107: note = Description of Artificial Sequence: Synthetic polypeptide
  REGION 1..107: note = VL of XENP018333

SEQ ID NO: 18678 - protein, 11 aa, synthetic construct
  REGION 1..11: note = Description of Artificial Sequence: Synthetic peptide
  REGION 1..11: note = XENP018333 vlCDR1
RASQSVSNDVA

SEQ ID NO: 18679 - protein, 7 aa, synthetic construct
  REGION 1..7: note = Description of Artificial Sequence: Synthetic peptide
  REGION 1..7: note = XENP018333 vlCDR2
YASHRYT

SEQ ID NO: 18680 - protein, 9 aa, synthetic construct
  REGION 1..9: note = Description of Artificial Sequence: Synthetic peptide
  REGION 1..9: note = XENP018333 vlCDR3
QQDYSSPRT

SEQ ID NO: 18681 - protein, 451 aa, synthetic construct
  REGION 1..451: note = Description of Artificial Sequence: Synthetic polypeptide
  REGION 1..451: note = XENP018334 1G6_H1.229_L1_IgG1_PVA_/S267K Heavy Chain
EVQLVESGGGLVKPGGSLRLSCAASGFTFSNYWMNWVRQAPGKGLEWVGEIRLKSNNYATHYAEPVKGRFTISRDDSKSTVYLQMNSLKTEDTAVYYCTRYYGNYGGHFDVWGAGTLVTVSSASTKGPSVFPLAPSSKSTSGGTAALGCLVKDYFPEPVTVSWNSGALTSGVHTFPAVLQSSGLYSLSSVVTVPSSSLGTQTYICNVNHKPSNTKVDKKVEPKSCDKTHTCPPCPAPPVAGPSVFLFPPKPKDTLMISRTPEVTCVVVDVKHEDPEVKFNWYVDGVEVHNAKTKPREEQYNSTYRVVSVLTVLHQDWLNGKEYKCKVSNKALPAPIEKTISKAKGQPREPQVYTLPPSREEMTKNQVSLTCLVKGFYPSDIAVEWESNGQPENNYKTTPPVLDSDGSFFLYSKLTVDKSRWQQGNVFSCSVMHEALHNHYTQKSLSLSPGK

SEQ ID NO: 18682 - protein, 122 aa, synthetic construct; identical to SEQ ID NO: 13088
  REGION 1..122: note = Description of Artificial Sequence: Synthetic polypeptide
  REGION 1..122: note = VH of XENP018334

SEQ ID NO: 18683 - protein, 5 aa, synthetic construct
  REGION 1..5: note = Description of Artificial Sequence: Synthetic peptide
  REGION 1..5: note = XENP018334 vhCDR1
NYWMN

SEQ ID NO: 18684 - protein, 19 aa, synthetic construct
  REGION 1..19: note = Description of Artificial Sequence: Synthetic peptide
  REGION 1..19: note = XENP018334 vhCDR2
EIRLKSNNYATHYAEPVKG

SEQ ID NO: 18685 - protein, 11 aa, synthetic construct
  REGION 1..11: note = Description of Artificial Sequence: Synthetic peptide
  REGION 1..11: note = XENP018334 vhCDR3
YYGNYGGHFDV

SEQ ID NO: 18686 - protein, 214 aa, synthetic construct; identical to SEQ ID NO: 16226
  REGION 1..214: note = Description of Artificial Sequence: Synthetic polypeptide
  REGION 1..214: note = XENP018334 1G6_H1.229_L1_IgG1_PVA_/S267K Light Chain

SEQ ID NO: 18687 - protein, 107 aa, synthetic construct; identical to SEQ ID NO: 10923
  REGION 1..107: note = Description of Artificial Sequence: Synthetic polypeptide
  REGION 1..107: note = VL of XENP018334

SEQ ID NO: 18688 - protein, 11 aa, synthetic construct
  REGION 1..11: note = Description of Artificial Sequence: Synthetic peptide
  REGION 1..11: note = XENP018334 vlCDR1
RASQSVSNDVA

SEQ ID NO: 18689 - protein, 7 aa, synthetic construct
  REGION 1..7: note = Description of Artificial Sequence: Synthetic peptide
  REGION 1..7: note = XENP018334 vlCDR2
YASHRYT

SEQ ID NO: 18690 - protein, 9 aa, synthetic construct
  REGION 1..9: note = Description of Artificial Sequence: Synthetic peptide
  REGION 1..9: note = XENP018334 vlCDR3
QQDYSSPRT

SEQ ID NO: 18691 - protein, 451 aa, synthetic construct
  REGION 1..451: note = Description of Artificial Sequence: Synthetic polypeptide
  REGION 1..451: note = XENP018335 1G6_H1.230_L1_IgG1_PVA_/S267K Heavy Chain
EVQLVESGGGLVKPGGSLRLSCAASGFTFSNYWMNWVRQAPGKGLEWVGEIRLKSNNYATHYAEPVKGRFTISRDDSKSTVYLQMNSLKTEDTAVYYCTRYYGNYGGLFDVWGAGTLVTVSSASTKGPSVFPLAPSSKSTSGGTAALGCLVKDYFPEPVTVSWNSGALTSGVHTFPAVLQSSGLYSLSSVVTVPSSSLGTQTYICNVNHKPSNTKVDKKVEPKSCDKTHTCPPCPAPPVAGPSVFLFPPKPKDTLMISRTPEVTCVVVDVKHEDPEVKFNWYVDGVEVHNAKTKPREEQYNSTYRVVSVLTVLHQDWLNGKEYKCKVSNKALPAPIEKTISKAKGQPREPQVYTLPPSREEMTKNQVSLTCLVKGFYPSDIAVEWESNGQPENNYKTTPPVLDSDGSFFLYSKLTVDKSRWQQGNVFSCSVMHEALHNHYTQKSLSLSPGK

SEQ ID NO: 18692 - protein, 122 aa, synthetic construct; identical to SEQ ID NO: 13097
  REGION 1..122: note = Description of Artificial Sequence: Synthetic polypeptide
  REGION 1..122: note = VH of XENP018335

SEQ ID NO: 18693 - protein, 5 aa, synthetic construct
  REGION 1..5: note = Description of Artificial Sequence: Synthetic peptide
  REGION 1..5: note = XENP018335 vhCDR1
NYWMN

SEQ ID NO: 18694 - protein, 19 aa, synthetic construct
  REGION 1..19: note = Description of Artificial Sequence: Synthetic peptide
  REGION 1..19: note = XENP018335 vhCDR2
EIRLKSNNYATHYAEPVKG

SEQ ID NO: 18695 - protein, 11 aa, synthetic construct
  REGION 1..11: note = Description of Artificial Sequence: Synthetic peptide
  REGION 1..11: note = XENP018335 vhCDR3
YYGNYGGLFDV

SEQ ID NO: 18696 - protein, 214 aa, synthetic construct; identical to SEQ ID NO: 16226
  REGION 1..214: note = Description of Artificial Sequence: Synthetic polypeptide
  REGION 1..214: note = XENP018335 1G6_H1.230_L1_IgG1_PVA_/S267K Light Chain

SEQ ID NO: 18697 - protein, 107 aa, synthetic construct; identical to SEQ ID NO: 10923
  REGION 1..107: note = Description of Artificial Sequence: Synthetic polypeptide
  REGION 1..107: note = VL of XENP018335

SEQ ID NO: 18698 - protein, 11 aa, synthetic construct
  REGION 1..11: note = Description of Artificial Sequence: Synthetic peptide
  REGION 1..11: note = XENP018335 vlCDR1
RASQSVSNDVA

SEQ ID NO: 18699 - protein, 7 aa, synthetic construct
  REGION 1..7: note = Description of Artificial Sequence: Synthetic peptide
  REGION 1..7: note = XENP018335 vlCDR2
YASHRYT

SEQ ID NO: 18700 - protein, 9 aa, synthetic construct
  REGION 1..9: note = Description of Artificial Sequence: Synthetic peptide
  REGION 1..9: note = XENP018335 vlCDR3
QQDYSSPRT

SEQ ID NO: 18701 - protein, 451 aa, synthetic construct
  REGION 1..451: note = Description of Artificial Sequence: Synthetic polypeptide
  REGION 1..451: note = XENP018336 1G6_H1.231_L1_IgG1_PVA_/S267K Heavy Chain
EVQLVESGGGLVKPGGSLRLSCAASGFTFSNYWMNWVRQAPGKGLEWVGEIRLKSNNYATHYAEPVKGRFTISRDDSKSTVYLQMNSLKTEDTAVYYCTRYYGNYGGWFDVWGAGTLVTVSSASTKGPSVFPLAPSSKSTSGGTAALGCLVKDYFPEPVTVSWNSGALTSGVHTFPAVLQSSGLYSLSSVVTVPSSSLGTQTYICNVNHKPSNTKVDKKVEPKSCDKTHTCPPCPAPPVAGPSVFLFPPKPKDTLMISRTPEVTCVVVDVKHEDPEVKFNWYVDGVEVHNAKTKPREEQYNSTYRVVSVLTVLHQDWLNGKEYKCKVSNKALPAPIEKTISKAKGQPREPQVYTLPPSREEMTKNQVSLTCLVKGFYPSDIAVEWESNGQPENNYKTTPPVLDSDGSFFLYSKLTVDKSRWQQGNVFSCSVMHEALHNHYTQKSLSLSPGK

SEQ ID NO: 18702 - protein, 122 aa, synthetic construct; identical to SEQ ID NO: 13106
  REGION 1..122: note = Description of Artificial Sequence: Synthetic polypeptide
  REGION 1..122: note = VH of XENP018336

SEQ ID NO: 18703 - protein, 5 aa, synthetic construct
  REGION 1..5: note = Description of Artificial Sequence: Synthetic peptide
  REGION 1..5: note = XENP018336 vhCDR1
NYWMN

SEQ ID NO: 18704 - protein, 19 aa, synthetic construct
  REGION 1..19: note = Description of Artificial Sequence: Synthetic peptide
  REGION 1..19: note = XENP018336 vhCDR2
EIRLKSNNYATHYAEPVKG

SEQ ID NO: 18705 - protein, 11 aa, synthetic construct
  REGION 1..11: note = Description of Artificial Sequence: Synthetic peptide
  REGION 1..11: note = XENP018336 vhCDR3
YYGNYGGWFDV

SEQ ID NO: 18706 - protein, 214 aa, synthetic construct; identical to SEQ ID NO: 16226
  REGION 1..214: note = Description of Artificial Sequence: Synthetic polypeptide
  REGION 1..214: note = XENP018336 1G6_H1.231_L1_IgG1_PVA_/S267K Light Chain

SEQ ID NO: 18707 - protein, 107 aa, synthetic construct; identical to SEQ ID NO: 10923
  REGION 1..107: note = Description of Artificial Sequence: Synthetic polypeptide
  REGION 1..107: note = VL of XENP018336

SEQ ID NO: 18708 - protein, 11 aa, synthetic construct
  REGION 1..11: note = Description of Artificial Sequence: Synthetic peptide
  REGION 1..11: note = XENP018336 vlCDR1
RASQSVSNDVA

SEQ ID NO: 18709 - protein, 7 aa, synthetic construct
  REGION 1..7: note = Description of Artificial Sequence: Synthetic peptide
  REGION 1..7: note = XENP018336 vlCDR2
YASHRYT

SEQ ID NO: 18710 - protein, 9 aa, synthetic construct
  REGION 1..9: note = Description of Artificial Sequence: Synthetic peptide
  REGION 1..9: note = XENP018336 vlCDR3
QQDYSSPRT

SEQ ID NO: 18711 - protein, 451 aa, synthetic construct
  REGION 1..451: note = Description of Artificial Sequence: Synthetic polypeptide
  REGION 1..451: note = XENP018337 1G6_H1.232_L1_IgG1_PVA_/S267K Heavy Chain
EVQLVESGGGLVKPGGSLRLSCAASGFTFSNYWMNWVRQAPGKGLEWVGEIRLKSNNYATHYAEPVKGRFTISRDDSKSTVYLQMNSLKTEDTAVYYCTRYYGNYGGVFDVWGAGTLVTVSSASTKGPSVFPLAPSSKSTSGGTAALGCLVKDYFPEPVTVSWNSGALTSGVHTFPAVLQSSGLYSLSSVVTVPSSSLGTQTYICNVNHKPSNTKVDKKVEPKSCDKTHTCPPCPAPPVAGPSVFLFPPKPKDTLMISRTPEVTCVVVDVKHEDPEVKFNWYVDGVEVHNAKTKPREEQYNSTYRVVSVLTVLHQDWLNGKEYKCKVSNKALPAPIEKTISKAKGQPREPQVYTLPPSREEMTKNQVSLTCLVKGFYPSDIAVEWESNGQPENNYKTTPPVLDSDGSFFLYSKLTVDKSRWQQGNVFSCSVMHEALHNHYTQKSLSLSPGK

SEQ ID NO: 18712 - protein, 122 aa, synthetic construct; identical to SEQ ID NO: 13115
  REGION 1..122: note = Description of Artificial Sequence: Synthetic polypeptide
  REGION 1..122: note = VH of XENP018337

SEQ ID NO: 18713 - protein, 5 aa, synthetic construct
  REGION 1..5: note = Description of Artificial Sequence: Synthetic peptide
  REGION 1..5: note = XENP018337 vhCDR1
NYWMN

SEQ ID NO: 18714 - protein, 19 aa, synthetic construct
  REGION 1..19: note = Description of Artificial Sequence: Synthetic peptide
  REGION 1..19: note = XENP018337 vhCDR2
EIRLKSNNYATHYAEPVKG

SEQ ID NO: 18715 - protein, 11 aa, synthetic construct
  REGION 1..11: note = Description of Artificial Sequence: Synthetic peptide
  REGION 1..11: note = XENP018337 vhCDR3
YYGNYGGVFDV

SEQ ID NO: 18716 - protein, 214 aa, synthetic construct; identical to SEQ ID NO: 16226
  REGION 1..214: note = Description of Artificial Sequence: Synthetic polypeptide
  REGION 1..214: note = XENP018337 1G6_H1.232_L1_IgG1_PVA_/S267K Light Chain

SEQ ID NO: 18717 - protein, 107 aa, synthetic construct; identical to SEQ ID NO: 10923
  REGION 1..107: note = Description of Artificial Sequence: Synthetic polypeptide
  REGION 1..107: note = VL of XENP018337

SEQ ID NO: 18718 - protein, 11 aa, synthetic construct
  REGION 1..11: note = Description of Artificial Sequence: Synthetic peptide
  REGION 1..11: note = XENP018337 vlCDR1
RASQSVSNDVA

SEQ ID NO: 18719 - protein, 7 aa, synthetic construct
  REGION 1..7: note = Description of Artificial Sequence: Synthetic peptide
  REGION 1..7: note = XENP018337 vlCDR2
YASHRYT

SEQ ID NO: 18720 - protein, 9 aa, synthetic construct
  REGION 1..9: note = Description of Artificial Sequence: Synthetic peptide
  REGION 1..9: note = XENP018337 vlCDR3
QQDYSSPRT

SEQ ID NO: 18721 - protein, 451 aa, synthetic construct
  REGION 1..451: note = Description of Artificial Sequence: Synthetic polypeptide
  REGION 1..451: note = XENP018338 1G6_H1.233_L1_IgG1_PVA_/S267K Heavy Chain
EVQLVESGGGLVKPGGSLRLSCAASGFTFSNYWMNWVRQAPGKGLEWVGEIRLKSNNYATHYAEPVKGRFTISRDDSKSTVYLQMNSLKTEDTAVYYCTRYYGNYGGAFDVWGAGTLVTVSSASTKGPSVFPLAPSSKSTSGGTAALGCLVKDYFPEPVTVSWNSGALTSGVHTFPAVLQSSGLYSLSSVVTVPSSSLGTQTYICNVNHKPSNTKVDKKVEPKSCDKTHTCPPCPAPPVAGPSVFLFPPKPKDTLMISRTPEVTCVVVDVKHEDPEVKFNWYVDGVEVHNAKTKPREEQYNSTYRVVSVLTVLHQDWLNGKEYKCKVSNKALPAPIEKTISKAKGQPREPQVYTLPPSREEMTKNQVSLTCLVKGFYPSDIAVEWESNGQPENNYKTTPPVLDSDGSFFLYSKLTVDKSRWQQGNVFSCSVMHEALHNHYTQKSLSLSPGK

SEQ ID NO: 18722 - protein, 122 aa, synthetic construct; identical to SEQ ID NO: 13124
  REGION 1..122: note = Description of Artificial Sequence: Synthetic polypeptide
  REGION 1..122: note = VH of XENP018338

SEQ ID NO: 18723 - protein, 5 aa, synthetic construct
  REGION 1..5: note = Description of Artificial Sequence: Synthetic peptide
  REGION 1..5: note = XENP018338 vhCDR1
NYWMN

SEQ ID NO: 18724 - protein, 19 aa, synthetic construct
  REGION 1..19: note = Description of Artificial Sequence: Synthetic peptide
  REGION 1..19: note = XENP018338 vhCDR2
EIRLKSNNYATHYAEPVKG

SEQ ID NO: 18725 - protein, 11 aa, synthetic construct
  REGION 1..11: note = Description of Artificial Sequence: Synthetic peptide
  REGION 1..11: note = XENP018338 vhCDR3
YYGNYGGAFDV

SEQ ID NO: 18726 - protein, 214 aa, synthetic construct; identical to SEQ ID NO: 16226
  REGION 1..214: note = Description of Artificial Sequence: Synthetic polypeptide
  REGION 1..214: note = XENP018338 1G6_H1.233_L1_IgG1_PVA_/S267K Light Chain

SEQ ID NO: 18727 - protein, 107 aa, synthetic construct; identical to SEQ ID NO: 10923
  REGION 1..107: note = Description of Artificial Sequence: Synthetic polypeptide
  REGION 1..107: note = VL of XENP018338

SEQ ID NO: 18728 - protein, 11 aa, synthetic construct
  REGION 1..11: note = Description of Artificial Sequence: Synthetic peptide
  REGION 1..11: note = XENP018338 vlCDR1
RASQSVSNDVA

SEQ ID NO: 18729 - protein, 7 aa, synthetic construct
  REGION 1..7: note = Description of Artificial Sequence: Synthetic peptide
  REGION 1..7: note = XENP018338 vlCDR2
YASHRYT

SEQ ID NO: 18730 - protein, 9 aa, synthetic construct
  REGION 1..9: note = Description of Artificial Sequence: Synthetic peptide
  REGION 1..9: note = XENP018338 vlCDR3
QQDYSSPRT

SEQ ID NO: 18731 - protein, 451 aa, synthetic construct
  REGION 1..451: note = Description of Artificial Sequence: Synthetic polypeptide
  REGION 1..451: note = XENP018339 1G6_H1.234_L1_IgG1_PVA_/S267K Heavy Chain
EVQLVESGGGLVKPGGSLRLSCAASGFTFSNYWMNWVRQAPGKGLEWVGEIRLKSNNYATHYAEPVKGRFTISRDDSKSTVYLQMNSLKTEDTAVYYCTRYYGNYGGQFDVWGAGTLVTVSSASTKGPSVFPLAPSSKSTSGGTAALGCLVKDYFPEPVTVSWNSGALTSGVHTFPAVLQSSGLYSLSSVVTVPSSSLGTQTYICNVNHKPSNTKVDKKVEPKSCDKTHTCPPCPAPPVAGPSVFLFPPKPKDTLMISRTPEVTCVVVDVKHEDPEVKFNWYVDGVEVHNAKTKPREEQYNSTYRVVSVLTVLHQDWLNGKEYKCKVSNKALPAPIEKTISKAKGQPREPQVYTLPPSREEMTKNQVSLTCLVKGFYPSDIAVEWESNGQPENNYKTTPPVLDSDGSFFLYSKLTVDKSRWQQGNVFSCSVMHEALHNHYTQKSLSLSPGK

SEQ ID NO: 18732 - protein, 122 aa, synthetic construct; identical to SEQ ID NO: 13133
  REGION 1..122: note = Description of Artificial Sequence: Synthetic polypeptide
  REGION 1..122: note = VH of XENP018339

SEQ ID NO: 18733 - protein, 5 aa, synthetic construct
  REGION 1..5: note = Description of Artificial Sequence: Synthetic peptide
  REGION 1..5: note = XENP018339 vhCDR1
NYWMN

SEQ ID NO: 18734 - protein, 19 aa, synthetic construct
  REGION 1..19: note = Description of Artificial Sequence: Synthetic peptide
  REGION 1..19: note = XENP018339 vhCDR2
EIRLKSNNYATHYAEPVKG

SEQ ID NO: 18735 - protein, 11 aa, synthetic construct
  REGION 1..11: note = Description of Artificial Sequence: Synthetic peptide
  REGION 1..11: note = XENP018339 vhCDR3
YYGNYGGQFDV

SEQ ID NO: 18736 - protein, 214 aa, synthetic construct; identical to SEQ ID NO: 16226
  REGION 1..214: note = Description of Artificial Sequence: Synthetic polypeptide
  REGION 1..214: note = XENP018339 1G6_H1.234_L1_IgG1_PVA_/S267K Light Chain

SEQ ID NO: 18737 - protein, 107 aa, synthetic construct; identical to SEQ ID NO: 10923
  REGION 1..107: note = Description of Artificial Sequence: Synthetic polypeptide
  REGION 1..107: note = VL of XENP018339

SEQ ID NO: 18738 - protein, 11 aa, synthetic construct
  REGION 1..11: note = Description of Artificial Sequence: Synthetic peptide
  REGION 1..11: note = XENP018339 vlCDR1
RASQSVSNDVA

SEQ ID NO: 18739 - protein, 7 aa, synthetic construct
  REGION 1..7: note = Description of Artificial Sequence: Synthetic peptide
  REGION 1..7: note = XENP018339 vlCDR2
YASHRYT

SEQ ID NO: 18740 - protein, 9 aa, synthetic construct
  REGION 1..9: note = Description of Artificial Sequence: Synthetic peptide
  REGION 1..9: note = XENP018339 vlCDR3
QQDYSSPRT

SEQ ID NO: 18741 - protein, 451 aa, synthetic construct
  REGION 1..451: note = Description of Artificial Sequence: Synthetic polypeptide
  REGION 1..451: note = XENP018340 1G6_H1.235_L1_IgG1_PVA_/S267K Heavy Chain
EVQLVESGGGLVKPGGSLRLSCAASGFTFSNYWMNWVRQAPGKGLEWVGEIRLKSNNYATHYAEPVKGRFTISRDDSKSTVYLQMNSLKTEDTAVYYCTRYYGNYGGDFDVWGAGTLVTVSSASTKGPSVFPLAPSSKSTSGGTAALGCLVKDYFPEPVTVSWNSGALTSGVHTFPAVLQSSGLYSLSSVVTVPSSSLGTQTYICNVNHKPSNTKVDKKVEPKSCDKTHTCPPCPAPPVAGPSVFLFPPKPKDTLMISRTPEVTCVVVDVKHEDPEVKFNWYVDGVEVHNAKTKPREEQYNSTYRVVSVLTVLHQDWLNGKEYKCKVSNKALPAPIEKTISKAKGQPREPQVYTLPPSREEMTKNQVSLTCLVKGFYPSDIAVEWESNGQPENNYKTTPPVLDSDGSFFLYSKLTVDKSRWQQGNVFSCSVMHEALHNHYTQKSLSLSPGK

SEQ ID NO: 18742 - protein, 122 aa, synthetic construct; identical to SEQ ID NO: 13142
  REGION 1..122: note = Description of Artificial Sequence: Synthetic polypeptide
  REGION 1..122: note = VH of XENP018340

SEQ ID NO: 18743 - protein, 5 aa, synthetic construct
  REGION 1..5: note = Description of Artificial Sequence: Synthetic peptide
  REGION 1..5: note = XENP018340 vhCDR1
NYWMN

SEQ ID NO: 18744 - protein, 19 aa, synthetic construct
  REGION 1..19: note = Description of Artificial Sequence: Synthetic peptide
  REGION 1..19: note = XENP018340 vhCDR2
EIRLKSNNYATHYAEPVKG

SEQ ID NO: 18745 - protein, 11 aa, synthetic construct
  REGION 1..11: note = Description of Artificial Sequence: Synthetic peptide
  REGION 1..11: note = XENP018340 vhCDR3
YYGNYGGDFDV

SEQ ID NO: 18746 - protein, 214 aa, synthetic construct; identical to SEQ ID NO: 16226
  REGION 1..214: note = Description of Artificial Sequence: Synthetic polypeptide
  REGION 1..214: note = XENP018340 1G6_H1.235_L1_IgG1_PVA_/S267K Light Chain

SEQ ID NO: 18747 - protein, 107 aa, synthetic construct; identical to SEQ ID NO: 10923
  REGION 1..107: note = Description of Artificial Sequence: Synthetic polypeptide
  REGION 1..107: note = VL of XENP018340

SEQ ID NO: 18748 - protein, 11 aa, synthetic construct
  REGION 1..11: note = Description of Artificial Sequence: Synthetic peptide
  REGION 1..11: note = XENP018340 vlCDR1
RASQSVSNDVA

SEQ ID NO: 18749 - protein, 7 aa, synthetic construct
  REGION 1..7: note = Description of Artificial Sequence: Synthetic peptide
  REGION 1..7: note = XENP018340 vlCDR2
YASHRYT

SEQ ID NO: 18750 - protein, 9 aa, synthetic construct
  REGION 1..9: note = Description of Artificial Sequence: Synthetic peptide
  REGION 1..9: note = XENP018340 vlCDR3
QQDYSSPRT

SEQ ID NO: 18751 - protein, 451 aa, synthetic construct
  REGION 1..451: note = Description of Artificial Sequence: Synthetic polypeptide
  REGION 1..451: note = XENP018341 1G6_H1.236_L1_IgG1_PVA_/S267K Heavy Chain
EVQLVESGGGLVKPGGSLRLSCAASGFTFSNYWMNWVRQAPGKGLEWVGEIRLKSNNYATHYAEPVKGRFTISRDDSKSTVYLQMNSLKTEDTAVYYCTRYYGNYGGKFDVWGAGTLVTVSSASTKGPSVFPLAPSSKSTSGGTAALGCLVKDYFPEPVTVSWNSGALTSGVHTFPAVLQSSGLYSLSSVVTVPSSSLGTQTYICNVNHKPSNTKVDKKVEPKSCDKTHTCPPCPAPPVAGPSVFLFPPKPKDTLMISRTPEVTCVVVDVKHEDPEVKFNWYVDGVEVHNAKTKPREEQYNSTYRVVSVLTVLHQDWLNGKEYKCKVSNKALPAPIEKTISKAKGQPREPQVYTLPPSREEMTKNQVSLTCLVKGFYPSDIAVEWESNGQPENNYKTTPPVLDSDGSFFLYSKLTVDKSRWQQGNVFSCSVMHEALHNHYTQKSLSLSPGK

SEQ ID NO: 18752 - protein, 122 aa, synthetic construct; identical to SEQ ID NO: 13151
  REGION 1..122: note = Description of Artificial Sequence: Synthetic polypeptide
  REGION 1..122: note = VH of XENP018341

SEQ ID NO: 18753 - protein, 5 aa, synthetic construct
  REGION 1..5: note = Description of Artificial Sequence: Synthetic peptide
  REGION 1..5: note = XENP018341 vhCDR1
NYWMN

SEQ ID NO: 18754 - protein, 19 aa, synthetic construct
  REGION 1..19: note = Description of Artificial Sequence: Synthetic peptide
  REGION 1..19: note = XENP018341 vhCDR2
EIRLKSNNYATHYAEPVKG

SEQ ID NO: 18755 - protein, 11 aa, synthetic construct
  REGION 1..11: note = Description of Artificial Sequence: Synthetic peptide
  REGION 1..11: note = XENP018341 vhCDR3
YYGNYGGKFDV

SEQ ID NO: 18756 - protein, 214 aa, synthetic construct; identical to SEQ ID NO: 16226
  REGION 1..214: note = Description of Artificial Sequence: Synthetic polypeptide
  REGION 1..214: note = XENP018341 1G6_H1.236_L1_IgG1_PVA_/S267K Light Chain

SEQ ID NO: 18757 - protein, 107 aa, synthetic construct; identical to SEQ ID NO: 10923
  REGION 1..107: note = Description of Artificial Sequence: Synthetic polypeptide
  REGION 1..107: note = VL of XENP018341

SEQ ID NO: 18758 - protein, 11 aa, synthetic construct
  REGION 1..11: note = Description of Artificial Sequence: Synthetic peptide
  REGION 1..11: note = XENP018341 vlCDR1
RASQSVSNDVA

SEQ ID NO: 18759 - protein, 7 aa, synthetic construct
  REGION 1..7: note = Description of Artificial Sequence: Synthetic peptide
  REGION 1..7: note = XENP018341 vlCDR2
YASHRYT

SEQ ID NO: 18760 - protein, 9 aa, synthetic construct
  REGION 1..9: note = Description of Artificial Sequence: Synthetic peptide
  REGION 1..9: note = XENP018341 vlCDR3
QQDYSSPRT

SEQ ID NO: 18761 - protein, 451 aa, synthetic construct
  REGION 1..451: note = Description of Artificial Sequence: Synthetic polypeptide
  REGION 1..451: note = XENP018342 1G6_H1.237_L1_IgG1_PVA_/S267K Heavy Chain
EVQLVESGGGLVKPGGSLRLSCAASGFTFSNYWMNWVRQAPGKGLEWVGEIRLKSNNYATHYAEPVKGRFTISRDDSKSTVYLQMNSLKTEDTAVYYCTRYYGNYGGYFDYWGAGTLVTVSSASTKGPSVFPLAPSSKSTSGGTAALGCLVKDYFPEPVTVSWNSGALTSGVHTFPAVLQSSGLYSLSSVVTVPSSSLGTQTYICNVNHKPSNTKVDKKVEPKSCDKTHTCPPCPAPPVAGPSVFLFPPKPKDTLMISRTPEVTCVVVDVKHEDPEVKFNWYVDGVEVHNAKTKPREEQYNSTYRVVSVLTVLHQDWLNGKEYKCKVSNKALPAPIEKTISKAKGQPREPQVYTLPPSREEMTKNQVSLTCLVKGFYPSDIAVEWESNGQPENNYKTTPPVLDSDGSFFLYSKLTVDKSRWQQGNVFSCSVMHEALHNHYTQKSLSLSPGK

SEQ ID NO: 18762 - protein, 122 aa, synthetic construct; identical to SEQ ID NO: 13160
  REGION 1..122: note = Description of Artificial Sequence: Synthetic polypeptide
  REGION 1..122: note = VH of XENP018342

SEQ ID NO: 18763 - protein, 5 aa, synthetic construct
  REGION 1..5: note = Description of Artificial Sequence: Synthetic peptide
  REGION 1..5: note = XENP018342 vhCDR1
NYWMN

SEQ ID NO: 18764 - protein, 19 aa, synthetic construct
  REGION 1..19: note = Description of Artificial Sequence: Synthetic peptide
  REGION 1..19: note = XENP018342 vhCDR2
EIRLKSNNYATHYAEPVKG

SEQ ID NO: 18765 - protein, 11 aa, synthetic construct
  REGION 1..11: note = Description of Artificial Sequence: Synthetic peptide
  REGION 1..11: note = XENP018342 vhCDR3
YYGNYGGYFDY

SEQ ID NO: 18766 - protein, 214 aa, synthetic construct; identical to SEQ ID NO: 16226
  REGION 1..214: note = Description of Artificial Sequence: Synthetic polypeptide
  REGION 1..214: note = XENP018342 1G6_H1.237_L1_IgG1_PVA_/S267K Light Chain

SEQ ID NO: 18767 - protein, 107 aa, synthetic construct; identical to SEQ ID NO: 10923
  REGION 1..107: note = Description of Artificial Sequence: Synthetic polypeptide
  REGION 1..107: note = VL of XENP018342

SEQ ID NO: 18768 - protein, 11 aa, synthetic construct
  REGION 1..11: note = Description of Artificial Sequence: Synthetic peptide
  REGION 1..11: note = XENP018342 vlCDR1
RASQSVSNDVA

SEQ ID NO: 18769 - protein, 7 aa, synthetic construct
  REGION 1..7: note = Description of Artificial Sequence: Synthetic peptide
  REGION 1..7: note = XENP018342 vlCDR2
YASHRYT

SEQ ID NO: 18770 - protein, 9 aa, synthetic construct
  REGION 1..9: note = Description of Artificial Sequence: Synthetic peptide
  REGION 1..9: note = XENP018342 vlCDR3
QQDYSSPRT

SEQ ID NO: 18771 - protein, 451 aa, synthetic construct
  REGION 1..451: note = Description of Artificial Sequence: Synthetic polypeptide
  REGION 1..451: note = XENP018343 1G6_H1.238_L1_IgG1_PVA_/S267K Heavy Chain
EVQLVESGGGLVKPGGSLRLSCAASGFTFSNYWMNWVRQAPGKGLEWVGEIRLKSNNYATHYAEPVKGRFTISRDDSKSTVYLQMNSLKTEDTAVYYCTRYYGNYGGYFDVWGQGTLVTVSSASTKGPSVFPLAPSSKSTSGGTAALGCLVKDYFPEPVTVSWNSGALTSGVHTFPAVLQSSGLYSLSSVVTVPSSSLGTQTYICNVNHKPSNTKVDKKVEPKSCDKTHTCPPCPAPPVAGPSVFLFPPKPKDTLMISRTPEVTCVVVDVKHEDPEVKFNWYVDGVEVHNAKTKPREEQYNSTYRVVSVLTVLHQDWLNGKEYKCKVSNKALPAPIEKTISKAKGQPREPQVYTLPPSREEMTKNQVSLTCLVKGFYPSDIAVEWESNGQPENNYKTTPPVLDSDGSFFLYSKLTVDKSRWQQGNVFSCSVMHEALHNHYTQKSLSLSPGK

SEQ ID NO: 18772 - protein, 122 aa, synthetic construct; identical to SEQ ID NO: 13169
  REGION 1..122: note = Description of Artificial Sequence: Synthetic polypeptide
  REGION 1..122: note = VH of XENP018343

SEQ ID NO: 18773 - protein, 5 aa, synthetic construct
  REGION 1..5: note = Description of Artificial Sequence: Synthetic peptide
  REGION 1..5: note = XENP018343 vhCDR1
NYWMN

SEQ ID NO: 18774 - protein, 19 aa, synthetic construct
  REGION 1..19: note = Description of Artificial Sequence: Synthetic peptide
  REGION 1..19: note = XENP018343 vhCDR2
EIRLKSNNYATHYAEPVKG

SEQ ID NO: 18775 - protein, 11 aa, synthetic construct
  REGION 1..11: note = Description of Artificial Sequence: Synthetic peptide
  REGION 1..11: note = XENP018343 vhCDR3
YYGNYGGYFDV

SEQ ID NO: 18776 - protein, 214 aa, synthetic construct; identical to SEQ ID NO: 16226
  REGION 1..214: note = Description of Artificial Sequence: Synthetic polypeptide
  REGION 1..214: note = XENP018343 1G6_H1.238_L1_IgG1_PVA_/S267K Light Chain

SEQ ID NO: 18777 - protein, 107 aa, synthetic construct; identical to SEQ ID NO: 10923
  REGION 1..107: note = Description of Artificial Sequence: Synthetic polypeptide
  REGION 1..107: note = VL of XENP018343

SEQ ID NO: 18778 - protein, 11 aa, synthetic construct
  REGION 1..11: note = Description of Artificial Sequence: Synthetic peptide
  REGION 1..11: note = XENP018343 vlCDR1
RASQSVSNDVA

SEQ ID NO: 18779 - protein, 7 aa, synthetic construct
  REGION 1..7: note = Description of Artificial Sequence: Synthetic peptide
  REGION 1..7: note = XENP018343 vlCDR2
YASHRYT

SEQ ID NO: 18780 - protein, 9 aa, synthetic construct
  REGION 1..9: note = Description of Artificial Sequence: Synthetic peptide
  REGION 1..9: note = XENP018343 vlCDR3
QQDYSSPRT

SEQ ID NO: 18781 - protein, 451 aa, synthetic construct; identical to SEQ ID NO: 16221
  REGION 1..451: note = Description of Artificial Sequence: Synthetic polypeptide
  REGION 1..451: note = XENP018344 1G6_H1_L1.1_IgG1_PVA_/S267K Heavy Chain

SEQ ID NO: 18782 - protein, 122 aa, synthetic construct; identical to SEQ ID NO: 10922
  REGION 1..122: note = Description of Artificial Sequence: Synthetic polypeptide
  REGION 1..122: note = VH of XENP018344

SEQ ID NO: 18783 - protein, 5 aa, synthetic construct
  REGION 1..5: note = Description of Artificial Sequence: Synthetic peptide
  REGION 1..5: note = XENP018344 vhCDR1
NYWMN

SEQ ID NO: 18784 - protein, 19 aa, synthetic construct
  REGION 1..19: note = Description of Artificial Sequence: Synthetic peptide
  REGION 1..19: note = XENP018344 vhCDR2
EIRLKSNNYATHYAEPVKG

SEQ ID NO: 18785 - protein, 11 aa, synthetic construct
  REGION 1..11: note = Description of Artificial Sequence: Synthetic peptide
  REGION 1..11: note = XENP018344 vhCDR3
YYGNYGGYFDV

SEQ ID NO: 18786 - protein, 214 aa, synthetic construct
  REGION 1..214: note = Description of Artificial Sequence: Synthetic polypeptide
  REGION 1..214: note = XENP018344 1G6_H1_L1.1_IgG1_PVA_/S267K Light Chain
EIVMTQSPATLSVSPGERATLSCRASQSVSNDVAWYQQKPGQSPRLLINYASHRYTGVPDRFTGSGYGTEFTLTISSLQSEDFAVYFCQQDYSSPRTFGGGTKVEIKRTVAAPSVFIFPPSDEQLKSGTASVVCLLNNFYPREAKVQWKVDNALQSGNSQESVTEQDSKDSTYSLSSTLTLSKADYEKHKVYACEVTHQGLSSPVTKSFNRGEC

SEQ ID NO: 18787 - protein, 107 aa, synthetic construct; identical to SEQ ID NO: 13179
  REGION 1..107: note = Description of Artificial Sequence: Synthetic polypeptide
  REGION 1..107: note = VL of XENP018344

SEQ ID NO: 18788 - protein, 11 aa, synthetic construct
  REGION 1..11: note = Description of Artificial Sequence: Synthetic peptide
  REGION 1..11: note = XENP018344 vlCDR1
RASQSVSNDVA

SEQ ID NO: 18789 - protein, 7 aa, synthetic construct
  REGION 1..7: note = Description of Artificial Sequence: Synthetic peptide
  REGION 1..7: note = XENP018344 vlCDR2
YASHRYT

SEQ ID NO: 18790 - protein, 9 aa, synthetic construct
  REGION 1..9: note = Description of Artificial Sequence: Synthetic peptide
  REGION 1..9: note = XENP018344 vlCDR3
QQDYSSPRT

SEQ ID NO: 18791 - protein, 451 aa, synthetic construct; identical to SEQ ID NO: 16221
  REGION 1..451: note = Description of Artificial Sequence: Synthetic polypeptide
  REGION 1..451: note = XENP018345 1G6_H1_L1.2_IgG1_PVA_/S267K Heavy Chain

SEQ ID NO: 18792 - protein, 122 aa, synthetic construct; identical to SEQ ID NO: 10922
  REGION 1..122: note = Description of Artificial Sequence: Synthetic polypeptide
  REGION 1..122: note = VH of XENP018345

SEQ ID NO: 18793 - protein, 5 aa, synthetic construct
  REGION 1..5: note = Description of Artificial Sequence: Synthetic peptide
  REGION 1..5: note = XENP018345 vhCDR1
NYWMN

SEQ ID NO: 18794 - protein, 19 aa, synthetic construct
  REGION 1..19: note = Description of Artificial Sequence: Synthetic peptide
  REGION 1..19: note = XENP018345 vhCDR2
EIRLKSNNYATHYAEPVKG

SEQ ID NO: 18795 - protein, 11 aa, synthetic construct
  REGION 1..11: note = Description of Artificial Sequence: Synthetic peptide
  REGION 1..11: note = XENP018345 vhCDR3
YYGNYGGYFDV

SEQ ID NO: 18796 - protein, 214 aa, synthetic construct
  REGION 1..214: note = Description of Artificial Sequence: Synthetic polypeptide
  REGION 1..214: note = XENP018345 1G6_H1_L1.2_IgG1_PVA_/S267K Light Chain
DIVMTQSPATLSVSPGERATLSCRASQSVSNDVAWYQQKPGQSPRLLINYASHRYTGVPDRFTGSGYGTEFTLTISSLQSEDFAVYFCQQDYSSPRTFGGGTKVEIKRTVAAPSVFIFPPSDEQLKSGTASVVCLLNNFYPREAKVQWKVDNALQSGNSQESVTEQDSKDSTYSLSSTLTLSKADYEKHKVYACEVTHQGLSSPVTKSFNRGEC

SEQ ID NO: 18797 - protein, 107 aa, synthetic construct; identical to SEQ ID NO: 13188
  REGION 1..107: note = Description of Artificial Sequence: Synthetic polypeptide
  REGION 1..107: note = VL of XENP018345

SEQ ID NO: 18798 - protein, 11 aa, synthetic construct
  REGION 1..11: note = Description of Artificial Sequence: Synthetic peptide
  REGION 1..11: note = XENP018345 vlCDR1
RASQSVSNDVA

SEQ ID NO: 18799 - protein, 7 aa, synthetic construct
  REGION 1..7: note = Description of Artificial Sequence: Synthetic peptide
  REGION 1..7: note = XENP018345 vlCDR2
YASHRYT

SEQ ID NO: 18800 - protein, 9 aa, synthetic construct
  REGION 1..9: note = Description of Artificial Sequence: Synthetic peptide
  REGION 1..9: note = XENP018345 vlCDR3
QQDYSSPRT

SEQ ID NO: 18801 - protein, 451 aa, synthetic construct; identical to SEQ ID NO: 16221
  REGION 1..451: note = Description of Artificial Sequence: Synthetic polypeptide
  REGION 1..451: note = XENP018346 1G6_H1_L1.3_IgG1_PVA_/S267K Heavy Chain

SEQ ID NO: 18802 - protein, 122 aa, synthetic construct; identical to SEQ ID NO: 10922
  REGION 1..122: note = Description of Artificial Sequence: Synthetic polypeptide
  REGION 1..122: note = VH of XENP018346

SEQ ID NO: 18803 - protein, 5 aa, synthetic construct
  REGION 1..5: note = Description of Artificial Sequence: Synthetic peptide
  REGION 1..5: note = XENP018346 vhCDR1
NYWMN

SEQ ID NO: 18804 - protein, 19 aa, synthetic construct
  REGION 1..19: note = Description of Artificial Sequence: Synthetic peptide
  REGION 1..19: note = XENP018346 vhCDR2
EIRLKSNNYATHYAEPVKG

SEQ ID NO: 18805 - protein, 11 aa, synthetic construct
  REGION 1..11: note = Description of Artificial Sequence: Synthetic peptide
  REGION 1..11: note = XENP018346 vhCDR3
YYGNYGGYFDV

SEQ ID NO: 18806 - protein, 214 aa, synthetic construct
  REGION 1..214: note = Description of Artificial Sequence: Synthetic polypeptide
  REGION 1..214: note = XENP018346 1G6_H1_L1.3_IgG1_PVA_/S267K Light Chain
SVVMTQSPATLSVSPGERATLSCRASQSVSNDVAWYQQKPGQSPRLLINYASHRYTGVPDRFTGSGYGTEFTLTISSLQSEDFAVYFCQQDYSSPRTFGGGTKVEIKRTVAAPSVFIFPPSDEQLKSGTASVVCLLNNFYPREAKVQWKVDNALQSGNSQESVTEQDSKDSTYSLSSTLTLSKADYEKHKVYACEVTHQGLSSPVTKSFNRGEC

SEQ ID NO: 18807 - protein, 107 aa, synthetic construct; identical to SEQ ID NO: 13197
  REGION 1..107: note = Description of Artificial Sequence: Synthetic polypeptide
  REGION 1..107: note = VL of XENP018346

SEQ ID NO: 18808 - protein, 11 aa, synthetic construct
  REGION 1..11: note = Description of Artificial Sequence: Synthetic peptide
  REGION 1..11: note = XENP018346 vlCDR1
RASQSVSNDVA

SEQ ID NO: 18809 - protein, 7 aa, synthetic construct
  REGION 1..7: note = Description of Artificial Sequence: Synthetic peptide
  REGION 1..7: note = XENP018346 vlCDR2
YASHRYT

SEQ ID NO: 18810 - protein, 9 aa, synthetic construct
  REGION 1..9: note = Description of Artificial Sequence: Synthetic peptide
  REGION 1..9: note = XENP018346 vlCDR3
QQDYSSPRT

SEQ ID NO: 18811 - protein, 451 aa, synthetic construct; identical to SEQ ID NO: 16221
  REGION 1..451: note = Description of Artificial Sequence: Synthetic polypeptide
  REGION 1..451: note = XENP018347 1G6_H1_L1.4_IgG1_PVA_/S267K Heavy Chain

SEQ ID NO: 18812 - protein, 122 aa, synthetic construct; identical to SEQ ID NO: 10922
  REGION 1..122: note = Description of Artificial Sequence: Synthetic polypeptide
  REGION 1..122: note = VH of XENP018347

SEQ ID NO: 18813 - protein, 5 aa, synthetic construct
  REGION 1..5: note = Description of Artificial Sequence: Synthetic peptide
  REGION 1..5: note = XENP018347 vhCDR1
NYWMN

SEQ ID NO: 18814 - protein, 19 aa, synthetic construct
  REGION 1..19: note = Description of Artificial Sequence: Synthetic peptide
  REGION 1..19: note = XENP018347 vhCDR2
EIRLKSNNYATHYAEPVKG

SEQ ID NO: 18815 - protein, 11 aa, synthetic construct
  REGION 1..11: note = Description of Artificial Sequence: Synthetic peptide
  REGION 1..11: note = XENP018347 vhCDR3
YYGNYGGYFDV

SEQ ID NO: 18816 - protein, 214 aa, synthetic construct
  REGION 1..214: note = Description of Artificial Sequence: Synthetic polypeptide
  REGION 1..214: note = XENP018347 1G6_H1_L1.4_IgG1_PVA_/S267K Light Chain
SIVLTQSPATLSVSPGERATLSCRASQSVSNDVAWYQQKPGQSPRLLINYASHRYTGVPDRFTGSGYGTEFTLTISSLQSEDFAVYFCQQDYSSPRTFGGGTKVEIKRTVAAPSVFIFPPSDEQLKSGTASVVCLLNNFYPREAKVQWKVDNALQSGNSQESVTEQDSKDSTYSLSSTLTLSKADYEKHKVYACEVTHQGLSSPVTKSFNRGEC

SEQ ID NO: 18817 - protein, 107 aa, synthetic construct; identical to SEQ ID NO: 13206
  REGION 1..107: note = Description of Artificial Sequence: Synthetic polypeptide
  REGION 1..107: note = VL of XENP018347

SEQ ID NO: 18818 - protein, 11 aa, synthetic construct
  REGION 1..11: note = Description of Artificial Sequence: Synthetic peptide
  REGION 1..11: note = XENP018347 vlCDR1
RASQSVSNDVA

SEQ ID NO: 18819 - protein, 7 aa, synthetic construct
  REGION 1..7: note = Description of Artificial Sequence: Synthetic peptide
  REGION 1..7: note = XENP018347 vlCDR2
YASHRYT

SEQ ID NO: 18820 - protein, 9 aa, synthetic construct
  REGION 1..9: note = Description of Artificial Sequence: Synthetic peptide
  REGION 1..9: note = XENP018347 vlCDR3
QQDYSSPRT

SEQ ID NO: 18821 - protein, 451 aa, synthetic construct; identical to SEQ ID NO: 16221
  REGION 1..451: note = Description of Artificial Sequence: Synthetic polypeptide
  REGION 1..451: note = XENP018348 1G6_H1_L1.5_IgG1_PVA_/S267K Heavy Chain

SEQ ID NO: 18822 - protein, 122 aa, synthetic construct; identical to SEQ ID NO: 10922
  REGION 1..122: note = Description of Artificial Sequence: Synthetic polypeptide
  REGION 1..122: note = VH of XENP018348

SEQ ID NO: 18823 - protein, 5 aa, synthetic construct
  REGION 1..5: note = Description of Artificial Sequence: Synthetic peptide
  REGION 1..5: note = XENP018348 vhCDR1
NYWMN

SEQ ID NO: 18824 - protein, 19 aa, synthetic construct
  REGION 1..19: note = Description of Artificial Sequence: Synthetic peptide
  REGION 1..19: note = XENP018348 vhCDR2
EIRLKSNNYATHYAEPVKG

SEQ ID NO: 18825 - protein, 11 aa, synthetic construct
  REGION 1..11: note = Description of Artificial Sequence: Synthetic peptide
  REGION 1..11: note = XENP018348 vhCDR3
YYGNYGGYFDV

SEQ ID NO: 18826 - protein, 214 aa, synthetic construct
  REGION 1..214: note = Description of Artificial Sequence: Synthetic polypeptide
  REGION 1..214: note = XENP018348 1G6_H1_L1.5_IgG1_PVA_/S267K Light Chain
SIVMTQTPATLSVSPGERATLSCRASQSVSNDVAWYQQKPGQSPRLLINYASHRYTGVPDRFTGSGYGTEFTLTISSLQSEDFAVYFCQQDYSSPRTFGGGTKVEIKRTVAAPSVFIFPPSDEQLKSGTASVVCLLNNFYPREAKVQWKVDNALQSGNSQESVTEQDSKDSTYSLSSTLTLSKADYEKHKVYACEVTHQGLSSPVTKSFNRGEC

SEQ ID NO: 18827 - protein, 107 aa, synthetic construct; identical to SEQ ID NO: 13215
  REGION 1..107: note = Description of Artificial Sequence: Synthetic polypeptide
  REGION 1..107: note = VL of XENP018348

SEQ ID NO: 18828 - protein, 11 aa, synthetic construct
  REGION 1..11: note = Description of Artificial Sequence: Synthetic peptide
  REGION 1..11: note = XENP018348 vlCDR1
RASQSVSNDVA

SEQ ID NO: 18829 - protein, 7 aa, synthetic construct
  REGION 1..7: note = Description of Artificial Sequence: Synthetic peptide
  REGION 1..7: note = XENP018348 vlCDR2
YASHRYT

SEQ ID NO: 18830 - protein, 9 aa, synthetic construct
  REGION 1..9: note = Description of Artificial Sequence: Synthetic peptide
  REGION 1..9: note = XENP018348 vlCDR3
QQDYSSPRT

SEQ ID NO: 18831 - protein, 451 aa, synthetic construct; identical to SEQ ID NO: 16221
  REGION 1..451: note = Description of Artificial Sequence: Synthetic polypeptide
  REGION 1..451: note = XENP018349 1G6_H1_L1.6_IgG1_PVA_/S267K Heavy Chain

SEQ ID NO: 18832 - protein, 122 aa, synthetic construct; identical to SEQ ID NO: 10922
  REGION 1..122: note = Description of Artificial Sequence: Synthetic polypeptide
  REGION 1..122: note = VH of XENP018349

SEQ ID NO: 18833 - protein, 5 aa, synthetic construct
  REGION 1..5: note = Description of Artificial Sequence: Synthetic peptide
  REGION 1..5: note = XENP018349 vhCDR1
NYWMN

SEQ ID NO: 18834 - protein, 19 aa, synthetic construct
  REGION 1..19: note = Description of Artificial Sequence: Synthetic peptide
  REGION 1..19: note = XENP018349 vhCDR2
EIRLKSNNYATHYAEPVKG

SEQ ID NO: 18835 - protein, 11 aa, synthetic construct
  REGION 1..11: note = Description of Artificial Sequence: Synthetic peptide
  REGION 1..11: note = XENP018349 vhCDR3
YYGNYGGYFDV

SEQ ID NO: 18836 - protein, 214 aa, synthetic construct
  REGION 1..214: note = Description of Artificial Sequence: Synthetic polypeptide
  REGION 1..214: note = XENP018349 1G6_H1_L1.6_IgG1_PVA_/S267K Light Chain
SIVMTQSPKTLSVSPGERATLSCRASQSVSNDVAWYQQKPGQSPRLLINYASHRYTGVPDRFTGSGYGTEFTLTISSLQSEDFAVYFCQQDYSSPRTFGGGTKVEIKRTVAAPSVFIFPPSDEQLKSGTASVVCLLNNFYPREAKVQWKVDNALQSGNSQESVTEQDSKDSTYSLSSTLTLSKADYEKHKVYACEVTHQGLSSPVTKSFNRGEC

SEQ ID NO: 18837 - protein, 107 aa, synthetic construct; identical to SEQ ID NO: 13224
  REGION 1..107: note = Description of Artificial Sequence: Synthetic polypeptide
  REGION 1..107: note = VL of XENP018349

SEQ ID NO: 18838 - protein, 11 aa, synthetic construct
  REGION 1..11: note = Description of Artificial Sequence: Synthetic peptide
  REGION 1..11: note = XENP018349 vlCDR1
RASQSVSNDVA

SEQ ID NO: 18839 - protein, 7 aa, synthetic construct
  REGION 1..7: note = Description of Artificial Sequence: Synthetic peptide
  REGION 1..7: note = XENP018349 vlCDR2
YASHRYT

SEQ ID NO: 18840 - protein, 9 aa, synthetic construct
  REGION 1..9: note = Description of Artificial Sequence: Synthetic peptide
  REGION 1..9: note = XENP018349 vlCDR3
QQDYSSPRT

SEQ ID NO: 18841 - protein, 451 aa, synthetic construct; identical to SEQ ID NO: 16221
  REGION 1..451: note = Description of Artificial Sequence: Synthetic polypeptide
  REGION 1..451: note = XENP018350 1G6_H1_L1.7_IgG1_PVA_/S267K Heavy Chain

SEQ ID NO: 18842 - protein, 122 aa, synthetic construct; identical to SEQ ID NO: 10922
  REGION 1..122: note = Description of Artificial Sequence: Synthetic polypeptide
  REGION 1..122: note = VH of XENP018350

SEQ ID NO: 18843 - protein, 5 aa, synthetic construct
  REGION 1..5: note = Description of Artificial Sequence: Synthetic peptide
  REGION 1..5: note = XENP018350 vhCDR1
NYWMN

SEQ ID NO: 18844 - protein, 19 aa, synthetic construct
  REGION 1..19: note = Description of Artificial Sequence: Synthetic peptide
  REGION 1..19: note = XENP018350 vhCDR2
EIRLKSNNYATHYAEPVKG

SEQ ID NO: 18845 - protein, 11 aa, synthetic construct
  REGION 1..11: note = Description of Artificial Sequence: Synthetic peptide
  REGION 1..11: note = XENP018350 vhCDR3
YYGNYGGYFDV

SEQ ID NO: 18846 - protein, 214 aa, synthetic construct
  REGION 1..214: note = Description of Artificial Sequence: Synthetic polypeptide
  REGION 1..214: note = XENP018350 1G6_H1_L1.7_IgG1_PVA_/S267K Light Chain
SIVMTQSPASLSVSPGERATLSCRASQSVSNDVAWYQQKPGQSPRLLINYASHRYTGVPDRFTGSGYGTEFTLTISSLQSEDFAVYFCQQDYSSPRTFGGGTKVEIKRTVAAPSVFIFPPSDEQLKSGTASVVCLLNNFYPREAKVQWKVDNALQSGNSQESVTEQDSKDSTYSLSSTLTLSKADYEKHKVYACEVTHQGLSSPVTKSFNRGEC

SEQ ID NO: 18847 - protein, 107 aa, synthetic construct; identical to SEQ ID NO: 13233
  REGION 1..107: note = Description of Artificial Sequence: Synthetic polypeptide
  REGION 1..107: note = VL of XENP018350

SEQ ID NO: 18848 - protein, 11 aa, synthetic construct
  REGION 1..11: note = Description of Artificial Sequence: Synthetic peptide
  REGION 1..11: note = XENP018350 vlCDR1
RASQSVSNDVA

SEQ ID NO: 18849 - protein, 7 aa, synthetic construct
  REGION 1..7: note = Description of Artificial Sequence: Synthetic peptide
  REGION 1..7: note = XENP018350 vlCDR2
YASHRYT

SEQ ID NO: 18850 - protein, 9 aa, synthetic construct
  REGION 1..9: note = Description of Artificial Sequence: Synthetic peptide
  REGION 1..9: note = XENP018350 vlCDR3
QQDYSSPRT

SEQ ID NO: 18851 - protein, 451 aa, synthetic construct; identical to SEQ ID NO: 16221
  REGION 1..451: note = Description of Artificial Sequence: Synthetic polypeptide
  REGION 1..451: note = XENP018351 1G6_H1_L1.8_IgG1_PVA_/S267K Heavy Chain

SEQ ID NO: 18852 - protein, 122 aa, synthetic construct; identical to SEQ ID NO: 10922
  REGION 1..122: note = Description of Artificial Sequence: Synthetic polypeptide
  REGION 1..122: note = VH of XENP018351

SEQ ID NO: 18853 - protein, 5 aa, synthetic construct
  REGION 1..5: note = Description of Artificial Sequence: Synthetic peptide
  REGION 1..5: note = XENP018351 vhCDR1
NYWMN

SEQ ID NO: 18854 - protein, 19 aa, synthetic construct
  REGION 1..19: note = Description of Artificial Sequence: Synthetic peptide
  REGION 1..19: note = XENP018351 vhCDR2
EIRLKSNNYATHYAEPVKG

SEQ ID NO: 18855 - protein, 11 aa, synthetic construct
  REGION 1..11: note = Description of Artificial Sequence: Synthetic peptide
  REGION 1..11: note = XENP018351 vhCDR3
YYGNYGGYFDV

SEQ ID NO: 18856 - protein, 214 aa, synthetic construct
  REGION 1..214: note = Description of Artificial Sequence: Synthetic polypeptide
  REGION 1..214: note = XENP018351 1G6_H1_L1.8_IgG1_PVA_/S267K Light Chain
SIVMTQSPAFLSVSPGERATLSCRASQSVSNDVAWYQQKPGQSPRLLINYASHRYTGVPDRFTGSGYGTEFTLTISSLQSEDFAVYFCQQDYSSPRTFGGGTKVEIKRTVAAPSVFIFPPSDEQLKSGTASVVCLLNNFYPREAKVQWKVDNALQSGNSQESVTEQDSKDSTYSLSSTLTLSKADYEKHKVYACEVTHQGLSSPVTKSFNRGEC

SEQ ID NO: 18857 - protein, 107 aa, synthetic construct; identical to SEQ ID NO: 13242
  REGION 1..107: note = Description of Artificial Sequence: Synthetic polypeptide
  REGION 1..107: note = VL of XENP018351

SEQ ID NO: 18858 - protein, 11 aa, synthetic construct
  REGION 1..11: note = Description of Artificial Sequence: Synthetic peptide
  REGION 1..11: note = XENP018351 vlCDR1
RASQSVSNDVA

SEQ ID NO: 18859 - protein, 7 aa, synthetic construct
  REGION 1..7: note = Description of Artificial Sequence: Synthetic peptide
  REGION 1..7: note = XENP018351 vlCDR2
YASHRYT

SEQ ID NO: 18860 - protein, 9 aa, synthetic construct
  REGION 1..9: note = Description of Artificial Sequence: Synthetic peptide
  REGION 1..9: note = XENP018351 vlCDR3
QQDYSSPRT

SEQ ID NO: 18861 - protein, 451 aa, synthetic construct; identical to SEQ ID NO: 16221
  REGION 1..451: note = Description of Artificial Sequence: Synthetic polypeptide
  REGION 1..451: note = XENP018352 1G6_H1_L1.9_IgG1_PVA_/S267K Heavy Chain

SEQ ID NO: 18862 - protein, 122 aa, synthetic construct; identical to SEQ ID NO: 10922
  REGION 1..122: note = Description of Artificial Sequence: Synthetic polypeptide
  REGION 1..122: note = VH of XENP018352

SEQ ID NO: 18863 - protein, 5 aa, synthetic construct
  REGION 1..5: note = Description of Artificial Sequence: Synthetic peptide
  REGION 1..5: note = XENP018352 vhCDR1
NYWMN

SEQ ID NO: 18864 - protein, 19 aa, synthetic construct
  REGION 1..19: note = Description of Artificial Sequence: Synthetic peptide
  REGION 1..19: note = XENP018352 vhCDR2
EIRLKSNNYATHYAEPVKG

SEQ ID NO: 18865 - protein, 11 aa, synthetic construct
  REGION 1..11: note = Description of Artificial Sequence: Synthetic peptide
  REGION 1..11: note = XENP018352 vhCDR3
YYGNYGGYFDV

SEQ ID NO: 18866 - protein, 214 aa, synthetic construct
  REGION 1..214: note = Description of Artificial Sequence: Synthetic polypeptide
  REGION 1..214: note = XENP018352 1G6_H1_L1.9_IgG1_PVA_/S267K Light Chain
SIVMTQSPATLLVSPGERATLSCRASQSVSNDVAWYQQKPGQSPRLLINYASHRYTGVPDRFTGSGYGTEFTLTISSLQSEDFAVYFCQQDYSSPRTFGGGTKVEIKRTVAAPSVFIFPPSDEQLKSGTASVVCLLNNFYPREAKVQWKVDNALQSGNSQESVTEQDSKDSTYSLSSTLTLSKADYEKHKVYACEVTHQGLSSPVTKSFNRGEC

SEQ ID NO: 18867 - protein, 107 aa, synthetic construct; identical to SEQ ID NO: 13251
  REGION 1..107: note = Description of Artificial Sequence: Synthetic polypeptide
  REGION 1..107: note = VL of XENP018352

SEQ ID NO: 18868 - protein, 11 aa, synthetic construct
  REGION 1..11: note = Description of Artificial Sequence: Synthetic peptide
  REGION 1..11: note = XENP018352 vlCDR1
RASQSVSNDVA

SEQ ID NO: 18869 - protein, 7 aa, synthetic construct
  REGION 1..7: note = Description of Artificial Sequence: Synthetic peptide
  REGION 1..7: note = XENP018352 vlCDR2
YASHRYT

SEQ ID NO: 18870 - protein, 9 aa, synthetic construct
  REGION 1..9: note = Description of Artificial Sequence: Synthetic peptide
  REGION 1..9: note = XENP018352 vlCDR3
QQDYSSPRT

SEQ ID NO: 18871 - protein, 451 aa, synthetic construct; identical to SEQ ID NO: 16221
  REGION 1..451: note = Description of Artificial Sequence: Synthetic polypeptide
  REGION 1..451: note = XENP018353 1G6_H1_L1.10_IgG1_PVA_/S267K Heavy Chain

SEQ ID NO: 18872 - protein, 122 aa, synthetic construct; identical to SEQ ID NO: 10922
  REGION 1..122: note = Description of Artificial Sequence: Synthetic polypeptide
  REGION 1..122: note = VH of XENP018353

SEQ ID NO: 18873 - protein, 5 aa, synthetic construct
  REGION 1..5: note = Description of Artificial Sequence: Synthetic peptide
  REGION 1..5: note = XENP018353 vhCDR1
NYWMN

SEQ ID NO: 18874 - protein, 19 aa, synthetic construct
  REGION 1..19: note = Description of Artificial Sequence: Synthetic peptide
  REGION 1..19: note = XENP018353 vhCDR2
EIRLKSNNYATHYAEPVKG

SEQ ID NO: 18875 - protein, 11 aa, synthetic construct
  REGION 1..11: note = Description of Artificial Sequence: Synthetic peptide
  REGION 1..11: note = XENP018353 vhCDR3
YYGNYGGYFDV

SEQ ID NO: 18876 - protein, 214 aa, synthetic construct
  REGION 1..214: note = Description of Artificial Sequence: Synthetic polypeptide
  REGION 1..214: note = XENP018353 1G6_H1_L1.10_IgG1_PVA_/S267K Light Chain
SIVMTQSPATLSVSAGERATLSCRASQSVSNDVAWYQQKPGQSPRLLINYASHRYTGVPDRFTGSGYGTEFTLTISSLQSEDFAVYFCQQDYSSPRTFGGGTKVEIKRTVAAPSVFIFPPSDEQLKSGTASVVCLLNNFYPREAKVQWKVDNALQSGNSQESVTEQDSKDSTYSLSSTLTLSKADYEKHKVYACEVTHQGLSSPVTKSFNRGEC

SEQ ID NO: 18877 - protein, 107 aa, synthetic construct; identical to SEQ ID NO: 13260
  REGION 1..107: note = Description of Artificial Sequence: Synthetic polypeptide
  REGION 1..107: note = VL of XENP018353

SEQ ID NO: 18878 - protein, 11 aa, synthetic construct
  REGION 1..11: note = Description of Artificial Sequence: Synthetic peptide
  REGION 1..11: note = XENP018353 vlCDR1
RASQSVSNDVA

SEQ ID NO: 18879 - protein, 7 aa, synthetic construct
  REGION 1..7: note = Description of Artificial Sequence: Synthetic peptide
  REGION 1..7: note = XENP018353 vlCDR2
YASHRYT

SEQ ID NO: 18880 - protein, 9 aa, synthetic construct
  REGION 1..9: note = Description of Artificial Sequence: Synthetic peptide
  REGION 1..9: note = XENP018353 vlCDR3
QQDYSSPRT

SEQ ID NO: 18881 - protein, 451 aa, synthetic construct; identical to SEQ ID NO: 16221
  REGION 1..451: note = Description of Artificial Sequence: Synthetic polypeptide
  REGION 1..451: note = XENP018354 1G6_H1_L1.11_IgG1_PVA_/S267K Heavy Chain

SEQ ID NO: 18882 - protein, 122 aa, synthetic construct; identical to SEQ ID NO: 10922
  REGION 1..122: note = Description of Artificial Sequence: Synthetic polypeptide
  REGION 1..122: note = VH of XENP018354

SEQ ID NO: 18883 - protein, 5 aa, synthetic construct
  REGION 1..5: note = Description of Artificial Sequence: Synthetic peptide
  REGION 1..5: note = XENP018354 vhCDR1
NYWMN

SEQ ID NO: 18884 - protein, 19 aa, synthetic construct
  REGION 1..19: note = Description of Artificial Sequence: Synthetic peptide
  REGION 1..19: note = XENP018354 vhCDR2
EIRLKSNNYATHYAEPVKG

SEQ ID NO: 18885 - protein, 11 aa, synthetic construct
  REGION 1..11: note = Description of Artificial Sequence: Synthetic peptide
  REGION 1..11: note = XENP018354 vhCDR3
YYGNYGGYFDV

SEQ ID NO: 18886 - protein, 214 aa, synthetic construct
  REGION 1..214: note = Description of Artificial Sequence: Synthetic polypeptide
  REGION 1..214: note = XENP018354 1G6_H1_L1.11_IgG1_PVA_/S267K Light Chain
SIVMTQSPATLSVSPGDRATLSCRASQSVSNDVAWYQQKPGQSPRLLINYASHRYTGVPDRFTGSGYGTEFTLTISSLQSEDFAVYFCQQDYSSPRTFGGGTKVEIKRTVAAPSVFIFPPSDEQLKSGTASVVCLLNNFYPREAKVQWKVDNALQSGNSQESVTEQDSKDSTYSLSSTLTLSKADYEKHKVYACEVTHQGLSSPVTKSFNRGEC

SEQ ID NO: 18887 - protein, 107 aa, synthetic construct; identical to SEQ ID NO: 13269
  REGION 1..107: note = Description of Artificial Sequence: Synthetic polypeptide
  REGION 1..107: note = VL of XENP018354

SEQ ID NO: 18888 - protein, 11 aa, synthetic construct
  REGION 1..11: note = Description of Artificial Sequence: Synthetic peptide
  REGION 1..11: note = XENP018354 vlCDR1
RASQSVSNDVA

SEQ ID NO: 18889 - protein, 7 aa, synthetic construct
  REGION 1..7: note = Description of Artificial Sequence: Synthetic peptide
  REGION 1..7: note = XENP018354 vlCDR2
YASHRYT

SEQ ID NO: 18890 - protein, 9 aa, synthetic construct
  REGION 1..9: note = Description of Artificial Sequence: Synthetic peptide
  REGION 1..9: note = XENP018354 vlCDR3
QQDYSSPRT

SEQ ID NO: 18891 - protein, 451 aa, synthetic construct; identical to SEQ ID NO: 16221
  REGION 1..451: note = Description of Artificial Sequence: Synthetic polypeptide
  REGION 1..451: note = XENP018355 1G6_H1_L1.12_IgG1_PVA_/S267K Heavy Chain

SEQ ID NO: 18892 - protein, 122 aa, synthetic construct; identical to SEQ ID NO: 10922
  REGION 1..122: note = Description of Artificial Sequence: Synthetic polypeptide
  REGION 1..122: note = VH of XENP018355

SEQ ID NO: 18893 - protein, 5 aa, synthetic construct
  REGION 1..5: note = Description of Artificial Sequence: Synthetic peptide
  REGION 1..5: note = XENP018355 vhCDR1
NYWMN

SEQ ID NO: 18894 - protein, 19 aa, synthetic construct
  REGION 1..19: note = Description of Artificial Sequence: Synthetic peptide
  REGION 1..19: note = XENP018355 vhCDR2
EIRLKSNNYATHYAEPVKG

SEQ ID NO: 18895 - protein, 11 aa, synthetic construct
  REGION 1..11: note = Description of Artificial Sequence: Synthetic peptide
  REGION 1..11: note = XENP018355 vhCDR3
YYGNYGGYFDV

SEQ ID NO: 18896 - protein, 214 aa, synthetic construct
  REGION 1..214: note = Description of Artificial Sequence: Synthetic polypeptide
  REGION 1..214: note = XENP018355 1G6_H1_L1.12_IgG1_PVA_/S267K Light Chain
SIVMTQSPATLSVSPGERVTLSCRASQSVSNDVAWYQQKPGQSPRLLINYASHRYTGVPDRFTGSGYGTEFTLTISSLQSEDFAVYFCQQDYSSPRTFGGGTKVEIKRTVAAPSVFIFPPSDEQLKSGTASVVCLLNNFYPREAKVQWKVDNALQSGNSQESVTEQDSKDSTYSLSSTLTLSKADYEKHKVYACEVTHQGLSSPVTKSFNRGEC

SEQ ID NO: 18897 - protein, 107 aa, synthetic construct; identical to SEQ ID NO: 13278
  REGION 1..107: note = Description of Artificial Sequence: Synthetic polypeptide
  REGION 1..107: note = VL of XENP018355

SEQ ID NO: 18898 - protein, 11 aa, synthetic construct
  REGION 1..11: note = Description of Artificial Sequence: Synthetic peptide
  REGION 1..11: note = XENP018355 vlCDR1
RASQSVSNDVA

SEQ ID NO: 18899 - protein, 7 aa, synthetic construct
  REGION 1..7: note = Description of Artificial Sequence: Synthetic peptide
  REGION 1..7: note = XENP018355 vlCDR2
YASHRYT

SEQ ID NO: 18900 - protein, 9 aa, synthetic construct
  REGION 1..9: note = Description of Artificial Sequence: Synthetic peptide
  REGION 1..9: note = XENP018355 vlCDR3
QQDYSSPRT

SEQ ID NO: 18901 - protein, 451 aa, synthetic construct; identical to SEQ ID NO: 16221
  REGION 1..451: note = Description of Artificial Sequence: Synthetic polypeptide
  REGION 1..451: note = XENP018356 1G6_H1_L1.13_IgG1_PVA_/S267K Heavy Chain

SEQ ID NO: 18902 - protein, 122 aa, synthetic construct; identical to SEQ ID NO: 10922
  REGION 1..122: note = Description of Artificial Sequence: Synthetic polypeptide
  REGION 1..122: note = VH of XENP018356

SEQ ID NO: 18903 - protein, 5 aa, synthetic construct
  REGION 1..5: note = Description of Artificial Sequence: Synthetic peptide
  REGION 1..5: note = XENP018356 vhCDR1
NYWMN

SEQ ID NO: 18904 - protein, 19 aa, synthetic construct
  REGION 1..19: note = Description of Artificial Sequence: Synthetic peptide
  REGION 1..19: note = XENP018356 vhCDR2
EIRLKSNNYATHYAEPVKG

SEQ ID NO: 18905 - protein, 11 aa, synthetic construct
  REGION 1..11: note = Description of Artificial Sequence: Synthetic peptide
  REGION 1..11: note = XENP018356 vhCDR3
YYGNYGGYFDV

SEQ ID NO: 18906 - protein, 214 aa, synthetic construct
  REGION 1..214: note = Description of Artificial Sequence: Synthetic polypeptide
  REGION 1..214: note = XENP018356 1G6_H1_L1.13_IgG1_PVA_/S267K Light Chain
SIVMTQSPATLSVSPGERATISCRASQSVSNDVAWYQQKPGQSPRLLINYASHRYTGVPDRFTGSGYGTEFTLTISSLQSEDFAVYFCQQDYSSPRTFGGGTKVEIKRTVAAPSVFIFPPSDEQLKSGTASVVCLLNNFYPREAKVQWKVDNALQSGNSQESVTEQDSKDSTYSLSSTLTLSKADYEKHKVYACEVTHQGLSSPVTKSFNRGEC

SEQ ID NO: 18907 - protein, 107 aa, synthetic construct; identical to SEQ ID NO: 13287
  REGION 1..107: note = Description of Artificial Sequence: Synthetic polypeptide
  REGION 1..107: note = VL of XENP018356

SEQ ID NO: 18908 - protein, 11 aa, synthetic construct
  REGION 1..11: note = Description of Artificial Sequence: Synthetic peptide
  REGION 1..11: note = XENP018356 vlCDR1
RASQSVSNDVA

SEQ ID NO: 18909 - protein, 7 aa, synthetic construct
  REGION 1..7: note = Description of Artificial Sequence: Synthetic peptide
  REGION 1..7: note = XENP018356 vlCDR2
YASHRYT

SEQ ID NO: 18910 - protein, 9 aa, synthetic construct
  REGION 1..9: note = Description of Artificial Sequence: Synthetic peptide
  REGION 1..9: note = XENP018356 vlCDR3
QQDYSSPRT

SEQ ID NO: 18911 - protein, 451 aa, synthetic construct; identical to SEQ ID NO: 16221
  REGION 1..451: note = Description of Artificial Sequence: Synthetic polypeptide
  REGION 1..451: note = XENP018357 1G6_H1_L1.14_IgG1_PVA_/S267K Heavy Chain

SEQ ID NO: 18912 - protein, 122 aa, synthetic construct; identical to SEQ ID NO: 10922
  REGION 1..122: note = Description of Artificial Sequence: Synthetic polypeptide
  REGION 1..122: note = VH of XENP018357

SEQ ID NO: 18913 - protein, 5 aa, synthetic construct
  REGION 1..5: note = Description of Artificial Sequence: Synthetic peptide
  REGION 1..5: note = XENP018357 vhCDR1
NYWMN

SEQ ID NO: 18914 - protein, 19 aa, synthetic construct
  REGION 1..19: note = Description of Artificial Sequence: Synthetic peptide
  REGION 1..19: note = XENP018357 vhCDR2
EIRLKSNNYATHYAEPVKG

SEQ ID NO: 18915 - protein, 11 aa, synthetic construct
  REGION 1..11: note = Description of Artificial Sequence: Synthetic peptide
  REGION 1..11: note = XENP018357 vhCDR3
YYGNYGGYFDV

SEQ ID NO: 18916 - protein, 214 aa, synthetic construct
  REGION 1..214: note = Description of Artificial Sequence: Synthetic polypeptide
  REGION 1..214: note = XENP018357 1G6_H1_L1.14_IgG1_PVA_/S267K Light Chain
SIVMTQSPATLSVSPGERATLTCRASQSVSNDVAWYQQKPGQSPRLLINYASHRYTGVPDRFTGSGYGTEFTLTISSLQSEDFAVYFCQQDYSSPRTFGGGTKVEIKRTVAAPSVFIFPPSDEQLKSGTASVVCLLNNFYPREAKVQWKVDNALQSGNSQESVTEQDSKDSTYSLSSTLTLSKADYEKHKVYACEVTHQGLSSPVTKSFNRGEC

SEQ ID NO: 18917 - protein, 107 aa, synthetic construct; identical to SEQ ID NO: 13296
  REGION 1..107: note = Description of Artificial Sequence: Synthetic polypeptide
  REGION 1..107: note = VL of XENP018357

SEQ ID NO: 18918 - protein, 11 aa, synthetic construct
  REGION 1..11: note = Description of Artificial Sequence: Synthetic peptide
  REGION 1..11: note = XENP018357 vlCDR1
RASQSVSNDVA

SEQ ID NO: 18919 - protein, 7 aa, synthetic construct
  REGION 1..7: note = Description of Artificial Sequence: Synthetic peptide
  REGION 1..7: note = XENP018357 vlCDR2
YASHRYT

SEQ ID NO: 18920 - protein, 9 aa, synthetic construct
  REGION 1..9: note = Description of Artificial Sequence: Synthetic peptide
  REGION 1..9: note = XENP018357 vlCDR3
QQDYSSPRT

SEQ ID NO: 18921 - protein, 451 aa, synthetic construct; identical to SEQ ID NO: 16221
  REGION 1..451: note = Description of Artificial Sequence: Synthetic polypeptide
  REGION 1..451: note = XENP018358 1G6_H1_L1.15_IgG1_PVA_/S267K Heavy Chain

SEQ ID NO: 18922 - protein, 122 aa, synthetic construct; identical to SEQ ID NO: 10922
  REGION 1..122: note = Description of Artificial Sequence: Synthetic polypeptide
  REGION 1..122: note = VH of XENP018358

SEQ ID NO: 18923 - protein, 5 aa, synthetic construct
  REGION 1..5: note = Description of Artificial Sequence: Synthetic peptide
  REGION 1..5: note = XENP018358 vhCDR1
NYWMN

SEQ ID NO: 18924 - protein, 19 aa, synthetic construct
  REGION 1..19: note = Description of Artificial Sequence: Synthetic peptide
  REGION 1..19: note = XENP018358 vhCDR2
EIRLKSNNYATHYAEPVKG

SEQ ID NO: 18925 - protein, 11 aa, synthetic construct
  REGION 1..11: note = Description of Artificial Sequence: Synthetic peptide
  REGION 1..11: note = XENP018358 vhCDR3
YYGNYGGYFDV

SEQ ID NO: 18926 - protein, 214 aa, synthetic construct
  REGION 1..214: note = Description of Artificial Sequence: Synthetic polypeptide
  REGION 1..214: note = XENP018358 1G6_H1_L1.15_IgG1_PVA_/S267K Light Chain
SIVMTQSPATLSVSPGERATLSCKASQSVSNDVAWYQQKPGQSPRLLINYASHRYTGVPDRFTGSGYGTEFTLTISSLQSEDFAVYFCQQDYSSPRTFGGGTKVEIKRTVAAPSVFIFPPSDEQLKSGTASVVCLLNNFYPREAKVQWKVDNALQSGNSQESVTEQDSKDSTYSLSSTLTLSKADYEKHKVYACEVTHQGLSSPVTKSFNRGEC

SEQ ID NO: 18927 - protein, 107 aa, synthetic construct; identical to SEQ ID NO: 13305
  REGION 1..107: note = Description of Artificial Sequence: Synthetic polypeptide
  REGION 1..107: note = VL of XENP018358

SEQ ID NO: 18928 - protein, 11 aa, synthetic construct
  REGION 1..11: note = Description of Artificial Sequence: Synthetic peptide
  REGION 1..11: note = XENP018358 vlCDR1
KASQSVSNDVA

SEQ ID NO: 18929 - protein, 7 aa, synthetic construct
  REGION 1..7: note = Description of Artificial Sequence: Synthetic peptide
  REGION 1..7: note = XENP018358 vlCDR2
YASHRYT

SEQ ID NO: 18930 - protein, 9 aa, synthetic construct
  REGION 1..9: note = Description of Artificial Sequence: Synthetic peptide
  REGION 1..9: note = XENP018358 vlCDR3
QQDYSSPRT

SEQ ID NO: 18931 - protein, 451 aa, synthetic construct; identical to SEQ ID NO: 16221
  REGION 1..451: note = Description of Artificial Sequence: Synthetic polypeptide
  REGION 1..451: note = XENP018359 1G6_H1_L1.16_IgG1_PVA_/S267K Heavy Chain

SEQ ID NO: 18932 - protein, 122 aa, synthetic construct; identical to SEQ ID NO: 10922
  REGION 1..122: note = Description of Artificial Sequence: Synthetic polypeptide
  REGION 1..122: note = VH of XENP018359

SEQ ID NO: 18933 - protein, 5 aa, synthetic construct
  REGION 1..5: note = Description of Artificial Sequence: Synthetic peptide
  REGION 1..5: note = XENP018359 vhCDR1
NYWMN

SEQ ID NO: 18934 - protein, 19 aa, synthetic construct
  REGION 1..19: note = Description of Artificial Sequence: Synthetic peptide
  REGION 1..19: note = XENP018359 vhCDR2
EIRLKSNNYATHYAEPVKG

SEQ ID NO: 18935 - protein, 11 aa, synthetic construct
  REGION 1..11: note = Description of Artificial Sequence: Synthetic peptide
  REGION 1..11: note = XENP018359 vhCDR3
YYGNYGGYFDV

SEQ ID NO: 18936 - protein, 214 aa, synthetic construct
  REGION 1..214: note = Description of Artificial Sequence: Synthetic polypeptide
  REGION 1..214: note = XENP018359 1G6_H1_L1.16_IgG1_PVA_/S267K Light Chain
SIVMTQSPATLSVSPGERATLSCRASQDVSNDVAWYQQKPGQSPRLLINYASHRYTGVPDRFTGSGYGTEFTLTISSLQSEDFAVYFCQQDYSSPRTFGGGTKVEIKRTVAAPSVFIFPPSDEQLKSGTASVVCLLNNFYPREAKVQWKVDNALQSGNSQESVTEQDSKDSTYSLSSTLTLSKADYEKHKVYACEVTHQGLSSPVTKSFNRGEC

SEQ ID NO: 18937 - protein, 107 aa, synthetic construct; identical to SEQ ID NO: 13314
  REGION 1..107: note = Description of Artificial Sequence: Synthetic polypeptide
  REGION 1..107: note = VL of XENP018359

SEQ ID NO: 18938 - protein, 11 aa, synthetic construct
  REGION 1..11: note = Description of Artificial Sequence: Synthetic peptide
  REGION 1..11: note = XENP018359 vlCDR1
RASQDVSNDVA

SEQ ID NO: 18939 - protein, 7 aa, synthetic construct
  REGION 1..7: note = Description of Artificial Sequence: Synthetic peptide
  REGION 1..7: note = XENP018359 vlCDR2
YASHRYT

SEQ ID NO: 18940 - protein, 9 aa, synthetic construct
  REGION 1..9: note = Description of Artificial Sequence: Synthetic peptide
  REGION 1..9: note = XENP018359 vlCDR3
QQDYSSPRT

SEQ ID NO: 18941 - protein, 451 aa, synthetic construct; identical to SEQ ID NO: 16221
  REGION 1..451: note = Description of Artificial Sequence: Synthetic polypeptide
  REGION 1..451: note = XENP018360 1G6_H1_L1.17_IgG1_PVA_/S267K Heavy Chain

SEQ ID NO: 18942 - protein, 122 aa, synthetic construct; identical to SEQ ID NO: 10922
  REGION 1..122: note = Description of Artificial Sequence: Synthetic polypeptide
  REGION 1..122: note = VH of XENP018360

SEQ ID NO: 18943 - protein, 5 aa, synthetic construct
  REGION 1..5: note = Description of Artificial Sequence: Synthetic peptide
  REGION 1..5: note = XENP018360 vhCDR1
NYWMN

SEQ ID NO: 18944 - protein, 19 aa, synthetic construct
  REGION 1..19: note = Description of Artificial Sequence: Synthetic peptide
  REGION 1..19: note = XENP018360 vhCDR2
EIRLKSNNYATHYAEPVKG

SEQ ID NO: 18945 - protein, 11 aa, synthetic construct
  REGION 1..11: note = Description of Artificial Sequence: Synthetic peptide
  REGION 1..11: note = XENP018360 vhCDR3
YYGNYGGYFDV

SEQ ID NO: 18946 - protein, 214 aa, synthetic construct
  REGION 1..214: note = Description of Artificial Sequence: Synthetic polypeptide
  REGION 1..214: note = XENP018360 1G6_H1_L1.17_IgG1_PVA_/S267K Light Chain
SIVMTQSPATLSVSPGERATLSCRASQGVSNDVAWYQQKPGQSPRLLINYASHRYTGVPDRFTGSGYGTEFTLTISSLQSEDFAVYFCQQDYSSPRTFGGGTKVEIKRTVAAPSVFIFPPSDEQLKSGTASVVCLLNNFYPREAKVQWKVDNALQSGNSQESVTEQDSKDSTYSLSSTLTLSKADYEKHKVYACEVTHQGLSSPVTKSFNRGEC

SEQ ID NO: 18947 - protein, 107 aa, synthetic construct; identical to SEQ ID NO: 13323
  REGION 1..107: note = Description of Artificial Sequence: Synthetic polypeptide
  REGION 1..107: note = VL of XENP018360

SEQ ID NO: 18948 - protein, 11 aa, synthetic construct
  REGION 1..11: note = Description of Artificial Sequence: Synthetic peptide
  REGION 1..11: note = XENP018360 vlCDR1
RASQGVSNDVA

SEQ ID NO: 18949 - protein, 7 aa, synthetic construct
  REGION 1..7: note = Description of Artificial Sequence: Synthetic peptide
  REGION 1..7: note = XENP018360 vlCDR2
YASHRYT

SEQ ID NO: 18950 - protein, 9 aa, synthetic construct
  REGION 1..9: note = Description of Artificial Sequence: Synthetic peptide
  REGION 1..9: note = XENP018360 vlCDR3
QQDYSSPRT

SEQ ID NO: 18951 - protein, 451 aa, synthetic construct; identical to SEQ ID NO: 16221
  REGION 1..451: note = Description of Artificial Sequence: Synthetic polypeptide
  REGION 1..451: note = XENP018361 1G6_H1_L1.18_IgG1_PVA_/S267K Heavy Chain

SEQ ID NO: 18952 - protein, 122 aa, synthetic construct; identical to SEQ ID NO: 10922
  REGION 1..122: note = Description of Artificial Sequence: Synthetic polypeptide
  REGION 1..122: note = VH of XENP018361

SEQ ID NO: 18953 - protein, 5 aa, synthetic construct
  REGION 1..5: note = Description of Artificial Sequence: Synthetic peptide
  REGION 1..5: note = XENP018361 vhCDR1
NYWMN

SEQ ID NO: 18954 - protein, 19 aa, synthetic construct
  REGION 1..19: note = Description of Artificial Sequence: Synthetic peptide
  REGION 1..19: note = XENP018361 vhCDR2
EIRLKSNNYATHYAEPVKG

SEQ ID NO: 18955 - protein, 11 aa, synthetic construct
  REGION 1..11: note = Description of Artificial Sequence: Synthetic peptide
  REGION 1..11: note = XENP018361 vhCDR3
YYGNYGGYFDV

SEQ ID NO: 18956 - protein, 214 aa, synthetic construct
  REGION 1..214: note = Description of Artificial Sequence: Synthetic polypeptide
  REGION 1..214: note = XENP018361 1G6_H1_L1.18_IgG1_PVA_/S267K Light Chain
SIVMTQSPATLSVSPGERATLSCRASQSISNDVAWYQQKPGQSPRLLINYASHRYTGVPDRFTGSGYGTEFTLTISSLQSEDFAVYFCQQDYSSPRTFGGGTKVEIKRTVAAPSVFIFPPSDEQLKSGTASVVCLLNNFYPREAKVQWKVDNALQSGNSQESVTEQDSKDSTYSLSSTLTLSKADYEKHKVYACEVTHQGLSSPVTKSFNRGEC

SEQ ID NO: 18957 - protein, 107 aa, synthetic construct; identical to SEQ ID NO: 13332
  REGION 1..107: note = Description of Artificial Sequence: Synthetic polypeptide
  REGION 1..107: note = VL of XENP018361

SEQ ID NO: 18958 - protein, 11 aa, synthetic construct
  REGION 1..11: note = Description of Artificial Sequence: Synthetic peptide
  REGION 1..11: note = XENP018361 vlCDR1
RASQSISNDVA

SEQ ID NO: 18959 - protein, 7 aa, synthetic construct
  REGION 1..7: note = Description of Artificial Sequence: Synthetic peptide
  REGION 1..7: note = XENP018361 vlCDR2
YASHRYT

SEQ ID NO: 18960 - protein, 9 aa, synthetic construct
  REGION 1..9: note = Description of Artificial Sequence: Synthetic peptide
  REGION 1..9: note = XENP018361 vlCDR3
QQDYSSPRT

SEQ ID NO: 18961 - protein, 451 aa, synthetic construct; identical to SEQ ID NO: 16221
  REGION 1..451: note = Description of Artificial Sequence: Synthetic polypeptide
  REGION 1..451: note = XENP018362 1G6_H1_L1.19_IgG1_PVA_/S267K Heavy Chain

SEQ ID NO: 18962 - protein, 122 aa, synthetic construct; identical to SEQ ID NO: 10922
  REGION 1..122: note = Description of Artificial Sequence: Synthetic polypeptide
  REGION 1..122: note = VH of XENP018362

SEQ ID NO: 18963 - protein, 5 aa, synthetic construct
  REGION 1..5: note = Description of Artificial Sequence: Synthetic peptide
  REGION 1..5: note = XENP018362 vhCDR1
NYWMN

SEQ ID NO: 18964 - protein, 19 aa, synthetic construct
  REGION 1..19: note = Description of Artificial Sequence: Synthetic peptide
  REGION 1..19: note = XENP018362 vhCDR2
EIRLKSNNYATHYAEPVKG

SEQ ID NO: 18965 - protein, 11 aa, synthetic construct
  REGION 1..11: note = Description of Artificial Sequence: Synthetic peptide
  REGION 1..11: note = XENP018362 vhCDR3
YYGNYGGYFDV

SEQ ID NO: 18966 - protein, 214 aa, synthetic construct
  REGION 1..214: note = Description of Artificial Sequence: Synthetic polypeptide
  REGION 1..214: note = XENP018362 1G6_H1_L1.19_IgG1_PVA_/S267K Light Chain
SIVMTQSPATLSVSPGERATLSCRASQSLSNDVAWYQQKPGQSPRLLINYASHRYTGVPDRFTGSGYGTEFTLTISSLQSEDFAVYFCQQDYSSPRTFGGGTKVEIKRTVAAPSVFIFPPSDEQLKSGTASVVCLLNNFYPREAKVQWKVDNALQSGNSQESVTEQDSKDSTYSLSSTLTLSKADYEKHKVYACEVTHQGLSSPVTKSFNRGEC

SEQ ID NO: 18967 - protein, 107 aa, synthetic construct; identical to SEQ ID NO: 13341
  REGION 1..107: note = Description of Artificial Sequence: Synthetic polypeptide
  REGION 1..107: note = VL of XENP018362

SEQ ID NO: 18968 - protein, 11 aa, synthetic construct
  REGION 1..11: note = Description of Artificial Sequence: Synthetic peptide
  REGION 1..11: note = XENP018362 vlCDR1
RASQSLSNDVA

SEQ ID NO: 18969 - protein, 7 aa, synthetic construct
  REGION 1..7: note = Description of Artificial Sequence: Synthetic peptide
  REGION 1..7: note = XENP018362 vlCDR2
YASHRYT

SEQ ID NO: 18970 - protein, 9 aa, synthetic construct
  REGION 1..9: note = Description of Artificial Sequence: Synthetic peptide
  REGION 1..9: note = XENP018362 vlCDR3
QQDYSSPRT

SEQ ID NO: 18971 - protein, 451 aa, synthetic construct; identical to SEQ ID NO: 16221
  REGION 1..451: note = Description of Artificial Sequence: Synthetic polypeptide
  REGION 1..451: note = XENP018363 1G6_H1_L1.20_IgG1_PVA_/S267K Heavy Chain

SEQ ID NO: 18972 - protein, 122 aa, synthetic construct; identical to SEQ ID NO: 10922
  REGION 1..122: note = Description of Artificial Sequence: Synthetic polypeptide
  REGION 1..122: note = VH of XENP018363

SEQ ID NO: 18973 - protein, 5 aa, synthetic construct
  REGION 1..5: note = Description of Artificial Sequence: Synthetic peptide
  REGION 1..5: note = XENP018363 vhCDR1
NYWMN

SEQ ID NO: 18974 - protein, 19 aa, synthetic construct
  REGION 1..19: note = Description of Artificial Sequence: Synthetic peptide
  REGION 1..19: note = XENP018363 vhCDR2
EIRLKSNNYATHYAEPVKG

SEQ ID NO: 18975 - protein, 11 aa, synthetic construct
  REGION 1..11: note = Description of Artificial Sequence: Synthetic peptide
  REGION 1..11: note = XENP018363 vhCDR3
YYGNYGGYFDV

SEQ ID NO: 18976 - protein, 214 aa, synthetic construct
  REGION 1..214: note = Description of Artificial Sequence: Synthetic polypeptide
  REGION 1..214: note = XENP018363 1G6_H1_L1.20_IgG1_PVA_/S267K Light Chain
SIVMTQSPATLSVSPGERATLSCRASQSVTNDVAWYQQKPGQSPRLLINYASHRYTGVPDRFTGSGYGTEFTLTISSLQSEDFAVYFCQQDYSSPRTFGGGTKVEIKRTVAAPSVFIFPPSDEQLKSGTASVVCLLNNFYPREAKVQWKVDNALQSGNSQESVTEQDSKDSTYSLSSTLTLSKADYEKHKVYACEVTHQGLSSPVTKSFNRGEC

SEQ ID NO: 18977 - protein, 107 aa, synthetic construct; identical to SEQ ID NO: 13350
  REGION 1..107: note = Description of Artificial Sequence: Synthetic polypeptide
  REGION 1..107: note = VL of XENP018363

SEQ ID NO: 18978 - protein, 11 aa, synthetic construct
  REGION 1..11: note = Description of Artificial Sequence: Synthetic peptide
  REGION 1..11: note = XENP018363 vlCDR1
RASQSVTNDVA

SEQ ID NO: 18979 - protein, 7 aa, synthetic construct
  REGION 1..7: note = Description of Artificial Sequence: Synthetic peptide
  REGION 1..7: note = XENP018363 vlCDR2
YASHRYT

SEQ ID NO: 18980 - protein, 9 aa, synthetic construct
  REGION 1..9: note = Description of Artificial Sequence: Synthetic peptide
  REGION 1..9: note = XENP018363 vlCDR3
QQDYSSPRT

SEQ ID NO: 18981 - protein, 451 aa, synthetic construct; identical to SEQ ID NO: 16221
  REGION 1..451: note = Description of Artificial Sequence: Synthetic polypeptide
  REGION 1..451: note = XENP018364 1G6_H1_L1.21_IgG1_PVA_/S267K Heavy Chain

SEQ ID NO: 18982 - protein, 122 aa, synthetic construct; identical to SEQ ID NO: 10922
  REGION 1..122: note = Description of Artificial Sequence: Synthetic polypeptide
  REGION 1..122: note = VH of XENP018364

SEQ ID NO: 18983 - protein, 5 aa, synthetic construct
  REGION 1..5: note = Description of Artificial Sequence: Synthetic peptide
  REGION 1..5: note = XENP018364 vhCDR1
NYWMN

SEQ ID NO: 18984 - protein, 19 aa, synthetic construct
  REGION 1..19: note = Description of Artificial Sequence: Synthetic peptide
  REGION 1..19: note = XENP018364 vhCDR2
EIRLKSNNYATHYAEPVKG

SEQ ID NO: 18985 - protein, 11 aa, synthetic construct
  REGION 1..11: note = Description of Artificial Sequence: Synthetic peptide
  REGION 1..11: note = XENP018364 vhCDR3
YYGNYGGYFDV

SEQ ID NO: 18986 - protein, 214 aa, synthetic construct
  REGION 1..214: note = Description of Artificial Sequence: Synthetic polypeptide
  REGION 1..214: note = XENP018364 1G6_H1_L1.21_IgG1_PVA_/S267K Light Chain
SIVMTQSPATLSVSPGERATLSCRASQSVANDVAWYQQKPGQSPRLLINYASHRYTGVPDRFTGSGYGTEFTLTISSLQSEDFAVYFCQQDYSSPRTFGGGTKVEIKRTVAAPSVFIFPPSDEQLKSGTASVVCLLNNFYPREAKVQWKVDNALQSGNSQESVTEQDSKDSTYSLSSTLTLSKADYEKHKVYACEVTHQGLSSPVTKSFNRGEC

SEQ ID NO: 18987 - protein, 107 aa, synthetic construct; identical to SEQ ID NO: 13359
  REGION 1..107: note = Description of Artificial Sequence: Synthetic polypeptide
  REGION 1..107: note = VL of XENP018364

SEQ ID NO: 18988 - protein, 11 aa, synthetic construct
  REGION 1..11: note = Description of Artificial Sequence: Synthetic peptide
  REGION 1..11: note = XENP018364 vlCDR1
RASQSVANDVA

SEQ ID NO: 18989 - protein, 7 aa, synthetic construct
  REGION 1..7: note = Description of Artificial Sequence: Synthetic peptide
  REGION 1..7: note = XENP018364 vlCDR2
YASHRYT

SEQ ID NO: 18990 - protein, 9 aa, synthetic construct
  REGION 1..9: note = Description of Artificial Sequence: Synthetic peptide
  REGION 1..9: note = XENP018364 vlCDR3
QQDYSSPRT

SEQ ID NO: 18991 - protein, 451 aa, synthetic construct; identical to SEQ ID NO: 16221
  REGION 1..451: note = Description of Artificial Sequence: Synthetic polypeptide
  REGION 1..451: note = XENP018365 1G6_H1_L1.22_IgG1_PVA_/S267K Heavy Chain

SEQ ID NO: 18992 - protein, 122 aa, synthetic construct; identical to SEQ ID NO: 10922
  REGION 1..122: note = Description of Artificial Sequence: Synthetic polypeptide
  REGION 1..122: note = VH of XENP018365

SEQ ID NO: 18993 - protein, 5 aa, synthetic construct
  REGION 1..5: note = Description of Artificial Sequence: Synthetic peptide
  REGION 1..5: note = XENP018365 vhCDR1
NYWMN

SEQ ID NO: 18994 - protein, 19 aa, synthetic construct
  REGION 1..19: note = Description of Artificial Sequence: Synthetic peptide
  REGION 1..19: note = XENP018365 vhCDR2
EIRLKSNNYATHYAEPVKG

SEQ ID NO: 18995 - protein, 11 aa, synthetic construct
  REGION 1..11: note = Description of Artificial Sequence: Synthetic peptide
  REGION 1..11: note = XENP018365 vhCDR3
YYGNYGGYFDV

SEQ ID NO: 18996 - protein, 214 aa, synthetic construct
  REGION 1..214: note = Description of Artificial Sequence: Synthetic polypeptide
  REGION 1..214: note = XENP018365 1G6_H1_L1.22_IgG1_PVA_/S267K Light Chain
SIVMTQSPATLSVSPGERATLSCRASQSVQNDVAWYQQKPGQSPRLLINYASHRYTGVPDRFTGSGYGTEFTLTISSLQSEDFAVYFCQQDYSSPRTFGGGTKVEIKRTVAAPSVFIFPPSDEQLKSGTASVVCLLNNFYPREAKVQWKVDNALQSGNSQESVTEQDSKDSTYSLSSTLTLSKADYEKHKVYACEVTHQGLSSPVTKSFNRGEC

SEQ ID NO: 18997 - protein, 107 aa, synthetic construct; identical to SEQ ID NO: 13368
  REGION 1..107: note = Description of Artificial Sequence: Synthetic polypeptide
  REGION 1..107: note = VL of XENP018365

SEQ ID NO: 18998 - protein, 11 aa, synthetic construct
  REGION 1..11: note = Description of Artificial Sequence: Synthetic peptide
  REGION 1..11: note = XENP018365 vlCDR1
RASQSVQNDVA

SEQ ID NO: 18999 - protein, 7 aa, synthetic construct
  REGION 1..7: note = Description of Artificial Sequence: Synthetic peptide
  REGION 1..7: note = XENP018365 vlCDR2
YASHRYT

SEQ ID NO: 19000 - protein, 9 aa, synthetic construct
  REGION 1..9: note = Description of Artificial Sequence: Synthetic peptide
  REGION 1..9: note = XENP018365 vlCDR3
QQDYSSPRT

SEQ ID NO: 19001 - protein, 451 aa, synthetic construct; identical to SEQ ID NO: 16221
  REGION 1..451: note = Description of Artificial Sequence: Synthetic polypeptide
  REGION 1..451: note = XENP018366 1G6_H1_L1.23_IgG1_PVA_/S267K Heavy Chain

SEQ ID NO: 19002 - protein, 122 aa, synthetic construct; identical to SEQ ID NO: 10922
  REGION 1..122: note = Description of Artificial Sequence: Synthetic polypeptide
  REGION 1..122: note = VH of XENP018366

SEQ ID NO: 19003 - protein, 5 aa, synthetic construct
  REGION 1..5: note = Description of Artificial Sequence: Synthetic peptide
  REGION 1..5: note = XENP018366 vhCDR1
NYWMN

SEQ ID NO: 19004 - protein, 19 aa, synthetic construct
  REGION 1..19: note = Description of Artificial Sequence: Synthetic peptide
  REGION 1..19: note = XENP018366 vhCDR2
EIRLKSNNYATHYAEPVKG

SEQ ID NO: 19005 - protein, 11 aa, synthetic construct
  REGION 1..11: note = Description of Artificial Sequence: Synthetic peptide
  REGION 1..11: note = XENP018366 vhCDR3
YYGNYGGYFDV

SEQ ID NO: 19006 - protein, 214 aa, synthetic construct
  REGION 1..214: note = Description of Artificial Sequence: Synthetic polypeptide
  REGION 1..214: note = XENP018366 1G6_H1_L1.23_IgG1_PVA_/S267K Light Chain
SIVMTQSPATLSVSPGERATLSCRASQSVGNDVAWYQQKPGQSPRLLINYASHRYTGVPDRFTGSGYGTEFTLTISSLQSEDFAVYFCQQDYSSPRTFGGGTKVEIKRTVAAPSVFIFPPSDEQLKSGTASVVCLLNNFYPREAKVQWKVDNALQSGNSQESVTEQDSKDSTYSLSSTLTLSKADYEKHKVYACEVTHQGLSSPVTKSFNRGEC

SEQ ID NO: 19007 - protein, 107 aa, synthetic construct; identical to SEQ ID NO: 13377
  REGION 1..107: note = Description of Artificial Sequence: Synthetic polypeptide
  REGION 1..107: note = VL of XENP018366

SEQ ID NO: 19008 - protein, 11 aa, synthetic construct
  REGION 1..11: note = Description of Artificial Sequence: Synthetic peptide
  REGION 1..11: note = XENP018366 vlCDR1
RASQSVGNDVA

SEQ ID NO: 19009 - protein, 7 aa, synthetic construct
  REGION 1..7: note = Description of Artificial Sequence: Synthetic peptide
  REGION 1..7: note = XENP018366 vlCDR2
YASHRYT

SEQ ID NO: 19010 - protein, 9 aa, synthetic construct
  REGION 1..9: note = Description of Artificial Sequence: Synthetic peptide
  REGION 1..9: note = XENP018366 vlCDR3
QQDYSSPRT

SEQ ID NO: 19011 - protein, 451 aa, synthetic construct; identical to SEQ ID NO: 16221
  REGION 1..451: note = Description of Artificial Sequence: Synthetic polypeptide
  REGION 1..451: note = XENP018367 1G6_H1_L1.24_IgG1_PVA_/S267K Heavy Chain

SEQ ID NO: 19012 - protein, 122 aa, synthetic construct; identical to SEQ ID NO: 10922
  REGION 1..122: note = Description of Artificial Sequence: Synthetic polypeptide
  REGION 1..122: note = VH of XENP018367

SEQ ID NO: 19013 - protein, 5 aa, synthetic construct
  REGION 1..5: note = Description of Artificial Sequence: Synthetic peptide
  REGION 1..5: note = XENP018367 vhCDR1
NYWMN

SEQ ID NO: 19014 - protein, 19 aa, synthetic construct
  REGION 1..19: note = Description of Artificial Sequence: Synthetic peptide
  REGION 1..19: note = XENP018367 vhCDR2
EIRLKSNNYATHYAEPVKG

SEQ ID NO: 19015 - protein, 11 aa, synthetic construct
  REGION 1..11: note = Description of Artificial Sequence: Synthetic peptide
  REGION 1..11: note = XENP018367 vhCDR3
YYGNYGGYFDV

SEQ ID NO: 19016 - protein, 214 aa, synthetic construct
  REGION 1..214: note = Description of Artificial Sequence: Synthetic polypeptide
  REGION 1..214: note = XENP018367 1G6_H1_L1.24_IgG1_PVA_/S267K Light Chain
SIVMTQSPATLSVSPGERATLSCRASQSVVNDVAWYQQKPGQSPRLLINYASHRYTGVPDRFTGSGYGTEFTLTISSLQSEDFAVYFCQQDYSSPRTFGGGTKVEIKRTVAAPSVFIFPPSDEQLKSGTASVVCLLNNFYPREAKVQWKVDNALQSGNSQESVTEQDSKDSTYSLSSTLTLSKADYEKHKVYACEVTHQGLSSPVTKSFNRGEC

SEQ ID NO: 19017 - protein, 107 aa, synthetic construct; identical to SEQ ID NO: 13386
  REGION 1..107: note = Description of Artificial Sequence: Synthetic polypeptide
  REGION 1..107: note = VL of XENP018367

SEQ ID NO: 19018 - protein, 11 aa, synthetic construct
  REGION 1..11: note = Description of Artificial Sequence: Synthetic peptide
  REGION 1..11: note = XENP018367 vlCDR1
RASQSVVNDVA

SEQ ID NO: 19019 - protein, 7 aa, synthetic construct
  REGION 1..7: note = Description of Artificial Sequence: Synthetic peptide
  REGION 1..7: note = XENP018367 vlCDR2
YASHRYT

SEQ ID NO: 19020 - protein, 9 aa, synthetic construct
  REGION 1..9: note = Description of Artificial Sequence: Synthetic peptide
  REGION 1..9: note = XENP018367 vlCDR3
QQDYSSPRT

SEQ ID NO: 19021 - protein, 451 aa, synthetic construct; identical to SEQ ID NO: 16221
  REGION 1..451: note = Description of Artificial Sequence: Synthetic polypeptide
  REGION 1..451: note = XENP018368 1G6_H1_L1.25_IgG1_PVA_/S267K Heavy Chain

SEQ ID NO: 19022 - protein, 122 aa, synthetic construct; identical to SEQ ID NO: 10922
  REGION 1..122: note = Description of Artificial Sequence: Synthetic polypeptide
  REGION 1..122: note = VH of XENP018368

SEQ ID NO: 19023 - protein, 5 aa, synthetic construct
  REGION 1..5: note = Description of Artificial Sequence: Synthetic peptide
  REGION 1..5: note = XENP018368 vhCDR1
NYWMN

SEQ ID NO: 19024 - protein, 19 aa, synthetic construct
  REGION 1..19: note = Description of Artificial Sequence: Synthetic peptide
  REGION 1..19: note = XENP018368 vhCDR2
EIRLKSNNYATHYAEPVKG

SEQ ID NO: 19025 - protein, 11 aa, synthetic construct
  REGION 1..11: note = Description of Artificial Sequence: Synthetic peptide
  REGION 1..11: note = XENP018368 vhCDR3
YYGNYGGYFDV

SEQ ID NO: 19026 - protein, 214 aa, synthetic construct
  REGION 1..214: note = Description of Artificial Sequence: Synthetic polypeptide
  REGION 1..214: note = XENP018368 1G6_H1_L1.25_IgG1_PVA_/S267K Light Chain
SIVMTQSPATLSVSPGERATLSCRASQSVHNDVAWYQQKPGQSPRLLINYASHRYTGVPDRFTGSGYGTEFTLTISSLQSEDFAVYFCQQDYSSPRTFGGGTKVEIKRTVAAPSVFIFPPSDEQLKSGTASVVCLLNNFYPREAKVQWKVDNALQSGNSQESVTEQDSKDSTYSLSSTLTLSKADYEKHKVYACEVTHQGLSSPVTKSFNRGEC

SEQ ID NO: 19027 - protein, 107 aa, synthetic construct; identical to SEQ ID NO: 13395
  REGION 1..107: note = Description of Artificial Sequence: Synthetic polypeptide
  REGION 1..107: note = VL of XENP018368

SEQ ID NO: 19028 - protein, 11 aa, synthetic construct
  REGION 1..11: note = Description of Artificial Sequence: Synthetic peptide
  REGION 1..11: note = XENP018368 vlCDR1
RASQSVHNDVA

SEQ ID NO: 19029 - protein, 7 aa, synthetic construct
  REGION 1..7: note = Description of Artificial Sequence: Synthetic peptide
  REGION 1..7: note = XENP018368 vlCDR2
YASHRYT

SEQ ID NO: 19030 - protein, 9 aa, synthetic construct
  REGION 1..9: note = Description of Artificial Sequence: Synthetic peptide
  REGION 1..9: note = XENP018368 vlCDR3
QQDYSSPRT

SEQ ID NO: 19031 - protein, 451 aa, synthetic construct; identical to SEQ ID NO: 16221
  REGION 1..451: note = Description of Artificial Sequence: Synthetic polypeptide
  REGION 1..451: note = XENP018369 1G6_H1_L1.26_IgG1_PVA_/S267K Heavy Chain

SEQ ID NO: 19032 - protein, 122 aa, synthetic construct; identical to SEQ ID NO: 10922
  REGION 1..122: note = Description of Artificial Sequence: Synthetic polypeptide
  REGION 1..122: note = VH of XENP018369

SEQ ID NO: 19033 - protein, 5 aa, synthetic construct
  REGION 1..5: note = Description of Artificial Sequence: Synthetic peptide
  REGION 1..5: note = XENP018369 vhCDR1
NYWMN

SEQ ID NO: 19034 - protein, 19 aa, synthetic construct
  REGION 1..19: note = Description of Artificial Sequence: Synthetic peptide
  REGION 1..19: note = XENP018369 vhCDR2
EIRLKSNNYATHYAEPVKG

SEQ ID NO: 19035 - protein, 11 aa, synthetic construct
  REGION 1..11: note = Description of Artificial Sequence: Synthetic peptide
  REGION 1..11: note = XENP018369 vhCDR3
YYGNYGGYFDV

SEQ ID NO: 19036 - protein, 214 aa, synthetic construct
  REGION 1..214: note = Description of Artificial Sequence: Synthetic polypeptide
  REGION 1..214: note = XENP018369 1G6_H1_L1.26_IgG1_PVA_/S267K Light Chain
SIVMTQSPATLSVSPGERATLSCRASQSVDNDVAWYQQKPGQSPRLLINYASHRYTGVPDRFTGSGYGTEFTLTISSLQSEDFAVYFCQQDYSSPRTFGGGTKVEIKRTVAAPSVFIFPPSDEQLKSGTASVVCLLNNFYPREAKVQWKVDNALQSGNSQESVTEQDSKDSTYSLSSTLTLSKADYEKHKVYACEVTHQGLSSPVTKSFNRGEC

SEQ ID NO: 19037 - protein, 107 aa, synthetic construct; identical to SEQ ID NO: 13404
  REGION 1..107: note = Description of Artificial Sequence: Synthetic polypeptide
  REGION 1..107: note = VL of XENP018369

SEQ ID NO: 19038 - protein, 11 aa, synthetic construct
  REGION 1..11: note = Description of Artificial Sequence: Synthetic peptide
  REGION 1..11: note = XENP018369 vlCDR1
RASQSVDNDVA

SEQ ID NO: 19039 - protein, 7 aa, synthetic construct
  REGION 1..7: note = Description of Artificial Sequence: Synthetic peptide
  REGION 1..7: note = XENP018369 vlCDR2
YASHRYT

SEQ ID NO: 19040 - protein, 9 aa, synthetic construct
  REGION 1..9: note = Description of Artificial Sequence: Synthetic peptide
  REGION 1..9: note = XENP018369 vlCDR3
QQDYSSPRT

SEQ ID NO: 19041 - protein, 451 aa, synthetic construct; identical to SEQ ID NO: 16221
  REGION 1..451: note = Description of Artificial Sequence: Synthetic polypeptide
  REGION 1..451: note = XENP018370 1G6_H1_L1.27_IgG1_PVA_/S267K Heavy Chain

SEQ ID NO: 19042 - protein, 122 aa, synthetic construct; identical to SEQ ID NO: 10922
  REGION 1..122: note = Description of Artificial Sequence: Synthetic polypeptide
  REGION 1..122: note = VH of XENP018370

SEQ ID NO: 19043 - protein, 5 aa, synthetic construct
  REGION 1..5: note = Description of Artificial Sequence: Synthetic peptide
  REGION 1..5: note = XENP018370 vhCDR1
NYWMN

SEQ ID NO: 19044 - protein, 19 aa, synthetic construct
  REGION 1..19: note = Description of Artificial Sequence: Synthetic peptide
  REGION 1..19: note = XENP018370 vhCDR2
EIRLKSNNYATHYAEPVKG

SEQ ID NO: 19045 - protein, 11 aa, synthetic construct
  REGION 1..11: note = Description of Artificial Sequence: Synthetic peptide
  REGION 1..11: note = XENP018370 vhCDR3
YYGNYGGYFDV

SEQ ID NO: 19046 - protein, 214 aa, synthetic construct
  REGION 1..214: note = Description of Artificial Sequence: Synthetic polypeptide
  REGION 1..214: note = XENP018370 1G6_H1_L1.27_IgG1_PVA_/S267K Light Chain
SIVMTQSPATLSVSPGERATLSCRASQSVKNDVAWYQQKPGQSPRLLINYASHRYTGVPDRFTGSGYGTEFTLTISSLQSEDFAVYFCQQDYSSPRTFGGGTKVEIKRTVAAPSVFIFPPSDEQLKSGTASVVCLLNNFYPREAKVQWKVDNALQSGNSQESVTEQDSKDSTYSLSSTLTLSKADYEKHKVYACEVTHQGLSSPVTKSFNRGEC

SEQ ID NO: 19047 - protein, 107 aa, synthetic construct; identical to SEQ ID NO: 13413
  REGION 1..107: note = Description of Artificial Sequence: Synthetic polypeptide
  REGION 1..107: note = VL of XENP018370

SEQ ID NO: 19048 - protein, 11 aa, synthetic construct
  REGION 1..11: note = Description of Artificial Sequence: Synthetic peptide
  REGION 1..11: note = XENP018370 vlCDR1
RASQSVKNDVA

SEQ ID NO: 19049 - protein, 7 aa, synthetic construct
  REGION 1..7: note = Description of Artificial Sequence: Synthetic peptide
  REGION 1..7: note = XENP018370 vlCDR2
YASHRYT

SEQ ID NO: 19050 - protein, 9 aa, synthetic construct
  REGION 1..9: note = Description of Artificial Sequence: Synthetic peptide
  REGION 1..9: note = XENP018370 vlCDR3
QQDYSSPRT

SEQ ID NO: 19051 - protein, 451 aa, synthetic construct; identical to SEQ ID NO: 16221
  REGION 1..451: note = Description of Artificial Sequence: Synthetic polypeptide
  REGION 1..451: note = XENP018371 1G6_H1_L1.28_IgG1_PVA_/S267K Heavy Chain

SEQ ID NO: 19052 - protein, 122 aa, synthetic construct; identical to SEQ ID NO: 10922
  REGION 1..122: note = Description of Artificial Sequence: Synthetic polypeptide
  REGION 1..122: note = VH of XENP018371

SEQ ID NO: 19053 - protein, 5 aa, synthetic construct
  REGION 1..5: note = Description of Artificial Sequence: Synthetic peptide
  REGION 1..5: note = XENP018371 vhCDR1
NYWMN

SEQ ID NO: 19054 - protein, 19 aa, synthetic construct
  REGION 1..19: note = Description of Artificial Sequence: Synthetic peptide
  REGION 1..19: note = XENP018371 vhCDR2
EIRLKSNNYATHYAEPVKG

SEQ ID NO: 19055 - protein, 11 aa, synthetic construct
  REGION 1..11: note = Description of Artificial Sequence: Synthetic peptide
  REGION 1..11: note = XENP018371 vhCDR3
YYGNYGGYFDV

SEQ ID NO: 19056 - protein, 214 aa, synthetic construct
  REGION 1..214: note = Description of Artificial Sequence: Synthetic polypeptide
  REGION 1..214: note = XENP018371 1G6_H1_L1.28_IgG1_PVA_/S267K Light Chain
SIVMTQSPATLSVSPGERATLSCRASQSVYNDVAWYQQKPGQSPRLLINYASHRYTGVPDRFTGSGYGTEFTLTISSLQSEDFAVYFCQQDYSSPRTFGGGTKVEIKRTVAAPSVFIFPPSDEQLKSGTASVVCLLNNFYPREAKVQWKVDNALQSGNSQESVTEQDSKDSTYSLSSTLTLSKADYEKHKVYACEVTHQGLSSPVTKSFNRGEC

SEQ ID NO: 19057 - protein, 107 aa, synthetic construct; identical to SEQ ID NO: 13422
  REGION 1..107: note = Description of Artificial Sequence: Synthetic polypeptide
  REGION 1..107: note = VL of XENP018371

SEQ ID NO: 19058 - protein, 11 aa, synthetic construct
  REGION 1..11: note = Description of Artificial Sequence: Synthetic peptide
  REGION 1..11: note = XENP018371 vlCDR1
RASQSVYNDVA

SEQ ID NO: 19059 - protein, 7 aa, synthetic construct
  REGION 1..7: note = Description of Artificial Sequence: Synthetic peptide
  REGION 1..7: note = XENP018371 vlCDR2
YASHRYT

SEQ ID NO: 19060 - protein, 9 aa, synthetic construct
  REGION 1..9: note = Description of Artificial Sequence: Synthetic peptide
  REGION 1..9: note = XENP018371 vlCDR3
QQDYSSPRT

SEQ ID NO: 19061 - protein, 451 aa, synthetic construct; identical to SEQ ID NO: 16221
  REGION 1..451: note = Description of Artificial Sequence: Synthetic polypeptide
  REGION 1..451: note = XENP018372 1G6_H1_L1.29_IgG1_PVA_/S267K Heavy Chain

SEQ ID NO: 19062 - protein, 122 aa, synthetic construct; identical to SEQ ID NO: 10922
  REGION 1..122: note = Description of Artificial Sequence: Synthetic polypeptide
  REGION 1..122: note = VH of XENP018372

SEQ ID NO: 19063 - protein, 5 aa, synthetic construct
  REGION 1..5: note = Description of Artificial Sequence: Synthetic peptide
  REGION 1..5: note = XENP018372 vhCDR1
NYWMN

SEQ ID NO: 19064 - protein, 19 aa, synthetic construct
  REGION 1..19: note = Description of Artificial Sequence: Synthetic peptide
  REGION 1..19: note = XENP018372 vhCDR2
EIRLKSNNYATHYAEPVKG

SEQ ID NO: 19065 - protein, 11 aa, synthetic construct
  REGION 1..11: note = Description of Artificial Sequence: Synthetic peptide
  REGION 1..11: note = XENP018372 vhCDR3
YYGNYGGYFDV

SEQ ID NO: 19066 - protein, 214 aa, synthetic construct
  REGION 1..214: note = Description of Artificial Sequence: Synthetic polypeptide
  REGION 1..214: note = XENP018372 1G6_H1_L1.29_IgG1_PVA_/S267K Light Chain
SIVMTQSPATLSVSPGERATLSCRASQSVSDDVAWYQQKPGQSPRLLINYASHRYTGVPDRFTGSGYGTEFTLTISSLQSEDFAVYFCQQDYSSPRTFGGGTKVEIKRTVAAPSVFIFPPSDEQLKSGTASVVCLLNNFYPREAKVQWKVDNALQSGNSQESVTEQDSKDSTYSLSSTLTLSKADYEKHKVYACEVTHQGLSSPVTKSFNRGEC

SEQ ID NO: 19067 - protein, 107 aa, synthetic construct; identical to SEQ ID NO: 13431
  REGION 1..107: note = Description of Artificial Sequence: Synthetic polypeptide
  REGION 1..107: note = VL of XENP018372

SEQ ID NO: 19068 - protein, 11 aa, synthetic construct
  REGION 1..11: note = Description of Artificial Sequence: Synthetic peptide
  REGION 1..11: note = XENP018372 vlCDR1
RASQSVSDDVA

SEQ ID NO: 19069 - protein, 7 aa, synthetic construct
  REGION 1..7: note = Description of Artificial Sequence: Synthetic peptide
  REGION 1..7: note = XENP018372 vlCDR2
YASHRYT

SEQ ID NO: 19070 - protein, 9 aa, synthetic construct
  REGION 1..9: note = Description of Artificial Sequence: Synthetic peptide
  REGION 1..9: note = XENP018372 vlCDR3
QQDYSSPRT

SEQ ID NO: 19071 - protein, 451 aa, synthetic construct; identical to SEQ ID NO: 16221
  REGION 1..451: note = Description of Artificial Sequence: Synthetic polypeptide
  REGION 1..451: note = XENP018373 1G6_H1_L1.30_IgG1_PVA_/S267K Heavy Chain

SEQ ID NO: 19072 - protein, 122 aa, synthetic construct; identical to SEQ ID NO: 10922
  REGION 1..122: note = Description of Artificial Sequence: Synthetic polypeptide
  REGION 1..122: note = VH of XENP018373

SEQ ID NO: 19073 - protein, 5 aa, synthetic construct
  REGION 1..5: note = Description of Artificial Sequence: Synthetic peptide
  REGION 1..5: note = XENP018373 vhCDR1
NYWMN

SEQ ID NO: 19074 - protein, 19 aa, synthetic construct
  REGION 1..19: note = Description of Artificial Sequence: Synthetic peptide
  REGION 1..19: note = XENP018373 vhCDR2
EIRLKSNNYATHYAEPVKG

SEQ ID NO: 19075 - protein, 11 aa, synthetic construct
  REGION 1..11: note = Description of Artificial Sequence: Synthetic peptide
  REGION 1..11: note = XENP018373 vhCDR3
YYGNYGGYFDV

SEQ ID NO: 19076 - protein, 214 aa, synthetic construct
  REGION 1..214: note = Description of Artificial Sequence: Synthetic polypeptide
  REGION 1..214: note = XENP018373 1G6_H1_L1.30_IgG1_PVA_/S267K Light Chain
SIVMTQSPATLSVSPGERATLSCRASQSVSHDVAWYQQKPGQSPRLLINYASHRYTGVPDRFTGSGYGTEFTLTISSLQSEDFAVYFCQQDYSSPRTFGGGTKVEIKRTVAAPSVFIFPPSDEQLKSGTASVVCLLNNFYPREAKVQWKVDNALQSGNSQESVTEQDSKDSTYSLSSTLTLSKADYEKHKVYACEVTHQGLSSPVTKSFNRGEC

SEQ ID NO: 19077 - protein, 107 aa, synthetic construct; identical to SEQ ID NO: 13440
  REGION 1..107: note = Description of Artificial Sequence: Synthetic polypeptide
  REGION 1..107: note = VL of XENP018373

SEQ ID NO: 19078 - protein, 11 aa, synthetic construct
  REGION 1..11: note = Description of Artificial Sequence: Synthetic peptide
  REGION 1..11: note = XENP018373 vlCDR1
RASQSVSHDVA

SEQ ID NO: 19079 - protein, 7 aa, synthetic construct
  REGION 1..7: note = Description of Artificial Sequence: Synthetic peptide
  REGION 1..7: note = XENP018373 vlCDR2
YASHRYT

SEQ ID NO: 19080 - protein, 9 aa, synthetic construct
  REGION 1..9: note = Description of Artificial Sequence: Synthetic peptide
  REGION 1..9: note = XENP018373 vlCDR3
QQDYSSPRT

SEQ ID NO: 19081 - protein, 451 aa, synthetic construct; identical to SEQ ID NO: 16221
  REGION 1..451: note = Description of Artificial Sequence: Synthetic polypeptide
  REGION 1..451: note = XENP018374 1G6_H1_L1.31_IgG1_PVA_/S267K Heavy Chain

SEQ ID NO: 19082 - protein, 122 aa, synthetic construct; identical to SEQ ID NO: 10922
  REGION 1..122: note = Description of Artificial Sequence: Synthetic polypeptide
  REGION 1..122: note = VH of XENP018374

SEQ ID NO: 19083 - protein, 5 aa, synthetic construct
  REGION 1..5: note = Description of Artificial Sequence: Synthetic peptide
  REGION 1..5: note = XENP018374 vhCDR1
NYWMN

SEQ ID NO: 19084 - protein, 19 aa, synthetic construct
  REGION 1..19: note = Description of Artificial Sequence: Synthetic peptide
  REGION 1..19: note = XENP018374 vhCDR2
EIRLKSNNYATHYAEPVKG

SEQ ID NO: 19085 - protein, 11 aa, synthetic construct
  REGION 1..11: note = Description of Artificial Sequence: Synthetic peptide
  REGION 1..11: note = XENP018374 vhCDR3
YYGNYGGYFDV

SEQ ID NO: 19086 - protein, 214 aa, synthetic construct
  REGION 1..214: note = Description of Artificial Sequence: Synthetic polypeptide
  REGION 1..214: note = XENP018374 1G6_H1_L1.31_IgG1_PVA_/S267K Light Chain
SIVMTQSPATLSVSPGERATLSCRASQSVSEDVAWYQQKPGQSPRLLINYASHRYTGVPDRFTGSGYGTEFTLTISSLQSEDFAVYFCQQDYSSPRTFGGGTKVEIKRTVAAPSVFIFPPSDEQLKSGTASVVCLLNNFYPREAKVQWKVDNALQSGNSQESVTEQDSKDSTYSLSSTLTLSKADYEKHKVYACEVTHQGLSSPVTKSFNRGEC

SEQ ID NO: 19087 - protein, 107 aa, synthetic construct; identical to SEQ ID NO: 13449
  REGION 1..107: note = Description of Artificial Sequence: Synthetic polypeptide
  REGION 1..107: note = VL of XENP018374

SEQ ID NO: 19088 - protein, 11 aa, synthetic construct
  REGION 1..11: note = Description of Artificial Sequence: Synthetic peptide
  REGION 1..11: note = XENP018374 vlCDR1
RASQSVSEDVA

SEQ ID NO: 19089 - protein, 7 aa, synthetic construct
  REGION 1..7: note = Description of Artificial Sequence: Synthetic peptide
  REGION 1..7: note = XENP018374 vlCDR2
YASHRYT

SEQ ID NO: 19090 - protein, 9 aa, synthetic construct
  REGION 1..9: note = Description of Artificial Sequence: Synthetic peptide
  REGION 1..9: note = XENP018374 vlCDR3
QQDYSSPRT

SEQ ID NO: 19091 - protein, 451 aa, synthetic construct; identical to SEQ ID NO: 16221
  REGION 1..451: note = Description of Artificial Sequence: Synthetic polypeptide
  REGION 1..451: note = XENP018375 1G6_H1_L1.32_IgG1_PVA_/S267K Heavy Chain

SEQ ID NO: 19092 - protein, 122 aa, synthetic construct; identical to SEQ ID NO: 10922
  REGION 1..122: note = Description of Artificial Sequence: Synthetic polypeptide
  REGION 1..122: note = VH of XENP018375

SEQ ID NO: 19093 - protein, 5 aa, synthetic construct
  REGION 1..5: note = Description of Artificial Sequence: Synthetic peptide
  REGION 1..5: note = XENP018375 vhCDR1
NYWMN

SEQ ID NO: 19094 - protein, 19 aa, synthetic construct
  REGION 1..19: note = Description of Artificial Sequence: Synthetic peptide
  REGION 1..19: note = XENP018375 vhCDR2
EIRLKSNNYATHYAEPVKG

SEQ ID NO: 19095 - protein, 11 aa, synthetic construct
  REGION 1..11: note = Description of Artificial Sequence: Synthetic peptide
  REGION 1..11: note = XENP018375 vhCDR3
YYGNYGGYFDV

SEQ ID NO: 19096 - protein, 214 aa, synthetic construct
  REGION 1..214: note = Description of Artificial Sequence: Synthetic polypeptide
  REGION 1..214: note = XENP018375 1G6_H1_L1.32_IgG1_PVA_/S267K Light Chain
SIVMTQSPATLSVSPGERATLSCRASQSVSSDVAWYQQKPGQSPRLLINYASHRYTGVPDRFTGSGYGTEFTLTISSLQSEDFAVYFCQQDYSSPRTFGGGTKVEIKRTVAAPSVFIFPPSDEQLKSGTASVVCLLNNFYPREAKVQWKVDNALQSGNSQESVTEQDSKDSTYSLSSTLTLSKADYEKHKVYACEVTHQGLSSPVTKSFNRGEC

SEQ ID NO: 19097 - protein, 107 aa, synthetic construct; identical to SEQ ID NO: 13458
  REGION 1..107: note = Description of Artificial Sequence: Synthetic polypeptide
  REGION 1..107: note = VL of XENP018375

SEQ ID NO: 19098 - protein, 11 aa, synthetic construct
  REGION 1..11: note = Description of Artificial Sequence: Synthetic peptide
  REGION 1..11: note = XENP018375 vlCDR1
RASQSVSSDVA

SEQ ID NO: 19099 - protein, 7 aa, synthetic construct
  REGION 1..7: note = Description of Artificial Sequence: Synthetic peptide
  REGION 1..7: note = XENP018375 vlCDR2
YASHRYT

SEQ ID NO: 19100 - protein, 9 aa, synthetic construct
  REGION 1..9: note = Description of Artificial Sequence: Synthetic peptide
  REGION 1..9: note = XENP018375 vlCDR3
QQDYSSPRT

SEQ ID NO: 19101 - protein, 451 aa, synthetic construct; identical to SEQ ID NO: 16221
  REGION 1..451: note = Description of Artificial Sequence: Synthetic polypeptide
  REGION 1..451: note = XENP018376 1G6_H1_L1.33_IgG1_PVA_/S267K Heavy Chain

SEQ ID NO: 19102 - protein, 122 aa, synthetic construct; identical to SEQ ID NO: 10922
  REGION 1..122: note = Description of Artificial Sequence: Synthetic polypeptide
  REGION 1..122: note = VH of XENP018376

SEQ ID NO: 19103 - protein, 5 aa, synthetic construct
  REGION 1..5: note = Description of Artificial Sequence: Synthetic peptide
  REGION 1..5: note = XENP018376 vhCDR1
NYWMN

SEQ ID NO: 19104 - protein, 19 aa, synthetic construct
  REGION 1..19: note = Description of Artificial Sequence: Synthetic peptide
  REGION 1..19: note = XENP018376 vhCDR2
EIRLKSNNYATHYAEPVKG

SEQ ID NO: 19105 - protein, 11 aa, synthetic construct
  REGION 1..11: note = Description of Artificial Sequence: Synthetic peptide
  REGION 1..11: note = XENP018376 vhCDR3
YYGNYGGYFDV

SEQ ID NO: 19106 - protein, 214 aa, synthetic construct
  REGION 1..214: note = Description of Artificial Sequence: Synthetic polypeptide
  REGION 1..214: note = XENP018376 1G6_H1_L1.33_IgG1_PVA_/S267K Light Chain
SIVMTQSPATLSVSPGERATLSCRASQSVSRDVAWYQQKPGQSPRLLINYASHRYTGVPDRFTGSGYGTEFTLTISSLQSEDFAVYFCQQDYSSPRTFGGGTKVEIKRTVAAPSVFIFPPSDEQLKSGTASVVCLLNNFYPREAKVQWKVDNALQSGNSQESVTEQDSKDSTYSLSSTLTLSKADYEKHKVYACEVTHQGLSSPVTKSFNRGEC

SEQ ID NO: 19107 - protein, 107 aa, synthetic construct; identical to SEQ ID NO: 13467
  REGION 1..107: note = Description of Artificial Sequence: Synthetic polypeptide
  REGION 1..107: note = VL of XENP018376

SEQ ID NO: 19108 - protein, 11 aa, synthetic construct
  REGION 1..11: note = Description of Artificial Sequence: Synthetic peptide
  REGION 1..11: note = XENP018376 vlCDR1
RASQSVSRDVA

SEQ ID NO: 19109 - protein, 7 aa, synthetic construct
  REGION 1..7: note = Description of Artificial Sequence: Synthetic peptide
  REGION 1..7: note = XENP018376 vlCDR2
YASHRYT

SEQ ID NO: 19110 - protein, 9 aa, synthetic construct
  REGION 1..9: note = Description of Artificial Sequence: Synthetic peptide
  REGION 1..9: note = XENP018376 vlCDR3
QQDYSSPRT

SEQ ID NO: 19111 - protein, 451 aa, synthetic construct; identical to SEQ ID NO: 16221
  REGION 1..451: note = Description of Artificial Sequence: Synthetic polypeptide
  REGION 1..451: note = XENP018377 1G6_H1_L1.34_IgG1_PVA_/S267K Heavy Chain

SEQ ID NO: 19112 - protein, 122 aa, synthetic construct; identical to SEQ ID NO: 10922
  REGION 1..122: note = Description of Artificial Sequence: Synthetic polypeptide
  REGION 1..122: note = VH of XENP018377

SEQ ID NO: 19113 - protein, 5 aa, synthetic construct
  REGION 1..5: note = Description of Artificial Sequence: Synthetic peptide
  REGION 1..5: note = XENP018377 vhCDR1
NYWMN

SEQ ID NO: 19114 - protein, 19 aa, synthetic construct
  REGION 1..19: note = Description of Artificial Sequence: Synthetic peptide
  REGION 1..19: note = XENP018377 vhCDR2
EIRLKSNNYATHYAEPVKG

SEQ ID NO: 19115 - protein, 11 aa, synthetic construct
  REGION 1..11: note = Description of Artificial Sequence: Synthetic peptide
  REGION 1..11: note = XENP018377 vhCDR3
YYGNYGGYFDV

SEQ ID NO: 19116 - protein, 214 aa, synthetic construct
  REGION 1..214: note = Description of Artificial Sequence: Synthetic polypeptide
  REGION 1..214: note = XENP018377 1G6_H1_L1.34_IgG1_PVA_/S267K Light Chain
SIVMTQSPATLSVSPGERATLSCRASQSVSLDVAWYQQKPGQSPRLLINYASHRYTGVPDRFTGSGYGTEFTLTISSLQSEDFAVYFCQQDYSSPRTFGGGTKVEIKRTVAAPSVFIFPPSDEQLKSGTASVVCLLNNFYPREAKVQWKVDNALQSGNSQESVTEQDSKDSTYSLSSTLTLSKADYEKHKVYACEVTHQGLSSPVTKSFNRGEC

SEQ ID NO: 19117 - protein, 107 aa, synthetic construct; identical to SEQ ID NO: 13476
  REGION 1..107: note = Description of Artificial Sequence: Synthetic polypeptide
  REGION 1..107: note = VL of XENP018377

SEQ ID NO: 19118 - protein, 11 aa, synthetic construct
  REGION 1..11: note = Description of Artificial Sequence: Synthetic peptide
  REGION 1..11: note = XENP018377 vlCDR1
RASQSVSLDVA

SEQ ID NO: 19119 - protein, 7 aa, synthetic construct
  REGION 1..7: note = Description of Artificial Sequence: Synthetic peptide
  REGION 1..7: note = XENP018377 vlCDR2
YASHRYT

SEQ ID NO: 19120 - protein, 9 aa, synthetic construct
  REGION 1..9: note = Description of Artificial Sequence: Synthetic peptide
  REGION 1..9: note = XENP018377 vlCDR3
QQDYSSPRT

SEQ ID NO: 19121 - protein, 451 aa, synthetic construct; identical to SEQ ID NO: 16221
  REGION 1..451: note = Description of Artificial Sequence: Synthetic polypeptide
  REGION 1..451: note = XENP018378 1G6_H1_L1.35_IgG1_PVA_/S267K Heavy Chain

SEQ ID NO: 19122 - protein, 122 aa, synthetic construct; identical to SEQ ID NO: 10922
  REGION 1..122: note = Description of Artificial Sequence: Synthetic polypeptide
  REGION 1..122: note = VH of XENP018378

SEQ ID NO: 19123 - protein, 5 aa, synthetic construct
  REGION 1..5: note = Description of Artificial Sequence: Synthetic peptide
  REGION 1..5: note = XENP018378 vhCDR1
NYWMN

SEQ ID NO: 19124 - protein, 19 aa, synthetic construct
  REGION 1..19: note = Description of Artificial Sequence: Synthetic peptide
  REGION 1..19: note = XENP018378 vhCDR2
EIRLKSNNYATHYAEPVKG

SEQ ID NO: 19125 - protein, 11 aa, synthetic construct
  REGION 1..11: note = Description of Artificial Sequence: Synthetic peptide
  REGION 1..11: note = XENP018378 vhCDR3
YYGNYGGYFDV

SEQ ID NO: 19126 - protein, 214 aa, synthetic construct
  REGION 1..214: note = Description of Artificial Sequence: Synthetic polypeptide
  REGION 1..214: note = XENP018378 1G6_H1_L1.35_IgG1_PVA_/S267K Light Chain
SIVMTQSPATLSVSPGERATLSCRASQSVSTDVAWYQQKPGQSPRLLINYASHRYTGVPDRFTGSGYGTEFTLTISSLQSEDFAVYFCQQDYSSPRTFGGGTKVEIKRTVAAPSVFIFPPSDEQLKSGTASVVCLLNNFYPREAKVQWKVDNALQSGNSQESVTEQDSKDSTYSLSSTLTLSKADYEKHKVYACEVTHQGLSSPVTKSFNRGEC

SEQ ID NO: 19127 - protein, 107 aa, synthetic construct; identical to SEQ ID NO: 13485
  REGION 1..107: note = Description of Artificial Sequence: Synthetic polypeptide
  REGION 1..107: note = VL of XENP018378

SEQ ID NO: 19128 - protein, 11 aa, synthetic construct
  REGION 1..11: note = Description of Artificial Sequence: Synthetic peptide
  REGION 1..11: note = XENP018378 vlCDR1
RASQSVSTDVA

SEQ ID NO: 19129 - protein, 7 aa, synthetic construct
  REGION 1..7: note = Description of Artificial Sequence: Synthetic peptide
  REGION 1..7: note = XENP018378 vlCDR2
YASHRYT

SEQ ID NO: 19130 - protein, 9 aa, synthetic construct
  REGION 1..9: note = Description of Artificial Sequence: Synthetic peptide
  REGION 1..9: note = XENP018378 vlCDR3
QQDYSSPRT

SEQ ID NO: 19131 - protein, 451 aa, synthetic construct; identical to SEQ ID NO: 16221
  REGION 1..451: note = Description of Artificial Sequence: Synthetic polypeptide
  REGION 1..451: note = XENP018379 1G6_H1_L1.36_IgG1_PVA_/S267K Heavy Chain

SEQ ID NO: 19132 - protein, 122 aa, synthetic construct; identical to SEQ ID NO: 10922
  REGION 1..122: note = Description of Artificial Sequence: Synthetic polypeptide
  REGION 1..122: note = VH of XENP018379

SEQ ID NO: 19133 - protein, 5 aa, synthetic construct
  REGION 1..5: note = Description of Artificial Sequence: Synthetic peptide
  REGION 1..5: note = XENP018379 vhCDR1
NYWMN

SEQ ID NO: 19134 - protein, 19 aa, synthetic construct
  REGION 1..19: note = Description of Artificial Sequence: Synthetic peptide
  REGION 1..19: note = XENP018379 vhCDR2
EIRLKSNNYATHYAEPVKG

SEQ ID NO: 19135 - protein, 11 aa, synthetic construct
  REGION 1..11: note = Description of Artificial Sequence: Synthetic peptide
  REGION 1..11: note = XENP018379 vhCDR3
YYGNYGGYFDV

SEQ ID NO: 19136 - protein, 214 aa, synthetic construct
  REGION 1..214: note = Description of Artificial Sequence: Synthetic polypeptide
  REGION 1..214: note = XENP018379 1G6_H1_L1.36_IgG1_PVA_/S267K Light Chain
SIVMTQSPATLSVSPGERATLSCRASQSVSGDVAWYQQKPGQSPRLLINYASHRYTGVPDRFTGSGYGTEFTLTISSLQSEDFAVYFCQQDYSSPRTFGGGTKVEIKRTVAAPSVFIFPPSDEQLKSGTASVVCLLNNFYPREAKVQWKVDNALQSGNSQESVTEQDSKDSTYSLSSTLTLSKADYEKHKVYACEVTHQGLSSPVTKSFNRGEC

SEQ ID NO: 19137 - protein, 107 aa, synthetic construct; identical to SEQ ID NO: 13494
  REGION 1..107: note = Description of Artificial Sequence: Synthetic polypeptide
  REGION 1..107: note = VL of XENP018379

SEQ ID NO: 19138 - protein, 11 aa, synthetic construct
  REGION 1..11: note = Description of Artificial Sequence: Synthetic peptide
  REGION 1..11: note = XENP018379 vlCDR1
RASQSVSGDVA

SEQ ID NO: 19139 - protein, 7 aa, synthetic construct
  REGION 1..7: note = Description of Artificial Sequence: Synthetic peptide
  REGION 1..7: note = XENP018379 vlCDR2
YASHRYT

SEQ ID NO: 19140 - protein, 9 aa, synthetic construct
  REGION 1..9: note = Description of Artificial Sequence: Synthetic peptide
  REGION 1..9: note = XENP018379 vlCDR3
QQDYSSPRT

SEQ ID NO: 19141 - protein, 451 aa, synthetic construct; identical to SEQ ID NO: 16221
  REGION 1..451: note = Description of Artificial Sequence: Synthetic polypeptide
  REGION 1..451: note = XENP018380 1G6_H1_L1.37_IgG1_PVA_/S267K Heavy Chain

SEQ ID NO: 19142 - protein, 122 aa, synthetic construct; identical to SEQ ID NO: 10922
  REGION 1..122: note = Description of Artificial Sequence: Synthetic polypeptide
  REGION 1..122: note = VH of XENP018380

SEQ ID NO: 19143 - protein, 5 aa, synthetic construct
  REGION 1..5: note = Description of Artificial Sequence: Synthetic peptide
  REGION 1..5: note = XENP018380 vhCDR1
NYWMN

SEQ ID NO: 19144 - protein, 19 aa, synthetic construct
  REGION 1..19: note = Description of Artificial Sequence: Synthetic peptide
  REGION 1..19: note = XENP018380 vhCDR2
EIRLKSNNYATHYAEPVKG

SEQ ID NO: 19145 - protein, 11 aa, synthetic construct
  REGION 1..11: note = Description of Artificial Sequence: Synthetic peptide
  REGION 1..11: note = XENP018380 vhCDR3
YYGNYGGYFDV

SEQ ID NO: 19146 - protein, 214 aa, synthetic construct
  REGION 1..214: note = Description of Artificial Sequence: Synthetic polypeptide
  REGION 1..214: note = XENP018380 1G6_H1_L1.37_IgG1_PVA_/S267K Light Chain
SIVMTQSPATLSVSPGERATLSCRASQSVSYDVAWYQQKPGQSPRLLINYASHRYTGVPDRFTGSGYGTEFTLTISSLQSEDFAVYFCQQDYSSPRTFGGGTKVEIKRTVAAPSVFIFPPSDEQLKSGTASVVCLLNNFYPREAKVQWKVDNALQSGNSQESVTEQDSKDSTYSLSSTLTLSKADYEKHKVYACEVTHQGLSSPVTKSFNRGEC

SEQ ID NO: 19147 - protein, 107 aa, synthetic construct; identical to SEQ ID NO: 13503
  REGION 1..107: note = Description of Artificial Sequence: Synthetic polypeptide
  REGION 1..107: note = VL of XENP018380

SEQ ID NO: 19148 - protein, 11 aa, synthetic construct
  REGION 1..11: note = Description of Artificial Sequence: Synthetic peptide
  REGION 1..11: note = XENP018380 vlCDR1
RASQSVSYDVA

SEQ ID NO: 19149 - protein, 7 aa, synthetic construct
  REGION 1..7: note = Description of Artificial Sequence: Synthetic peptide
  REGION 1..7: note = XENP018380 vlCDR2
YASHRYT

SEQ ID NO: 19150 - protein, 9 aa, synthetic construct
  REGION 1..9: note = Description of Artificial Sequence: Synthetic peptide
  REGION 1..9: note = XENP018380 vlCDR3
QQDYSSPRT

SEQ ID NO: 19151 - protein, 451 aa, synthetic construct; identical to SEQ ID NO: 16221
  REGION 1..451: note = Description of Artificial Sequence: Synthetic polypeptide
  REGION 1..451: note = XENP018381 1G6_H1_L1.38_IgG1_PVA_/S267K Heavy Chain

SEQ ID NO: 19152 - protein, 122 aa, synthetic construct; identical to SEQ ID NO: 10922
  REGION 1..122: note = Description of Artificial Sequence: Synthetic polypeptide
  REGION 1..122: note = VH of XENP018381

SEQ ID NO: 19153 - protein, 5 aa, synthetic construct
  REGION 1..5: note = Description of Artificial Sequence: Synthetic peptide
  REGION 1..5: note = XENP018381 vhCDR1
NYWMN

SEQ ID NO: 19154 - protein, 19 aa, synthetic construct
  REGION 1..19: note = Description of Artificial Sequence: Synthetic peptide
  REGION 1..19: note = XENP018381 vhCDR2
EIRLKSNNYATHYAEPVKG

SEQ ID NO: 19155 - protein, 11 aa, synthetic construct
  REGION 1..11: note = Description of Artificial Sequence: Synthetic peptide
  REGION 1..11: note = XENP018381 vhCDR3
YYGNYGGYFDV

SEQ ID NO: 19156 - protein, 214 aa, synthetic construct
  REGION 1..214: note = Description of Artificial Sequence: Synthetic polypeptide
  REGION 1..214: note = XENP018381 1G6_H1_L1.38_IgG1_PVA_/S267K Light Chain
SIVMTQSPATLSVSPGERATLSCRASQSVSNNVAWYQQKPGQSPRLLINYASHRYTGVPDRFTGSGYGTEFTLTISSLQSEDFAVYFCQQDYSSPRTFGGGTKVEIKRTVAAPSVFIFPPSDEQLKSGTASVVCLLNNFYPREAKVQWKVDNALQSGNSQESVTEQDSKDSTYSLSSTLTLSKADYEKHKVYACEVTHQGLSSPVTKSFNRGEC

SEQ ID NO: 19157 - protein, 107 aa, synthetic construct; identical to SEQ ID NO: 13512
  REGION 1..107: note = Description of Artificial Sequence: Synthetic polypeptide
  REGION 1..107: note = VL of XENP018381

SEQ ID NO: 19158 - protein, 11 aa, synthetic construct
  REGION 1..11: note = Description of Artificial Sequence: Synthetic peptide
  REGION 1..11: note = XENP018381 vlCDR1
RASQSVSNNVA

SEQ ID NO: 19159 - protein, 7 aa, synthetic construct
  REGION 1..7: note = Description of Artificial Sequence: Synthetic peptide
  REGION 1..7: note = XENP018381 vlCDR2
YASHRYT

SEQ ID NO: 19160 - protein, 9 aa, synthetic construct
  REGION 1..9: note = Description of Artificial Sequence: Synthetic peptide
  REGION 1..9: note = XENP018381 vlCDR3
QQDYSSPRT

SEQ ID NO: 19161 - protein, 451 aa, synthetic construct; identical to SEQ ID NO: 16221
  REGION 1..451: note = Description of Artificial Sequence: Synthetic polypeptide
  REGION 1..451: note = XENP018382 1G6_H1_L1.39_IgG1_PVA_/S267K Heavy Chain

SEQ ID NO: 19162 - protein, 122 aa, synthetic construct; identical to SEQ ID NO: 10922
  REGION 1..122: note = Description of Artificial Sequence: Synthetic polypeptide
  REGION 1..122: note = VH of XENP018382

SEQ ID NO: 19163 - protein, 5 aa, synthetic construct
  REGION 1..5: note = Description of Artificial Sequence: Synthetic peptide
  REGION 1..5: note = XENP018382 vhCDR1
NYWMN

SEQ ID NO: 19164 - protein, 19 aa, synthetic construct
  REGION 1..19: note = Description of Artificial Sequence: Synthetic peptide
  REGION 1..19: note = XENP018382 vhCDR2
EIRLKSNNYATHYAEPVKG

SEQ ID NO: 19165 - protein, 11 aa, synthetic construct
  REGION 1..11: note = Description of Artificial Sequence: Synthetic peptide
  REGION 1..11: note = XENP018382 vhCDR3
YYGNYGGYFDV

SEQ ID NO: 19166 - protein, 214 aa, synthetic construct
  REGION 1..214: note = Description of Artificial Sequence: Synthetic polypeptide
  REGION 1..214: note = XENP018382 1G6_H1_L1.39_IgG1_PVA_/S267K Light Chain
SIVMTQSPATLSVSPGERATLSCRASQSVSNEVAWYQQKPGQSPRLLINYASHRYTGVPDRFTGSGYGTEFTLTISSLQSEDFAVYFCQQDYSSPRTFGGGTKVEIKRTVAAPSVFIFPPSDEQLKSGTASVVCLLNNFYPREAKVQWKVDNALQSGNSQESVTEQDSKDSTYSLSSTLTLSKADYEKHKVYACEVTHQGLSSPVTKSFNRGEC

SEQ ID NO: 19167 - protein, 107 aa, synthetic construct; identical to SEQ ID NO: 13521
  REGION 1..107: note = Description of Artificial Sequence: Synthetic polypeptide
  REGION 1..107: note = VL of XENP018382

SEQ ID NO: 19168 - protein, 11 aa, synthetic construct
  REGION 1..11: note = Description of Artificial Sequence: Synthetic peptide
  REGION 1..11: note = XENP018382 vlCDR1
RASQSVSNEVA

SEQ ID NO: 19169 - protein, 7 aa, synthetic construct
  REGION 1..7: note = Description of Artificial Sequence: Synthetic peptide
  REGION 1..7: note = XENP018382 vlCDR2
YASHRYT

SEQ ID NO: 19170 - protein, 9 aa, synthetic construct
  REGION 1..9: note = Description of Artificial Sequence: Synthetic peptide
  REGION 1..9: note = XENP018382 vlCDR3
QQDYSSPRT

SEQ ID NO: 19171 - protein, 451 aa, synthetic construct; identical to SEQ ID NO: 16221
  REGION 1..451: note = Description of Artificial Sequence: Synthetic polypeptide
  REGION 1..451: note = XENP018383 1G6_H1_L1.40_IgG1_PVA_/S267K Heavy Chain

SEQ ID NO: 19172 - protein, 122 aa, synthetic construct; identical to SEQ ID NO: 10922
  REGION 1..122: note = Description of Artificial Sequence: Synthetic polypeptide
  REGION 1..122: note = VH of XENP018383

SEQ ID NO: 19173 - protein, 5 aa, synthetic construct
  REGION 1..5: note = Description of Artificial Sequence: Synthetic peptide
  REGION 1..5: note = XENP018383 vhCDR1
NYWMN

SEQ ID NO: 19174 - protein, 19 aa, synthetic construct
  REGION 1..19: note = Description of Artificial Sequence: Synthetic peptide
  REGION 1..19: note = XENP018383 vhCDR2
EIRLKSNNYATHYAEPVKG

SEQ ID NO: 19175 - protein, 11 aa, synthetic construct
  REGION 1..11: note = Description of Artificial Sequence: Synthetic peptide
  REGION 1..11: note = XENP018383 vhCDR3
YYGNYGGYFDV

SEQ ID NO: 19176 - protein, 214 aa, synthetic construct
  REGION 1..214: note = Description of Artificial Sequence: Synthetic polypeptide
  REGION 1..214: note = XENP018383 1G6_H1_L1.40_IgG1_PVA_/S267K Light Chain
SIVMTQSPATLSVSPGERATLSCRASQSVSNHVAWYQQKPGQSPRLLINYASHRYTGVPDRFTGSGYGTEFTLTISSLQSEDFAVYFCQQDYSSPRTFGGGTKVEIKRTVAAPSVFIFPPSDEQLKSGTASVVCLLNNFYPREAKVQWKVDNALQSGNSQESVTEQDSKDSTYSLSSTLTLSKADYEKHKVYACEVTHQGLSSPVTKSFNRGEC

SEQ ID NO: 19177 - protein, 107 aa, synthetic construct; identical to SEQ ID NO: 13530
  REGION 1..107: note = Description of Artificial Sequence: Synthetic polypeptide
  REGION 1..107: note = VL of XENP018383

SEQ ID NO: 19178 - protein, 11 aa, synthetic construct
  REGION 1..11: note = Description of Artificial Sequence: Synthetic peptide
  REGION 1..11: note = XENP018383 vlCDR1
RASQSVSNHVA

SEQ ID NO: 19179 - protein, 7 aa, synthetic construct
  REGION 1..7: note = Description of Artificial Sequence: Synthetic peptide
  REGION 1..7: note = XENP018383 vlCDR2
YASHRYT

SEQ ID NO: 19180 - protein, 9 aa, synthetic construct
  REGION 1..9: note = Description of Artificial Sequence: Synthetic peptide
  REGION 1..9: note = XENP018383 vlCDR3
QQDYSSPRT

SEQ ID NO: 19181 - protein, 451 aa, synthetic construct; identical to SEQ ID NO: 16221
  REGION 1..451: note = Description of Artificial Sequence: Synthetic polypeptide
  REGION 1..451: note = XENP018384 1G6_H1_L1.41_IgG1_PVA_/S267K Heavy Chain

SEQ ID NO: 19182 - protein, 122 aa, synthetic construct; identical to SEQ ID NO: 10922
  REGION 1..122: note = Description of Artificial Sequence: Synthetic polypeptide
  REGION 1..122: note = VH of XENP018384

SEQ ID NO: 19183 - protein, 5 aa, synthetic construct
  REGION 1..5: note = Description of Artificial Sequence: Synthetic peptide
  REGION 1..5: note = XENP018384 vhCDR1
NYWMN

SEQ ID NO: 19184 - protein, 19 aa, synthetic construct
  REGION 1..19: note = Description of Artificial Sequence: Synthetic peptide
  REGION 1..19: note = XENP018384 vhCDR2
EIRLKSNNYATHYAEPVKG

SEQ ID NO: 19185 - protein, 11 aa, synthetic construct
  REGION 1..11: note = Description of Artificial Sequence: Synthetic peptide
  REGION 1..11: note = XENP018384 vhCDR3
YYGNYGGYFDV

SEQ ID NO: 19186 - protein, 214 aa, synthetic construct
  REGION 1..214: note = Description of Artificial Sequence: Synthetic polypeptide
  REGION 1..214: note = XENP018384 1G6_H1_L1.41_IgG1_PVA_/S267K Light Chain
SIVMTQSPATLSVSPGERATLSCRASQSVSNSVAWYQQKPGQSPRLLINYASHRYTGVPDRFTGSGYGTEFTLTISSLQSEDFAVYFCQQDYSSPRTFGGGTKVEIKRTVAAPSVFIFPPSDEQLKSGTASVVCLLNNFYPREAKVQWKVDNALQSGNSQESVTEQDSKDSTYSLSSTLTLSKADYEKHKVYACEVTHQGLSSPVTKSFNRGEC

SEQ ID NO: 19187 - protein, 107 aa, synthetic construct; identical to SEQ ID NO: 13539
  REGION 1..107: note = Description of Artificial Sequence: Synthetic polypeptide
  REGION 1..107: note = VL of XENP018384

SEQ ID NO: 19188 - protein, 11 aa, synthetic construct
  REGION 1..11: note = Description of Artificial Sequence: Synthetic peptide
  REGION 1..11: note = XENP018384 vlCDR1
RASQSVSNSVA

SEQ ID NO: 19189 - protein, 7 aa, synthetic construct
  REGION 1..7: note = Description of Artificial Sequence: Synthetic peptide
  REGION 1..7: note = XENP018384 vlCDR2
YASHRYT

SEQ ID NO: 19190 - protein, 9 aa, synthetic construct
  REGION 1..9: note = Description of Artificial Sequence: Synthetic peptide
  REGION 1..9: note = XENP018384 vlCDR3
QQDYSSPRT

SEQ ID NO: 19191 - protein, 451 aa, synthetic construct; identical to SEQ ID NO: 16221
  REGION 1..451: note = Description of Artificial Sequence: Synthetic polypeptide
  REGION 1..451: note = XENP018385 1G6_H1_L1.42_IgG1_PVA_/S267K Heavy Chain

SEQ ID NO: 19192 - protein, 122 aa, synthetic construct; identical to SEQ ID NO: 10922
  REGION 1..122: note = Description of Artificial Sequence: Synthetic polypeptide
  REGION 1..122: note = VH of XENP018385

SEQ ID NO: 19193 - protein, 5 aa, synthetic construct
  REGION 1..5: note = Description of Artificial Sequence: Synthetic peptide
  REGION 1..5: note = XENP018385 vhCDR1
NYWMN

SEQ ID NO: 19194 - protein, 19 aa, synthetic construct
  REGION 1..19: note = Description of Artificial Sequence: Synthetic peptide
  REGION 1..19: note = XENP018385 vhCDR2
EIRLKSNNYATHYAEPVKG

SEQ ID NO: 19195 - protein, 11 aa, synthetic construct
  REGION 1..11: note = Description of Artificial Sequence: Synthetic peptide
  REGION 1..11: note = XENP018385 vhCDR3
YYGNYGGYFDV

SEQ ID NO: 19196 - protein, 214 aa, synthetic construct
  REGION 1..214: note = Description of Artificial Sequence: Synthetic polypeptide
  REGION 1..214: note = XENP018385 1G6_H1_L1.42_IgG1_PVA_/S267K Light Chain
SIVMTQSPATLSVSPGERATLSCRASQSVSNRVAWYQQKPGQSPRLLINYASHRYTGVPDRFTGSGYGTEFTLTISSLQSEDFAVYFCQQDYSSPRTFGGGTKVEIKRTVAAPSVFIFPPSDEQLKSGTASVVCLLNNFYPREAKVQWKVDNALQSGNSQESVTEQDSKDSTYSLSSTLTLSKADYEKHKVYACEVTHQGLSSPVTKSFNRGEC

SEQ ID NO: 19197 - protein, 107 aa, synthetic construct; identical to SEQ ID NO: 13548
  REGION 1..107: note = Description of Artificial Sequence: Synthetic polypeptide
  REGION 1..107: note = VL of XENP018385

SEQ ID NO: 19198 - protein, 11 aa, synthetic construct
  REGION 1..11: note = Description of Artificial Sequence: Synthetic peptide
  REGION 1..11: note = XENP018385 vlCDR1
RASQSVSNRVA

SEQ ID NO: 19199 - protein, 7 aa, synthetic construct
  REGION 1..7: note = Description of Artificial Sequence: Synthetic peptide
  REGION 1..7: note = XENP018385 vlCDR2
YASHRYT

SEQ ID NO: 19200 - protein, 9 aa, synthetic construct
  REGION 1..9: note = Description of Artificial Sequence: Synthetic peptide
  REGION 1..9: note = XENP018385 vlCDR3
QQDYSSPRT

SEQ ID NO: 19201 - protein, 451 aa, synthetic construct; identical to SEQ ID NO: 16221
  REGION 1..451: note = Description of Artificial Sequence: Synthetic polypeptide
  REGION 1..451: note = XENP018386 1G6_H1_L1.43_IgG1_PVA_/S267K Heavy Chain

SEQ ID NO: 19202 - protein, 122 aa, synthetic construct; identical to SEQ ID NO: 10922
  REGION 1..122: note = Description of Artificial Sequence: Synthetic polypeptide
  REGION 1..122: note = VH of XENP018386

SEQ ID NO: 19203 - protein, 5 aa, synthetic construct
  REGION 1..5: note = Description of Artificial Sequence: Synthetic peptide
  REGION 1..5: note = XENP018386 vhCDR1
NYWMN

SEQ ID NO: 19204 - protein, 19 aa, synthetic construct
  REGION 1..19: note = Description of Artificial Sequence: Synthetic peptide
  REGION 1..19: note = XENP018386 vhCDR2
EIRLKSNNYATHYAEPVKG

SEQ ID NO: 19205 - protein, 11 aa, synthetic construct
  REGION 1..11: note = Description of Artificial Sequence: Synthetic peptide
  REGION 1..11: note = XENP018386 vhCDR3
YYGNYGGYFDV

SEQ ID NO: 19206 - protein, 214 aa, synthetic construct
  REGION 1..214: note = Description of Artificial Sequence: Synthetic polypeptide
  REGION 1..214: note = XENP018386 1G6_H1_L1.43_IgG1_PVA_/S267K Light Chain
SIVMTQSPATLSVSPGERATLSCRASQSVSNLVAWYQQKPGQSPRLLINYASHRYTGVPDRFTGSGYGTEFTLTISSLQSEDFAVYFCQQDYSSPRTFGGGTKVEIKRTVAAPSVFIFPPSDEQLKSGTASVVCLLNNFYPREAKVQWKVDNALQSGNSQESVTEQDSKDSTYSLSSTLTLSKADYEKHKVYACEVTHQGLSSPVTKSFNRGEC

SEQ ID NO: 19207 - protein, 107 aa, synthetic construct; identical to SEQ ID NO: 13557
  REGION 1..107: note = Description of Artificial Sequence: Synthetic polypeptide
  REGION 1..107: note = VL of XENP018386

SEQ ID NO: 19208 - protein, 11 aa, synthetic construct
  REGION 1..11: note = Description of Artificial Sequence: Synthetic peptide
  REGION 1..11: note = XENP018386 vlCDR1
RASQSVSNLVA

SEQ ID NO: 19209 - protein, 7 aa, synthetic construct
  REGION 1..7: note = Description of Artificial Sequence: Synthetic peptide
  REGION 1..7: note = XENP018386 vlCDR2
YASHRYT

SEQ ID NO: 19210 - protein, 9 aa, synthetic construct
  REGION 1..9: note = Description of Artificial Sequence: Synthetic peptide
  REGION 1..9: note = XENP018386 vlCDR3
QQDYSSPRT

SEQ ID NO: 19211 - protein, 451 aa, synthetic construct; identical to SEQ ID NO: 16221
  REGION 1..451: note = Description of Artificial Sequence: Synthetic polypeptide
  REGION 1..451: note = XENP018387 1G6_H1_L1.44_IgG1_PVA_/S267K Heavy Chain

SEQ ID NO: 19212 - protein, 122 aa, synthetic construct; identical to SEQ ID NO: 10922
  REGION 1..122: note = Description of Artificial Sequence: Synthetic polypeptide
  REGION 1..122: note = VH of XENP018387

SEQ ID NO: 19213 - protein, 5 aa, synthetic construct
  REGION 1..5: note = Description of Artificial Sequence: Synthetic peptide
  REGION 1..5: note = XENP018387 vhCDR1
NYWMN

SEQ ID NO: 19214 - protein, 19 aa, synthetic construct
  REGION 1..19: note = Description of Artificial Sequence: Synthetic peptide
  REGION 1..19: note = XENP018387 vhCDR2
EIRLKSNNYATHYAEPVKG

SEQ ID NO: 19215 - protein, 11 aa, synthetic construct
  REGION 1..11: note = Description of Artificial Sequence: Synthetic peptide
  REGION 1..11: note = XENP018387 vhCDR3
YYGNYGGYFDV

SEQ ID NO: 19216 - protein, 214 aa, synthetic construct
  REGION 1..214: note = Description of Artificial Sequence: Synthetic polypeptide
  REGION 1..214: note = XENP018387 1G6_H1_L1.44_IgG1_PVA_/S267K Light Chain
SIVMTQSPATLSVSPGERATLSCRASQSVSNTVAWYQQKPGQSPRLLINYASHRYTGVPDRFTGSGYGTEFTLTISSLQSEDFAVYFCQQDYSSPRTFGGGTKVEIKRTVAAPSVFIFPPSDEQLKSGTASVVCLLNNFYPREAKVQWKVDNALQSGNSQESVTEQDSKDSTYSLSSTLTLSKADYEKHKVYACEVTHQGLSSPVTKSFNRGEC

SEQ ID NO: 19217 - protein, 107 aa, synthetic construct; identical to SEQ ID NO: 13566
  REGION 1..107: note = Description of Artificial Sequence: Synthetic polypeptide
  REGION 1..107: note = VL of XENP018387

SEQ ID NO: 19218 - protein, 11 aa, synthetic construct
  REGION 1..11: note = Description of Artificial Sequence: Synthetic peptide
  REGION 1..11: note = XENP018387 vlCDR1
RASQSVSNTVA

SEQ ID NO: 19219 - protein, 7 aa, synthetic construct
  REGION 1..7: note = Description of Artificial Sequence: Synthetic peptide
  REGION 1..7: note = XENP018387 vlCDR2
YASHRYT

SEQ ID NO: 19220 - protein, 9 aa, synthetic construct
  REGION 1..9: note = Description of Artificial Sequence: Synthetic peptide
  REGION 1..9: note = XENP018387 vlCDR3
QQDYSSPRT

SEQ ID NO: 19221 - protein, 451 aa, synthetic construct; identical to SEQ ID NO: 16221
  REGION 1..451: note = Description of Artificial Sequence: Synthetic polypeptide
  REGION 1..451: note = XENP018388 1G6_H1_L1.45_IgG1_PVA_/S267K Heavy Chain

SEQ ID NO: 19222 - protein, 122 aa, synthetic construct; identical to SEQ ID NO: 10922
  REGION 1..122: note = Description of Artificial Sequence: Synthetic polypeptide
  REGION 1..122: note = VH of XENP018388

SEQ ID NO: 19223 - protein, 5 aa, synthetic construct
  REGION 1..5: note = Description of Artificial Sequence: Synthetic peptide
  REGION 1..5: note = XENP018388 vhCDR1
NYWMN

SEQ ID NO: 19224 - protein, 19 aa, synthetic construct
  REGION 1..19: note = Description of Artificial Sequence: Synthetic peptide
  REGION 1..19: note = XENP018388 vhCDR2
EIRLKSNNYATHYAEPVKG

SEQ ID NO: 19225 - protein, 11 aa, synthetic construct
  REGION 1..11: note = Description of Artificial Sequence: Synthetic peptide
  REGION 1..11: note = XENP018388 vhCDR3
YYGNYGGYFDV

SEQ ID NO: 19226 - protein, 214 aa, synthetic construct
  REGION 1..214: note = Description of Artificial Sequence: Synthetic polypeptide
  REGION 1..214: note = XENP018388 1G6_H1_L1.45_IgG1_PVA_/S267K Light Chain
SIVMTQSPATLSVSPGERATLSCRASQSVSNGVAWYQQKPGQSPRLLINYASHRYTGVPDRFTGSGYGTEFTLTISSLQSEDFAVYFCQQDYSSPRTFGGGTKVEIKRTVAAPSVFIFPPSDEQLKSGTASVVCLLNNFYPREAKVQWKVDNALQSGNSQESVTEQDSKDSTYSLSSTLTLSKADYEKHKVYACEVTHQGLSSPVTKSFNRGEC

SEQ ID NO: 19227 - protein, 107 aa, synthetic construct; identical to SEQ ID NO: 13575
  REGION 1..107: note = Description of Artificial Sequence: Synthetic polypeptide
  REGION 1..107: note = VL of XENP018388

SEQ ID NO: 19228 - protein, 11 aa, synthetic construct
  REGION 1..11: note = Description of Artificial Sequence: Synthetic peptide
  REGION 1..11: note = XENP018388 vlCDR1
RASQSVSNGVA

SEQ ID NO: 19229 - protein, 7 aa, synthetic construct
  REGION 1..7: note = Description of Artificial Sequence: Synthetic peptide
  REGION 1..7: note = XENP018388 vlCDR2
YASHRYT

SEQ ID NO: 19230 - protein, 9 aa, synthetic construct
  REGION 1..9: note = Description of Artificial Sequence: Synthetic peptide
  REGION 1..9: note = XENP018388 vlCDR3
QQDYSSPRT

SEQ ID NO: 19231 - protein, 451 aa, synthetic construct; identical to SEQ ID NO: 16221
  REGION 1..451: note = Description of Artificial Sequence: Synthetic polypeptide
  REGION 1..451: note = XENP018389 1G6_H1_L1.46_IgG1_PVA_/S267K Heavy Chain

SEQ ID NO: 19232 - protein, 122 aa, synthetic construct; identical to SEQ ID NO: 10922
  REGION 1..122: note = Description of Artificial Sequence: Synthetic polypeptide
  REGION 1..122: note = VH of XENP018389

SEQ ID NO: 19233 - protein, 5 aa, synthetic construct
  REGION 1..5: note = Description of Artificial Sequence: Synthetic peptide
  REGION 1..5: note = XENP018389 vhCDR1
NYWMN

SEQ ID NO: 19234 - protein, 19 aa, synthetic construct
  REGION 1..19: note = Description of Artificial Sequence: Synthetic peptide
  REGION 1..19: note = XENP018389 vhCDR2
EIRLKSNNYATHYAEPVKG

SEQ ID NO: 19235 - protein, 11 aa, synthetic construct
  REGION 1..11: note = Description of Artificial Sequence: Synthetic peptide
  REGION 1..11: note = XENP018389 vhCDR3
YYGNYGGYFDV

SEQ ID NO: 19236 - protein, 214 aa, synthetic construct
  REGION 1..214: note = Description of Artificial Sequence: Synthetic polypeptide
  REGION 1..214: note = XENP018389 1G6_H1_L1.46_IgG1_PVA_/S267K Light Chain
SIVMTQSPATLSVSPGERATLSCRASQSVSNYVAWYQQKPGQSPRLLINYASHRYTGVPDRFTGSGYGTEFTLTISSLQSEDFAVYFCQQDYSSPRTFGGGTKVEIKRTVAAPSVFIFPPSDEQLKSGTASVVCLLNNFYPREAKVQWKVDNALQSGNSQESVTEQDSKDSTYSLSSTLTLSKADYEKHKVYACEVTHQGLSSPVTKSFNRGEC

SEQ ID NO: 19237 - protein, 107 aa, synthetic construct; identical to SEQ ID NO: 13584
  REGION 1..107: note = Description of Artificial Sequence: Synthetic polypeptide
  REGION 1..107: note = VL of XENP018389

SEQ ID NO: 19238 - protein, 11 aa, synthetic construct
  REGION 1..11: note = Description of Artificial Sequence: Synthetic peptide
  REGION 1..11: note = XENP018389 vlCDR1
RASQSVSNYVA

SEQ ID NO: 19239 - protein, 7 aa, synthetic construct
  REGION 1..7: note = Description of Artificial Sequence: Synthetic peptide
  REGION 1..7: note = XENP018389 vlCDR2
YASHRYT

SEQ ID NO: 19240 - protein, 9 aa, synthetic construct
  REGION 1..9: note = Description of Artificial Sequence: Synthetic peptide
  REGION 1..9: note = XENP018389 vlCDR3
QQDYSSPRT

SEQ ID NO: 19241 - protein, 451 aa, synthetic construct; identical to SEQ ID NO: 16221
  REGION 1..451: note = Description of Artificial Sequence: Synthetic polypeptide
  REGION 1..451: note = XENP018390 1G6_H1_L1.47_IgG1_PVA_/S267K Heavy Chain

SEQ ID NO: 19242 - protein, 122 aa, synthetic construct; identical to SEQ ID NO: 10922
  REGION 1..122: note = Description of Artificial Sequence: Synthetic polypeptide
  REGION 1..122: note = VH of XENP018390

SEQ ID NO: 19243 - protein, 5 aa, synthetic construct
  REGION 1..5: note = Description of Artificial Sequence: Synthetic peptide
  REGION 1..5: note = XENP018390 vhCDR1
NYWMN

SEQ ID NO: 19244 - protein, 19 aa, synthetic construct
  REGION 1..19: note = Description of Artificial Sequence: Synthetic peptide
  REGION 1..19: note = XENP018390 vhCDR2
EIRLKSNNYATHYAEPVKG

SEQ ID NO: 19245 - protein, 11 aa, synthetic construct
  REGION 1..11: note = Description of Artificial Sequence: Synthetic peptide
  REGION 1..11: note = XENP018390 vhCDR3
YYGNYGGYFDV

SEQ ID NO: 19246 - protein, 214 aa, synthetic construct
  REGION 1..214: note = Description of Artificial Sequence: Synthetic polypeptide
  REGION 1..214: note = XENP018390 1G6_H1_L1.47_IgG1_PVA_/S267K Light Chain
SIVMTQSPATLSVSPGERATLSCRASQSVSNDLAWYQQKPGQSPRLLINYASHRYTGVPDRFTGSGYGTEFTLTISSLQSEDFAVYFCQQDYSSPRTFGGGTKVEIKRTVAAPSVFIFPPSDEQLKSGTASVVCLLNNFYPREAKVQWKVDNALQSGNSQESVTEQDSKDSTYSLSSTLTLSKADYEKHKVYACEVTHQGLSSPVTKSFNRGEC

SEQ ID NO: 19247 - protein, 107 aa, synthetic construct; identical to SEQ ID NO: 13593
  REGION 1..107: note = Description of Artificial Sequence: Synthetic polypeptide
  REGION 1..107: note = VL of XENP018390

SEQ ID NO: 19248 - protein, 11 aa, synthetic construct
  REGION 1..11: note = Description of Artificial Sequence: Synthetic peptide
  REGION 1..11: note = XENP018390 vlCDR1
RASQSVSNDLA

SEQ ID NO: 19249 - protein, 7 aa, synthetic construct
  REGION 1..7: note = Description of Artificial Sequence: Synthetic peptide
  REGION 1..7: note = XENP018390 vlCDR2
YASHRYT

SEQ ID NO: 19250 - protein, 9 aa, synthetic construct
  REGION 1..9: note = Description of Artificial Sequence: Synthetic peptide
  REGION 1..9: note = XENP018390 vlCDR3
QQDYSSPRT

SEQ ID NO: 19251 - protein, 451 aa, synthetic construct; identical to SEQ ID NO: 16221
  REGION 1..451: note = Description of Artificial Sequence: Synthetic polypeptide
  REGION 1..451: note = XENP018391 1G6_H1_L1.48_IgG1_PVA_/S267K Heavy Chain

SEQ ID NO: 19252 - protein, 122 aa, synthetic construct; identical to SEQ ID NO: 10922
  REGION 1..122: note = Description of Artificial Sequence: Synthetic polypeptide
  REGION 1..122: note = VH of XENP018391

SEQ ID NO: 19253 - protein, 5 aa, synthetic construct
  REGION 1..5: note = Description of Artificial Sequence: Synthetic peptide
  REGION 1..5: note = XENP018391 vhCDR1
NYWMN

SEQ ID NO: 19254 - protein, 19 aa, synthetic construct
  REGION 1..19: note = Description of Artificial Sequence: Synthetic peptide
  REGION 1..19: note = XENP018391 vhCDR2
EIRLKSNNYATHYAEPVKG

SEQ ID NO: 19255 - protein, 11 aa, synthetic construct
  REGION 1..11: note = Description of Artificial Sequence: Synthetic peptide
  REGION 1..11: note = XENP018391 vhCDR3
YYGNYGGYFDV

SEQ ID NO: 19256 - protein, 214 aa, synthetic construct
  REGION 1..214: note = Description of Artificial Sequence: Synthetic polypeptide
  REGION 1..214: note = XENP018391 1G6_H1_L1.48_IgG1_PVA_/S267K Light Chain
SIVMTQSPATLSVSPGERATLSCRASQSVSNDVSWYQQKPGQSPRLLINYASHRYTGVPDRFTGSGYGTEFTLTISSLQSEDFAVYFCQQDYSSPRTFGGGTKVEIKRTVAAPSVFIFPPSDEQLKSGTASVVCLLNNFYPREAKVQWKVDNALQSGNSQESVTEQDSKDSTYSLSSTLTLSKADYEKHKVYACEVTHQGLSSPVTKSFNRGEC

SEQ ID NO: 19257 - protein, 107 aa, synthetic construct; identical to SEQ ID NO: 13602
  REGION 1..107: note = Description of Artificial Sequence: Synthetic polypeptide
  REGION 1..107: note = VL of XENP018391

SEQ ID NO: 19258 - protein, 11 aa, synthetic construct
  REGION 1..11: note = Description of Artificial Sequence: Synthetic peptide
  REGION 1..11: note = XENP018391 vlCDR1
RASQSVSNDVS

SEQ ID NO: 19259 - protein, 7 aa, synthetic construct
  REGION 1..7: note = Description of Artificial Sequence: Synthetic peptide
  REGION 1..7: note = XENP018391 vlCDR2
YASHRYT

SEQ ID NO: 19260 - protein, 9 aa, synthetic construct
  REGION 1..9: note = Description of Artificial Sequence: Synthetic peptide
  REGION 1..9: note = XENP018391 vlCDR3
QQDYSSPRT

SEQ ID NO: 19261 - protein, 451 aa, synthetic construct; identical to SEQ ID NO: 16221
  REGION 1..451: note = Description of Artificial Sequence: Synthetic polypeptide
  REGION 1..451: note = XENP018392 1G6_H1_L1.49_IgG1_PVA_/S267K Heavy Chain

SEQ ID NO: 19262 - protein, 122 aa, synthetic construct; identical to SEQ ID NO: 10922
  REGION 1..122: note = Description of Artificial Sequence: Synthetic polypeptide
  REGION 1..122: note = VH of XENP018392

SEQ ID NO: 19263 - protein, 5 aa, synthetic construct
  REGION 1..5: note = Description of Artificial Sequence: Synthetic peptide
  REGION 1..5: note = XENP018392 vhCDR1
NYWMN

SEQ ID NO: 19264 - protein, 19 aa, synthetic construct
  REGION 1..19: note = Description of Artificial Sequence: Synthetic peptide
  REGION 1..19: note = XENP018392 vhCDR2
EIRLKSNNYATHYAEPVKG

SEQ ID NO: 19265 - protein, 11 aa, synthetic construct
  REGION 1..11: note = Description of Artificial Sequence: Synthetic peptide
  REGION 1..11: note = XENP018392 vhCDR3
YYGNYGGYFDV

SEQ ID NO: 19266 - protein, 214 aa, synthetic construct
  REGION 1..214: note = Description of Artificial Sequence: Synthetic polypeptide
  REGION 1..214: note = XENP018392 1G6_H1_L1.49_IgG1_PVA_/S267K Light Chain
SIVMTQSPATLSVSPGERATLSCRASQSVSNDVTWYQQKPGQSPRLLINYASHRYTGVPDRFTGSGYGTEFTLTISSLQSEDFAVYFCQQDYSSPRTFGGGTKVEIKRTVAAPSVFIFPPSDEQLKSGTASVVCLLNNFYPREAKVQWKVDNALQSGNSQESVTEQDSKDSTYSLSSTLTLSKADYEKHKVYACEVTHQGLSSPVTKSFNRGEC

SEQ ID NO: 19267 - protein, 107 aa, synthetic construct; identical to SEQ ID NO: 13611
  REGION 1..107: note = Description of Artificial Sequence: Synthetic polypeptide
  REGION 1..107: note = VL of XENP018392

SEQ ID NO: 19268 - protein, 11 aa, synthetic construct
  REGION 1..11: note = Description of Artificial Sequence: Synthetic peptide
  REGION 1..11: note = XENP018392 vlCDR1
RASQSVSNDVT

SEQ ID NO: 19269 - protein, 7 aa, synthetic construct
  REGION 1..7: note = Description of Artificial Sequence: Synthetic peptide
  REGION 1..7: note = XENP018392 vlCDR2
YASHRYT

SEQ ID NO: 19270 - protein, 9 aa, synthetic construct
  REGION 1..9: note = Description of Artificial Sequence: Synthetic peptide
  REGION 1..9: note = XENP018392 vlCDR3
QQDYSSPRT

SEQ ID NO: 19271 - protein, 451 aa, synthetic construct; identical to SEQ ID NO: 16221
  REGION 1..451: note = Description of Artificial Sequence: Synthetic polypeptide
  REGION 1..451: note = XENP018393 1G6_H1_L1.50_IgG1_PVA_/S267K Heavy Chain

SEQ ID NO: 19272 - protein, 122 aa, synthetic construct; identical to SEQ ID NO: 10922
  REGION 1..122: note = Description of Artificial Sequence: Synthetic polypeptide
  REGION 1..122: note = VH of XENP018393

SEQ ID NO: 19273 - protein, 5 aa, synthetic construct
  REGION 1..5: note = Description of Artificial Sequence: Synthetic peptide
  REGION 1..5: note = XENP018393 vhCDR1
NYWMN

SEQ ID NO: 19274 - protein, 19 aa, synthetic construct
  REGION 1..19: note = Description of Artificial Sequence: Synthetic peptide
  REGION 1..19: note = XENP018393 vhCDR2
EIRLKSNNYATHYAEPVKG

SEQ ID NO: 19275 - protein, 11 aa, synthetic construct
  REGION 1..11: note = Description of Artificial Sequence: Synthetic peptide
  REGION 1..11: note = XENP018393 vhCDR3
YYGNYGGYFDV

SEQ ID NO: 19276 - protein, 214 aa, synthetic construct
  REGION 1..214: note = Description of Artificial Sequence: Synthetic polypeptide
  REGION 1..214: note = XENP018393 1G6_H1_L1.50_IgG1_PVA_/S267K Light Chain
SIVMTQSPATLSVSPGERATLSCRASQSVSNDVAWYQQKPGQAPRLLINYASHRYTGVPDRFTGSGYGTEFTLTISSLQSEDFAVYFCQQDYSSPRTFGGGTKVEIKRTVAAPSVFIFPPSDEQLKSGTASVVCLLNNFYPREAKVQWKVDNALQSGNSQESVTEQDSKDSTYSLSSTLTLSKADYEKHKVYACEVTHQGLSSPVTKSFNRGEC

SEQ ID NO: 19277 - protein, 107 aa, synthetic construct; identical to SEQ ID NO: 13620
  REGION 1..107: note = Description of Artificial Sequence: Synthetic polypeptide
  REGION 1..107: note = VL of XENP018393

SEQ ID NO: 19278 - protein, 11 aa, synthetic construct
  REGION 1..11: note = Description of Artificial Sequence: Synthetic peptide
  REGION 1..11: note = XENP018393 vlCDR1
RASQSVSNDVA

SEQ ID NO: 19279 - protein, 7 aa, synthetic construct
  REGION 1..7: note = Description of Artificial Sequence: Synthetic peptide
  REGION 1..7: note = XENP018393 vlCDR2
YASHRYT

SEQ ID NO: 19280 - protein, 9 aa, synthetic construct
  REGION 1..9: note = Description of Artificial Sequence: Synthetic peptide
  REGION 1..9: note = XENP018393 vlCDR3
QQDYSSPRT

SEQ ID NO: 19281 - protein, 451 aa, synthetic construct; identical to SEQ ID NO: 16221
  REGION 1..451: note = Description of Artificial Sequence: Synthetic polypeptide
  REGION 1..451: note = XENP018394 1G6_H1_L1.51_IgG1_PVA_/S267K Heavy Chain

SEQ ID NO: 19282 - protein, 122 aa, synthetic construct; identical to SEQ ID NO: 10922
  REGION 1..122: note = Description of Artificial Sequence: Synthetic polypeptide
  REGION 1..122: note = VH of XENP018394

SEQ ID NO: 19283 - protein, 5 aa, synthetic construct
  REGION 1..5: note = Description of Artificial Sequence: Synthetic peptide
  REGION 1..5: note = XENP018394 vhCDR1
NYWMN

SEQ ID NO: 19284 - protein, 19 aa, synthetic construct
  REGION 1..19: note = Description of Artificial Sequence: Synthetic peptide
  REGION 1..19: note = XENP018394 vhCDR2
EIRLKSNNYATHYAEPVKG

SEQ ID NO: 19285 - protein, 11 aa, synthetic construct
  REGION 1..11: note = Description of Artificial Sequence: Synthetic peptide
  REGION 1..11: note = XENP018394 vhCDR3
YYGNYGGYFDV

SEQ ID NO: 19286 - protein, 214 aa, synthetic construct
  REGION 1..214: note = Description of Artificial Sequence: Synthetic polypeptide
  REGION 1..214: note = XENP018394 1G6_H1_L1.51_IgG1_PVA_/S267K Light Chain
SIVMTQSPATLSVSPGERATLSCRASQSVSNDVAWYQQKPGQSPKLLINYASHRYTGVPDRFTGSGYGTEFTLTISSLQSEDFAVYFCQQDYSSPRTFGGGTKVEIKRTVAAPSVFIFPPSDEQLKSGTASVVCLLNNFYPREAKVQWKVDNALQSGNSQESVTEQDSKDSTYSLSSTLTLSKADYEKHKVYACEVTHQGLSSPVTKSFNRGEC

SEQ ID NO: 19287 - protein, 107 aa, synthetic construct; identical to SEQ ID NO: 13629
  REGION 1..107: note = Description of Artificial Sequence: Synthetic polypeptide
  REGION 1..107: note = VL of XENP018394

SEQ ID NO: 19288 - protein, 11 aa, synthetic construct
  REGION 1..11: note = Description of Artificial Sequence: Synthetic peptide
  REGION 1..11: note = XENP018394 vlCDR1
RASQSVSNDVA

SEQ ID NO: 19289 - protein, 7 aa, synthetic construct
  REGION 1..7: note = Description of Artificial Sequence: Synthetic peptide
  REGION 1..7: note = XENP018394 vlCDR2
YASHRYT

SEQ ID NO: 19290 - protein, 9 aa, synthetic construct
  REGION 1..9: note = Description of Artificial Sequence: Synthetic peptide
  REGION 1..9: note = XENP018394 vlCDR3
QQDYSSPRT

SEQ ID NO: 19291 - protein, 451 aa, synthetic construct; identical to SEQ ID NO: 16221
  REGION 1..451: note = Description of Artificial Sequence: Synthetic polypeptide
  REGION 1..451: note = XENP018395 1G6_H1_L1.52_IgG1_PVA_/S267K Heavy Chain

SEQ ID NO: 19292 - protein, 122 aa, synthetic construct; identical to SEQ ID NO: 10922
  REGION 1..122: note = Description of Artificial Sequence: Synthetic polypeptide
  REGION 1..122: note = VH of XENP018395

SEQ ID NO: 19293 - protein, 5 aa, synthetic construct
  REGION 1..5: note = Description of Artificial Sequence: Synthetic peptide
  REGION 1..5: note = XENP018395 vhCDR1
NYWMN

SEQ ID NO: 19294 - protein, 19 aa, synthetic construct
  REGION 1..19: note = Description of Artificial Sequence: Synthetic peptide
  REGION 1..19: note = XENP018395 vhCDR2
EIRLKSNNYATHYAEPVKG

SEQ ID NO: 19295 - protein, 11 aa, synthetic construct
  REGION 1..11: note = Description of Artificial Sequence: Synthetic peptide
  REGION 1..11: note = XENP018395 vhCDR3
YYGNYGGYFDV

SEQ ID NO: 19296 - protein, 214 aa, synthetic construct
  REGION 1..214: note = Description of Artificial Sequence: Synthetic polypeptide
  REGION 1..214: note = XENP018395 1G6_H1_L1.52_IgG1_PVA_/S267K Light Chain
SIVMTQSPATLSVSPGERATLSCRASQSVSNDVAWYQQKPGQSPQLLINYASHRYTGVPDRFTGSGYGTEFTLTISSLQSEDFAVYFCQQDYSSPRTFGGGTKVEIKRTVAAPSVFIFPPSDEQLKSGTASVVCLLNNFYPREAKVQWKVDNALQSGNSQESVTEQDSKDSTYSLSSTLTLSKADYEKHKVYACEVTHQGLSSPVTKSFNRGEC

SEQ ID NO: 19297 - protein, 107 aa, synthetic construct; identical to SEQ ID NO: 13638
  REGION 1..107: note = Description of Artificial Sequence: Synthetic polypeptide
  REGION 1..107: note = VL of XENP018395

SEQ ID NO: 19298 - protein, 11 aa, synthetic construct
  REGION 1..11: note = Description of Artificial Sequence: Synthetic peptide
  REGION 1..11: note = XENP018395 vlCDR1
RASQSVSNDVA

SEQ ID NO: 19299 - protein, 7 aa, synthetic construct
  REGION 1..7: note = Description of Artificial Sequence: Synthetic peptide
  REGION 1..7: note = XENP018395 vlCDR2
YASHRYT

SEQ ID NO: 19300 - protein, 9 aa, synthetic construct
  REGION 1..9: note = Description of Artificial Sequence: Synthetic peptide
  REGION 1..9: note = XENP018395 vlCDR3
QQDYSSPRT

SEQ ID NO: 19301 - protein, 451 aa, synthetic construct; identical to SEQ ID NO: 16221
  REGION 1..451: note = Description of Artificial Sequence: Synthetic polypeptide
  REGION 1..451: note = XENP018396 1G6_H1_L1.53_IgG1_PVA_/S267K Heavy Chain

SEQ ID NO: 19302 - protein, 122 aa, synthetic construct; identical to SEQ ID NO: 10922
  REGION 1..122: note = Description of Artificial Sequence: Synthetic polypeptide
  REGION 1..122: note = VH of XENP018396

SEQ ID NO: 19303 - protein, 5 aa, synthetic construct
  REGION 1..5: note = Description of Artificial Sequence: Synthetic peptide
  REGION 1..5: note = XENP018396 vhCDR1
NYWMN

SEQ ID NO: 19304 - protein, 19 aa, synthetic construct
  REGION 1..19: note = Description of Artificial Sequence: Synthetic peptide
  REGION 1..19: note = XENP018396 vhCDR2
EIRLKSNNYATHYAEPVKG

SEQ ID NO: 19305 - protein, 11 aa, synthetic construct
  REGION 1..11: note = Description of Artificial Sequence: Synthetic peptide
  REGION 1..11: note = XENP018396 vhCDR3
YYGNYGGYFDV

SEQ ID NO: 19306 - protein, 214 aa, synthetic construct
  REGION 1..214: note = Description of Artificial Sequence: Synthetic polypeptide
  REGION 1..214: note = XENP018396 1G6_H1_L1.53_IgG1_PVA_/S267K Light Chain
SIVMTQSPATLSVSPGERATLSCRASQSVSNDVAWYQQKPGQSPILLINYASHRYTGVPDRFTGSGYGTEFTLTISSLQSEDFAVYFCQQDYSSPRTFGGGTKVEIKRTVAAPSVFIFPPSDEQLKSGTASVVCLLNNFYPREAKVQWKVDNALQSGNSQESVTEQDSKDSTYSLSSTLTLSKADYEKHKVYACEVTHQGLSSPVTKSFNRGEC

SEQ ID NO: 19307 - protein, 107 aa, synthetic construct; identical to SEQ ID NO: 13647
  REGION 1..107: note = Description of Artificial Sequence: Synthetic polypeptide
  REGION 1..107: note = VL of XENP018396

SEQ ID NO: 19308 - protein, 11 aa, synthetic construct
  REGION 1..11: note = Description of Artificial Sequence: Synthetic peptide
  REGION 1..11: note = XENP018396 vlCDR1
RASQSVSNDVA

SEQ ID NO: 19309 - protein, 7 aa, synthetic construct
  REGION 1..7: note = Description of Artificial Sequence: Synthetic peptide
  REGION 1..7: note = XENP018396 vlCDR2
YASHRYT

SEQ ID NO: 19310 - protein, 9 aa, synthetic construct
  REGION 1..9: note = Description of Artificial Sequence: Synthetic peptide
  REGION 1..9: note = XENP018396 vlCDR3
QQDYSSPRT

SEQ ID NO: 19311 - protein, 451 aa, synthetic construct; identical to SEQ ID NO: 16221
  REGION 1..451: note = Description of Artificial Sequence: Synthetic polypeptide
  REGION 1..451: note = XENP018401 1G6_H1_L1.54_IgG1_PVA_/S267K Heavy Chain

SEQ ID NO: 19312 - protein, 122 aa, synthetic construct; identical to SEQ ID NO: 10922
  REGION 1..122: note = Description of Artificial Sequence: Synthetic polypeptide
  REGION 1..122: note = VH of XENP018401

SEQ ID NO: 19313 - protein, 5 aa, synthetic construct
  REGION 1..5: note = Description of Artificial Sequence: Synthetic peptide
  REGION 1..5: note = XENP018401 vhCDR1
NYWMN

SEQ ID NO: 19314 - protein, 19 aa, synthetic construct
  REGION 1..19: note = Description of Artificial Sequence: Synthetic peptide
  REGION 1..19: note = XENP018401 vhCDR2
EIRLKSNNYATHYAEPVKG

SEQ ID NO: 19315 - protein, 11 aa, synthetic construct
  REGION 1..11: note = Description of Artificial Sequence: Synthetic peptide
  REGION 1..11: note = XENP018401 vhCDR3
YYGNYGGYFDV

SEQ ID NO: 19316 - protein, 214 aa, synthetic construct
  REGION 1..214: note = Description of Artificial Sequence: Synthetic polypeptide
  REGION 1..214: note = XENP018401 1G6_H1_L1.54_IgG1_PVA_/S267K Light Chain
SIVMTQSPATLSVSPGERATLSCRASQSVSNDVAWYQQKPGQSPRLLIYYASHRYTGVPDRFTGSGYGTEFTLTISSLQSEDFAVYFCQQDYSSPRTFGGGTKVEIKRTVAAPSVFIFPPSDEQLKSGTASVVCLLNNFYPREAKVQWKVDNALQSGNSQESVTEQDSKDSTYSLSSTLTLSKADYEKHKVYACEVTHQGLSSPVTKSFNRGEC

SEQ ID NO: 19317 - protein, 107 aa, synthetic construct; identical to SEQ ID NO: 13656
  REGION 1..107: note = Description of Artificial Sequence: Synthetic polypeptide
  REGION 1..107: note = VL of XENP018401

SEQ ID NO: 19318 - protein, 11 aa, synthetic construct
  REGION 1..11: note = Description of Artificial Sequence: Synthetic peptide
  REGION 1..11: note = XENP018401 vlCDR1
RASQSVSNDVA

SEQ ID NO: 19319 - protein, 7 aa, synthetic construct
  REGION 1..7: note = Description of Artificial Sequence: Synthetic peptide
  REGION 1..7: note = XENP018401 vlCDR2
YASHRYT

SEQ ID NO: 19320 - protein, 9 aa, synthetic construct
  REGION 1..9: note = Description of Artificial Sequence: Synthetic peptide
  REGION 1..9: note = XENP018401 vlCDR3
QQDYSSPRT

SEQ ID NO: 19321 - protein, 451 aa, synthetic construct; identical to SEQ ID NO: 16221
  REGION 1..451: note = Description of Artificial Sequence: Synthetic polypeptide
  REGION 1..451: note = XENP018402 1G6_H1_L1.55_IgG1_PVA_/S267K Heavy Chain

SEQ ID NO: 19322 - protein, 122 aa, synthetic construct; identical to SEQ ID NO: 10922
  REGION 1..122: note = Description of Artificial Sequence: Synthetic polypeptide
  REGION 1..122: note = VH of XENP018402

SEQ ID NO: 19323 - protein, 5 aa, synthetic construct
  REGION 1..5: note = Description of Artificial Sequence: Synthetic peptide
  REGION 1..5: note = XENP018402 vhCDR1
NYWMN

SEQ ID NO: 19324 - protein, 19 aa, synthetic construct
  REGION 1..19: note = Description of Artificial Sequence: Synthetic peptide
  REGION 1..19: note = XENP018402 vhCDR2
EIRLKSNNYATHYAEPVKG

SEQ ID NO: 19325 - protein, 11 aa, synthetic construct
  REGION 1..11: note = Description of Artificial Sequence: Synthetic peptide
  REGION 1..11: note = XENP018402 vhCDR3
YYGNYGGYFDV

SEQ ID NO: 19326 - protein, 214 aa, synthetic construct
  REGION 1..214: note = Description of Artificial Sequence: Synthetic polypeptide
  REGION 1..214: note = XENP018402 1G6_H1_L1.55_IgG1_PVA_/S267K Light Chain
SIVMTQSPATLSVSPGERATLSCRASQSVSNDVAWYQQKPGQSPRLLINFASHRYTGVPDRFTGSGYGTEFTLTISSLQSEDFAVYFCQQDYSSPRTFGGGTKVEIKRTVAAPSVFIFPPSDEQLKSGTASVVCLLNNFYPREAKVQWKVDNALQSGNSQESVTEQDSKDSTYSLSSTLTLSKADYEKHKVYACEVTHQGLSSPVTKSFNRGEC

SEQ ID NO: 19327 - protein, 107 aa, synthetic construct; identical to SEQ ID NO: 13665
  REGION 1..107: note = Description of Artificial Sequence: Synthetic polypeptide
  REGION 1..107: note = VL of XENP018402

SEQ ID NO: 19328 - protein, 11 aa, synthetic construct
  REGION 1..11: note = Description of Artificial Sequence: Synthetic peptide
  REGION 1..11: note = XENP018402 vlCDR1
RASQSVSNDVA

SEQ ID NO: 19329 - protein, 7 aa, synthetic construct
  REGION 1..7: note = Description of Artificial Sequence: Synthetic peptide
  REGION 1..7: note = XENP018402 vlCDR2
FASHRYT

SEQ ID NO: 19330 - protein, 9 aa, synthetic construct
  REGION 1..9: note = Description of Artificial Sequence: Synthetic peptide
  REGION 1..9: note = XENP018402 vlCDR3
QQDYSSPRT

SEQ ID NO: 19331 - protein, 451 aa, synthetic construct; identical to SEQ ID NO: 16221
  REGION 1..451: note = Description of Artificial Sequence: Synthetic polypeptide
  REGION 1..451: note = XENP018403 1G6_H1_L1.56_IgG1_PVA_/S267K Heavy Chain

SEQ ID NO: 19332 - protein, 122 aa, synthetic construct; identical to SEQ ID NO: 10922
  REGION 1..122: note = Description of Artificial Sequence: Synthetic polypeptide
  REGION 1..122: note = VH of XENP018403

SEQ ID NO: 19333 - protein, 5 aa, synthetic construct
  REGION 1..5: note = Description of Artificial Sequence: Synthetic peptide
  REGION 1..5: note = XENP018403 vhCDR1
NYWMN

SEQ ID NO: 19334 - protein, 19 aa, synthetic construct
  REGION 1..19: note = Description of Artificial Sequence: Synthetic peptide
  REGION 1..19: note = XENP018403 vhCDR2
EIRLKSNNYATHYAEPVKG

SEQ ID NO: 19335 - protein, 11 aa, synthetic construct
  REGION 1..11: note = Description of Artificial Sequence: Synthetic peptide
  REGION 1..11: note = XENP018403 vhCDR3
YYGNYGGYFDV

SEQ ID NO: 19336 - protein, 214 aa, synthetic construct
  REGION 1..214: note = Description of Artificial Sequence: Synthetic polypeptide
  REGION 1..214: note = XENP018403 1G6_H1_L1.56_IgG1_PVA_/S267K Light Chain
SIVMTQSPATLSVSPGERATLSCRASQSVSNDVAWYQQKPGQSPRLLINHASHRYTGVPDRFTGSGYGTEFTLTISSLQSEDFAVYFCQQDYSSPRTFGGGTKVEIKRTVAAPSVFIFPPSDEQLKSGTASVVCLLNNFYPREAKVQWKVDNALQSGNSQESVTEQDSKDSTYSLSSTLTLSKADYEKHKVYACEVTHQGLSSPVTKSFNRGEC

SEQ ID NO: 19337 - protein, 107 aa, synthetic construct; identical to SEQ ID NO: 13674
  REGION 1..107: note = Description of Artificial Sequence: Synthetic polypeptide
  REGION 1..107: note = VL of XENP018403

SEQ ID NO: 19338 - protein, 11 aa, synthetic construct
  REGION 1..11: note = Description of Artificial Sequence: Synthetic peptide
  REGION 1..11: note = XENP018403 vlCDR1
RASQSVSNDVA

SEQ ID NO: 19339 - protein, 7 aa, synthetic construct
  REGION 1..7: note = Description of Artificial Sequence: Synthetic peptide
  REGION 1..7: note = XENP018403 vlCDR2
HASHRYT

SEQ ID NO: 19340 - protein, 9 aa, synthetic construct
  REGION 1..9: note = Description of Artificial Sequence: Synthetic peptide
  REGION 1..9: note = XENP018403 vlCDR3
QQDYSSPRT

SEQ ID NO: 19341 - protein, 451 aa, synthetic construct; identical to SEQ ID NO: 16221
  REGION 1..451: note = Description of Artificial Sequence: Synthetic polypeptide
  REGION 1..451: note = XENP018404 1G6_H1_L1.57_IgG1_PVA_/S267K Heavy Chain

SEQ ID NO: 19342 - protein, 122 aa, synthetic construct; identical to SEQ ID NO: 10922
  REGION 1..122: note = Description of Artificial Sequence: Synthetic polypeptide
  REGION 1..122: note = VH of XENP018404

SEQ ID NO: 19343 - protein, 5 aa, synthetic construct
  REGION 1..5: note = Description of Artificial Sequence: Synthetic peptide
  REGION 1..5: note = XENP018404 vhCDR1
NYWMN

SEQ ID NO: 19344 - protein, 19 aa, synthetic construct
  REGION 1..19: note = Description of Artificial Sequence: Synthetic peptide
  REGION 1..19: note = XENP018404 vhCDR2
EIRLKSNNYATHYAEPVKG

SEQ ID NO: 19345 - protein, 11 aa, synthetic construct
  REGION 1..11: note = Description of Artificial Sequence: Synthetic peptide
  REGION 1..11: note = XENP018404 vhCDR3
YYGNYGGYFDV

SEQ ID NO: 19346 - protein, 214 aa, synthetic construct
  REGION 1..214: note = Description of Artificial Sequence: Synthetic polypeptide
  REGION 1..214: note = XENP018404 1G6_H1_L1.57_IgG1_PVA_/S267K Light Chain
SIVMTQSPATLSVSPGERATLSCRASQSVSNDVAWYQQKPGQSPRLLINLASHRYTGVPDRFTGSGYGTEFTLTISSLQSEDFAVYFCQQDYSSPRTFGGGTKVEIKRTVAAPSVFIFPPSDEQLKSGTASVVCLLNNFYPREAKVQWKVDNALQSGNSQESVTEQDSKDSTYSLSSTLTLSKADYEKHKVYACEVTHQGLSSPVTKSFNRGEC

SEQ ID NO: 19347 - protein, 107 aa, synthetic construct; identical to SEQ ID NO: 13683
  REGION 1..107: note = Description of Artificial Sequence: Synthetic polypeptide
  REGION 1..107: note = VL of XENP018404

SEQ ID NO: 19348 - protein, 11 aa, synthetic construct
  REGION 1..11: note = Description of Artificial Sequence: Synthetic peptide
  REGION 1..11: note = XENP018404 vlCDR1
RASQSVSNDVA

SEQ ID NO: 19349 - protein, 7 aa, synthetic construct
  REGION 1..7: note = Description of Artificial Sequence: Synthetic peptide
  REGION 1..7: note = XENP018404 vlCDR2
LASHRYT

SEQ ID NO: 19350 - protein, 9 aa, synthetic construct
  REGION 1..9: note = Description of Artificial Sequence: Synthetic peptide
  REGION 1..9: note = XENP018404 vlCDR3
QQDYSSPRT

SEQ ID NO: 19351 - protein, 451 aa, synthetic construct; identical to SEQ ID NO: 16221
  REGION 1..451: note = Description of Artificial Sequence: Synthetic polypeptide
  REGION 1..451: note = XENP018405 1G6_H1_L1.58_IgG1_PVA_/S267K Heavy Chain

SEQ ID NO: 19352 - protein, 122 aa, synthetic construct; identical to SEQ ID NO: 10922
  REGION 1..122: note = Description of Artificial Sequence: Synthetic polypeptide
  REGION 1..122: note = VH of XENP018405

SEQ ID NO: 19353 - protein, 5 aa, synthetic construct
  REGION 1..5: note = Description of Artificial Sequence: Synthetic peptide
  REGION 1..5: note = XENP018405 vhCDR1
NYWMN

SEQ ID NO: 19354 - protein, 19 aa, synthetic construct
  REGION 1..19: note = Description of Artificial Sequence: Synthetic peptide
  REGION 1..19: note = XENP018405 vhCDR2
EIRLKSNNYATHYAEPVKG

SEQ ID NO: 19355 - protein, 11 aa, synthetic construct
  REGION 1..11: note = Description of Artificial Sequence: Synthetic peptide
  REGION 1..11: note = XENP018405 vhCDR3
YYGNYGGYFDV

SEQ ID NO: 19356 - protein, 214 aa, synthetic construct
  REGION 1..214: note = Description of Artificial Sequence: Synthetic polypeptide
  REGION 1..214: note = XENP018405 1G6_H1_L1.58_IgG1_PVA_/S267K Light Chain
SIVMTQSPATLSVSPGERATLSCRASQSVSNDVAWYQQKPGQSPRLLINWASHRYTGVPDRFTGSGYGTEFTLTISSLQSEDFAVYFCQQDYSSPRTFGGGTKVEIKRTVAAPSVFIFPPSDEQLKSGTASVVCLLNNFYPREAKVQWKVDNALQSGNSQESVTEQDSKDSTYSLSSTLTLSKADYEKHKVYACEVTHQGLSSPVTKSFNRGEC

SEQ ID NO: 19357 - protein, 107 aa, synthetic construct; identical to SEQ ID NO: 13692
  REGION 1..107: note = Description of Artificial Sequence: Synthetic polypeptide
  REGION 1..107: note = VL of XENP018405

SEQ ID NO: 19358 - protein, 11 aa, synthetic construct
  REGION 1..11: note = Description of Artificial Sequence: Synthetic peptide
  REGION 1..11: note = XENP018405 vlCDR1
RASQSVSNDVA

SEQ ID NO: 19359 - protein, 7 aa, synthetic construct
  REGION 1..7: note = Description of Artificial Sequence: Synthetic peptide
  REGION 1..7: note = XENP018405 vlCDR2
WASHRYT

SEQ ID NO: 19360 - protein, 9 aa, synthetic construct
  REGION 1..9: note = Description of Artificial Sequence: Synthetic peptide
  REGION 1..9: note = XENP018405 vlCDR3
QQDYSSPRT

SEQ ID NO: 19361 - protein, 451 aa, synthetic construct; identical to SEQ ID NO: 16221
  REGION 1..451: note = Description of Artificial Sequence: Synthetic polypeptide
  REGION 1..451: note = XENP018406 1G6_H1_L1.59_IgG1_PVA_/S267K Heavy Chain

SEQ ID NO: 19362 - protein, 122 aa, synthetic construct; identical to SEQ ID NO: 10922
  REGION 1..122: note = Description of Artificial Sequence: Synthetic polypeptide
  REGION 1..122: note = VH of XENP018406

SEQ ID NO: 19363 - protein, 5 aa, synthetic construct
  REGION 1..5: note = Description of Artificial Sequence: Synthetic peptide
  REGION 1..5: note = XENP018406 vhCDR1
NYWMN

SEQ ID NO: 19364 - protein, 19 aa, synthetic construct
  REGION 1..19: note = Description of Artificial Sequence: Synthetic peptide
  REGION 1..19: note = XENP018406 vhCDR2
EIRLKSNNYATHYAEPVKG

SEQ ID NO: 19365 - protein, 11 aa, synthetic construct
  REGION 1..11: note = Description of Artificial Sequence: Synthetic peptide
  REGION 1..11: note = XENP018406 vhCDR3
YYGNYGGYFDV

SEQ ID NO: 19366 - protein, 214 aa, synthetic construct
  REGION 1..214: note = Description of Artificial Sequence: Synthetic polypeptide
  REGION 1..214: note = XENP018406 1G6_H1_L1.59_IgG1_PVA_/S267K Light Chain
SIVMTQSPATLSVSPGERATLSCRASQSVSNDVAWYQQKPGQSPRLLINVASHRYTGVPDRFTGSGYGTEFTLTISSLQSEDFAVYFCQQDYSSPRTFGGGTKVEIKRTVAAPSVFIFPPSDEQLKSGTASVVCLLNNFYPREAKVQWKVDNALQSGNSQESVTEQDSKDSTYSLSSTLTLSKADYEKHKVYACEVTHQGLSSPVTKSFNRGEC

SEQ ID NO: 19367 - protein, 107 aa, synthetic construct; identical to SEQ ID NO: 13701
  REGION 1..107: note = Description of Artificial Sequence: Synthetic polypeptide
  REGION 1..107: note = VL of XENP018406

SEQ ID NO: 19368 - protein, 11 aa, synthetic construct
  REGION 1..11: note = Description of Artificial Sequence: Synthetic peptide
  REGION 1..11: note = XENP018406 vlCDR1
RASQSVSNDVA

SEQ ID NO: 19369 - protein, 7 aa, synthetic construct
  REGION 1..7: note = Description of Artificial Sequence: Synthetic peptide
  REGION 1..7: note = XENP018406 vlCDR2
VASHRYT

SEQ ID NO: 19370 - protein, 9 aa, synthetic construct
  REGION 1..9: note = Description of Artificial Sequence: Synthetic peptide
  REGION 1..9: note = XENP018406 vlCDR3
QQDYSSPRT

SEQ ID NO: 19371 - protein, 451 aa, synthetic construct; identical to SEQ ID NO: 16221
  REGION 1..451: note = Description of Artificial Sequence: Synthetic polypeptide
  REGION 1..451: note = XENP018407 1G6_H1_L1.60_IgG1_PVA_/S267K Heavy Chain

SEQ ID NO: 19372 - protein, 122 aa, synthetic construct; identical to SEQ ID NO: 10922
  REGION 1..122: note = Description of Artificial Sequence: Synthetic polypeptide
  REGION 1..122: note = VH of XENP018407

SEQ ID NO: 19373 - protein, 5 aa, synthetic construct
  REGION 1..5: note = Description of Artificial Sequence: Synthetic peptide
  REGION 1..5: note = XENP018407 vhCDR1
NYWMN

SEQ ID NO: 19374 - protein, 19 aa, synthetic construct
  REGION 1..19: note = Description of Artificial Sequence: Synthetic peptide
  REGION 1..19: note = XENP018407 vhCDR2
EIRLKSNNYATHYAEPVKG

SEQ ID NO: 19375 - protein, 11 aa, synthetic construct
  REGION 1..11: note = Description of Artificial Sequence: Synthetic peptide
  REGION 1..11: note = XENP018407 vhCDR3
YYGNYGGYFDV

SEQ ID NO: 19376 - protein, 214 aa, synthetic construct
  REGION 1..214: note = Description of Artificial Sequence: Synthetic polypeptide
  REGION 1..214: note = XENP018407 1G6_H1_L1.60_IgG1_PVA_/S267K Light Chain
SIVMTQSPATLSVSPGERATLSCRASQSVSNDVAWYQQKPGQSPRLLINAASHRYTGVPDRFTGSGYGTEFTLTISSLQSEDFAVYFCQQDYSSPRTFGGGTKVEIKRTVAAPSVFIFPPSDEQLKSGTASVVCLLNNFYPREAKVQWKVDNALQSGNSQESVTEQDSKDSTYSLSSTLTLSKADYEKHKVYACEVTHQGLSSPVTKSFNRGEC

SEQ ID NO: 19377 - protein, 107 aa, synthetic construct; identical to SEQ ID NO: 13710
  REGION 1..107: note = Description of Artificial Sequence: Synthetic polypeptide
  REGION 1..107: note = VL of XENP018407

SEQ ID NO: 19378 - protein, 11 aa, synthetic construct
  REGION 1..11: note = Description of Artificial Sequence: Synthetic peptide
  REGION 1..11: note = XENP018407 vlCDR1
RASQSVSNDVA

SEQ ID NO: 19379 - protein, 7 aa, synthetic construct
  REGION 1..7: note = Description of Artificial Sequence: Synthetic peptide
  REGION 1..7: note = XENP018407 vlCDR2
AASHRYT

SEQ ID NO: 19380 - protein, 9 aa, synthetic construct
  REGION 1..9: note = Description of Artificial Sequence: Synthetic peptide
  REGION 1..9: note = XENP018407 vlCDR3
QQDYSSPRT

SEQ ID NO: 19381 - protein, 451 aa, synthetic construct; identical to SEQ ID NO: 16221
  REGION 1..451: note = Description of Artificial Sequence: Synthetic polypeptide
  REGION 1..451: note = XENP018408 1G6_H1_L1.61_IgG1_PVA_/S267K Heavy Chain

SEQ ID NO: 19382 - protein, 122 aa, synthetic construct; identical to SEQ ID NO: 10922
  REGION 1..122: note = Description of Artificial Sequence: Synthetic polypeptide
  REGION 1..122: note = VH of XENP018408

SEQ ID NO: 19383 - protein, 5 aa, synthetic construct
  REGION 1..5: note = Description of Artificial Sequence: Synthetic peptide
  REGION 1..5: note = XENP018408 vhCDR1
NYWMN

SEQ ID NO: 19384 - protein, 19 aa, synthetic construct
  REGION 1..19: note = Description of Artificial Sequence: Synthetic peptide
  REGION 1..19: note = XENP018408 vhCDR2
EIRLKSNNYATHYAEPVKG

SEQ ID NO: 19385 - protein, 11 aa, synthetic construct
  REGION 1..11: note = Description of Artificial Sequence: Synthetic peptide
  REGION 1..11: note = XENP018408 vhCDR3
YYGNYGGYFDV

SEQ ID NO: 19386 - protein, 214 aa, synthetic construct
  REGION 1..214: note = Description of Artificial Sequence: Synthetic polypeptide
  REGION 1..214: note = XENP018408 1G6_H1_L1.61_IgG1_PVA_/S267K Light Chain
SIVMTQSPATLSVSPGERATLSCRASQSVSNDVAWYQQKPGQSPRLLINQASHRYTGVPDRFTGSGYGTEFTLTISSLQSEDFAVYFCQQDYSSPRTFGGGTKVEIKRTVAAPSVFIFPPSDEQLKSGTASVVCLLNNFYPREAKVQWKVDNALQSGNSQESVTEQDSKDSTYSLSSTLTLSKADYEKHKVYACEVTHQGLSSPVTKSFNRGEC

SEQ ID NO: 19387 - protein, 107 aa, synthetic construct; identical to SEQ ID NO: 13719
  REGION 1..107: note = Description of Artificial Sequence: Synthetic polypeptide
  REGION 1..107: note = VL of XENP018408

SEQ ID NO: 19388 - protein, 11 aa, synthetic construct
  REGION 1..11: note = Description of Artificial Sequence: Synthetic peptide
  REGION 1..11: note = XENP018408 vlCDR1
RASQSVSNDVA

SEQ ID NO: 19389 - protein, 7 aa, synthetic construct
  REGION 1..7: note = Description of Artificial Sequence: Synthetic peptide
  REGION 1..7: note = XENP018408 vlCDR2
QASHRYT

SEQ ID NO: 19390 - protein, 9 aa, synthetic construct
  REGION 1..9: note = Description of Artificial Sequence: Synthetic peptide
  REGION 1..9: note = XENP018408 vlCDR3
QQDYSSPRT

SEQ ID NO: 19391 - protein, 451 aa, synthetic construct; identical to SEQ ID NO: 16221
  REGION 1..451: note = Description of Artificial Sequence: Synthetic polypeptide
  REGION 1..451: note = XENP018409 1G6_H1_L1.62_IgG1_PVA_/S267K Heavy Chain

SEQ ID NO: 19392 - protein, 122 aa, synthetic construct; identical to SEQ ID NO: 10922
  REGION 1..122: note = Description of Artificial Sequence: Synthetic polypeptide
  REGION 1..122: note = VH of XENP018409

SEQ ID NO: 19393 - protein, 5 aa, synthetic construct
  REGION 1..5: note = Description of Artificial Sequence: Synthetic peptide
  REGION 1..5: note = XENP018409 vhCDR1
NYWMN

SEQ ID NO: 19394 - protein, 19 aa, synthetic construct
  REGION 1..19: note = Description of Artificial Sequence: Synthetic peptide
  REGION 1..19: note = XENP018409 vhCDR2
EIRLKSNNYATHYAEPVKG

SEQ ID NO: 19395 - protein, 11 aa, synthetic construct
  REGION 1..11: note = Description of Artificial Sequence: Synthetic peptide
  REGION 1..11: note = XENP018409 vhCDR3
YYGNYGGYFDV

SEQ ID NO: 19396 - protein, 214 aa, synthetic construct
  REGION 1..214: note = Description of Artificial Sequence: Synthetic polypeptide
  REGION 1..214: note = XENP018409 1G6_H1_L1.62_IgG1_PVA_/S267K Light Chain
SIVMTQSPATLSVSPGERATLSCRASQSVSNDVAWYQQKPGQSPRLLINDASHRYTGVPDRFTGSGYGTEFTLTISSLQSEDFAVYFCQQDYSSPRTFGGGTKVEIKRTVAAPSVFIFPPSDEQLKSGTASVVCLLNNFYPREAKVQWKVDNALQSGNSQESVTEQDSKDSTYSLSSTLTLSKADYEKHKVYACEVTHQGLSSPVTKSFNRGEC

SEQ ID NO: 19397 - protein, 107 aa, synthetic construct; identical to SEQ ID NO: 13728
  REGION 1..107: note = Description of Artificial Sequence: Synthetic polypeptide
  REGION 1..107: note = VL of XENP018409

SEQ ID NO: 19398 - protein, 11 aa, synthetic construct
  REGION 1..11: note = Description of Artificial Sequence: Synthetic peptide
  REGION 1..11: note = XENP018409 vlCDR1
RASQSVSNDVA

SEQ ID NO: 19399 - protein, 7 aa, synthetic construct
  REGION 1..7: note = Description of Artificial Sequence: Synthetic peptide
  REGION 1..7: note = XENP018409 vlCDR2
DASHRYT

SEQ ID NO: 19400 - protein, 9 aa, synthetic construct
  REGION 1..9: note = Description of Artificial Sequence: Synthetic peptide
  REGION 1..9: note = XENP018409 vlCDR3
QQDYSSPRT

SEQ ID NO: 19401 - protein, 451 aa, synthetic construct; identical to SEQ ID NO: 16221
  REGION 1..451: note = Description of Artificial Sequence: Synthetic polypeptide
  REGION 1..451: note = XENP018410 1G6_H1_L1.63_IgG1_PVA_/S267K Heavy Chain

SEQ ID NO: 19402 - protein, 122 aa, synthetic construct; identical to SEQ ID NO: 10922
  REGION 1..122: note = Description of Artificial Sequence: Synthetic polypeptide
  REGION 1..122: note = VH of XENP018410

SEQ ID NO: 19403 - protein, 5 aa, synthetic construct
  REGION 1..5: note = Description of Artificial Sequence: Synthetic peptide
  REGION 1..5: note = XENP018410 vhCDR1
NYWMN

SEQ ID NO: 19404 - protein, 19 aa, synthetic construct
  REGION 1..19: note = Description of Artificial Sequence: Synthetic peptide
  REGION 1..19: note = XENP018410 vhCDR2
EIRLKSNNYATHYAEPVKG

SEQ ID NO: 19405 - protein, 11 aa, synthetic construct
  REGION 1..11: note = Description of Artificial Sequence: Synthetic peptide
  REGION 1..11: note = XENP018410 vhCDR3
YYGNYGGYFDV

SEQ ID NO: 19406 - protein, 214 aa, synthetic construct
  REGION 1..214: note = Description of Artificial Sequence: Synthetic polypeptide
  REGION 1..214: note = XENP018410 1G6_H1_L1.63_IgG1_PVA_/S267K Light Chain
SIVMTQSPATLSVSPGERATLSCRASQSVSNDVAWYQQKPGQSPRLLINKASHRYTGVPDRFTGSGYGTEFTLTISSLQSEDFAVYFCQQDYSSPRTFGGGTKVEIKRTVAAPSVFIFPPSDEQLKSGTASVVCLLNNFYPREAKVQWKVDNALQSGNSQESVTEQDSKDSTYSLSSTLTLSKADYEKHKVYACEVTHQGLSSPVTKSFNRGEC

SEQ ID NO: 19407 - protein, 107 aa, synthetic construct; identical to SEQ ID NO: 13737
  REGION 1..107: note = Description of Artificial Sequence: Synthetic polypeptide
  REGION 1..107: note = VL of XENP018410

SEQ ID NO: 19408 - protein, 11 aa, synthetic construct
  REGION 1..11: note = Description of Artificial Sequence: Synthetic peptide
  REGION 1..11: note = XENP018410 vlCDR1
RASQSVSNDVA

SEQ ID NO: 19409 - protein, 7 aa, synthetic construct
  REGION 1..7: note = Description of Artificial Sequence: Synthetic peptide
  REGION 1..7: note = XENP018410 vlCDR2
KASHRYT

SEQ ID NO: 19410 - protein, 9 aa, synthetic construct
  REGION 1..9: note = Description of Artificial Sequence: Synthetic peptide
  REGION 1..9: note = XENP018410 vlCDR3
QQDYSSPRT

SEQ ID NO: 19411 - protein, 451 aa, synthetic construct; identical to SEQ ID NO: 16221
  REGION 1..451: note = Description of Artificial Sequence: Synthetic polypeptide
  REGION 1..451: note = XENP018411 1G6_H1_L1.64_IgG1_PVA_/S267K Heavy Chain

SEQ ID NO: 19412 - protein, 122 aa, synthetic construct; identical to SEQ ID NO: 10922
  REGION 1..122: note = Description of Artificial Sequence: Synthetic polypeptide
  REGION 1..122: note = VH of XENP018411

SEQ ID NO: 19413 - protein, 5 aa, synthetic construct
  REGION 1..5: note = Description of Artificial Sequence: Synthetic peptide
  REGION 1..5: note = XENP018411 vhCDR1
NYWMN

SEQ ID NO: 19414 - protein, 19 aa, synthetic construct
  REGION 1..19: note = Description of Artificial Sequence: Synthetic peptide
  REGION 1..19: note = XENP018411 vhCDR2
EIRLKSNNYATHYAEPVKG

SEQ ID NO: 19415 - protein, 11 aa, synthetic construct
  REGION 1..11: note = Description of Artificial Sequence: Synthetic peptide
  REGION 1..11: note = XENP018411 vhCDR3
YYGNYGGYFDV

SEQ ID NO: 19416 - protein, 214 aa, synthetic construct
  REGION 1..214: note = Description of Artificial Sequence: Synthetic polypeptide
  REGION 1..214: note = XENP018411 1G6_H1_L1.64_IgG1_PVA_/S267K Light Chain
SIVMTQSPATLSVSPGERATLSCRASQSVSNDVAWYQQKPGQSPRLLINYASYRYTGVPDRFTGSGYGTEFTLTISSLQSEDFAVYFCQQDYSSPRTFGGGTKVEIKRTVAAPSVFIFPPSDEQLKSGTASVVCLLNNFYPREAKVQWKVDNALQSGNSQESVTEQDSKDSTYSLSSTLTLSKADYEKHKVYACEVTHQGLSSPVTKSFNRGEC

SEQ ID NO: 19417 - protein, 107 aa, synthetic construct; identical to SEQ ID NO: 13746
  REGION 1..107: note = Description of Artificial Sequence: Synthetic polypeptide
  REGION 1..107: note = VL of XENP018411

SEQ ID NO: 19418 - protein, 11 aa, synthetic construct
  REGION 1..11: note = Description of Artificial Sequence: Synthetic peptide
  REGION 1..11: note = XENP018411 vlCDR1
RASQSVSNDVA

SEQ ID NO: 19419 - protein, 7 aa, synthetic construct
  REGION 1..7: note = Description of Artificial Sequence: Synthetic peptide
  REGION 1..7: note = XENP018411 vlCDR2
YASYRYT

SEQ ID NO: 19420 - protein, 9 aa, synthetic construct
  REGION 1..9: note = Description of Artificial Sequence: Synthetic peptide
  REGION 1..9: note = XENP018411 vlCDR3
QQDYSSPRT

SEQ ID NO: 19421 - protein, 451 aa, synthetic construct; identical to SEQ ID NO: 16221
  REGION 1..451: note = Description of Artificial Sequence: Synthetic polypeptide
  REGION 1..451: note = XENP018412 1G6_H1_L1.65_IgG1_PVA_/S267K Heavy Chain

SEQ ID NO: 19422 - protein, 122 aa, synthetic construct; identical to SEQ ID NO: 10922
  REGION 1..122: note = Description of Artificial Sequence: Synthetic polypeptide
  REGION 1..122: note = VH of XENP018412

SEQ ID NO: 19423 - protein, 5 aa, synthetic construct
  REGION 1..5: note = Description of Artificial Sequence: Synthetic peptide
  REGION 1..5: note = XENP018412 vhCDR1
NYWMN

SEQ ID NO: 19424 - protein, 19 aa, synthetic construct
  REGION 1..19: note = Description of Artificial Sequence: Synthetic peptide
  REGION 1..19: note = XENP018412 vhCDR2
EIRLKSNNYATHYAEPVKG

SEQ ID NO: 19425 - protein, 11 aa, synthetic construct
  REGION 1..11: note = Description of Artificial Sequence: Synthetic peptide
  REGION 1..11: note = XENP018412 vhCDR3
YYGNYGGYFDV

SEQ ID NO: 19426 - protein, 214 aa, synthetic construct
  REGION 1..214: note = Description of Artificial Sequence: Synthetic polypeptide
  REGION 1..214: note = XENP018412 1G6_H1_L1.65_IgG1_PVA_/S267K Light Chain
SIVMTQSPATLSVSPGERATLSCRASQSVSNDVAWYQQKPGQSPRLLINYASQRYTGVPDRFTGSGYGTEFTLTISSLQSEDFAVYFCQQDYSSPRTFGGGTKVEIKRTVAAPSVFIFPPSDEQLKSGTASVVCLLNNFYPREAKVQWKVDNALQSGNSQESVTEQDSKDSTYSLSSTLTLSKADYEKHKVYACEVTHQGLSSPVTKSFNRGEC

SEQ ID NO: 19427 - protein, 107 aa, synthetic construct; identical to SEQ ID NO: 13755
  REGION 1..107: note = Description of Artificial Sequence: Synthetic polypeptide
  REGION 1..107: note = VL of XENP018412

SEQ ID NO: 19428 - protein, 11 aa, synthetic construct
  REGION 1..11: note = Description of Artificial Sequence: Synthetic peptide
  REGION 1..11: note = XENP018412 vlCDR1
RASQSVSNDVA

SEQ ID NO: 19429 - protein, 7 aa, synthetic construct
  REGION 1..7: note = Description of Artificial Sequence: Synthetic peptide
  REGION 1..7: note = XENP018412 vlCDR2
YASQRYT

SEQ ID NO: 19430 - protein, 9 aa, synthetic construct
  REGION 1..9: note = Description of Artificial Sequence: Synthetic peptide
  REGION 1..9: note = XENP018412 vlCDR3
QQDYSSPRT

SEQ ID NO: 19431 - protein, 451 aa, synthetic construct; identical to SEQ ID NO: 16221
  REGION 1..451: note = Description of Artificial Sequence: Synthetic polypeptide
  REGION 1..451: note = XENP018413 1G6_H1_L1.66_IgG1_PVA_/S267K Heavy Chain

SEQ ID NO: 19432 - protein, 122 aa, synthetic construct; identical to SEQ ID NO: 10922
  REGION 1..122: note = Description of Artificial Sequence: Synthetic polypeptide
  REGION 1..122: note = VH of XENP018413

SEQ ID NO: 19433 - protein, 5 aa, synthetic construct
  REGION 1..5: note = Description of Artificial Sequence: Synthetic peptide
  REGION 1..5: note = XENP018413 vhCDR1
NYWMN

SEQ ID NO: 19434 - protein, 19 aa, synthetic construct
  REGION 1..19: note = Description of Artificial Sequence: Synthetic peptide
  REGION 1..19: note = XENP018413 vhCDR2
EIRLKSNNYATHYAEPVKG

SEQ ID NO: 19435 - protein, 11 aa, synthetic construct
  REGION 1..11: note = Description of Artificial Sequence: Synthetic peptide
  REGION 1..11: note = XENP018413 vhCDR3
YYGNYGGYFDV

SEQ ID NO: 19436 - protein, 214 aa, synthetic construct
  REGION 1..214: note = Description of Artificial Sequence: Synthetic polypeptide
  REGION 1..214: note = XENP018413 1G6_H1_L1.66_IgG1_PVA_/S267K Light Chain
SIVMTQSPATLSVSPGERATLSCRASQSVSNDVAWYQQKPGQSPRLLINYASDRYTGVPDRFTGSGYGTEFTLTISSLQSEDFAVYFCQQDYSSPRTFGGGTKVEIKRTVAAPSVFIFPPSDEQLKSGTASVVCLLNNFYPREAKVQWKVDNALQSGNSQESVTEQDSKDSTYSLSSTLTLSKADYEKHKVYACEVTHQGLSSPVTKSFNRGEC

SEQ ID NO: 19437 - protein, 107 aa, synthetic construct; identical to SEQ ID NO: 13764
  REGION 1..107: note = Description of Artificial Sequence: Synthetic polypeptide
  REGION 1..107: note = VL of XENP018413

SEQ ID NO: 19438 - protein, 11 aa, synthetic construct
  REGION 1..11: note = Description of Artificial Sequence: Synthetic peptide
  REGION 1..11: note = XENP018413 vlCDR1
RASQSVSNDVA

SEQ ID NO: 19439 - protein, 7 aa, synthetic construct
  REGION 1..7: note = Description of Artificial Sequence: Synthetic peptide
  REGION 1..7: note = XENP018413 vlCDR2
YASDRYT

SEQ ID NO: 19440 - protein, 9 aa, synthetic construct
  REGION 1..9: note = Description of Artificial Sequence: Synthetic peptide
  REGION 1..9: note = XENP018413 vlCDR3
QQDYSSPRT

SEQ ID NO: 19441 - protein, 451 aa, synthetic construct; identical to SEQ ID NO: 16221
  REGION 1..451: note = Description of Artificial Sequence: Synthetic polypeptide
  REGION 1..451: note = XENP018414 1G6_H1_L1.67_IgG1_PVA_/S267K Heavy Chain

SEQ ID NO: 19442 - protein, 122 aa, synthetic construct; identical to SEQ ID NO: 10922
  REGION 1..122: note = Description of Artificial Sequence: Synthetic polypeptide
  REGION 1..122: note = VH of XENP018414

SEQ ID NO: 19443 - protein, 5 aa, synthetic construct
  REGION 1..5: note = Description of Artificial Sequence: Synthetic peptide
  REGION 1..5: note = XENP018414 vhCDR1
NYWMN

SEQ ID NO: 19444 - protein, 19 aa, synthetic construct
  REGION 1..19: note = Description of Artificial Sequence: Synthetic peptide
  REGION 1..19: note = XENP018414 vhCDR2
EIRLKSNNYATHYAEPVKG

SEQ ID NO: 19445 - protein, 11 aa, synthetic construct
  REGION 1..11: note = Description of Artificial Sequence: Synthetic peptide
  REGION 1..11: note = XENP018414 vhCDR3
YYGNYGGYFDV

SEQ ID NO: 19446 - protein, 214 aa, synthetic construct
  REGION 1..214: note = Description of Artificial Sequence: Synthetic polypeptide
  REGION 1..214: note = XENP018414 1G6_H1_L1.67_IgG1_PVA_/S267K Light Chain
SIVMTQSPATLSVSPGERATLSCRASQSVSNDVAWYQQKPGQSPRLLINYASWRYTGVPDRFTGSGYGTEFTLTISSLQSEDFAVYFCQQDYSSPRTFGGGTKVEIKRTVAAPSVFIFPPSDEQLKSGTASVVCLLNNFYPREAKVQWKVDNALQSGNSQESVTEQDSKDSTYSLSSTLTLSKADYEKHKVYACEVTHQGLSSPVTKSFNRGEC

SEQ ID NO: 19447 - protein, 107 aa, synthetic construct; identical to SEQ ID NO: 13773
  REGION 1..107: note = Description of Artificial Sequence: Synthetic polypeptide
  REGION 1..107: note = VL of XENP018414

SEQ ID NO: 19448 - protein, 11 aa, synthetic construct
  REGION 1..11: note = Description of Artificial Sequence: Synthetic peptide
  REGION 1..11: note = XENP018414 vlCDR1
RASQSVSNDVA

SEQ ID NO: 19449 - protein, 7 aa, synthetic construct
  REGION 1..7: note = Description of Artificial Sequence: Synthetic peptide
  REGION 1..7: note = XENP018414 vlCDR2
YASWRYT

SEQ ID NO: 19450 - protein, 9 aa, synthetic construct
  REGION 1..9: note = Description of Artificial Sequence: Synthetic peptide
  REGION 1..9: note = XENP018414 vlCDR3
QQDYSSPRT

SEQ ID NO: 19451 - protein, 451 aa, synthetic construct; identical to SEQ ID NO: 16221
  REGION 1..451: note = Description of Artificial Sequence: Synthetic polypeptide
  REGION 1..451: note = XENP018415 1G6_H1_L1.68_IgG1_PVA_/S267K Heavy Chain

SEQ ID NO: 19452 - protein, 122 aa, synthetic construct; identical to SEQ ID NO: 10922
  REGION 1..122: note = Description of Artificial Sequence: Synthetic polypeptide
  REGION 1..122: note = VH of XENP018415

SEQ ID NO: 19453 - protein, 5 aa, synthetic construct
  REGION 1..5: note = Description of Artificial Sequence: Synthetic peptide
  REGION 1..5: note = XENP018415 vhCDR1
NYWMN

SEQ ID NO: 19454 - protein, 19 aa, synthetic construct
  REGION 1..19: note = Description of Artificial Sequence: Synthetic peptide
  REGION 1..19: note = XENP018415 vhCDR2
EIRLKSNNYATHYAEPVKG

SEQ ID NO: 19455 - protein, 11 aa, synthetic construct
  REGION 1..11: note = Description of Artificial Sequence: Synthetic peptide
  REGION 1..11: note = XENP018415 vhCDR3
YYGNYGGYFDV

SEQ ID NO: 19456 - protein, 214 aa, synthetic construct
  REGION 1..214: note = Description of Artificial Sequence: Synthetic polypeptide
  REGION 1..214: note = XENP018415 1G6_H1_L1.68_IgG1_PVA_/S267K Light Chain
SIVMTQSPATLSVSPGERATLSCRASQSVSNDVAWYQQKPGQSPRLLINYASARYTGVPDRFTGSGYGTEFTLTISSLQSEDFAVYFCQQDYSSPRTFGGGTKVEIKRTVAAPSVFIFPPSDEQLKSGTASVVCLLNNFYPREAKVQWKVDNALQSGNSQESVTEQDSKDSTYSLSSTLTLSKADYEKHKVYACEVTHQGLSSPVTKSFNRGEC

SEQ ID NO: 19457 - protein, 107 aa, synthetic construct; identical to SEQ ID NO: 13782
  REGION 1..107: note = Description of Artificial Sequence: Synthetic polypeptide
  REGION 1..107: note = VL of XENP018415

SEQ ID NO: 19458 - protein, 11 aa, synthetic construct
  REGION 1..11: note = Description of Artificial Sequence: Synthetic peptide
  REGION 1..11: note = XENP018415 vlCDR1
RASQSVSNDVA

SEQ ID NO: 19459 - protein, 7 aa, synthetic construct
  REGION 1..7: note = Description of Artificial Sequence: Synthetic peptide
  REGION 1..7: note = XENP018415 vlCDR2
YASARYT

SEQ ID NO: 19460 - protein, 9 aa, synthetic construct
  REGION 1..9: note = Description of Artificial Sequence: Synthetic peptide
  REGION 1..9: note = XENP018415 vlCDR3
QQDYSSPRT

SEQ ID NO: 19461 - protein, 451 aa, synthetic construct; identical to SEQ ID NO: 16221
  REGION 1..451: note = Description of Artificial Sequence: Synthetic polypeptide
  REGION 1..451: note = XENP018416 1G6_H1_L1.69_IgG1_PVA_/S267K Heavy Chain

SEQ ID NO: 19462 - protein, 122 aa, synthetic construct; identical to SEQ ID NO: 10922
  REGION 1..122: note = Description of Artificial Sequence: Synthetic polypeptide
  REGION 1..122: note = VH of XENP018416

SEQ ID NO: 19463 - protein, 5 aa, synthetic construct
  REGION 1..5: note = Description of Artificial Sequence: Synthetic peptide
  REGION 1..5: note = XENP018416 vhCDR1
NYWMN

SEQ ID NO: 19464 - protein, 19 aa, synthetic construct
  REGION 1..19: note = Description of Artificial Sequence: Synthetic peptide
  REGION 1..19: note = XENP018416 vhCDR2
EIRLKSNNYATHYAEPVKG

SEQ ID NO: 19465 - protein, 11 aa, synthetic construct
  REGION 1..11: note = Description of Artificial Sequence: Synthetic peptide
  REGION 1..11: note = XENP018416 vhCDR3
YYGNYGGYFDV

SEQ ID NO: 19466 - protein, 214 aa, synthetic construct
  REGION 1..214: note = Description of Artificial Sequence: Synthetic polypeptide
  REGION 1..214: note = XENP018416 1G6_H1_L1.69_IgG1_PVA_/S267K Light Chain
SIVMTQSPATLSVSPGERATLSCRASQSVSNDVAWYQQKPGQSPRLLINYASTRYTGVPDRFTGSGYGTEFTLTISSLQSEDFAVYFCQQDYSSPRTFGGGTKVEIKRTVAAPSVFIFPPSDEQLKSGTASVVCLLNNFYPREAKVQWKVDNALQSGNSQESVTEQDSKDSTYSLSSTLTLSKADYEKHKVYACEVTHQGLSSPVTKSFNRGEC

SEQ ID NO: 19467 - protein, 107 aa, synthetic construct; identical to SEQ ID NO: 13791
  REGION 1..107: note = Description of Artificial Sequence: Synthetic polypeptide
  REGION 1..107: note = VL of XENP018416

SEQ ID NO: 19468 - protein, 11 aa, synthetic construct
  REGION 1..11: note = Description of Artificial Sequence: Synthetic peptide
  REGION 1..11: note = XENP018416 vlCDR1
RASQSVSNDVA

SEQ ID NO: 19469 - protein, 7 aa, synthetic construct
  REGION 1..7: note = Description of Artificial Sequence: Synthetic peptide
  REGION 1..7: note = XENP018416 vlCDR2
YASTRYT

SEQ ID NO: 19470 - protein, 9 aa, synthetic construct
  REGION 1..9: note = Description of Artificial Sequence: Synthetic peptide
  REGION 1..9: note = XENP018416 vlCDR3
QQDYSSPRT

SEQ ID NO: 19471 - protein, 451 aa, synthetic construct; identical to SEQ ID NO: 16221
  REGION 1..451: note = Description of Artificial Sequence: Synthetic polypeptide
  REGION 1..451: note = XENP018417 1G6_H1_L1.70_IgG1_PVA_/S267K Heavy Chain

SEQ ID NO: 19472 - protein, 122 aa, synthetic construct; identical to SEQ ID NO: 10922
  REGION 1..122: note = Description of Artificial Sequence: Synthetic polypeptide
  REGION 1..122: note = VH of XENP018417

SEQ ID NO: 19473 - protein, 5 aa, synthetic construct
  REGION 1..5: note = Description of Artificial Sequence: Synthetic peptide
  REGION 1..5: note = XENP018417 vhCDR1
NYWMN

SEQ ID NO: 19474 - protein, 19 aa, synthetic construct
  REGION 1..19: note = Description of Artificial Sequence: Synthetic peptide
  REGION 1..19: note = XENP018417 vhCDR2
EIRLKSNNYATHYAEPVKG

SEQ ID NO: 19475 - protein, 11 aa, synthetic construct
  REGION 1..11: note = Description of Artificial Sequence: Synthetic peptide
  REGION 1..11: note = XENP018417 vhCDR3
YYGNYGGYFDV

SEQ ID NO: 19476 - protein, 214 aa, synthetic construct
  REGION 1..214: note = Description of Artificial Sequence: Synthetic polypeptide
  REGION 1..214: note = XENP018417 1G6_H1_L1.70_IgG1_PVA_/S267K Light Chain
SIVMTQSPATLSVSPGERATLSCRASQSVSNDVAWYQQKPGQSPRLLINYASKRYTGVPDRFTGSGYGTEFTLTISSLQSEDFAVYFCQQDYSSPRTFGGGTKVEIKRTVAAPSVFIFPPSDEQLKSGTASVVCLLNNFYPREAKVQWKVDNALQSGNSQESVTEQDSKDSTYSLSSTLTLSKADYEKHKVYACEVTHQGLSSPVTKSFNRGEC

SEQ ID NO: 19477 - protein, 107 aa, synthetic construct; identical to SEQ ID NO: 13800
  REGION 1..107: note = Description of Artificial Sequence: Synthetic polypeptide
  REGION 1..107: note = VL of XENP018417

SEQ ID NO: 19478 - protein, 11 aa, synthetic construct
  REGION 1..11: note = Description of Artificial Sequence: Synthetic peptide
  REGION 1..11: note = XENP018417 vlCDR1
RASQSVSNDVA

SEQ ID NO: 19479 - protein, 7 aa, synthetic construct
  REGION 1..7: note = Description of Artificial Sequence: Synthetic peptide
  REGION 1..7: note = XENP018417 vlCDR2
YASKRYT

SEQ ID NO: 19480 - protein, 9 aa, synthetic construct
  REGION 1..9: note = Description of Artificial Sequence: Synthetic peptide
  REGION 1..9: note = XENP018417 vlCDR3
QQDYSSPRT

SEQ ID NO: 19481 - protein, 451 aa, synthetic construct; identical to SEQ ID NO: 16221
  REGION 1..451: note = Description of Artificial Sequence: Synthetic polypeptide
  REGION 1..451: note = XENP018418 1G6_H1_L1.71_IgG1_PVA_/S267K Heavy Chain

SEQ ID NO: 19482 - protein, 122 aa, synthetic construct; identical to SEQ ID NO: 10922
  REGION 1..122: note = Description of Artificial Sequence: Synthetic polypeptide
  REGION 1..122: note = VH of XENP018418

SEQ ID NO: 19483 - protein, 5 aa, synthetic construct
  REGION 1..5: note = Description of Artificial Sequence: Synthetic peptide
  REGION 1..5: note = XENP018418 vhCDR1
NYWMN

SEQ ID NO: 19484 - protein, 19 aa, synthetic construct
  REGION 1..19: note = Description of Artificial Sequence: Synthetic peptide
  REGION 1..19: note = XENP018418 vhCDR2
EIRLKSNNYATHYAEPVKG

SEQ ID NO: 19485 - protein, 11 aa, synthetic construct
  REGION 1..11: note = Description of Artificial Sequence: Synthetic peptide
  REGION 1..11: note = XENP018418 vhCDR3
YYGNYGGYFDV

SEQ ID NO: 19486 - protein, 214 aa, synthetic construct
  REGION 1..214: note = Description of Artificial Sequence: Synthetic polypeptide
  REGION 1..214: note = XENP018418 1G6_H1_L1.71_IgG1_PVA_/S267K Light Chain
SIVMTQSPATLSVSPGERATLSCRASQSVSNDVAWYQQKPGQSPRLLINYASGRYTGVPDRFTGSGYGTEFTLTISSLQSEDFAVYFCQQDYSSPRTFGGGTKVEIKRTVAAPSVFIFPPSDEQLKSGTASVVCLLNNFYPREAKVQWKVDNALQSGNSQESVTEQDSKDSTYSLSSTLTLSKADYEKHKVYACEVTHQGLSSPVTKSFNRGEC

SEQ ID NO: 19487 - protein, 107 aa, synthetic construct; identical to SEQ ID NO: 13809
  REGION 1..107: note = Description of Artificial Sequence: Synthetic polypeptide
  REGION 1..107: note = VL of XENP018418

SEQ ID NO: 19488 - protein, 11 aa, synthetic construct
  REGION 1..11: note = Description of Artificial Sequence: Synthetic peptide
  REGION 1..11: note = XENP018418 vlCDR1
RASQSVSNDVA

SEQ ID NO: 19489 - protein, 7 aa, synthetic construct
  REGION 1..7: note = Description of Artificial Sequence: Synthetic peptide
  REGION 1..7: note = XENP018418 vlCDR2
YASGRYT

SEQ ID NO: 19490 - protein, 9 aa, synthetic construct
  REGION 1..9: note = Description of Artificial Sequence: Synthetic peptide
  REGION 1..9: note = XENP018418 vlCDR3
QQDYSSPRT

SEQ ID NO: 19491 - protein, 451 aa, synthetic construct; identical to SEQ ID NO: 16221
  REGION 1..451: note = Description of Artificial Sequence: Synthetic polypeptide
  REGION 1..451: note = XENP018419 1G6_H1_L1.72_IgG1_PVA_/S267K Heavy Chain

SEQ ID NO: 19492 - protein, 122 aa, synthetic construct; identical to SEQ ID NO: 10922
  REGION 1..122: note = Description of Artificial Sequence: Synthetic polypeptide
  REGION 1..122: note = VH of XENP018419

SEQ ID NO: 19493 - protein, 5 aa, synthetic construct
  REGION 1..5: note = Description of Artificial Sequence: Synthetic peptide
  REGION 1..5: note = XENP018419 vhCDR1
NYWMN

SEQ ID NO: 19494 - protein, 19 aa, synthetic construct
  REGION 1..19: note = Description of Artificial Sequence: Synthetic peptide
  REGION 1..19: note = XENP018419 vhCDR2
EIRLKSNNYATHYAEPVKG

SEQ ID NO: 19495 - protein, 11 aa, synthetic construct
  REGION 1..11: note = Description of Artificial Sequence: Synthetic peptide
  REGION 1..11: note = XENP018419 vhCDR3
YYGNYGGYFDV

SEQ ID NO: 19496 - protein, 214 aa, synthetic construct
  REGION 1..214: note = Description of Artificial Sequence: Synthetic polypeptide
  REGION 1..214: note = XENP018419 1G6_H1_L1.72_IgG1_PVA_/S267K Light Chain
SIVMTQSPATLSVSPGERATLSCRASQSVSNDVAWYQQKPGQSPRLLINYASLRYTGVPDRFTGSGYGTEFTLTISSLQSEDFAVYFCQQDYSSPRTFGGGTKVEIKRTVAAPSVFIFPPSDEQLKSGTASVVCLLNNFYPREAKVQWKVDNALQSGNSQESVTEQDSKDSTYSLSSTLTLSKADYEKHKVYACEVTHQGLSSPVTKSFNRGEC

SEQ ID NO: 19497 - protein, 107 aa, synthetic construct; identical to SEQ ID NO: 13818
  REGION 1..107: note = Description of Artificial Sequence: Synthetic polypeptide
  REGION 1..107: note = VL of XENP018419

SEQ ID NO: 19498 - protein, 11 aa, synthetic construct
  REGION 1..11: note = Description of Artificial Sequence: Synthetic peptide
  REGION 1..11: note = XENP018419 vlCDR1
RASQSVSNDVA

SEQ ID NO: 19499 - protein, 7 aa, synthetic construct
  REGION 1..7: note = Description of Artificial Sequence: Synthetic peptide
  REGION 1..7: note = XENP018419 vlCDR2
YASLRYT

SEQ ID NO: 19500 - protein, 9 aa, synthetic construct
  REGION 1..9: note = Description of Artificial Sequence: Synthetic peptide
  REGION 1..9: note = XENP018419 vlCDR3
QQDYSSPRT

SEQ ID NO: 19501 - protein, 451 aa, synthetic construct; identical to SEQ ID NO: 16221
  REGION 1..451: note = Description of Artificial Sequence: Synthetic polypeptide
  REGION 1..451: note = XENP018420 1G6_H1_L1.73_IgG1_PVA_/S267K Heavy Chain

SEQ ID NO: 19502 - protein, 122 aa, synthetic construct; identical to SEQ ID NO: 10922
  REGION 1..122: note = Description of Artificial Sequence: Synthetic polypeptide
  REGION 1..122: note = VH of XENP018420

SEQ ID NO: 19503 - protein, 5 aa, synthetic construct
  REGION 1..5: note = Description of Artificial Sequence: Synthetic peptide
  REGION 1..5: note = XENP018420 vhCDR1
NYWMN

SEQ ID NO: 19504 - protein, 19 aa, synthetic construct
  REGION 1..19: note = Description of Artificial Sequence: Synthetic peptide
  REGION 1..19: note = XENP018420 vhCDR2
EIRLKSNNYATHYAEPVKG

SEQ ID NO: 19505 - protein, 11 aa, synthetic construct
  REGION 1..11: note = Description of Artificial Sequence: Synthetic peptide
  REGION 1..11: note = XENP018420 vhCDR3
YYGNYGGYFDV

SEQ ID NO: 19506 - protein, 214 aa, synthetic construct
  REGION 1..214: note = Description of Artificial Sequence: Synthetic polypeptide
  REGION 1..214: note = XENP018420 1G6_H1_L1.73_IgG1_PVA_/S267K Light Chain
SIVMTQSPATLSVSPGERATLSCRASQSVSNDVAWYQQKPGQSPRLLINYASHLYTGVPDRFTGSGYGTEFTLTISSLQSEDFAVYFCQQDYSSPRTFGGGTKVEIKRTVAAPSVFIFPPSDEQLKSGTASVVCLLNNFYPREAKVQWKVDNALQSGNSQESVTEQDSKDSTYSLSSTLTLSKADYEKHKVYACEVTHQGLSSPVTKSFNRGEC

SEQ ID NO: 19507 - protein, 107 aa, synthetic construct; identical to SEQ ID NO: 13827
  REGION 1..107: note = Description of Artificial Sequence: Synthetic polypeptide
  REGION 1..107: note = VL of XENP018420

SEQ ID NO: 19508 - protein, 11 aa, synthetic construct
  REGION 1..11: note = Description of Artificial Sequence: Synthetic peptide
  REGION 1..11: note = XENP018420 vlCDR1
RASQSVSNDVA

SEQ ID NO: 19509 - protein, 7 aa, synthetic construct
  REGION 1..7: note = Description of Artificial Sequence: Synthetic peptide
  REGION 1..7: note = XENP018420 vlCDR2
YASHLYT

SEQ ID NO: 19510 - protein, 9 aa, synthetic construct
  REGION 1..9: note = Description of Artificial Sequence: Synthetic peptide
  REGION 1..9: note = XENP018420 vlCDR3
QQDYSSPRT

SEQ ID NO: 19511 - protein, 451 aa, synthetic construct; identical to SEQ ID NO: 16221
  REGION 1..451: note = Description of Artificial Sequence: Synthetic polypeptide
  REGION 1..451: note = XENP018421 1G6_H1_L1.74_IgG1_PVA_/S267K Heavy Chain

SEQ ID NO: 19512 - protein, 122 aa, synthetic construct; identical to SEQ ID NO: 10922
  REGION 1..122: note = Description of Artificial Sequence: Synthetic polypeptide
  REGION 1..122: note = VH of XENP018421

SEQ ID NO: 19513 - protein, 5 aa, synthetic construct
  REGION 1..5: note = Description of Artificial Sequence: Synthetic peptide
  REGION 1..5: note = XENP018421 vhCDR1
NYWMN

SEQ ID NO: 19514 - protein, 19 aa, synthetic construct
  REGION 1..19: note = Description of Artificial Sequence: Synthetic peptide
  REGION 1..19: note = XENP018421 vhCDR2
EIRLKSNNYATHYAEPVKG

SEQ ID NO: 19515 - protein, 11 aa, synthetic construct
  REGION 1..11: note = Description of Artificial Sequence: Synthetic peptide
  REGION 1..11: note = XENP018421 vhCDR3
YYGNYGGYFDV

SEQ ID NO: 19516 - protein, 214 aa, synthetic construct
  REGION 1..214: note = Description of Artificial Sequence: Synthetic polypeptide
  REGION 1..214: note = XENP018421 1G6_H1_L1.74_IgG1_PVA_/S267K Light Chain
SIVMTQSPATLSVSPGERATLSCRASQSVSNDVAWYQQKPGQSPRLLINYASHWYTGVPDRFTGSGYGTEFTLTISSLQSEDFAVYFCQQDYSSPRTFGGGTKVEIKRTVAAPSVFIFPPSDEQLKSGTASVVCLLNNFYPREAKVQWKVDNALQSGNSQESVTEQDSKDSTYSLSSTLTLSKADYEKHKVYACEVTHQGLSSPVTKSFNRGEC

SEQ ID NO: 19517 - protein, 107 aa, synthetic construct; identical to SEQ ID NO: 13836
  REGION 1..107: note = Description of Artificial Sequence: Synthetic polypeptide
  REGION 1..107: note = VL of XENP018421

SEQ ID NO: 19518 - protein, 11 aa, synthetic construct
  REGION 1..11: note = Description of Artificial Sequence: Synthetic peptide
  REGION 1..11: note = XENP018421 vlCDR1
RASQSVSNDVA

SEQ ID NO: 19519 - protein, 7 aa, synthetic construct
  REGION 1..7: note = Description of Artificial Sequence: Synthetic peptide
  REGION 1..7: note = XENP018421 vlCDR2
YASHWYT

SEQ ID NO: 19520 - protein, 9 aa, synthetic construct
  REGION 1..9: note = Description of Artificial Sequence: Synthetic peptide
  REGION 1..9: note = XENP018421 vlCDR3
QQDYSSPRT

SEQ ID NO: 19521 - protein, 451 aa, synthetic construct; identical to SEQ ID NO: 16221
  REGION 1..451: note = Description of Artificial Sequence: Synthetic polypeptide
  REGION 1..451: note = XENP018422 1G6_H1_L1.75_IgG1_PVA_/S267K Heavy Chain

SEQ ID NO: 19522 - protein, 122 aa, synthetic construct; identical to SEQ ID NO: 10922
  REGION 1..122: note = Description of Artificial Sequence: Synthetic polypeptide
  REGION 1..122: note = VH of XENP018422

SEQ ID NO: 19523 - protein, 5 aa, synthetic construct
  REGION 1..5: note = Description of Artificial Sequence: Synthetic peptide
  REGION 1..5: note = XENP018422 vhCDR1
NYWMN

SEQ ID NO: 19524 - protein, 19 aa, synthetic construct
  REGION 1..19: note = Description of Artificial Sequence: Synthetic peptide
  REGION 1..19: note = XENP018422 vhCDR2
EIRLKSNNYATHYAEPVKG

SEQ ID NO: 19525 - protein, 11 aa, synthetic construct
  REGION 1..11: note = Description of Artificial Sequence: Synthetic peptide
  REGION 1..11: note = XENP018422 vhCDR3
YYGNYGGYFDV

SEQ ID NO: 19526 - protein, 214 aa, synthetic construct
  REGION 1..214: note = Description of Artificial Sequence: Synthetic polypeptide
  REGION 1..214: note = XENP018422 1G6_H1_L1.75_IgG1_PVA_/S267K Light Chain
SIVMTQSPATLSVSPGERATLSCRASQSVSNDVAWYQQKPGQSPRLLINYASHSYTGVPDRFTGSGYGTEFTLTISSLQSEDFAVYFCQQDYSSPRTFGGGTKVEIKRTVAAPSVFIFPPSDEQLKSGTASVVCLLNNFYPREAKVQWKVDNALQSGNSQESVTEQDSKDSTYSLSSTLTLSKADYEKHKVYACEVTHQGLSSPVTKSFNRGEC

SEQ ID NO: 19527 - protein, 107 aa, synthetic construct; identical to SEQ ID NO: 13845
  REGION 1..107: note = Description of Artificial Sequence: Synthetic polypeptide
  REGION 1..107: note = VL of XENP018422

SEQ ID NO: 19528 - protein, 11 aa, synthetic construct
  REGION 1..11: note = Description of Artificial Sequence: Synthetic peptide
  REGION 1..11: note = XENP018422 vlCDR1
RASQSVSNDVA

SEQ ID NO: 19529 - protein, 7 aa, synthetic construct
  REGION 1..7: note = Description of Artificial Sequence: Synthetic peptide
  REGION 1..7: note = XENP018422 vlCDR2
YASHSYT

SEQ ID NO: 19530 - protein, 9 aa, synthetic construct
  REGION 1..9: note = Description of Artificial Sequence: Synthetic peptide
  REGION 1..9: note = XENP018422 vlCDR3
QQDYSSPRT

SEQ ID NO: 19531 - protein, 451 aa, synthetic construct; identical to SEQ ID NO: 16221
  REGION 1..451: note = Description of Artificial Sequence: Synthetic polypeptide
  REGION 1..451: note = XENP018423 1G6_H1_L1.76_IgG1_PVA_/S267K Heavy Chain

SEQ ID NO: 19532 - protein, 122 aa, synthetic construct; identical to SEQ ID NO: 10922
  REGION 1..122: note = Description of Artificial Sequence: Synthetic polypeptide
  REGION 1..122: note = VH of XENP018423

SEQ ID NO: 19533 - protein, 5 aa, synthetic construct
  REGION 1..5: note = Description of Artificial Sequence: Synthetic peptide
  REGION 1..5: note = XENP018423 vhCDR1
NYWMN

SEQ ID NO: 19534 - protein, 19 aa, synthetic construct
  REGION 1..19: note = Description of Artificial Sequence: Synthetic peptide
  REGION 1..19: note = XENP018423 vhCDR2
EIRLKSNNYATHYAEPVKG

SEQ ID NO: 19535 - protein, 11 aa, synthetic construct
  REGION 1..11: note = Description of Artificial Sequence: Synthetic peptide
  REGION 1..11: note = XENP018423 vhCDR3
YYGNYGGYFDV

SEQ ID NO: 19536 - protein, 214 aa, synthetic construct
  REGION 1..214: note = Description of Artificial Sequence: Synthetic polypeptide
  REGION 1..214: note = XENP018423 1G6_H1_L1.76_IgG1_PVA_/S267K Light Chain
SIVMTQSPATLSVSPGERATLSCRASQSVSNDVAWYQQKPGQSPRLLINYASHRFTGVPDRFTGSGYGTEFTLTISSLQSEDFAVYFCQQDYSSPRTFGGGTKVEIKRTVAAPSVFIFPPSDEQLKSGTASVVCLLNNFYPREAKVQWKVDNALQSGNSQESVTEQDSKDSTYSLSSTLTLSKADYEKHKVYACEVTHQGLSSPVTKSFNRGEC

SEQ ID NO: 19537 - protein, 107 aa, synthetic construct; identical to SEQ ID NO: 13854
  REGION 1..107: note = Description of Artificial Sequence: Synthetic polypeptide
  REGION 1..107: note = VL of XENP018423

SEQ ID NO: 19538 - protein, 11 aa, synthetic construct
  REGION 1..11: note = Description of Artificial Sequence: Synthetic peptide
  REGION 1..11: note = XENP018423 vlCDR1
RASQSVSNDVA

SEQ ID NO: 19539 - protein, 7 aa, synthetic construct
  REGION 1..7: note = Description of Artificial Sequence: Synthetic peptide
  REGION 1..7: note = XENP018423 vlCDR2
YASHRFT

SEQ ID NO: 19540 - protein, 9 aa, synthetic construct
  REGION 1..9: note = Description of Artificial Sequence: Synthetic peptide
  REGION 1..9: note = XENP018423 vlCDR3
QQDYSSPRT

SEQ ID NO: 19541 - protein, 451 aa, synthetic construct; identical to SEQ ID NO: 16221
  REGION 1..451: note = Description of Artificial Sequence: Synthetic polypeptide
  REGION 1..451: note = XENP018424 1G6_H1_L1.77_IgG1_PVA_/S267K Heavy Chain

SEQ ID NO: 19542 - protein, 122 aa, synthetic construct; identical to SEQ ID NO: 10922
  REGION 1..122: note = Description of Artificial Sequence: Synthetic polypeptide
  REGION 1..122: note = VH of XENP018424

SEQ ID NO: 19543 - protein, 5 aa, synthetic construct
  REGION 1..5: note = Description of Artificial Sequence: Synthetic peptide
  REGION 1..5: note = XENP018424 vhCDR1
NYWMN

SEQ ID NO: 19544 - protein, 19 aa, synthetic construct
  REGION 1..19: note = Description of Artificial Sequence: Synthetic peptide
  REGION 1..19: note = XENP018424 vhCDR2
EIRLKSNNYATHYAEPVKG

SEQ ID NO: 19545 - protein, 11 aa, synthetic construct
  REGION 1..11: note = Description of Artificial Sequence: Synthetic peptide
  REGION 1..11: note = XENP018424 vhCDR3
YYGNYGGYFDV

SEQ ID NO: 19546 - protein, 214 aa, synthetic construct
  REGION 1..214: note = Description of Artificial Sequence: Synthetic polypeptide
  REGION 1..214: note = XENP018424 1G6_H1_L1.77_IgG1_PVA_/S267K Light Chain
SIVMTQSPATLSVSPGERATLSCRASQSVSNDVAWYQQKPGQSPRLLINYASHRHTGVPDRFTGSGYGTEFTLTISSLQSEDFAVYFCQQDYSSPRTFGGGTKVEIKRTVAAPSVFIFPPSDEQLKSGTASVVCLLNNFYPREAKVQWKVDNALQSGNSQESVTEQDSKDSTYSLSSTLTLSKADYEKHKVYACEVTHQGLSSPVTKSFNRGEC

SEQ ID NO: 19547 - protein, 107 aa, synthetic construct; identical to SEQ ID NO: 13863
  REGION 1..107: note = Description of Artificial Sequence: Synthetic polypeptide
  REGION 1..107: note = VL of XENP018424

SEQ ID NO: 19548 - protein, 11 aa, synthetic construct
  REGION 1..11: note = Description of Artificial Sequence: Synthetic peptide
  REGION 1..11: note = XENP018424 vlCDR1
RASQSVSNDVA

SEQ ID NO: 19549 - protein, 7 aa, synthetic construct
  REGION 1..7: note = Description of Artificial Sequence: Synthetic peptide
  REGION 1..7: note = XENP018424 vlCDR2
YASHRHT

SEQ ID NO: 19550 - protein, 9 aa, synthetic construct
  REGION 1..9: note = Description of Artificial Sequence: Synthetic peptide
  REGION 1..9: note = XENP018424 vlCDR3
QQDYSSPRT

SEQ ID NO: 19551 - protein, 451 aa, synthetic construct; identical to SEQ ID NO: 16221
  REGION 1..451: note = Description of Artificial Sequence: Synthetic polypeptide
  REGION 1..451: note = XENP018425 1G6_H1_L1.78_IgG1_PVA_/S267K Heavy Chain

SEQ ID NO: 19552 - protein, 122 aa, synthetic construct; identical to SEQ ID NO: 10922
  REGION 1..122: note = Description of Artificial Sequence: Synthetic polypeptide
  REGION 1..122: note = VH of XENP018425

SEQ ID NO: 19553 - protein, 5 aa, synthetic construct
  REGION 1..5: note = Description of Artificial Sequence: Synthetic peptide
  REGION 1..5: note = XENP018425 vhCDR1
NYWMN

SEQ ID NO: 19554 - protein, 19 aa, synthetic construct
  REGION 1..19: note = Description of Artificial Sequence: Synthetic peptide
  REGION 1..19: note = XENP018425 vhCDR2
EIRLKSNNYATHYAEPVKG

SEQ ID NO: 19555 - protein, 11 aa, synthetic construct
  REGION 1..11: note = Description of Artificial Sequence: Synthetic peptide
  REGION 1..11: note = XENP018425 vhCDR3
YYGNYGGYFDV

SEQ ID NO: 19556 - protein, 214 aa, synthetic construct
  REGION 1..214: note = Description of Artificial Sequence: Synthetic polypeptide
  REGION 1..214: note = XENP018425 1G6_H1_L1.78_IgG1_PVA_/S267K Light Chain
SIVMTQSPATLSVSPGERATLSCRASQSVSNDVAWYQQKPGQSPRLLINYASHRLTGVPDRFTGSGYGTEFTLTISSLQSEDFAVYFCQQDYSSPRTFGGGTKVEIKRTVAAPSVFIFPPSDEQLKSGTASVVCLLNNFYPREAKVQWKVDNALQSGNSQESVTEQDSKDSTYSLSSTLTLSKADYEKHKVYACEVTHQGLSSPVTKSFNRGEC

SEQ ID NO: 19557 - protein, 107 aa, synthetic construct; identical to SEQ ID NO: 13872
  REGION 1..107: note = Description of Artificial Sequence: Synthetic polypeptide
  REGION 1..107: note = VL of XENP018425

SEQ ID NO: 19558 - protein, 11 aa, synthetic construct
  REGION 1..11: note = Description of Artificial Sequence: Synthetic peptide
  REGION 1..11: note = XENP018425 vlCDR1
RASQSVSNDVA

SEQ ID NO: 19559 - protein, 7 aa, synthetic construct
  REGION 1..7: note = Description of Artificial Sequence: Synthetic peptide
  REGION 1..7: note = XENP018425 vlCDR2
YASHRLT

SEQ ID NO: 19560 - protein, 9 aa, synthetic construct
  REGION 1..9: note = Description of Artificial Sequence: Synthetic peptide
  REGION 1..9: note = XENP018425 vlCDR3
QQDYSSPRT

SEQ ID NO: 19561 - protein, 451 aa, synthetic construct; identical to SEQ ID NO: 16221
  REGION 1..451: note = Description of Artificial Sequence: Synthetic polypeptide
  REGION 1..451: note = XENP018426 1G6_H1_L1.79_IgG1_PVA_/S267K Heavy Chain

SEQ ID NO: 19562 - protein, 122 aa, synthetic construct; identical to SEQ ID NO: 10922
  REGION 1..122: note = Description of Artificial Sequence: Synthetic polypeptide
  REGION 1..122: note = VH of XENP018426

SEQ ID NO: 19563 - protein, 5 aa, synthetic construct
  REGION 1..5: note = Description of Artificial Sequence: Synthetic peptide
  REGION 1..5: note = XENP018426 vhCDR1
NYWMN

SEQ ID NO: 19564 - protein, 19 aa, synthetic construct
  REGION 1..19: note = Description of Artificial Sequence: Synthetic peptide
  REGION 1..19: note = XENP018426 vhCDR2
EIRLKSNNYATHYAEPVKG

SEQ ID NO: 19565 - protein, 11 aa, synthetic construct
  REGION 1..11: note = Description of Artificial Sequence: Synthetic peptide
  REGION 1..11: note = XENP018426 vhCDR3
YYGNYGGYFDV

SEQ ID NO: 19566 - protein, 214 aa, synthetic construct
  REGION 1..214: note = Description of Artificial Sequence: Synthetic polypeptide
  REGION 1..214: note = XENP018426 1G6_H1_L1.79_IgG1_PVA_/S267K Light Chain
SIVMTQSPATLSVSPGERATLSCRASQSVSNDVAWYQQKPGQSPRLLINYASHRWTGVPDRFTGSGYGTEFTLTISSLQSEDFAVYFCQQDYSSPRTFGGGTKVEIKRTVAAPSVFIFPPSDEQLKSGTASVVCLLNNFYPREAKVQWKVDNALQSGNSQESVTEQDSKDSTYSLSSTLTLSKADYEKHKVYACEVTHQGLSSPVTKSFNRGEC

SEQ ID NO: 19567 - protein, 107 aa, synthetic construct; identical to SEQ ID NO: 13881
  REGION 1..107: note = Description of Artificial Sequence: Synthetic polypeptide
  REGION 1..107: note = VL of XENP018426

SEQ ID NO: 19568 - protein, 11 aa, synthetic construct
  REGION 1..11: note = Description of Artificial Sequence: Synthetic peptide
  REGION 1..11: note = XENP018426 vlCDR1
RASQSVSNDVA

SEQ ID NO: 19569 - protein, 7 aa, synthetic construct
  REGION 1..7: note = Description of Artificial Sequence: Synthetic peptide
  REGION 1..7: note = XENP018426 vlCDR2
YASHRWT

SEQ ID NO: 19570 - protein, 9 aa, synthetic construct
  REGION 1..9: note = Description of Artificial Sequence: Synthetic peptide
  REGION 1..9: note = XENP018426 vlCDR3
QQDYSSPRT

SEQ ID NO: 19571 - protein, 451 aa, synthetic construct; identical to SEQ ID NO: 16221
  REGION 1..451: note = Description of Artificial Sequence: Synthetic polypeptide
  REGION 1..451: note = XENP018427 1G6_H1_L1.80_IgG1_PVA_/S267K Heavy Chain

SEQ ID NO: 19572 - protein, 122 aa, synthetic construct; identical to SEQ ID NO: 10922
  REGION 1..122: note = Description of Artificial Sequence: Synthetic polypeptide
  REGION 1..122: note = VH of XENP018427

SEQ ID NO: 19573 - protein, 5 aa, synthetic construct
  REGION 1..5: note = Description of Artificial Sequence: Synthetic peptide
  REGION 1..5: note = XENP018427 vhCDR1
NYWMN

SEQ ID NO: 19574 - protein, 19 aa, synthetic construct
  REGION 1..19: note = Description of Artificial Sequence: Synthetic peptide
  REGION 1..19: note = XENP018427 vhCDR2
EIRLKSNNYATHYAEPVKG

SEQ ID NO: 19575 - protein, 11 aa, synthetic construct
  REGION 1..11: note = Description of Artificial Sequence: Synthetic peptide
  REGION 1..11: note = XENP018427 vhCDR3
YYGNYGGYFDV

SEQ ID NO: 19576 - protein, 214 aa, synthetic construct
  REGION 1..214: note = Description of Artificial Sequence: Synthetic polypeptide
  REGION 1..214: note = XENP018427 1G6_H1_L1.80_IgG1_PVA_/S267K Light Chain
SIVMTQSPATLSVSPGERATLSCRASQSVSNDVAWYQQKPGQSPRLLINYASHRVTGVPDRFTGSGYGTEFTLTISSLQSEDFAVYFCQQDYSSPRTFGGGTKVEIKRTVAAPSVFIFPPSDEQLKSGTASVVCLLNNFYPREAKVQWKVDNALQSGNSQESVTEQDSKDSTYSLSSTLTLSKADYEKHKVYACEVTHQGLSSPVTKSFNRGEC

SEQ ID NO: 19577 - protein, 107 aa, synthetic construct; identical to SEQ ID NO: 13890
  REGION 1..107: note = Description of Artificial Sequence: Synthetic polypeptide
  REGION 1..107: note = VL of XENP018427

SEQ ID NO: 19578 - protein, 11 aa, synthetic construct
  REGION 1..11: note = Description of Artificial Sequence: Synthetic peptide
  REGION 1..11: note = XENP018427 vlCDR1
RASQSVSNDVA

SEQ ID NO: 19579 - protein, 7 aa, synthetic construct
  REGION 1..7: note = Description of Artificial Sequence: Synthetic peptide
  REGION 1..7: note = XENP018427 vlCDR2
YASHRVT

SEQ ID NO: 19580 - protein, 9 aa, synthetic construct
  REGION 1..9: note = Description of Artificial Sequence: Synthetic peptide
  REGION 1..9: note = XENP018427 vlCDR3
QQDYSSPRT

SEQ ID NO: 19581 - protein, 451 aa, synthetic construct; identical to SEQ ID NO: 16221
  REGION 1..451: note = Description of Artificial Sequence: Synthetic polypeptide
  REGION 1..451: note = XENP018428 1G6_H1_L1.81_IgG1_PVA_/S267K Heavy Chain

SEQ ID NO: 19582 - protein, 122 aa, synthetic construct; identical to SEQ ID NO: 10922
  REGION 1..122: note = Description of Artificial Sequence: Synthetic polypeptide
  REGION 1..122: note = VH of XENP018428

SEQ ID NO: 19583 - protein, 5 aa, synthetic construct
  REGION 1..5: note = Description of Artificial Sequence: Synthetic peptide
  REGION 1..5: note = XENP018428 vhCDR1
NYWMN

SEQ ID NO: 19584 - protein, 19 aa, synthetic construct
  REGION 1..19: note = Description of Artificial Sequence: Synthetic peptide
  REGION 1..19: note = XENP018428 vhCDR2
EIRLKSNNYATHYAEPVKG

SEQ ID NO: 19585 - protein, 11 aa, synthetic construct
  REGION 1..11: note = Description of Artificial Sequence: Synthetic peptide
  REGION 1..11: note = XENP018428 vhCDR3
YYGNYGGYFDV

SEQ ID NO: 19586 - protein, 214 aa, synthetic construct
  REGION 1..214: note = Description of Artificial Sequence: Synthetic polypeptide
  REGION 1..214: note = XENP018428 1G6_H1_L1.81_IgG1_PVA_/S267K Light Chain
SIVMTQSPATLSVSPGERATLSCRASQSVSNDVAWYQQKPGQSPRLLINYASHRATGVPDRFTGSGYGTEFTLTISSLQSEDFAVYFCQQDYSSPRTFGGGTKVEIKRTVAAPSVFIFPPSDEQLKSGTASVVCLLNNFYPREAKVQWKVDNALQSGNSQESVTEQDSKDSTYSLSSTLTLSKADYEKHKVYACEVTHQGLSSPVTKSFNRGEC

SEQ ID NO: 19587 - protein, 107 aa, synthetic construct; identical to SEQ ID NO: 13899
  REGION 1..107: note = Description of Artificial Sequence: Synthetic polypeptide
  REGION 1..107: note = VL of XENP018428

SEQ ID NO: 19588 - protein, 11 aa, synthetic construct
  REGION 1..11: note = Description of Artificial Sequence: Synthetic peptide
  REGION 1..11: note = XENP018428 vlCDR1
RASQSVSNDVA

SEQ ID NO: 19589 - protein, 7 aa, synthetic construct
  REGION 1..7: note = Description of Artificial Sequence: Synthetic peptide
  REGION 1..7: note = XENP018428 vlCDR2
YASHRAT

SEQ ID NO: 19590 - protein, 9 aa, synthetic construct
  REGION 1..9: note = Description of Artificial Sequence: Synthetic peptide
  REGION 1..9: note = XENP018428 vlCDR3
QQDYSSPRT

SEQ ID NO: 19591 - protein, 451 aa, synthetic construct; identical to SEQ ID NO: 16221
  REGION 1..451: note = Description of Artificial Sequence: Synthetic polypeptide
  REGION 1..451: note = XENP018429 1G6_H1_L1.82_IgG1_PVA_/S267K Heavy Chain

SEQ ID NO: 19592 - protein, 122 aa, synthetic construct; identical to SEQ ID NO: 10922
  REGION 1..122: note = Description of Artificial Sequence: Synthetic polypeptide
  REGION 1..122: note = VH of XENP018429

SEQ ID NO: 19593 - protein, 5 aa, synthetic construct
  REGION 1..5: note = Description of Artificial Sequence: Synthetic peptide
  REGION 1..5: note = XENP018429 vhCDR1
NYWMN

SEQ ID NO: 19594 - protein, 19 aa, synthetic construct
  REGION 1..19: note = Description of Artificial Sequence: Synthetic peptide
  REGION 1..19: note = XENP018429 vhCDR2
EIRLKSNNYATHYAEPVKG

SEQ ID NO: 19595 - protein, 11 aa, synthetic construct
  REGION 1..11: note = Description of Artificial Sequence: Synthetic peptide
  REGION 1..11: note = XENP018429 vhCDR3
YYGNYGGYFDV

SEQ ID NO: 19596 - protein, 214 aa, synthetic construct
  REGION 1..214: note = Description of Artificial Sequence: Synthetic polypeptide
  REGION 1..214: note = XENP018429 1G6_H1_L1.82_IgG1_PVA_/S267K Light Chain
SIVMTQSPATLSVSPGERATLSCRASQSVSNDVAWYQQKPGQSPRLLINYASHRQTGVPDRFTGSGYGTEFTLTISSLQSEDFAVYFCQQDYSSPRTFGGGTKVEIKRTVAAPSVFIFPPSDEQLKSGTASVVCLLNNFYPREAKVQWKVDNALQSGNSQESVTEQDSKDSTYSLSSTLTLSKADYEKHKVYACEVTHQGLSSPVTKSFNRGEC

SEQ ID NO: 19597 - protein, 107 aa, synthetic construct; identical to SEQ ID NO: 13908
  REGION 1..107: note = Description of Artificial Sequence: Synthetic polypeptide
  REGION 1..107: note = VL of XENP018429

SEQ ID NO: 19598 - protein, 11 aa, synthetic construct
  REGION 1..11: note = Description of Artificial Sequence: Synthetic peptide
  REGION 1..11: note = XENP018429 vlCDR1
RASQSVSNDVA

SEQ ID NO: 19599 - protein, 7 aa, synthetic construct
  REGION 1..7: note = Description of Artificial Sequence: Synthetic peptide
  REGION 1..7: note = XENP018429 vlCDR2
YASHRQT

SEQ ID NO: 19600 - protein, 9 aa, synthetic construct
  REGION 1..9: note = Description of Artificial Sequence: Synthetic peptide
  REGION 1..9: note = XENP018429 vlCDR3
QQDYSSPRT

SEQ ID NO: 19601 - protein, 451 aa, synthetic construct; identical to SEQ ID NO: 16221
  REGION 1..451: note = Description of Artificial Sequence: Synthetic polypeptide
  REGION 1..451: note = XENP018430 1G6_H1_L1.83_IgG1_PVA_/S267K Heavy Chain

SEQ ID NO: 19602 - protein, 122 aa, synthetic construct; identical to SEQ ID NO: 10922
  REGION 1..122: note = Description of Artificial Sequence: Synthetic polypeptide
  REGION 1..122: note = VH of XENP018430

SEQ ID NO: 19603 - protein, 5 aa, synthetic construct
  REGION 1..5: note = Description of Artificial Sequence: Synthetic peptide
  REGION 1..5: note = XENP018430 vhCDR1
NYWMN

SEQ ID NO: 19604 - protein, 19 aa, synthetic construct
  REGION 1..19: note = Description of Artificial Sequence: Synthetic peptide
  REGION 1..19: note = XENP018430 vhCDR2
EIRLKSNNYATHYAEPVKG

SEQ ID NO: 19605 - protein, 11 aa, synthetic construct
  REGION 1..11: note = Description of Artificial Sequence: Synthetic peptide
  REGION 1..11: note = XENP018430 vhCDR3
YYGNYGGYFDV

SEQ ID NO: 19606 - protein, 214 aa, synthetic construct
  REGION 1..214: note = Description of Artificial Sequence: Synthetic polypeptide
  REGION 1..214: note = XENP018430 1G6_H1_L1.83_IgG1_PVA_/S267K Light Chain
SIVMTQSPATLSVSPGERATLSCRASQSVSNDVAWYQQKPGQSPRLLINYASHRDTGVPDRFTGSGYGTEFTLTISSLQSEDFAVYFCQQDYSSPRTFGGGTKVEIKRTVAAPSVFIFPPSDEQLKSGTASVVCLLNNFYPREAKVQWKVDNALQSGNSQESVTEQDSKDSTYSLSSTLTLSKADYEKHKVYACEVTHQGLSSPVTKSFNRGEC

SEQ ID NO: 19607 - protein, 107 aa, synthetic construct; identical to SEQ ID NO: 13917
  REGION 1..107: note = Description of Artificial Sequence: Synthetic polypeptide
  REGION 1..107: note = VL of XENP018430

SEQ ID NO: 19608 - protein, 11 aa, synthetic construct
  REGION 1..11: note = Description of Artificial Sequence: Synthetic peptide
  REGION 1..11: note = XENP018430 vlCDR1
RASQSVSNDVA

SEQ ID NO: 19609 - protein, 7 aa, synthetic construct
  REGION 1..7: note = Description of Artificial Sequence: Synthetic peptide
  REGION 1..7: note = XENP018430 vlCDR2
YASHRDT

SEQ ID NO: 19610 - protein, 9 aa, synthetic construct
  REGION 1..9: note = Description of Artificial Sequence: Synthetic peptide
  REGION 1..9: note = XENP018430 vlCDR3
QQDYSSPRT

SEQ ID NO: 19611 - protein, 451 aa, synthetic construct; identical to SEQ ID NO: 16221
  REGION 1..451: note = Description of Artificial Sequence: Synthetic polypeptide
  REGION 1..451: note = XENP018431 1G6_H1_L1.84_IgG1_PVA_/S267K Heavy Chain

SEQ ID NO: 19612 - protein, 122 aa, synthetic construct; identical to SEQ ID NO: 10922
  REGION 1..122: note = Description of Artificial Sequence: Synthetic polypeptide
  REGION 1..122: note = VH of XENP018431

SEQ ID NO: 19613 - protein, 5 aa, synthetic construct
  REGION 1..5: note = Description of Artificial Sequence: Synthetic peptide
  REGION 1..5: note = XENP018431 vhCDR1
NYWMN

SEQ ID NO: 19614 - protein, 19 aa, synthetic construct
  REGION 1..19: note = Description of Artificial Sequence: Synthetic peptide
  REGION 1..19: note = XENP018431 vhCDR2
EIRLKSNNYATHYAEPVKG

SEQ ID NO: 19615 - protein, 11 aa, synthetic construct
  REGION 1..11: note = Description of Artificial Sequence: Synthetic peptide
  REGION 1..11: note = XENP018431 vhCDR3
YYGNYGGYFDV

SEQ ID NO: 19616 - protein, 214 aa, synthetic construct
  REGION 1..214: note = Description of Artificial Sequence: Synthetic polypeptide
  REGION 1..214: note = XENP018431 1G6_H1_L1.84_IgG1_PVA_/S267K Light Chain
SIVMTQSPATLSVSPGERATLSCRASQSVSNDVAWYQQKPGQSPRLLINYASHRKTGVPDRFTGSGYGTEFTLTISSLQSEDFAVYFCQQDYSSPRTFGGGTKVEIKRTVAAPSVFIFPPSDEQLKSGTASVVCLLNNFYPREAKVQWKVDNALQSGNSQESVTEQDSKDSTYSLSSTLTLSKADYEKHKVYACEVTHQGLSSPVTKSFNRGEC

SEQ ID NO: 19617 - protein, 107 aa, synthetic construct; identical to SEQ ID NO: 13926
  REGION 1..107: note = Description of Artificial Sequence: Synthetic polypeptide
  REGION 1..107: note = VL of XENP018431

SEQ ID NO: 19618 - protein, 11 aa, synthetic construct
  REGION 1..11: note = Description of Artificial Sequence: Synthetic peptide
  REGION 1..11: note = XENP018431 vlCDR1
RASQSVSNDVA

SEQ ID NO: 19619 - protein, 7 aa, synthetic construct
  REGION 1..7: note = Description of Artificial Sequence: Synthetic peptide
  REGION 1..7: note = XENP018431 vlCDR2
YASHRKT

SEQ ID NO: 19620 - protein, 9 aa, synthetic construct
  REGION 1..9: note = Description of Artificial Sequence: Synthetic peptide
  REGION 1..9: note = XENP018431 vlCDR3
QQDYSSPRT

SEQ ID NO: 19621 - protein, 451 aa, synthetic construct; identical to SEQ ID NO: 16221
  REGION 1..451: note = Description of Artificial Sequence: Synthetic polypeptide
  REGION 1..451: note = XENP018432 1G6_H1_L1.85_IgG1_PVA_/S267K Heavy Chain

SEQ ID NO: 19622 - protein, 122 aa, synthetic construct; identical to SEQ ID NO: 10922
  REGION 1..122: note = Description of Artificial Sequence: Synthetic polypeptide
  REGION 1..122: note = VH of XENP018432

SEQ ID NO: 19623 - protein, 5 aa, synthetic construct
  REGION 1..5: note = Description of Artificial Sequence: Synthetic peptide
  REGION 1..5: note = XENP018432 vhCDR1
NYWMN

SEQ ID NO: 19624 - protein, 19 aa, synthetic construct
  REGION 1..19: note = Description of Artificial Sequence: Synthetic peptide
  REGION 1..19: note = XENP018432 vhCDR2
EIRLKSNNYATHYAEPVKG

SEQ ID NO: 19625 - protein, 11 aa, synthetic construct
  REGION 1..11: note = Description of Artificial Sequence: Synthetic peptide
  REGION 1..11: note = XENP018432 vhCDR3
YYGNYGGYFDV

SEQ ID NO: 19626 - protein, 214 aa, synthetic construct
  REGION 1..214: note = Description of Artificial Sequence: Synthetic polypeptide
  REGION 1..214: note = XENP018432 1G6_H1_L1.85_IgG1_PVA_/S267K Light Chain
SIVMTQSPATLSVSPGERATLSCRASQSVSNDVAWYQQKPGQSPRLLINYASHRYVGVPDRFTGSGYGTEFTLTISSLQSEDFAVYFCQQDYSSPRTFGGGTKVEIKRTVAAPSVFIFPPSDEQLKSGTASVVCLLNNFYPREAKVQWKVDNALQSGNSQESVTEQDSKDSTYSLSSTLTLSKADYEKHKVYACEVTHQGLSSPVTKSFNRGEC

SEQ ID NO: 19627 - protein, 107 aa, synthetic construct; identical to SEQ ID NO: 13935
  REGION 1..107: note = Description of Artificial Sequence: Synthetic polypeptide
  REGION 1..107: note = VL of XENP018432

SEQ ID NO: 19628 - protein, 11 aa, synthetic construct
  REGION 1..11: note = Description of Artificial Sequence: Synthetic peptide
  REGION 1..11: note = XENP018432 vlCDR1
RASQSVSNDVA

SEQ ID NO: 19629 - protein, 7 aa, synthetic construct
  REGION 1..7: note = Description of Artificial Sequence: Synthetic peptide
  REGION 1..7: note = XENP018432 vlCDR2
YASHRYV

SEQ ID NO: 19630 - protein, 9 aa, synthetic construct
  REGION 1..9: note = Description of Artificial Sequence: Synthetic peptide
  REGION 1..9: note = XENP018432 vlCDR3
QQDYSSPRT

SEQ ID NO: 19631 - protein, 451 aa, synthetic construct; identical to SEQ ID NO: 16221
  REGION 1..451: note = Description of Artificial Sequence: Synthetic polypeptide
  REGION 1..451: note = XENP018433 1G6_H1_L1.86_IgG1_PVA_/S267K Heavy Chain

SEQ ID NO: 19632 - protein, 122 aa, synthetic construct; identical to SEQ ID NO: 10922
  REGION 1..122: note = Description of Artificial Sequence: Synthetic polypeptide
  REGION 1..122: note = VH of XENP018433

SEQ ID NO: 19633 - protein, 5 aa, synthetic construct
  REGION 1..5: note = Description of Artificial Sequence: Synthetic peptide
  REGION 1..5: note = XENP018433 vhCDR1
NYWMN

SEQ ID NO: 19634 - protein, 19 aa, synthetic construct
  REGION 1..19: note = Description of Artificial Sequence: Synthetic peptide
  REGION 1..19: note = XENP018433 vhCDR2
EIRLKSNNYATHYAEPVKG

SEQ ID NO: 19635 - protein, 11 aa, synthetic construct
  REGION 1..11: note = Description of Artificial Sequence: Synthetic peptide
  REGION 1..11: note = XENP018433 vhCDR3
YYGNYGGYFDV

SEQ ID NO: 19636 - protein, 214 aa, synthetic construct
  REGION 1..214: note = Description of Artificial Sequence: Synthetic polypeptide
  REGION 1..214: note = XENP018433 1G6_H1_L1.86_IgG1_PVA_/S267K Light Chain
SIVMTQSPATLSVSPGERATLSCRASQSVSNDVAWYQQKPGQSPRLLINYASHRYSGVPDRFTGSGYGTEFTLTISSLQSEDFAVYFCQQDYSSPRTFGGGTKVEIKRTVAAPSVFIFPPSDEQLKSGTASVVCLLNNFYPREAKVQWKVDNALQSGNSQESVTEQDSKDSTYSLSSTLTLSKADYEKHKVYACEVTHQGLSSPVTKSFNRGEC

SEQ ID NO: 19637 - protein, 107 aa, synthetic construct; identical to SEQ ID NO: 13944
  REGION 1..107: note = Description of Artificial Sequence: Synthetic polypeptide
  REGION 1..107: note = VL of XENP018433

SEQ ID NO: 19638 - protein, 11 aa, synthetic construct
  REGION 1..11: note = Description of Artificial Sequence: Synthetic peptide
  REGION 1..11: note = XENP018433 vlCDR1
RASQSVSNDVA

SEQ ID NO: 19639 - protein, 7 aa, synthetic construct
  REGION 1..7: note = Description of Artificial Sequence: Synthetic peptide
  REGION 1..7: note = XENP018433 vlCDR2
YASHRYS

SEQ ID NO: 19640 - protein, 9 aa, synthetic construct
  REGION 1..9: note = Description of Artificial Sequence: Synthetic peptide
  REGION 1..9: note = XENP018433 vlCDR3
QQDYSSPRT

SEQ ID NO: 19641 - protein, 451 aa, synthetic construct; identical to SEQ ID NO: 16221
  REGION 1..451: note = Description of Artificial Sequence: Synthetic polypeptide
  REGION 1..451: note = XENP018434 1G6_H1_L1.87_IgG1_PVA_/S267K Heavy Chain

SEQ ID NO: 19642 - protein, 122 aa, synthetic construct; identical to SEQ ID NO: 10922
  REGION 1..122: note = Description of Artificial Sequence: Synthetic polypeptide
  REGION 1..122: note = VH of XENP018434

SEQ ID NO: 19643 - protein, 5 aa, synthetic construct
  REGION 1..5: note = Description of Artificial Sequence: Synthetic peptide
  REGION 1..5: note = XENP018434 vhCDR1
NYWMN

SEQ ID NO: 19644 - protein, 19 aa, synthetic construct
  REGION 1..19: note = Description of Artificial Sequence: Synthetic peptide
  REGION 1..19: note = XENP018434 vhCDR2
EIRLKSNNYATHYAEPVKG

SEQ ID NO: 19645 - protein, 11 aa, synthetic construct
  REGION 1..11: note = Description of Artificial Sequence: Synthetic peptide
  REGION 1..11: note = XENP018434 vhCDR3
YYGNYGGYFDV

SEQ ID NO: 19646 - protein, 214 aa, synthetic construct
  REGION 1..214: note = Description of Artificial Sequence: Synthetic polypeptide
  REGION 1..214: note = XENP018434 1G6_H1_L1.87_IgG1_PVA_/S267K Light Chain
SIVMTQSPATLSVSPGERATLSCRASQSVSNDVAWYQQKPGQSPRLLINYASHRYAGVPDRFTGSGYGTEFTLTISSLQSEDFAVYFCQQDYSSPRTFGGGTKVEIKRTVAAPSVFIFPPSDEQLKSGTASVVCLLNNFYPREAKVQWKVDNALQSGNSQESVTEQDSKDSTYSLSSTLTLSKADYEKHKVYACEVTHQGLSSPVTKSFNRGEC

SEQ ID NO: 19647 - protein, 107 aa, synthetic construct; identical to SEQ ID NO: 13953
  REGION 1..107: note = Description of Artificial Sequence: Synthetic polypeptide
  REGION 1..107: note = VL of XENP018434

SEQ ID NO: 19648 - protein, 11 aa, synthetic construct
  REGION 1..11: note = Description of Artificial Sequence: Synthetic peptide
  REGION 1..11: note = XENP018434 vlCDR1
RASQSVSNDVA

SEQ ID NO: 19649 - protein, 7 aa, synthetic construct
  REGION 1..7: note = Description of Artificial Sequence: Synthetic peptide
  REGION 1..7: note = XENP018434 vlCDR2
YASHRYA

SEQ ID NO: 19650 - protein, 9 aa, synthetic construct
  REGION 1..9: note = Description of Artificial Sequence: Synthetic peptide
  REGION 1..9: note = XENP018434 vlCDR3
QQDYSSPRT

SEQ ID NO: 19651 - protein, 451 aa, synthetic construct; identical to SEQ ID NO: 16221
  REGION 1..451: note = Description of Artificial Sequence: Synthetic polypeptide
  REGION 1..451: note = XENP018435 1G6_H1_L1.88_IgG1_PVA_/S267K Heavy Chain

SEQ ID NO: 19652 - protein, 122 aa, synthetic construct; identical to SEQ ID NO: 10922
  REGION 1..122: note = Description of Artificial Sequence: Synthetic polypeptide
  REGION 1..122: note = VH of XENP018435

SEQ ID NO: 19653 - protein, 5 aa, synthetic construct
  REGION 1..5: note = Description of Artificial Sequence: Synthetic peptide
  REGION 1..5: note = XENP018435 vhCDR1
NYWMN

SEQ ID NO: 19654 - protein, 19 aa, synthetic construct
  REGION 1..19: note = Description of Artificial Sequence: Synthetic peptide
  REGION 1..19: note = XENP018435 vhCDR2
EIRLKSNNYATHYAEPVKG

SEQ ID NO: 19655 - protein, 11 aa, synthetic construct
  REGION 1..11: note = Description of Artificial Sequence: Synthetic peptide
  REGION 1..11: note = XENP018435 vhCDR3
YYGNYGGYFDV

SEQ ID NO: 19656 - protein, 214 aa, synthetic construct
  REGION 1..214: note = Description of Artificial Sequence: Synthetic polypeptide
  REGION 1..214: note = XENP018435 1G6_H1_L1.88_IgG1_PVA_/S267K Light Chain
SIVMTQSPATLSVSPGERATLSCRASQSVSNDVAWYQQKPGQSPRLLINYASHRYIGVPDRFTGSGYGTEFTLTISSLQSEDFAVYFCQQDYSSPRTFGGGTKVEIKRTVAAPSVFIFPPSDEQLKSGTASVVCLLNNFYPREAKVQWKVDNALQSGNSQESVTEQDSKDSTYSLSSTLTLSKADYEKHKVYACEVTHQGLSSPVTKSFNRGEC

SEQ ID NO: 19657 - protein, 107 aa, synthetic construct; identical to SEQ ID NO: 13962
  REGION 1..107: note = Description of Artificial Sequence: Synthetic polypeptide
  REGION 1..107: note = VL of XENP018435

SEQ ID NO: 19658 - protein, 11 aa, synthetic construct
  REGION 1..11: note = Description of Artificial Sequence: Synthetic peptide
  REGION 1..11: note = XENP018435 vlCDR1
RASQSVSNDVA

SEQ ID NO: 19659 - protein, 7 aa, synthetic construct
  REGION 1..7: note = Description of Artificial Sequence: Synthetic peptide
  REGION 1..7: note = XENP018435 vlCDR2
YASHRYI

SEQ ID NO: 19660 - protein, 9 aa, synthetic construct
  REGION 1..9: note = Description of Artificial Sequence: Synthetic peptide
  REGION 1..9: note = XENP018435 vlCDR3
QQDYSSPRT

SEQ ID NO: 19661 - protein, 451 aa, synthetic construct; identical to SEQ ID NO: 16221
  REGION 1..451: note = Description of Artificial Sequence: Synthetic polypeptide
  REGION 1..451: note = XENP018436 1G6_H1_L1.89_IgG1_PVA_/S267K Heavy Chain

SEQ ID NO: 19662 - protein, 122 aa, synthetic construct; identical to SEQ ID NO: 10922
  REGION 1..122: note = Description of Artificial Sequence: Synthetic polypeptide
  REGION 1..122: note = VH of XENP018436

SEQ ID NO: 19663 - protein, 5 aa, synthetic construct
  REGION 1..5: note = Description of Artificial Sequence: Synthetic peptide
  REGION 1..5: note = XENP018436 vhCDR1
NYWMN

SEQ ID NO: 19664 - protein, 19 aa, synthetic construct
  REGION 1..19: note = Description of Artificial Sequence: Synthetic peptide
  REGION 1..19: note = XENP018436 vhCDR2
EIRLKSNNYATHYAEPVKG

SEQ ID NO: 19665 - protein, 11 aa, synthetic construct
  REGION 1..11: note = Description of Artificial Sequence: Synthetic peptide
  REGION 1..11: note = XENP018436 vhCDR3
YYGNYGGYFDV

SEQ ID NO: 19666 - protein, 214 aa, synthetic construct
  REGION 1..214: note = Description of Artificial Sequence: Synthetic polypeptide
  REGION 1..214: note = XENP018436 1G6_H1_L1.89_IgG1_PVA_/S267K Light Chain
SIVMTQSPATLSVSPGERATLSCRASQSVSNDVAWYQQKPGQSPRLLINYASHRYQGVPDRFTGSGYGTEFTLTISSLQSEDFAVYFCQQDYSSPRTFGGGTKVEIKRTVAAPSVFIFPPSDEQLKSGTASVVCLLNNFYPREAKVQWKVDNALQSGNSQESVTEQDSKDSTYSLSSTLTLSKADYEKHKVYACEVTHQGLSSPVTKSFNRGEC

SEQ ID NO: 19667 - protein, 107 aa, synthetic construct; identical to SEQ ID NO: 13971
  REGION 1..107: note = Description of Artificial Sequence: Synthetic polypeptide
  REGION 1..107: note = VL of XENP018436

SEQ ID NO: 19668 - protein, 11 aa, synthetic construct
  REGION 1..11: note = Description of Artificial Sequence: Synthetic peptide
  REGION 1..11: note = XENP018436 vlCDR1
RASQSVSNDVA

SEQ ID NO: 19669 - protein, 7 aa, synthetic construct
  REGION 1..7: note = Description of Artificial Sequence: Synthetic peptide
  REGION 1..7: note = XENP018436 vlCDR2
YASHRYQ

SEQ ID NO: 19670 - protein, 9 aa, synthetic construct
  REGION 1..9: note = Description of Artificial Sequence: Synthetic peptide
  REGION 1..9: note = XENP018436 vlCDR3
QQDYSSPRT

SEQ ID NO: 19671 - protein, 451 aa, synthetic construct; identical to SEQ ID NO: 16221
  REGION 1..451: note = Description of Artificial Sequence: Synthetic polypeptide
  REGION 1..451: note = XENP018437 1G6_H1_L1.90_IgG1_PVA_/S267K Heavy Chain

SEQ ID NO: 19672 - protein, 122 aa, synthetic construct; identical to SEQ ID NO: 10922
  REGION 1..122: note = Description of Artificial Sequence: Synthetic polypeptide
  REGION 1..122: note = VH of XENP018437

SEQ ID NO: 19673 - protein, 5 aa, synthetic construct
  REGION 1..5: note = Description of Artificial Sequence: Synthetic peptide
  REGION 1..5: note = XENP018437 vhCDR1
NYWMN

SEQ ID NO: 19674 - protein, 19 aa, synthetic construct
  REGION 1..19: note = Description of Artificial Sequence: Synthetic peptide
  REGION 1..19: note = XENP018437 vhCDR2
EIRLKSNNYATHYAEPVKG

SEQ ID NO: 19675 - protein, 11 aa, synthetic construct
  REGION 1..11: note = Description of Artificial Sequence: Synthetic peptide
  REGION 1..11: note = XENP018437 vhCDR3
YYGNYGGYFDV

SEQ ID NO: 19676 - protein, 214 aa, synthetic construct
  REGION 1..214: note = Description of Artificial Sequence: Synthetic polypeptide
  REGION 1..214: note = XENP018437 1G6_H1_L1.90_IgG1_PVA_/S267K Light Chain
SIVMTQSPATLSVSPGERATLSCRASQSVSNDVAWYQQKPGQSPRLLINYASHRYHGVPDRFTGSGYGTEFTLTISSLQSEDFAVYFCQQDYSSPRTFGGGTKVEIKRTVAAPSVFIFPPSDEQLKSGTASVVCLLNNFYPREAKVQWKVDNALQSGNSQESVTEQDSKDSTYSLSSTLTLSKADYEKHKVYACEVTHQGLSSPVTKSFNRGEC

SEQ ID NO: 19677 - protein, 107 aa, synthetic construct; identical to SEQ ID NO: 13980
  REGION 1..107: note = Description of Artificial Sequence: Synthetic polypeptide
  REGION 1..107: note = VL of XENP018437

SEQ ID NO: 19678 - protein, 11 aa, synthetic construct
  REGION 1..11: note = Description of Artificial Sequence: Synthetic peptide
  REGION 1..11: note = XENP018437 vlCDR1
RASQSVSNDVA

SEQ ID NO: 19679 - protein, 7 aa, synthetic construct
  REGION 1..7: note = Description of Artificial Sequence: Synthetic peptide
  REGION 1..7: note = XENP018437 vlCDR2
YASHRYH

SEQ ID NO: 19680 - protein, 9 aa, synthetic construct
  REGION 1..9: note = Description of Artificial Sequence: Synthetic peptide
  REGION 1..9: note = XENP018437 vlCDR3
QQDYSSPRT

SEQ ID NO: 19681 - protein, 451 aa, synthetic construct; identical to SEQ ID NO: 16221
  REGION 1..451: note = Description of Artificial Sequence: Synthetic polypeptide
  REGION 1..451: note = XENP018438 1G6_H1_L1.91_IgG1_PVA_/S267K Heavy Chain

SEQ ID NO: 19682 - protein, 122 aa, synthetic construct; identical to SEQ ID NO: 10922
  REGION 1..122: note = Description of Artificial Sequence: Synthetic polypeptide
  REGION 1..122: note = VH of XENP018438

SEQ ID NO: 19683 - protein, 5 aa, synthetic construct
  REGION 1..5: note = Description of Artificial Sequence: Synthetic peptide
  REGION 1..5: note = XENP018438 vhCDR1
NYWMN

SEQ ID NO: 19684 - protein, 19 aa, synthetic construct
  REGION 1..19: note = Description of Artificial Sequence: Synthetic peptide
  REGION 1..19: note = XENP018438 vhCDR2
EIRLKSNNYATHYAEPVKG

SEQ ID NO: 19685 - protein, 11 aa, synthetic construct
  REGION 1..11: note = Description of Artificial Sequence: Synthetic peptide
  REGION 1..11: note = XENP018438 vhCDR3
YYGNYGGYFDV

SEQ ID NO: 19686 - protein, 214 aa, synthetic construct
  REGION 1..214: note = Description of Artificial Sequence: Synthetic polypeptide
  REGION 1..214: note = XENP018438 1G6_H1_L1.91_IgG1_PVA_/S267K Light Chain
SIVMTQSPATLSVSPGERATLSCRASQSVSNDVAWYQQKPGQSPRLLINYASHRYDGVPDRFTGSGYGTEFTLTISSLQSEDFAVYFCQQDYSSPRTFGGGTKVEIKRTVAAPSVFIFPPSDEQLKSGTASVVCLLNNFYPREAKVQWKVDNALQSGNSQESVTEQDSKDSTYSLSSTLTLSKADYEKHKVYACEVTHQGLSSPVTKSFNRGEC

SEQ ID NO: 19687 - protein, 107 aa, synthetic construct; identical to SEQ ID NO: 13989
  REGION 1..107: note = Description of Artificial Sequence: Synthetic polypeptide
  REGION 1..107: note = VL of XENP018438

SEQ ID NO: 19688 - protein, 11 aa, synthetic construct
  REGION 1..11: note = Description of Artificial Sequence: Synthetic peptide
  REGION 1..11: note = XENP018438 vlCDR1
RASQSVSNDVA

SEQ ID NO: 19689 - protein, 7 aa, synthetic construct
  REGION 1..7: note = Description of Artificial Sequence: Synthetic peptide
  REGION 1..7: note = XENP018438 vlCDR2
YASHRYD

SEQ ID NO: 19690 - protein, 9 aa, synthetic construct
  REGION 1..9: note = Description of Artificial Sequence: Synthetic peptide
  REGION 1..9: note = XENP018438 vlCDR3
QQDYSSPRT

SEQ ID NO: 19691 - protein, 451 aa, synthetic construct; identical to SEQ ID NO: 16221
  REGION 1..451: note = Description of Artificial Sequence: Synthetic polypeptide
  REGION 1..451: note = XENP018439 1G6_H1_L1.92_IgG1_PVA_/S267K Heavy Chain

SEQ ID NO: 19692 - protein, 122 aa, synthetic construct; identical to SEQ ID NO: 10922
  REGION 1..122: note = Description of Artificial Sequence: Synthetic polypeptide
  REGION 1..122: note = VH of XENP018439

SEQ ID NO: 19693 - protein, 5 aa, synthetic construct
  REGION 1..5: note = Description of Artificial Sequence: Synthetic peptide
  REGION 1..5: note = XENP018439 vhCDR1
NYWMN

SEQ ID NO: 19694 - protein, 19 aa, synthetic construct
  REGION 1..19: note = Description of Artificial Sequence: Synthetic peptide
  REGION 1..19: note = XENP018439 vhCDR2
EIRLKSNNYATHYAEPVKG

SEQ ID NO: 19695 - protein, 11 aa, synthetic construct
  REGION 1..11: note = Description of Artificial Sequence: Synthetic peptide
  REGION 1..11: note = XENP018439 vhCDR3
YYGNYGGYFDV

SEQ ID NO: 19696 - protein, 214 aa, synthetic construct
  REGION 1..214: note = Description of Artificial Sequence: Synthetic polypeptide
  REGION 1..214: note = XENP018439 1G6_H1_L1.92_IgG1_PVA_/S267K Light Chain
SIVMTQSPATLSVSPGERATLSCRASQSVSNDVAWYQQKPGQSPRLLINYASHRYKGVPDRFTGSGYGTEFTLTISSLQSEDFAVYFCQQDYSSPRTFGGGTKVEIKRTVAAPSVFIFPPSDEQLKSGTASVVCLLNNFYPREAKVQWKVDNALQSGNSQESVTEQDSKDSTYSLSSTLTLSKADYEKHKVYACEVTHQGLSSPVTKSFNRGEC

SEQ ID NO: 19697 - protein, 107 aa, synthetic construct; identical to SEQ ID NO: 13998
  REGION 1..107: note = Description of Artificial Sequence: Synthetic polypeptide
  REGION 1..107: note = VL of XENP018439

SEQ ID NO: 19698 - protein, 11 aa, synthetic construct
  REGION 1..11: note = Description of Artificial Sequence: Synthetic peptide
  REGION 1..11: note = XENP018439 vlCDR1
RASQSVSNDVA

SEQ ID NO: 19699 - protein, 7 aa, synthetic construct
  REGION 1..7: note = Description of Artificial Sequence: Synthetic peptide
  REGION 1..7: note = XENP018439 vlCDR2
YASHRYK

SEQ ID NO: 19700 - protein, 9 aa, synthetic construct
  REGION 1..9: note = Description of Artificial Sequence: Synthetic peptide
  REGION 1..9: note = XENP018439 vlCDR3
QQDYSSPRT

SEQ ID NO: 19701 - protein, 451 aa, synthetic construct; identical to SEQ ID NO: 16221
  REGION 1..451: note = Description of Artificial Sequence: Synthetic polypeptide
  REGION 1..451: note = XENP018440 1G6_H1_L1.93_IgG1_PVA_/S267K Heavy Chain

SEQ ID NO: 19702 - protein, 122 aa, synthetic construct; identical to SEQ ID NO: 10922
  REGION 1..122: note = Description of Artificial Sequence: Synthetic polypeptide
  REGION 1..122: note = VH of XENP018440

SEQ ID NO: 19703 - protein, 5 aa, synthetic construct
  REGION 1..5: note = Description of Artificial Sequence: Synthetic peptide
  REGION 1..5: note = XENP018440 vhCDR1
NYWMN

SEQ ID NO: 19704 - protein, 19 aa, synthetic construct
  REGION 1..19: note = Description of Artificial Sequence: Synthetic peptide
  REGION 1..19: note = XENP018440 vhCDR2
EIRLKSNNYATHYAEPVKG

SEQ ID NO: 19705 - protein, 11 aa, synthetic construct
  REGION 1..11: note = Description of Artificial Sequence: Synthetic peptide
  REGION 1..11: note = XENP018440 vhCDR3
YYGNYGGYFDV

SEQ ID NO: 19706 - protein, 214 aa, synthetic construct
  REGION 1..214: note = Description of Artificial Sequence: Synthetic polypeptide
  REGION 1..214: note = XENP018440 1G6_H1_L1.93_IgG1_PVA_/S267K Light Chain
SIVMTQSPATLSVSPGERATLSCRASQSVSNDVAWYQQKPGQSPRLLINYASHRYYGVPDRFTGSGYGTEFTLTISSLQSEDFAVYFCQQDYSSPRTFGGGTKVEIKRTVAAPSVFIFPPSDEQLKSGTASVVCLLNNFYPREAKVQWKVDNALQSGNSQESVTEQDSKDSTYSLSSTLTLSKADYEKHKVYACEVTHQGLSSPVTKSFNRGEC

SEQ ID NO: 19707 - protein, 107 aa, synthetic construct; identical to SEQ ID NO: 14007
  REGION 1..107: note = Description of Artificial Sequence: Synthetic polypeptide
  REGION 1..107: note = VL of XENP018440

SEQ ID NO: 19708 - protein, 11 aa, synthetic construct
  REGION 1..11: note = Description of Artificial Sequence: Synthetic peptide
  REGION 1..11: note = XENP018440 vlCDR1
RASQSVSNDVA

SEQ ID NO: 19709 - protein, 7 aa, synthetic construct
  REGION 1..7: note = Description of Artificial Sequence: Synthetic peptide
  REGION 1..7: note = XENP018440 vlCDR2
YASHRYY

SEQ ID NO: 19710 - protein, 9 aa, synthetic construct
  REGION 1..9: note = Description of Artificial Sequence: Synthetic peptide
  REGION 1..9: note = XENP018440 vlCDR3
QQDYSSPRT

SEQ ID NO: 19711 - protein, 451 aa, synthetic construct; identical to SEQ ID NO: 16221
  REGION 1..451: note = Description of Artificial Sequence: Synthetic polypeptide
  REGION 1..451: note = XENP018441 1G6_H1_L1.94_IgG1_PVA_/S267K Heavy Chain

SEQ ID NO: 19712 - protein, 122 aa, synthetic construct; identical to SEQ ID NO: 10922
  REGION 1..122: note = Description of Artificial Sequence: Synthetic polypeptide
  REGION 1..122: note = VH of XENP018441

SEQ ID NO: 19713 - protein, 5 aa, synthetic construct
  REGION 1..5: note = Description of Artificial Sequence: Synthetic peptide
  REGION 1..5: note = XENP018441 vhCDR1
NYWMN

SEQ ID NO: 19714 - protein, 19 aa, synthetic construct
  REGION 1..19: note = Description of Artificial Sequence: Synthetic peptide
  REGION 1..19: note = XENP018441 vhCDR2
EIRLKSNNYATHYAEPVKG

SEQ ID NO: 19715 - protein, 11 aa, synthetic construct
  REGION 1..11: note = Description of Artificial Sequence: Synthetic peptide
  REGION 1..11: note = XENP018441 vhCDR3
YYGNYGGYFDV

SEQ ID NO: 19716 - protein, 214 aa, synthetic construct
  REGION 1..214: note = Description of Artificial Sequence: Synthetic polypeptide
  REGION 1..214: note = XENP018441 1G6_H1_L1.94_IgG1_PVA_/S267K Light Chain
SIVMTQSPATLSVSPGERATLSCRASQSVSNDVAWYQQKPGQSPRLLINYASHRYTSVPDRFTGSGYGTEFTLTISSLQSEDFAVYFCQQDYSSPRTFGGGTKVEIKRTVAAPSVFIFPPSDEQLKSGTASVVCLLNNFYPREAKVQWKVDNALQSGNSQESVTEQDSKDSTYSLSSTLTLSKADYEKHKVYACEVTHQGLSSPVTKSFNRGEC

SEQ ID NO: 19717 - protein, 107 aa, synthetic construct; identical to SEQ ID NO: 14016
  REGION 1..107: note = Description of Artificial Sequence: Synthetic polypeptide
  REGION 1..107: note = VL of XENP018441

SEQ ID NO: 19718 - protein, 11 aa, synthetic construct
  REGION 1..11: note = Description of Artificial Sequence: Synthetic peptide
  REGION 1..11: note = XENP018441 vlCDR1
RASQSVSNDVA

SEQ ID NO: 19719 - protein, 7 aa, synthetic construct
  REGION 1..7: note = Description of Artificial Sequence: Synthetic peptide
  REGION 1..7: note = XENP018441 vlCDR2
YASHRYT

SEQ ID NO: 19720 - protein, 9 aa, synthetic construct
  REGION 1..9: note = Description of Artificial Sequence: Synthetic peptide
  REGION 1..9: note = XENP018441 vlCDR3
QQDYSSPRT

SEQ ID NO: 19721 - protein, 451 aa, synthetic construct; identical to SEQ ID NO: 16221
  REGION 1..451: note = Description of Artificial Sequence: Synthetic polypeptide
  REGION 1..451: note = XENP018442 1G6_H1_L1.95_IgG1_PVA_/S267K Heavy Chain

SEQ ID NO: 19722 - protein, 122 aa, synthetic construct; identical to SEQ ID NO: 10922
  REGION 1..122: note = Description of Artificial Sequence: Synthetic polypeptide
  REGION 1..122: note = VH of XENP018442

SEQ ID NO: 19723 - protein, 5 aa, synthetic construct
  REGION 1..5: note = Description of Artificial Sequence: Synthetic peptide
  REGION 1..5: note = XENP018442 vhCDR1
NYWMN

SEQ ID NO: 19724 - protein, 19 aa, synthetic construct
  REGION 1..19: note = Description of Artificial Sequence: Synthetic peptide
  REGION 1..19: note = XENP018442 vhCDR2
EIRLKSNNYATHYAEPVKG

SEQ ID NO: 19725 - protein, 11 aa, synthetic construct
  REGION 1..11: note = Description of Artificial Sequence: Synthetic peptide
  REGION 1..11: note = XENP018442 vhCDR3
YYGNYGGYFDV

SEQ ID NO: 19726 - protein, 214 aa, synthetic construct
  REGION 1..214: note = Description of Artificial Sequence: Synthetic polypeptide
  REGION 1..214: note = XENP018442 1G6_H1_L1.95_IgG1_PVA_/S267K Light Chain
SIVMTQSPATLSVSPGERATLSCRASQSVSNDVAWYQQKPGQSPRLLINYASHRYTGIPDRFTGSGYGTEFTLTISSLQSEDFAVYFCQQDYSSPRTFGGGTKVEIKRTVAAPSVFIFPPSDEQLKSGTASVVCLLNNFYPREAKVQWKVDNALQSGNSQESVTEQDSKDSTYSLSSTLTLSKADYEKHKVYACEVTHQGLSSPVTKSFNRGEC

SEQ ID NO: 19727 - protein, 107 aa, synthetic construct; identical to SEQ ID NO: 14025
  REGION 1..107: note = Description of Artificial Sequence: Synthetic polypeptide
  REGION 1..107: note = VL of XENP018442

SEQ ID NO: 19728 - protein, 11 aa, synthetic construct
  REGION 1..11: note = Description of Artificial Sequence: Synthetic peptide
  REGION 1..11: note = XENP018442 vlCDR1
RASQSVSNDVA

SEQ ID NO: 19729 - protein, 7 aa, synthetic construct
  REGION 1..7: note = Description of Artificial Sequence: Synthetic peptide
  REGION 1..7: note = XENP018442 vlCDR2
YASHRYT

SEQ ID NO: 19730 - protein, 9 aa, synthetic construct
  REGION 1..9: note = Description of Artificial Sequence: Synthetic peptide
  REGION 1..9: note = XENP018442 vlCDR3
QQDYSSPRT

SEQ ID NO: 19731 - protein, 451 aa, synthetic construct; identical to SEQ ID NO: 16221
  REGION 1..451: note = Description of Artificial Sequence: Synthetic polypeptide
  REGION 1..451: note = XENP018443 1G6_H1_L1.96_IgG1_PVA_/S267K Heavy Chain

SEQ ID NO: 19732 - protein, 122 aa, synthetic construct; identical to SEQ ID NO: 10922
  REGION 1..122: note = Description of Artificial Sequence: Synthetic polypeptide
  REGION 1..122: note = VH of XENP018443

SEQ ID NO: 19733 - protein, 5 aa, synthetic construct
  REGION 1..5: note = Description of Artificial Sequence: Synthetic peptide
  REGION 1..5: note = XENP018443 vhCDR1
NYWMN

SEQ ID NO: 19734 - protein, 19 aa, synthetic construct
  REGION 1..19: note = Description of Artificial Sequence: Synthetic peptide
  REGION 1..19: note = XENP018443 vhCDR2
EIRLKSNNYATHYAEPVKG

SEQ ID NO: 19735 - protein, 11 aa, synthetic construct
  REGION 1..11: note = Description of Artificial Sequence: Synthetic peptide
  REGION 1..11: note = XENP018443 vhCDR3
YYGNYGGYFDV

SEQ ID NO: 19736 - protein, 214 aa, synthetic construct
  REGION 1..214: note = Description of Artificial Sequence: Synthetic polypeptide
  REGION 1..214: note = XENP018443 1G6_H1_L1.96_IgG1_PVA_/S267K Light Chain
SIVMTQSPATLSVSPGERATLSCRASQSVSNDVAWYQQKPGQSPRLLINYASHRYTGVPARFTGSGYGTEFTLTISSLQSEDFAVYFCQQDYSSPRTFGGGTKVEIKRTVAAPSVFIFPPSDEQLKSGTASVVCLLNNFYPREAKVQWKVDNALQSGNSQESVTEQDSKDSTYSLSSTLTLSKADYEKHKVYACEVTHQGLSSPVTKSFNRGEC

SEQ ID NO: 19737 - protein, 107 aa, synthetic construct; identical to SEQ ID NO: 14034
  REGION 1..107: note = Description of Artificial Sequence: Synthetic polypeptide
  REGION 1..107: note = VL of XENP018443

SEQ ID NO: 19738 - protein, 11 aa, synthetic construct
  REGION 1..11: note = Description of Artificial Sequence: Synthetic peptide
  REGION 1..11: note = XENP018443 vlCDR1
RASQSVSNDVA

SEQ ID NO: 19739 - protein, 7 aa, synthetic construct
  REGION 1..7: note = Description of Artificial Sequence: Synthetic peptide
  REGION 1..7: note = XENP018443 vlCDR2
YASHRYT

SEQ ID NO: 19740 - protein, 9 aa, synthetic construct
  REGION 1..9: note = Description of Artificial Sequence: Synthetic peptide
  REGION 1..9: note = XENP018443 vlCDR3
QQDYSSPRT

SEQ ID NO: 19741 - protein, 451 aa, synthetic construct; identical to SEQ ID NO: 16221
  REGION 1..451: note = Description of Artificial Sequence: Synthetic polypeptide
  REGION 1..451: note = XENP018444 1G6_H1_L1.97_IgG1_PVA_/S267K Heavy Chain

SEQ ID NO: 19742 - protein, 122 aa, synthetic construct; identical to SEQ ID NO: 10922
  REGION 1..122: note = Description of Artificial Sequence: Synthetic polypeptide
  REGION 1..122: note = VH of XENP018444

SEQ ID NO: 19743 - protein, 5 aa, synthetic construct
  REGION 1..5: note = Description of Artificial Sequence: Synthetic peptide
  REGION 1..5: note = XENP018444 vhCDR1
NYWMN

SEQ ID NO: 19744 - protein, 19 aa, synthetic construct
  REGION 1..19: note = Description of Artificial Sequence: Synthetic peptide
  REGION 1..19: note = XENP018444 vhCDR2
EIRLKSNNYATHYAEPVKG

SEQ ID NO: 19745 - protein, 11 aa, synthetic construct
  REGION 1..11: note = Description of Artificial Sequence: Synthetic peptide
  REGION 1..11: note = XENP018444 vhCDR3
YYGNYGGYFDV

SEQ ID NO: 19746 - protein, 214 aa, synthetic construct
  REGION 1..214: note = Description of Artificial Sequence: Synthetic polypeptide
  REGION 1..214: note = XENP018444 1G6_H1_L1.97_IgG1_PVA_/S267K Light Chain
SIVMTQSPATLSVSPGERATLSCRASQSVSNDVAWYQQKPGQSPRLLINYASHRYTGVPDRFSGSGYGTEFTLTISSLQSEDFAVYFCQQDYSSPRTFGGGTKVEIKRTVAAPSVFIFPPSDEQLKSGTASVVCLLNNFYPREAKVQWKVDNALQSGNSQESVTEQDSKDSTYSLSSTLTLSKADYEKHKVYACEVTHQGLSSPVTKSFNRGEC

SEQ ID NO: 19747 - protein, 107 aa, synthetic construct; identical to SEQ ID NO: 14043
  REGION 1..107: note = Description of Artificial Sequence: Synthetic polypeptide
  REGION 1..107: note = VL of XENP018444

SEQ ID NO: 19748 - protein, 11 aa, synthetic construct
  REGION 1..11: note = Description of Artificial Sequence: Synthetic peptide
  REGION 1..11: note = XENP018444 vlCDR1
RASQSVSNDVA

SEQ ID NO: 19749 - protein, 7 aa, synthetic construct
  REGION 1..7: note = Description of Artificial Sequence: Synthetic peptide
  REGION 1..7: note = XENP018444 vlCDR2
YASHRYT

SEQ ID NO: 19750 - protein, 9 aa, synthetic construct
  REGION 1..9: note = Description of Artificial Sequence: Synthetic peptide
  REGION 1..9: note = XENP018444 vlCDR3
QQDYSSPRT

SEQ ID NO: 19751 - protein, 451 aa, synthetic construct; identical to SEQ ID NO: 16221
  REGION 1..451: note = Description of Artificial Sequence: Synthetic polypeptide
  REGION 1..451: note = XENP018445 1G6_H1_L1.98_IgG1_PVA_/S267K Heavy Chain

SEQ ID NO: 19752 - protein, 122 aa, synthetic construct; identical to SEQ ID NO: 10922
  REGION 1..122: note = Description of Artificial Sequence: Synthetic polypeptide
  REGION 1..122: note = VH of XENP018445

SEQ ID NO: 19753 - protein, 5 aa, synthetic construct
  REGION 1..5: note = Description of Artificial Sequence: Synthetic peptide
  REGION 1..5: note = XENP018445 vhCDR1
NYWMN

SEQ ID NO: 19754 - protein, 19 aa, synthetic construct
  REGION 1..19: note = Description of Artificial Sequence: Synthetic peptide
  REGION 1..19: note = XENP018445 vhCDR2
EIRLKSNNYATHYAEPVKG

SEQ ID NO: 19755 - protein, 11 aa, synthetic construct
  REGION 1..11: note = Description of Artificial Sequence: Synthetic peptide
  REGION 1..11: note = XENP018445 vhCDR3
YYGNYGGYFDV

SEQ ID NO: 19756 - protein, 214 aa, synthetic construct
  REGION 1..214: note = Description of Artificial Sequence: Synthetic polypeptide
  REGION 1..214: note = XENP018445 1G6_H1_L1.98_IgG1_PVA_/S267K Light Chain
SIVMTQSPATLSVSPGERATLSCRASQSVSNDVAWYQQKPGQSPRLLINYASHRYTGVPDRFTGSGSGTEFTLTISSLQSEDFAVYFCQQDYSSPRTFGGGTKVEIKRTVAAPSVFIFPPSDEQLKSGTASVVCLLNNFYPREAKVQWKVDNALQSGNSQESVTEQDSKDSTYSLSSTLTLSKADYEKHKVYACEVTHQGLSSPVTKSFNRGEC

SEQ ID NO: 19757 - protein, 107 aa, synthetic construct; identical to SEQ ID NO: 14052
  REGION 1..107: note = Description of Artificial Sequence: Synthetic polypeptide
  REGION 1..107: note = VL of XENP018445

SEQ ID NO: 19758 - protein, 11 aa, synthetic construct
  REGION 1..11: note = Description of Artificial Sequence: Synthetic peptide
  REGION 1..11: note = XENP018445 vlCDR1
RASQSVSNDVA

SEQ ID NO: 19759 - protein, 7 aa, synthetic construct
  REGION 1..7: note = Description of Artificial Sequence: Synthetic peptide
  REGION 1..7: note = XENP018445 vlCDR2
YASHRYT

SEQ ID NO: 19760 - protein, 9 aa, synthetic construct
  REGION 1..9: note = Description of Artificial Sequence: Synthetic peptide
  REGION 1..9: note = XENP018445 vlCDR3
QQDYSSPRT

SEQ ID NO: 19761 - protein, 451 aa, synthetic construct; identical to SEQ ID NO: 16221
  REGION 1..451: note = Description of Artificial Sequence: Synthetic polypeptide
  REGION 1..451: note = XENP018446 1G6_H1_L1.99_IgG1_PVA_/S267K Heavy Chain

SEQ ID NO: 19762 - protein, 122 aa, synthetic construct; identical to SEQ ID NO: 10922
  REGION 1..122: note = Description of Artificial Sequence: Synthetic polypeptide
  REGION 1..122: note = VH of XENP018446

SEQ ID NO: 19763 - protein, 5 aa, synthetic construct
  REGION 1..5: note = Description of Artificial Sequence: Synthetic peptide
  REGION 1..5: note = XENP018446 vhCDR1
NYWMN

SEQ ID NO: 19764 - protein, 19 aa, synthetic construct
  REGION 1..19: note = Description of Artificial Sequence: Synthetic peptide
  REGION 1..19: note = XENP018446 vhCDR2
EIRLKSNNYATHYAEPVKG

SEQ ID NO: 19765 - protein, 11 aa, synthetic construct
  REGION 1..11: note = Description of Artificial Sequence: Synthetic peptide
  REGION 1..11: note = XENP018446 vhCDR3
YYGNYGGYFDV

SEQ ID NO: 19766 - protein, 214 aa, synthetic construct
  REGION 1..214: note = Description of Artificial Sequence: Synthetic polypeptide
  REGION 1..214: note = XENP018446 1G6_H1_L1.99_IgG1_PVA_/S267K Light Chain
SIVMTQSPATLSVSPGERATLSCRASQSVSNDVAWYQQKPGQSPRLLINYASHRYTGVPDRFTGSGPGTEFTLTISSLQSEDFAVYFCQQDYSSPRTFGGGTKVEIKRTVAAPSVFIFPPSDEQLKSGTASVVCLLNNFYPREAKVQWKVDNALQSGNSQESVTEQDSKDSTYSLSSTLTLSKADYEKHKVYACEVTHQGLSSPVTKSFNRGEC

SEQ ID NO: 19767 - protein, 107 aa, synthetic construct; identical to SEQ ID NO: 14061
  REGION 1..107: note = Description of Artificial Sequence: Synthetic polypeptide
  REGION 1..107: note = VL of XENP018446

SEQ ID NO: 19768 - protein, 11 aa, synthetic construct
  REGION 1..11: note = Description of Artificial Sequence: Synthetic peptide
  REGION 1..11: note = XENP018446 vlCDR1
RASQSVSNDVA

SEQ ID NO: 19769 - protein, 7 aa, synthetic construct
  REGION 1..7: note = Description of Artificial Sequence: Synthetic peptide
  REGION 1..7: note = XENP018446 vlCDR2
YASHRYT

SEQ ID NO: 19770 - protein, 9 aa, synthetic construct
  REGION 1..9: note = Description of Artificial Sequence: Synthetic peptide
  REGION 1..9: note = XENP018446 vlCDR3
QQDYSSPRT

SEQ ID NO: 19771 - protein, 451 aa, synthetic construct; identical to SEQ ID NO: 16221
  REGION 1..451: note = Description of Artificial Sequence: Synthetic polypeptide
  REGION 1..451: note = XENP018447 1G6_H1_L1.100_IgG1_PVA_/S267K Heavy Chain

SEQ ID NO: 19772 - protein, 122 aa, synthetic construct; identical to SEQ ID NO: 10922
  REGION 1..122: note = Description of Artificial Sequence: Synthetic polypeptide
  REGION 1..122: note = VH of XENP018447

SEQ ID NO: 19773 - protein, 5 aa, synthetic construct
  REGION 1..5: note = Description of Artificial Sequence: Synthetic peptide
  REGION 1..5: note = XENP018447 vhCDR1
NYWMN

SEQ ID NO: 19774 - protein, 19 aa, synthetic construct
  REGION 1..19: note = Description of Artificial Sequence: Synthetic peptide
  REGION 1..19: note = XENP018447 vhCDR2
EIRLKSNNYATHYAEPVKG

SEQ ID NO: 19775 - protein, 11 aa, synthetic construct
  REGION 1..11: note = Description of Artificial Sequence: Synthetic peptide
  REGION 1..11: note = XENP018447 vhCDR3
YYGNYGGYFDV

SEQ ID NO: 19776 - protein, 214 aa, synthetic construct
  REGION 1..214: note = Description of Artificial Sequence: Synthetic polypeptide
  REGION 1..214: note = XENP018447 1G6_H1_L1.100_IgG1_PVA_/S267K Light Chain
SIVMTQSPATLSVSPGERATLSCRASQSVSNDVAWYQQKPGQSPRLLINYASHRYTGVPDRFTGSGYGTDFTLTISSLQSEDFAVYFCQQDYSSPRTFGGGTKVEIKRTVAAPSVFIFPPSDEQLKSGTASVVCLLNNFYPREAKVQWKVDNALQSGNSQESVTEQDSKDSTYSLSSTLTLSKADYEKHKVYACEVTHQGLSSPVTKSFNRGEC

SEQ ID NO: 19777 - protein, 107 aa, synthetic construct; identical to SEQ ID NO: 14070
  REGION 1..107: note = Description of Artificial Sequence: Synthetic polypeptide
  REGION 1..107: note = VL of XENP018447

SEQ ID NO: 19778 - protein, 11 aa, synthetic construct
  REGION 1..11: note = Description of Artificial Sequence: Synthetic peptide
  REGION 1..11: note = XENP018447 vlCDR1
RASQSVSNDVA

SEQ ID NO: 19779 - protein, 7 aa, synthetic construct
  REGION 1..7: note = Description of Artificial Sequence: Synthetic peptide
  REGION 1..7: note = XENP018447 vlCDR2
YASHRYT

SEQ ID NO: 19780 - protein, 9 aa, synthetic construct
  REGION 1..9: note = Description of Artificial Sequence: Synthetic peptide
  REGION 1..9: note = XENP018447 vlCDR3
QQDYSSPRT

SEQ ID NO: 19781 - protein, 451 aa, synthetic construct; identical to SEQ ID NO: 16221
  REGION 1..451: note = Description of Artificial Sequence: Synthetic polypeptide
  REGION 1..451: note = XENP018448 1G6_H1_L1.101_IgG1_PVA_/S267K Heavy Chain

SEQ ID NO: 19782 - protein, 122 aa, synthetic construct; identical to SEQ ID NO: 10922
  REGION 1..122: note = Description of Artificial Sequence: Synthetic polypeptide
  REGION 1..122: note = VH of XENP018448

SEQ ID NO: 19783 - protein, 5 aa, synthetic construct
  REGION 1..5: note = Description of Artificial Sequence: Synthetic peptide
  REGION 1..5: note = XENP018448 vhCDR1
NYWMN

SEQ ID NO: 19784 - protein, 19 aa, synthetic construct
  REGION 1..19: note = Description of Artificial Sequence: Synthetic peptide
  REGION 1..19: note = XENP018448 vhCDR2
EIRLKSNNYATHYAEPVKG

SEQ ID NO: 19785 - protein, 11 aa, synthetic construct
  REGION 1..11: note = Description of Artificial Sequence: Synthetic peptide
  REGION 1..11: note = XENP018448 vhCDR3
YYGNYGGYFDV

SEQ ID NO: 19786 - protein, 214 aa, synthetic construct
  REGION 1..214: note = Description of Artificial Sequence: Synthetic polypeptide
  REGION 1..214: note = XENP018448 1G6_H1_L1.101_IgG1_PVA_/S267K Light Chain
SIVMTQSPATLSVSPGERATLSCRASQSVSNDVAWYQQKPGQSPRLLINYASHRYTGVPDRFTGSGYGTEFTFTISSLQSEDFAVYFCQQDYSSPRTFGGGTKVEIKRTVAAPSVFIFPPSDEQLKSGTASVVCLLNNFYPREAKVQWKVDNALQSGNSQESVTEQDSKDSTYSLSSTLTLSKADYEKHKVYACEVTHQGLSSPVTKSFNRGEC

SEQ ID NO: 19787 - protein, 107 aa, synthetic construct; identical to SEQ ID NO: 14079
  REGION 1..107: note = Description of Artificial Sequence: Synthetic polypeptide
  REGION 1..107: note = VL of XENP018448

SEQ ID NO: 19788 - protein, 11 aa, synthetic construct
  REGION 1..11: note = Description of Artificial Sequence: Synthetic peptide
  REGION 1..11: note = XENP018448 vlCDR1
RASQSVSNDVA

SEQ ID NO: 19789 - protein, 7 aa, synthetic construct
  REGION 1..7: note = Description of Artificial Sequence: Synthetic peptide
  REGION 1..7: note = XENP018448 vlCDR2
YASHRYT

SEQ ID NO: 19790 - protein, 9 aa, synthetic construct
  REGION 1..9: note = Description of Artificial Sequence: Synthetic peptide
  REGION 1..9: note = XENP018448 vlCDR3
QQDYSSPRT

SEQ ID NO: 19791 - protein, 451 aa, synthetic construct; identical to SEQ ID NO: 16221
  REGION 1..451: note = Description of Artificial Sequence: Synthetic polypeptide
  REGION 1..451: note = XENP018449 1G6_H1_L1.102_IgG1_PVA_/S267K Heavy Chain

SEQ ID NO: 19792 - protein, 122 aa, synthetic construct; identical to SEQ ID NO: 10922
  REGION 1..122: note = Description of Artificial Sequence: Synthetic polypeptide
  REGION 1..122: note = VH of XENP018449

SEQ ID NO: 19793 - protein, 5 aa, synthetic construct
  REGION 1..5: note = Description of Artificial Sequence: Synthetic peptide
  REGION 1..5: note = XENP018449 vhCDR1
NYWMN

SEQ ID NO: 19794 - protein, 19 aa, synthetic construct
  REGION 1..19: note = Description of Artificial Sequence: Synthetic peptide
  REGION 1..19: note = XENP018449 vhCDR2
EIRLKSNNYATHYAEPVKG

SEQ ID NO: 19795 - protein, 11 aa, synthetic construct
  REGION 1..11: note = Description of Artificial Sequence: Synthetic peptide
  REGION 1..11: note = XENP018449 vhCDR3
YYGNYGGYFDV

SEQ ID NO: 19796 - protein, 214 aa, synthetic construct
  REGION 1..214: note = Description of Artificial Sequence: Synthetic polypeptide
  REGION 1..214: note = XENP018449 1G6_H1_L1.102_IgG1_PVA_/S267K Light Chain
SIVMTQSPATLSVSPGERATLSCRASQSVSNDVAWYQQKPGQSPRLLINYASHRYTGVPDRFTGSGYGTEFTLTISTLQSEDFAVYFCQQDYSSPRTFGGGTKVEIKRTVAAPSVFIFPPSDEQLKSGTASVVCLLNNFYPREAKVQWKVDNALQSGNSQESVTEQDSKDSTYSLSSTLTLSKADYEKHKVYACEVTHQGLSSPVTKSFNRGEC

SEQ ID NO: 19797 - protein, 107 aa, synthetic construct; identical to SEQ ID NO: 14088
  REGION 1..107: note = Description of Artificial Sequence: Synthetic polypeptide
  REGION 1..107: note = VL of XENP018449

SEQ ID NO: 19798 - protein, 11 aa, synthetic construct
  REGION 1..11: note = Description of Artificial Sequence: Synthetic peptide
  REGION 1..11: note = XENP018449 vlCDR1
RASQSVSNDVA

SEQ ID NO: 19799 - protein, 7 aa, synthetic construct
  REGION 1..7: note = Description of Artificial Sequence: Synthetic peptide
  REGION 1..7: note = XENP018449 vlCDR2
YASHRYT

SEQ ID NO: 19800 - protein, 9 aa, synthetic construct
  REGION 1..9: note = Description of Artificial Sequence: Synthetic peptide
  REGION 1..9: note = XENP018449 vlCDR3
QQDYSSPRT

SEQ ID NO: 19801 - protein, 451 aa, synthetic construct; identical to SEQ ID NO: 16221
  REGION 1..451: note = Description of Artificial Sequence: Synthetic polypeptide
  REGION 1..451: note = XENP018450 1G6_H1_L1.103_IgG1_PVA_/S267K Heavy Chain

SEQ ID NO: 19802 - protein, 122 aa, synthetic construct; identical to SEQ ID NO: 10922
  REGION 1..122: note = Description of Artificial Sequence: Synthetic polypeptide
  REGION 1..122: note = VH of XENP018450

SEQ ID NO: 19803 - protein, 5 aa, synthetic construct
  REGION 1..5: note = Description of Artificial Sequence: Synthetic peptide
  REGION 1..5: note = XENP018450 vhCDR1
NYWMN

SEQ ID NO: 19804 - protein, 19 aa, synthetic construct
  REGION 1..19: note = Description of Artificial Sequence: Synthetic peptide
  REGION 1..19: note = XENP018450 vhCDR2
EIRLKSNNYATHYAEPVKG

SEQ ID NO: 19805 - protein, 11 aa, synthetic construct
  REGION 1..11: note = Description of Artificial Sequence: Synthetic peptide
  REGION 1..11: note = XENP018450 vhCDR3
YYGNYGGYFDV

SEQ ID NO: 19806 - protein, 214 aa, synthetic construct
  REGION 1..214: note = Description of Artificial Sequence: Synthetic polypeptide
  REGION 1..214: note = XENP018450 1G6_H1_L1.103_IgG1_PVA_/S267K Light Chain
SIVMTQSPATLSVSPGERATLSCRASQSVSNDVAWYQQKPGQSPRLLINYASHRYTGVPDRFTGSGYGTEFTLTISSVQSEDFAVYFCQQDYSSPRTFGGGTKVEIKRTVAAPSVFIFPPSDEQLKSGTASVVCLLNNFYPREAKVQWKVDNALQSGNSQESVTEQDSKDSTYSLSSTLTLSKADYEKHKVYACEVTHQGLSSPVTKSFNRGEC

SEQ ID NO: 19807 - protein, 107 aa, synthetic construct; identical to SEQ ID NO: 14097
  REGION 1..107: note = Description of Artificial Sequence: Synthetic polypeptide
  REGION 1..107: note = VL of XENP018450

SEQ ID NO: 19808 - protein, 11 aa, synthetic construct
  REGION 1..11: note = Description of Artificial Sequence: Synthetic peptide
  REGION 1..11: note = XENP018450 vlCDR1
RASQSVSNDVA

SEQ ID NO: 19809 - protein, 7 aa, synthetic construct
  REGION 1..7: note = Description of Artificial Sequence: Synthetic peptide
  REGION 1..7: note = XENP018450 vlCDR2
YASHRYT

SEQ ID NO: 19810 - protein, 9 aa, synthetic construct
  REGION 1..9: note = Description of Artificial Sequence: Synthetic peptide
  REGION 1..9: note = XENP018450 vlCDR3
QQDYSSPRT

SEQ ID NO: 19811 - protein, 451 aa, synthetic construct; identical to SEQ ID NO: 16221
  REGION 1..451: note = Description of Artificial Sequence: Synthetic polypeptide
  REGION 1..451: note = XENP018451 1G6_H1_L1.104_IgG1_PVA_/S267K Heavy Chain

SEQ ID NO: 19812 - protein, 122 aa, synthetic construct; identical to SEQ ID NO: 10922
  REGION 1..122: note = Description of Artificial Sequence: Synthetic polypeptide
  REGION 1..122: note = VH of XENP018451

SEQ ID NO: 19813 - protein, 5 aa, synthetic construct
  REGION 1..5: note = Description of Artificial Sequence: Synthetic peptide
  REGION 1..5: note = XENP018451 vhCDR1
NYWMN

SEQ ID NO: 19814 - protein, 19 aa, synthetic construct
  REGION 1..19: note = Description of Artificial Sequence: Synthetic peptide
  REGION 1..19: note = XENP018451 vhCDR2
EIRLKSNNYATHYAEPVKG

SEQ ID NO: 19815 - protein, 11 aa, synthetic construct
  REGION 1..11: note = Description of Artificial Sequence: Synthetic peptide
  REGION 1..11: note = XENP018451 vhCDR3
YYGNYGGYFDV

SEQ ID NO: 19816 - protein, 214 aa, synthetic construct
  REGION 1..214: note = Description of Artificial Sequence: Synthetic polypeptide
  REGION 1..214: note = XENP018451 1G6_H1_L1.104_IgG1_PVA_/S267K Light Chain
SIVMTQSPATLSVSPGERATLSCRASQSVSNDVAWYQQKPGQSPRLLINYASHRYTGVPDRFTGSGYGTEFTLTISSLQAEDFAVYFCQQDYSSPRTFGGGTKVEIKRTVAAPSVFIFPPSDEQLKSGTASVVCLLNNFYPREAKVQWKVDNALQSGNSQESVTEQDSKDSTYSLSSTLTLSKADYEKHKVYACEVTHQGLSSPVTKSFNRGEC

SEQ ID NO: 19817 - protein, 107 aa, synthetic construct; identical to SEQ ID NO: 14106
  REGION 1..107: note = Description of Artificial Sequence: Synthetic polypeptide
  REGION 1..107: note = VL of XENP018451

SEQ ID NO: 19818 - protein, 11 aa, synthetic construct
  REGION 1..11: note = Description of Artificial Sequence: Synthetic peptide
  REGION 1..11: note = XENP018451 vlCDR1
RASQSVSNDVA

SEQ ID NO: 19819 - protein, 7 aa, synthetic construct
  REGION 1..7: note = Description of Artificial Sequence: Synthetic peptide
  REGION 1..7: note = XENP018451 vlCDR2
YASHRYT

SEQ ID NO: 19820 - protein, 9 aa, synthetic construct
  REGION 1..9: note = Description of Artificial Sequence: Synthetic peptide
  REGION 1..9: note = XENP018451 vlCDR3
QQDYSSPRT

SEQ ID NO: 19821 - protein, 451 aa, synthetic construct; identical to SEQ ID NO: 16221
  REGION 1..451: note = Description of Artificial Sequence: Synthetic polypeptide
  REGION 1..451: note = XENP018452 1G6_H1_L1.105_IgG1_PVA_/S267K Heavy Chain

SEQ ID NO: 19822 - protein, 122 aa, synthetic construct; identical to SEQ ID NO: 10922
  REGION 1..122: note = Description of Artificial Sequence: Synthetic polypeptide
  REGION 1..122: note = VH of XENP018452

SEQ ID NO: 19823 - protein, 5 aa, synthetic construct
  REGION 1..5: note = Description of Artificial Sequence: Synthetic peptide
  REGION 1..5: note = XENP018452 vhCDR1
NYWMN

SEQ ID NO: 19824 - protein, 19 aa, synthetic construct
  REGION 1..19: note = Description of Artificial Sequence: Synthetic peptide
  REGION 1..19: note = XENP018452 vhCDR2
EIRLKSNNYATHYAEPVKG

SEQ ID NO: 19825 - protein, 11 aa, synthetic construct
  REGION 1..11: note = Description of Artificial Sequence: Synthetic peptide
  REGION 1..11: note = XENP018452 vhCDR3
YYGNYGGYFDV

SEQ ID NO: 19826 - protein, 214 aa, synthetic construct
  REGION 1..214: note = Description of Artificial Sequence: Synthetic polypeptide
  REGION 1..214: note = XENP018452 1G6_H1_L1.105_IgG1_PVA_/S267K Light Chain
SIVMTQSPATLSVSPGERATLSCRASQSVSNDVAWYQQKPGQSPRLLINYASHRYTGVPDRFTGSGYGTEFTLTISSLQSEDLAVYFCQQDYSSPRTFGGGTKVEIKRTVAAPSVFIFPPSDEQLKSGTASVVCLLNNFYPREAKVQWKVDNALQSGNSQESVTEQDSKDSTYSLSSTLTLSKADYEKHKVYACEVTHQGLSSPVTKSFNRGEC

SEQ ID NO: 19827 - protein, 107 aa, synthetic construct; identical to SEQ ID NO: 14115
  REGION 1..107: note = Description of Artificial Sequence: Synthetic polypeptide
  REGION 1..107: note = VL of XENP018452

SEQ ID NO: 19828 - protein, 11 aa, synthetic construct
  REGION 1..11: note = Description of Artificial Sequence: Synthetic peptide
  REGION 1..11: note = XENP018452 vlCDR1
RASQSVSNDVA

SEQ ID NO: 19829 - protein, 7 aa, synthetic construct
  REGION 1..7: note = Description of Artificial Sequence: Synthetic peptide
  REGION 1..7: note = XENP018452 vlCDR2
YASHRYT

SEQ ID NO: 19830 - protein, 9 aa, synthetic construct
  REGION 1..9: note = Description of Artificial Sequence: Synthetic peptide
  REGION 1..9: note = XENP018452 vlCDR3
QQDYSSPRT

SEQ ID NO: 19831 - protein, 451 aa, synthetic construct; identical to SEQ ID NO: 16221
  REGION 1..451: note = Description of Artificial Sequence: Synthetic polypeptide
  REGION 1..451: note = XENP018453 1G6_H1_L1.106_IgG1_PVA_/S267K Heavy Chain

SEQ ID NO: 19832 - protein, 122 aa, synthetic construct; identical to SEQ ID NO: 10922
  REGION 1..122: note = Description of Artificial Sequence: Synthetic polypeptide
  REGION 1..122: note = VH of XENP018453

SEQ ID NO: 19833 - protein, 5 aa, synthetic construct
  REGION 1..5: note = Description of Artificial Sequence: Synthetic peptide
  REGION 1..5: note = XENP018453 vhCDR1
NYWMN

SEQ ID NO: 19834 - protein, 19 aa, synthetic construct
  REGION 1..19: note = Description of Artificial Sequence: Synthetic peptide
  REGION 1..19: note = XENP018453 vhCDR2
EIRLKSNNYATHYAEPVKG

SEQ ID NO: 19835 - protein, 11 aa, synthetic construct
  REGION 1..11: note = Description of Artificial Sequence: Synthetic peptide
  REGION 1..11: note = XENP018453 vhCDR3
YYGNYGGYFDV

SEQ ID NO: 19836 - protein, 214 aa, synthetic construct
  REGION 1..214: note = Description of Artificial Sequence: Synthetic polypeptide
  REGION 1..214: note = XENP018453 1G6_H1_L1.106_IgG1_PVA_/S267K Light Chain
SIVMTQSPATLSVSPGERATLSCRASQSVSNDVAWYQQKPGQSPRLLINYASHRYTGVPDRFTGSGYGTEFTLTISSLQSEDFAVYYCQQDYSSPRTFGGGTKVEIKRTVAAPSVFIFPPSDEQLKSGTASVVCLLNNFYPREAKVQWKVDNALQSGNSQESVTEQDSKDSTYSLSSTLTLSKADYEKHKVYACEVTHQGLSSPVTKSFNRGEC

SEQ ID NO: 19837 - protein, 107 aa, synthetic construct; identical to SEQ ID NO: 14124
  REGION 1..107: note = Description of Artificial Sequence: Synthetic polypeptide
  REGION 1..107: note = VL of XENP018453

SEQ ID NO: 19838 - protein, 11 aa, synthetic construct
  REGION 1..11: note = Description of Artificial Sequence: Synthetic peptide
  REGION 1..11: note = XENP018453 vlCDR1
RASQSVSNDVA

SEQ ID NO: 19839 - protein, 7 aa, synthetic construct
  REGION 1..7: note = Description of Artificial Sequence: Synthetic peptide
  REGION 1..7: note = XENP018453 vlCDR2
YASHRYT

SEQ ID NO: 19840 - protein, 9 aa, synthetic construct
  REGION 1..9: note = Description of Artificial Sequence: Synthetic peptide
  REGION 1..9: note = XENP018453 vlCDR3
QQDYSSPRT

SEQ ID NO: 19841 - protein, 451 aa, synthetic construct; identical to SEQ ID NO: 16221
  REGION 1..451: note = Description of Artificial Sequence: Synthetic polypeptide
  REGION 1..451: note = XENP018454 1G6_H1_L1.107_IgG1_PVA_/S267K Heavy Chain

SEQ ID NO: 19842 - protein, 122 aa, synthetic construct; identical to SEQ ID NO: 10922
  REGION 1..122: note = Description of Artificial Sequence: Synthetic polypeptide
  REGION 1..122: note = VH of XENP018454

SEQ ID NO: 19843 - protein, 5 aa, synthetic construct
  REGION 1..5: note = Description of Artificial Sequence: Synthetic peptide
  REGION 1..5: note = XENP018454 vhCDR1
NYWMN

SEQ ID NO: 19844 - protein, 19 aa, synthetic construct
  REGION 1..19: note = Description of Artificial Sequence: Synthetic peptide
  REGION 1..19: note = XENP018454 vhCDR2
EIRLKSNNYATHYAEPVKG

SEQ ID NO: 19845 - protein, 11 aa, synthetic construct
  REGION 1..11: note = Description of Artificial Sequence: Synthetic peptide
  REGION 1..11: note = XENP018454 vhCDR3
YYGNYGGYFDV

SEQ ID NO: 19846 - protein, 214 aa, synthetic construct
  REGION 1..214: note = Description of Artificial Sequence: Synthetic polypeptide
  REGION 1..214: note = XENP018454 1G6_H1_L1.107_IgG1_PVA_/S267K Light Chain
SIVMTQSPATLSVSPGERATLSCRASQSVSNDVAWYQQKPGQSPRLLINYASHRYTGVPDRFTGSGYGTEFTLTISSLQSEDFAVYFCQQQYSSPRTFGGGTKVEIKRTVAAPSVFIFPPSDEQLKSGTASVVCLLNNFYPREAKVQWKVDNALQSGNSQESVTEQDSKDSTYSLSSTLTLSKADYEKHKVYACEVTHQGLSSPVTKSFNRGEC

SEQ ID NO: 19847 - protein, 107 aa, synthetic construct; identical to SEQ ID NO: 14133
  REGION 1..107: note = Description of Artificial Sequence: Synthetic polypeptide
  REGION 1..107: note = VL of XENP018454

SEQ ID NO: 19848 - protein, 11 aa, synthetic construct
  REGION 1..11: note = Description of Artificial Sequence: Synthetic peptide
  REGION 1..11: note = XENP018454 vlCDR1
RASQSVSNDVA

SEQ ID NO: 19849 - protein, 7 aa, synthetic construct
  REGION 1..7: note = Description of Artificial Sequence: Synthetic peptide
  REGION 1..7: note = XENP018454 vlCDR2
YASHRYT

SEQ ID NO: 19850 - protein, 9 aa, synthetic construct
  REGION 1..9: note = Description of Artificial Sequence: Synthetic peptide
  REGION 1..9: note = XENP018454 vlCDR3
QQQYSSPRT

SEQ ID NO: 19851 - protein, 451 aa, synthetic construct; identical to SEQ ID NO: 16221
  REGION 1..451: note = Description of Artificial Sequence: Synthetic polypeptide
  REGION 1..451: note = XENP018455 1G6_H1_L1.108_IgG1_PVA_/S267K Heavy Chain

SEQ ID NO: 19852 - protein, 122 aa, synthetic construct; identical to SEQ ID NO: 10922
  REGION 1..122: note = Description of Artificial Sequence: Synthetic polypeptide
  REGION 1..122: note = VH of XENP018455

SEQ ID NO: 19853 - protein, 5 aa, synthetic construct
  REGION 1..5: note = Description of Artificial Sequence: Synthetic peptide
  REGION 1..5: note = XENP018455 vhCDR1
NYWMN

SEQ ID NO: 19854 - protein, 19 aa, synthetic construct
  REGION 1..19: note = Description of Artificial Sequence: Synthetic peptide
  REGION 1..19: note = XENP018455 vhCDR2
EIRLKSNNYATHYAEPVKG

SEQ ID NO: 19855 - protein, 11 aa, synthetic construct
  REGION 1..11: note = Description of Artificial Sequence: Synthetic peptide
  REGION 1..11: note = XENP018455 vhCDR3
YYGNYGGYFDV

SEQ ID NO: 19856 - protein, 214 aa, synthetic construct
  REGION 1..214: note = Description of Artificial Sequence: Synthetic polypeptide
  REGION 1..214: note = XENP018455 1G6_H1_L1.108_IgG1_PVA_/S267K Light Chain
SIVMTQSPATLSVSPGERATLSCRASQSVSNDVAWYQQKPGQSPRLLINYASHRYTGVPDRFTGSGYGTEFTLTISSLQSEDFAVYFCQQEYSSPRTFGGGTKVEIKRTVAAPSVFIFPPSDEQLKSGTASVVCLLNNFYPREAKVQWKVDNALQSGNSQESVTEQDSKDSTYSLSSTLTLSKADYEKHKVYACEVTHQGLSSPVTKSFNRGEC

SEQ ID NO: 19857 - protein, 107 aa, synthetic construct; identical to SEQ ID NO: 14142
  REGION 1..107: note = Description of Artificial Sequence: Synthetic polypeptide
  REGION 1..107: note = VL of XENP018455

SEQ ID NO: 19858 - protein, 11 aa, synthetic construct
  REGION 1..11: note = Description of Artificial Sequence: Synthetic peptide
  REGION 1..11: note = XENP018455 vlCDR1
RASQSVSNDVA

SEQ ID NO: 19859 - protein, 7 aa, synthetic construct
  REGION 1..7: note = Description of Artificial Sequence: Synthetic peptide
  REGION 1..7: note = XENP018455 vlCDR2
YASHRYT

SEQ ID NO: 19860 - protein, 9 aa, synthetic construct
  REGION 1..9: note = Description of Artificial Sequence: Synthetic peptide
  REGION 1..9: note = XENP018455 vlCDR3
QQEYSSPRT

SEQ ID NO: 19861 - protein, 451 aa, synthetic construct; identical to SEQ ID NO: 16221
  REGION 1..451: note = Description of Artificial Sequence: Synthetic polypeptide
  REGION 1..451: note = XENP018456 1G6_H1_L1.109_IgG1_PVA_/S267K Heavy Chain

SEQ ID NO: 19862 - protein, 122 aa, synthetic construct; identical to SEQ ID NO: 10922
  REGION 1..122: note = Description of Artificial Sequence: Synthetic polypeptide
  REGION 1..122: note = VH of XENP018456

SEQ ID NO: 19863 - protein, 5 aa, synthetic construct
  REGION 1..5: note = Description of Artificial Sequence: Synthetic peptide
  REGION 1..5: note = XENP018456 vhCDR1
NYWMN

SEQ ID NO: 19864 - protein, 19 aa, synthetic construct
  REGION 1..19: note = Description of Artificial Sequence: Synthetic peptide
  REGION 1..19: note = XENP018456 vhCDR2
EIRLKSNNYATHYAEPVKG

SEQ ID NO: 19865 - protein, 11 aa, synthetic construct
  REGION 1..11: note = Description of Artificial Sequence: Synthetic peptide
  REGION 1..11: note = XENP018456 vhCDR3
YYGNYGGYFDV

SEQ ID NO: 19866 - protein, 214 aa, synthetic construct
  REGION 1..214: note = Description of Artificial Sequence: Synthetic polypeptide
  REGION 1..214: note = XENP018456 1G6_H1_L1.109_IgG1_PVA_/S267K Light Chain
SIVMTQSPATLSVSPGERATLSCRASQSVSNDVAWYQQKPGQSPRLLINYASHRYTGVPDRFTGSGYGTEFTLTISSLQSEDFAVYFCQQHYSSPRTFGGGTKVEIKRTVAAPSVFIFPPSDEQLKSGTASVVCLLNNFYPREAKVQWKVDNALQSGNSQESVTEQDSKDSTYSLSSTLTLSKADYEKHKVYACEVTHQGLSSPVTKSFNRGEC

SEQ ID NO: 19867 - protein, 107 aa, synthetic construct; identical to SEQ ID NO: 14151
  REGION 1..107: note = Description of Artificial Sequence: Synthetic polypeptide
  REGION 1..107: note = VL of XENP018456

SEQ ID NO: 19868 - protein, 11 aa, synthetic construct
  REGION 1..11: note = Description of Artificial Sequence: Synthetic peptide
  REGION 1..11: note = XENP018456 vlCDR1
RASQSVSNDVA

SEQ ID NO: 19869 - protein, 7 aa, synthetic construct
  REGION 1..7: note = Description of Artificial Sequence: Synthetic peptide
  REGION 1..7: note = XENP018456 vlCDR2
YASHRYT

SEQ ID NO: 19870 - protein, 9 aa, synthetic construct
  REGION 1..9: note = Description of Artificial Sequence: Synthetic peptide
  REGION 1..9: note = XENP018456 vlCDR3
QQHYSSPRT

SEQ ID NO: 19871 - protein, 451 aa, synthetic construct; identical to SEQ ID NO: 16221
  REGION 1..451: note = Description of Artificial Sequence: Synthetic polypeptide
  REGION 1..451: note = XENP018457 1G6_H1_L1.110_IgG1_PVA_/S267K Heavy Chain

SEQ ID NO: 19872 - protein, 122 aa, synthetic construct; identical to SEQ ID NO: 10922
  REGION 1..122: note = Description of Artificial Sequence: Synthetic polypeptide
  REGION 1..122: note = VH of XENP018457

SEQ ID NO: 19873 - protein, 5 aa, synthetic construct
  REGION 1..5: note = Description of Artificial Sequence: Synthetic peptide
  REGION 1..5: note = XENP018457 vhCDR1
NYWMN

SEQ ID NO: 19874 - protein, 19 aa, synthetic construct
  REGION 1..19: note = Description of Artificial Sequence: Synthetic peptide
  REGION 1..19: note = XENP018457 vhCDR2
EIRLKSNNYATHYAEPVKG

SEQ ID NO: 19875 - protein, 11 aa, synthetic construct
  REGION 1..11: note = Description of Artificial Sequence: Synthetic peptide
  REGION 1..11: note = XENP018457 vhCDR3
YYGNYGGYFDV

SEQ ID NO: 19876 - protein, 214 aa, synthetic construct
  REGION 1..214: note = Description of Artificial Sequence: Synthetic polypeptide
  REGION 1..214: note = XENP018457 1G6_H1_L1.110_IgG1_PVA_/S267K Light Chain
SIVMTQSPATLSVSPGERATLSCRASQSVSNDVAWYQQKPGQSPRLLINYASHRYTGVPDRFTGSGYGTEFTLTISSLQSEDFAVYFCQQSYSSPRTFGGGTKVEIKRTVAAPSVFIFPPSDEQLKSGTASVVCLLNNFYPREAKVQWKVDNALQSGNSQESVTEQDSKDSTYSLSSTLTLSKADYEKHKVYACEVTHQGLSSPVTKSFNRGEC

SEQ ID NO: 19877 - protein, 107 aa, synthetic construct; identical to SEQ ID NO: 14160
  REGION 1..107: note = Description of Artificial Sequence: Synthetic polypeptide
  REGION 1..107: note = VL of XENP018457

SEQ ID NO: 19878 - protein, 11 aa, synthetic construct
  REGION 1..11: note = Description of Artificial Sequence: Synthetic peptide
  REGION 1..11: note = XENP018457 vlCDR1
RASQSVSNDVA

SEQ ID NO: 19879 - protein, 7 aa, synthetic construct
  REGION 1..7: note = Description of Artificial Sequence: Synthetic peptide
  REGION 1..7: note = XENP018457 vlCDR2
YASHRYT

SEQ ID NO: 19880 - protein, 9 aa, synthetic construct
  REGION 1..9: note = Description of Artificial Sequence: Synthetic peptide
  REGION 1..9: note = XENP018457 vlCDR3
QQSYSSPRT

SEQ ID NO: 19881 - protein, 451 aa, synthetic construct; identical to SEQ ID NO: 16221
  REGION 1..451: note = Description of Artificial Sequence: Synthetic polypeptide
  REGION 1..451: note = XENP018458 1G6_H1_L1.111_IgG1_PVA_/S267K Heavy Chain

SEQ ID NO: 19882 - protein, 122 aa, synthetic construct; identical to SEQ ID NO: 10922
  REGION 1..122: note = Description of Artificial Sequence: Synthetic polypeptide
  REGION 1..122: note = VH of XENP018458

SEQ ID NO: 19883 - protein, 5 aa, synthetic construct
  REGION 1..5: note = Description of Artificial Sequence: Synthetic peptide
  REGION 1..5: note = XENP018458 vhCDR1
NYWMN

SEQ ID NO: 19884 - protein, 19 aa, synthetic construct
  REGION 1..19: note = Description of Artificial Sequence: Synthetic peptide
  REGION 1..19: note = XENP018458 vhCDR2
EIRLKSNNYATHYAEPVKG

SEQ ID NO: 19885 - protein, 11 aa, synthetic construct
  REGION 1..11: note = Description of Artificial Sequence: Synthetic peptide
  REGION 1..11: note = XENP018458 vhCDR3
YYGNYGGYFDV

SEQ ID NO: 19886 - protein, 214 aa, synthetic construct
  REGION 1..214: note = Description of Artificial Sequence: Synthetic polypeptide
  REGION 1..214: note = XENP018458 1G6_H1_L1.111_IgG1_PVA_/S267K Light Chain
SIVMTQSPATLSVSPGERATLSCRASQSVSNDVAWYQQKPGQSPRLLINYASHRYTGVPDRFTGSGYGTEFTLTISSLQSEDFAVYFCQQRYSSPRTFGGGTKVEIKRTVAAPSVFIFPPSDEQLKSGTASVVCLLNNFYPREAKVQWKVDNALQSGNSQESVTEQDSKDSTYSLSSTLTLSKADYEKHKVYACEVTHQGLSSPVTKSFNRGEC

SEQ ID NO: 19887 - protein, 107 aa, synthetic construct; identical to SEQ ID NO: 14169
  REGION 1..107: note = Description of Artificial Sequence: Synthetic polypeptide
  REGION 1..107: note = VL of XENP018458

SEQ ID NO: 19888 - protein, 11 aa, synthetic construct
  REGION 1..11: note = Description of Artificial Sequence: Synthetic peptide
  REGION 1..11: note = XENP018458 vlCDR1
RASQSVSNDVA

SEQ ID NO: 19889 - protein, 7 aa, synthetic construct
  REGION 1..7: note = Description of Artificial Sequence: Synthetic peptide
  REGION 1..7: note = XENP018458 vlCDR2
YASHRYT

SEQ ID NO: 19890 - protein, 9 aa, synthetic construct
  REGION 1..9: note = Description of Artificial Sequence: Synthetic peptide
  REGION 1..9: note = XENP018458 vlCDR3
QQRYSSPRT

SEQ ID NO: 19891 - protein, 451 aa, synthetic construct; identical to SEQ ID NO: 16221
  REGION 1..451: note = Description of Artificial Sequence: Synthetic polypeptide
  REGION 1..451: note = XENP018459 1G6_H1_L1.112_IgG1_PVA_/S267K Heavy Chain

SEQ ID NO: 19892 - protein, 122 aa, synthetic construct; identical to SEQ ID NO: 10922
  REGION 1..122: note = Description of Artificial Sequence: Synthetic polypeptide
  REGION 1..122: note = VH of XENP018459

SEQ ID NO: 19893 - protein, 5 aa, synthetic construct
  REGION 1..5: note = Description of Artificial Sequence: Synthetic peptide
  REGION 1..5: note = XENP018459 vhCDR1
NYWMN

SEQ ID NO: 19894 - protein, 19 aa, synthetic construct
  REGION 1..19: note = Description of Artificial Sequence: Synthetic peptide
  REGION 1..19: note = XENP018459 vhCDR2
EIRLKSNNYATHYAEPVKG

SEQ ID NO: 19895 - protein, 11 aa, synthetic construct
  REGION 1..11: note = Description of Artificial Sequence: Synthetic peptide
  REGION 1..11: note = XENP018459 vhCDR3
YYGNYGGYFDV

SEQ ID NO: 19896 - protein, 214 aa, synthetic construct
  REGION 1..214: note = Description of Artificial Sequence: Synthetic polypeptide
  REGION 1..214: note = XENP018459 1G6_H1_L1.112_IgG1_PVA_/S267K Light Chain
SIVMTQSPATLSVSPGERATLSCRASQSVSNDVAWYQQKPGQSPRLLINYASHRYTGVPDRFTGSGYGTEFTLTISSLQSEDFAVYFCQQLYSSPRTFGGGTKVEIKRTVAAPSVFIFPPSDEQLKSGTASVVCLLNNFYPREAKVQWKVDNALQSGNSQESVTEQDSKDSTYSLSSTLTLSKADYEKHKVYACEVTHQGLSSPVTKSFNRGEC

SEQ ID NO: 19897 - protein, 107 aa, synthetic construct; identical to SEQ ID NO: 14178
  REGION 1..107: note = Description of Artificial Sequence: Synthetic polypeptide
  REGION 1..107: note = VL of XENP018459

SEQ ID NO: 19898 - protein, 11 aa, synthetic construct
  REGION 1..11: note = Description of Artificial Sequence: Synthetic peptide
  REGION 1..11: note = XENP018459 vlCDR1
RASQSVSNDVA

SEQ ID NO: 19899 - protein, 7 aa, synthetic construct
  REGION 1..7: note = Description of Artificial Sequence: Synthetic peptide
  REGION 1..7: note = XENP018459 vlCDR2
YASHRYT

SEQ ID NO: 19900 - protein, 9 aa, synthetic construct
  REGION 1..9: note = Description of Artificial Sequence: Synthetic peptide
  REGION 1..9: note = XENP018459 vlCDR3
QQLYSSPRT

SEQ ID NO: 19901 - protein, 451 aa, synthetic construct; identical to SEQ ID NO: 16221
  REGION 1..451: note = Description of Artificial Sequence: Synthetic polypeptide
  REGION 1..451: note = XENP018460 1G6_H1_L1.113_IgG1_PVA_/S267K Heavy Chain

SEQ ID NO: 19902 - protein, 122 aa, synthetic construct; identical to SEQ ID NO: 10922
  REGION 1..122: note = Description of Artificial Sequence: Synthetic polypeptide
  REGION 1..122: note = VH of XENP018460

SEQ ID NO: 19903 - protein, 5 aa, synthetic construct
  REGION 1..5: note = Description of Artificial Sequence: Synthetic peptide
  REGION 1..5: note = XENP018460 vhCDR1
NYWMN

SEQ ID NO: 19904 - protein, 19 aa, synthetic construct
  REGION 1..19: note = Description of Artificial Sequence: Synthetic peptide
  REGION 1..19: note = XENP018460 vhCDR2
EIRLKSNNYATHYAEPVKG

SEQ ID NO: 19905 - protein, 11 aa, synthetic construct
  REGION 1..11: note = Description of Artificial Sequence: Synthetic peptide
  REGION 1..11: note = XENP018460 vhCDR3
YYGNYGGYFDV

SEQ ID NO: 19906 - protein, 214 aa, synthetic construct
  REGION 1..214: note = Description of Artificial Sequence: Synthetic polypeptide
  REGION 1..214: note = XENP018460 1G6_H1_L1.113_IgG1_PVA_/S267K Light Chain
SIVMTQSPATLSVSPGERATLSCRASQSVSNDVAWYQQKPGQSPRLLINYASHRYTGVPDRFTGSGYGTEFTLTISSLQSEDFAVYFCQQTYSSPRTFGGGTKVEIKRTVAAPSVFIFPPSDEQLKSGTASVVCLLNNFYPREAKVQWKVDNALQSGNSQESVTEQDSKDSTYSLSSTLTLSKADYEKHKVYACEVTHQGLSSPVTKSFNRGEC

SEQ ID NO: 19907 - protein, 107 aa, synthetic construct; identical to SEQ ID NO: 14187
  REGION 1..107: note = Description of Artificial Sequence: Synthetic polypeptide
  REGION 1..107: note = VL of XENP018460

SEQ ID NO: 19908 - protein, 11 aa, synthetic construct
  REGION 1..11: note = Description of Artificial Sequence: Synthetic peptide
  REGION 1..11: note = XENP018460 vlCDR1
RASQSVSNDVA

SEQ ID NO: 19909 - protein, 7 aa, synthetic construct
  REGION 1..7: note = Description of Artificial Sequence: Synthetic peptide
  REGION 1..7: note = XENP018460 vlCDR2
YASHRYT

SEQ ID NO: 19910 - protein, 9 aa, synthetic construct
  REGION 1..9: note = Description of Artificial Sequence: Synthetic peptide
  REGION 1..9: note = XENP018460 vlCDR3
QQTYSSPRT

SEQ ID NO: 19911 - protein, 451 aa, synthetic construct; identical to SEQ ID NO: 16221
  REGION 1..451: note = Description of Artificial Sequence: Synthetic polypeptide
  REGION 1..451: note = XENP018461 1G6_H1_L1.114_IgG1_PVA_/S267K Heavy Chain

SEQ ID NO: 19912 - protein, 122 aa, synthetic construct; identical to SEQ ID NO: 10922
  REGION 1..122: note = Description of Artificial Sequence: Synthetic polypeptide
  REGION 1..122: note = VH of XENP018461

SEQ ID NO: 19913 - protein, 5 aa, synthetic construct
  REGION 1..5: note = Description of Artificial Sequence: Synthetic peptide
  REGION 1..5: note = XENP018461 vhCDR1
NYWMN

SEQ ID NO: 19914 - protein, 19 aa, synthetic construct
  REGION 1..19: note = Description of Artificial Sequence: Synthetic peptide
  REGION 1..19: note = XENP018461 vhCDR2
EIRLKSNNYATHYAEPVKG

SEQ ID NO: 19915 - protein, 11 aa, synthetic construct
  REGION 1..11: note = Description of Artificial Sequence: Synthetic peptide
  REGION 1..11: note = XENP018461 vhCDR3
YYGNYGGYFDV

SEQ ID NO: 19916 - protein, 214 aa, synthetic construct
  REGION 1..214: note = Description of Artificial Sequence: Synthetic polypeptide
  REGION 1..214: note = XENP018461 1G6_H1_L1.114_IgG1_PVA_/S267K Light Chain
SIVMTQSPATLSVSPGERATLSCRASQSVSNDVAWYQQKPGQSPRLLINYASHRYTGVPDRFTGSGYGTEFTLTISSLQSEDFAVYFCQQGYSSPRTFGGGTKVEIKRTVAAPSVFIFPPSDEQLKSGTASVVCLLNNFYPREAKVQWKVDNALQSGNSQESVTEQDSKDSTYSLSSTLTLSKADYEKHKVYACEVTHQGLSSPVTKSFNRGEC

SEQ ID NO: 19917 - protein, 107 aa, synthetic construct; identical to SEQ ID NO: 14196
  REGION 1..107: note = Description of Artificial Sequence: Synthetic polypeptide
  REGION 1..107: note = VL of XENP018461

SEQ ID NO: 19918 - protein, 11 aa, synthetic construct
  REGION 1..11: note = Description of Artificial Sequence: Synthetic peptide
  REGION 1..11: note = XENP018461 vlCDR1
RASQSVSNDVA

SEQ ID NO: 19919 - protein, 7 aa, synthetic construct
  REGION 1..7: note = Description of Artificial Sequence: Synthetic peptide
  REGION 1..7: note = XENP018461 vlCDR2
YASHRYT

SEQ ID NO: 19920 - protein, 9 aa, synthetic construct
  REGION 1..9: note = Description of Artificial Sequence: Synthetic peptide
  REGION 1..9: note = XENP018461 vlCDR3
QQGYSSPRT

SEQ ID NO: 19921 - protein, 451 aa, synthetic construct; identical to SEQ ID NO: 16221
  REGION 1..451: note = Description of Artificial Sequence: Synthetic polypeptide
  REGION 1..451: note = XENP018462 1G6_H1_L1.115_IgG1_PVA_/S267K Heavy Chain

SEQ ID NO: 19922 - protein, 122 aa, synthetic construct; identical to SEQ ID NO: 10922
  REGION 1..122: note = Description of Artificial Sequence: Synthetic polypeptide
  REGION 1..122: note = VH of XENP018462

SEQ ID NO: 19923 - protein, 5 aa, synthetic construct
  REGION 1..5: note = Description of Artificial Sequence: Synthetic peptide
  REGION 1..5: note = XENP018462 vhCDR1
NYWMN

SEQ ID NO: 19924 - protein, 19 aa, synthetic construct
  REGION 1..19: note = Description of Artificial Sequence: Synthetic peptide
  REGION 1..19: note = XENP018462 vhCDR2
EIRLKSNNYATHYAEPVKG

SEQ ID NO: 19925 - protein, 11 aa, synthetic construct
  REGION 1..11: note = Description of Artificial Sequence: Synthetic peptide
  REGION 1..11: note = XENP018462 vhCDR3
YYGNYGGYFDV

SEQ ID NO: 19926 - protein, 214 aa, synthetic construct
  REGION 1..214: note = Description of Artificial Sequence: Synthetic polypeptide
  REGION 1..214: note = XENP018462 1G6_H1_L1.115_IgG1_PVA_/S267K Light Chain
SIVMTQSPATLSVSPGERATLSCRASQSVSNDVAWYQQKPGQSPRLLINYASHRYTGVPDRFTGSGYGTEFTLTISSLQSEDFAVYFCQQYYSSPRTFGGGTKVEIKRTVAAPSVFIFPPSDEQLKSGTASVVCLLNNFYPREAKVQWKVDNALQSGNSQESVTEQDSKDSTYSLSSTLTLSKADYEKHKVYACEVTHQGLSSPVTKSFNRGEC

SEQ ID NO: 19927 - protein, 107 aa, synthetic construct; identical to SEQ ID NO: 14205
  REGION 1..107: note = Description of Artificial Sequence: Synthetic polypeptide
  REGION 1..107: note = VL of XENP018462

SEQ ID NO: 19928 - protein, 11 aa, synthetic construct
  REGION 1..11: note = Description of Artificial Sequence: Synthetic peptide
  REGION 1..11: note = XENP018462 vlCDR1
RASQSVSNDVA

SEQ ID NO: 19929 - protein, 7 aa, synthetic construct
  REGION 1..7: note = Description of Artificial Sequence: Synthetic peptide
  REGION 1..7: note = XENP018462 vlCDR2
YASHRYT

SEQ ID NO: 19930 - protein, 9 aa, synthetic construct
  REGION 1..9: note = Description of Artificial Sequence: Synthetic peptide
  REGION 1..9: note = XENP018462 vlCDR3
QQYYSSPRT

SEQ ID NO: 19931 - protein, 451 aa, synthetic construct; identical to SEQ ID NO: 16221
  REGION 1..451: note = Description of Artificial Sequence: Synthetic polypeptide
  REGION 1..451: note = XENP018463 1G6_H1_L1.116_IgG1_PVA_/S267K Heavy Chain

SEQ ID NO: 19932 - protein, 122 aa, synthetic construct; identical to SEQ ID NO: 10922
  REGION 1..122: note = Description of Artificial Sequence: Synthetic polypeptide
  REGION 1..122: note = VH of XENP018463

SEQ ID NO: 19933 - protein, 5 aa, synthetic construct
  REGION 1..5: note = Description of Artificial Sequence: Synthetic peptide
  REGION 1..5: note = XENP018463 vhCDR1
NYWMN

SEQ ID NO: 19934 - protein, 19 aa, synthetic construct
  REGION 1..19: note = Description of Artificial Sequence: Synthetic peptide
  REGION 1..19: note = XENP018463 vhCDR2
EIRLKSNNYATHYAEPVKG

SEQ ID NO: 19935 - protein, 11 aa, synthetic construct
  REGION 1..11: note = Description of Artificial Sequence: Synthetic peptide
  REGION 1..11: note = XENP018463 vhCDR3
YYGNYGGYFDV

SEQ ID NO: 19936 - protein, 214 aa, synthetic construct
  REGION 1..214: note = Description of Artificial Sequence: Synthetic polypeptide
  REGION 1..214: note = XENP018463 1G6_H1_L1.116_IgG1_PVA_/S267K Light Chain
SIVMTQSPATLSVSPGERATLSCRASQSVSNDVAWYQQKPGQSPRLLINYASHRYTGVPDRFTGSGYGTEFTLTISSLQSEDFAVYFCQQDFSSPRTFGGGTKVEIKRTVAAPSVFIFPPSDEQLKSGTASVVCLLNNFYPREAKVQWKVDNALQSGNSQESVTEQDSKDSTYSLSSTLTLSKADYEKHKVYACEVTHQGLSSPVTKSFNRGEC

SEQ ID NO: 19937 - protein, 107 aa, synthetic construct; identical to SEQ ID NO: 14214
  REGION 1..107: note = Description of Artificial Sequence: Synthetic polypeptide
  REGION 1..107: note = VL of XENP018463

SEQ ID NO: 19938 - protein, 11 aa, synthetic construct
  REGION 1..11: note = Description of Artificial Sequence: Synthetic peptide
  REGION 1..11: note = XENP018463 vlCDR1
RASQSVSNDVA

SEQ ID NO: 19939 - protein, 7 aa, synthetic construct
  REGION 1..7: note = Description of Artificial Sequence: Synthetic peptide
  REGION 1..7: note = XENP018463 vlCDR2
YASHRYT

SEQ ID NO: 19940 - protein, 9 aa, synthetic construct
  REGION 1..9: note = Description of Artificial Sequence: Synthetic peptide
  REGION 1..9: note = XENP018463 vlCDR3
QQDFSSPRT

SEQ ID NO: 19941 - protein, 451 aa, synthetic construct; identical to SEQ ID NO: 16221
  REGION 1..451: note = Description of Artificial Sequence: Synthetic polypeptide
  REGION 1..451: note = XENP018464 1G6_H1_L1.117_IgG1_PVA_/S267K Heavy Chain

SEQ ID NO: 19942 - protein, 122 aa, synthetic construct; identical to SEQ ID NO: 10922
  REGION 1..122: note = Description of Artificial Sequence: Synthetic polypeptide
  REGION 1..122: note = VH of XENP018464

SEQ ID NO: 19943 - protein, 5 aa, synthetic construct
  REGION 1..5: note = Description of Artificial Sequence: Synthetic peptide
  REGION 1..5: note = XENP018464 vhCDR1
NYWMN

SEQ ID NO: 19944 - protein, 19 aa, synthetic construct
  REGION 1..19: note = Description of Artificial Sequence: Synthetic peptide
  REGION 1..19: note = XENP018464 vhCDR2
EIRLKSNNYATHYAEPVKG

SEQ ID NO: 19945 - protein, 11 aa, synthetic construct
  REGION 1..11: note = Description of Artificial Sequence: Synthetic peptide
  REGION 1..11: note = XENP018464 vhCDR3
YYGNYGGYFDV

SEQ ID NO: 19946 - protein, 214 aa, synthetic construct
  REGION 1..214: note = Description of Artificial Sequence: Synthetic polypeptide
  REGION 1..214: note = XENP018464 1G6_H1_L1.117_IgG1_PVA_/S267K Light Chain
SIVMTQSPATLSVSPGERATLSCRASQSVSNDVAWYQQKPGQSPRLLINYASHRYTGVPDRFTGSGYGTEFTLTISSLQSEDFAVYFCQQDHSSPRTFGGGTKVEIKRTVAAPSVFIFPPSDEQLKSGTASVVCLLNNFYPREAKVQWKVDNALQSGNSQESVTEQDSKDSTYSLSSTLTLSKADYEKHKVYACEVTHQGLSSPVTKSFNRGEC

SEQ ID NO: 19947 - protein, 107 aa, synthetic construct; identical to SEQ ID NO: 14223
  REGION 1..107: note = Description of Artificial Sequence: Synthetic polypeptide
  REGION 1..107: note = VL of XENP018464

SEQ ID NO: 19948 - protein, 11 aa, synthetic construct
  REGION 1..11: note = Description of Artificial Sequence: Synthetic peptide
  REGION 1..11: note = XENP018464 vlCDR1
RASQSVSNDVA

SEQ ID NO: 19949 - protein, 7 aa, synthetic construct
  REGION 1..7: note = Description of Artificial Sequence: Synthetic peptide
  REGION 1..7: note = XENP018464 vlCDR2
YASHRYT

SEQ ID NO: 19950 - protein, 9 aa, synthetic construct
  REGION 1..9: note = Description of Artificial Sequence: Synthetic peptide
  REGION 1..9: note = XENP018464 vlCDR3
QQDHSSPRT

SEQ ID NO: 19951 - protein, 451 aa, synthetic construct; identical to SEQ ID NO: 16221
  REGION 1..451: note = Description of Artificial Sequence: Synthetic polypeptide
  REGION 1..451: note = XENP018465 1G6_H1_L1.118_IgG1_PVA_/S267K Heavy Chain

SEQ ID NO: 19952 - protein, 122 aa, synthetic construct; identical to SEQ ID NO: 10922
  REGION 1..122: note = Description of Artificial Sequence: Synthetic polypeptide
  REGION 1..122: note = VH of XENP018465

SEQ ID NO: 19953 - protein, 5 aa, synthetic construct
  REGION 1..5: note = Description of Artificial Sequence: Synthetic peptide
  REGION 1..5: note = XENP018465 vhCDR1
NYWMN

SEQ ID NO: 19954 - protein, 19 aa, synthetic construct
  REGION 1..19: note = Description of Artificial Sequence: Synthetic peptide
  REGION 1..19: note = XENP018465 vhCDR2
EIRLKSNNYATHYAEPVKG

SEQ ID NO: 19955 - protein, 11 aa, synthetic construct
  REGION 1..11: note = Description of Artificial Sequence: Synthetic peptide
  REGION 1..11: note = XENP018465 vhCDR3
YYGNYGGYFDV

SEQ ID NO: 19956 - protein, 214 aa, synthetic construct
  REGION 1..214: note = Description of Artificial Sequence: Synthetic polypeptide
  REGION 1..214: note = XENP018465 1G6_H1_L1.118_IgG1_PVA_/S267K Light Chain
SIVMTQSPATLSVSPGERATLSCRASQSVSNDVAWYQQKPGQSPRLLINYASHRYTGVPDRFTGSGYGTEFTLTISSLQSEDFAVYFCQQDLSSPRTFGGGTKVEIKRTVAAPSVFIFPPSDEQLKSGTASVVCLLNNFYPREAKVQWKVDNALQSGNSQESVTEQDSKDSTYSLSSTLTLSKADYEKHKVYACEVTHQGLSSPVTKSFNRGEC

SEQ ID NO: 19957 - protein, 107 aa, synthetic construct; identical to SEQ ID NO: 14232
  REGION 1..107: note = Description of Artificial Sequence: Synthetic polypeptide
  REGION 1..107: note = VL of XENP018465

SEQ ID NO: 19958 - protein, 11 aa, synthetic construct
  REGION 1..11: note = Description of Artificial Sequence: Synthetic peptide
  REGION 1..11: note = XENP018465 vlCDR1
RASQSVSNDVA

SEQ ID NO: 19959 - protein, 7 aa, synthetic construct
  REGION 1..7: note = Description of Artificial Sequence: Synthetic peptide
  REGION 1..7: note = XENP018465 vlCDR2
YASHRYT

SEQ ID NO: 19960 - protein, 9 aa, synthetic construct
  REGION 1..9: note = Description of Artificial Sequence: Synthetic peptide
  REGION 1..9: note = XENP018465 vlCDR3
QQDLSSPRT

SEQ ID NO: 19961 - protein, 451 aa, synthetic construct; identical to SEQ ID NO: 16221
  REGION 1..451: note = Description of Artificial Sequence: Synthetic polypeptide
  REGION 1..451: note = XENP018466 1G6_H1_L1.119_IgG1_PVA_/S267K Heavy Chain

SEQ ID NO: 19962 - protein, 122 aa, synthetic construct; identical to SEQ ID NO: 10922
  REGION 1..122: note = Description of Artificial Sequence: Synthetic polypeptide
  REGION 1..122: note = VH of XENP018466

SEQ ID NO: 19963 - protein, 5 aa, synthetic construct
  REGION 1..5: note = Description of Artificial Sequence: Synthetic peptide
  REGION 1..5: note = XENP018466 vhCDR1
NYWMN

SEQ ID NO: 19964 - protein, 19 aa, synthetic construct
  REGION 1..19: note = Description of Artificial Sequence: Synthetic peptide
  REGION 1..19: note = XENP018466 vhCDR2
EIRLKSNNYATHYAEPVKG

SEQ ID NO: 19965 - protein, 11 aa, synthetic construct
  REGION 1..11: note = Description of Artificial Sequence: Synthetic peptide
  REGION 1..11: note = XENP018466 vhCDR3
YYGNYGGYFDV

SEQ ID NO: 19966 - protein, 214 aa, synthetic construct
  REGION 1..214: note = Description of Artificial Sequence: Synthetic polypeptide
  REGION 1..214: note = XENP018466 1G6_H1_L1.119_IgG1_PVA_/S267K Light Chain
SIVMTQSPATLSVSPGERATLSCRASQSVSNDVAWYQQKPGQSPRLLINYASHRYTGVPDRFTGSGYGTEFTLTISSLQSEDFAVYFCQQDWSSPRTFGGGTKVEIKRTVAAPSVFIFPPSDEQLKSGTASVVCLLNNFYPREAKVQWKVDNALQSGNSQESVTEQDSKDSTYSLSSTLTLSKADYEKHKVYACEVTHQGLSSPVTKSFNRGEC

SEQ ID NO: 19967 - protein, 107 aa, synthetic construct; identical to SEQ ID NO: 14241
  REGION 1..107: note = Description of Artificial Sequence: Synthetic polypeptide
  REGION 1..107: note = VL of XENP018466

SEQ ID NO: 19968 - protein, 11 aa, synthetic construct
  REGION 1..11: note = Description of Artificial Sequence: Synthetic peptide
  REGION 1..11: note = XENP018466 vlCDR1
RASQSVSNDVA

SEQ ID NO: 19969 - protein, 7 aa, synthetic construct
  REGION 1..7: note = Description of Artificial Sequence: Synthetic peptide
  REGION 1..7: note = XENP018466 vlCDR2
YASHRYT

SEQ ID NO: 19970 - protein, 9 aa, synthetic construct
  REGION 1..9: note = Description of Artificial Sequence: Synthetic peptide
  REGION 1..9: note = XENP018466 vlCDR3
QQDWSSPRT

SEQ ID NO: 19971 - protein, 451 aa, synthetic construct; identical to SEQ ID NO: 16221
  REGION 1..451: note = Description of Artificial Sequence: Synthetic polypeptide
  REGION 1..451: note = XENP018467 1G6_H1_L1.120_IgG1_PVA_/S267K Heavy Chain

SEQ ID NO: 19972 - protein, 122 aa, synthetic construct; identical to SEQ ID NO: 10922
  REGION 1..122: note = Description of Artificial Sequence: Synthetic polypeptide
  REGION 1..122: note = VH of XENP018467

SEQ ID NO: 19973 - protein, 5 aa, synthetic construct
  REGION 1..5: note = Description of Artificial Sequence: Synthetic peptide
  REGION 1..5: note = XENP018467 vhCDR1
NYWMN

SEQ ID NO: 19974 - protein, 19 aa, synthetic construct
  REGION 1..19: note = Description of Artificial Sequence: Synthetic peptide
  REGION 1..19: note = XENP018467 vhCDR2
EIRLKSNNYATHYAEPVKG

SEQ ID NO: 19975 - protein, 11 aa, synthetic construct
  REGION 1..11: note = Description of Artificial Sequence: Synthetic peptide
  REGION 1..11: note = XENP018467 vhCDR3
YYGNYGGYFDV

SEQ ID NO: 19976 - protein, 214 aa, synthetic construct
  REGION 1..214: note = Description of Artificial Sequence: Synthetic polypeptide
  REGION 1..214: note = XENP018467 1G6_H1_L1.120_IgG1_PVA_/S267K Light Chain
SIVMTQSPATLSVSPGERATLSCRASQSVSNDVAWYQQKPGQSPRLLINYASHRYTGVPDRFTGSGYGTEFTLTISSLQSEDFAVYFCQQDVSSPRTFGGGTKVEIKRTVAAPSVFIFPPSDEQLKSGTASVVCLLNNFYPREAKVQWKVDNALQSGNSQESVTEQDSKDSTYSLSSTLTLSKADYEKHKVYACEVTHQGLSSPVTKSFNRGEC

SEQ ID NO: 19977 - protein, 107 aa, synthetic construct; identical to SEQ ID NO: 14250
  REGION 1..107: note = Description of Artificial Sequence: Synthetic polypeptide
  REGION 1..107: note = VL of XENP018467

SEQ ID NO: 19978 - protein, 11 aa, synthetic construct
  REGION 1..11: note = Description of Artificial Sequence: Synthetic peptide
  REGION 1..11: note = XENP018467 vlCDR1
RASQSVSNDVA

SEQ ID NO: 19979 - protein, 7 aa, synthetic construct
  REGION 1..7: note = Description of Artificial Sequence: Synthetic peptide
  REGION 1..7: note = XENP018467 vlCDR2
YASHRYT

SEQ ID NO: 19980 - protein, 9 aa, synthetic construct
  REGION 1..9: note = Description of Artificial Sequence: Synthetic peptide
  REGION 1..9: note = XENP018467 vlCDR3
QQDVSSPRT

SEQ ID NO: 19981 - protein, 451 aa, synthetic construct; identical to SEQ ID NO: 16221
  REGION 1..451: note = Description of Artificial Sequence: Synthetic polypeptide
  REGION 1..451: note = XENP018468 1G6_H1_L1.121_IgG1_PVA_/S267K Heavy Chain

SEQ ID NO: 19982 - protein, 122 aa, synthetic construct; identical to SEQ ID NO: 10922
  REGION 1..122: note = Description of Artificial Sequence: Synthetic polypeptide
  REGION 1..122: note = VH of XENP018468

SEQ ID NO: 19983 - protein, 5 aa, synthetic construct
  REGION 1..5: note = Description of Artificial Sequence: Synthetic peptide
  REGION 1..5: note = XENP018468 vhCDR1
NYWMN

SEQ ID NO: 19984 - protein, 19 aa, synthetic construct
  REGION 1..19: note = Description of Artificial Sequence: Synthetic peptide
  REGION 1..19: note = XENP018468 vhCDR2
EIRLKSNNYATHYAEPVKG

SEQ ID NO: 19985 - protein, 11 aa, synthetic construct
  REGION 1..11: note = Description of Artificial Sequence: Synthetic peptide
  REGION 1..11: note = XENP018468 vhCDR3
YYGNYGGYFDV

SEQ ID NO: 19986 - protein, 214 aa, synthetic construct
  REGION 1..214: note = Description of Artificial Sequence: Synthetic polypeptide
  REGION 1..214: note = XENP018468 1G6_H1_L1.121_IgG1_PVA_/S267K Light Chain
SIVMTQSPATLSVSPGERATLSCRASQSVSNDVAWYQQKPGQSPRLLINYASHRYTGVPDRFTGSGYGTEFTLTISSLQSEDFAVYFCQQDASSPRTFGGGTKVEIKRTVAAPSVFIFPPSDEQLKSGTASVVCLLNNFYPREAKVQWKVDNALQSGNSQESVTEQDSKDSTYSLSSTLTLSKADYEKHKVYACEVTHQGLSSPVTKSFNRGEC

SEQ ID NO: 19987 - protein, 107 aa, synthetic construct; identical to SEQ ID NO: 14259
  REGION 1..107: note = Description of Artificial Sequence: Synthetic polypeptide
  REGION 1..107: note = VL of XENP018468

SEQ ID NO: 19988 - protein, 11 aa, synthetic construct
  REGION 1..11: note = Description of Artificial Sequence: Synthetic peptide
  REGION 1..11: note = XENP018468 vlCDR1
RASQSVSNDVA

SEQ ID NO: 19989 - protein, 7 aa, synthetic construct
  REGION 1..7: note = Description of Artificial Sequence: Synthetic peptide
  REGION 1..7: note = XENP018468 vlCDR2
YASHRYT

SEQ ID NO: 19990 - protein, 9 aa, synthetic construct
  REGION 1..9: note = Description of Artificial Sequence: Synthetic peptide
  REGION 1..9: note = XENP018468 vlCDR3
QQDASSPRT

SEQ ID NO: 19991 - protein, 451 aa, synthetic construct; identical to SEQ ID NO: 16221
  REGION 1..451: note = Description of Artificial Sequence: Synthetic polypeptide
  REGION 1..451: note = XENP018469 1G6_H1_L1.122_IgG1_PVA_/S267K Heavy Chain

SEQ ID NO: 19992 - protein, 122 aa, synthetic construct; identical to SEQ ID NO: 10922
  REGION 1..122: note = Description of Artificial Sequence: Synthetic polypeptide
  REGION 1..122: note = VH of XENP018469

SEQ ID NO: 19993 - protein, 5 aa, synthetic construct
  REGION 1..5: note = Description of Artificial Sequence: Synthetic peptide
  REGION 1..5: note = XENP018469 vhCDR1
NYWMN

SEQ ID NO: 19994 - protein, 19 aa, synthetic construct
  REGION 1..19: note = Description of Artificial Sequence: Synthetic peptide
  REGION 1..19: note = XENP018469 vhCDR2
EIRLKSNNYATHYAEPVKG

SEQ ID NO: 19995 - protein, 11 aa, synthetic construct
  REGION 1..11: note = Description of Artificial Sequence: Synthetic peptide
  REGION 1..11: note = XENP018469 vhCDR3
YYGNYGGYFDV

SEQ ID NO: 19996 - protein, 214 aa, synthetic construct
  REGION 1..214: note = Description of Artificial Sequence: Synthetic polypeptide
  REGION 1..214: note = XENP018469 1G6_H1_L1.122_IgG1_PVA_/S267K Light Chain
SIVMTQSPATLSVSPGERATLSCRASQSVSNDVAWYQQKPGQSPRLLINYASHRYTGVPDRFTGSGYGTEFTLTISSLQSEDFAVYFCQQDQSSPRTFGGGTKVEIKRTVAAPSVFIFPPSDEQLKSGTASVVCLLNNFYPREAKVQWKVDNALQSGNSQESVTEQDSKDSTYSLSSTLTLSKADYEKHKVYACEVTHQGLSSPVTKSFNRGEC

SEQ ID NO: 19997 - protein, 107 aa, synthetic construct; identical to SEQ ID NO: 14268
  REGION 1..107: note = Description of Artificial Sequence: Synthetic polypeptide
  REGION 1..107: note = VL of XENP018469

SEQ ID NO: 19998 - protein, 11 aa, synthetic construct
  REGION 1..11: note = Description of Artificial Sequence: Synthetic peptide
  REGION 1..11: note = XENP018469 vlCDR1
RASQSVSNDVA

SEQ ID NO: 19999 - protein, 7 aa, synthetic construct
  REGION 1..7: note = Description of Artificial Sequence: Synthetic peptide
  REGION 1..7: note = XENP018469 vlCDR2
YASHRYT

SEQ ID NO: 20000 - protein, 9 aa, synthetic construct
  REGION 1..9: note = Description of Artificial Sequence: Synthetic peptide
  REGION 1..9: note = XENP018469 vlCDR3
QQDQSSPRT

SEQ ID NO: 20001 - protein, 451 aa, synthetic construct; identical to SEQ ID NO: 16221
  REGION 1..451: note = Description of Artificial Sequence: Synthetic polypeptide
  REGION 1..451: note = XENP018470 1G6_H1_L1.123_IgG1_PVA_/S267K Heavy Chain

SEQ ID NO: 20002 - protein, 122 aa, synthetic construct; identical to SEQ ID NO: 10922
  REGION 1..122: note = Description of Artificial Sequence: Synthetic polypeptide
  REGION 1..122: note = VH of XENP018470

SEQ ID NO: 20003 - protein, 5 aa, synthetic construct
  REGION 1..5: note = Description of Artificial Sequence: Synthetic peptide
  REGION 1..5: note = XENP018470 vhCDR1
NYWMN

SEQ ID NO: 20004 - protein, 19 aa, synthetic construct
  REGION 1..19: note = Description of Artificial Sequence: Synthetic peptide
  REGION 1..19: note = XENP018470 vhCDR2
EIRLKSNNYATHYAEPVKG

SEQ ID NO: 20005 - protein, 11 aa, synthetic construct
  REGION 1..11: note = Description of Artificial Sequence: Synthetic peptide
  REGION 1..11: note = XENP018470 vhCDR3
YYGNYGGYFDV

SEQ ID NO: 20006 - protein, 214 aa, synthetic construct
  REGION 1..214: note = Description of Artificial Sequence: Synthetic polypeptide
  REGION 1..214: note = XENP018470 1G6_H1_L1.123_IgG1_PVA_/S267K Light Chain
SIVMTQSPATLSVSPGERATLSCRASQSVSNDVAWYQQKPGQSPRLLINYASHRYTGVPDRFTGSGYGTEFTLTISSLQSEDFAVYFCQQDDSSPRTFGGGTKVEIKRTVAAPSVFIFPPSDEQLKSGTASVVCLLNNFYPREAKVQWKVDNALQSGNSQESVTEQDSKDSTYSLSSTLTLSKADYEKHKVYACEVTHQGLSSPVTKSFNRGEC

SEQ ID NO: 20007 - protein, 107 aa, synthetic construct; identical to SEQ ID NO: 14277
  REGION 1..107: note = Description of Artificial Sequence: Synthetic polypeptide
  REGION 1..107: note = VL of XENP018470

SEQ ID NO: 20008 - protein, 11 aa, synthetic construct
  REGION 1..11: note = Description of Artificial Sequence: Synthetic peptide
  REGION 1..11: note = XENP018470 vlCDR1
RASQSVSNDVA

SEQ ID NO: 20009 - protein, 7 aa, synthetic construct
  REGION 1..7: note = Description of Artificial Sequence: Synthetic peptide
  REGION 1..7: note = XENP018470 vlCDR2
YASHRYT

SEQ ID NO: 20010 - protein, 9 aa, synthetic construct
  REGION 1..9: note = Description of Artificial Sequence: Synthetic peptide
  REGION 1..9: note = XENP018470 vlCDR3
QQDDSSPRT

SEQ ID NO: 20011 - protein, 451 aa, synthetic construct; identical to SEQ ID NO: 16221
  REGION 1..451: note = Description of Artificial Sequence: Synthetic polypeptide
  REGION 1..451: note = XENP018471 1G6_H1_L1.124_IgG1_PVA_/S267K Heavy Chain

SEQ ID NO: 20012 - protein, 122 aa, synthetic construct; identical to SEQ ID NO: 10922
  REGION 1..122: note = Description of Artificial Sequence: Synthetic polypeptide
  REGION 1..122: note = VH of XENP018471

SEQ ID NO: 20013 - protein, 5 aa, synthetic construct
  REGION 1..5: note = Description of Artificial Sequence: Synthetic peptide
  REGION 1..5: note = XENP018471 vhCDR1
NYWMN

SEQ ID NO: 20014 - protein, 19 aa, synthetic construct
  REGION 1..19: note = Description of Artificial Sequence: Synthetic peptide
  REGION 1..19: note = XENP018471 vhCDR2
EIRLKSNNYATHYAEPVKG

SEQ ID NO: 20015 - protein, 11 aa, synthetic construct
  REGION 1..11: note = Description of Artificial Sequence: Synthetic peptide
  REGION 1..11: note = XENP018471 vhCDR3
YYGNYGGYFDV

SEQ ID NO: 20016 - protein, 214 aa, synthetic construct
  REGION 1..214: note = Description of Artificial Sequence: Synthetic polypeptide
  REGION 1..214: note = XENP018471 1G6_H1_L1.124_IgG1_PVA_/S267K Light Chain
SIVMTQSPATLSVSPGERATLSCRASQSVSNDVAWYQQKPGQSPRLLINYASHRYTGVPDRFTGSGYGTEFTLTISSLQSEDFAVYFCQQDKSSPRTFGGGTKVEIKRTVAAPSVFIFPPSDEQLKSGTASVVCLLNNFYPREAKVQWKVDNALQSGNSQESVTEQDSKDSTYSLSSTLTLSKADYEKHKVYACEVTHQGLSSPVTKSFNRGEC

SEQ ID NO: 20017 - protein, 107 aa, synthetic construct; identical to SEQ ID NO: 14286
  REGION 1..107: note = Description of Artificial Sequence: Synthetic polypeptide
  REGION 1..107: note = VL of XENP018471

SEQ ID NO: 20018 - protein, 11 aa, synthetic construct
  REGION 1..11: note = Description of Artificial Sequence: Synthetic peptide
  REGION 1..11: note = XENP018471 vlCDR1
RASQSVSNDVA

SEQ ID NO: 20019 - protein, 7 aa, synthetic construct
  REGION 1..7: note = Description of Artificial Sequence: Synthetic peptide
  REGION 1..7: note = XENP018471 vlCDR2
YASHRYT

SEQ ID NO: 20020 - protein, 9 aa, synthetic construct
  REGION 1..9: note = Description of Artificial Sequence: Synthetic peptide
  REGION 1..9: note = XENP018471 vlCDR3
QQDKSSPRT

SEQ ID NO: 20021 - protein, 451 aa, synthetic construct; identical to SEQ ID NO: 16221
  REGION 1..451: note = Description of Artificial Sequence: Synthetic polypeptide
  REGION 1..451: note = XENP018472 1G6_H1_L1.125_IgG1_PVA_/S267K Heavy Chain

SEQ ID NO: 20022 - protein, 122 aa, synthetic construct; identical to SEQ ID NO: 10922
  REGION 1..122: note = Description of Artificial Sequence: Synthetic polypeptide
  REGION 1..122: note = VH of XENP018472

SEQ ID NO: 20023 - protein, 5 aa, synthetic construct
  REGION 1..5: note = Description of Artificial Sequence: Synthetic peptide
  REGION 1..5: note = XENP018472 vhCDR1
NYWMN

SEQ ID NO: 20024 - protein, 19 aa, synthetic construct
  REGION 1..19: note = Description of Artificial Sequence: Synthetic peptide
  REGION 1..19: note = XENP018472 vhCDR2
EIRLKSNNYATHYAEPVKG

SEQ ID NO: 20025 - protein, 11 aa, synthetic construct
  REGION 1..11: note = Description of Artificial Sequence: Synthetic peptide
  REGION 1..11: note = XENP018472 vhCDR3
YYGNYGGYFDV

SEQ ID NO: 20026 - protein, 214 aa, synthetic construct
  REGION 1..214: note = Description of Artificial Sequence: Synthetic polypeptide
  REGION 1..214: note = XENP018472 1G6_H1_L1.125_IgG1_PVA_/S267K Light Chain
SIVMTQSPATLSVSPGERATLSCRASQSVSNDVAWYQQKPGQSPRLLINYASHRYTGVPDRFTGSGYGTEFTLTISSLQSEDFAVYFCQQDSSSPRTFGGGTKVEIKRTVAAPSVFIFPPSDEQLKSGTASVVCLLNNFYPREAKVQWKVDNALQSGNSQESVTEQDSKDSTYSLSSTLTLSKADYEKHKVYACEVTHQGLSSPVTKSFNRGEC

SEQ ID NO: 20027 - protein, 107 aa, synthetic construct; identical to SEQ ID NO: 14295
  REGION 1..107: note = Description of Artificial Sequence: Synthetic polypeptide
  REGION 1..107: note = VL of XENP018472

SEQ ID NO: 20028 - protein, 11 aa, synthetic construct
  REGION 1..11: note = Description of Artificial Sequence: Synthetic peptide
  REGION 1..11: note = XENP018472 vlCDR1
RASQSVSNDVA

SEQ ID NO: 20029 - protein, 7 aa, synthetic construct
  REGION 1..7: note = Description of Artificial Sequence: Synthetic peptide
  REGION 1..7: note = XENP018472 vlCDR2
YASHRYT

SEQ ID NO: 20030 - protein, 9 aa, synthetic construct
  REGION 1..9: note = Description of Artificial Sequence: Synthetic peptide
  REGION 1..9: note = XENP018472 vlCDR3
QQDSSSPRT

SEQ ID NO: 20031 - protein, 451 aa, synthetic construct; identical to SEQ ID NO: 16221
  REGION 1..451: note = Description of Artificial Sequence: Synthetic polypeptide
  REGION 1..451: note = XENP018473 1G6_H1_L1.126_IgG1_PVA_/S267K Heavy Chain

SEQ ID NO: 20032 - protein, 122 aa, synthetic construct; identical to SEQ ID NO: 10922
  REGION 1..122: note = Description of Artificial Sequence: Synthetic polypeptide
  REGION 1..122: note = VH of XENP018473

SEQ ID NO: 20033 - protein, 5 aa, synthetic construct
  REGION 1..5: note = Description of Artificial Sequence: Synthetic peptide
  REGION 1..5: note = XENP018473 vhCDR1
NYWMN

SEQ ID NO: 20034 - protein, 19 aa, synthetic construct
  REGION 1..19: note = Description of Artificial Sequence: Synthetic peptide
  REGION 1..19: note = XENP018473 vhCDR2
EIRLKSNNYATHYAEPVKG

SEQ ID NO: 20035 - protein, 11 aa, synthetic construct
  REGION 1..11: note = Description of Artificial Sequence: Synthetic peptide
  REGION 1..11: note = XENP018473 vhCDR3
YYGNYGGYFDV

SEQ ID NO: 20036 - protein, 214 aa, synthetic construct
  REGION 1..214: note = Description of Artificial Sequence: Synthetic polypeptide
  REGION 1..214: note = XENP018473 1G6_H1_L1.126_IgG1_PVA_/S267K Light Chain
SIVMTQSPATLSVSPGERATLSCRASQSVSNDVAWYQQKPGQSPRLLINYASHRYTGVPDRFTGSGYGTEFTLTISSLQSEDFAVYFCQQDGSSPRTFGGGTKVEIKRTVAAPSVFIFPPSDEQLKSGTASVVCLLNNFYPREAKVQWKVDNALQSGNSQESVTEQDSKDSTYSLSSTLTLSKADYEKHKVYACEVTHQGLSSPVTKSFNRGEC

SEQ ID NO: 20037 - protein, 107 aa, synthetic construct; identical to SEQ ID NO: 14304
  REGION 1..107: note = Description of Artificial Sequence: Synthetic polypeptide
  REGION 1..107: note = VL of XENP018473

SEQ ID NO: 20038 - protein, 11 aa, synthetic construct
  REGION 1..11: note = Description of Artificial Sequence: Synthetic peptide
  REGION 1..11: note = XENP018473 vlCDR1
RASQSVSNDVA

SEQ ID NO: 20039 - protein, 7 aa, synthetic construct
  REGION 1..7: note = Description of Artificial Sequence: Synthetic peptide
  REGION 1..7: note = XENP018473 vlCDR2
YASHRYT

SEQ ID NO: 20040 - protein, 9 aa, synthetic construct
  REGION 1..9: note = Description of Artificial Sequence: Synthetic peptide
  REGION 1..9: note = XENP018473 vlCDR3
QQDGSSPRT

SEQ ID NO: 20041 - protein, 451 aa, synthetic construct; identical to SEQ ID NO: 16221
  REGION 1..451: note = Description of Artificial Sequence: Synthetic polypeptide
  REGION 1..451: note = XENP018474 1G6_H1_L1.127_IgG1_PVA_/S267K Heavy Chain

SEQ ID NO: 20042 - protein, 122 aa, synthetic construct; identical to SEQ ID NO: 10922
  REGION 1..122: note = Description of Artificial Sequence: Synthetic polypeptide
  REGION 1..122: note = VH of XENP018474

SEQ ID NO: 20043 - protein, 5 aa, synthetic construct
  REGION 1..5: note = Description of Artificial Sequence: Synthetic peptide
  REGION 1..5: note = XENP018474 vhCDR1
NYWMN

SEQ ID NO: 20044 - protein, 19 aa, synthetic construct
  REGION 1..19: note = Description of Artificial Sequence: Synthetic peptide
  REGION 1..19: note = XENP018474 vhCDR2
EIRLKSNNYATHYAEPVKG

SEQ ID NO: 20045 - protein, 11 aa, synthetic construct
  REGION 1..11: note = Description of Artificial Sequence: Synthetic peptide
  REGION 1..11: note = XENP018474 vhCDR3
YYGNYGGYFDV

SEQ ID NO: 20046 - protein, 214 aa, synthetic construct
  REGION 1..214: note = Description of Artificial Sequence: Synthetic polypeptide
  REGION 1..214: note = XENP018474 1G6_H1_L1.127_IgG1_PVA_/S267K Light Chain
SIVMTQSPATLSVSPGERATLSCRASQSVSNDVAWYQQKPGQSPRLLINYASHRYTGVPDRFTGSGYGTEFTLTISSLQSEDFAVYFCQQDYTSPRTFGGGTKVEIKRTVAAPSVFIFPPSDEQLKSGTASVVCLLNNFYPREAKVQWKVDNALQSGNSQESVTEQDSKDSTYSLSSTLTLSKADYEKHKVYACEVTHQGLSSPVTKSFNRGEC

SEQ ID NO: 20047 - protein, 107 aa, synthetic construct; identical to SEQ ID NO: 14313
  REGION 1..107: note = Description of Artificial Sequence: Synthetic polypeptide
  REGION 1..107: note = VL of XENP018474

SEQ ID NO: 20048 - protein, 11 aa, synthetic construct
  REGION 1..11: note = Description of Artificial Sequence: Synthetic peptide
  REGION 1..11: note = XENP018474 vlCDR1
RASQSVSNDVA

SEQ ID NO: 20049 - protein, 7 aa, synthetic construct
  REGION 1..7: note = Description of Artificial Sequence: Synthetic peptide
  REGION 1..7: note = XENP018474 vlCDR2
YASHRYT

SEQ ID NO: 20050 - protein, 9 aa, synthetic construct
  REGION 1..9: note = Description of Artificial Sequence: Synthetic peptide
  REGION 1..9: note = XENP018474 vlCDR3
QQDYTSPRT

SEQ ID NO: 20051 - protein, 451 aa, synthetic construct; identical to SEQ ID NO: 16221
  REGION 1..451: note = Description of Artificial Sequence: Synthetic polypeptide
  REGION 1..451: note = XENP018475 1G6_H1_L1.128_IgG1_PVA_/S267K Heavy Chain

SEQ ID NO: 20052 - protein, 122 aa, synthetic construct; identical to SEQ ID NO: 10922
  REGION 1..122: note = Description of Artificial Sequence: Synthetic polypeptide
  REGION 1..122: note = VH of XENP018475

SEQ ID NO: 20053 - protein, 5 aa, synthetic construct
  REGION 1..5: note = Description of Artificial Sequence: Synthetic peptide
  REGION 1..5: note = XENP018475 vhCDR1
NYWMN

SEQ ID NO: 20054 - protein, 19 aa, synthetic construct
  REGION 1..19: note = Description of Artificial Sequence: Synthetic peptide
  REGION 1..19: note = XENP018475 vhCDR2
EIRLKSNNYATHYAEPVKG

SEQ ID NO: 20055 - protein, 11 aa, synthetic construct
  REGION 1..11: note = Description of Artificial Sequence: Synthetic peptide
  REGION 1..11: note = XENP018475 vhCDR3
YYGNYGGYFDV

SEQ ID NO: 20056 - protein, 214 aa, synthetic construct
  REGION 1..214: note = Description of Artificial Sequence: Synthetic polypeptide
  REGION 1..214: note = XENP018475 1G6_H1_L1.128_IgG1_PVA_/S267K Light Chain
SIVMTQSPATLSVSPGERATLSCRASQSVSNDVAWYQQKPGQSPRLLINYASHRYTGVPDRFTGSGYGTEFTLTISSLQSEDFAVYFCQQDYASPRTFGGGTKVEIKRTVAAPSVFIFPPSDEQLKSGTASVVCLLNNFYPREAKVQWKVDNALQSGNSQESVTEQDSKDSTYSLSSTLTLSKADYEKHKVYACEVTHQGLSSPVTKSFNRGEC

SEQ ID NO: 20057 - protein, 107 aa, synthetic construct; identical to SEQ ID NO: 14322
  REGION 1..107: note = Description of Artificial Sequence: Synthetic polypeptide
  REGION 1..107: note = VL of XENP018475

SEQ ID NO: 20058 - protein, 11 aa, synthetic construct
  REGION 1..11: note = Description of Artificial Sequence: Synthetic peptide
  REGION 1..11: note = XENP018475 vlCDR1
RASQSVSNDVA

SEQ ID NO: 20059 - protein, 7 aa, synthetic construct
  REGION 1..7: note = Description of Artificial Sequence: Synthetic peptide
  REGION 1..7: note = XENP018475 vlCDR2
YASHRYT

SEQ ID NO: 20060 - protein, 9 aa, synthetic construct
  REGION 1..9: note = Description of Artificial Sequence: Synthetic peptide
  REGION 1..9: note = XENP018475 vlCDR3
QQDYASPRT

SEQ ID NO: 20061 - protein, 451 aa, synthetic construct; identical to SEQ ID NO: 16221
  REGION 1..451: note = Description of Artificial Sequence: Synthetic polypeptide
  REGION 1..451: note = XENP018476 1G6_H1_L1.129_IgG1_PVA_/S267K Heavy Chain

SEQ ID NO: 20062 - protein, 122 aa, synthetic construct; identical to SEQ ID NO: 10922
  REGION 1..122: note = Description of Artificial Sequence: Synthetic polypeptide
  REGION 1..122: note = VH of XENP018476

SEQ ID NO: 20063 - protein, 5 aa, synthetic construct
  REGION 1..5: note = Description of Artificial Sequence: Synthetic peptide
  REGION 1..5: note = XENP018476 vhCDR1
NYWMN

SEQ ID NO: 20064 - protein, 19 aa, synthetic construct
  REGION 1..19: note = Description of Artificial Sequence: Synthetic peptide
  REGION 1..19: note = XENP018476 vhCDR2
EIRLKSNNYATHYAEPVKG

SEQ ID NO: 20065 - protein, 11 aa, synthetic construct
  REGION 1..11: note = Description of Artificial Sequence: Synthetic peptide
  REGION 1..11: note = XENP018476 vhCDR3
YYGNYGGYFDV

SEQ ID NO: 20066 - protein, 214 aa, synthetic construct
  REGION 1..214: note = Description of Artificial Sequence: Synthetic polypeptide
  REGION 1..214: note = XENP018476 1G6_H1_L1.129_IgG1_PVA_/S267K Light Chain
SIVMTQSPATLSVSPGERATLSCRASQSVSNDVAWYQQKPGQSPRLLINYASHRYTGVPDRFTGSGYGTEFTLTISSLQSEDFAVYFCQQDYQSPRTFGGGTKVEIKRTVAAPSVFIFPPSDEQLKSGTASVVCLLNNFYPREAKVQWKVDNALQSGNSQESVTEQDSKDSTYSLSSTLTLSKADYEKHKVYACEVTHQGLSSPVTKSFNRGEC

SEQ ID NO: 20067 - protein, 107 aa, synthetic construct; identical to SEQ ID NO: 14331
  REGION 1..107: note = Description of Artificial Sequence: Synthetic polypeptide
  REGION 1..107: note = VL of XENP018476

SEQ ID NO: 20068 - protein, 11 aa, synthetic construct
  REGION 1..11: note = Description of Artificial Sequence: Synthetic peptide
  REGION 1..11: note = XENP018476 vlCDR1
RASQSVSNDVA

SEQ ID NO: 20069 - protein, 7 aa, synthetic construct
  REGION 1..7: note = Description of Artificial Sequence: Synthetic peptide
  REGION 1..7: note = XENP018476 vlCDR2
YASHRYT

SEQ ID NO: 20070 - protein, 9 aa, synthetic construct
  REGION 1..9: note = Description of Artificial Sequence: Synthetic peptide
  REGION 1..9: note = XENP018476 vlCDR3
QQDYQSPRT

SEQ ID NO: 20071 - protein, 451 aa, synthetic construct; identical to SEQ ID NO: 16221
  REGION 1..451: note = Description of Artificial Sequence: Synthetic polypeptide
  REGION 1..451: note = XENP018477 1G6_H1_L1.130_IgG1_PVA_/S267K Heavy Chain

SEQ ID NO: 20072 - protein, 122 aa, synthetic construct; identical to SEQ ID NO: 10922
  REGION 1..122: note = Description of Artificial Sequence: Synthetic polypeptide
  REGION 1..122: note = VH of XENP018477

SEQ ID NO: 20073 - protein, 5 aa, synthetic construct
  REGION 1..5: note = Description of Artificial Sequence: Synthetic peptide
  REGION 1..5: note = XENP018477 vhCDR1
NYWMN

SEQ ID NO: 20074 - protein, 19 aa, synthetic construct
  REGION 1..19: note = Description of Artificial Sequence: Synthetic peptide
  REGION 1..19: note = XENP018477 vhCDR2
EIRLKSNNYATHYAEPVKG

SEQ ID NO: 20075 - protein, 11 aa, synthetic construct
  REGION 1..11: note = Description of Artificial Sequence: Synthetic peptide
  REGION 1..11: note = XENP018477 vhCDR3
YYGNYGGYFDV

SEQ ID NO: 20076 - protein, 214 aa, synthetic construct
  REGION 1..214: note = Description of Artificial Sequence: Synthetic polypeptide
  REGION 1..214: note = XENP018477 1G6_H1_L1.130_IgG1_PVA_/S267K Light Chain
SIVMTQSPATLSVSPGERATLSCRASQSVSNDVAWYQQKPGQSPRLLINYASHRYTGVPDRFTGSGYGTEFTLTISSLQSEDFAVYFCQQDYGSPRTFGGGTKVEIKRTVAAPSVFIFPPSDEQLKSGTASVVCLLNNFYPREAKVQWKVDNALQSGNSQESVTEQDSKDSTYSLSSTLTLSKADYEKHKVYACEVTHQGLSSPVTKSFNRGEC

SEQ ID NO: 20077 - protein, 107 aa, synthetic construct; identical to SEQ ID NO: 14340
  REGION 1..107: note = Description of Artificial Sequence: Synthetic polypeptide
  REGION 1..107: note = VL of XENP018477

SEQ ID NO: 20078 - protein, 11 aa, synthetic construct
  REGION 1..11: note = Description of Artificial Sequence: Synthetic peptide
  REGION 1..11: note = XENP018477 vlCDR1
RASQSVSNDVA

SEQ ID NO: 20079 - protein, 7 aa, synthetic construct
  REGION 1..7: note = Description of Artificial Sequence: Synthetic peptide
  REGION 1..7: note = XENP018477 vlCDR2
YASHRYT

SEQ ID NO: 20080 - protein, 9 aa, synthetic construct
  REGION 1..9: note = Description of Artificial Sequence: Synthetic peptide
  REGION 1..9: note = XENP018477 vlCDR3
QQDYGSPRT

SEQ ID NO: 20081 - protein, 451 aa, synthetic construct; identical to SEQ ID NO: 16221
  REGION 1..451: note = Description of Artificial Sequence: Synthetic polypeptide
  REGION 1..451: note = XENP018478 1G6_H1_L1.131_IgG1_PVA_/S267K Heavy Chain

SEQ ID NO: 20082 - protein, 122 aa, synthetic construct; identical to SEQ ID NO: 10922
  REGION 1..122: note = Description of Artificial Sequence: Synthetic polypeptide
  REGION 1..122: note = VH of XENP018478

SEQ ID NO: 20083 - protein, 5 aa, synthetic construct
  REGION 1..5: note = Description of Artificial Sequence: Synthetic peptide
  REGION 1..5: note = XENP018478 vhCDR1
NYWMN

SEQ ID NO: 20084 - protein, 19 aa, synthetic construct
  REGION 1..19: note = Description of Artificial Sequence: Synthetic peptide
  REGION 1..19: note = XENP018478 vhCDR2
EIRLKSNNYATHYAEPVKG

SEQ ID NO: 20085 - protein, 11 aa, synthetic construct
  REGION 1..11: note = Description of Artificial Sequence: Synthetic peptide
  REGION 1..11: note = XENP018478 vhCDR3
YYGNYGGYFDV

SEQ ID NO: 20086 - protein, 214 aa, synthetic construct
  REGION 1..214: note = Description of Artificial Sequence: Synthetic polypeptide
  REGION 1..214: note = XENP018478 1G6_H1_L1.131_IgG1_PVA_/S267K Light Chain
SIVMTQSPATLSVSPGERATLSCRASQSVSNDVAWYQQKPGQSPRLLINYASHRYTGVPDRFTGSGYGTEFTLTISSLQSEDFAVYFCQQDYVSPRTFGGGTKVEIKRTVAAPSVFIFPPSDEQLKSGTASVVCLLNNFYPREAKVQWKVDNALQSGNSQESVTEQDSKDSTYSLSSTLTLSKADYEKHKVYACEVTHQGLSSPVTKSFNRGEC

SEQ ID NO: 20087 - protein, 107 aa, synthetic construct; identical to SEQ ID NO: 14349
  REGION 1..107: note = Description of Artificial Sequence: Synthetic polypeptide
  REGION 1..107: note = VL of XENP018478

SEQ ID NO: 20088 - protein, 11 aa, synthetic construct
  REGION 1..11: note = Description of Artificial Sequence: Synthetic peptide
  REGION 1..11: note = XENP018478 vlCDR1
RASQSVSNDVA

SEQ ID NO: 20089 - protein, 7 aa, synthetic construct
  REGION 1..7: note = Description of Artificial Sequence: Synthetic peptide
  REGION 1..7: note = XENP018478 vlCDR2
YASHRYT

SEQ ID NO: 20090 - protein, 9 aa, synthetic construct
  REGION 1..9: note = Description of Artificial Sequence: Synthetic peptide
  REGION 1..9: note = XENP018478 vlCDR3
QQDYVSPRT

SEQ ID NO: 20091 - protein, 451 aa, synthetic construct; identical to SEQ ID NO: 16221
  REGION 1..451: note = Description of Artificial Sequence: Synthetic polypeptide
  REGION 1..451: note = XENP018479 1G6_H1_L1.132_IgG1_PVA_/S267K Heavy Chain

SEQ ID NO: 20092 - protein, 122 aa, synthetic construct; identical to SEQ ID NO: 10922
  REGION 1..122: note = Description of Artificial Sequence: Synthetic polypeptide
  REGION 1..122: note = VH of XENP018479

SEQ ID NO: 20093 - protein, 5 aa, synthetic construct
  REGION 1..5: note = Description of Artificial Sequence: Synthetic peptide
  REGION 1..5: note = XENP018479 vhCDR1
NYWMN

SEQ ID NO: 20094 - protein, 19 aa, synthetic construct
  REGION 1..19: note = Description of Artificial Sequence: Synthetic peptide
  REGION 1..19: note = XENP018479 vhCDR2
EIRLKSNNYATHYAEPVKG

SEQ ID NO: 20095 - protein, 11 aa, synthetic construct
  REGION 1..11: note = Description of Artificial Sequence: Synthetic peptide
  REGION 1..11: note = XENP018479 vhCDR3
YYGNYGGYFDV

SEQ ID NO: 20096 - protein, 214 aa, synthetic construct
  REGION 1..214: note = Description of Artificial Sequence: Synthetic polypeptide
  REGION 1..214: note = XENP018479 1G6_H1_L1.132_IgG1_PVA_/S267K Light Chain
SIVMTQSPATLSVSPGERATLSCRASQSVSNDVAWYQQKPGQSPRLLINYASHRYTGVPDRFTGSGYGTEFTLTISSLQSEDFAVYFCQQDYHSPRTFGGGTKVEIKRTVAAPSVFIFPPSDEQLKSGTASVVCLLNNFYPREAKVQWKVDNALQSGNSQESVTEQDSKDSTYSLSSTLTLSKADYEKHKVYACEVTHQGLSSPVTKSFNRGEC

SEQ ID NO: 20097 - protein, 107 aa, synthetic construct; identical to SEQ ID NO: 14358
  REGION 1..107: note = Description of Artificial Sequence: Synthetic polypeptide
  REGION 1..107: note = VL of XENP018479

SEQ ID NO: 20098 - protein, 11 aa, synthetic construct
  REGION 1..11: note = Description of Artificial Sequence: Synthetic peptide
  REGION 1..11: note = XENP018479 vlCDR1
RASQSVSNDVA

SEQ ID NO: 20099 - protein, 7 aa, synthetic construct
  REGION 1..7: note = Description of Artificial Sequence: Synthetic peptide
  REGION 1..7: note = XENP018479 vlCDR2
YASHRYT

SEQ ID NO: 20100 - protein, 9 aa, synthetic construct
  REGION 1..9: note = Description of Artificial Sequence: Synthetic peptide
  REGION 1..9: note = XENP018479 vlCDR3
QQDYHSPRT

SEQ ID NO: 20101 - protein, 451 aa, synthetic construct; identical to SEQ ID NO: 16221
  REGION 1..451: note = Description of Artificial Sequence: Synthetic polypeptide
  REGION 1..451: note = XENP018480 1G6_H1_L1.133_IgG1_PVA_/S267K Heavy Chain

SEQ ID NO: 20102 - protein, 122 aa, synthetic construct; identical to SEQ ID NO: 10922
  REGION 1..122: note = Description of Artificial Sequence: Synthetic polypeptide
  REGION 1..122: note = VH of XENP018480

SEQ ID NO: 20103 - protein, 5 aa, synthetic construct
  REGION 1..5: note = Description of Artificial Sequence: Synthetic peptide
  REGION 1..5: note = XENP018480 vhCDR1
NYWMN

SEQ ID NO: 20104 - protein, 19 aa, synthetic construct
  REGION 1..19: note = Description of Artificial Sequence: Synthetic peptide
  REGION 1..19: note = XENP018480 vhCDR2
EIRLKSNNYATHYAEPVKG

SEQ ID NO: 20105 - protein, 11 aa, synthetic construct
  REGION 1..11: note = Description of Artificial Sequence: Synthetic peptide
  REGION 1..11: note = XENP018480 vhCDR3
YYGNYGGYFDV

SEQ ID NO: 20106 - protein, 214 aa, synthetic construct
  REGION 1..214: note = Description of Artificial Sequence: Synthetic polypeptide
  REGION 1..214: note = XENP018480 1G6_H1_L1.133_IgG1_PVA_/S267K Light Chain
SIVMTQSPATLSVSPGERATLSCRASQSVSNDVAWYQQKPGQSPRLLINYASHRYTGVPDRFTGSGYGTEFTLTISSLQSEDFAVYFCQQDYDSPRTFGGGTKVEIKRTVAAPSVFIFPPSDEQLKSGTASVVCLLNNFYPREAKVQWKVDNALQSGNSQESVTEQDSKDSTYSLSSTLTLSKADYEKHKVYACEVTHQGLSSPVTKSFNRGEC

SEQ ID NO: 20107 - protein, 107 aa, synthetic construct; identical to SEQ ID NO: 14367
  REGION 1..107: note = Description of Artificial Sequence: Synthetic polypeptide
  REGION 1..107: note = VL of XENP018480

SEQ ID NO: 20108 - protein, 11 aa, synthetic construct
  REGION 1..11: note = Description of Artificial Sequence: Synthetic peptide
  REGION 1..11: note = XENP018480 vlCDR1
RASQSVSNDVA

SEQ ID NO: 20109 - protein, 7 aa, synthetic construct
  REGION 1..7: note = Description of Artificial Sequence: Synthetic peptide
  REGION 1..7: note = XENP018480 vlCDR2
YASHRYT

SEQ ID NO: 20110 - protein, 9 aa, synthetic construct
  REGION 1..9: note = Description of Artificial Sequence: Synthetic peptide
  REGION 1..9: note = XENP018480 vlCDR3
QQDYDSPRT

SEQ ID NO: 20111 - protein, 451 aa, synthetic construct; identical to SEQ ID NO: 16221
  REGION 1..451: note = Description of Artificial Sequence: Synthetic polypeptide
  REGION 1..451: note = XENP018481 1G6_H1_L1.134_IgG1_PVA_/S267K Heavy Chain

SEQ ID NO: 20112 - protein, 122 aa, synthetic construct; identical to SEQ ID NO: 10922
  REGION 1..122: note = Description of Artificial Sequence: Synthetic polypeptide
  REGION 1..122: note = VH of XENP018481

SEQ ID NO: 20113 - protein, 5 aa, synthetic construct
  REGION 1..5: note = Description of Artificial Sequence: Synthetic peptide
  REGION 1..5: note = XENP018481 vhCDR1
NYWMN

SEQ ID NO: 20114 - protein, 19 aa, synthetic construct
  REGION 1..19: note = Description of Artificial Sequence: Synthetic peptide
  REGION 1..19: note = XENP018481 vhCDR2
EIRLKSNNYATHYAEPVKG

SEQ ID NO: 20115 - protein, 11 aa, synthetic construct
  REGION 1..11: note = Description of Artificial Sequence: Synthetic peptide
  REGION 1..11: note = XENP018481 vhCDR3
YYGNYGGYFDV

SEQ ID NO: 20116 - protein, 214 aa, synthetic construct
  REGION 1..214: note = Description of Artificial Sequence: Synthetic polypeptide
  REGION 1..214: note = XENP018481 1G6_H1_L1.134_IgG1_PVA_/S267K Light Chain
SIVMTQSPATLSVSPGERATLSCRASQSVSNDVAWYQQKPGQSPRLLINYASHRYTGVPDRFTGSGYGTEFTLTISSLQSEDFAVYFCQQDYKSPRTFGGGTKVEIKRTVAAPSVFIFPPSDEQLKSGTASVVCLLNNFYPREAKVQWKVDNALQSGNSQESVTEQDSKDSTYSLSSTLTLSKADYEKHKVYACEVTHQGLSSPVTKSFNRGEC

SEQ ID NO: 20117 - protein, 107 aa, synthetic construct; identical to SEQ ID NO: 14376
  REGION 1..107: note = Description of Artificial Sequence: Synthetic polypeptide
  REGION 1..107: note = VL of XENP018481

SEQ ID NO: 20118 - protein, 11 aa, synthetic construct
  REGION 1..11: note = Description of Artificial Sequence: Synthetic peptide
  REGION 1..11: note = XENP018481 vlCDR1
RASQSVSNDVA

SEQ ID NO: 20119 - protein, 7 aa, synthetic construct
  REGION 1..7: note = Description of Artificial Sequence: Synthetic peptide
  REGION 1..7: note = XENP018481 vlCDR2
YASHRYT

SEQ ID NO: 20120 - protein, 9 aa, synthetic construct
  REGION 1..9: note = Description of Artificial Sequence: Synthetic peptide
  REGION 1..9: note = XENP018481 vlCDR3
QQDYKSPRT

SEQ ID NO: 20121 - protein, 451 aa, synthetic construct; identical to SEQ ID NO: 16221
  REGION 1..451: note = Description of Artificial Sequence: Synthetic polypeptide
  REGION 1..451: note = XENP018482 1G6_H1_L1.135_IgG1_PVA_/S267K Heavy Chain

SEQ ID NO: 20122 - protein, 122 aa, synthetic construct; identical to SEQ ID NO: 10922
  REGION 1..122: note = Description of Artificial Sequence: Synthetic polypeptide
  REGION 1..122: note = VH of XENP018482

SEQ ID NO: 20123 - protein, 5 aa, synthetic construct
  REGION 1..5: note = Description of Artificial Sequence: Synthetic peptide
  REGION 1..5: note = XENP018482 vhCDR1
NYWMN

SEQ ID NO: 20124 - protein, 19 aa, synthetic construct
  REGION 1..19: note = Description of Artificial Sequence: Synthetic peptide
  REGION 1..19: note = XENP018482 vhCDR2
EIRLKSNNYATHYAEPVKG

SEQ ID NO: 20125 - protein, 11 aa, synthetic construct
  REGION 1..11: note = Description of Artificial Sequence: Synthetic peptide
  REGION 1..11: note = XENP018482 vhCDR3
YYGNYGGYFDV

SEQ ID NO: 20126 - protein, 214 aa, synthetic construct
  REGION 1..214: note = Description of Artificial Sequence: Synthetic polypeptide
  REGION 1..214: note = XENP018482 1G6_H1_L1.135_IgG1_PVA_/S267K Light Chain
SIVMTQSPATLSVSPGERATLSCRASQSVSNDVAWYQQKPGQSPRLLINYASHRYTGVPDRFTGSGYGTEFTLTISSLQSEDFAVYFCQQDYFSPRTFGGGTKVEIKRTVAAPSVFIFPPSDEQLKSGTASVVCLLNNFYPREAKVQWKVDNALQSGNSQESVTEQDSKDSTYSLSSTLTLSKADYEKHKVYACEVTHQGLSSPVTKSFNRGEC

SEQ ID NO: 20127 - protein, 107 aa, synthetic construct; identical to SEQ ID NO: 14385
  REGION 1..107: note = Description of Artificial Sequence: Synthetic polypeptide
  REGION 1..107: note = VL of XENP018482

SEQ ID NO: 20128 - protein, 11 aa, synthetic construct
  REGION 1..11: note = Description of Artificial Sequence: Synthetic peptide
  REGION 1..11: note = XENP018482 vlCDR1
RASQSVSNDVA

SEQ ID NO: 20129 - protein, 7 aa, synthetic construct
  REGION 1..7: note = Description of Artificial Sequence: Synthetic peptide
  REGION 1..7: note = XENP018482 vlCDR2
YASHRYT

SEQ ID NO: 20130 - protein, 9 aa, synthetic construct
  REGION 1..9: note = Description of Artificial Sequence: Synthetic peptide
  REGION 1..9: note = XENP018482 vlCDR3
QQDYFSPRT

SEQ ID NO: 20131 - protein, 451 aa, synthetic construct; identical to SEQ ID NO: 16221
  REGION 1..451: note = Description of Artificial Sequence: Synthetic polypeptide
  REGION 1..451: note = XENP018483 1G6_H1_L1.136_IgG1_PVA_/S267K Heavy Chain

SEQ ID NO: 20132 - protein, 122 aa, synthetic construct; identical to SEQ ID NO: 10922
  REGION 1..122: note = Description of Artificial Sequence: Synthetic polypeptide
  REGION 1..122: note = VH of XENP018483

SEQ ID NO: 20133 - protein, 5 aa, synthetic construct
  REGION 1..5: note = Description of Artificial Sequence: Synthetic peptide
  REGION 1..5: note = XENP018483 vhCDR1
NYWMN

SEQ ID NO: 20134 - protein, 19 aa, synthetic construct
  REGION 1..19: note = Description of Artificial Sequence: Synthetic peptide
  REGION 1..19: note = XENP018483 vhCDR2
EIRLKSNNYATHYAEPVKG

SEQ ID NO: 20135 - protein, 11 aa, synthetic construct
  REGION 1..11: note = Description of Artificial Sequence: Synthetic peptide
  REGION 1..11: note = XENP018483 vhCDR3
YYGNYGGYFDV

SEQ ID NO: 20136 - protein, 214 aa, synthetic construct
  REGION 1..214: note = Description of Artificial Sequence: Synthetic polypeptide
  REGION 1..214: note = XENP018483 1G6_H1_L1.136_IgG1_PVA_/S267K Light Chain
SIVMTQSPATLSVSPGERATLSCRASQSVSNDVAWYQQKPGQSPRLLINYASHRYTGVPDRFTGSGYGTEFTLTISSLQSEDFAVYFCQQDYSTPRTFGGGTKVEIKRTVAAPSVFIFPPSDEQLKSGTASVVCLLNNFYPREAKVQWKVDNALQSGNSQESVTEQDSKDSTYSLSSTLTLSKADYEKHKVYACEVTHQGLSSPVTKSFNRGEC

SEQ ID NO: 20137 - protein, 107 aa, synthetic construct; identical to SEQ ID NO: 14394
  REGION 1..107: note = Description of Artificial Sequence: Synthetic polypeptide
  REGION 1..107: note = VL of XENP018483

SEQ ID NO: 20138 - protein, 11 aa, synthetic construct
  REGION 1..11: note = Description of Artificial Sequence: Synthetic peptide
  REGION 1..11: note = XENP018483 vlCDR1
RASQSVSNDVA

SEQ ID NO: 20139 - protein, 7 aa, synthetic construct
  REGION 1..7: note = Description of Artificial Sequence: Synthetic peptide
  REGION 1..7: note = XENP018483 vlCDR2
YASHRYT

SEQ ID NO: 20140 - protein, 9 aa, synthetic construct
  REGION 1..9: note = Description of Artificial Sequence: Synthetic peptide
  REGION 1..9: note = XENP018483 vlCDR3
QQDYSTPRT

SEQ ID NO: 20141 - protein, 451 aa, synthetic construct; identical to SEQ ID NO: 16221
  REGION 1..451: note = Description of Artificial Sequence: Synthetic polypeptide
  REGION 1..451: note = XENP018484 1G6_H1_L1.137_IgG1_PVA_/S267K Heavy Chain

SEQ ID NO: 20142 - protein, 122 aa, synthetic construct; identical to SEQ ID NO: 10922
  REGION 1..122: note = Description of Artificial Sequence: Synthetic polypeptide
  REGION 1..122: note = VH of XENP018484

SEQ ID NO: 20143 - protein, 5 aa, synthetic construct
  REGION 1..5: note = Description of Artificial Sequence: Synthetic peptide
  REGION 1..5: note = XENP018484 vhCDR1
NYWMN

SEQ ID NO: 20144 - protein, 19 aa, synthetic construct
  REGION 1..19: note = Description of Artificial Sequence: Synthetic peptide
  REGION 1..19: note = XENP018484 vhCDR2
EIRLKSNNYATHYAEPVKG

SEQ ID NO: 20145 - protein, 11 aa, synthetic construct
  REGION 1..11: note = Description of Artificial Sequence: Synthetic peptide
  REGION 1..11: note = XENP018484 vhCDR3
YYGNYGGYFDV

SEQ ID NO: 20146 - protein, 214 aa, synthetic construct
  REGION 1..214: note = Description of Artificial Sequence: Synthetic polypeptide
  REGION 1..214: note = XENP018484 1G6_H1_L1.137_IgG1_PVA_/S267K Light Chain
SIVMTQSPATLSVSPGERATLSCRASQSVSNDVAWYQQKPGQSPRLLINYASHRYTGVPDRFTGSGYGTEFTLTISSLQSEDFAVYFCQQDYSAPRTFGGGTKVEIKRTVAAPSVFIFPPSDEQLKSGTASVVCLLNNFYPREAKVQWKVDNALQSGNSQESVTEQDSKDSTYSLSSTLTLSKADYEKHKVYACEVTHQGLSSPVTKSFNRGEC

SEQ ID NO: 20147 - protein, 107 aa, synthetic construct; identical to SEQ ID NO: 14403
  REGION 1..107: note = Description of Artificial Sequence: Synthetic polypeptide
  REGION 1..107: note = VL of XENP018484

SEQ ID NO: 20148 - protein, 11 aa, synthetic construct
  REGION 1..11: note = Description of Artificial Sequence: Synthetic peptide
  REGION 1..11: note = XENP018484 vlCDR1
RASQSVSNDVA

SEQ ID NO: 20149 - protein, 7 aa, synthetic construct
  REGION 1..7: note = Description of Artificial Sequence: Synthetic peptide
  REGION 1..7: note = XENP018484 vlCDR2
YASHRYT

SEQ ID NO: 20150 - protein, 9 aa, synthetic construct
  REGION 1..9: note = Description of Artificial Sequence: Synthetic peptide
  REGION 1..9: note = XENP018484 vlCDR3
QQDYSAPRT

SEQ ID NO: 20151 - protein, 451 aa, synthetic construct; identical to SEQ ID NO: 16221
  REGION 1..451: note = Description of Artificial Sequence: Synthetic polypeptide
  REGION 1..451: note = XENP018485 1G6_H1_L1.138_IgG1_PVA_/S267K Heavy Chain

SEQ ID NO: 20152 - protein, 122 aa, synthetic construct; identical to SEQ ID NO: 10922
  REGION 1..122: note = Description of Artificial Sequence: Synthetic polypeptide
  REGION 1..122: note = VH of XENP018485

SEQ ID NO: 20153 - protein, 5 aa, synthetic construct
  REGION 1..5: note = Description of Artificial Sequence: Synthetic peptide
  REGION 1..5: note = XENP018485 vhCDR1
NYWMN

SEQ ID NO: 20154 - protein, 19 aa, synthetic construct
  REGION 1..19: note = Description of Artificial Sequence: Synthetic peptide
  REGION 1..19: note = XENP018485 vhCDR2
EIRLKSNNYATHYAEPVKG

SEQ ID NO: 20155 - protein, 11 aa, synthetic construct
  REGION 1..11: note = Description of Artificial Sequence: Synthetic peptide
  REGION 1..11: note = XENP018485 vhCDR3
YYGNYGGYFDV

SEQ ID NO: 20156 - protein, 214 aa, synthetic construct
  REGION 1..214: note = Description of Artificial Sequence: Synthetic polypeptide
  REGION 1..214: note = XENP018485 1G6_H1_L1.138_IgG1_PVA_/S267K Light Chain
SIVMTQSPATLSVSPGERATLSCRASQSVSNDVAWYQQKPGQSPRLLINYASHRYTGVPDRFTGSGYGTEFTLTISSLQSEDFAVYFCQQDYSNPRTFGGGTKVEIKRTVAAPSVFIFPPSDEQLKSGTASVVCLLNNFYPREAKVQWKVDNALQSGNSQESVTEQDSKDSTYSLSSTLTLSKADYEKHKVYACEVTHQGLSSPVTKSFNRGEC

SEQ ID NO: 20157 - protein, 107 aa, synthetic construct; identical to SEQ ID NO: 14412
  REGION 1..107: note = Description of Artificial Sequence: Synthetic polypeptide
  REGION 1..107: note = VL of XENP018485

SEQ ID NO: 20158 - protein, 11 aa, synthetic construct
  REGION 1..11: note = Description of Artificial Sequence: Synthetic peptide
  REGION 1..11: note = XENP018485 vlCDR1
RASQSVSNDVA

SEQ ID NO: 20159 - protein, 7 aa, synthetic construct
  REGION 1..7: note = Description of Artificial Sequence: Synthetic peptide
  REGION 1..7: note = XENP018485 vlCDR2
YASHRYT

SEQ ID NO: 20160 - protein, 9 aa, synthetic construct
  REGION 1..9: note = Description of Artificial Sequence: Synthetic peptide
  REGION 1..9: note = XENP018485 vlCDR3
QQDYSNPRT

SEQ ID NO: 20161 - protein, 451 aa, synthetic construct; identical to SEQ ID NO: 16221
  REGION 1..451: note = Description of Artificial Sequence: Synthetic polypeptide
  REGION 1..451: note = XENP018486 1G6_H1_L1.139_IgG1_PVA_/S267K Heavy Chain

SEQ ID NO: 20162 - protein, 122 aa, synthetic construct; identical to SEQ ID NO: 10922
  REGION 1..122: note = Description of Artificial Sequence: Synthetic polypeptide
  REGION 1..122: note = VH of XENP018486

SEQ ID NO: 20163 - protein, 5 aa, synthetic construct
  REGION 1..5: note = Description of Artificial Sequence: Synthetic peptide
  REGION 1..5: note = XENP018486 vhCDR1
NYWMN

SEQ ID NO: 20164 - protein, 19 aa, synthetic construct
  REGION 1..19: note = Description of Artificial Sequence: Synthetic peptide
  REGION 1..19: note = XENP018486 vhCDR2
EIRLKSNNYATHYAEPVKG

SEQ ID NO: 20165 - protein, 11 aa, synthetic construct
  REGION 1..11: note = Description of Artificial Sequence: Synthetic peptide
  REGION 1..11: note = XENP018486 vhCDR3
YYGNYGGYFDV

SEQ ID NO: 20166 - protein, 214 aa, synthetic construct
  REGION 1..214: note = Description of Artificial Sequence: Synthetic polypeptide
  REGION 1..214: note = XENP018486 1G6_H1_L1.139_IgG1_PVA_/S267K Light Chain
SIVMTQSPATLSVSPGERATLSCRASQSVSNDVAWYQQKPGQSPRLLINYASHRYTGVPDRFTGSGYGTEFTLTISSLQSEDFAVYFCQQDYSGPRTFGGGTKVEIKRTVAAPSVFIFPPSDEQLKSGTASVVCLLNNFYPREAKVQWKVDNALQSGNSQESVTEQDSKDSTYSLSSTLTLSKADYEKHKVYACEVTHQGLSSPVTKSFNRGEC

SEQ ID NO: 20167 - protein, 107 aa, synthetic construct; identical to SEQ ID NO: 14421
  REGION 1..107: note = Description of Artificial Sequence: Synthetic polypeptide
  REGION 1..107: note = VL of XENP018486

SEQ ID NO: 20168 - protein, 11 aa, synthetic construct
  REGION 1..11: note = Description of Artificial Sequence: Synthetic peptide
  REGION 1..11: note = XENP018486 vlCDR1
RASQSVSNDVA

SEQ ID NO: 20169 - protein, 7 aa, synthetic construct
  REGION 1..7: note = Description of Artificial Sequence: Synthetic peptide
  REGION 1..7: note = XENP018486 vlCDR2
YASHRYT

SEQ ID NO: 20170 - protein, 9 aa, synthetic construct
  REGION 1..9: note = Description of Artificial Sequence: Synthetic peptide
  REGION 1..9: note = XENP018486 vlCDR3
QQDYSGPRT

SEQ ID NO: 20171 - protein, 451 aa, synthetic construct; identical to SEQ ID NO: 16221
  REGION 1..451: note = Description of Artificial Sequence: Synthetic polypeptide
  REGION 1..451: note = XENP018487 1G6_H1_L1.140_IgG1_PVA_/S267K Heavy Chain

SEQ ID NO: 20172 - protein, 122 aa, synthetic construct; identical to SEQ ID NO: 10922
  REGION 1..122: note = Description of Artificial Sequence: Synthetic polypeptide
  REGION 1..122: note = VH of XENP018487

SEQ ID NO: 20173 - protein, 5 aa, synthetic construct
  REGION 1..5: note = Description of Artificial Sequence: Synthetic peptide
  REGION 1..5: note = XENP018487 vhCDR1
NYWMN

SEQ ID NO: 20174 - protein, 19 aa, synthetic construct
  REGION 1..19: note = Description of Artificial Sequence: Synthetic peptide
  REGION 1..19: note = XENP018487 vhCDR2
EIRLKSNNYATHYAEPVKG

SEQ ID NO: 20175 - protein, 11 aa, synthetic construct
  REGION 1..11: note = Description of Artificial Sequence: Synthetic peptide
  REGION 1..11: note = XENP018487 vhCDR3
YYGNYGGYFDV

SEQ ID NO: 20176 - protein, 214 aa, synthetic construct
  REGION 1..214: note = Description of Artificial Sequence: Synthetic polypeptide
  REGION 1..214: note = XENP018487 1G6_H1_L1.140_IgG1_PVA_/S267K Light Chain
SIVMTQSPATLSVSPGERATLSCRASQSVSNDVAWYQQKPGQSPRLLINYASHRYTGVPDRFTGSGYGTEFTLTISSLQSEDFAVYFCQQDYSVPRTFGGGTKVEIKRTVAAPSVFIFPPSDEQLKSGTASVVCLLNNFYPREAKVQWKVDNALQSGNSQESVTEQDSKDSTYSLSSTLTLSKADYEKHKVYACEVTHQGLSSPVTKSFNRGEC

SEQ ID NO: 20177 - protein, 107 aa, synthetic construct; identical to SEQ ID NO: 14430
  REGION 1..107: note = Description of Artificial Sequence: Synthetic polypeptide
  REGION 1..107: note = VL of XENP018487

SEQ ID NO: 20178 - protein, 11 aa, synthetic construct
  REGION 1..11: note = Description of Artificial Sequence: Synthetic peptide
  REGION 1..11: note = XENP018487 vlCDR1
RASQSVSNDVA

SEQ ID NO: 20179 - protein, 7 aa, synthetic construct
  REGION 1..7: note = Description of Artificial Sequence: Synthetic peptide
  REGION 1..7: note = XENP018487 vlCDR2
YASHRYT

SEQ ID NO: 20180 - protein, 9 aa, synthetic construct
  REGION 1..9: note = Description of Artificial Sequence: Synthetic peptide
  REGION 1..9: note = XENP018487 vlCDR3
QQDYSVPRT

SEQ ID NO: 20181 - protein, 451 aa, synthetic construct; identical to SEQ ID NO: 16221
  REGION 1..451: note = Description of Artificial Sequence: Synthetic polypeptide
  REGION 1..451: note = XENP018488 1G6_H1_L1.141_IgG1_PVA_/S267K Heavy Chain

SEQ ID NO: 20182 - protein, 122 aa, synthetic construct; identical to SEQ ID NO: 10922
  REGION 1..122: note = Description of Artificial Sequence: Synthetic polypeptide
  REGION 1..122: note = VH of XENP018488

SEQ ID NO: 20183 - protein, 5 aa, synthetic construct
  REGION 1..5: note = Description of Artificial Sequence: Synthetic peptide
  REGION 1..5: note = XENP018488 vhCDR1
NYWMN

SEQ ID NO: 20184 - protein, 19 aa, synthetic construct
  REGION 1..19: note = Description of Artificial Sequence: Synthetic peptide
  REGION 1..19: note = XENP018488 vhCDR2
EIRLKSNNYATHYAEPVKG

SEQ ID NO: 20185 - protein, 11 aa, synthetic construct
  REGION 1..11: note = Description of Artificial Sequence: Synthetic peptide
  REGION 1..11: note = XENP018488 vhCDR3
YYGNYGGYFDV

SEQ ID NO: 20186 - protein, 214 aa, synthetic construct
  REGION 1..214: note = Description of Artificial Sequence: Synthetic polypeptide
  REGION 1..214: note = XENP018488 1G6_H1_L1.141_IgG1_PVA_/S267K Light Chain
SIVMTQSPATLSVSPGERATLSCRASQSVSNDVAWYQQKPGQSPRLLINYASHRYTGVPDRFTGSGYGTEFTLTISSLQSEDFAVYFCQQDYSHPRTFGGGTKVEIKRTVAAPSVFIFPPSDEQLKSGTASVVCLLNNFYPREAKVQWKVDNALQSGNSQESVTEQDSKDSTYSLSSTLTLSKADYEKHKVYACEVTHQGLSSPVTKSFNRGEC

SEQ ID NO: 20187 - protein, 107 aa, synthetic construct; identical to SEQ ID NO: 14439
  REGION 1..107: note = Description of Artificial Sequence: Synthetic polypeptide
  REGION 1..107: note = VL of XENP018488

SEQ ID NO: 20188 - protein, 11 aa, synthetic construct
  REGION 1..11: note = Description of Artificial Sequence: Synthetic peptide
  REGION 1..11: note = XENP018488 vlCDR1
RASQSVSNDVA

SEQ ID NO: 20189 - protein, 7 aa, synthetic construct
  REGION 1..7: note = Description of Artificial Sequence: Synthetic peptide
  REGION 1..7: note = XENP018488 vlCDR2
YASHRYT

SEQ ID NO: 20190 - protein, 9 aa, synthetic construct
  REGION 1..9: note = Description of Artificial Sequence: Synthetic peptide
  REGION 1..9: note = XENP018488 vlCDR3
QQDYSHPRT

SEQ ID NO: 20191 - protein, 451 aa, synthetic construct; identical to SEQ ID NO: 16221
  REGION 1..451: note = Description of Artificial Sequence: Synthetic polypeptide
  REGION 1..451: note = XENP018489 1G6_H1_L1.142_IgG1_PVA_/S267K Heavy Chain

SEQ ID NO: 20192 - protein, 122 aa, synthetic construct; identical to SEQ ID NO: 10922
  REGION 1..122: note = Description of Artificial Sequence: Synthetic polypeptide
  REGION 1..122: note = VH of XENP018489

SEQ ID NO: 20193 - protein, 5 aa, synthetic construct
  REGION 1..5: note = Description of Artificial Sequence: Synthetic peptide
  REGION 1..5: note = XENP018489 vhCDR1
NYWMN

SEQ ID NO: 20194 - protein, 19 aa, synthetic construct
  REGION 1..19: note = Description of Artificial Sequence: Synthetic peptide
  REGION 1..19: note = XENP018489 vhCDR2
EIRLKSNNYATHYAEPVKG

SEQ ID NO: 20195 - protein, 11 aa, synthetic construct
  REGION 1..11: note = Description of Artificial Sequence: Synthetic peptide
  REGION 1..11: note = XENP018489 vhCDR3
YYGNYGGYFDV

SEQ ID NO: 20196 - protein, 214 aa, synthetic construct
  REGION 1..214: note = Description of Artificial Sequence: Synthetic polypeptide
  REGION 1..214: note = XENP018489 1G6_H1_L1.142_IgG1_PVA_/S267K Light Chain
SIVMTQSPATLSVSPGERATLSCRASQSVSNDVAWYQQKPGQSPRLLINYASHRYTGVPDRFTGSGYGTEFTLTISSLQSEDFAVYFCQQDYSDPRTFGGGTKVEIKRTVAAPSVFIFPPSDEQLKSGTASVVCLLNNFYPREAKVQWKVDNALQSGNSQESVTEQDSKDSTYSLSSTLTLSKADYEKHKVYACEVTHQGLSSPVTKSFNRGEC

SEQ ID NO: 20197 - protein, 107 aa, synthetic construct; identical to SEQ ID NO: 14448
  REGION 1..107: note = Description of Artificial Sequence: Synthetic polypeptide
  REGION 1..107: note = VL of XENP018489

SEQ ID NO: 20198 - protein, 11 aa, synthetic construct
  REGION 1..11: note = Description of Artificial Sequence: Synthetic peptide
  REGION 1..11: note = XENP018489 vlCDR1
RASQSVSNDVA

SEQ ID NO: 20199 - protein, 7 aa, synthetic construct
  REGION 1..7: note = Description of Artificial Sequence: Synthetic peptide
  REGION 1..7: note = XENP018489 vlCDR2
YASHRYT

SEQ ID NO: 20200 - protein, 9 aa, synthetic construct
  REGION 1..9: note = Description of Artificial Sequence: Synthetic peptide
  REGION 1..9: note = XENP018489 vlCDR3
QQDYSDPRT

SEQ ID NO: 20201 - protein, 451 aa, synthetic construct; identical to SEQ ID NO: 16221
  REGION 1..451: note = Description of Artificial Sequence: Synthetic polypeptide
  REGION 1..451: note = XENP018490 1G6_H1_L1.143_IgG1_PVA_/S267K Heavy Chain

SEQ ID NO: 20202 - protein, 122 aa, synthetic construct; identical to SEQ ID NO: 10922
  REGION 1..122: note = Description of Artificial Sequence: Synthetic polypeptide
  REGION 1..122: note = VH of XENP018490

SEQ ID NO: 20203 - protein, 5 aa, synthetic construct
  REGION 1..5: note = Description of Artificial Sequence: Synthetic peptide
  REGION 1..5: note = XENP018490 vhCDR1
NYWMN

SEQ ID NO: 20204 - protein, 19 aa, synthetic construct
  REGION 1..19: note = Description of Artificial Sequence: Synthetic peptide
  REGION 1..19: note = XENP018490 vhCDR2
EIRLKSNNYATHYAEPVKG

SEQ ID NO: 20205 - protein, 11 aa, synthetic construct
  REGION 1..11: note = Description of Artificial Sequence: Synthetic peptide
  REGION 1..11: note = XENP018490 vhCDR3
YYGNYGGYFDV

SEQ ID NO: 20206 - protein, 214 aa, synthetic construct
  REGION 1..214: note = Description of Artificial Sequence: Synthetic polypeptide
  REGION 1..214: note = XENP018490 1G6_H1_L1.143_IgG1_PVA_/S267K Light Chain
SIVMTQSPATLSVSPGERATLSCRASQSVSNDVAWYQQKPGQSPRLLINYASHRYTGVPDRFTGSGYGTEFTLTISSLQSEDFAVYFCQQDYSKPRTFGGGTKVEIKRTVAAPSVFIFPPSDEQLKSGTASVVCLLNNFYPREAKVQWKVDNALQSGNSQESVTEQDSKDSTYSLSSTLTLSKADYEKHKVYACEVTHQGLSSPVTKSFNRGEC

SEQ ID NO: 20207 - protein, 107 aa, synthetic construct; identical to SEQ ID NO: 14457
  REGION 1..107: note = Description of Artificial Sequence: Synthetic polypeptide
  REGION 1..107: note = VL of XENP018490

SEQ ID NO: 20208 - protein, 11 aa, synthetic construct
  REGION 1..11: note = Description of Artificial Sequence: Synthetic peptide
  REGION 1..11: note = XENP018490 vlCDR1
RASQSVSNDVA

SEQ ID NO: 20209 - protein, 7 aa, synthetic construct
  REGION 1..7: note = Description of Artificial Sequence: Synthetic peptide
  REGION 1..7: note = XENP018490 vlCDR2
YASHRYT

SEQ ID NO: 20210 - protein, 9 aa, synthetic construct
  REGION 1..9: note = Description of Artificial Sequence: Synthetic peptide
  REGION 1..9: note = XENP018490 vlCDR3
QQDYSKPRT

SEQ ID NO: 20211 - protein, 451 aa, synthetic construct; identical to SEQ ID NO: 16221
  REGION 1..451: note = Description of Artificial Sequence: Synthetic polypeptide
  REGION 1..451: note = XENP018491 1G6_H1_L1.144_IgG1_PVA_/S267K Heavy Chain

SEQ ID NO: 20212 - protein, 122 aa, synthetic construct; identical to SEQ ID NO: 10922
  REGION 1..122: note = Description of Artificial Sequence: Synthetic polypeptide
  REGION 1..122: note = VH of XENP018491

SEQ ID NO: 20213 - protein, 5 aa, synthetic construct
  REGION 1..5: note = Description of Artificial Sequence: Synthetic peptide
  REGION 1..5: note = XENP018491 vhCDR1
NYWMN

SEQ ID NO: 20214 - protein, 19 aa, synthetic construct
  REGION 1..19: note = Description of Artificial Sequence: Synthetic peptide
  REGION 1..19: note = XENP018491 vhCDR2
EIRLKSNNYATHYAEPVKG

SEQ ID NO: 20215 - protein, 11 aa, synthetic construct
  REGION 1..11: note = Description of Artificial Sequence: Synthetic peptide
  REGION 1..11: note = XENP018491 vhCDR3
YYGNYGGYFDV

SEQ ID NO: 20216 - protein, 214 aa, synthetic construct
  REGION 1..214: note = Description of Artificial Sequence: Synthetic polypeptide
  REGION 1..214: note = XENP018491 1G6_H1_L1.144_IgG1_PVA_/S267K Light Chain
SIVMTQSPATLSVSPGERATLSCRASQSVSNDVAWYQQKPGQSPRLLINYASHRYTGVPDRFTGSGYGTEFTLTISSLQSEDFAVYFCQQDYSFPRTFGGGTKVEIKRTVAAPSVFIFPPSDEQLKSGTASVVCLLNNFYPREAKVQWKVDNALQSGNSQESVTEQDSKDSTYSLSSTLTLSKADYEKHKVYACEVTHQGLSSPVTKSFNRGEC

SEQ ID NO: 20217 - protein, 107 aa, synthetic construct; identical to SEQ ID NO: 14466
  REGION 1..107: note = Description of Artificial Sequence: Synthetic polypeptide
  REGION 1..107: note = VL of XENP018491

SEQ ID NO: 20218 - protein, 11 aa, synthetic construct
  REGION 1..11: note = Description of Artificial Sequence: Synthetic peptide
  REGION 1..11: note = XENP018491 vlCDR1
RASQSVSNDVA

SEQ ID NO: 20219 - protein, 7 aa, synthetic construct
  REGION 1..7: note = Description of Artificial Sequence: Synthetic peptide
  REGION 1..7: note = XENP018491 vlCDR2
YASHRYT

SEQ ID NO: 20220 - protein, 9 aa, synthetic construct
  REGION 1..9: note = Description of Artificial Sequence: Synthetic peptide
  REGION 1..9: note = XENP018491 vlCDR3
QQDYSFPRT

SEQ ID NO: 20221 - protein, 451 aa, synthetic construct; identical to SEQ ID NO: 16221
  REGION 1..451: note = Description of Artificial Sequence: Synthetic polypeptide
  REGION 1..451: note = XENP018492 1G6_H1_L1.145_IgG1_PVA_/S267K Heavy Chain

SEQ ID NO: 20222 - protein, 122 aa, synthetic construct; identical to SEQ ID NO: 10922
  REGION 1..122: note = Description of Artificial Sequence: Synthetic polypeptide
  REGION 1..122: note = VH of XENP018492

SEQ ID NO: 20223 - protein, 5 aa, synthetic construct
  REGION 1..5: note = Description of Artificial Sequence: Synthetic peptide
  REGION 1..5: note = XENP018492 vhCDR1
NYWMN

SEQ ID NO: 20224 - protein, 19 aa, synthetic construct
  REGION 1..19: note = Description of Artificial Sequence: Synthetic peptide
  REGION 1..19: note = XENP018492 vhCDR2
EIRLKSNNYATHYAEPVKG

SEQ ID NO: 20225 - protein, 11 aa, synthetic construct
  REGION 1..11: note = Description of Artificial Sequence: Synthetic peptide
  REGION 1..11: note = XENP018492 vhCDR3
YYGNYGGYFDV

SEQ ID NO: 20226 - protein, 214 aa, synthetic construct
  REGION 1..214: note = Description of Artificial Sequence: Synthetic polypeptide
  REGION 1..214: note = XENP018492 1G6_H1_L1.145_IgG1_PVA_/S267K Light Chain
SIVMTQSPATLSVSPGERATLSCRASQSVSNDVAWYQQKPGQSPRLLINYASHRYTGVPDRFTGSGYGTEFTLTISSLQSEDFAVYFCQQDYSSPRTFGGGTKLEIKRTVAAPSVFIFPPSDEQLKSGTASVVCLLNNFYPREAKVQWKVDNALQSGNSQESVTEQDSKDSTYSLSSTLTLSKADYEKHKVYACEVTHQGLSSPVTKSFNRGEC

SEQ ID NO: 20227 - protein, 107 aa, synthetic construct; identical to SEQ ID NO: 14475
  REGION 1..107: note = Description of Artificial Sequence: Synthetic polypeptide
  REGION 1..107: note = VL of XENP018492

SEQ ID NO: 20228 - protein, 11 aa, synthetic construct
  REGION 1..11: note = Description of Artificial Sequence: Synthetic peptide
  REGION 1..11: note = XENP018492 vlCDR1
RASQSVSNDVA

SEQ ID NO: 20229 - protein, 7 aa, synthetic construct
  REGION 1..7: note = Description of Artificial Sequence: Synthetic peptide
  REGION 1..7: note = XENP018492 vlCDR2
YASHRYT

SEQ ID NO: 20230 - protein, 9 aa, synthetic construct
  REGION 1..9: note = Description of Artificial Sequence: Synthetic peptide
  REGION 1..9: note = XENP018492 vlCDR3
QQDYSSPRT

SEQ ID NO: 20231 - protein, 451 aa, synthetic construct
  REGION 1..451: note = Description of Artificial Sequence: Synthetic polypeptide
  REGION 1..451: note = XENP018892 1G6_H0L0_IgG1_PVA_/S267K Heavy Chain
EVKLEESGGGLVQPGGSMKLSCVASGFTFSNYWMNWVRQSPEKGLEWVAEIRLKSNNYATHYAESVKGRFTISRDDSKSSVYLQMNNLRAEDTGIYYCTRYYGNYGGYFDVWGAGTTVTVSSASTKGPSVFPLAPSSKSTSGGTAALGCLVKDYFPEPVTVSWNSGALTSGVHTFPAVLQSSGLYSLSSVVTVPSSSLGTQTYICNVNHKPSNTKVDKKVEPKSCDKTHTCPPCPAPPVAGPSVFLFPPKPKDTLMISRTPEVTCVVVDVKHEDPEVKFNWYVDGVEVHNAKTKPREEQYNSTYRVVSVLTVLHQDWLNGKEYKCKVSNKALPAPIEKTISKAKGQPREPQVYTLPPSREEMTKNQVSLTCLVKGFYPSDIAVEWESNGQPENNYKTTPPVLDSDGSFFLYSKLTVDKSRWQQGNVFSCSVMHEALHNHYTQKSLSLSPGK

SEQ ID NO: 20232 - protein, 122 aa, synthetic construct; identical to SEQ ID NO: 14483
  REGION 1..122: note = Description of Artificial Sequence: Synthetic polypeptide
  REGION 1..122: note = VH of XENP018892

SEQ ID NO: 20233 - protein, 5 aa, synthetic construct
  REGION 1..5: note = Description of Artificial Sequence: Synthetic peptide
  REGION 1..5: note = XENP018892 vhCDR1
NYWMN

SEQ ID NO: 20234 - protein, 19 aa, synthetic construct
  REGION 1..19: note = Description of Artificial Sequence: Synthetic peptide
  REGION 1..19: note = XENP018892 vhCDR2
EIRLKSNNYATHYAESVKG

SEQ ID NO: 20235 - protein, 11 aa, synthetic construct
  REGION 1..11: note = Description of Artificial Sequence: Synthetic peptide
  REGION 1..11: note = XENP018892 vhCDR3
YYGNYGGYFDV

SEQ ID NO: 20236 - protein, 214 aa, synthetic construct
  REGION 1..214: note = Description of Artificial Sequence: Synthetic polypeptide
  REGION 1..214: note = XENP018892 1G6_H0L0_IgG1_PVA_/S267K Light Chain
SIVMTQTPKFLLVSAGDRVTITCKASQSVSNDVAWYQQKPGQSPKLLINYASHRYTGVPDRFTGSGYGTDFTFTISTVQAEDLAVYFCQQDYSSPRTFGGGTKLEIKRTVAAPSVFIFPPSDEQLKSGTASVVCLLNNFYPREAKVQWKVDNALQSGNSQESVTEQDSKDSTYSLSSTLTLSKADYEKHKVYACEVTHQGLSSPVTKSFNRGEC

SEQ ID NO: 20237 - protein, 107 aa, synthetic construct; identical to SEQ ID NO: 14484
  REGION 1..107: note = Description of Artificial Sequence: Synthetic polypeptide
  REGION 1..107: note = VL of XENP018892

SEQ ID NO: 20238 - protein, 11 aa, synthetic construct
  REGION 1..11: note = Description of Artificial Sequence: Synthetic peptide
  REGION 1..11: note = XENP018892 vlCDR1
KASQSVSNDVA

SEQ ID NO: 20239 - protein, 7 aa, synthetic construct
  REGION 1..7: note = Description of Artificial Sequence: Synthetic peptide
  REGION 1..7: note = XENP018892 vlCDR2
YASHRYT

SEQ ID NO: 20240 - protein, 9 aa, synthetic construct
  REGION 1..9: note = Description of Artificial Sequence: Synthetic peptide
  REGION 1..9: note = XENP018892 vlCDR3
QQDYSSPRT

SEQ ID NO: 20241 - protein, 449 aa, synthetic construct
  REGION 1..449: note = Description of Artificial Sequence: Synthetic polypeptide
  REGION 1..449: note = XENP018893 4C11_H0L0_IgG1_PVA_/S267K Heavy Chain
EIHLQQSGTVLAKPGASVKMSCTASGYTFTSYWMHWVKQRPGQGLEWIGAIYPGNSDTSYNQKFKGKAKLTAVTSASTAYMELSSLTNEDSAVYYCTNLYYGSSFAMDYWGQGTSVTVSSASTKGPSVFPLAPSSKSTSGGTAALGCLVKDYFPEPVTVSWNSGALTSGVHTFPAVLQSSGLYSLSSVVTVPSSSLGTQTYICNVNHKPSNTKVDKKVEPKSCDKTHTCPPCPAPPVAGPSVFLFPPKPKDTLMISRTPEVTCVVVDVKHEDPEVKFNWYVDGVEVHNAKTKPREEQYNSTYRVVSVLTVLHQDWLNGKEYKCKVSNKALPAPIEKTISKAKGQPREPQVYTLPPSREEMTKNQVSLTCLVKGFYPSDIAVEWESNGQPENNYKTTPPVLDSDGSFFLYSKLTVDKSRWQQGNVFSCSVMHEALHNHYTQKSLSLSPGK

SEQ ID NO: 20242 - protein, 120 aa, synthetic construct
  REGION 1..120: note = Description of Artificial Sequence: Synthetic polypeptide
  REGION 1..120: note = VH of XENP018893
EIHLQQSGTVLAKPGASVKMSCTASGYTFTSYWMHWVKQRPGQGLEWIGAIYPGNSDTSYNQKFKGKAKLTAVTSASTAYMELSSLTNEDSAVYYCTNLYYGSSFAMDYWGQGTSVTVSS

SEQ ID NO: 20243 - protein, 5 aa, synthetic construct
  REGION 1..5: note = Description of Artificial Sequence: Synthetic peptide
  REGION 1..5: note = XENP018893 vhCDR1
SYWMH

SEQ ID NO: 20244 - protein, 17 aa, synthetic construct
  REGION 1..17: note = Description of Artificial Sequence: Synthetic peptide
  REGION 1..17: note = XENP018893 vhCDR2
AIYPGNSDTSYNQKFKG

SEQ ID NO: 20245 - protein, 11 aa, synthetic construct
  REGION 1..11: note = Description of Artificial Sequence: Synthetic peptide
  REGION 1..11: note = XENP018893 vhCDR3
LYYGSSFAMDY

SEQ ID NO: 20246 - protein, 214 aa, synthetic construct
  REGION 1..214: note = Description of Artificial Sequence: Synthetic polypeptide
  REGION 1..214: note = XENP018893 4C11_H0L0_IgG1_PVA_/S267K Light Chain
DIKMTQSPSSIYASLGERVTVTCRASQDINTYLSWFQQLPGKSPKTLIYRANRLVDGVPSRFSGSGSGQDYSLTISSLEYEDMGIYYCLHYDDFPYTFGGGTKLEIKRTVAAPSVFIFPPSDEQLKSGTASVVCLLNNFYPREAKVQWKVDNALQSGNSQESVTEQDSKDSTYSLSSTLTLSKADYEKHKVYACEVTHQGLSSPVTKSFNRGEC

SEQ ID NO: 20247 - protein, 107 aa, synthetic construct
  REGION 1..107: note = Description of Artificial Sequence: Synthetic polypeptide
  REGION 1..107: note = VL of XENP018893
DIKMTQSPSSIYASLGERVTVTCRASQDINTYLSWFQQLPGKSPKTLIYRANRLVDGVPSRFSGSGSGQDYSLTISSLEYEDMGIYYCLHYDDFPYTFGGGTKLEIK

SEQ ID NO: 20248 - protein, 11 aa, synthetic construct
  REGION 1..11: note = Description of Artificial Sequence: Synthetic peptide
  REGION 1..11: note = XENP018893 vlCDR1
RASQDINTYLS

SEQ ID NO: 20249 - protein, 7 aa, synthetic construct
  REGION 1..7: note = Description of Artificial Sequence: Synthetic peptide
  REGION 1..7: note = XENP018893 vlCDR2
RANRLVD

SEQ ID NO: 20250 - protein, 9 aa, synthetic construct
  REGION 1..9: note = Description of Artificial Sequence: Synthetic peptide
  REGION 1..9: note = XENP018893 vlCDR3
LHYDDFPYT

SEQ ID NO: 20251 - protein, 446 aa, synthetic construct
  REGION 1..446: note = Description of Artificial Sequence: Synthetic polypeptide
  REGION 1..446: note = XENP018894 6A3_H0L0_IgG1_PVA_/S267K Heavy Chain
EVKLVESGGGLVKPGGSLKLSCAASGFTFSSYGMSWVRQTPEKRLEWVATISGGGRYTYYPDSVKGRFTISRDNAKNNLYLQMSSLRSEDTALYYCASYYDSSFDYWGQGTTLTVSSASTKGPSVFPLAPSSKSTSGGTAALGCLVKDYFPEPVTVSWNSGALTSGVHTFPAVLQSSGLYSLSSVVTVPSSSLGTQTYICNVNHKPSNTKVDKKVEPKSCDKTHTCPPCPAPPVAGPSVFLFPPKPKDTLMISRTPEVTCVVVDVKHEDPEVKFNWYVDGVEVHNAKTKPREEQYNSTYRVVSVLTVLHQDWLNGKEYKCKVSNKALPAPIEKTISKAKGQPREPQVYTLPPSREEMTKNQVSLTCLVKGFYPSDIAVEWESNGQPENNYKTTPPVLDSDGSFFLYSKLTVDKSRWQQGNVFSCSVMHEALHNHYTQKSLSLSPGK

SEQ ID NO: 20252 - protein, 117 aa, synthetic construct; identical to SEQ ID NO: 14501
  REGION 1..117: note = Description of Artificial Sequence: Synthetic polypeptide
  REGION 1..117: note = VH of XENP018894

SEQ ID NO: 20253 - protein, 5 aa, synthetic construct
  REGION 1..5: note = Description of Artificial Sequence: Synthetic peptide
  REGION 1..5: note = XENP018894 vhCDR1
SYGMS

SEQ ID NO: 20254 - protein, 17 aa, synthetic construct
  REGION 1..17: note = Description of Artificial Sequence: Synthetic peptide
  REGION 1..17: note = XENP018894 vhCDR2
TISGGGRYTYYPDSVKG

SEQ ID NO: 20255 - protein, 8 aa, synthetic construct
  REGION 1..8: note = Description of Artificial Sequence: Synthetic peptide
  REGION 1..8: note = XENP018894 vhCDR3
YYDSSFDY

SEQ ID NO: 20256 - protein, 214 aa, synthetic construct
  REGION 1..214: note = Description of Artificial Sequence: Synthetic polypeptide
  REGION 1..214: note = XENP018894 6A3_H0L0_IgG1_PVA_/S267K Light Chain
DIVMTQSHKFMSTSVGDRVSITCKASQDVGTAVAWYQQKPGQSPKLLIYWASTRHTGVPDRFTGSGSGTDFTLTISNVQSEDLADYFCQHYSIYPWTFGGGTKLEIKRTVAAPSVFIFPPSDEQLKSGTASVVCLLNNFYPREAKVQWKVDNALQSGNSQESVTEQDSKDSTYSLSSTLTLSKADYEKHKVYACEVTHQGLSSPVTKSFNRGEC

SEQ ID NO: 20257 - protein, 107 aa, synthetic construct; identical to SEQ ID NO: 14502
  REGION 1..107: note = Description of Artificial Sequence: Synthetic polypeptide
  REGION 1..107: note = VL of XENP018894

SEQ ID NO: 20258 - protein, 11 aa, synthetic construct
  REGION 1..11: note = Description of Artificial Sequence: Synthetic peptide
  REGION 1..11: note = XENP018894 vlCDR1
KASQDVGTAVA

SEQ ID NO: 20259 - protein, 7 aa, synthetic construct
  REGION 1..7: note = Description of Artificial Sequence: Synthetic peptide
  REGION 1..7: note = XENP018894 vlCDR2
WASTRHT

SEQ ID NO: 20260 - protein, 9 aa, synthetic construct
  REGION 1..9: note = Description of Artificial Sequence: Synthetic peptide
  REGION 1..9: note = XENP018894 vlCDR3
QHYSIYPWT

SEQ ID NO: 20261 - protein, 451 aa, synthetic construct; identical to SEQ ID NO: 17291
  REGION 1..451: note = Description of Artificial Sequence: Synthetic polypeptide
  REGION 1..451: note = XENP018910 1G6_H1.90_L1.119_IgG1_PVA_/S267K Heavy Chain

SEQ ID NO: 20262 - protein, 122 aa, synthetic construct; identical to SEQ ID NO: 11837
  REGION 1..122: note = Description of Artificial Sequence: Synthetic polypeptide
  REGION 1..122: note = VH of XENP018910

SEQ ID NO: 20263 - protein, 5 aa, synthetic construct
  REGION 1..5: note = Description of Artificial Sequence: Synthetic peptide
  REGION 1..5: note = XENP018910 vhCDR1
NYWMN

SEQ ID NO: 20264 - protein, 19 aa, synthetic construct
  REGION 1..19: note = Description of Artificial Sequence: Synthetic peptide
  REGION 1..19: note = XENP018910 vhCDR2
EIRLYSNNYATHYAEPVKG

SEQ ID NO: 20265 - protein, 11 aa, synthetic construct
  REGION 1..11: note = Description of Artificial Sequence: Synthetic peptide
  REGION 1..11: note = XENP018910 vhCDR3
YYGNYGGYFDV

SEQ ID NO: 20266 - protein, 214 aa, synthetic construct; identical to SEQ ID NO: 19966
  REGION 1..214: note = Description of Artificial Sequence: Synthetic polypeptide
  REGION 1..214: note = XENP018910 1G6_H1.90_L1.119_IgG1_PVA_/S267K Light Chain

SEQ ID NO: 20267 - protein, 107 aa, synthetic construct; identical to SEQ ID NO: 14241
  REGION 1..107: note = Description of Artificial Sequence: Synthetic polypeptide
  REGION 1..107: note = VL of XENP018910

SEQ ID NO: 20268 - protein, 11 aa, synthetic construct
  REGION 1..11: note = Description of Artificial Sequence: Synthetic peptide
  REGION 1..11: note = XENP018910 vlCDR1
RASQSVSNDVA

SEQ ID NO: 20269 - protein, 7 aa, synthetic construct
  REGION 1..7: note = Description of Artificial Sequence: Synthetic peptide
  REGION 1..7: note = XENP018910 vlCDR2
YASHRYT

SEQ ID NO: 20270 - protein, 9 aa, synthetic construct
  REGION 1..9: note = Description of Artificial Sequence: Synthetic peptide
  REGION 1..9: note = XENP018910 vlCDR3
QQDWSSPRT

SEQ ID NO: 20271 - protein, 451 aa, synthetic construct; identical to SEQ ID NO: 17291
  REGION 1..451: note = Description of Artificial Sequence: Synthetic polypeptide
  REGION 1..451: note = XENP018911 1G6_H1.90_L1.23_IgG1_PVA_/S267K Heavy Chain

SEQ ID NO: 20272 - protein, 122 aa, synthetic construct; identical to SEQ ID NO: 11837
  REGION 1..122: note = Description of Artificial Sequence: Synthetic polypeptide
  REGION 1..122: note = VH of XENP018911

SEQ ID NO: 20273 - protein, 5 aa, synthetic construct
  REGION 1..5: note = Description of Artificial Sequence: Synthetic peptide
  REGION 1..5: note = XENP018911 vhCDR1
NYWMN

SEQ ID NO: 20274 - protein, 19 aa, synthetic construct
  REGION 1..19: note = Description of Artificial Sequence: Synthetic peptide
  REGION 1..19: note = XENP018911 vhCDR2
EIRLYSNNYATHYAEPVKG

SEQ ID NO: 20275 - protein, 11 aa, synthetic construct
  REGION 1..11: note = Description of Artificial Sequence: Synthetic peptide
  REGION 1..11: note = XENP018911 vhCDR3
YYGNYGGYFDV

SEQ ID NO: 20276 - protein, 214 aa, synthetic construct; identical to SEQ ID NO: 19006
  REGION 1..214: note = Description of Artificial Sequence: Synthetic polypeptide
  REGION 1..214: note = XENP018911 1G6_H1.90_L1.23_IgG1_PVA_/S267K Light Chain

SEQ ID NO: 20277 - protein, 107 aa, synthetic construct; identical to SEQ ID NO: 13377
  REGION 1..107: note = Description of Artificial Sequence: Synthetic polypeptide
  REGION 1..107: note = VL of XENP018911

SEQ ID NO: 20278 - protein, 11 aa, synthetic construct
  REGION 1..11: note = Description of Artificial Sequence: Synthetic peptide
  REGION 1..11: note = XENP018911 vlCDR1
RASQSVGNDVA

SEQ ID NO: 20279 - protein, 7 aa, synthetic construct
  REGION 1..7: note = Description of Artificial Sequence: Synthetic peptide
  REGION 1..7: note = XENP018911 vlCDR2
YASHRYT

SEQ ID NO: 20280 - protein, 9 aa, synthetic construct
  REGION 1..9: note = Description of Artificial Sequence: Synthetic peptide
  REGION 1..9: note = XENP018911 vlCDR3
QQDYSSPRT

SEQ ID NO: 20281 - protein, 451 aa, synthetic construct; identical to SEQ ID NO: 17291
  REGION 1..451: note = Description of Artificial Sequence: Synthetic polypeptide
  REGION 1..451: note = XENP018912 1G6_H1.90_L1.67_IgG1_PVA_/S267K Heavy Chain

SEQ ID NO: 20282 - protein, 122 aa, synthetic construct; identical to SEQ ID NO: 11837
  REGION 1..122: note = Description of Artificial Sequence: Synthetic polypeptide
  REGION 1..122: note = VH of XENP018912

SEQ ID NO: 20283 - protein, 5 aa, synthetic construct
  REGION 1..5: note = Description of Artificial Sequence: Synthetic peptide
  REGION 1..5: note = XENP018912 vhCDR1
NYWMN

SEQ ID NO: 20284 - protein, 19 aa, synthetic construct
  REGION 1..19: note = Description of Artificial Sequence: Synthetic peptide
  REGION 1..19: note = XENP018912 vhCDR2
EIRLYSNNYATHYAEPVKG

SEQ ID NO: 20285 - protein, 11 aa, synthetic construct
  REGION 1..11: note = Description of Artificial Sequence: Synthetic peptide
  REGION 1..11: note = XENP018912 vhCDR3
YYGNYGGYFDV

SEQ ID NO: 20286 - protein, 214 aa, synthetic construct; identical to SEQ ID NO: 19446
  REGION 1..214: note = Description of Artificial Sequence: Synthetic polypeptide
  REGION 1..214: note = XENP018912 1G6_H1.90_L1.67_IgG1_PVA_/S267K Light Chain

SEQ ID NO: 20287 - protein, 107 aa, synthetic construct; identical to SEQ ID NO: 13773
  REGION 1..107: note = Description of Artificial Sequence: Synthetic polypeptide
  REGION 1..107: note = VL of XENP018912

SEQ ID NO: 20288 - protein, 11 aa, synthetic construct
  REGION 1..11: note = Description of Artificial Sequence: Synthetic peptide
  REGION 1..11: note = XENP018912 vlCDR1
RASQSVSNDVA

SEQ ID NO: 20289 - protein, 7 aa, synthetic construct
  REGION 1..7: note = Description of Artificial Sequence: Synthetic peptide
  REGION 1..7: note = XENP018912 vlCDR2
YASWRYT

SEQ ID NO: 20290 - protein, 9 aa, synthetic construct
  REGION 1..9: note = Description of Artificial Sequence: Synthetic peptide
  REGION 1..9: note = XENP018912 vlCDR3
QQDYSSPRT

SEQ ID NO: 20291 - protein, 451 aa, synthetic construct; identical to SEQ ID NO: 17291
  REGION 1..451: note = Description of Artificial Sequence: Synthetic polypeptide
  REGION 1..451: note = XENP018913 1G6_H1.90_L1.94_IgG1_PVA_/S267K Heavy Chain

SEQ ID NO: 20292 - protein, 122 aa, synthetic construct; identical to SEQ ID NO: 11837
  REGION 1..122: note = Description of Artificial Sequence: Synthetic polypeptide
  REGION 1..122: note = VH of XENP018913

SEQ ID NO: 20293 - protein, 5 aa, synthetic construct
  REGION 1..5: note = Description of Artificial Sequence: Synthetic peptide
  REGION 1..5: note = XENP018913 vhCDR1
NYWMN

SEQ ID NO: 20294 - protein, 19 aa, synthetic construct
  REGION 1..19: note = Description of Artificial Sequence: Synthetic peptide
  REGION 1..19: note = XENP018913 vhCDR2
EIRLYSNNYATHYAEPVKG

SEQ ID NO: 20295 - protein, 11 aa, synthetic construct
  REGION 1..11: note = Description of Artificial Sequence: Synthetic peptide
  REGION 1..11: note = XENP018913 vhCDR3
YYGNYGGYFDV

SEQ ID NO: 20296 - protein, 214 aa, synthetic construct; identical to SEQ ID NO: 19716
  REGION 1..214: note = Description of Artificial Sequence: Synthetic polypeptide
  REGION 1..214: note = XENP018913 1G6_H1.90_L1.94_IgG1_PVA_/S267K Light Chain

SEQ ID NO: 20297 - protein, 107 aa, synthetic construct; identical to SEQ ID NO: 14016
  REGION 1..107: note = Description of Artificial Sequence: Synthetic polypeptide
  REGION 1..107: note = VL of XENP018913

SEQ ID NO: 20298 - protein, 11 aa, synthetic construct
  REGION 1..11: note = Description of Artificial Sequence: Synthetic peptide
  REGION 1..11: note = XENP018913 vlCDR1
RASQSVSNDVA

SEQ ID NO: 20299 - protein, 7 aa, synthetic construct
  REGION 1..7: note = Description of Artificial Sequence: Synthetic peptide
  REGION 1..7: note = XENP018913 vlCDR2
YASHRYT

SEQ ID NO: 20300 - protein, 9 aa, synthetic construct
  REGION 1..9: note = Description of Artificial Sequence: Synthetic peptide
  REGION 1..9: note = XENP018913 vlCDR3
QQDYSSPRT

SEQ ID NO: 20301 - protein, 451 aa, synthetic construct; identical to SEQ ID NO: 17291
  REGION 1..451: note = Description of Artificial Sequence: Synthetic polypeptide
  REGION 1..451: note = XENP018914 1G6_H1.90_L1.116_IgG1_PVA_/S267K Heavy Chain

SEQ ID NO: 20302 - protein, 122 aa, synthetic construct; identical to SEQ ID NO: 11837
  REGION 1..122: note = Description of Artificial Sequence: Synthetic polypeptide
  REGION 1..122: note = VH of XENP018914

SEQ ID NO: 20303 - protein, 5 aa, synthetic construct
  REGION 1..5: note = Description of Artificial Sequence: Synthetic peptide
  REGION 1..5: note = XENP018914 vhCDR1
NYWMN

SEQ ID NO: 20304 - protein, 19 aa, synthetic construct
  REGION 1..19: note = Description of Artificial Sequence: Synthetic peptide
  REGION 1..19: note = XENP018914 vhCDR2
EIRLYSNNYATHYAEPVKG

SEQ ID NO: 20305 - protein, 11 aa, synthetic construct
  REGION 1..11: note = Description of Artificial Sequence: Synthetic peptide
  REGION 1..11: note = XENP018914 vhCDR3
YYGNYGGYFDV

SEQ ID NO: 20306 - protein, 214 aa, synthetic construct; identical to SEQ ID NO: 19936
  REGION 1..214: note = Description of Artificial Sequence: Synthetic polypeptide
  REGION 1..214: note = XENP018914 1G6_H1.90_L1.116_IgG1_PVA_/S267K Light Chain

SEQ ID NO: 20307 - protein, 107 aa, synthetic construct; identical to SEQ ID NO: 14214
  REGION 1..107: note = Description of Artificial Sequence: Synthetic polypeptide
  REGION 1..107: note = VL of XENP018914

SEQ ID NO: 20308 - protein, 11 aa, synthetic construct
  REGION 1..11: note = Description of Artificial Sequence: Synthetic peptide
  REGION 1..11: note = XENP018914 vlCDR1
RASQSVSNDVA

SEQ ID NO: 20309 - protein, 7 aa, synthetic construct
  REGION 1..7: note = Description of Artificial Sequence: Synthetic peptide
  REGION 1..7: note = XENP018914 vlCDR2
YASHRYT

SEQ ID NO: 20310 - protein, 9 aa, synthetic construct
  REGION 1..9: note = Description of Artificial Sequence: Synthetic peptide
  REGION 1..9: note = XENP018914 vlCDR3
QQDFSSPRT

SEQ ID NO: 20311 - protein, 451 aa, synthetic construct; identical to SEQ ID NO: 17941
  REGION 1..451: note = Description of Artificial Sequence: Synthetic polypeptide
  REGION 1..451: note = XENP018915 1G6_H1.155_L1.119_IgG1_PVA_/S267K Heavy Chain

SEQ ID NO: 20312 - protein, 122 aa, synthetic construct; identical to SEQ ID NO: 12422
  REGION 1..122: note = Description of Artificial Sequence: Synthetic polypeptide
  REGION 1..122: note = VH of XENP018915

SEQ ID NO: 20313 - protein, 5 aa, synthetic construct
  REGION 1..5: note = Description of Artificial Sequence: Synthetic peptide
  REGION 1..5: note = XENP018915 vhCDR1
NYWMN

SEQ ID NO: 20314 - protein, 19 aa, synthetic construct
  REGION 1..19: note = Description of Artificial Sequence: Synthetic peptide
  REGION 1..19: note = XENP018915 vhCDR2
EIRLKSNNYATHYAEPVKG

SEQ ID NO: 20315 - protein, 11 aa, synthetic construct
  REGION 1..11: note = Description of Artificial Sequence: Synthetic peptide
  REGION 1..11: note = XENP018915 vhCDR3
YYGNYGGYFDV

SEQ ID NO: 20316 - protein, 214 aa, synthetic construct; identical to SEQ ID NO: 19966
  REGION 1..214: note = Description of Artificial Sequence: Synthetic polypeptide
  REGION 1..214: note = XENP018915 1G6_H1.155_L1.119_IgG1_PVA_/S267K Light Chain

SEQ ID NO: 20317 - protein, 107 aa, synthetic construct; identical to SEQ ID NO: 14241
  REGION 1..107: note = Description of Artificial Sequence: Synthetic polypeptide
  REGION 1..107: note = VL of XENP018915

SEQ ID NO: 20318 - protein, 11 aa, synthetic construct
  REGION 1..11: note = Description of Artificial Sequence: Synthetic peptide
  REGION 1..11: note = XENP018915 vlCDR1
RASQSVSNDVA

SEQ ID NO: 20319 - protein, 7 aa, synthetic construct
  REGION 1..7: note = Description of Artificial Sequence: Synthetic peptide
  REGION 1..7: note = XENP018915 vlCDR2
YASHRYT

SEQ ID NO: 20320 - protein, 9 aa, synthetic construct
  REGION 1..9: note = Description of Artificial Sequence: Synthetic peptide
  REGION 1..9: note = XENP018915 vlCDR3
QQDWSSPRT

SEQ ID NO: 20321 - protein, 451 aa, synthetic construct
  REGION 1..451: note = Description of Artificial Sequence: Synthetic polypeptide
  REGION 1..451: note = XENP018980 1G6_H1.239_L1_IgG1_PVA_/S267K Heavy Chain
EVQLKESGGGLVKPGGSLRLSCAASGFTFSNYWMNWVRQAPGKGLEWVGEIRLKSNNYATHYAEPVKGRFTISRDDSKSTVYLQMNSLKTEDTAVYYCTRYYGNYGGYFDVWGAGTLVTVSSASTKGPSVFPLAPSSKSTSGGTAALGCLVKDYFPEPVTVSWNSGALTSGVHTFPAVLQSSGLYSLSSVVTVPSSSLGTQTYICNVNHKPSNTKVDKKVEPKSCDKTHTCPPCPAPPVAGPSVFLFPPKPKDTLMISRTPEVTCVVVDVKHEDPEVKFNWYVDGVEVHNAKTKPREEQYNSTYRVVSVLTVLHQDWLNGKEYKCKVSNKALPAPIEKTISKAKGQPREPQVYTLPPSREEMTKNQVSLTCLVKGFYPSDIAVEWESNGQPENNYKTTPPVLDSDGSFFLYSKLTVDKSRWQQGNVFSCSVMHEALHNHYTQKSLSLSPGK

SEQ ID NO: 20322 - protein, 122 aa, synthetic construct; identical to SEQ ID NO: 14681
  REGION 1..122: note = Description of Artificial Sequence: Synthetic polypeptide
  REGION 1..122: note = VH of XENP018980

SEQ ID NO: 20323 - protein, 5 aa, synthetic construct
  REGION 1..5: note = Description of Artificial Sequence: Synthetic peptide
  REGION 1..5: note = XENP018980 vhCDR1
NYWMN

SEQ ID NO: 20324 - protein, 19 aa, synthetic construct
  REGION 1..19: note = Description of Artificial Sequence: Synthetic peptide
  REGION 1..19: note = XENP018980 vhCDR2
EIRLKSNNYATHYAEPVKG

SEQ ID NO: 20325 - protein, 11 aa, synthetic construct
  REGION 1..11: note = Description of Artificial Sequence: Synthetic peptide
  REGION 1..11: note = XENP018980 vhCDR3
YYGNYGGYFDV

SEQ ID NO: 20326 - protein, 214 aa, synthetic construct; identical to SEQ ID NO: 16226
  REGION 1..214: note = Description of Artificial Sequence: Synthetic polypeptide
  REGION 1..214: note = XENP018980 1G6_H1.239_L1_IgG1_PVA_/S267K Light Chain

SEQ ID NO: 20327 - protein, 107 aa, synthetic construct; identical to SEQ ID NO: 10923
  REGION 1..107: note = Description of Artificial Sequence: Synthetic polypeptide
  REGION 1..107: note = VL of XENP018980

SEQ ID NO: 20328 - protein, 11 aa, synthetic construct
  REGION 1..11: note = Description of Artificial Sequence: Synthetic peptide
  REGION 1..11: note = XENP018980 vlCDR1
RASQSVSNDVA

SEQ ID NO: 20329 - protein, 7 aa, synthetic construct
  REGION 1..7: note = Description of Artificial Sequence: Synthetic peptide
  REGION 1..7: note = XENP018980 vlCDR2
YASHRYT

SEQ ID NO: 20330 - protein, 9 aa, synthetic construct
  REGION 1..9: note = Description of Artificial Sequence: Synthetic peptide
  REGION 1..9: note = XENP018980 vlCDR3
QQDYSSPRT

SEQ ID NO: 20331 - protein, 451 aa, synthetic construct
  REGION 1..451: note = Description of Artificial Sequence: Synthetic polypeptide
  REGION 1..451: note = XENP018981 1G6_H1.240_L1_IgG1_PVA_/S267K Heavy Chain
EVQLVESGGGLVKPGESLRLSCAASGFTFSNYWMNWVRQAPGKGLEWVGEIRLKSNNYATHYAEPVKGRFTISRDDSKSTVYLQMNSLKTEDTAVYYCTRYYGNYGGYFDVWGAGTLVTVSSASTKGPSVFPLAPSSKSTSGGTAALGCLVKDYFPEPVTVSWNSGALTSGVHTFPAVLQSSGLYSLSSVVTVPSSSLGTQTYICNVNHKPSNTKVDKKVEPKSCDKTHTCPPCPAPPVAGPSVFLFPPKPKDTLMISRTPEVTCVVVDVKHEDPEVKFNWYVDGVEVHNAKTKPREEQYNSTYRVVSVLTVLHQDWLNGKEYKCKVSNKALPAPIEKTISKAKGQPREPQVYTLPPSREEMTKNQVSLTCLVKGFYPSDIAVEWESNGQPENNYKTTPPVLDSDGSFFLYSKLTVDKSRWQQGNVFSCSVMHEALHNHYTQKSLSLSPGK

SEQ ID NO: 20332 - protein, 122 aa, synthetic construct; identical to SEQ ID NO: 14690
  REGION 1..122: note = Description of Artificial Sequence: Synthetic polypeptide
  REGION 1..122: note = VH of XENP018981

SEQ ID NO: 20333 - protein, 5 aa, synthetic construct
  REGION 1..5: note = Description of Artificial Sequence: Synthetic peptide
  REGION 1..5: note = XENP018981 vhCDR1
NYWMN

SEQ ID NO: 20334 - protein, 19 aa, synthetic construct
  REGION 1..19: note = Description of Artificial Sequence: Synthetic peptide
  REGION 1..19: note = XENP018981 vhCDR2
EIRLKSNNYATHYAEPVKG

SEQ ID NO: 20335 - protein, 11 aa, synthetic construct
  REGION 1..11: note = Description of Artificial Sequence: Synthetic peptide
  REGION 1..11: note = XENP018981 vhCDR3
YYGNYGGYFDV

SEQ ID NO: 20336 - protein, 214 aa, synthetic construct; identical to SEQ ID NO: 16226
  REGION 1..214: note = Description of Artificial Sequence: Synthetic polypeptide
  REGION 1..214: note = XENP018981 1G6_H1.240_L1_IgG1_PVA_/S267K Light Chain

SEQ ID NO: 20337 - protein, 107 aa, synthetic construct; identical to SEQ ID NO: 10923
  REGION 1..107: note = Description of Artificial Sequence: Synthetic polypeptide
  REGION 1..107: note = VL of XENP018981

SEQ ID NO: 20338 - protein, 11 aa, synthetic construct
  REGION 1..11: note = Description of Artificial Sequence: Synthetic peptide
  REGION 1..11: note = XENP018981 vlCDR1
RASQSVSNDVA

SEQ ID NO: 20339 - protein, 7 aa, synthetic construct
  REGION 1..7: note = Description of Artificial Sequence: Synthetic peptide
  REGION 1..7: note = XENP018981 vlCDR2
YASHRYT

SEQ ID NO: 20340 - protein, 9 aa, synthetic construct
  REGION 1..9: note = Description of Artificial Sequence: Synthetic peptide
  REGION 1..9: note = XENP018981 vlCDR3
QQDYSSPRT

SEQ ID NO: 20341 - protein, 451 aa, synthetic construct
  REGION 1..451: note = Description of Artificial Sequence: Synthetic polypeptide
  REGION 1..451: note = XENP018982 1G6_H1.241_L1_IgG1_PVA_/S267K Heavy Chain
EVQLVESGGGLVKPGGSLRLTCAASGFTFSNYWMNWVRQAPGKGLEWVGEIRLKSNNYATHYAEPVKGRFTISRDDSKSTVYLQMNSLKTEDTAVYYCTRYYGNYGGYFDVWGAGTLVTVSSASTKGPSVFPLAPSSKSTSGGTAALGCLVKDYFPEPVTVSWNSGALTSGVHTFPAVLQSSGLYSLSSVVTVPSSSLGTQTYICNVNHKPSNTKVDKKVEPKSCDKTHTCPPCPAPPVAGPSVFLFPPKPKDTLMISRTPEVTCVVVDVKHEDPEVKFNWYVDGVEVHNAKTKPREEQYNSTYRVVSVLTVLHQDWLNGKEYKCKVSNKALPAPIEKTISKAKGQPREPQVYTLPPSREEMTKNQVSLTCLVKGFYPSDIAVEWESNGQPENNYKTTPPVLDSDGSFFLYSKLTVDKSRWQQGNVFSCSVMHEALHNHYTQKSLSLSPGK

SEQ ID NO: 20342 - protein, 122 aa, synthetic construct; identical to SEQ ID NO: 14699
  REGION 1..122: note = Description of Artificial Sequence: Synthetic polypeptide
  REGION 1..122: note = VH of XENP018982

SEQ ID NO: 20343 - protein, 5 aa, synthetic construct
  REGION 1..5: note = Description of Artificial Sequence: Synthetic peptide
  REGION 1..5: note = XENP018982 vhCDR1
NYWMN

SEQ ID NO: 20344 - protein, 19 aa, synthetic construct
  REGION 1..19: note = Description of Artificial Sequence: Synthetic peptide
  REGION 1..19: note = XENP018982 vhCDR2
EIRLKSNNYATHYAEPVKG

SEQ ID NO: 20345 - protein, 11 aa, synthetic construct
  REGION 1..11: note = Description of Artificial Sequence: Synthetic peptide
  REGION 1..11: note = XENP018982 vhCDR3
YYGNYGGYFDV

SEQ ID NO: 20346 - protein, 214 aa, synthetic construct; identical to SEQ ID NO: 16226
  REGION 1..214: note = Description of Artificial Sequence: Synthetic polypeptide
  REGION 1..214: note = XENP018982 1G6_H1.241_L1_IgG1_PVA_/S267K Light Chain

SEQ ID NO: 20347 - protein, 107 aa, synthetic construct; identical to SEQ ID NO: 10923
  REGION 1..107: note = Description of Artificial Sequence: Synthetic polypeptide
  REGION 1..107: note = VL of XENP018982

SEQ ID NO: 20348 - protein, 11 aa, synthetic construct
  REGION 1..11: note = Description of Artificial Sequence: Synthetic peptide
  REGION 1..11: note = XENP018982 vlCDR1
RASQSVSNDVA

SEQ ID NO: 20349 - protein, 7 aa, synthetic construct
  REGION 1..7: note = Description of Artificial Sequence: Synthetic peptide
  REGION 1..7: note = XENP018982 vlCDR2
YASHRYT

SEQ ID NO: 20350 - protein, 9 aa, synthetic construct
  REGION 1..9: note = Description of Artificial Sequence: Synthetic peptide
  REGION 1..9: note = XENP018982 vlCDR3
QQDYSSPRT

SEQ ID NO: 20351 - protein, 451 aa, synthetic construct
  REGION 1..451: note = Description of Artificial Sequence: Synthetic polypeptide
  REGION 1..451: note = XENP018983 1G6_H1.242_L1_IgG1_PVA_/S267K Heavy Chain
EVQLVESGGGLVKPGGSLRLVCAASGFTFSNYWMNWVRQAPGKGLEWVGEIRLKSNNYATHYAEPVKGRFTISRDDSKSTVYLQMNSLKTEDTAVYYCTRYYGNYGGYFDVWGAGTLVTVSSASTKGPSVFPLAPSSKSTSGGTAALGCLVKDYFPEPVTVSWNSGALTSGVHTFPAVLQSSGLYSLSSVVTVPSSSLGTQTYICNVNHKPSNTKVDKKVEPKSCDKTHTCPPCPAPPVAGPSVFLFPPKPKDTLMISRTPEVTCVVVDVKHEDPEVKFNWYVDGVEVHNAKTKPREEQYNSTYRVVSVLTVLHQDWLNGKEYKCKVSNKALPAPIEKTISKAKGQPREPQVYTLPPSREEMTKNQVSLTCLVKGFYPSDIAVEWESNGQPENNYKTTPPVLDSDGSFFLYSKLTVDKSRWQQGNVFSCSVMHEALHNHYTQKSLSLSPGK

SEQ ID NO: 20352 - protein, 122 aa, synthetic construct; identical to SEQ ID NO: 14708
  REGION 1..122: note = Description of Artificial Sequence: Synthetic polypeptide
  REGION 1..122: note = VH of XENP018983

SEQ ID NO: 20353 - protein, 5 aa, synthetic construct
  REGION 1..5: note = Description of Artificial Sequence: Synthetic peptide
  REGION 1..5: note = XENP018983 vhCDR1
NYWMN

SEQ ID NO: 20354 - protein, 19 aa, synthetic construct
  REGION 1..19: note = Description of Artificial Sequence: Synthetic peptide
  REGION 1..19: note = XENP018983 vhCDR2
EIRLKSNNYATHYAEPVKG

SEQ ID NO: 20355 - protein, 11 aa, synthetic construct
  REGION 1..11: note = Description of Artificial Sequence: Synthetic peptide
  REGION 1..11: note = XENP018983 vhCDR3
YYGNYGGYFDV

SEQ ID NO: 20356 - protein, 214 aa, synthetic construct; identical to SEQ ID NO: 16226
  REGION 1..214: note = Description of Artificial Sequence: Synthetic polypeptide
  REGION 1..214: note = XENP018983 1G6_H1.242_L1_IgG1_PVA_/S267K Light Chain

SEQ ID NO: 20357 - protein, 107 aa, synthetic construct; identical to SEQ ID NO: 10923
  REGION 1..107: note = Description of Artificial Sequence: Synthetic polypeptide
  REGION 1..107: note = VL of XENP018983

SEQ ID NO: 20358 - protein, 11 aa, synthetic construct
  REGION 1..11: note = Description of Artificial Sequence: Synthetic peptide
  REGION 1..11: note = XENP018983 vlCDR1
RASQSVSNDVA

SEQ ID NO: 20359 - protein, 7 aa, synthetic construct
  REGION 1..7: note = Description of Artificial Sequence: Synthetic peptide
  REGION 1..7: note = XENP018983 vlCDR2
YASHRYT

SEQ ID NO: 20360 - protein, 9 aa, synthetic construct
  REGION 1..9: note = Description of Artificial Sequence: Synthetic peptide
  REGION 1..9: note = XENP018983 vlCDR3
QQDYSSPRT

SEQ ID NO: 20361 - protein, 451 aa, synthetic construct
  REGION 1..451: note = Description of Artificial Sequence: Synthetic polypeptide
  REGION 1..451: note = XENP018984 1G6_H1.243_L1_IgG1_PVA_/S267K Heavy Chain
EVQLVESGGGLVKPGGSLRLSCAASGFTLSNYWMNWVRQAPGKGLEWVGEIRLKSNNYATHYAEPVKGRFTISRDDSKSTVYLQMNSLKTEDTAVYYCTRYYGNYGGYFDVWGAGTLVTVSSASTKGPSVFPLAPSSKSTSGGTAALGCLVKDYFPEPVTVSWNSGALTSGVHTFPAVLQSSGLYSLSSVVTVPSSSLGTQTYICNVNHKPSNTKVDKKVEPKSCDKTHTCPPCPAPPVAGPSVFLFPPKPKDTLMISRTPEVTCVVVDVKHEDPEVKFNWYVDGVEVHNAKTKPREEQYNSTYRVVSVLTVLHQDWLNGKEYKCKVSNKALPAPIEKTISKAKGQPREPQVYTLPPSREEMTKNQVSLTCLVKGFYPSDIAVEWESNGQPENNYKTTPPVLDSDGSFFLYSKLTVDKSRWQQGNVFSCSVMHEALHNHYTQKSLSLSPGK

SEQ ID NO: 20362 - protein, 122 aa, synthetic construct; identical to SEQ ID NO: 14717
  REGION 1..122: note = Description of Artificial Sequence: Synthetic polypeptide
  REGION 1..122: note = VH of XENP018984

SEQ ID NO: 20363 - protein, 5 aa, synthetic construct
  REGION 1..5: note = Description of Artificial Sequence: Synthetic peptide
  REGION 1..5: note = XENP018984 vhCDR1
NYWMN

SEQ ID NO: 20364 - protein, 19 aa, synthetic construct
  REGION 1..19: note = Description of Artificial Sequence: Synthetic peptide
  REGION 1..19: note = XENP018984 vhCDR2
EIRLKSNNYATHYAEPVKG

SEQ ID NO: 20365 - protein, 11 aa, synthetic construct
  REGION 1..11: note = Description of Artificial Sequence: Synthetic peptide
  REGION 1..11: note = XENP018984 vhCDR3
YYGNYGGYFDV

SEQ ID NO: 20366 - protein, 214 aa, synthetic construct; identical to SEQ ID NO: 16226
  REGION 1..214: note = Description of Artificial Sequence: Synthetic polypeptide
  REGION 1..214: note = XENP018984 1G6_H1.243_L1_IgG1_PVA_/S267K Light Chain

SEQ ID NO: 20367 - protein, 107 aa, synthetic construct; identical to SEQ ID NO: 10923
  REGION 1..107: note = Description of Artificial Sequence: Synthetic polypeptide
  REGION 1..107: note = VL of XENP018984

SEQ ID NO: 20368 - protein, 11 aa, synthetic construct
  REGION 1..11: note = Description of Artificial Sequence: Synthetic peptide
  REGION 1..11: note = XENP018984 vlCDR1
RASQSVSNDVA

SEQ ID NO: 20369 - protein, 7 aa, synthetic construct
  REGION 1..7: note = Description of Artificial Sequence: Synthetic peptide
  REGION 1..7: note = XENP018984 vlCDR2
YASHRYT

SEQ ID NO: 20370 - protein, 9 aa, synthetic construct
  REGION 1..9: note = Description of Artificial Sequence: Synthetic peptide
  REGION 1..9: note = XENP018984 vlCDR3
QQDYSSPRT

SEQ ID NO: 20371 - protein, 451 aa, synthetic construct
  REGION 1..451: note = Description of Artificial Sequence: Synthetic polypeptide
  REGION 1..451: note = XENP018985 1G6_H1.244_L1_IgG1_PVA_/S267K Heavy Chain
EVQLVESGGGLVKPGGSLRLSCAASGFTFSNYWMNWVRQAPGKGLQWVGEIRLKSNNYATHYAEPVKGRFTISRDDSKSTVYLQMNSLKTEDTAVYYCTRYYGNYGGYFDVWGAGTLVTVSSASTKGPSVFPLAPSSKSTSGGTAALGCLVKDYFPEPVTVSWNSGALTSGVHTFPAVLQSSGLYSLSSVVTVPSSSLGTQTYICNVNHKPSNTKVDKKVEPKSCDKTHTCPPCPAPPVAGPSVFLFPPKPKDTLMISRTPEVTCVVVDVKHEDPEVKFNWYVDGVEVHNAKTKPREEQYNSTYRVVSVLTVLHQDWLNGKEYKCKVSNKALPAPIEKTISKAKGQPREPQVYTLPPSREEMTKNQVSLTCLVKGFYPSDIAVEWESNGQPENNYKTTPPVLDSDGSFFLYSKLTVDKSRWQQGNVFSCSVMHEALHNHYTQKSLSLSPGK

SEQ ID NO: 20372 - protein, 122 aa, synthetic construct; identical to SEQ ID NO: 14726
  REGION 1..122: note = Description of Artificial Sequence: Synthetic polypeptide
  REGION 1..122: note = VH of XENP018985

SEQ ID NO: 20373 - protein, 5 aa, synthetic construct
  REGION 1..5: note = Description of Artificial Sequence: Synthetic peptide
  REGION 1..5: note = XENP018985 vhCDR1
NYWMN

SEQ ID NO: 20374 - protein, 19 aa, synthetic construct
  REGION 1..19: note = Description of Artificial Sequence: Synthetic peptide
  REGION 1..19: note = XENP018985 vhCDR2
EIRLKSNNYATHYAEPVKG

SEQ ID NO: 20375 - protein, 11 aa, synthetic construct
  REGION 1..11: note = Description of Artificial Sequence: Synthetic peptide
  REGION 1..11: note = XENP018985 vhCDR3
YYGNYGGYFDV

SEQ ID NO: 20376 - protein, 214 aa, synthetic construct; identical to SEQ ID NO: 16226
  REGION 1..214: note = Description of Artificial Sequence: Synthetic polypeptide
  REGION 1..214: note = XENP018985 1G6_H1.244_L1_IgG1_PVA_/S267K Light Chain

SEQ ID NO: 20377 - protein, 107 aa, synthetic construct; identical to SEQ ID NO: 10923
  REGION 1..107: note = Description of Artificial Sequence: Synthetic polypeptide
  REGION 1..107: note = VL of XENP018985

SEQ ID NO: 20378 - protein, 11 aa, synthetic construct
  REGION 1..11: note = Description of Artificial Sequence: Synthetic peptide
  REGION 1..11: note = XENP018985 vlCDR1
RASQSVSNDVA

SEQ ID NO: 20379 - protein, 7 aa, synthetic construct
  REGION 1..7: note = Description of Artificial Sequence: Synthetic peptide
  REGION 1..7: note = XENP018985 vlCDR2
YASHRYT

SEQ ID NO: 20380 - protein, 9 aa, synthetic construct
  REGION 1..9: note = Description of Artificial Sequence: Synthetic peptide
  REGION 1..9: note = XENP018985 vlCDR3
QQDYSSPRT

SEQ ID NO: 20381 - protein, 451 aa, synthetic construct
  REGION 1..451: note = Description of Artificial Sequence: Synthetic polypeptide
  REGION 1..451: note = XENP018986 1G6_H1.245_L1_IgG1_PVA_/S267K Heavy Chain
EVQLVESGGGLVKPGGSLRLSCAASGFTFSNYWMNWVRQAPGKGLEWIGEIRLKSNNYATHYAEPVKGRFTISRDDSKSTVYLQMNSLKTEDTAVYYCTRYYGNYGGYFDVWGAGTLVTVSSASTKGPSVFPLAPSSKSTSGGTAALGCLVKDYFPEPVTVSWNSGALTSGVHTFPAVLQSSGLYSLSSVVTVPSSSLGTQTYICNVNHKPSNTKVDKKVEPKSCDKTHTCPPCPAPPVAGPSVFLFPPKPKDTLMISRTPEVTCVVVDVKHEDPEVKFNWYVDGVEVHNAKTKPREEQYNSTYRVVSVLTVLHQDWLNGKEYKCKVSNKALPAPIEKTISKAKGQPREPQVYTLPPSREEMTKNQVSLTCLVKGFYPSDIAVEWESNGQPENNYKTTPPVLDSDGSFFLYSKLTVDKSRWQQGNVFSCSVMHEALHNHYTQKSLSLSPGK

SEQ ID NO: 20382 - protein, 122 aa, synthetic construct; identical to SEQ ID NO: 14735
  REGION 1..122: note = Description of Artificial Sequence: Synthetic polypeptide
  REGION 1..122: note = VH of XENP018986

SEQ ID NO: 20383 - protein, 5 aa, synthetic construct
  REGION 1..5: note = Description of Artificial Sequence: Synthetic peptide
  REGION 1..5: note = XENP018986 vhCDR1
NYWMN

SEQ ID NO: 20384 - protein, 19 aa, synthetic construct
  REGION 1..19: note = Description of Artificial Sequence: Synthetic peptide
  REGION 1..19: note = XENP018986 vhCDR2
EIRLKSNNYATHYAEPVKG

SEQ ID NO: 20385 - protein, 11 aa, synthetic construct
  REGION 1..11: note = Description of Artificial Sequence: Synthetic peptide
  REGION 1..11: note = XENP018986 vhCDR3
YYGNYGGYFDV

SEQ ID NO: 20386 - protein, 214 aa, synthetic construct; identical to SEQ ID NO: 16226
  REGION 1..214: note = Description of Artificial Sequence: Synthetic polypeptide
  REGION 1..214: note = XENP018986 1G6_H1.245_L1_IgG1_PVA_/S267K Light Chain

SEQ ID NO: 20387 - protein, 107 aa, synthetic construct; identical to SEQ ID NO: 10923
  REGION 1..107: note = Description of Artificial Sequence: Synthetic polypeptide
  REGION 1..107: note = VL of XENP018986

SEQ ID NO: 20388 - protein, 11 aa, synthetic construct
  REGION 1..11: note = Description of Artificial Sequence: Synthetic peptide
  REGION 1..11: note = XENP018986 vlCDR1
RASQSVSNDVA

SEQ ID NO: 20389 - protein, 7 aa, synthetic construct
  REGION 1..7: note = Description of Artificial Sequence: Synthetic peptide
  REGION 1..7: note = XENP018986 vlCDR2
YASHRYT

SEQ ID NO: 20390 - protein, 9 aa, synthetic construct
  REGION 1..9: note = Description of Artificial Sequence: Synthetic peptide
  REGION 1..9: note = XENP018986 vlCDR3
QQDYSSPRT

SEQ ID NO: 20391 - protein, 451 aa, synthetic construct
  REGION 1..451: note = Description of Artificial Sequence: Synthetic polypeptide
  REGION 1..451: note = XENP018987 1G6_H1.246_L1_IgG1_PVA_/S267K Heavy Chain
EVQLVESGGGLVKPGGSLRLSCAASGFTFSNYWMNWVRQAPGKGLEWMGEIRLKSNNYATHYAEPVKGRFTISRDDSKSTVYLQMNSLKTEDTAVYYCTRYYGNYGGYFDVWGAGTLVTVSSASTKGPSVFPLAPSSKSTSGGTAALGCLVKDYFPEPVTVSWNSGALTSGVHTFPAVLQSSGLYSLSSVVTVPSSSLGTQTYICNVNHKPSNTKVDKKVEPKSCDKTHTCPPCPAPPVAGPSVFLFPPKPKDTLMISRTPEVTCVVVDVKHEDPEVKFNWYVDGVEVHNAKTKPREEQYNSTYRVVSVLTVLHQDWLNGKEYKCKVSNKALPAPIEKTISKAKGQPREPQVYTLPPSREEMTKNQVSLTCLVKGFYPSDIAVEWESNGQPENNYKTTPPVLDSDGSFFLYSKLTVDKSRWQQGNVFSCSVMHEALHNHYTQKSLSLSPGK

SEQ ID NO: 20392 - protein, 122 aa, synthetic construct; identical to SEQ ID NO: 14744
  REGION 1..122: note = Description of Artificial Sequence: Synthetic polypeptide
  REGION 1..122: note = VH of XENP018987

SEQ ID NO: 20393 - protein, 5 aa, synthetic construct
  REGION 1..5: note = Description of Artificial Sequence: Synthetic peptide
  REGION 1..5: note = XENP018987 vhCDR1
NYWMN

SEQ ID NO: 20394 - protein, 19 aa, synthetic construct
  REGION 1..19: note = Description of Artificial Sequence: Synthetic peptide
  REGION 1..19: note = XENP018987 vhCDR2
EIRLKSNNYATHYAEPVKG

SEQ ID NO: 20395 - protein, 11 aa, synthetic construct
  REGION 1..11: note = Description of Artificial Sequence: Synthetic peptide
  REGION 1..11: note = XENP018987 vhCDR3
YYGNYGGYFDV

SEQ ID NO: 20396 - protein, 214 aa, synthetic construct; identical to SEQ ID NO: 16226
  REGION 1..214: note = Description of Artificial Sequence: Synthetic polypeptide
  REGION 1..214: note = XENP018987 1G6_H1.246_L1_IgG1_PVA_/S267K Light Chain

SEQ ID NO: 20397 - protein, 107 aa, synthetic construct; identical to SEQ ID NO: 10923
  REGION 1..107: note = Description of Artificial Sequence: Synthetic polypeptide
  REGION 1..107: note = VL of XENP018987

SEQ ID NO: 20398 - protein, 11 aa, synthetic construct
  REGION 1..11: note = Description of Artificial Sequence: Synthetic peptide
  REGION 1..11: note = XENP018987 vlCDR1
RASQSVSNDVA

SEQ ID NO: 20399 - protein, 7 aa, synthetic construct
  REGION 1..7: note = Description of Artificial Sequence: Synthetic peptide
  REGION 1..7: note = XENP018987 vlCDR2
YASHRYT

SEQ ID NO: 20400 - protein, 9 aa, synthetic construct
  REGION 1..9: note = Description of Artificial Sequence: Synthetic peptide
  REGION 1..9: note = XENP018987 vlCDR3
QQDYSSPRT

SEQ ID NO: 20401 - protein, 451 aa, synthetic construct
  REGION 1..451: note = Description of Artificial Sequence: Synthetic polypeptide
  REGION 1..451: note = XENP018988 1G6_H1.247_L1_IgG1_PVA_/S267K Heavy Chain
EVQLVESGGGLVKPGGSLRLSCAASGFTFSNYWMNWVRQAPGKGLEWVGEIRLKSNNYATHYAEPFKGRFTISRDDSKSTVYLQMNSLKTEDTAVYYCTRYYGNYGGYFDVWGAGTLVTVSSASTKGPSVFPLAPSSKSTSGGTAALGCLVKDYFPEPVTVSWNSGALTSGVHTFPAVLQSSGLYSLSSVVTVPSSSLGTQTYICNVNHKPSNTKVDKKVEPKSCDKTHTCPPCPAPPVAGPSVFLFPPKPKDTLMISRTPEVTCVVVDVKHEDPEVKFNWYVDGVEVHNAKTKPREEQYNSTYRVVSVLTVLHQDWLNGKEYKCKVSNKALPAPIEKTISKAKGQPREPQVYTLPPSREEMTKNQVSLTCLVKGFYPSDIAVEWESNGQPENNYKTTPPVLDSDGSFFLYSKLTVDKSRWQQGNVFSCSVMHEALHNHYTQKSLSLSPGK

SEQ ID NO: 20402 - protein, 122 aa, synthetic construct; identical to SEQ ID NO: 14753
  REGION 1..122: note = Description of Artificial Sequence: Synthetic polypeptide
  REGION 1..122: note = VH of XENP018988

SEQ ID NO: 20403 - protein, 5 aa, synthetic construct
  REGION 1..5: note = Description of Artificial Sequence: Synthetic peptide
  REGION 1..5: note = XENP018988 vhCDR1
NYWMN

SEQ ID NO: 20404 - protein, 19 aa, synthetic construct
  REGION 1..19: note = Description of Artificial Sequence: Synthetic peptide
  REGION 1..19: note = XENP018988 vhCDR2
EIRLKSNNYATHYAEPFKG

SEQ ID NO: 20405 - protein, 11 aa, synthetic construct
  REGION 1..11: note = Description of Artificial Sequence: Synthetic peptide
  REGION 1..11: note = XENP018988 vhCDR3
YYGNYGGYFDV

SEQ ID NO: 20406 - protein, 214 aa, synthetic construct; identical to SEQ ID NO: 16226
  REGION 1..214: note = Description of Artificial Sequence: Synthetic polypeptide
  REGION 1..214: note = XENP018988 1G6_H1.247_L1_IgG1_PVA_/S267K Light Chain

SEQ ID NO: 20407 - protein, 107 aa, synthetic construct; identical to SEQ ID NO: 10923
  REGION 1..107: note = Description of Artificial Sequence: Synthetic polypeptide
  REGION 1..107: note = VL of XENP018988

SEQ ID NO: 20408 - protein, 11 aa, synthetic construct
  REGION 1..11: note = Description of Artificial Sequence: Synthetic peptide
  REGION 1..11: note = XENP018988 vlCDR1
RASQSVSNDVA

SEQ ID NO: 20409 - protein, 7 aa, synthetic construct
  REGION 1..7: note = Description of Artificial Sequence: Synthetic peptide
  REGION 1..7: note = XENP018988 vlCDR2
YASHRYT

SEQ ID NO: 20410 - protein, 9 aa, synthetic construct
  REGION 1..9: note = Description of Artificial Sequence: Synthetic peptide
  REGION 1..9: note = XENP018988 vlCDR3
QQDYSSPRT

SEQ ID NO: 20411 - protein, 451 aa, synthetic construct
  REGION 1..451: note = Description of Artificial Sequence: Synthetic polypeptide
  REGION 1..451: note = XENP018989 1G6_H1.248_L1_IgG1_PVA_/S267K Heavy Chain
EVQLVESGGGLVKPGGSLRLSCAASGFTFSNYWMNWVRQAPGKGLEWVGEIRLKSNNYATHYAEPVKGRATISRDDSKSTVYLQMNSLKTEDTAVYYCTRYYGNYGGYFDVWGAGTLVTVSSASTKGPSVFPLAPSSKSTSGGTAALGCLVKDYFPEPVTVSWNSGALTSGVHTFPAVLQSSGLYSLSSVVTVPSSSLGTQTYICNVNHKPSNTKVDKKVEPKSCDKTHTCPPCPAPPVAGPSVFLFPPKPKDTLMISRTPEVTCVVVDVKHEDPEVKFNWYVDGVEVHNAKTKPREEQYNSTYRVVSVLTVLHQDWLNGKEYKCKVSNKALPAPIEKTISKAKGQPREPQVYTLPPSREEMTKNQVSLTCLVKGFYPSDIAVEWESNGQPENNYKTTPPVLDSDGSFFLYSKLTVDKSRWQQGNVFSCSVMHEALHNHYTQKSLSLSPGK

SEQ ID NO: 20412 - protein, 122 aa, synthetic construct; identical to SEQ ID NO: 14762
  REGION 1..122: note = Description of Artificial Sequence: Synthetic polypeptide
  REGION 1..122: note = VH of XENP018989

SEQ ID NO: 20413 - protein, 5 aa, synthetic construct
  REGION 1..5: note = Description of Artificial Sequence: Synthetic peptide
  REGION 1..5: note = XENP018989 vhCDR1
NYWMN

SEQ ID NO: 20414 - protein, 19 aa, synthetic construct
  REGION 1..19: note = Description of Artificial Sequence: Synthetic peptide
  REGION 1..19: note = XENP018989 vhCDR2
EIRLKSNNYATHYAEPVKG

SEQ ID NO: 20415 - protein, 11 aa, synthetic construct
  REGION 1..11: note = Description of Artificial Sequence: Synthetic peptide
  REGION 1..11: note = XENP018989 vhCDR3
YYGNYGGYFDV

SEQ ID NO: 20416 - protein, 214 aa, synthetic construct; identical to SEQ ID NO: 16226
  REGION 1..214: note = Description of Artificial Sequence: Synthetic polypeptide
  REGION 1..214: note = XENP018989 1G6_H1.248_L1_IgG1_PVA_/S267K Light Chain

SEQ ID NO: 20417 - protein, 107 aa, synthetic construct; identical to SEQ ID NO: 10923
  REGION 1..107: note = Description of Artificial Sequence: Synthetic polypeptide
  REGION 1..107: note = VL of XENP018989

SEQ ID NO: 20418 - protein, 11 aa, synthetic construct
  REGION 1..11: note = Description of Artificial Sequence: Synthetic peptide
  REGION 1..11: note = XENP018989 vlCDR1
RASQSVSNDVA

SEQ ID NO: 20419 - protein, 7 aa, synthetic construct
  REGION 1..7: note = Description of Artificial Sequence: Synthetic peptide
  REGION 1..7: note = XENP018989 vlCDR2
YASHRYT

SEQ ID NO: 20420 - protein, 9 aa, synthetic construct
  REGION 1..9: note = Description of Artificial Sequence: Synthetic peptide
  REGION 1..9: note = XENP018989 vlCDR3
QQDYSSPRT

SEQ ID NO: 20421 - protein, 451 aa, synthetic construct
  REGION 1..451: note = Description of Artificial Sequence: Synthetic polypeptide
  REGION 1..451: note = XENP018990 1G6_H1.249_L1_IgG1_PVA_/S267K Heavy Chain
EVQLVESGGGLVKPGGSLRLSCAASGFTFSNYWMNWVRQAPGKGLEWVGEIRLKSNNYATHYAEPVKGRVTISRDDSKSTVYLQMNSLKTEDTAVYYCTRYYGNYGGYFDVWGAGTLVTVSSASTKGPSVFPLAPSSKSTSGGTAALGCLVKDYFPEPVTVSWNSGALTSGVHTFPAVLQSSGLYSLSSVVTVPSSSLGTQTYICNVNHKPSNTKVDKKVEPKSCDKTHTCPPCPAPPVAGPSVFLFPPKPKDTLMISRTPEVTCVVVDVKHEDPEVKFNWYVDGVEVHNAKTKPREEQYNSTYRVVSVLTVLHQDWLNGKEYKCKVSNKALPAPIEKTISKAKGQPREPQVYTLPPSREEMTKNQVSLTCLVKGFYPSDIAVEWESNGQPENNYKTTPPVLDSDGSFFLYSKLTVDKSRWQQGNVFSCSVMHEALHNHYTQKSLSLSPGK

SEQ ID NO: 20422 - protein, 122 aa, synthetic construct; identical to SEQ ID NO: 14771
  REGION 1..122: note = Description of Artificial Sequence: Synthetic polypeptide
  REGION 1..122: note = VH of XENP018990

SEQ ID NO: 20423 - protein, 5 aa, synthetic construct
  REGION 1..5: note = Description of Artificial Sequence: Synthetic peptide
  REGION 1..5: note = XENP018990 vhCDR1
NYWMN

SEQ ID NO: 20424 - protein, 19 aa, synthetic construct
  REGION 1..19: note = Description of Artificial Sequence: Synthetic peptide
  REGION 1..19: note = XENP018990 vhCDR2
EIRLKSNNYATHYAEPVKG

SEQ ID NO: 20425 - protein, 11 aa, synthetic construct
  REGION 1..11: note = Description of Artificial Sequence: Synthetic peptide
  REGION 1..11: note = XENP018990 vhCDR3
YYGNYGGYFDV

SEQ ID NO: 20426 - protein, 214 aa, synthetic construct; identical to SEQ ID NO: 16226
  REGION 1..214: note = Description of Artificial Sequence: Synthetic polypeptide
  REGION 1..214: note = XENP018990 1G6_H1.249_L1_IgG1_PVA_/S267K Light Chain

SEQ ID NO: 20427 - protein, 107 aa, synthetic construct; identical to SEQ ID NO: 10923
  REGION 1..107: note = Description of Artificial Sequence: Synthetic polypeptide
  REGION 1..107: note = VL of XENP018990

SEQ ID NO: 20428 - protein, 11 aa, synthetic construct
  REGION 1..11: note = Description of Artificial Sequence: Synthetic peptide
  REGION 1..11: note = XENP018990 vlCDR1
RASQSVSNDVA

SEQ ID NO: 20429 - protein, 7 aa, synthetic construct
  REGION 1..7: note = Description of Artificial Sequence: Synthetic peptide
  REGION 1..7: note = XENP018990 vlCDR2
YASHRYT

SEQ ID NO: 20430 - protein, 9 aa, synthetic construct
  REGION 1..9: note = Description of Artificial Sequence: Synthetic peptide
  REGION 1..9: note = XENP018990 vlCDR3
QQDYSSPRT

SEQ ID NO: 20431 - protein, 451 aa, synthetic construct
  REGION 1..451: note = Description of Artificial Sequence: Synthetic polypeptide
  REGION 1..451: note = XENP018991 1G6_H1.250_L1_IgG1_PVA_/S267K Heavy Chain
EVQLVESGGGLVKPGGSLRLSCAASGFTFSNYWMNWVRQAPGKGLEWVGEIRLKSNNYATHYAEPVKGRFTISRDDSSSTVYLQMNSLKTEDTAVYYCTRYYGNYGGYFDVWGAGTLVTVSSASTKGPSVFPLAPSSKSTSGGTAALGCLVKDYFPEPVTVSWNSGALTSGVHTFPAVLQSSGLYSLSSVVTVPSSSLGTQTYICNVNHKPSNTKVDKKVEPKSCDKTHTCPPCPAPPVAGPSVFLFPPKPKDTLMISRTPEVTCVVVDVKHEDPEVKFNWYVDGVEVHNAKTKPREEQYNSTYRVVSVLTVLHQDWLNGKEYKCKVSNKALPAPIEKTISKAKGQPREPQVYTLPPSREEMTKNQVSLTCLVKGFYPSDIAVEWESNGQPENNYKTTPPVLDSDGSFFLYSKLTVDKSRWQQGNVFSCSVMHEALHNHYTQKSLSLSPGK

SEQ ID NO: 20432 - protein, 122 aa, synthetic construct; identical to SEQ ID NO: 14780
  REGION 1..122: note = Description of Artificial Sequence: Synthetic polypeptide
  REGION 1..122: note = VH of XENP018991

SEQ ID NO: 20433 - protein, 5 aa, synthetic construct
  REGION 1..5: note = Description of Artificial Sequence: Synthetic peptide
  REGION 1..5: note = XENP018991 vhCDR1
NYWMN

SEQ ID NO: 20434 - protein, 19 aa, synthetic construct
  REGION 1..19: note = Description of Artificial Sequence: Synthetic peptide
  REGION 1..19: note = XENP018991 vhCDR2
EIRLKSNNYATHYAEPVKG

SEQ ID NO: 20435 - protein, 11 aa, synthetic construct
  REGION 1..11: note = Description of Artificial Sequence: Synthetic peptide
  REGION 1..11: note = XENP018991 vhCDR3
YYGNYGGYFDV

SEQ ID NO: 20436 - protein, 214 aa, synthetic construct; identical to SEQ ID NO: 16226
  REGION 1..214: note = Description of Artificial Sequence: Synthetic polypeptide
  REGION 1..214: note = XENP018991 1G6_H1.250_L1_IgG1_PVA_/S267K Light Chain

SEQ ID NO: 20437 - protein, 107 aa, synthetic construct; identical to SEQ ID NO: 10923
  REGION 1..107: note = Description of Artificial Sequence: Synthetic polypeptide
  REGION 1..107: note = VL of XENP018991

SEQ ID NO: 20438 - protein, 11 aa, synthetic construct
  REGION 1..11: note = Description of Artificial Sequence: Synthetic peptide
  REGION 1..11: note = XENP018991 vlCDR1
RASQSVSNDVA

SEQ ID NO: 20439 - protein, 7 aa, synthetic construct
  REGION 1..7: note = Description of Artificial Sequence: Synthetic peptide
  REGION 1..7: note = XENP018991 vlCDR2
YASHRYT

SEQ ID NO: 20440 - protein, 9 aa, synthetic construct
  REGION 1..9: note = Description of Artificial Sequence: Synthetic peptide
  REGION 1..9: note = XENP018991 vlCDR3
QQDYSSPRT

SEQ ID NO: 20441 - protein, 451 aa, synthetic construct
  REGION 1..451: note = Description of Artificial Sequence: Synthetic polypeptide
  REGION 1..451: note = XENP018992 1G6_H1.251_L1_IgG1_PVA_/S267K Heavy Chain
EVQLVESGGGLVKPGGSLRLSCAASGFTFSNYWMNWVRQAPGKGLEWVGEIRLKSNNYATHYAEPVKGRFTISRDDSKSMVYLQMNSLKTEDTAVYYCTRYYGNYGGYFDVWGAGTLVTVSSASTKGPSVFPLAPSSKSTSGGTAALGCLVKDYFPEPVTVSWNSGALTSGVHTFPAVLQSSGLYSLSSVVTVPSSSLGTQTYICNVNHKPSNTKVDKKVEPKSCDKTHTCPPCPAPPVAGPSVFLFPPKPKDTLMISRTPEVTCVVVDVKHEDPEVKFNWYVDGVEVHNAKTKPREEQYNSTYRVVSVLTVLHQDWLNGKEYKCKVSNKALPAPIEKTISKAKGQPREPQVYTLPPSREEMTKNQVSLTCLVKGFYPSDIAVEWESNGQPENNYKTTPPVLDSDGSFFLYSKLTVDKSRWQQGNVFSCSVMHEALHNHYTQKSLSLSPGK

SEQ ID NO: 20442 - protein, 122 aa, synthetic construct; identical to SEQ ID NO: 14789
  REGION 1..122: note = Description of Artificial Sequence: Synthetic polypeptide
  REGION 1..122: note = VH of XENP018992

SEQ ID NO: 20443 - protein, 5 aa, synthetic construct
  REGION 1..5: note = Description of Artificial Sequence: Synthetic peptide
  REGION 1..5: note = XENP018992 vhCDR1
NYWMN

SEQ ID NO: 20444 - protein, 19 aa, synthetic construct
  REGION 1..19: note = Description of Artificial Sequence: Synthetic peptide
  REGION 1..19: note = XENP018992 vhCDR2
EIRLKSNNYATHYAEPVKG

SEQ ID NO: 20445 - protein, 11 aa, synthetic construct
  REGION 1..11: note = Description of Artificial Sequence: Synthetic peptide
  REGION 1..11: note = XENP018992 vhCDR3
YYGNYGGYFDV

SEQ ID NO: 20446 - protein, 214 aa, synthetic construct; identical to SEQ ID NO: 16226
  REGION 1..214: note = Description of Artificial Sequence: Synthetic polypeptide
  REGION 1..214: note = XENP018992 1G6_H1.251_L1_IgG1_PVA_/S267K Light Chain

SEQ ID NO: 20447 - protein, 107 aa, synthetic construct; identical to SEQ ID NO: 10923
  REGION 1..107: note = Description of Artificial Sequence: Synthetic polypeptide
  REGION 1..107: note = VL of XENP018992

SEQ ID NO: 20448 - protein, 11 aa, synthetic construct
  REGION 1..11: note = Description of Artificial Sequence: Synthetic peptide
  REGION 1..11: note = XENP018992 vlCDR1
RASQSVSNDVA

SEQ ID NO: 20449 - protein, 7 aa, synthetic construct
  REGION 1..7: note = Description of Artificial Sequence: Synthetic peptide
  REGION 1..7: note = XENP018992 vlCDR2
YASHRYT

SEQ ID NO: 20450 - protein, 9 aa, synthetic construct
  REGION 1..9: note = Description of Artificial Sequence: Synthetic peptide
  REGION 1..9: note = XENP018992 vlCDR3
QQDYSSPRT

SEQ ID NO: 20451 - protein, 451 aa, synthetic construct
  REGION 1..451: note = Description of Artificial Sequence: Synthetic polypeptide
  REGION 1..451: note = XENP018993 1G6_H1.252_L1_IgG1_PVA_/S267K Heavy Chain
EVQLVESGGGLVKPGGSLRLSCAASGFTFSNYWMNWVRQAPGKGLEWVGEIRLKSNNYATHYAEPVKGRFTISRDDSKSQVYLQMNSLKTEDTAVYYCTRYYGNYGGYFDVWGAGTLVTVSSASTKGPSVFPLAPSSKSTSGGTAALGCLVKDYFPEPVTVSWNSGALTSGVHTFPAVLQSSGLYSLSSVVTVPSSSLGTQTYICNVNHKPSNTKVDKKVEPKSCDKTHTCPPCPAPPVAGPSVFLFPPKPKDTLMISRTPEVTCVVVDVKHEDPEVKFNWYVDGVEVHNAKTKPREEQYNSTYRVVSVLTVLHQDWLNGKEYKCKVSNKALPAPIEKTISKAKGQPREPQVYTLPPSREEMTKNQVSLTCLVKGFYPSDIAVEWESNGQPENNYKTTPPVLDSDGSFFLYSKLTVDKSRWQQGNVFSCSVMHEALHNHYTQKSLSLSPGK

SEQ ID NO: 20452 - protein, 122 aa, synthetic construct; identical to SEQ ID NO: 14798
  REGION 1..122: note = Description of Artificial Sequence: Synthetic polypeptide
  REGION 1..122: note = VH of XENP018993

SEQ ID NO: 20453 - protein, 5 aa, synthetic construct
  REGION 1..5: note = Description of Artificial Sequence: Synthetic peptide
  REGION 1..5: note = XENP018993 vhCDR1
NYWMN

SEQ ID NO: 20454 - protein, 19 aa, synthetic construct
  REGION 1..19: note = Description of Artificial Sequence: Synthetic peptide
  REGION 1..19: note = XENP018993 vhCDR2
EIRLKSNNYATHYAEPVKG

SEQ ID NO: 20455 - protein, 11 aa, synthetic construct
  REGION 1..11: note = Description of Artificial Sequence: Synthetic peptide
  REGION 1..11: note = XENP018993 vhCDR3
YYGNYGGYFDV

SEQ ID NO: 20456 - protein, 214 aa, synthetic construct; identical to SEQ ID NO: 16226
  REGION 1..214: note = Description of Artificial Sequence: Synthetic polypeptide
  REGION 1..214: note = XENP018993 1G6_H1.252_L1_IgG1_PVA_/S267K Light Chain

SEQ ID NO: 20457 - protein, 107 aa, synthetic construct; identical to SEQ ID NO: 10923
  REGION 1..107: note = Description of Artificial Sequence: Synthetic polypeptide
  REGION 1..107: note = VL of XENP018993

SEQ ID NO: 20458 - protein, 11 aa, synthetic construct
  REGION 1..11: note = Description of Artificial Sequence: Synthetic peptide
  REGION 1..11: note = XENP018993 vlCDR1
RASQSVSNDVA

SEQ ID NO: 20459 - protein, 7 aa, synthetic construct
  REGION 1..7: note = Description of Artificial Sequence: Synthetic peptide
  REGION 1..7: note = XENP018993 vlCDR2
YASHRYT

SEQ ID NO: 20460 - protein, 9 aa, synthetic construct
  REGION 1..9: note = Description of Artificial Sequence: Synthetic peptide
  REGION 1..9: note = XENP018993 vlCDR3
QQDYSSPRT

SEQ ID NO: 20461 - protein, 451 aa, synthetic construct
  REGION 1..451: note = Description of Artificial Sequence: Synthetic polypeptide
  REGION 1..451: note = XENP018994 1G6_H1.253_L1_IgG1_PVA_/S267K Heavy Chain
EVQLVESGGGLVKPGGSLRLSCAASGFTFSNYWMNWVRQAPGKGLEWVGEIRLKSNNYATHYAEPVKGRFTISRDDSKSTVVLQMNSLKTEDTAVYYCTRYYGNYGGYFDVWGAGTLVTVSSASTKGPSVFPLAPSSKSTSGGTAALGCLVKDYFPEPVTVSWNSGALTSGVHTFPAVLQSSGLYSLSSVVTVPSSSLGTQTYICNVNHKPSNTKVDKKVEPKSCDKTHTCPPCPAPPVAGPSVFLFPPKPKDTLMISRTPEVTCVVVDVKHEDPEVKFNWYVDGVEVHNAKTKPREEQYNSTYRVVSVLTVLHQDWLNGKEYKCKVSNKALPAPIEKTISKAKGQPREPQVYTLPPSREEMTKNQVSLTCLVKGFYPSDIAVEWESNGQPENNYKTTPPVLDSDGSFFLYSKLTVDKSRWQQGNVFSCSVMHEALHNHYTQKSLSLSPGK

SEQ ID NO: 20462 - protein, 122 aa, synthetic construct; identical to SEQ ID NO: 14807
  REGION 1..122: note = Description of Artificial Sequence: Synthetic polypeptide
  REGION 1..122: note = VH of XENP018994

SEQ ID NO: 20463 - protein, 5 aa, synthetic construct
  REGION 1..5: note = Description of Artificial Sequence: Synthetic peptide
  REGION 1..5: note = XENP018994 vhCDR1
NYWMN

SEQ ID NO: 20464 - protein, 19 aa, synthetic construct
  REGION 1..19: note = Description of Artificial Sequence: Synthetic peptide
  REGION 1..19: note = XENP018994 vhCDR2
EIRLKSNNYATHYAEPVKG

SEQ ID NO: 20465 - protein, 11 aa, synthetic construct
  REGION 1..11: note = Description of Artificial Sequence: Synthetic peptide
  REGION 1..11: note = XENP018994 vhCDR3
YYGNYGGYFDV

SEQ ID NO: 20466 - protein, 214 aa, synthetic construct; identical to SEQ ID NO: 16226
  REGION 1..214: note = Description of Artificial Sequence: Synthetic polypeptide
  REGION 1..214: note = XENP018994 1G6_H1.253_L1_IgG1_PVA_/S267K Light Chain

SEQ ID NO: 20467 - protein, 107 aa, synthetic construct; identical to SEQ ID NO: 10923
  REGION 1..107: note = Description of Artificial Sequence: Synthetic polypeptide
  REGION 1..107: note = VL of XENP018994

SEQ ID NO: 20468 - protein, 11 aa, synthetic construct
  REGION 1..11: note = Description of Artificial Sequence: Synthetic peptide
  REGION 1..11: note = XENP018994 vlCDR1
RASQSVSNDVA

SEQ ID NO: 20469 - protein, 7 aa, synthetic construct
  REGION 1..7: note = Description of Artificial Sequence: Synthetic peptide
  REGION 1..7: note = XENP018994 vlCDR2
YASHRYT

SEQ ID NO: 20470 - protein, 9 aa, synthetic construct
  REGION 1..9: note = Description of Artificial Sequence: Synthetic peptide
  REGION 1..9: note = XENP018994 vlCDR3
QQDYSSPRT

SEQ ID NO: 20471 - protein, 451 aa, synthetic construct
  REGION 1..451: note = Description of Artificial Sequence: Synthetic polypeptide
  REGION 1..451: note = XENP018995 1G6_H1.254_L1_IgG1_PVA_/S267K Heavy Chain
EVQLVESGGGLVKPGGSLRLSCAASGFTFSNYWMNWVRQAPGKGLEWVGEIRLKSNNYATHYAEPVKGRFTISRDDSKSTVYLEMNSLKTEDTAVYYCTRYYGNYGGYFDVWGAGTLVTVSSASTKGPSVFPLAPSSKSTSGGTAALGCLVKDYFPEPVTVSWNSGALTSGVHTFPAVLQSSGLYSLSSVVTVPSSSLGTQTYICNVNHKPSNTKVDKKVEPKSCDKTHTCPPCPAPPVAGPSVFLFPPKPKDTLMISRTPEVTCVVVDVKHEDPEVKFNWYVDGVEVHNAKTKPREEQYNSTYRVVSVLTVLHQDWLNGKEYKCKVSNKALPAPIEKTISKAKGQPREPQVYTLPPSREEMTKNQVSLTCLVKGFYPSDIAVEWESNGQPENNYKTTPPVLDSDGSFFLYSKLTVDKSRWQQGNVFSCSVMHEALHNHYTQKSLSLSPGK

SEQ ID NO: 20472 - protein, 122 aa, synthetic construct; identical to SEQ ID NO: 14816
  REGION 1..122: note = Description of Artificial Sequence: Synthetic polypeptide
  REGION 1..122: note = VH of XENP018995

SEQ ID NO: 20473 - protein, 5 aa, synthetic construct
  REGION 1..5: note = Description of Artificial Sequence: Synthetic peptide
  REGION 1..5: note = XENP018995 vhCDR1
NYWMN

SEQ ID NO: 20474 - protein, 19 aa, synthetic construct
  REGION 1..19: note = Description of Artificial Sequence: Synthetic peptide
  REGION 1..19: note = XENP018995 vhCDR2
EIRLKSNNYATHYAEPVKG

SEQ ID NO: 20475 - protein, 11 aa, synthetic construct
  REGION 1..11: note = Description of Artificial Sequence: Synthetic peptide
  REGION 1..11: note = XENP018995 vhCDR3
YYGNYGGYFDV

SEQ ID NO: 20476 - protein, 214 aa, synthetic construct; identical to SEQ ID NO: 16226
  REGION 1..214: note = Description of Artificial Sequence: Synthetic polypeptide
  REGION 1..214: note = XENP018995 1G6_H1.254_L1_IgG1_PVA_/S267K Light Chain

SEQ ID NO: 20477 - protein, 107 aa, synthetic construct; identical to SEQ ID NO: 10923
  REGION 1..107: note = Description of Artificial Sequence: Synthetic polypeptide
  REGION 1..107: note = VL of XENP018995

SEQ ID NO: 20478 - protein, 11 aa, synthetic construct
  REGION 1..11: note = Description of Artificial Sequence: Synthetic peptide
  REGION 1..11: note = XENP018995 vlCDR1
RASQSVSNDVA

SEQ ID NO: 20479 - protein, 7 aa, synthetic construct
  REGION 1..7: note = Description of Artificial Sequence: Synthetic peptide
  REGION 1..7: note = XENP018995 vlCDR2
YASHRYT

SEQ ID NO: 20480 - protein, 9 aa, synthetic construct
  REGION 1..9: note = Description of Artificial Sequence: Synthetic peptide
  REGION 1..9: note = XENP018995 vlCDR3
QQDYSSPRT

SEQ ID NO: 20481 - protein, 451 aa, synthetic construct
  REGION 1..451: note = Description of Artificial Sequence: Synthetic polypeptide
  REGION 1..451: note = XENP018996 1G6_H1.255_L1_IgG1_PVA_/S267K Heavy Chain
EVQLVESGGGLVKPGGSLRLSCAASGFTFSNYWMNWVRQAPGKGLEWVGEIRLKSNNYATHYAEPVKGRFTISRDDSKSTVYLQMNSEKTEDTAVYYCTRYYGNYGGYFDVWGAGTLVTVSSASTKGPSVFPLAPSSKSTSGGTAALGCLVKDYFPEPVTVSWNSGALTSGVHTFPAVLQSSGLYSLSSVVTVPSSSLGTQTYICNVNHKPSNTKVDKKVEPKSCDKTHTCPPCPAPPVAGPSVFLFPPKPKDTLMISRTPEVTCVVVDVKHEDPEVKFNWYVDGVEVHNAKTKPREEQYNSTYRVVSVLTVLHQDWLNGKEYKCKVSNKALPAPIEKTISKAKGQPREPQVYTLPPSREEMTKNQVSLTCLVKGFYPSDIAVEWESNGQPENNYKTTPPVLDSDGSFFLYSKLTVDKSRWQQGNVFSCSVMHEALHNHYTQKSLSLSPGK

SEQ ID NO: 20482 - protein, 122 aa, synthetic construct; identical to SEQ ID NO: 14825
  REGION 1..122: note = Description of Artificial Sequence: Synthetic polypeptide
  REGION 1..122: note = VH of XENP018996

SEQ ID NO: 20483 - protein, 5 aa, synthetic construct
  REGION 1..5: note = Description of Artificial Sequence: Synthetic peptide
  REGION 1..5: note = XENP018996 vhCDR1
NYWMN

SEQ ID NO: 20484 - protein, 19 aa, synthetic construct
  REGION 1..19: note = Description of Artificial Sequence: Synthetic peptide
  REGION 1..19: note = XENP018996 vhCDR2
EIRLKSNNYATHYAEPVKG

SEQ ID NO: 20485 - protein, 11 aa, synthetic construct
  REGION 1..11: note = Description of Artificial Sequence: Synthetic peptide
  REGION 1..11: note = XENP018996 vhCDR3
YYGNYGGYFDV

SEQ ID NO: 20486 - protein, 214 aa, synthetic construct; identical to SEQ ID NO: 16226
  REGION 1..214: note = Description of Artificial Sequence: Synthetic polypeptide
  REGION 1..214: note = XENP018996 1G6_H1.255_L1_IgG1_PVA_/S267K Light Chain

SEQ ID NO: 20487 - protein, 107 aa, synthetic construct; identical to SEQ ID NO: 10923
  REGION 1..107: note = Description of Artificial Sequence: Synthetic polypeptide
  REGION 1..107: note = VL of XENP018996

SEQ ID NO: 20488 - protein, 11 aa, synthetic construct
  REGION 1..11: note = Description of Artificial Sequence: Synthetic peptide
  REGION 1..11: note = XENP018996 vlCDR1
RASQSVSNDVA

SEQ ID NO: 20489 - protein, 7 aa, synthetic construct
  REGION 1..7: note = Description of Artificial Sequence: Synthetic peptide
  REGION 1..7: note = XENP018996 vlCDR2
YASHRYT

SEQ ID NO: 20490 - protein, 9 aa, synthetic construct
  REGION 1..9: note = Description of Artificial Sequence: Synthetic peptide
  REGION 1..9: note = XENP018996 vlCDR3
QQDYSSPRT

SEQ ID NO: 20491 - protein, 451 aa, synthetic construct
  REGION 1..451: note = Description of Artificial Sequence: Synthetic polypeptide
  REGION 1..451: note = XENP019001 1G6_H1.256_L1_IgG1_PVA_/S267K Heavy Chain
EVQLVESGGGLVKPGGSLRLSCAASGFTFSNYWMNWVRQAPGKGLEWVGEIRLKSNNYATHYAEPVKGRFTISRDDSKSTVYLQMNSVKTEDTAVYYCTRYYGNYGGYFDVWGAGTLVTVSSASTKGPSVFPLAPSSKSTSGGTAALGCLVKDYFPEPVTVSWNSGALTSGVHTFPAVLQSSGLYSLSSVVTVPSSSLGTQTYICNVNHKPSNTKVDKKVEPKSCDKTHTCPPCPAPPVAGPSVFLFPPKPKDTLMISRTPEVTCVVVDVKHEDPEVKFNWYVDGVEVHNAKTKPREEQYNSTYRVVSVLTVLHQDWLNGKEYKCKVSNKALPAPIEKTISKAKGQPREPQVYTLPPSREEMTKNQVSLTCLVKGFYPSDIAVEWESNGQPENNYKTTPPVLDSDGSFFLYSKLTVDKSRWQQGNVFSCSVMHEALHNHYTQKSLSLSPGK

SEQ ID NO: 20492 - protein, 122 aa, synthetic construct; identical to SEQ ID NO: 14834
  REGION 1..122: note = Description of Artificial Sequence: Synthetic polypeptide
  REGION 1..122: note = VH of XENP019001

SEQ ID NO: 20493 - protein, 5 aa, synthetic construct
  REGION 1..5: note = Description of Artificial Sequence: Synthetic peptide
  REGION 1..5: note = XENP019001 vhCDR1
NYWMN

SEQ ID NO: 20494 - protein, 19 aa, synthetic construct
  REGION 1..19: note = Description of Artificial Sequence: Synthetic peptide
  REGION 1..19: note = XENP019001 vhCDR2
EIRLKSNNYATHYAEPVKG

SEQ ID NO: 20495 - protein, 11 aa, synthetic construct
  REGION 1..11: note = Description of Artificial Sequence: Synthetic peptide
  REGION 1..11: note = XENP019001 vhCDR3
YYGNYGGYFDV

SEQ ID NO: 20496 - protein, 214 aa, synthetic construct; identical to SEQ ID NO: 16226
  REGION 1..214: note = Description of Artificial Sequence: Synthetic polypeptide
  REGION 1..214: note = XENP019001 1G6_H1.256_L1_IgG1_PVA_/S267K Light Chain

SEQ ID NO: 20497 - protein, 107 aa, synthetic construct; identical to SEQ ID NO: 10923
  REGION 1..107: note = Description of Artificial Sequence: Synthetic polypeptide
  REGION 1..107: note = VL of XENP019001

SEQ ID NO: 20498 - protein, 11 aa, synthetic construct
  REGION 1..11: note = Description of Artificial Sequence: Synthetic peptide
  REGION 1..11: note = XENP019001 vlCDR1
RASQSVSNDVA

SEQ ID NO: 20499 - protein, 7 aa, synthetic construct
  REGION 1..7: note = Description of Artificial Sequence: Synthetic peptide
  REGION 1..7: note = XENP019001 vlCDR2
YASHRYT

SEQ ID NO: 20500 - protein, 9 aa, synthetic construct
  REGION 1..9: note = Description of Artificial Sequence: Synthetic peptide
  REGION 1..9: note = XENP019001 vlCDR3
QQDYSSPRT

SEQ ID NO: 20501 - protein, 451 aa, synthetic construct
  REGION 1..451: note = Description of Artificial Sequence: Synthetic polypeptide
  REGION 1..451: note = XENP019002 1G6_H1.257_L1_IgG1_PVA_/S267K Heavy Chain
EVQLVESGGGLVKPGGSLRLSCAASGFTFSNYWMNWVRQAPGKGLEWVGEIRLKSNNYATHYAEPVKGRFTISRDDSKSTVYLQMNSLKTEDTAVYYCTRYYGNYGGYFDVWGRGTLVTVSSASTKGPSVFPLAPSSKSTSGGTAALGCLVKDYFPEPVTVSWNSGALTSGVHTFPAVLQSSGLYSLSSVVTVPSSSLGTQTYICNVNHKPSNTKVDKKVEPKSCDKTHTCPPCPAPPVAGPSVFLFPPKPKDTLMISRTPEVTCVVVDVKHEDPEVKFNWYVDGVEVHNAKTKPREEQYNSTYRVVSVLTVLHQDWLNGKEYKCKVSNKALPAPIEKTISKAKGQPREPQVYTLPPSREEMTKNQVSLTCLVKGFYPSDIAVEWESNGQPENNYKTTPPVLDSDGSFFLYSKLTVDKSRWQQGNVFSCSVMHEALHNHYTQKSLSLSPGK

SEQ ID NO: 20502 - protein, 122 aa, synthetic construct; identical to SEQ ID NO: 14843
  REGION 1..122: note = Description of Artificial Sequence: Synthetic polypeptide
  REGION 1..122: note = VH of XENP019002

SEQ ID NO: 20503 - protein, 5 aa, synthetic construct
  REGION 1..5: note = Description of Artificial Sequence: Synthetic peptide
  REGION 1..5: note = XENP019002 vhCDR1
NYWMN

SEQ ID NO: 20504 - protein, 19 aa, synthetic construct
  REGION 1..19: note = Description of Artificial Sequence: Synthetic peptide
  REGION 1..19: note = XENP019002 vhCDR2
EIRLKSNNYATHYAEPVKG

SEQ ID NO: 20505 - protein, 11 aa, synthetic construct
  REGION 1..11: note = Description of Artificial Sequence: Synthetic peptide
  REGION 1..11: note = XENP019002 vhCDR3
YYGNYGGYFDV

SEQ ID NO: 20506 - protein, 214 aa, synthetic construct; identical to SEQ ID NO: 16226
  REGION 1..214: note = Description of Artificial Sequence: Synthetic polypeptide
  REGION 1..214: note = XENP019002 1G6_H1.257_L1_IgG1_PVA_/S267K Light Chain

SEQ ID NO: 20507 - protein, 107 aa, synthetic construct; identical to SEQ ID NO: 10923
  REGION 1..107: note = Description of Artificial Sequence: Synthetic polypeptide
  REGION 1..107: note = VL of XENP019002

SEQ ID NO: 20508 - protein, 11 aa, synthetic construct
  REGION 1..11: note = Description of Artificial Sequence: Synthetic peptide
  REGION 1..11: note = XENP019002 vlCDR1
RASQSVSNDVA

SEQ ID NO: 20509 - protein, 7 aa, synthetic construct
  REGION 1..7: note = Description of Artificial Sequence: Synthetic peptide
  REGION 1..7: note = XENP019002 vlCDR2
YASHRYT

SEQ ID NO: 20510 - protein, 9 aa, synthetic construct
  REGION 1..9: note = Description of Artificial Sequence: Synthetic peptide
  REGION 1..9: note = XENP019002 vlCDR3
QQDYSSPRT

SEQ ID NO: 20511 - protein, 451 aa, synthetic construct
  REGION 1..451: note = Description of Artificial Sequence: Synthetic polypeptide
  REGION 1..451: note = XENP019003 1G6_H1.258_L1_IgG1_PVA_/S267K Heavy Chain
EVQLVESGGGLKKPGESLRLSCAASGFTFSNYWMNWVRQAPGKGLEWVGEIRLKSNNYATHYAEPVKGRFTISRDDSKSTVYLQMNSLKTEDTAVYYCTRYYGNYGGYFDVWGAGTLVTVSSASTKGPSVFPLAPSSKSTSGGTAALGCLVKDYFPEPVTVSWNSGALTSGVHTFPAVLQSSGLYSLSSVVTVPSSSLGTQTYICNVNHKPSNTKVDKKVEPKSCDKTHTCPPCPAPPVAGPSVFLFPPKPKDTLMISRTPEVTCVVVDVKHEDPEVKFNWYVDGVEVHNAKTKPREEQYNSTYRVVSVLTVLHQDWLNGKEYKCKVSNKALPAPIEKTISKAKGQPREPQVYTLPPSREEMTKNQVSLTCLVKGFYPSDIAVEWESNGQPENNYKTTPPVLDSDGSFFLYSKLTVDKSRWQQGNVFSCSVMHEALHNHYTQKSLSLSPGK

SEQ ID NO: 20512 - protein, 122 aa, synthetic construct; identical to SEQ ID NO: 14852
  REGION 1..122: note = Description of Artificial Sequence: Synthetic polypeptide
  REGION 1..122: note = VH of XENP019003

SEQ ID NO: 20513 - protein, 5 aa, synthetic construct
  REGION 1..5: note = Description of Artificial Sequence: Synthetic peptide
  REGION 1..5: note = XENP019003 vhCDR1
NYWMN

SEQ ID NO: 20514 - protein, 19 aa, synthetic construct
  REGION 1..19: note = Description of Artificial Sequence: Synthetic peptide
  REGION 1..19: note = XENP019003 vhCDR2
EIRLKSNNYATHYAEPVKG

SEQ ID NO: 20515 - protein, 11 aa, synthetic construct
  REGION 1..11: note = Description of Artificial Sequence: Synthetic peptide
  REGION 1..11: note = XENP019003 vhCDR3
YYGNYGGYFDV

SEQ ID NO: 20516 - protein, 214 aa, synthetic construct; identical to SEQ ID NO: 16226
  REGION 1..214: note = Description of Artificial Sequence: Synthetic polypeptide
  REGION 1..214: note = XENP019003 1G6_H1.258_L1_IgG1_PVA_/S267K Light Chain

SEQ ID NO: 20517 - protein, 107 aa, synthetic construct; identical to SEQ ID NO: 10923
  REGION 1..107: note = Description of Artificial Sequence: Synthetic polypeptide
  REGION 1..107: note = VL of XENP019003

SEQ ID NO: 20518 - protein, 11 aa, synthetic construct
  REGION 1..11: note = Description of Artificial Sequence: Synthetic peptide
  REGION 1..11: note = XENP019003 vlCDR1
RASQSVSNDVA

SEQ ID NO: 20519 - protein, 7 aa, synthetic construct
  REGION 1..7: note = Description of Artificial Sequence: Synthetic peptide
  REGION 1..7: note = XENP019003 vlCDR2
YASHRYT

SEQ ID NO: 20520 - protein, 9 aa, synthetic construct
  REGION 1..9: note = Description of Artificial Sequence: Synthetic peptide
  REGION 1..9: note = XENP019003 vlCDR3
QQDYSSPRT

SEQ ID NO: 20521 - protein, 451 aa, synthetic construct
  REGION 1..451: note = Description of Artificial Sequence: Synthetic polypeptide
  REGION 1..451: note = XENP019004 1G6_H1.259_L1_IgG1_PVA_/S267K Heavy Chain
EVQLVESGGGLVKPGGSLRLSCAASGFTFSNYWMDWVRQAPGKGLEWVGEIRLKSNNYATHYAEPVKGRFTISRDDSKSTVYLQMNSLKTEDTAVYYCKRYYGNYGGYFDVWGAGTLVTVSSASTKGPSVFPLAPSSKSTSGGTAALGCLVKDYFPEPVTVSWNSGALTSGVHTFPAVLQSSGLYSLSSVVTVPSSSLGTQTYICNVNHKPSNTKVDKKVEPKSCDKTHTCPPCPAPPVAGPSVFLFPPKPKDTLMISRTPEVTCVVVDVKHEDPEVKFNWYVDGVEVHNAKTKPREEQYNSTYRVVSVLTVLHQDWLNGKEYKCKVSNKALPAPIEKTISKAKGQPREPQVYTLPPSREEMTKNQVSLTCLVKGFYPSDIAVEWESNGQPENNYKTTPPVLDSDGSFFLYSKLTVDKSRWQQGNVFSCSVMHEALHNHYTQKSLSLSPGK

SEQ ID NO: 20522 - protein, 122 aa, synthetic construct; identical to SEQ ID NO: 14861
  REGION 1..122: note = Description of Artificial Sequence: Synthetic polypeptide
  REGION 1..122: note = VH of XENP019004

SEQ ID NO: 20523 - protein, 5 aa, synthetic construct
  REGION 1..5: note = Description of Artificial Sequence: Synthetic peptide
  REGION 1..5: note = XENP019004 vhCDR1
NYWMD

SEQ ID NO: 20524 - protein, 19 aa, synthetic construct
  REGION 1..19: note = Description of Artificial Sequence: Synthetic peptide
  REGION 1..19: note = XENP019004 vhCDR2
EIRLKSNNYATHYAEPVKG

SEQ ID NO: 20525 - protein, 11 aa, synthetic construct
  REGION 1..11: note = Description of Artificial Sequence: Synthetic peptide
  REGION 1..11: note = XENP019004 vhCDR3
YYGNYGGYFDV

SEQ ID NO: 20526 - protein, 214 aa, synthetic construct; identical to SEQ ID NO: 16226
  REGION 1..214: note = Description of Artificial Sequence: Synthetic polypeptide
  REGION 1..214: note = XENP019004 1G6_H1.259_L1_IgG1_PVA_/S267K Light Chain

SEQ ID NO: 20527 - protein, 107 aa, synthetic construct; identical to SEQ ID NO: 10923
  REGION 1..107: note = Description of Artificial Sequence: Synthetic polypeptide
  REGION 1..107: note = VL of XENP019004

SEQ ID NO: 20528 - protein, 11 aa, synthetic construct
  REGION 1..11: note = Description of Artificial Sequence: Synthetic peptide
  REGION 1..11: note = XENP019004 vlCDR1
RASQSVSNDVA

SEQ ID NO: 20529 - protein, 7 aa, synthetic construct
  REGION 1..7: note = Description of Artificial Sequence: Synthetic peptide
  REGION 1..7: note = XENP019004 vlCDR2
YASHRYT

SEQ ID NO: 20530 - protein, 9 aa, synthetic construct
  REGION 1..9: note = Description of Artificial Sequence: Synthetic peptide
  REGION 1..9: note = XENP019004 vlCDR3
QQDYSSPRT

SEQ ID NO: 20531 - protein, 451 aa, synthetic construct
  REGION 1..451: note = Description of Artificial Sequence: Synthetic polypeptide
  REGION 1..451: note = XENP019005 1G6_H1.260_L1_IgG1_PVA_/S267K Heavy Chain
EVQLVESGGGLVKPGESLRLSCAASGFTFSNYWMNWVRQAPGKGLEWVGEIRLKSNNYATHYAEPVKGRFTISRDDSKSTVYLQMNSRKTEDTAVYYCTRYYGNYGGYFDVWGAGTLVTVSSASTKGPSVFPLAPSSKSTSGGTAALGCLVKDYFPEPVTVSWNSGALTSGVHTFPAVLQSSGLYSLSSVVTVPSSSLGTQTYICNVNHKPSNTKVDKKVEPKSCDKTHTCPPCPAPPVAGPSVFLFPPKPKDTLMISRTPEVTCVVVDVKHEDPEVKFNWYVDGVEVHNAKTKPREEQYNSTYRVVSVLTVLHQDWLNGKEYKCKVSNKALPAPIEKTISKAKGQPREPQVYTLPPSREEMTKNQVSLTCLVKGFYPSDIAVEWESNGQPENNYKTTPPVLDSDGSFFLYSKLTVDKSRWQQGNVFSCSVMHEALHNHYTQKSLSLSPGK

SEQ ID NO: 20532 - protein, 122 aa, synthetic construct; identical to SEQ ID NO: 14870
  REGION 1..122: note = Description of Artificial Sequence: Synthetic polypeptide
  REGION 1..122: note = VH of XENP019005

SEQ ID NO: 20533 - protein, 5 aa, synthetic construct
  REGION 1..5: note = Description of Artificial Sequence: Synthetic peptide
  REGION 1..5: note = XENP019005 vhCDR1
NYWMN

SEQ ID NO: 20534 - protein, 19 aa, synthetic construct
  REGION 1..19: note = Description of Artificial Sequence: Synthetic peptide
  REGION 1..19: note = XENP019005 vhCDR2
EIRLKSNNYATHYAEPVKG

SEQ ID NO: 20535 - protein, 11 aa, synthetic construct
  REGION 1..11: note = Description of Artificial Sequence: Synthetic peptide
  REGION 1..11: note = XENP019005 vhCDR3
YYGNYGGYFDV

SEQ ID NO: 20536 - protein, 214 aa, synthetic construct; identical to SEQ ID NO: 16226
  REGION 1..214: note = Description of Artificial Sequence: Synthetic polypeptide
  REGION 1..214: note = XENP019005 1G6_H1.260_L1_IgG1_PVA_/S267K Light Chain

SEQ ID NO: 20537 - protein, 107 aa, synthetic construct; identical to SEQ ID NO: 10923
  REGION 1..107: note = Description of Artificial Sequence: Synthetic polypeptide
  REGION 1..107: note = VL of XENP019005

SEQ ID NO: 20538 - protein, 11 aa, synthetic construct
  REGION 1..11: note = Description of Artificial Sequence: Synthetic peptide
  REGION 1..11: note = XENP019005 vlCDR1
RASQSVSNDVA

SEQ ID NO: 20539 - protein, 7 aa, synthetic construct
  REGION 1..7: note = Description of Artificial Sequence: Synthetic peptide
  REGION 1..7: note = XENP019005 vlCDR2
YASHRYT

SEQ ID NO: 20540 - protein, 9 aa, synthetic construct
  REGION 1..9: note = Description of Artificial Sequence: Synthetic peptide
  REGION 1..9: note = XENP019005 vlCDR3
QQDYSSPRT

SEQ ID NO: 20541 - protein, 451 aa, synthetic construct
  REGION 1..451: note = Description of Artificial Sequence: Synthetic polypeptide
  REGION 1..451: note = XENP019006 1G6_H1.261_L1_IgG1_PVA_/S267K Heavy Chain
EVQLVESGGGLVKPGGSLRLSCKASGFTFSNYWMNWVRQAPGKGLEWVGEIRLKSNNYATHYAEPVKGRFTISRDDSKDTVYLQMNSLKTEDTAVYYCTRYYGNYGGYFDVWGAGTLVTVSSASTKGPSVFPLAPSSKSTSGGTAALGCLVKDYFPEPVTVSWNSGALTSGVHTFPAVLQSSGLYSLSSVVTVPSSSLGTQTYICNVNHKPSNTKVDKKVEPKSCDKTHTCPPCPAPPVAGPSVFLFPPKPKDTLMISRTPEVTCVVVDVKHEDPEVKFNWYVDGVEVHNAKTKPREEQYNSTYRVVSVLTVLHQDWLNGKEYKCKVSNKALPAPIEKTISKAKGQPREPQVYTLPPSREEMTKNQVSLTCLVKGFYPSDIAVEWESNGQPENNYKTTPPVLDSDGSFFLYSKLTVDKSRWQQGNVFSCSVMHEALHNHYTQKSLSLSPGK

SEQ ID NO: 20542 - protein, 122 aa, synthetic construct; identical to SEQ ID NO: 14879
  REGION 1..122: note = Description of Artificial Sequence: Synthetic polypeptide
  REGION 1..122: note = VH of XENP019006

SEQ ID NO: 20543 - protein, 5 aa, synthetic construct
  REGION 1..5: note = Description of Artificial Sequence: Synthetic peptide
  REGION 1..5: note = XENP019006 vhCDR1
NYWMN

SEQ ID NO: 20544 - protein, 19 aa, synthetic construct
  REGION 1..19: note = Description of Artificial Sequence: Synthetic peptide
  REGION 1..19: note = XENP019006 vhCDR2
EIRLKSNNYATHYAEPVKG

SEQ ID NO: 20545 - protein, 11 aa, synthetic construct
  REGION 1..11: note = Description of Artificial Sequence: Synthetic peptide
  REGION 1..11: note = XENP019006 vhCDR3
YYGNYGGYFDV

SEQ ID NO: 20546 - protein, 214 aa, synthetic construct; identical to SEQ ID NO: 16226
  REGION 1..214: note = Description of Artificial Sequence: Synthetic polypeptide
  REGION 1..214: note = XENP019006 1G6_H1.261_L1_IgG1_PVA_/S267K Light Chain

SEQ ID NO: 20547 - protein, 107 aa, synthetic construct; identical to SEQ ID NO: 10923
  REGION 1..107: note = Description of Artificial Sequence: Synthetic polypeptide
  REGION 1..107: note = VL of XENP019006

SEQ ID NO: 20548 - protein, 11 aa, synthetic construct
  REGION 1..11: note = Description of Artificial Sequence: Synthetic peptide
  REGION 1..11: note = XENP019006 vlCDR1
RASQSVSNDVA

SEQ ID NO: 20549 - protein, 7 aa, synthetic construct
  REGION 1..7: note = Description of Artificial Sequence: Synthetic peptide
  REGION 1..7: note = XENP019006 vlCDR2
YASHRYT

SEQ ID NO: 20550 - protein, 9 aa, synthetic construct
  REGION 1..9: note = Description of Artificial Sequence: Synthetic peptide
  REGION 1..9: note = XENP019006 vlCDR3
QQDYSSPRT

SEQ ID NO: 20551 - protein, 451 aa, synthetic construct
  REGION 1..451: note = Description of Artificial Sequence: Synthetic polypeptide
  REGION 1..451: note = XENP019007 1G6_H1.262_L1_IgG1_PVA_/S267K Heavy Chain
EVQLVESGGGLVKPGESLRLSCAASGFTFSNYWMNWVRQAPGKGLEWVGEIRLKSNNYATHYAEPVKGRFTISRDDSKSTVYLQMNRLKTEDTAVYYCTRYYGNYGGYFDVWGAGTLVTVSSASTKGPSVFPLAPSSKSTSGGTAALGCLVKDYFPEPVTVSWNSGALTSGVHTFPAVLQSSGLYSLSSVVTVPSSSLGTQTYICNVNHKPSNTKVDKKVEPKSCDKTHTCPPCPAPPVAGPSVFLFPPKPKDTLMISRTPEVTCVVVDVKHEDPEVKFNWYVDGVEVHNAKTKPREEQYNSTYRVVSVLTVLHQDWLNGKEYKCKVSNKALPAPIEKTISKAKGQPREPQVYTLPPSREEMTKNQVSLTCLVKGFYPSDIAVEWESNGQPENNYKTTPPVLDSDGSFFLYSKLTVDKSRWQQGNVFSCSVMHEALHNHYTQKSLSLSPGK

SEQ ID NO: 20552 - protein, 122 aa, synthetic construct; identical to SEQ ID NO: 14888
  REGION 1..122: note = Description of Artificial Sequence: Synthetic polypeptide
  REGION 1..122: note = VH of XENP019007

SEQ ID NO: 20553 - protein, 5 aa, synthetic construct
  REGION 1..5: note = Description of Artificial Sequence: Synthetic peptide
  REGION 1..5: note = XENP019007 vhCDR1
NYWMN

SEQ ID NO: 20554 - protein, 19 aa, synthetic construct
  REGION 1..19: note = Description of Artificial Sequence: Synthetic peptide
  REGION 1..19: note = XENP019007 vhCDR2
EIRLKSNNYATHYAEPVKG

SEQ ID NO: 20555 - protein, 11 aa, synthetic construct
  REGION 1..11: note = Description of Artificial Sequence: Synthetic peptide
  REGION 1..11: note = XENP019007 vhCDR3
YYGNYGGYFDV

SEQ ID NO: 20556 - protein, 214 aa, synthetic construct; identical to SEQ ID NO: 16226
  REGION 1..214: note = Description of Artificial Sequence: Synthetic polypeptide
  REGION 1..214: note = XENP019007 1G6_H1.262_L1_IgG1_PVA_/S267K Light Chain

SEQ ID NO: 20557 - protein, 107 aa, synthetic construct; identical to SEQ ID NO: 10923
  REGION 1..107: note = Description of Artificial Sequence: Synthetic polypeptide
  REGION 1..107: note = VL of XENP019007

SEQ ID NO: 20558 - protein, 11 aa, synthetic construct
  REGION 1..11: note = Description of Artificial Sequence: Synthetic peptide
  REGION 1..11: note = XENP019007 vlCDR1
RASQSVSNDVA

SEQ ID NO: 20559 - protein, 7 aa, synthetic construct
  REGION 1..7: note = Description of Artificial Sequence: Synthetic peptide
  REGION 1..7: note = XENP019007 vlCDR2
YASHRYT

SEQ ID NO: 20560 - protein, 9 aa, synthetic construct
  REGION 1..9: note = Description of Artificial Sequence: Synthetic peptide
  REGION 1..9: note = XENP019007 vlCDR3
QQDYSSPRT

SEQ ID NO: 20561 - protein, 451 aa, synthetic construct
  REGION 1..451: note = Description of Artificial Sequence: Synthetic polypeptide
  REGION 1..451: note = XENP019008 1G6_H1.263_L1_IgG1_PVA_/S267K Heavy Chain
EVQLVESGGGLVKPGGSLRLSCAASGFTFSNYWMNWVRQAPGKGLEWVGEIRLKSNNYATHYAEKVKGLFTISRDDSKSTVYLQMNSLKTEDTAVYYCTRYYGNYGGYFDVWGAGTLVTVSSASTKGPSVFPLAPSSKSTSGGTAALGCLVKDYFPEPVTVSWNSGALTSGVHTFPAVLQSSGLYSLSSVVTVPSSSLGTQTYICNVNHKPSNTKVDKKVEPKSCDKTHTCPPCPAPPVAGPSVFLFPPKPKDTLMISRTPEVTCVVVDVKHEDPEVKFNWYVDGVEVHNAKTKPREEQYNSTYRVVSVLTVLHQDWLNGKEYKCKVSNKALPAPIEKTISKAKGQPREPQVYTLPPSREEMTKNQVSLTCLVKGFYPSDIAVEWESNGQPENNYKTTPPVLDSDGSFFLYSKLTVDKSRWQQGNVFSCSVMHEALHNHYTQKSLSLSPGK

SEQ ID NO: 20562 - protein, 122 aa, synthetic construct; identical to SEQ ID NO: 14897
  REGION 1..122: note = Description of Artificial Sequence: Synthetic polypeptide
  REGION 1..122: note = VH of XENP019008

SEQ ID NO: 20563 - protein, 5 aa, synthetic construct
  REGION 1..5: note = Description of Artificial Sequence: Synthetic peptide
  REGION 1..5: note = XENP019008 vhCDR1
NYWMN

SEQ ID NO: 20564 - protein, 19 aa, synthetic construct
  REGION 1..19: note = Description of Artificial Sequence: Synthetic peptide
  REGION 1..19: note = XENP019008 vhCDR2
EIRLKSNNYATHYAEKVKG

SEQ ID NO: 20565 - protein, 11 aa, synthetic construct
  REGION 1..11: note = Description of Artificial Sequence: Synthetic peptide
  REGION 1..11: note = XENP019008 vhCDR3
YYGNYGGYFDV

SEQ ID NO: 20566 - protein, 214 aa, synthetic construct; identical to SEQ ID NO: 16226
  REGION 1..214: note = Description of Artificial Sequence: Synthetic polypeptide
  REGION 1..214: note = XENP019008 1G6_H1.263_L1_IgG1_PVA_/S267K Light Chain

SEQ ID NO: 20567 - protein, 107 aa, synthetic construct; identical to SEQ ID NO: 10923
  REGION 1..107: note = Description of Artificial Sequence: Synthetic polypeptide
  REGION 1..107: note = VL of XENP019008

SEQ ID NO: 20568 - protein, 11 aa, synthetic construct
  REGION 1..11: note = Description of Artificial Sequence: Synthetic peptide
  REGION 1..11: note = XENP019008 vlCDR1
RASQSVSNDVA

SEQ ID NO: 20569 - protein, 7 aa, synthetic construct
  REGION 1..7: note = Description of Artificial Sequence: Synthetic peptide
  REGION 1..7: note = XENP019008 vlCDR2
YASHRYT

SEQ ID NO: 20570 - protein, 9 aa, synthetic construct
  REGION 1..9: note = Description of Artificial Sequence: Synthetic peptide
  REGION 1..9: note = XENP019008 vlCDR3
QQDYSSPRT

SEQ ID NO: 20571 - protein, 451 aa, synthetic construct
  REGION 1..451: note = Description of Artificial Sequence: Synthetic polypeptide
  REGION 1..451: note = XENP019009 1G6_H1.264_L1_IgG1_PVA_/S267K Heavy Chain
EVQLVESGGGLVKPGGSLRLSCKASGDTFSNYWMNWVRQAPGKGLEWVGEIRLKSNNYATHYAEPVKGRFTISRDDSKSTVYLQMNSLKTEDTAVYYCTRYYGNYGGYFDVWGAGTLVTVSSASTKGPSVFPLAPSSKSTSGGTAALGCLVKDYFPEPVTVSWNSGALTSGVHTFPAVLQSSGLYSLSSVVTVPSSSLGTQTYICNVNHKPSNTKVDKKVEPKSCDKTHTCPPCPAPPVAGPSVFLFPPKPKDTLMISRTPEVTCVVVDVKHEDPEVKFNWYVDGVEVHNAKTKPREEQYNSTYRVVSVLTVLHQDWLNGKEYKCKVSNKALPAPIEKTISKAKGQPREPQVYTLPPSREEMTKNQVSLTCLVKGFYPSDIAVEWESNGQPENNYKTTPPVLDSDGSFFLYSKLTVDKSRWQQGNVFSCSVMHEALHNHYTQKSLSLSPGK

SEQ ID NO: 20572 - protein, 122 aa, synthetic construct; identical to SEQ ID NO: 14906
  REGION 1..122: note = Description of Artificial Sequence: Synthetic polypeptide
  REGION 1..122: note = VH of XENP019009

SEQ ID NO: 20573 - protein, 5 aa, synthetic construct
  REGION 1..5: note = Description of Artificial Sequence: Synthetic peptide
  REGION 1..5: note = XENP019009 vhCDR1
NYWMN

SEQ ID NO: 20574 - protein, 19 aa, synthetic construct
  REGION 1..19: note = Description of Artificial Sequence: Synthetic peptide
  REGION 1..19: note = XENP019009 vhCDR2
EIRLKSNNYATHYAEPVKG

SEQ ID NO: 20575 - protein, 11 aa, synthetic construct
  REGION 1..11: note = Description of Artificial Sequence: Synthetic peptide
  REGION 1..11: note = XENP019009 vhCDR3
YYGNYGGYFDV

SEQ ID NO: 20576 - protein, 214 aa, synthetic construct; identical to SEQ ID NO: 16226
  REGION 1..214: note = Description of Artificial Sequence: Synthetic polypeptide
  REGION 1..214: note = XENP019009 1G6_H1.264_L1_IgG1_PVA_/S267K Light Chain

SEQ ID NO: 20577 - protein, 107 aa, synthetic construct; identical to SEQ ID NO: 10923
  REGION 1..107: note = Description of Artificial Sequence: Synthetic polypeptide
  REGION 1..107: note = VL of XENP019009

SEQ ID NO: 20578 - protein, 11 aa, synthetic construct
  REGION 1..11: note = Description of Artificial Sequence: Synthetic peptide
  REGION 1..11: note = XENP019009 vlCDR1
RASQSVSNDVA

SEQ ID NO: 20579 - protein, 7 aa, synthetic construct
  REGION 1..7: note = Description of Artificial Sequence: Synthetic peptide
  REGION 1..7: note = XENP019009 vlCDR2
YASHRYT

SEQ ID NO: 20580 - protein, 9 aa, synthetic construct
  REGION 1..9: note = Description of Artificial Sequence: Synthetic peptide
  REGION 1..9: note = XENP019009 vlCDR3
QQDYSSPRT

SEQ ID NO: 20581 - protein, 451 aa, synthetic construct
  REGION 1..451: note = Description of Artificial Sequence: Synthetic polypeptide
  REGION 1..451: note = XENP019010 1G6_H1.265_L1_IgG1_PVA_/S267K Heavy Chain
EVQLVESGGGLVKPGESLRLSCAASGFTFSNYWMNWVRQAPGKGLEWVGEIRLKSNNYATHYAEPVKGRFTISRDDSKSTVYLKMNSLKTEDTAVYYCTRYYGNYGGYFDVWGAGTLVTVSSASTKGPSVFPLAPSSKSTSGGTAALGCLVKDYFPEPVTVSWNSGALTSGVHTFPAVLQSSGLYSLSSVVTVPSSSLGTQTYICNVNHKPSNTKVDKKVEPKSCDKTHTCPPCPAPPVAGPSVFLFPPKPKDTLMISRTPEVTCVVVDVKHEDPEVKFNWYVDGVEVHNAKTKPREEQYNSTYRVVSVLTVLHQDWLNGKEYKCKVSNKALPAPIEKTISKAKGQPREPQVYTLPPSREEMTKNQVSLTCLVKGFYPSDIAVEWESNGQPENNYKTTPPVLDSDGSFFLYSKLTVDKSRWQQGNVFSCSVMHEALHNHYTQKSLSLSPGK

SEQ ID NO: 20582 - protein, 122 aa, synthetic construct; identical to SEQ ID NO: 14915
  REGION 1..122: note = Description of Artificial Sequence: Synthetic polypeptide
  REGION 1..122: note = VH of XENP019010

SEQ ID NO: 20583 - protein, 5 aa, synthetic construct
  REGION 1..5: note = Description of Artificial Sequence: Synthetic peptide
  REGION 1..5: note = XENP019010 vhCDR1
NYWMN

SEQ ID NO: 20584 - protein, 19 aa, synthetic construct
  REGION 1..19: note = Description of Artificial Sequence: Synthetic peptide
  REGION 1..19: note = XENP019010 vhCDR2
EIRLKSNNYATHYAEPVKG

SEQ ID NO: 20585 - protein, 11 aa, synthetic construct
  REGION 1..11: note = Description of Artificial Sequence: Synthetic peptide
  REGION 1..11: note = XENP019010 vhCDR3
YYGNYGGYFDV

SEQ ID NO: 20586 - protein, 214 aa, synthetic construct; identical to SEQ ID NO: 16226
  REGION 1..214: note = Description of Artificial Sequence: Synthetic polypeptide
  REGION 1..214: note = XENP019010 1G6_H1.265_L1_IgG1_PVA_/S267K Light Chain

SEQ ID NO: 20587 - protein, 107 aa, synthetic construct; identical to SEQ ID NO: 10923
  REGION 1..107: note = Description of Artificial Sequence: Synthetic polypeptide
  REGION 1..107: note = VL of XENP019010

SEQ ID NO: 20588 - protein, 11 aa, synthetic construct
  REGION 1..11: note = Description of Artificial Sequence: Synthetic peptide
  REGION 1..11: note = XENP019010 vlCDR1
RASQSVSNDVA

SEQ ID NO: 20589 - protein, 7 aa, synthetic construct
  REGION 1..7: note = Description of Artificial Sequence: Synthetic peptide
  REGION 1..7: note = XENP019010 vlCDR2
YASHRYT

SEQ ID NO: 20590 - protein, 9 aa, synthetic construct
  REGION 1..9: note = Description of Artificial Sequence: Synthetic peptide
  REGION 1..9: note = XENP019010 vlCDR3
QQDYSSPRT

SEQ ID NO: 20591 - protein, 451 aa, synthetic construct
  REGION 1..451: note = Description of Artificial Sequence: Synthetic polypeptide
  REGION 1..451: note = XENP019011 1G6_H1.266_L1_IgG1_PVA_/S267K Heavy Chain
EVQLVESGGGLVKPGGSLRLSCAASGFTFSNYWMNWVRQAPGKGLEWVGEIRLKSNNYATHYAQPVKDRFTISRDDSKSTVYLQMNSLKTEDTAVYYCTRYYGNYGGYFDVWGAGTLVTVSSASTKGPSVFPLAPSSKSTSGGTAALGCLVKDYFPEPVTVSWNSGALTSGVHTFPAVLQSSGLYSLSSVVTVPSSSLGTQTYICNVNHKPSNTKVDKKVEPKSCDKTHTCPPCPAPPVAGPSVFLFPPKPKDTLMISRTPEVTCVVVDVKHEDPEVKFNWYVDGVEVHNAKTKPREEQYNSTYRVVSVLTVLHQDWLNGKEYKCKVSNKALPAPIEKTISKAKGQPREPQVYTLPPSREEMTKNQVSLTCLVKGFYPSDIAVEWESNGQPENNYKTTPPVLDSDGSFFLYSKLTVDKSRWQQGNVFSCSVMHEALHNHYTQKSLSLSPGK

SEQ ID NO: 20592 - protein, 122 aa, synthetic construct; identical to SEQ ID NO: 14924
  REGION 1..122: note = Description of Artificial Sequence: Synthetic polypeptide
  REGION 1..122: note = VH of XENP019011

SEQ ID NO: 20593 - protein, 5 aa, synthetic construct
  REGION 1..5: note = Description of Artificial Sequence: Synthetic peptide
  REGION 1..5: note = XENP019011 vhCDR1
NYWMN

SEQ ID NO: 20594 - protein, 19 aa, synthetic construct
  REGION 1..19: note = Description of Artificial Sequence: Synthetic peptide
  REGION 1..19: note = XENP019011 vhCDR2
EIRLKSNNYATHYAQPVKD

SEQ ID NO: 20595 - protein, 11 aa, synthetic construct
  REGION 1..11: note = Description of Artificial Sequence: Synthetic peptide
  REGION 1..11: note = XENP019011 vhCDR3
YYGNYGGYFDV

SEQ ID NO: 20596 - protein, 214 aa, synthetic construct; identical to SEQ ID NO: 16226
  REGION 1..214: note = Description of Artificial Sequence: Synthetic polypeptide
  REGION 1..214: note = XENP019011 1G6_H1.266_L1_IgG1_PVA_/S267K Light Chain

SEQ ID NO: 20597 - protein, 107 aa, synthetic construct; identical to SEQ ID NO: 10923
  REGION 1..107: note = Description of Artificial Sequence: Synthetic polypeptide
  REGION 1..107: note = VL of XENP019011

SEQ ID NO: 20598 - protein, 11 aa, synthetic construct
  REGION 1..11: note = Description of Artificial Sequence: Synthetic peptide
  REGION 1..11: note = XENP019011 vlCDR1
RASQSVSNDVA

SEQ ID NO: 20599 - protein, 7 aa, synthetic construct
  REGION 1..7: note = Description of Artificial Sequence: Synthetic peptide
  REGION 1..7: note = XENP019011 vlCDR2
YASHRYT

SEQ ID NO: 20600 - protein, 9 aa, synthetic construct
  REGION 1..9: note = Description of Artificial Sequence: Synthetic peptide
  REGION 1..9: note = XENP019011 vlCDR3
QQDYSSPRT

SEQ ID NO: 20601 - protein, 451 aa, synthetic construct
  REGION 1..451: note = Description of Artificial Sequence: Synthetic polypeptide
  REGION 1..451: note = XENP019012 1G6_H1.267_L1_IgG1_PVA_/S267K Heavy Chain
EVQLVESGGGLVKPGGSLRLSCAASGFTFSNYWMNWVRQAPGKGLEWVGEIRLKSNNYATHYAEPVKGRFTISRDDSKSTVYLEMNSRKTEDTAVYYCTRYYGNYGGYFDVWGAGTLVTVSSASTKGPSVFPLAPSSKSTSGGTAALGCLVKDYFPEPVTVSWNSGALTSGVHTFPAVLQSSGLYSLSSVVTVPSSSLGTQTYICNVNHKPSNTKVDKKVEPKSCDKTHTCPPCPAPPVAGPSVFLFPPKPKDTLMISRTPEVTCVVVDVKHEDPEVKFNWYVDGVEVHNAKTKPREEQYNSTYRVVSVLTVLHQDWLNGKEYKCKVSNKALPAPIEKTISKAKGQPREPQVYTLPPSREEMTKNQVSLTCLVKGFYPSDIAVEWESNGQPENNYKTTPPVLDSDGSFFLYSKLTVDKSRWQQGNVFSCSVMHEALHNHYTQKSLSLSPGK

SEQ ID NO: 20602 - protein, 122 aa, synthetic construct; identical to SEQ ID NO: 14933
  REGION 1..122: note = Description of Artificial Sequence: Synthetic polypeptide
  REGION 1..122: note = VH of XENP019012

SEQ ID NO: 20603 - protein, 5 aa, synthetic construct
  REGION 1..5: note = Description of Artificial Sequence: Synthetic peptide
  REGION 1..5: note = XENP019012 vhCDR1
NYWMN

SEQ ID NO: 20604 - protein, 19 aa, synthetic construct
  REGION 1..19: note = Description of Artificial Sequence: Synthetic peptide
  REGION 1..19: note = XENP019012 vhCDR2
EIRLKSNNYATHYAEPVKG

SEQ ID NO: 20605 - protein, 11 aa, synthetic construct
  REGION 1..11: note = Description of Artificial Sequence: Synthetic peptide
  REGION 1..11: note = XENP019012 vhCDR3
YYGNYGGYFDV

SEQ ID NO: 20606 - protein, 214 aa, synthetic construct; identical to SEQ ID NO: 16226
  REGION 1..214: note = Description of Artificial Sequence: Synthetic polypeptide
  REGION 1..214: note = XENP019012 1G6_H1.267_L1_IgG1_PVA_/S267K Light Chain

SEQ ID NO: 20607 - protein, 107 aa, synthetic construct; identical to SEQ ID NO: 10923
  REGION 1..107: note = Description of Artificial Sequence: Synthetic polypeptide
  REGION 1..107: note = VL of XENP019012

SEQ ID NO: 20608 - protein, 11 aa, synthetic construct
  REGION 1..11: note = Description of Artificial Sequence: Synthetic peptide
  REGION 1..11: note = XENP019012 vlCDR1
RASQSVSNDVA

SEQ ID NO: 20609 - protein, 7 aa, synthetic construct
  REGION 1..7: note = Description of Artificial Sequence: Synthetic peptide
  REGION 1..7: note = XENP019012 vlCDR2
YASHRYT

SEQ ID NO: 20610 - protein, 9 aa, synthetic construct
  REGION 1..9: note = Description of Artificial Sequence: Synthetic peptide
  REGION 1..9: note = XENP019012 vlCDR3
QQDYSSPRT

SEQ ID NO: 20611 - protein, 451 aa, synthetic construct
  REGION 1..451: note = Description of Artificial Sequence: Synthetic polypeptide
  REGION 1..451: note = XENP019013 1G6_H1.268_L1_IgG1_PVA_/S267K Heavy Chain
EVQLVESGGGLVKPGESLRLSCAASGFTFSNYWMNWVRQAPGKGLEWVGEIRLKSNNYATHYAEPVKGRFTISRDDSKSTVYLQMRSLKTEDTAVYYCTRYYGNYGGYFDVWGAGTLVTVSSASTKGPSVFPLAPSSKSTSGGTAALGCLVKDYFPEPVTVSWNSGALTSGVHTFPAVLQSSGLYSLSSVVTVPSSSLGTQTYICNVNHKPSNTKVDKKVEPKSCDKTHTCPPCPAPPVAGPSVFLFPPKPKDTLMISRTPEVTCVVVDVKHEDPEVKFNWYVDGVEVHNAKTKPREEQYNSTYRVVSVLTVLHQDWLNGKEYKCKVSNKALPAPIEKTISKAKGQPREPQVYTLPPSREEMTKNQVSLTCLVKGFYPSDIAVEWESNGQPENNYKTTPPVLDSDGSFFLYSKLTVDKSRWQQGNVFSCSVMHEALHNHYTQKSLSLSPGK

SEQ ID NO: 20612 - protein, 122 aa, synthetic construct; identical to SEQ ID NO: 14942
  REGION 1..122: note = Description of Artificial Sequence: Synthetic polypeptide
  REGION 1..122: note = VH of XENP019013

SEQ ID NO: 20613 - protein, 5 aa, synthetic construct
  REGION 1..5: note = Description of Artificial Sequence: Synthetic peptide
  REGION 1..5: note = XENP019013 vhCDR1
NYWMN

SEQ ID NO: 20614 - protein, 19 aa, synthetic construct
  REGION 1..19: note = Description of Artificial Sequence: Synthetic peptide
  REGION 1..19: note = XENP019013 vhCDR2
EIRLKSNNYATHYAEPVKG

SEQ ID NO: 20615 - protein, 11 aa, synthetic construct
  REGION 1..11: note = Description of Artificial Sequence: Synthetic peptide
  REGION 1..11: note = XENP019013 vhCDR3
YYGNYGGYFDV

SEQ ID NO: 20616 - protein, 214 aa, synthetic construct; identical to SEQ ID NO: 16226
  REGION 1..214: note = Description of Artificial Sequence: Synthetic polypeptide
  REGION 1..214: note = XENP019013 1G6_H1.268_L1_IgG1_PVA_/S267K Light Chain

SEQ ID NO: 20617 - protein, 107 aa, synthetic construct; identical to SEQ ID NO: 10923
  REGION 1..107: note = Description of Artificial Sequence: Synthetic polypeptide
  REGION 1..107: note = VL of XENP019013

SEQ ID NO: 20618 - protein, 11 aa, synthetic construct
  REGION 1..11: note = Description of Artificial Sequence: Synthetic peptide
  REGION 1..11: note = XENP019013 vlCDR1
RASQSVSNDVA

SEQ ID NO: 20619 - protein, 7 aa, synthetic construct
  REGION 1..7: note = Description of Artificial Sequence: Synthetic peptide
  REGION 1..7: note = XENP019013 vlCDR2
YASHRYT

SEQ ID NO: 20620 - protein, 9 aa, synthetic construct
  REGION 1..9: note = Description of Artificial Sequence: Synthetic peptide
  REGION 1..9: note = XENP019013 vlCDR3
QQDYSSPRT

SEQ ID NO: 20621 - protein, 451 aa, synthetic construct
  REGION 1..451: note = Description of Artificial Sequence: Synthetic polypeptide
  REGION 1..451: note = XENP019014 1G6_H1.269_L1_IgG1_PVA_/S267K Heavy Chain
EVQLVESGGGLVKPGGSLRLSCAASGFTFSNFWMNWVRQAPGKGLEWVGEIRLYSNNYATHYAEPVKGRFTISRDDSKSTVYLQMNSLKTEDTAVYYCTRYYGNYGGYFDVWGAGTLVTVSSASTKGPSVFPLAPSSKSTSGGTAALGCLVKDYFPEPVTVSWNSGALTSGVHTFPAVLQSSGLYSLSSVVTVPSSSLGTQTYICNVNHKPSNTKVDKKVEPKSCDKTHTCPPCPAPPVAGPSVFLFPPKPKDTLMISRTPEVTCVVVDVKHEDPEVKFNWYVDGVEVHNAKTKPREEQYNSTYRVVSVLTVLHQDWLNGKEYKCKVSNKALPAPIEKTISKAKGQPREPQVYTLPPSREEMTKNQVSLTCLVKGFYPSDIAVEWESNGQPENNYKTTPPVLDSDGSFFLYSKLTVDKSRWQQGNVFSCSVMHEALHNHYTQKSLSLSPGK

SEQ ID NO: 20622 - protein, 122 aa, synthetic construct; identical to SEQ ID NO: 14951
  REGION 1..122: note = Description of Artificial Sequence: Synthetic polypeptide
  REGION 1..122: note = VH of XENP019014

SEQ ID NO: 20623 - protein, 5 aa, synthetic construct
  REGION 1..5: note = Description of Artificial Sequence: Synthetic peptide
  REGION 1..5: note = XENP019014 vhCDR1
NFWMN

SEQ ID NO: 20624 - protein, 19 aa, synthetic construct
  REGION 1..19: note = Description of Artificial Sequence: Synthetic peptide
  REGION 1..19: note = XENP019014 vhCDR2
EIRLYSNNYATHYAEPVKG

SEQ ID NO: 20625 - protein, 11 aa, synthetic construct
  REGION 1..11: note = Description of Artificial Sequence: Synthetic peptide
  REGION 1..11: note = XENP019014 vhCDR3
YYGNYGGYFDV

SEQ ID NO: 20626 - protein, 214 aa, synthetic construct; identical to SEQ ID NO: 16226
  REGION 1..214: note = Description of Artificial Sequence: Synthetic polypeptide
  REGION 1..214: note = XENP019014 1G6_H1.269_L1_IgG1_PVA_/S267K Light Chain

SEQ ID NO: 20627 - protein, 107 aa, synthetic construct; identical to SEQ ID NO: 10923
  REGION 1..107: note = Description of Artificial Sequence: Synthetic polypeptide
  REGION 1..107: note = VL of XENP019014

SEQ ID NO: 20628 - protein, 11 aa, synthetic construct
  REGION 1..11: note = Description of Artificial Sequence: Synthetic peptide
  REGION 1..11: note = XENP019014 vlCDR1
RASQSVSNDVA

SEQ ID NO: 20629 - protein, 7 aa, synthetic construct
  REGION 1..7: note = Description of Artificial Sequence: Synthetic peptide
  REGION 1..7: note = XENP019014 vlCDR2
YASHRYT

SEQ ID NO: 20630 - protein, 9 aa, synthetic construct
  REGION 1..9: note = Description of Artificial Sequence: Synthetic peptide
  REGION 1..9: note = XENP019014 vlCDR3
QQDYSSPRT

SEQ ID NO: 20631 - protein, 451 aa, synthetic construct
  REGION 1..451: note = Description of Artificial Sequence: Synthetic polypeptide
  REGION 1..451: note = XENP019015 1G6_H1.270_L1_IgG1_PVA_/S267K Heavy Chain
EVQLVESGGGLVKPGGSLRLSCAASGFTFSNYWMNWVRQAPGKGLEWVGEIRWYSNNYATHYAEPVKGRFTISRDDSKSTVYLQMNSLKTEDTAVYYCTRYYGNYGGYFDVWGAGTLVTVSSASTKGPSVFPLAPSSKSTSGGTAALGCLVKDYFPEPVTVSWNSGALTSGVHTFPAVLQSSGLYSLSSVVTVPSSSLGTQTYICNVNHKPSNTKVDKKVEPKSCDKTHTCPPCPAPPVAGPSVFLFPPKPKDTLMISRTPEVTCVVVDVKHEDPEVKFNWYVDGVEVHNAKTKPREEQYNSTYRVVSVLTVLHQDWLNGKEYKCKVSNKALPAPIEKTISKAKGQPREPQVYTLPPSREEMTKNQVSLTCLVKGFYPSDIAVEWESNGQPENNYKTTPPVLDSDGSFFLYSKLTVDKSRWQQGNVFSCSVMHEALHNHYTQKSLSLSPGK

SEQ ID NO: 20632 - protein, 122 aa, synthetic construct; identical to SEQ ID NO: 14960
  REGION 1..122: note = Description of Artificial Sequence: Synthetic polypeptide
  REGION 1..122: note = VH of XENP019015

SEQ ID NO: 20633 - protein, 5 aa, synthetic construct
  REGION 1..5: note = Description of Artificial Sequence: Synthetic peptide
  REGION 1..5: note = XENP019015 vhCDR1
NYWMN

SEQ ID NO: 20634 - protein, 19 aa, synthetic construct
  REGION 1..19: note = Description of Artificial Sequence: Synthetic peptide
  REGION 1..19: note = XENP019015 vhCDR2
EIRWYSNNYATHYAEPVKG

SEQ ID NO: 20635 - protein, 11 aa, synthetic construct
  REGION 1..11: note = Description of Artificial Sequence: Synthetic peptide
  REGION 1..11: note = XENP019015 vhCDR3
YYGNYGGYFDV

SEQ ID NO: 20636 - protein, 214 aa, synthetic construct; identical to SEQ ID NO: 16226
  REGION 1..214: note = Description of Artificial Sequence: Synthetic polypeptide
  REGION 1..214: note = XENP019015 1G6_H1.270_L1_IgG1_PVA_/S267K Light Chain

SEQ ID NO: 20637 - protein, 107 aa, synthetic construct; identical to SEQ ID NO: 10923
  REGION 1..107: note = Description of Artificial Sequence: Synthetic polypeptide
  REGION 1..107: note = VL of XENP019015

SEQ ID NO: 20638 - protein, 11 aa, synthetic construct
  REGION 1..11: note = Description of Artificial Sequence: Synthetic peptide
  REGION 1..11: note = XENP019015 vlCDR1
RASQSVSNDVA

SEQ ID NO: 20639 - protein, 7 aa, synthetic construct
  REGION 1..7: note = Description of Artificial Sequence: Synthetic peptide
  REGION 1..7: note = XENP019015 vlCDR2
YASHRYT

SEQ ID NO: 20640 - protein, 9 aa, synthetic construct
  REGION 1..9: note = Description of Artificial Sequence: Synthetic peptide
  REGION 1..9: note = XENP019015 vlCDR3
QQDYSSPRT

SEQ ID NO: 20641 - protein, 451 aa, synthetic construct
  REGION 1..451: note = Description of Artificial Sequence: Synthetic polypeptide
  REGION 1..451: note = XENP019016 1G6_H1.271_L1_IgG1_PVA_/S267K Heavy Chain
EVQLVESGGGLVKPGGSLRLSCAASGFTFSNYWMNWVRQAPGKGLEWVGEIRLYSNNYATHYAEPVKGRFTISRDDSKSTLYLQMNSLKTEDTAVYYCTRYYGNYGGYFDVWGAGTLVTVSSASTKGPSVFPLAPSSKSTSGGTAALGCLVKDYFPEPVTVSWNSGALTSGVHTFPAVLQSSGLYSLSSVVTVPSSSLGTQTYICNVNHKPSNTKVDKKVEPKSCDKTHTCPPCPAPPVAGPSVFLFPPKPKDTLMISRTPEVTCVVVDVKHEDPEVKFNWYVDGVEVHNAKTKPREEQYNSTYRVVSVLTVLHQDWLNGKEYKCKVSNKALPAPIEKTISKAKGQPREPQVYTLPPSREEMTKNQVSLTCLVKGFYPSDIAVEWESNGQPENNYKTTPPVLDSDGSFFLYSKLTVDKSRWQQGNVFSCSVMHEALHNHYTQKSLSLSPGK

SEQ ID NO: 20642 - protein, 122 aa, synthetic construct; identical to SEQ ID NO: 14969
  REGION 1..122: note = Description of Artificial Sequence: Synthetic polypeptide
  REGION 1..122: note = VH of XENP019016

SEQ ID NO: 20643 - protein, 5 aa, synthetic construct
  REGION 1..5: note = Description of Artificial Sequence: Synthetic peptide
  REGION 1..5: note = XENP019016 vhCDR1
NYWMN

SEQ ID NO: 20644 - protein, 19 aa, synthetic construct
  REGION 1..19: note = Description of Artificial Sequence: Synthetic peptide
  REGION 1..19: note = XENP019016 vhCDR2
EIRLYSNNYATHYAEPVKG

SEQ ID NO: 20645 - protein, 11 aa, synthetic construct
  REGION 1..11: note = Description of Artificial Sequence: Synthetic peptide
  REGION 1..11: note = XENP019016 vhCDR3
YYGNYGGYFDV

SEQ ID NO: 20646 - protein, 214 aa, synthetic construct; identical to SEQ ID NO: 16226
  REGION 1..214: note = Description of Artificial Sequence: Synthetic polypeptide
  REGION 1..214: note = XENP019016 1G6_H1.271_L1_IgG1_PVA_/S267K Light Chain

SEQ ID NO: 20647 - protein, 107 aa, synthetic construct; identical to SEQ ID NO: 10923
  REGION 1..107: note = Description of Artificial Sequence: Synthetic polypeptide
  REGION 1..107: note = VL of XENP019016

SEQ ID NO: 20648 - protein, 11 aa, synthetic construct
  REGION 1..11: note = Description of Artificial Sequence: Synthetic peptide
  REGION 1..11: note = XENP019016 vlCDR1
RASQSVSNDVA

SEQ ID NO: 20649 - protein, 7 aa, synthetic construct
  REGION 1..7: note = Description of Artificial Sequence: Synthetic peptide
  REGION 1..7: note = XENP019016 vlCDR2
YASHRYT

SEQ ID NO: 20650 - protein, 9 aa, synthetic construct
  REGION 1..9: note = Description of Artificial Sequence: Synthetic peptide
  REGION 1..9: note = XENP019016 vlCDR3
QQDYSSPRT

SEQ ID NO: 20651 - protein, 451 aa, synthetic construct
  REGION 1..451: note = Description of Artificial Sequence: Synthetic polypeptide
  REGION 1..451: note = XENP019017 1G6_H1.272_L1_IgG1_PVA_/S267K Heavy Chain
EVQLVESGGGLVKPGGSLRLSCAASGFTFSNFWMNWVRQAPGKGLEWVGEIRLYSNNYATHYAEPVKGRFTISRDDSKSTLYLQMNSLKTEDTAVYYCTRYYGNYGGYFDVWGAGTLVTVSSASTKGPSVFPLAPSSKSTSGGTAALGCLVKDYFPEPVTVSWNSGALTSGVHTFPAVLQSSGLYSLSSVVTVPSSSLGTQTYICNVNHKPSNTKVDKKVEPKSCDKTHTCPPCPAPPVAGPSVFLFPPKPKDTLMISRTPEVTCVVVDVKHEDPEVKFNWYVDGVEVHNAKTKPREEQYNSTYRVVSVLTVLHQDWLNGKEYKCKVSNKALPAPIEKTISKAKGQPREPQVYTLPPSREEMTKNQVSLTCLVKGFYPSDIAVEWESNGQPENNYKTTPPVLDSDGSFFLYSKLTVDKSRWQQGNVFSCSVMHEALHNHYTQKSLSLSPGK

SEQ ID NO: 20652 - protein, 122 aa, synthetic construct; identical to SEQ ID NO: 14978
  REGION 1..122: note = Description of Artificial Sequence: Synthetic polypeptide
  REGION 1..122: note = VH of XENP019017

SEQ ID NO: 20653 - protein, 5 aa, synthetic construct
  REGION 1..5: note = Description of Artificial Sequence: Synthetic peptide
  REGION 1..5: note = XENP019017 vhCDR1
NFWMN

SEQ ID NO: 20654 - protein, 19 aa, synthetic construct
  REGION 1..19: note = Description of Artificial Sequence: Synthetic peptide
  REGION 1..19: note = XENP019017 vhCDR2
EIRLYSNNYATHYAEPVKG

SEQ ID NO: 20655 - protein, 11 aa, synthetic construct
  REGION 1..11: note = Description of Artificial Sequence: Synthetic peptide
  REGION 1..11: note = XENP019017 vhCDR3
YYGNYGGYFDV

SEQ ID NO: 20656 - protein, 214 aa, synthetic construct; identical to SEQ ID NO: 16226
  REGION 1..214: note = Description of Artificial Sequence: Synthetic polypeptide
  REGION 1..214: note = XENP019017 1G6_H1.272_L1_IgG1_PVA_/S267K Light Chain

SEQ ID NO: 20657 - protein, 107 aa, synthetic construct; identical to SEQ ID NO: 10923
  REGION 1..107: note = Description of Artificial Sequence: Synthetic polypeptide
  REGION 1..107: note = VL of XENP019017

SEQ ID NO: 20658 - protein, 11 aa, synthetic construct
  REGION 1..11: note = Description of Artificial Sequence: Synthetic peptide
  REGION 1..11: note = XENP019017 vlCDR1
RASQSVSNDVA

SEQ ID NO: 20659 - protein, 7 aa, synthetic construct
  REGION 1..7: note = Description of Artificial Sequence: Synthetic peptide
  REGION 1..7: note = XENP019017 vlCDR2
YASHRYT

SEQ ID NO: 20660 - protein, 9 aa, synthetic construct
  REGION 1..9: note = Description of Artificial Sequence: Synthetic peptide
  REGION 1..9: note = XENP019017 vlCDR3
QQDYSSPRT

SEQ ID NO: 20661 - protein, 451 aa, synthetic construct
  REGION 1..451: note = Description of Artificial Sequence: Synthetic polypeptide
  REGION 1..451: note = XENP019018 1G6_H1.273_L1_IgG1_PVA_/S267K Heavy Chain
EVQLVESGGGLVKPGGSLRLSCAASGFTFSNFWMNWVRQAPGKGLEWVGEIRWKSNNYATHYAEPVKGRFTISRDDSKSTLYLQMNSLKTEDTAVYYCTRYYGNYGGYFDVWGAGTLVTVSSASTKGPSVFPLAPSSKSTSGGTAALGCLVKDYFPEPVTVSWNSGALTSGVHTFPAVLQSSGLYSLSSVVTVPSSSLGTQTYICNVNHKPSNTKVDKKVEPKSCDKTHTCPPCPAPPVAGPSVFLFPPKPKDTLMISRTPEVTCVVVDVKHEDPEVKFNWYVDGVEVHNAKTKPREEQYNSTYRVVSVLTVLHQDWLNGKEYKCKVSNKALPAPIEKTISKAKGQPREPQVYTLPPSREEMTKNQVSLTCLVKGFYPSDIAVEWESNGQPENNYKTTPPVLDSDGSFFLYSKLTVDKSRWQQGNVFSCSVMHEALHNHYTQKSLSLSPGK

SEQ ID NO: 20662 - protein, 122 aa, synthetic construct; identical to SEQ ID NO: 14987
  REGION 1..122: note = Description of Artificial Sequence: Synthetic polypeptide
  REGION 1..122: note = VH of XENP019018

SEQ ID NO: 20663 - protein, 5 aa, synthetic construct
  REGION 1..5: note = Description of Artificial Sequence: Synthetic peptide
  REGION 1..5: note = XENP019018 vhCDR1
NFWMN

SEQ ID NO: 20664 - protein, 19 aa, synthetic construct
  REGION 1..19: note = Description of Artificial Sequence: Synthetic peptide
  REGION 1..19: note = XENP019018 vhCDR2
EIRWKSNNYATHYAEPVKG

SEQ ID NO: 20665 - protein, 11 aa, synthetic construct
  REGION 1..11: note = Description of Artificial Sequence: Synthetic peptide
  REGION 1..11: note = XENP019018 vhCDR3
YYGNYGGYFDV

SEQ ID NO: 20666 - protein, 214 aa, synthetic construct; identical to SEQ ID NO: 16226
  REGION 1..214: note = Description of Artificial Sequence: Synthetic polypeptide
  REGION 1..214: note = XENP019018 1G6_H1.273_L1_IgG1_PVA_/S267K Light Chain

SEQ ID NO: 20667 - protein, 107 aa, synthetic construct; identical to SEQ ID NO: 10923
  REGION 1..107: note = Description of Artificial Sequence: Synthetic polypeptide
  REGION 1..107: note = VL of XENP019018

SEQ ID NO: 20668 - protein, 11 aa, synthetic construct
  REGION 1..11: note = Description of Artificial Sequence: Synthetic peptide
  REGION 1..11: note = XENP019018 vlCDR1
RASQSVSNDVA

SEQ ID NO: 20669 - protein, 7 aa, synthetic construct
  REGION 1..7: note = Description of Artificial Sequence: Synthetic peptide
  REGION 1..7: note = XENP019018 vlCDR2
YASHRYT

SEQ ID NO: 20670 - protein, 9 aa, synthetic construct
  REGION 1..9: note = Description of Artificial Sequence: Synthetic peptide
  REGION 1..9: note = XENP019018 vlCDR3
QQDYSSPRT

SEQ ID NO: 20671 - protein, 451 aa, synthetic construct
  REGION 1..451: note = Description of Artificial Sequence: Synthetic polypeptide
  REGION 1..451: note = XENP019019 1G6_H1.274_L1_IgG1_PVA_/S267K Heavy Chain
EVQLVESGGGLVKPGGSLRLSCAASGFTFSNFWMNWVRQAPGKGLEWVGEIRLKKNNYATHYAEPVKGRFTISRDDSKSTLYLQMNSLKTEDTAVYYCTRYYGNYGGYFDVWGAGTLVTVSSASTKGPSVFPLAPSSKSTSGGTAALGCLVKDYFPEPVTVSWNSGALTSGVHTFPAVLQSSGLYSLSSVVTVPSSSLGTQTYICNVNHKPSNTKVDKKVEPKSCDKTHTCPPCPAPPVAGPSVFLFPPKPKDTLMISRTPEVTCVVVDVKHEDPEVKFNWYVDGVEVHNAKTKPREEQYNSTYRVVSVLTVLHQDWLNGKEYKCKVSNKALPAPIEKTISKAKGQPREPQVYTLPPSREEMTKNQVSLTCLVKGFYPSDIAVEWESNGQPENNYKTTPPVLDSDGSFFLYSKLTVDKSRWQQGNVFSCSVMHEALHNHYTQKSLSLSPGK

SEQ ID NO: 20672 - protein, 122 aa, synthetic construct; identical to SEQ ID NO: 14996
  REGION 1..122: note = Description of Artificial Sequence: Synthetic polypeptide
  REGION 1..122: note = VH of XENP019019

SEQ ID NO: 20673 - protein, 5 aa, synthetic construct
  REGION 1..5: note = Description of Artificial Sequence: Synthetic peptide
  REGION 1..5: note = XENP019019 vhCDR1
NFWMN

SEQ ID NO: 20674 - protein, 19 aa, synthetic construct
  REGION 1..19: note = Description of Artificial Sequence: Synthetic peptide
  REGION 1..19: note = XENP019019 vhCDR2
EIRLKKNNYATHYAEPVKG

SEQ ID NO: 20675 - protein, 11 aa, synthetic construct
  REGION 1..11: note = Description of Artificial Sequence: Synthetic peptide
  REGION 1..11: note = XENP019019 vhCDR3
YYGNYGGYFDV

SEQ ID NO: 20676 - protein, 214 aa, synthetic construct; identical to SEQ ID NO: 16226
  REGION 1..214: note = Description of Artificial Sequence: Synthetic polypeptide
  REGION 1..214: note = XENP019019 1G6_H1.274_L1_IgG1_PVA_/S267K Light Chain

SEQ ID NO: 20677 - protein, 107 aa, synthetic construct; identical to SEQ ID NO: 10923
  REGION 1..107: note = Description of Artificial Sequence: Synthetic polypeptide
  REGION 1..107: note = VL of XENP019019

SEQ ID NO: 20678 - protein, 11 aa, synthetic construct
  REGION 1..11: note = Description of Artificial Sequence: Synthetic peptide
  REGION 1..11: note = XENP019019 vlCDR1
RASQSVSNDVA

SEQ ID NO: 20679 - protein, 7 aa, synthetic construct
  REGION 1..7: note = Description of Artificial Sequence: Synthetic peptide
  REGION 1..7: note = XENP019019 vlCDR2
YASHRYT

SEQ ID NO: 20680 - protein, 9 aa, synthetic construct
  REGION 1..9: note = Description of Artificial Sequence: Synthetic peptide
  REGION 1..9: note = XENP019019 vlCDR3
QQDYSSPRT

SEQ ID NO: 20681 - protein, 451 aa, synthetic construct
  REGION 1..451: note = Description of Artificial Sequence: Synthetic polypeptide
  REGION 1..451: note = XENP019020 1G6_H1.275_L1_IgG1_PVA_/S267K Heavy Chain
EVQLVESGGGLVKPGGSLRLSCAASGFTFSNFWMNWVRQAPGKGLEWVGEIRWYSNNYATHYAEPVKGRFTISRDDSKSTLYLQMNSLKTEDTAVYYCTRYYGNYGGYFDVWGAGTLVTVSSASTKGPSVFPLAPSSKSTSGGTAALGCLVKDYFPEPVTVSWNSGALTSGVHTFPAVLQSSGLYSLSSVVTVPSSSLGTQTYICNVNHKPSNTKVDKKVEPKSCDKTHTCPPCPAPPVAGPSVFLFPPKPKDTLMISRTPEVTCVVVDVKHEDPEVKFNWYVDGVEVHNAKTKPREEQYNSTYRVVSVLTVLHQDWLNGKEYKCKVSNKALPAPIEKTISKAKGQPREPQVYTLPPSREEMTKNQVSLTCLVKGFYPSDIAVEWESNGQPENNYKTTPPVLDSDGSFFLYSKLTVDKSRWQQGNVFSCSVMHEALHNHYTQKSLSLSPGK

SEQ ID NO: 20682 - protein, 122 aa, synthetic construct; identical to SEQ ID NO: 15005
  REGION 1..122: note = Description of Artificial Sequence: Synthetic polypeptide
  REGION 1..122: note = VH of XENP019020

SEQ ID NO: 20683 - protein, 5 aa, synthetic construct
  REGION 1..5: note = Description of Artificial Sequence: Synthetic peptide
  REGION 1..5: note = XENP019020 vhCDR1
NFWMN

SEQ ID NO: 20684 - protein, 19 aa, synthetic construct
  REGION 1..19: note = Description of Artificial Sequence: Synthetic peptide
  REGION 1..19: note = XENP019020 vhCDR2
EIRWYSNNYATHYAEPVKG

SEQ ID NO: 20685 - protein, 11 aa, synthetic construct
  REGION 1..11: note = Description of Artificial Sequence: Synthetic peptide
  REGION 1..11: note = XENP019020 vhCDR3
YYGNYGGYFDV

SEQ ID NO: 20686 - protein, 214 aa, synthetic construct; identical to SEQ ID NO: 16226
  REGION 1..214: note = Description of Artificial Sequence: Synthetic polypeptide
  REGION 1..214: note = XENP019020 1G6_H1.275_L1_IgG1_PVA_/S267K Light Chain

SEQ ID NO: 20687 - protein, 107 aa, synthetic construct; identical to SEQ ID NO: 10923
  REGION 1..107: note = Description of Artificial Sequence: Synthetic polypeptide
  REGION 1..107: note = VL of XENP019020

SEQ ID NO: 20688 - protein, 11 aa, synthetic construct
  REGION 1..11: note = Description of Artificial Sequence: Synthetic peptide
  REGION 1..11: note = XENP019020 vlCDR1
RASQSVSNDVA

SEQ ID NO: 20689 - protein, 7 aa, synthetic construct
  REGION 1..7: note = Description of Artificial Sequence: Synthetic peptide
  REGION 1..7: note = XENP019020 vlCDR2
YASHRYT

SEQ ID NO: 20690 - protein, 9 aa, synthetic construct
  REGION 1..9: note = Description of Artificial Sequence: Synthetic peptide
  REGION 1..9: note = XENP019020 vlCDR3
QQDYSSPRT

SEQ ID NO: 20691 - protein, 451 aa, synthetic construct
  REGION 1..451: note = Description of Artificial Sequence: Synthetic polypeptide
  REGION 1..451: note = XENP019021 1G6_H1.276_L1_IgG1_PVA_/S267K Heavy Chain
EVQLVESGGGLVQPGGSLKLSCAASGFTFSNYWMNWVRQAPGKGLEWVGEIRLKSNNYATHYAASVKGRFTISRDDSKSTLYLQMNSLKTEDTAVYYCTRYYGNYGGYFDVWGQGTLVTVSSASTKGPSVFPLAPSSKSTSGGTAALGCLVKDYFPEPVTVSWNSGALTSGVHTFPAVLQSSGLYSLSSVVTVPSSSLGTQTYICNVNHKPSNTKVDKKVEPKSCDKTHTCPPCPAPPVAGPSVFLFPPKPKDTLMISRTPEVTCVVVDVKHEDPEVKFNWYVDGVEVHNAKTKPREEQYNSTYRVVSVLTVLHQDWLNGKEYKCKVSNKALPAPIEKTISKAKGQPREPQVYTLPPSREEMTKNQVSLTCLVKGFYPSDIAVEWESNGQPENNYKTTPPVLDSDGSFFLYSKLTVDKSRWQQGNVFSCSVMHEALHNHYTQKSLSLSPGK

SEQ ID NO: 20692 - protein, 122 aa, synthetic construct; identical to SEQ ID NO: 15014
  REGION 1..122: note = Description of Artificial Sequence: Synthetic polypeptide
  REGION 1..122: note = VH of XENP019021

SEQ ID NO: 20693 - protein, 5 aa, synthetic construct
  REGION 1..5: note = Description of Artificial Sequence: Synthetic peptide
  REGION 1..5: note = XENP019021 vhCDR1
NYWMN

SEQ ID NO: 20694 - protein, 19 aa, synthetic construct
  REGION 1..19: note = Description of Artificial Sequence: Synthetic peptide
  REGION 1..19: note = XENP019021 vhCDR2
EIRLKSNNYATHYAASVKG

SEQ ID NO: 20695 - protein, 11 aa, synthetic construct
  REGION 1..11: note = Description of Artificial Sequence: Synthetic peptide
  REGION 1..11: note = XENP019021 vhCDR3
YYGNYGGYFDV

SEQ ID NO: 20696 - protein, 214 aa, synthetic construct; identical to SEQ ID NO: 16226
  REGION 1..214: note = Description of Artificial Sequence: Synthetic polypeptide
  REGION 1..214: note = XENP019021 1G6_H1.276_L1_IgG1_PVA_/S267K Light Chain

SEQ ID NO: 20697 - protein, 107 aa, synthetic construct; identical to SEQ ID NO: 10923
  REGION 1..107: note = Description of Artificial Sequence: Synthetic polypeptide
  REGION 1..107: note = VL of XENP019021

SEQ ID NO: 20698 - protein, 11 aa, synthetic construct
  REGION 1..11: note = Description of Artificial Sequence: Synthetic peptide
  REGION 1..11: note = XENP019021 vlCDR1
RASQSVSNDVA

SEQ ID NO: 20699 - protein, 7 aa, synthetic construct
  REGION 1..7: note = Description of Artificial Sequence: Synthetic peptide
  REGION 1..7: note = XENP019021 vlCDR2
YASHRYT

SEQ ID NO: 20700 - protein, 9 aa, synthetic construct
  REGION 1..9: note = Description of Artificial Sequence: Synthetic peptide
  REGION 1..9: note = XENP019021 vlCDR3
QQDYSSPRT

SEQ ID NO: 20701 - protein, 451 aa, synthetic construct
  REGION 1..451: note = Description of Artificial Sequence: Synthetic polypeptide
  REGION 1..451: note = XENP019022 1G6_H1.277_L1_IgG1_PVA_/S267K Heavy Chain
EVQLVESGGGLVKPGGSLKLSCAASGFTFSNYWMNWVRQAPGKGLEWVGEIRLKSNNYATHYADSVKGRFTISRDDSKSTLYLQMNSLKTEDTAVYYCTRYYGNYGGYFDVWGQGTLVTVSSASTKGPSVFPLAPSSKSTSGGTAALGCLVKDYFPEPVTVSWNSGALTSGVHTFPAVLQSSGLYSLSSVVTVPSSSLGTQTYICNVNHKPSNTKVDKKVEPKSCDKTHTCPPCPAPPVAGPSVFLFPPKPKDTLMISRTPEVTCVVVDVKHEDPEVKFNWYVDGVEVHNAKTKPREEQYNSTYRVVSVLTVLHQDWLNGKEYKCKVSNKALPAPIEKTISKAKGQPREPQVYTLPPSREEMTKNQVSLTCLVKGFYPSDIAVEWESNGQPENNYKTTPPVLDSDGSFFLYSKLTVDKSRWQQGNVFSCSVMHEALHNHYTQKSLSLSPGK

SEQ ID NO: 20702 - protein, 122 aa, synthetic construct; identical to SEQ ID NO: 15023
  REGION 1..122: note = Description of Artificial Sequence: Synthetic polypeptide
  REGION 1..122: note = VH of XENP019022

SEQ ID NO: 20703 - protein, 5 aa, synthetic construct
  REGION 1..5: note = Description of Artificial Sequence: Synthetic peptide
  REGION 1..5: note = XENP019022 vhCDR1
NYWMN

SEQ ID NO: 20704 - protein, 19 aa, synthetic construct
  REGION 1..19: note = Description of Artificial Sequence: Synthetic peptide
  REGION 1..19: note = XENP019022 vhCDR2
EIRLKSNNYATHYADSVKG

SEQ ID NO: 20705 - protein, 11 aa, synthetic construct
  REGION 1..11: note = Description of Artificial Sequence: Synthetic peptide
  REGION 1..11: note = XENP019022 vhCDR3
YYGNYGGYFDV

SEQ ID NO: 20706 - protein, 214 aa, synthetic construct; identical to SEQ ID NO: 16226
  REGION 1..214: note = Description of Artificial Sequence: Synthetic polypeptide
  REGION 1..214: note = XENP019022 1G6_H1.277_L1_IgG1_PVA_/S267K Light Chain

SEQ ID NO: 20707 - protein, 107 aa, synthetic construct; identical to SEQ ID NO: 10923
  REGION 1..107: note = Description of Artificial Sequence: Synthetic polypeptide
  REGION 1..107: note = VL of XENP019022

SEQ ID NO: 20708 - protein, 11 aa, synthetic construct
  REGION 1..11: note = Description of Artificial Sequence: Synthetic peptide
  REGION 1..11: note = XENP019022 vlCDR1
RASQSVSNDVA

SEQ ID NO: 20709 - protein, 7 aa, synthetic construct
  REGION 1..7: note = Description of Artificial Sequence: Synthetic peptide
  REGION 1..7: note = XENP019022 vlCDR2
YASHRYT

SEQ ID NO: 20710 - protein, 9 aa, synthetic construct
  REGION 1..9: note = Description of Artificial Sequence: Synthetic peptide
  REGION 1..9: note = XENP019022 vlCDR3
QQDYSSPRT

SEQ ID NO: 20711 - protein, 451 aa, synthetic construct; identical to SEQ ID NO: 16221
  REGION 1..451: note = Description of Artificial Sequence: Synthetic polypeptide
  REGION 1..451: note = XENP019023 1G6_H1_L1.146_IgG1_PVA_/S267K Heavy Chain

SEQ ID NO: 20712 - protein, 122 aa, synthetic construct; identical to SEQ ID NO: 10922
  REGION 1..122: note = Description of Artificial Sequence: Synthetic polypeptide
  REGION 1..122: note = VH of XENP019023

SEQ ID NO: 20713 - protein, 5 aa, synthetic construct
  REGION 1..5: note = Description of Artificial Sequence: Synthetic peptide
  REGION 1..5: note = XENP019023 vhCDR1
NYWMN

SEQ ID NO: 20714 - protein, 19 aa, synthetic construct
  REGION 1..19: note = Description of Artificial Sequence: Synthetic peptide
  REGION 1..19: note = XENP019023 vhCDR2
EIRLKSNNYATHYAEPVKG

SEQ ID NO: 20715 - protein, 11 aa, synthetic construct
  REGION 1..11: note = Description of Artificial Sequence: Synthetic peptide
  REGION 1..11: note = XENP019023 vhCDR3
YYGNYGGYFDV

SEQ ID NO: 20716 - protein, 214 aa, synthetic construct
  REGION 1..214: note = Description of Artificial Sequence: Synthetic polypeptide
  REGION 1..214: note = XENP019023 1G6_H1_L1.146_IgG1_PVA_/S267K Light Chain
SIVMTQSPATLAVSPGERATLSCRASQSVSNDVAWYQQKPGQSPRLLINYASHRYTGVPDRFTGSGYGTEFTLTISSLQSEDFAVYFCQQDYSSPRTFGGGTKVEIKRTVAAPSVFIFPPSDEQLKSGTASVVCLLNNFYPREAKVQWKVDNALQSGNSQESVTEQDSKDSTYSLSSTLTLSKADYEKHKVYACEVTHQGLSSPVTKSFNRGEC

SEQ ID NO: 20717 - protein, 107 aa, synthetic construct; identical to SEQ ID NO: 15033
  REGION 1..107: note = Description of Artificial Sequence: Synthetic polypeptide
  REGION 1..107: note = VL of XENP019023

SEQ ID NO: 20718 - protein, 11 aa, synthetic construct
  REGION 1..11: note = Description of Artificial Sequence: Synthetic peptide
  REGION 1..11: note = XENP019023 vlCDR1
RASQSVSNDVA

SEQ ID NO: 20719 - protein, 7 aa, synthetic construct
  REGION 1..7: note = Description of Artificial Sequence: Synthetic peptide
  REGION 1..7: note = XENP019023 vlCDR2
YASHRYT

SEQ ID NO: 20720 - protein, 9 aa, synthetic construct
  REGION 1..9: note = Description of Artificial Sequence: Synthetic peptide
  REGION 1..9: note = XENP019023 vlCDR3
QQDYSSPRT

SEQ ID NO: 20721 - protein, 451 aa, synthetic construct; identical to SEQ ID NO: 16221
  REGION 1..451: note = Description of Artificial Sequence: Synthetic polypeptide
  REGION 1..451: note = XENP019024 1G6_H1_L1.147_IgG1_PVA_/S267K Heavy Chain

SEQ ID NO: 20722 - protein, 122 aa, synthetic construct; identical to SEQ ID NO: 10922
  REGION 1..122: note = Description of Artificial Sequence: Synthetic polypeptide
  REGION 1..122: note = VH of XENP019024

SEQ ID NO: 20723 - protein, 5 aa, synthetic construct
  REGION 1..5: note = Description of Artificial Sequence: Synthetic peptide
  REGION 1..5: note = XENP019024 vhCDR1
NYWMN

SEQ ID NO: 20724 - protein, 19 aa, synthetic construct
  REGION 1..19: note = Description of Artificial Sequence: Synthetic peptide
  REGION 1..19: note = XENP019024 vhCDR2
EIRLKSNNYATHYAEPVKG

SEQ ID NO: 20725 - protein, 11 aa, synthetic construct
  REGION 1..11: note = Description of Artificial Sequence: Synthetic peptide
  REGION 1..11: note = XENP019024 vhCDR3
YYGNYGGYFDV

SEQ ID NO: 20726 - protein, 214 aa, synthetic construct
  REGION 1..214: note = Description of Artificial Sequence: Synthetic polypeptide
  REGION 1..214: note = XENP019024 1G6_H1_L1.147_IgG1_PVA_/S267K Light Chain
SIVMTQSPATLPVSPGERATLSCRASQSVSNDVAWYQQKPGQSPRLLINYASHRYTGVPDRFTGSGYGTEFTLTISSLQSEDFAVYFCQQDYSSPRTFGGGTKVEIKRTVAAPSVFIFPPSDEQLKSGTASVVCLLNNFYPREAKVQWKVDNALQSGNSQESVTEQDSKDSTYSLSSTLTLSKADYEKHKVYACEVTHQGLSSPVTKSFNRGEC

SEQ ID NO: 20727 - protein, 107 aa, synthetic construct; identical to SEQ ID NO: 15042
  REGION 1..107: note = Description of Artificial Sequence: Synthetic polypeptide
  REGION 1..107: note = VL of XENP019024

SEQ ID NO: 20728 - protein, 11 aa, synthetic construct
  REGION 1..11: note = Description of Artificial Sequence: Synthetic peptide
  REGION 1..11: note = XENP019024 vlCDR1
RASQSVSNDVA

SEQ ID NO: 20729 - protein, 7 aa, synthetic construct
  REGION 1..7: note = Description of Artificial Sequence: Synthetic peptide
  REGION 1..7: note = XENP019024 vlCDR2
YASHRYT

SEQ ID NO: 20730 - protein, 9 aa, synthetic construct
  REGION 1..9: note = Description of Artificial Sequence: Synthetic peptide
  REGION 1..9: note = XENP019024 vlCDR3
QQDYSSPRT

SEQ ID NO: 20731 - protein, 451 aa, synthetic construct; identical to SEQ ID NO: 16221
  REGION 1..451: note = Description of Artificial Sequence: Synthetic polypeptide
  REGION 1..451: note = XENP019025 1G6_H1_L1.148_IgG1_PVA_/S267K Heavy Chain

SEQ ID NO: 20732 - protein, 122 aa, synthetic construct; identical to SEQ ID NO: 10922
  REGION 1..122: note = Description of Artificial Sequence: Synthetic polypeptide
  REGION 1..122: note = VH of XENP019025

SEQ ID NO: 20733 - protein, 5 aa, synthetic construct
  REGION 1..5: note = Description of Artificial Sequence: Synthetic peptide
  REGION 1..5: note = XENP019025 vhCDR1
NYWMN

SEQ ID NO: 20734 - protein, 19 aa, synthetic construct
  REGION 1..19: note = Description of Artificial Sequence: Synthetic peptide
  REGION 1..19: note = XENP019025 vhCDR2
EIRLKSNNYATHYAEPVKG

SEQ ID NO: 20735 - protein, 11 aa, synthetic construct
  REGION 1..11: note = Description of Artificial Sequence: Synthetic peptide
  REGION 1..11: note = XENP019025 vhCDR3
YYGNYGGYFDV

SEQ ID NO: 20736 - protein, 214 aa, synthetic construct
  REGION 1..214: note = Description of Artificial Sequence: Synthetic polypeptide
  REGION 1..214: note = XENP019025 1G6_H1_L1.148_IgG1_PVA_/S267K Light Chain
SIVMTQSPATLSASPGERATLSCRASQSVSNDVAWYQQKPGQSPRLLINYASHRYTGVPDRFTGSGYGTEFTLTISSLQSEDFAVYFCQQDYSSPRTFGGGTKVEIKRTVAAPSVFIFPPSDEQLKSGTASVVCLLNNFYPREAKVQWKVDNALQSGNSQESVTEQDSKDSTYSLSSTLTLSKADYEKHKVYACEVTHQGLSSPVTKSFNRGEC

SEQ ID NO: 20737 - protein, 107 aa, synthetic construct; identical to SEQ ID NO: 15051
  REGION 1..107: note = Description of Artificial Sequence: Synthetic polypeptide
  REGION 1..107: note = VL of XENP019025

SEQ ID NO: 20738 - protein, 11 aa, synthetic construct
  REGION 1..11: note = Description of Artificial Sequence: Synthetic peptide
  REGION 1..11: note = XENP019025 vlCDR1
RASQSVSNDVA

SEQ ID NO: 20739 - protein, 7 aa, synthetic construct
  REGION 1..7: note = Description of Artificial Sequence: Synthetic peptide
  REGION 1..7: note = XENP019025 vlCDR2
YASHRYT

SEQ ID NO: 20740 - protein, 9 aa, synthetic construct
  REGION 1..9: note = Description of Artificial Sequence: Synthetic peptide
  REGION 1..9: note = XENP019025 vlCDR3
QQDYSSPRT

SEQ ID NO: 20741 - protein, 451 aa, synthetic construct; identical to SEQ ID NO: 16221
  REGION 1..451: note = Description of Artificial Sequence: Synthetic polypeptide
  REGION 1..451: note = XENP019026 1G6_H1_L1.149_IgG1_PVA_/S267K Heavy Chain

SEQ ID NO: 20742 - protein, 122 aa, synthetic construct; identical to SEQ ID NO: 10922
  REGION 1..122: note = Description of Artificial Sequence: Synthetic polypeptide
  REGION 1..122: note = VH of XENP019026

SEQ ID NO: 20743 - protein, 5 aa, synthetic construct
  REGION 1..5: note = Description of Artificial Sequence: Synthetic peptide
  REGION 1..5: note = XENP019026 vhCDR1
NYWMN

SEQ ID NO: 20744 - protein, 19 aa, synthetic construct
  REGION 1..19: note = Description of Artificial Sequence: Synthetic peptide
  REGION 1..19: note = XENP019026 vhCDR2
EIRLKSNNYATHYAEPVKG

SEQ ID NO: 20745 - protein, 11 aa, synthetic construct
  REGION 1..11: note = Description of Artificial Sequence: Synthetic peptide
  REGION 1..11: note = XENP019026 vhCDR3
YYGNYGGYFDV

SEQ ID NO: 20746 - protein, 214 aa, synthetic construct
  REGION 1..214: note = Description of Artificial Sequence: Synthetic polypeptide
  REGION 1..214: note = XENP019026 1G6_H1_L1.149_IgG1_PVA_/S267K Light Chain
SIVMTQSPATLSVSPGERASLSCRASQSVSNDVAWYQQKPGQSPRLLINYASHRYTGVPDRFTGSGYGTEFTLTISSLQSEDFAVYFCQQDYSSPRTFGGGTKVEIKRTVAAPSVFIFPPSDEQLKSGTASVVCLLNNFYPREAKVQWKVDNALQSGNSQESVTEQDSKDSTYSLSSTLTLSKADYEKHKVYACEVTHQGLSSPVTKSFNRGEC

SEQ ID NO: 20747 - protein, 107 aa, synthetic construct; identical to SEQ ID NO: 15060
  REGION 1..107: note = Description of Artificial Sequence: Synthetic polypeptide
  REGION 1..107: note = VL of XENP019026

SEQ ID NO: 20748 - protein, 11 aa, synthetic construct
  REGION 1..11: note = Description of Artificial Sequence: Synthetic peptide
  REGION 1..11: note = XENP019026 vlCDR1
RASQSVSNDVA

SEQ ID NO: 20749 - protein, 7 aa, synthetic construct
  REGION 1..7: note = Description of Artificial Sequence: Synthetic peptide
  REGION 1..7: note = XENP019026 vlCDR2
YASHRYT

SEQ ID NO: 20750 - protein, 9 aa, synthetic construct
  REGION 1..9: note = Description of Artificial Sequence: Synthetic peptide
  REGION 1..9: note = XENP019026 vlCDR3
QQDYSSPRT

SEQ ID NO: 20751 - protein, 451 aa, synthetic construct; identical to SEQ ID NO: 16221
  REGION 1..451: note = Description of Artificial Sequence: Synthetic polypeptide
  REGION 1..451: note = XENP019027 1G6_H1_L1.150_IgG1_PVA_/S267K Heavy Chain

SEQ ID NO: 20752 - protein, 122 aa, synthetic construct; identical to SEQ ID NO: 10922
  REGION 1..122: note = Description of Artificial Sequence: Synthetic polypeptide
  REGION 1..122: note = VH of XENP019027

SEQ ID NO: 20753 - protein, 5 aa, synthetic construct
  REGION 1..5: note = Description of Artificial Sequence: Synthetic peptide
  REGION 1..5: note = XENP019027 vhCDR1
NYWMN

SEQ ID NO: 20754 - protein, 19 aa, synthetic construct
  REGION 1..19: note = Description of Artificial Sequence: Synthetic peptide
  REGION 1..19: note = XENP019027 vhCDR2
EIRLKSNNYATHYAEPVKG

SEQ ID NO: 20755 - protein, 11 aa, synthetic construct
  REGION 1..11: note = Description of Artificial Sequence: Synthetic peptide
  REGION 1..11: note = XENP019027 vhCDR3
YYGNYGGYFDV

SEQ ID NO: 20756 - protein, 214 aa, synthetic construct
  REGION 1..214: note = Description of Artificial Sequence: Synthetic polypeptide
  REGION 1..214: note = XENP019027 1G6_H1_L1.150_IgG1_PVA_/S267K Light Chain
SIVMTQSPATLSVSPGERATLKCRASQSVSNDVAWYQQKPGQSPRLLINYASHRYTGVPDRFTGSGYGTEFTLTISSLQSEDFAVYFCQQDYSSPRTFGGGTKVEIKRTVAAPSVFIFPPSDEQLKSGTASVVCLLNNFYPREAKVQWKVDNALQSGNSQESVTEQDSKDSTYSLSSTLTLSKADYEKHKVYACEVTHQGLSSPVTKSFNRGEC

SEQ ID NO: 20757 - protein, 107 aa, synthetic construct; identical to SEQ ID NO: 15069
  REGION 1..107: note = Description of Artificial Sequence: Synthetic polypeptide
  REGION 1..107: note = VL of XENP019027

SEQ ID NO: 20758 - protein, 11 aa, synthetic construct
  REGION 1..11: note = Description of Artificial Sequence: Synthetic peptide
  REGION 1..11: note = XENP019027 vlCDR1
RASQSVSNDVA

SEQ ID NO: 20759 - protein, 7 aa, synthetic construct
  REGION 1..7: note = Description of Artificial Sequence: Synthetic peptide
  REGION 1..7: note = XENP019027 vlCDR2
YASHRYT

SEQ ID NO: 20760 - protein, 9 aa, synthetic construct
  REGION 1..9: note = Description of Artificial Sequence: Synthetic peptide
  REGION 1..9: note = XENP019027 vlCDR3
QQDYSSPRT

SEQ ID NO: 20761 - protein, 451 aa, synthetic construct; identical to SEQ ID NO: 16221
  REGION 1..451: note = Description of Artificial Sequence: Synthetic polypeptide
  REGION 1..451: note = XENP019028 1G6_H1_L1.151_IgG1_PVA_/S267K Heavy Chain

SEQ ID NO: 20762 - protein, 122 aa, synthetic construct; identical to SEQ ID NO: 10922
  REGION 1..122: note = Description of Artificial Sequence: Synthetic polypeptide
  REGION 1..122: note = VH of XENP019028

SEQ ID NO: 20763 - protein, 5 aa, synthetic construct
  REGION 1..5: note = Description of Artificial Sequence: Synthetic peptide
  REGION 1..5: note = XENP019028 vhCDR1
NYWMN

SEQ ID NO: 20764 - protein, 19 aa, synthetic construct
  REGION 1..19: note = Description of Artificial Sequence: Synthetic peptide
  REGION 1..19: note = XENP019028 vhCDR2
EIRLKSNNYATHYAEPVKG

SEQ ID NO: 20765 - protein, 11 aa, synthetic construct
  REGION 1..11: note = Description of Artificial Sequence: Synthetic peptide
  REGION 1..11: note = XENP019028 vhCDR3
YYGNYGGYFDV

SEQ ID NO: 20766 - protein, 214 aa, synthetic construct
  REGION 1..214: note = Description of Artificial Sequence: Synthetic polypeptide
  REGION 1..214: note = XENP019028 1G6_H1_L1.151_IgG1_PVA_/S267K Light Chain
SIVMTQSPATLSVSPGERATLSCRASQSVSNDVAWYQQKPEQSPRLLINYASHRYTGVPDRFTGSGYGTEFTLTISSLQSEDFAVYFCQQDYSSPRTFGGGTKVEIKRTVAAPSVFIFPPSDEQLKSGTASVVCLLNNFYPREAKVQWKVDNALQSGNSQESVTEQDSKDSTYSLSSTLTLSKADYEKHKVYACEVTHQGLSSPVTKSFNRGEC

SEQ ID NO: 20767 - protein, 107 aa, synthetic construct; identical to SEQ ID NO: 15078
  REGION 1..107: note = Description of Artificial Sequence: Synthetic polypeptide
  REGION 1..107: note = VL of XENP019028

SEQ ID NO: 20768 - protein, 11 aa, synthetic construct
  REGION 1..11: note = Description of Artificial Sequence: Synthetic peptide
  REGION 1..11: note = XENP019028 vlCDR1
RASQSVSNDVA

SEQ ID NO: 20769 - protein, 7 aa, synthetic construct
  REGION 1..7: note = Description of Artificial Sequence: Synthetic peptide
  REGION 1..7: note = XENP019028 vlCDR2
YASHRYT

SEQ ID NO: 20770 - protein, 9 aa, synthetic construct
  REGION 1..9: note = Description of Artificial Sequence: Synthetic peptide
  REGION 1..9: note = XENP019028 vlCDR3
QQDYSSPRT

SEQ ID NO: 20771 - protein, 451 aa, synthetic construct; identical to SEQ ID NO: 16221
  REGION 1..451: note = Description of Artificial Sequence: Synthetic polypeptide
  REGION 1..451: note = XENP019029 1G6_H1_L1.152_IgG1_PVA_/S267K Heavy Chain

SEQ ID NO: 20772 - protein, 122 aa, synthetic construct; identical to SEQ ID NO: 10922
  REGION 1..122: note = Description of Artificial Sequence: Synthetic polypeptide
  REGION 1..122: note = VH of XENP019029

SEQ ID NO: 20773 - protein, 5 aa, synthetic construct
  REGION 1..5: note = Description of Artificial Sequence: Synthetic peptide
  REGION 1..5: note = XENP019029 vhCDR1
NYWMN

SEQ ID NO: 20774 - protein, 19 aa, synthetic construct
  REGION 1..19: note = Description of Artificial Sequence: Synthetic peptide
  REGION 1..19: note = XENP019029 vhCDR2
EIRLKSNNYATHYAEPVKG

SEQ ID NO: 20775 - protein, 11 aa, synthetic construct
  REGION 1..11: note = Description of Artificial Sequence: Synthetic peptide
  REGION 1..11: note = XENP019029 vhCDR3
YYGNYGGYFDV

SEQ ID NO: 20776 - protein, 214 aa, synthetic construct
  REGION 1..214: note = Description of Artificial Sequence: Synthetic polypeptide
  REGION 1..214: note = XENP019029 1G6_H1_L1.152_IgG1_PVA_/S267K Light Chain
SIVMTQSPATLSVSPGERATLSCRASQSVSNDVAWYQQKPGESPRLLINYASHRYTGVPDRFTGSGYGTEFTLTISSLQSEDFAVYFCQQDYSSPRTFGGGTKVEIKRTVAAPSVFIFPPSDEQLKSGTASVVCLLNNFYPREAKVQWKVDNALQSGNSQESVTEQDSKDSTYSLSSTLTLSKADYEKHKVYACEVTHQGLSSPVTKSFNRGEC

SEQ ID NO: 20777 - protein, 107 aa, synthetic construct; identical to SEQ ID NO: 15087
  REGION 1..107: note = Description of Artificial Sequence: Synthetic polypeptide
  REGION 1..107: note = VL of XENP019029

SEQ ID NO: 20778 - protein, 11 aa, synthetic construct
  REGION 1..11: note = Description of Artificial Sequence: Synthetic peptide
  REGION 1..11: note = XENP019029 vlCDR1
RASQSVSNDVA

SEQ ID NO: 20779 - protein, 7 aa, synthetic construct
  REGION 1..7: note = Description of Artificial Sequence: Synthetic peptide
  REGION 1..7: note = XENP019029 vlCDR2
YASHRYT

SEQ ID NO: 20780 - protein, 9 aa, synthetic construct
  REGION 1..9: note = Description of Artificial Sequence: Synthetic peptide
  REGION 1..9: note = XENP019029 vlCDR3
QQDYSSPRT

SEQ ID NO: 20781 - protein, 451 aa, synthetic construct; identical to SEQ ID NO: 16221
  REGION 1..451: note = Description of Artificial Sequence: Synthetic polypeptide
  REGION 1..451: note = XENP019030 1G6_H1_L1.153_IgG1_PVA_/S267K Heavy Chain

SEQ ID NO: 20782 - protein, 122 aa, synthetic construct; identical to SEQ ID NO: 10922
  REGION 1..122: note = Description of Artificial Sequence: Synthetic polypeptide
  REGION 1..122: note = VH of XENP019030

SEQ ID NO: 20783 - protein, 5 aa, synthetic construct
  REGION 1..5: note = Description of Artificial Sequence: Synthetic peptide
  REGION 1..5: note = XENP019030 vhCDR1
NYWMN

SEQ ID NO: 20784 - protein, 19 aa, synthetic construct
  REGION 1..19: note = Description of Artificial Sequence: Synthetic peptide
  REGION 1..19: note = XENP019030 vhCDR2
EIRLKSNNYATHYAEPVKG

SEQ ID NO: 20785 - protein, 11 aa, synthetic construct
  REGION 1..11: note = Description of Artificial Sequence: Synthetic peptide
  REGION 1..11: note = XENP019030 vhCDR3
YYGNYGGYFDV

SEQ ID NO: 20786 - protein, 214 aa, synthetic construct
  REGION 1..214: note = Description of Artificial Sequence: Synthetic polypeptide
  REGION 1..214: note = XENP019030 1G6_H1_L1.153_IgG1_PVA_/S267K Light Chain
SIVMTQSPATLSVSPGERATLSCRASQSVSNDVAWYQQKPGQSPRVLINYASHRYTGVPDRFTGSGYGTEFTLTISSLQSEDFAVYFCQQDYSSPRTFGGGTKVEIKRTVAAPSVFIFPPSDEQLKSGTASVVCLLNNFYPREAKVQWKVDNALQSGNSQESVTEQDSKDSTYSLSSTLTLSKADYEKHKVYACEVTHQGLSSPVTKSFNRGEC

SEQ ID NO: 20787 - protein, 107 aa, synthetic construct; identical to SEQ ID NO: 15096
  REGION 1..107: note = Description of Artificial Sequence: Synthetic polypeptide
  REGION 1..107: note = VL of XENP019030

SEQ ID NO: 20788 - protein, 11 aa, synthetic construct
  REGION 1..11: note = Description of Artificial Sequence: Synthetic peptide
  REGION 1..11: note = XENP019030 vlCDR1
RASQSVSNDVA

SEQ ID NO: 20789 - protein, 7 aa, synthetic construct
  REGION 1..7: note = Description of Artificial Sequence: Synthetic peptide
  REGION 1..7: note = XENP019030 vlCDR2
YASHRYT

SEQ ID NO: 20790 - protein, 9 aa, synthetic construct
  REGION 1..9: note = Description of Artificial Sequence: Synthetic peptide
  REGION 1..9: note = XENP019030 vlCDR3
QQDYSSPRT

SEQ ID NO: 20791 - protein, 451 aa, synthetic construct; identical to SEQ ID NO: 16221
  REGION 1..451: note = Description of Artificial Sequence: Synthetic polypeptide
  REGION 1..451: note = XENP019031 1G6_H1_L1.154_IgG1_PVA_/S267K Heavy Chain

SEQ ID NO: 20792 - protein, 122 aa, synthetic construct; identical to SEQ ID NO: 10922
  REGION 1..122: note = Description of Artificial Sequence: Synthetic polypeptide
  REGION 1..122: note = VH of XENP019031

SEQ ID NO: 20793 - protein, 5 aa, synthetic construct
  REGION 1..5: note = Description of Artificial Sequence: Synthetic peptide
  REGION 1..5: note = XENP019031 vhCDR1
NYWMN

SEQ ID NO: 20794 - protein, 19 aa, synthetic construct
  REGION 1..19: note = Description of Artificial Sequence: Synthetic peptide
  REGION 1..19: note = XENP019031 vhCDR2
EIRLKSNNYATHYAEPVKG

SEQ ID NO: 20795 - protein, 11 aa, synthetic construct
  REGION 1..11: note = Description of Artificial Sequence: Synthetic peptide
  REGION 1..11: note = XENP019031 vhCDR3
YYGNYGGYFDV

SEQ ID NO: 20796 - protein, 214 aa, synthetic construct
  REGION 1..214: note = Description of Artificial Sequence: Synthetic polypeptide
  REGION 1..214: note = XENP019031 1G6_H1_L1.154_IgG1_PVA_/S267K Light Chain
SIVMTQSPATLSVSPGERATLSCRASQSVSNDVAWYQQKPGQSPRLLVNYASHRYTGVPDRFTGSGYGTEFTLTISSLQSEDFAVYFCQQDYSSPRTFGGGTKVEIKRTVAAPSVFIFPPSDEQLKSGTASVVCLLNNFYPREAKVQWKVDNALQSGNSQESVTEQDSKDSTYSLSSTLTLSKADYEKHKVYACEVTHQGLSSPVTKSFNRGEC

SEQ ID NO: 20797 - protein, 107 aa, synthetic construct; identical to SEQ ID NO: 15105
  REGION 1..107: note = Description of Artificial Sequence: Synthetic polypeptide
  REGION 1..107: note = VL of XENP019031

SEQ ID NO: 20798 - protein, 11 aa, synthetic construct
  REGION 1..11: note = Description of Artificial Sequence: Synthetic peptide
  REGION 1..11: note = XENP019031 vlCDR1
RASQSVSNDVA

SEQ ID NO: 20799 - protein, 7 aa, synthetic construct
  REGION 1..7: note = Description of Artificial Sequence: Synthetic peptide
  REGION 1..7: note = XENP019031 vlCDR2
YASHRYT

SEQ ID NO: 20800 - protein, 9 aa, synthetic construct
  REGION 1..9: note = Description of Artificial Sequence: Synthetic peptide
  REGION 1..9: note = XENP019031 vlCDR3
QQDYSSPRT

SEQ ID NO: 20801 - protein, 451 aa, synthetic construct; identical to SEQ ID NO: 16221
  REGION 1..451: note = Description of Artificial Sequence: Synthetic polypeptide
  REGION 1..451: note = XENP019032 1G6_H1_L1.155_IgG1_PVA_/S267K Heavy Chain

SEQ ID NO: 20802 - protein, 122 aa, synthetic construct; identical to SEQ ID NO: 10922
  REGION 1..122: note = Description of Artificial Sequence: Synthetic polypeptide
  REGION 1..122: note = VH of XENP019032

SEQ ID NO: 20803 - protein, 5 aa, synthetic construct
  REGION 1..5: note = Description of Artificial Sequence: Synthetic peptide
  REGION 1..5: note = XENP019032 vhCDR1
NYWMN

SEQ ID NO: 20804 - protein, 19 aa, synthetic construct
  REGION 1..19: note = Description of Artificial Sequence: Synthetic peptide
  REGION 1..19: note = XENP019032 vhCDR2
EIRLKSNNYATHYAEPVKG

SEQ ID NO: 20805 - protein, 11 aa, synthetic construct
  REGION 1..11: note = Description of Artificial Sequence: Synthetic peptide
  REGION 1..11: note = XENP019032 vhCDR3
YYGNYGGYFDV

SEQ ID NO: 20806 - protein, 214 aa, synthetic construct
  REGION 1..214: note = Description of Artificial Sequence: Synthetic polypeptide
  REGION 1..214: note = XENP019032 1G6_H1_L1.155_IgG1_PVA_/S267K Light Chain
SIVMTQSPATLSVSPGERATLSCRASQSVSNDVAWYQQKPGQSPRLLINYANHRYTGVPDRFTGSGYGTEFTLTISSLQSEDFAVYFCQQDYSSPRTFGGGTKVEIKRTVAAPSVFIFPPSDEQLKSGTASVVCLLNNFYPREAKVQWKVDNALQSGNSQESVTEQDSKDSTYSLSSTLTLSKADYEKHKVYACEVTHQGLSSPVTKSFNRGEC

SEQ ID NO: 20807 - protein, 107 aa, synthetic construct; identical to SEQ ID NO: 15114
  REGION 1..107: note = Description of Artificial Sequence: Synthetic polypeptide
  REGION 1..107: note = VL of XENP019032

SEQ ID NO: 20808 - protein, 11 aa, synthetic construct
  REGION 1..11: note = Description of Artificial Sequence: Synthetic peptide
  REGION 1..11: note = XENP019032 vlCDR1
RASQSVSNDVA

SEQ ID NO: 20809 - protein, 7 aa, synthetic construct
  REGION 1..7: note = Description of Artificial Sequence: Synthetic peptide
  REGION 1..7: note = XENP019032 vlCDR2
YANHRYT

SEQ ID NO: 20810 - protein, 9 aa, synthetic construct
  REGION 1..9: note = Description of Artificial Sequence: Synthetic peptide
  REGION 1..9: note = XENP019032 vlCDR3
QQDYSSPRT

SEQ ID NO: 20811 - protein, 451 aa, synthetic construct; identical to SEQ ID NO: 16221
  REGION 1..451: note = Description of Artificial Sequence: Synthetic polypeptide
  REGION 1..451: note = XENP019033 1G6_H1_L1.156_IgG1_PVA_/S267K Heavy Chain

SEQ ID NO: 20812 - protein, 122 aa, synthetic construct; identical to SEQ ID NO: 10922
  REGION 1..122: note = Description of Artificial Sequence: Synthetic polypeptide
  REGION 1..122: note = VH of XENP019033

SEQ ID NO: 20813 - protein, 5 aa, synthetic construct
  REGION 1..5: note = Description of Artificial Sequence: Synthetic peptide
  REGION 1..5: note = XENP019033 vhCDR1
NYWMN

SEQ ID NO: 20814 - protein, 19 aa, synthetic construct
  REGION 1..19: note = Description of Artificial Sequence: Synthetic peptide
  REGION 1..19: note = XENP019033 vhCDR2
EIRLKSNNYATHYAEPVKG

SEQ ID NO: 20815 - protein, 11 aa, synthetic construct
  REGION 1..11: note = Description of Artificial Sequence: Synthetic peptide
  REGION 1..11: note = XENP019033 vhCDR3
YYGNYGGYFDV

SEQ ID NO: 20816 - protein, 214 aa, synthetic construct
  REGION 1..214: note = Description of Artificial Sequence: Synthetic polypeptide
  REGION 1..214: note = XENP019033 1G6_H1_L1.156_IgG1_PVA_/S267K Light Chain
SIVMTQSPATLSVSPGERATLSCRASQSVSNDVAWYQQKPGQSPRLLINYASHRYTGVPDRFTGSGYGTEFTLTISSLESEDFAVYFCQQDYSSPRTFGGGTKVEIKRTVAAPSVFIFPPSDEQLKSGTASVVCLLNNFYPREAKVQWKVDNALQSGNSQESVTEQDSKDSTYSLSSTLTLSKADYEKHKVYACEVTHQGLSSPVTKSFNRGEC

SEQ ID NO: 20817 - protein, 107 aa, synthetic construct; identical to SEQ ID NO: 15123
  REGION 1..107: note = Description of Artificial Sequence: Synthetic polypeptide
  REGION 1..107: note = VL of XENP019033

SEQ ID NO: 20818 - protein, 11 aa, synthetic construct
  REGION 1..11: note = Description of Artificial Sequence: Synthetic peptide
  REGION 1..11: note = XENP019033 vlCDR1
RASQSVSNDVA

SEQ ID NO: 20819 - protein, 7 aa, synthetic construct
  REGION 1..7: note = Description of Artificial Sequence: Synthetic peptide
  REGION 1..7: note = XENP019033 vlCDR2
YASHRYT

SEQ ID NO: 20820 - protein, 9 aa, synthetic construct
  REGION 1..9: note = Description of Artificial Sequence: Synthetic peptide
  REGION 1..9: note = XENP019033 vlCDR3
QQDYSSPRT

SEQ ID NO: 20821 - protein, 451 aa, synthetic construct; identical to SEQ ID NO: 16221
  REGION 1..451: note = Description of Artificial Sequence: Synthetic polypeptide
  REGION 1..451: note = XENP019034 1G6_H1_L1.157_IgG1_PVA_/S267K Heavy Chain

SEQ ID NO: 20822 - protein, 122 aa, synthetic construct; identical to SEQ ID NO: 10922
  REGION 1..122: note = Description of Artificial Sequence: Synthetic polypeptide
  REGION 1..122: note = VH of XENP019034

SEQ ID NO: 20823 - protein, 5 aa, synthetic construct
  REGION 1..5: note = Description of Artificial Sequence: Synthetic peptide
  REGION 1..5: note = XENP019034 vhCDR1
NYWMN

SEQ ID NO: 20824 - protein, 19 aa, synthetic construct
  REGION 1..19: note = Description of Artificial Sequence: Synthetic peptide
  REGION 1..19: note = XENP019034 vhCDR2
EIRLKSNNYATHYAEPVKG

SEQ ID NO: 20825 - protein, 11 aa, synthetic construct
  REGION 1..11: note = Description of Artificial Sequence: Synthetic peptide
  REGION 1..11: note = XENP019034 vhCDR3
YYGNYGGYFDV

SEQ ID NO: 20826 - protein, 214 aa, synthetic construct
  REGION 1..214: note = Description of Artificial Sequence: Synthetic polypeptide
  REGION 1..214: note = XENP019034 1G6_H1_L1.157_IgG1_PVA_/S267K Light Chain
SIVMTQSPATLSVSPGERATLSCRASQSVSNDVAWYQQKPGQSPRLLINYASHRYTGVPDRFTGSGYGTEFTLTISSLKSEDFAVYFCQQDYSSPRTFGGGTKVEIKRTVAAPSVFIFPPSDEQLKSGTASVVCLLNNFYPREAKVQWKVDNALQSGNSQESVTEQDSKDSTYSLSSTLTLSKADYEKHKVYACEVTHQGLSSPVTKSFNRGEC

SEQ ID NO: 20827 - protein, 107 aa, synthetic construct; identical to SEQ ID NO: 15132
  REGION 1..107: note = Description of Artificial Sequence: Synthetic polypeptide
  REGION 1..107: note = VL of XENP019034

SEQ ID NO: 20828 - protein, 11 aa, synthetic construct
  REGION 1..11: note = Description of Artificial Sequence: Synthetic peptide
  REGION 1..11: note = XENP019034 vlCDR1
RASQSVSNDVA

SEQ ID NO: 20829 - protein, 7 aa, synthetic construct
  REGION 1..7: note = Description of Artificial Sequence: Synthetic peptide
  REGION 1..7: note = XENP019034 vlCDR2
YASHRYT

SEQ ID NO: 20830 - protein, 9 aa, synthetic construct
  REGION 1..9: note = Description of Artificial Sequence: Synthetic peptide
  REGION 1..9: note = XENP019034 vlCDR3
QQDYSSPRT

SEQ ID NO: 20831 - protein, 451 aa, synthetic construct; identical to SEQ ID NO: 16221
  REGION 1..451: note = Description of Artificial Sequence: Synthetic polypeptide
  REGION 1..451: note = XENP019035 1G6_H1_L1.158_IgG1_PVA_/S267K Heavy Chain

SEQ ID NO: 20832 - protein, 122 aa, synthetic construct; identical to SEQ ID NO: 10922
  REGION 1..122: note = Description of Artificial Sequence: Synthetic polypeptide
  REGION 1..122: note = VH of XENP019035

SEQ ID NO: 20833 - protein, 5 aa, synthetic construct
  REGION 1..5: note = Description of Artificial Sequence: Synthetic peptide
  REGION 1..5: note = XENP019035 vhCDR1
NYWMN

SEQ ID NO: 20834 - protein, 19 aa, synthetic construct
  REGION 1..19: note = Description of Artificial Sequence: Synthetic peptide
  REGION 1..19: note = XENP019035 vhCDR2
EIRLKSNNYATHYAEPVKG

SEQ ID NO: 20835 - protein, 11 aa, synthetic construct
  REGION 1..11: note = Description of Artificial Sequence: Synthetic peptide
  REGION 1..11: note = XENP019035 vhCDR3
YYGNYGGYFDV

SEQ ID NO: 20836 - protein, 214 aa, synthetic construct
  REGION 1..214: note = Description of Artificial Sequence: Synthetic polypeptide
  REGION 1..214: note = XENP019035 1G6_H1_L1.158_IgG1_PVA_/S267K Light Chain
SIVMTQSPATLSVSPGERATLSCRASQSVSNDVAWYQQKPGQSPRLLINYASHRYTGVPDRFTGSGYGTEFTLTISSLQSEDFGVYFCQQDYSSPRTFGGGTKVEIKRTVAAPSVFIFPPSDEQLKSGTASVVCLLNNFYPREAKVQWKVDNALQSGNSQESVTEQDSKDSTYSLSSTLTLSKADYEKHKVYACEVTHQGLSSPVTKSFNRGEC

SEQ ID NO: 20837 - protein, 107 aa, synthetic construct; identical to SEQ ID NO: 15141
  REGION 1..107: note = Description of Artificial Sequence: Synthetic polypeptide
  REGION 1..107: note = VL of XENP019035

SEQ ID NO: 20838 - protein, 11 aa, synthetic construct
  REGION 1..11: note = Description of Artificial Sequence: Synthetic peptide
  REGION 1..11: note = XENP019035 vlCDR1
RASQSVSNDVA

SEQ ID NO: 20839 - protein, 7 aa, synthetic construct
  REGION 1..7: note = Description of Artificial Sequence: Synthetic peptide
  REGION 1..7: note = XENP019035 vlCDR2
YASHRYT

SEQ ID NO: 20840 - protein, 9 aa, synthetic construct
  REGION 1..9: note = Description of Artificial Sequence: Synthetic peptide
  REGION 1..9: note = XENP019035 vlCDR3
QQDYSSPRT

SEQ ID NO: 20841 - protein, 451 aa, synthetic construct; identical to SEQ ID NO: 16221
  REGION 1..451: note = Description of Artificial Sequence: Synthetic polypeptide
  REGION 1..451: note = XENP019036 1G6_H1_L1.159_IgG1_PVA_/S267K Heavy Chain

SEQ ID NO: 20842 - protein, 122 aa, synthetic construct; identical to SEQ ID NO: 10922
  REGION 1..122: note = Description of Artificial Sequence: Synthetic polypeptide
  REGION 1..122: note = VH of XENP019036

SEQ ID NO: 20843 - protein, 5 aa, synthetic construct
  REGION 1..5: note = Description of Artificial Sequence: Synthetic peptide
  REGION 1..5: note = XENP019036 vhCDR1
NYWMN

SEQ ID NO: 20844 - protein, 19 aa, synthetic construct
  REGION 1..19: note = Description of Artificial Sequence: Synthetic peptide
  REGION 1..19: note = XENP019036 vhCDR2
EIRLKSNNYATHYAEPVKG

SEQ ID NO: 20845 - protein, 11 aa, synthetic construct
  REGION 1..11: note = Description of Artificial Sequence: Synthetic peptide
  REGION 1..11: note = XENP019036 vhCDR3
YYGNYGGYFDV

SEQ ID NO: 20846 - protein, 214 aa, synthetic construct
  REGION 1..214: note = Description of Artificial Sequence: Synthetic polypeptide
  REGION 1..214: note = XENP019036 1G6_H1_L1.159_IgG1_PVA_/S267K Light Chain
SIVMTQSPATLSVSPGERATLSCRASQSVSNDVAWYQQKPGQSPRLLINYASHRYTGVPDRFTGSGYGTEFTLTISSLQSEDFAVYFCKQDYSSPRTFGGGTKVEIKRTVAAPSVFIFPPSDEQLKSGTASVVCLLNNFYPREAKVQWKVDNALQSGNSQESVTEQDSKDSTYSLSSTLTLSKADYEKHKVYACEVTHQGLSSPVTKSFNRGEC

SEQ ID NO: 20847 - protein, 107 aa, synthetic construct; identical to SEQ ID NO: 15150
  REGION 1..107: note = Description of Artificial Sequence: Synthetic polypeptide
  REGION 1..107: note = VL of XENP019036

SEQ ID NO: 20848 - protein, 11 aa, synthetic construct
  REGION 1..11: note = Description of Artificial Sequence: Synthetic peptide
  REGION 1..11: note = XENP019036 vlCDR1
RASQSVSNDVA

SEQ ID NO: 20849 - protein, 7 aa, synthetic construct
  REGION 1..7: note = Description of Artificial Sequence: Synthetic peptide
  REGION 1..7: note = XENP019036 vlCDR2
YASHRYT

SEQ ID NO: 20850 - protein, 9 aa, synthetic construct
  REGION 1..9: note = Description of Artificial Sequence: Synthetic peptide
  REGION 1..9: note = XENP019036 vlCDR3
KQDYSSPRT

SEQ ID NO: 20851 - protein, 451 aa, synthetic construct; identical to SEQ ID NO: 16221
  REGION 1..451: note = Description of Artificial Sequence: Synthetic polypeptide
  REGION 1..451: note = XENP019037 1G6_H1_L1.160_IgG1_PVA_/S267K Heavy Chain

SEQ ID NO: 20852 - protein, 122 aa, synthetic construct; identical to SEQ ID NO: 10922
  REGION 1..122: note = Description of Artificial Sequence: Synthetic polypeptide
  REGION 1..122: note = VH of XENP019037

SEQ ID NO: 20853 - protein, 5 aa, synthetic construct
  REGION 1..5: note = Description of Artificial Sequence: Synthetic peptide
  REGION 1..5: note = XENP019037 vhCDR1
NYWMN

SEQ ID NO: 20854 - protein, 19 aa, synthetic construct
  REGION 1..19: note = Description of Artificial Sequence: Synthetic peptide
  REGION 1..19: note = XENP019037 vhCDR2
EIRLKSNNYATHYAEPVKG

SEQ ID NO: 20855 - protein, 11 aa, synthetic construct
  REGION 1..11: note = Description of Artificial Sequence: Synthetic peptide
  REGION 1..11: note = XENP019037 vhCDR3
YYGNYGGYFDV

SEQ ID NO: 20856 - protein, 214 aa, synthetic construct
  REGION 1..214: note = Description of Artificial Sequence: Synthetic polypeptide
  REGION 1..214: note = XENP019037 1G6_H1_L1.160_IgG1_PVA_/S267K Light Chain
SIVMTQSPATLSVSPGERATLSCRASQSVSNDVAWYQQKPGQSPRLLINYASHRYTGVPDRFTGSGYGTEFTLTISSLQSEDFAVYFCQKDYSSPRTFGGGTKVEIKRTVAAPSVFIFPPSDEQLKSGTASVVCLLNNFYPREAKVQWKVDNALQSGNSQESVTEQDSKDSTYSLSSTLTLSKADYEKHKVYACEVTHQGLSSPVTKSFNRGEC

SEQ ID NO: 20857 - protein, 107 aa, synthetic construct; identical to SEQ ID NO: 15159
  REGION 1..107: note = Description of Artificial Sequence: Synthetic polypeptide
  REGION 1..107: note = VL of XENP019037

SEQ ID NO: 20858 - protein, 11 aa, synthetic construct
  REGION 1..11: note = Description of Artificial Sequence: Synthetic peptide
  REGION 1..11: note = XENP019037 vlCDR1
RASQSVSNDVA

SEQ ID NO: 20859 - protein, 7 aa, synthetic construct
  REGION 1..7: note = Description of Artificial Sequence: Synthetic peptide
  REGION 1..7: note = XENP019037 vlCDR2
YASHRYT

SEQ ID NO: 20860 - protein, 9 aa, synthetic construct
  REGION 1..9: note = Description of Artificial Sequence: Synthetic peptide
  REGION 1..9: note = XENP019037 vlCDR3
QKDYSSPRT

SEQ ID NO: 20861 - protein, 451 aa, synthetic construct; identical to SEQ ID NO: 16221
  REGION 1..451: note = Description of Artificial Sequence: Synthetic polypeptide
  REGION 1..451: note = XENP019038 1G6_H1_L1.161_IgG1_PVA_/S267K Heavy Chain

SEQ ID NO: 20862 - protein, 122 aa, synthetic construct; identical to SEQ ID NO: 10922
  REGION 1..122: note = Description of Artificial Sequence: Synthetic polypeptide
  REGION 1..122: note = VH of XENP019038

SEQ ID NO: 20863 - protein, 5 aa, synthetic construct
  REGION 1..5: note = Description of Artificial Sequence: Synthetic peptide
  REGION 1..5: note = XENP019038 vhCDR1
NYWMN

SEQ ID NO: 20864 - protein, 19 aa, synthetic construct
  REGION 1..19: note = Description of Artificial Sequence: Synthetic peptide
  REGION 1..19: note = XENP019038 vhCDR2
EIRLKSNNYATHYAEPVKG

SEQ ID NO: 20865 - protein, 11 aa, synthetic construct
  REGION 1..11: note = Description of Artificial Sequence: Synthetic peptide
  REGION 1..11: note = XENP019038 vhCDR3
YYGNYGGYFDV

SEQ ID NO: 20866 - protein, 214 aa, synthetic construct
  REGION 1..214: note = Description of Artificial Sequence: Synthetic polypeptide
  REGION 1..214: note = XENP019038 1G6_H1_L1.161_IgG1_PVA_/S267K Light Chain
SIVMTQSPATLSVSPGERATLSCRASQSVSNDVAWYQQKPGQSPRLLINYASHRYTGVPDRFTGSGYGTEFTLTISSLQSEDFAVYFCQNDYSSPRTFGGGTKVEIKRTVAAPSVFIFPPSDEQLKSGTASVVCLLNNFYPREAKVQWKVDNALQSGNSQESVTEQDSKDSTYSLSSTLTLSKADYEKHKVYACEVTHQGLSSPVTKSFNRGEC

SEQ ID NO: 20867 - protein, 107 aa, synthetic construct; identical to SEQ ID NO: 15168
  REGION 1..107: note = Description of Artificial Sequence: Synthetic polypeptide
  REGION 1..107: note = VL of XENP019038

SEQ ID NO: 20868 - protein, 11 aa, synthetic construct
  REGION 1..11: note = Description of Artificial Sequence: Synthetic peptide
  REGION 1..11: note = XENP019038 vlCDR1
RASQSVSNDVA

SEQ ID NO: 20869 - protein, 7 aa, synthetic construct
  REGION 1..7: note = Description of Artificial Sequence: Synthetic peptide
  REGION 1..7: note = XENP019038 vlCDR2
YASHRYT

SEQ ID NO: 20870 - protein, 9 aa, synthetic construct
  REGION 1..9: note = Description of Artificial Sequence: Synthetic peptide
  REGION 1..9: note = XENP019038 vlCDR3
QNDYSSPRT

SEQ ID NO: 20871 - protein, 451 aa, synthetic construct; identical to SEQ ID NO: 16221
  REGION 1..451: note = Description of Artificial Sequence: Synthetic polypeptide
  REGION 1..451: note = XENP019039 1G6_H1_L1.162_IgG1_PVA_/S267K Heavy Chain

SEQ ID NO: 20872 - protein, 122 aa, synthetic construct; identical to SEQ ID NO: 10922
  REGION 1..122: note = Description of Artificial Sequence: Synthetic polypeptide
  REGION 1..122: note = VH of XENP019039

SEQ ID NO: 20873 - protein, 5 aa, synthetic construct
  REGION 1..5: note = Description of Artificial Sequence: Synthetic peptide
  REGION 1..5: note = XENP019039 vhCDR1
NYWMN

SEQ ID NO: 20874 - protein, 19 aa, synthetic construct
  REGION 1..19: note = Description of Artificial Sequence: Synthetic peptide
  REGION 1..19: note = XENP019039 vhCDR2
EIRLKSNNYATHYAEPVKG

SEQ ID NO: 20875 - protein, 11 aa, synthetic construct
  REGION 1..11: note = Description of Artificial Sequence: Synthetic peptide
  REGION 1..11: note = XENP019039 vhCDR3
YYGNYGGYFDV

SEQ ID NO: 20876 - protein, 214 aa, synthetic construct
  REGION 1..214: note = Description of Artificial Sequence: Synthetic polypeptide
  REGION 1..214: note = XENP019039 1G6_H1_L1.162_IgG1_PVA_/S267K Light Chain
SIVMTQSPATLSVSPGERATLSCRASQSVSNDVAWYQQKPGQSPRLLINYASHRYTGVPDRFTGSGYGTEFTLTISSLQSEDFAVYFCQRDYSSPRTFGGGTKVEIKRTVAAPSVFIFPPSDEQLKSGTASVVCLLNNFYPREAKVQWKVDNALQSGNSQESVTEQDSKDSTYSLSSTLTLSKADYEKHKVYACEVTHQGLSSPVTKSFNRGEC

SEQ ID NO: 20877 - protein, 107 aa, synthetic construct; identical to SEQ ID NO: 15177
  REGION 1..107: note = Description of Artificial Sequence: Synthetic polypeptide
  REGION 1..107: note = VL of XENP019039

SEQ ID NO: 20878 - protein, 11 aa, synthetic construct
  REGION 1..11: note = Description of Artificial Sequence: Synthetic peptide
  REGION 1..11: note = XENP019039 vlCDR1
RASQSVSNDVA

SEQ ID NO: 20879 - protein, 7 aa, synthetic construct
  REGION 1..7: note = Description of Artificial Sequence: Synthetic peptide
  REGION 1..7: note = XENP019039 vlCDR2
YASHRYT

SEQ ID NO: 20880 - protein, 9 aa, synthetic construct
  REGION 1..9: note = Description of Artificial Sequence: Synthetic peptide
  REGION 1..9: note = XENP019039 vlCDR3
QRDYSSPRT

SEQ ID NO: 20881 - protein, 451 aa, synthetic construct; identical to SEQ ID NO: 16221
  REGION 1..451: note = Description of Artificial Sequence: Synthetic polypeptide
  REGION 1..451: note = XENP019040 1G6_H1_L1.163_IgG1_PVA_/S267K Heavy Chain

SEQ ID NO: 20882 - protein, 122 aa, synthetic construct; identical to SEQ ID NO: 10922
  REGION 1..122: note = Description of Artificial Sequence: Synthetic polypeptide
  REGION 1..122: note = VH of XENP019040

SEQ ID NO: 20883 - protein, 5 aa, synthetic construct
  REGION 1..5: note = Description of Artificial Sequence: Synthetic peptide
  REGION 1..5: note = XENP019040 vhCDR1
NYWMN

SEQ ID NO: 20884 - protein, 19 aa, synthetic construct
  REGION 1..19: note = Description of Artificial Sequence: Synthetic peptide
  REGION 1..19: note = XENP019040 vhCDR2
EIRLKSNNYATHYAEPVKG

SEQ ID NO: 20885 - protein, 11 aa, synthetic construct
  REGION 1..11: note = Description of Artificial Sequence: Synthetic peptide
  REGION 1..11: note = XENP019040 vhCDR3
YYGNYGGYFDV

SEQ ID NO: 20886 - protein, 214 aa, synthetic construct
  REGION 1..214: note = Description of Artificial Sequence: Synthetic polypeptide
  REGION 1..214: note = XENP019040 1G6_H1_L1.163_IgG1_PVA_/S267K Light Chain
SIVMTQSPATLSVSPGEPATLSCRASQSVSNDVAWYQQKPGQSPRLLINYASHRYTGVPDRFTGSGYGTEFTLTISRLQSEDFAVYFCQQDYSSPRTFGGGTKVEIKRTVAAPSVFIFPPSDEQLKSGTASVVCLLNNFYPREAKVQWKVDNALQSGNSQESVTEQDSKDSTYSLSSTLTLSKADYEKHKVYACEVTHQGLSSPVTKSFNRGEC

SEQ ID NO: 20887 - protein, 107 aa, synthetic construct; identical to SEQ ID NO: 15186
  REGION 1..107: note = Description of Artificial Sequence: Synthetic polypeptide
  REGION 1..107: note = VL of XENP019040

SEQ ID NO: 20888 - protein, 11 aa, synthetic construct
  REGION 1..11: note = Description of Artificial Sequence: Synthetic peptide
  REGION 1..11: note = XENP019040 vlCDR1
RASQSVSNDVA

SEQ ID NO: 20889 - protein, 7 aa, synthetic construct
  REGION 1..7: note = Description of Artificial Sequence: Synthetic peptide
  REGION 1..7: note = XENP019040 vlCDR2
YASHRYT

SEQ ID NO: 20890 - protein, 9 aa, synthetic construct
  REGION 1..9: note = Description of Artificial Sequence: Synthetic peptide
  REGION 1..9: note = XENP019040 vlCDR3
QQDYSSPRT

SEQ ID NO: 20891 - protein, 451 aa, synthetic construct; identical to SEQ ID NO: 16221
  REGION 1..451: note = Description of Artificial Sequence: Synthetic polypeptide
  REGION 1..451: note = XENP019041 1G6_H1_L1.164_IgG1_PVA_/S267K Heavy Chain

SEQ ID NO: 20892 - protein, 122 aa, synthetic construct; identical to SEQ ID NO: 10922
  REGION 1..122: note = Description of Artificial Sequence: Synthetic polypeptide
  REGION 1..122: note = VH of XENP019041

SEQ ID NO: 20893 - protein, 5 aa, synthetic construct
  REGION 1..5: note = Description of Artificial Sequence: Synthetic peptide
  REGION 1..5: note = XENP019041 vhCDR1
NYWMN

SEQ ID NO: 20894 - protein, 19 aa, synthetic construct
  REGION 1..19: note = Description of Artificial Sequence: Synthetic peptide
  REGION 1..19: note = XENP019041 vhCDR2
EIRLKSNNYATHYAEPVKG

SEQ ID NO: 20895 - protein, 11 aa, synthetic construct
  REGION 1..11: note = Description of Artificial Sequence: Synthetic peptide
  REGION 1..11: note = XENP019041 vhCDR3
YYGNYGGYFDV

SEQ ID NO: 20896 - protein, 214 aa, synthetic construct
  REGION 1..214: note = Description of Artificial Sequence: Synthetic polypeptide
  REGION 1..214: note = XENP019041 1G6_H1_L1.164_IgG1_PVA_/S267K Light Chain
SIVMTQSPATLSVSPGERATLSCRASESVSNDVAWYQQKPGQSPRLLINYASHRYTGVPDRFTGSGYGTEFTLTISSLQSEDFAVYFCQKDYSSPRTFGGGTKVEIKRTVAAPSVFIFPPSDEQLKSGTASVVCLLNNFYPREAKVQWKVDNALQSGNSQESVTEQDSKDSTYSLSSTLTLSKADYEKHKVYACEVTHQGLSSPVTKSFNRGEC

SEQ ID NO: 20897 - protein, 107 aa, synthetic construct; identical to SEQ ID NO: 15195
  REGION 1..107: note = Description of Artificial Sequence: Synthetic polypeptide
  REGION 1..107: note = VL of XENP019041

SEQ ID NO: 20898 - protein, 11 aa, synthetic construct
  REGION 1..11: note = Description of Artificial Sequence: Synthetic peptide
  REGION 1..11: note = XENP019041 vlCDR1
RASESVSNDVA

SEQ ID NO: 20899 - protein, 7 aa, synthetic construct
  REGION 1..7: note = Description of Artificial Sequence: Synthetic peptide
  REGION 1..7: note = XENP019041 vlCDR2
YASHRYT

SEQ ID NO: 20900 - protein, 9 aa, synthetic construct
  REGION 1..9: note = Description of Artificial Sequence: Synthetic peptide
  REGION 1..9: note = XENP019041 vlCDR3
QKDYSSPRT

SEQ ID NO: 20901 - protein, 451 aa, synthetic construct; identical to SEQ ID NO: 16221
  REGION 1..451: note = Description of Artificial Sequence: Synthetic polypeptide
  REGION 1..451: note = XENP019042 1G6_H1_L1.165_IgG1_PVA_/S267K Heavy Chain

SEQ ID NO: 20902 - protein, 122 aa, synthetic construct; identical to SEQ ID NO: 10922
  REGION 1..122: note = Description of Artificial Sequence: Synthetic polypeptide
  REGION 1..122: note = VH of XENP019042

SEQ ID NO: 20903 - protein, 5 aa, synthetic construct
  REGION 1..5: note = Description of Artificial Sequence: Synthetic peptide
  REGION 1..5: note = XENP019042 vhCDR1
NYWMN

SEQ ID NO: 20904 - protein, 19 aa, synthetic construct
  REGION 1..19: note = Description of Artificial Sequence: Synthetic peptide
  REGION 1..19: note = XENP019042 vhCDR2
EIRLKSNNYATHYAEPVKG

SEQ ID NO: 20905 - protein, 11 aa, synthetic construct
  REGION 1..11: note = Description of Artificial Sequence: Synthetic peptide
  REGION 1..11: note = XENP019042 vhCDR3
YYGNYGGYFDV

SEQ ID NO: 20906 - protein, 214 aa, synthetic construct
  REGION 1..214: note = Description of Artificial Sequence: Synthetic polypeptide
  REGION 1..214: note = XENP019042 1G6_H1_L1.165_IgG1_PVA_/S267K Light Chain
SIVMTQSPATLSVSPGERATLSCRASESVSNDVAWYQQKPGQSPRLLINYASHRYTGVPDRFTGSGYGTEFTLTISSLQSEDFAVYFCQQDYKSPRTFGGGTKVEIKRTVAAPSVFIFPPSDEQLKSGTASVVCLLNNFYPREAKVQWKVDNALQSGNSQESVTEQDSKDSTYSLSSTLTLSKADYEKHKVYACEVTHQGLSSPVTKSFNRGEC

SEQ ID NO: 20907 - protein, 107 aa, synthetic construct; identical to SEQ ID NO: 15204
  REGION 1..107: note = Description of Artificial Sequence: Synthetic polypeptide
  REGION 1..107: note = VL of XENP019042

SEQ ID NO: 20908 - protein, 11 aa, synthetic construct
  REGION 1..11: note = Description of Artificial Sequence: Synthetic peptide
  REGION 1..11: note = XENP019042 vlCDR1
RASESVSNDVA

SEQ ID NO: 20909 - protein, 7 aa, synthetic construct
  REGION 1..7: note = Description of Artificial Sequence: Synthetic peptide
  REGION 1..7: note = XENP019042 vlCDR2
YASHRYT

SEQ ID NO: 20910 - protein, 9 aa, synthetic construct
  REGION 1..9: note = Description of Artificial Sequence: Synthetic peptide
  REGION 1..9: note = XENP019042 vlCDR3
QQDYKSPRT

SEQ ID NO: 20911 - protein, 451 aa, synthetic construct; identical to SEQ ID NO: 16221
  REGION 1..451: note = Description of Artificial Sequence: Synthetic polypeptide
  REGION 1..451: note = XENP019043 1G6_H1_L1.166_IgG1_PVA_/S267K Heavy Chain

SEQ ID NO: 20912 - protein, 122 aa, synthetic construct; identical to SEQ ID NO: 10922
  REGION 1..122: note = Description of Artificial Sequence: Synthetic polypeptide
  REGION 1..122: note = VH of XENP019043

SEQ ID NO: 20913 - protein, 5 aa, synthetic construct
  REGION 1..5: note = Description of Artificial Sequence: Synthetic peptide
  REGION 1..5: note = XENP019043 vhCDR1
NYWMN

SEQ ID NO: 20914 - protein, 19 aa, synthetic construct
  REGION 1..19: note = Description of Artificial Sequence: Synthetic peptide
  REGION 1..19: note = XENP019043 vhCDR2
EIRLKSNNYATHYAEPVKG

SEQ ID NO: 20915 - protein, 11 aa, synthetic construct
  REGION 1..11: note = Description of Artificial Sequence: Synthetic peptide
  REGION 1..11: note = XENP019043 vhCDR3
YYGNYGGYFDV

SEQ ID NO: 20916 - protein, 214 aa, synthetic construct
  REGION 1..214: note = Description of Artificial Sequence: Synthetic polypeptide
  REGION 1..214: note = XENP019043 1G6_H1_L1.166_IgG1_PVA_/S267K Light Chain
SIVMTQSPATLSVSPGERATLSCRASQSVSNDVAWYRQKPEQSPRLLINYASHRYTGVPDRFTGSGYGTEFTLTISSLQSEDFAVYFCQQDYSSPRTFGGGTKVEIKRTVAAPSVFIFPPSDEQLKSGTASVVCLLNNFYPREAKVQWKVDNALQSGNSQESVTEQDSKDSTYSLSSTLTLSKADYEKHKVYACEVTHQGLSSPVTKSFNRGEC

SEQ ID NO: 20917 - protein, 107 aa, synthetic construct; identical to SEQ ID NO: 15213
  REGION 1..107: note = Description of Artificial Sequence: Synthetic polypeptide
  REGION 1..107: note = VL of XENP019043

SEQ ID NO: 20918 - protein, 11 aa, synthetic construct
  REGION 1..11: note = Description of Artificial Sequence: Synthetic peptide
  REGION 1..11: note = XENP019043 vlCDR1
RASQSVSNDVA

SEQ ID NO: 20919 - protein, 7 aa, synthetic construct
  REGION 1..7: note = Description of Artificial Sequence: Synthetic peptide
  REGION 1..7: note = XENP019043 vlCDR2
YASHRYT

SEQ ID NO: 20920 - protein, 9 aa, synthetic construct
  REGION 1..9: note = Description of Artificial Sequence: Synthetic peptide
  REGION 1..9: note = XENP019043 vlCDR3
QQDYSSPRT

SEQ ID NO: 20921 - protein, 451 aa, synthetic construct; identical to SEQ ID NO: 16221
  REGION 1..451: note = Description of Artificial Sequence: Synthetic polypeptide
  REGION 1..451: note = XENP019044 1G6_H1_L1.167_IgG1_PVA_/S267K Heavy Chain

SEQ ID NO: 20922 - protein, 122 aa, synthetic construct; identical to SEQ ID NO: 10922
  REGION 1..122: note = Description of Artificial Sequence: Synthetic polypeptide
  REGION 1..122: note = VH of XENP019044

SEQ ID NO: 20923 - protein, 5 aa, synthetic construct
  REGION 1..5: note = Description of Artificial Sequence: Synthetic peptide
  REGION 1..5: note = XENP019044 vhCDR1
NYWMN

SEQ ID NO: 20924 - protein, 19 aa, synthetic construct
  REGION 1..19: note = Description of Artificial Sequence: Synthetic peptide
  REGION 1..19: note = XENP019044 vhCDR2
EIRLKSNNYATHYAEPVKG

SEQ ID NO: 20925 - protein, 11 aa, synthetic construct
  REGION 1..11: note = Description of Artificial Sequence: Synthetic peptide
  REGION 1..11: note = XENP019044 vhCDR3
YYGNYGGYFDV

SEQ ID NO: 20926 - protein, 214 aa, synthetic construct
  REGION 1..214: note = Description of Artificial Sequence: Synthetic polypeptide
  REGION 1..214: note = XENP019044 1G6_H1_L1.167_IgG1_PVA_/S267K Light Chain
SIVMTQSPATLSVSPGERATLSCRASQSVSNDVAWYRQKPGESPRLLINYASHRYTGVPDRFTGSGYGTEFTLTISSLQSEDFAVYFCQQDYSSPRTFGGGTKVEIKRTVAAPSVFIFPPSDEQLKSGTASVVCLLNNFYPREAKVQWKVDNALQSGNSQESVTEQDSKDSTYSLSSTLTLSKADYEKHKVYACEVTHQGLSSPVTKSFNRGEC

SEQ ID NO: 20927 - protein, 107 aa, synthetic construct; identical to SEQ ID NO: 15222
  REGION 1..107: note = Description of Artificial Sequence: Synthetic polypeptide
  REGION 1..107: note = VL of XENP019044

SEQ ID NO: 20928 - protein, 11 aa, synthetic construct
  REGION 1..11: note = Description of Artificial Sequence: Synthetic peptide
  REGION 1..11: note = XENP019044 vlCDR1
RASQSVSNDVA

SEQ ID NO: 20929 - protein, 7 aa, synthetic construct
  REGION 1..7: note = Description of Artificial Sequence: Synthetic peptide
  REGION 1..7: note = XENP019044 vlCDR2
YASHRYT

SEQ ID NO: 20930 - protein, 9 aa, synthetic construct
  REGION 1..9: note = Description of Artificial Sequence: Synthetic peptide
  REGION 1..9: note = XENP019044 vlCDR3
QQDYSSPRT

SEQ ID NO: 20931 - protein, 451 aa, synthetic construct; identical to SEQ ID NO: 16221
  REGION 1..451: note = Description of Artificial Sequence: Synthetic polypeptide
  REGION 1..451: note = XENP019045 1G6_H1_L1.168_IgG1_PVA_/S267K Heavy Chain

SEQ ID NO: 20932 - protein, 122 aa, synthetic construct; identical to SEQ ID NO: 10922
  REGION 1..122: note = Description of Artificial Sequence: Synthetic polypeptide
  REGION 1..122: note = VH of XENP019045

SEQ ID NO: 20933 - protein, 5 aa, synthetic construct
  REGION 1..5: note = Description of Artificial Sequence: Synthetic peptide
  REGION 1..5: note = XENP019045 vhCDR1
NYWMN

SEQ ID NO: 20934 - protein, 19 aa, synthetic construct
  REGION 1..19: note = Description of Artificial Sequence: Synthetic peptide
  REGION 1..19: note = XENP019045 vhCDR2
EIRLKSNNYATHYAEPVKG

SEQ ID NO: 20935 - protein, 11 aa, synthetic construct
  REGION 1..11: note = Description of Artificial Sequence: Synthetic peptide
  REGION 1..11: note = XENP019045 vhCDR3
YYGNYGGYFDV

SEQ ID NO: 20936 - protein, 214 aa, synthetic construct
  REGION 1..214: note = Description of Artificial Sequence: Synthetic polypeptide
  REGION 1..214: note = XENP019045 1G6_H1_L1.168_IgG1_PVA_/S267K Light Chain
SIVMTQSPATLSVSPGERATLSCRASQSVSNDVAWYQQKPGQSPRLLINYASWRYTGVPDRFTGSGYGTEFTLTISSLQSEDFAVYFCQQDFSSPRTFGGGTKVEIKRTVAAPSVFIFPPSDEQLKSGTASVVCLLNNFYPREAKVQWKVDNALQSGNSQESVTEQDSKDSTYSLSSTLTLSKADYEKHKVYACEVTHQGLSSPVTKSFNRGEC

SEQ ID NO: 20937 - protein, 107 aa, synthetic construct; identical to SEQ ID NO: 15231
  REGION 1..107: note = Description of Artificial Sequence: Synthetic polypeptide
  REGION 1..107: note = VL of XENP019045

SEQ ID NO: 20938 - protein, 11 aa, synthetic construct
  REGION 1..11: note = Description of Artificial Sequence: Synthetic peptide
  REGION 1..11: note = XENP019045 vlCDR1
RASQSVSNDVA

SEQ ID NO: 20939 - protein, 7 aa, synthetic construct
  REGION 1..7: note = Description of Artificial Sequence: Synthetic peptide
  REGION 1..7: note = XENP019045 vlCDR2
YASWRYT

SEQ ID NO: 20940 - protein, 9 aa, synthetic construct
  REGION 1..9: note = Description of Artificial Sequence: Synthetic peptide
  REGION 1..9: note = XENP019045 vlCDR3
QQDFSSPRT

SEQ ID NO: 20941 - protein, 451 aa, synthetic construct; identical to SEQ ID NO: 16221
  REGION 1..451: note = Description of Artificial Sequence: Synthetic polypeptide
  REGION 1..451: note = XENP019046 1G6_H1_L1.169_IgG1_PVA_/S267K Heavy Chain

SEQ ID NO: 20942 - protein, 122 aa, synthetic construct; identical to SEQ ID NO: 10922
  REGION 1..122: note = Description of Artificial Sequence: Synthetic polypeptide
  REGION 1..122: note = VH of XENP019046

SEQ ID NO: 20943 - protein, 5 aa, synthetic construct
  REGION 1..5: note = Description of Artificial Sequence: Synthetic peptide
  REGION 1..5: note = XENP019046 vhCDR1
NYWMN

SEQ ID NO: 20944 - protein, 19 aa, synthetic construct
  REGION 1..19: note = Description of Artificial Sequence: Synthetic peptide
  REGION 1..19: note = XENP019046 vhCDR2
EIRLKSNNYATHYAEPVKG

SEQ ID NO: 20945 - protein, 11 aa, synthetic construct
  REGION 1..11: note = Description of Artificial Sequence: Synthetic peptide
  REGION 1..11: note = XENP019046 vhCDR3
YYGNYGGYFDV

SEQ ID NO: 20946 - protein, 214 aa, synthetic construct
  REGION 1..214: note = Description of Artificial Sequence: Synthetic polypeptide
  REGION 1..214: note = XENP019046 1G6_H1_L1.169_IgG1_PVA_/S267K Light Chain
SIVMTQSPATLSVSPGERATLSCRASQSVSNDVAWYQQKPGQSPRLLINYASWRYTGVPDRFTGSGYGTEFTLTISSLQSEDFAVYFCQQDWSSPRTFGGGTKVEIKRTVAAPSVFIFPPSDEQLKSGTASVVCLLNNFYPREAKVQWKVDNALQSGNSQESVTEQDSKDSTYSLSSTLTLSKADYEKHKVYACEVTHQGLSSPVTKSFNRGEC

SEQ ID NO: 20947 - protein, 107 aa, synthetic construct; identical to SEQ ID NO: 15240
  REGION 1..107: note = Description of Artificial Sequence: Synthetic polypeptide
  REGION 1..107: note = VL of XENP019046

SEQ ID NO: 20948 - protein, 11 aa, synthetic construct
  REGION 1..11: note = Description of Artificial Sequence: Synthetic peptide
  REGION 1..11: note = XENP019046 vlCDR1
RASQSVSNDVA

SEQ ID NO: 20949 - protein, 7 aa, synthetic construct
  REGION 1..7: note = Description of Artificial Sequence: Synthetic peptide
  REGION 1..7: note = XENP019046 vlCDR2
YASWRYT

SEQ ID NO: 20950 - protein, 9 aa, synthetic construct
  REGION 1..9: note = Description of Artificial Sequence: Synthetic peptide
  REGION 1..9: note = XENP019046 vlCDR3
QQDWSSPRT

SEQ ID NO: 20951 - protein, 451 aa, synthetic construct; identical to SEQ ID NO: 16221
  REGION 1..451: note = Description of Artificial Sequence: Synthetic polypeptide
  REGION 1..451: note = XENP019047 1G6_H1_L1.170_IgG1_PVA_/S267K Heavy Chain

SEQ ID NO: 20952 - protein, 122 aa, synthetic construct; identical to SEQ ID NO: 10922
  REGION 1..122: note = Description of Artificial Sequence: Synthetic polypeptide
  REGION 1..122: note = VH of XENP019047

SEQ ID NO: 20953 - protein, 5 aa, synthetic construct
  REGION 1..5: note = Description of Artificial Sequence: Synthetic peptide
  REGION 1..5: note = XENP019047 vhCDR1
NYWMN

SEQ ID NO: 20954 - protein, 19 aa, synthetic construct
  REGION 1..19: note = Description of Artificial Sequence: Synthetic peptide
  REGION 1..19: note = XENP019047 vhCDR2
EIRLKSNNYATHYAEPVKG

SEQ ID NO: 20955 - protein, 11 aa, synthetic construct
  REGION 1..11: note = Description of Artificial Sequence: Synthetic peptide
  REGION 1..11: note = XENP019047 vhCDR3
YYGNYGGYFDV

SEQ ID NO: 20956 - protein, 214 aa, synthetic construct
  REGION 1..214: note = Description of Artificial Sequence: Synthetic polypeptide
  REGION 1..214: note = XENP019047 1G6_H1_L1.170_IgG1_PVA_/S267K Light Chain
SIVMTQSPATLSVSPGERATLSCRASQSVSNDVAWYQQKPGQSPRLLINYASWRYTGVPDRFTGSGYGTEFTLTISSLQSEDFAVYFCQQDGSSPRTFGGGTKVEIKRTVAAPSVFIFPPSDEQLKSGTASVVCLLNNFYPREAKVQWKVDNALQSGNSQESVTEQDSKDSTYSLSSTLTLSKADYEKHKVYACEVTHQGLSSPVTKSFNRGEC

SEQ ID NO: 20957 - protein, 107 aa, synthetic construct; identical to SEQ ID NO: 15249
  REGION 1..107: note = Description of Artificial Sequence: Synthetic polypeptide
  REGION 1..107: note = VL of XENP019047

SEQ ID NO: 20958 - protein, 11 aa, synthetic construct
  REGION 1..11: note = Description of Artificial Sequence: Synthetic peptide
  REGION 1..11: note = XENP019047 vlCDR1
RASQSVSNDVA

SEQ ID NO: 20959 - protein, 7 aa, synthetic construct
  REGION 1..7: note = Description of Artificial Sequence: Synthetic peptide
  REGION 1..7: note = XENP019047 vlCDR2
YASWRYT

SEQ ID NO: 20960 - protein, 9 aa, synthetic construct
  REGION 1..9: note = Description of Artificial Sequence: Synthetic peptide
  REGION 1..9: note = XENP019047 vlCDR3
QQDGSSPRT

SEQ ID NO: 20961 - protein, 451 aa, synthetic construct; identical to SEQ ID NO: 16221
  REGION 1..451: note = Description of Artificial Sequence: Synthetic polypeptide
  REGION 1..451: note = XENP019048 1G6_H1_L1.171_IgG1_PVA_/S267K Heavy Chain

SEQ ID NO: 20962 - protein, 122 aa, synthetic construct; identical to SEQ ID NO: 10922
  REGION 1..122: note = Description of Artificial Sequence: Synthetic polypeptide
  REGION 1..122: note = VH of XENP019048

SEQ ID NO: 20963 - protein, 5 aa, synthetic construct
  REGION 1..5: note = Description of Artificial Sequence: Synthetic peptide
  REGION 1..5: note = XENP019048 vhCDR1
NYWMN

SEQ ID NO: 20964 - protein, 19 aa, synthetic construct
  REGION 1..19: note = Description of Artificial Sequence: Synthetic peptide
  REGION 1..19: note = XENP019048 vhCDR2
EIRLKSNNYATHYAEPVKG

SEQ ID NO: 20965 - protein, 11 aa, synthetic construct
  REGION 1..11: note = Description of Artificial Sequence: Synthetic peptide
  REGION 1..11: note = XENP019048 vhCDR3
YYGNYGGYFDV

SEQ ID NO: 20966 - protein, 214 aa, synthetic construct
  REGION 1..214: note = Description of Artificial Sequence: Synthetic polypeptide
  REGION 1..214: note = XENP019048 1G6_H1_L1.171_IgG1_PVA_/S267K Light Chain
SIVMTQSPATLSVSPGERATLSCRASQSVSNDVAWYQQKPGQSPRLLINYASHRYTSVPDRFTGSGYGTEFTLTISSLQSEDFAVYFCQQDWSSPRTFGGGTKVEIKRTVAAPSVFIFPPSDEQLKSGTASVVCLLNNFYPREAKVQWKVDNALQSGNSQESVTEQDSKDSTYSLSSTLTLSKADYEKHKVYACEVTHQGLSSPVTKSFNRGEC

SEQ ID NO: 20967 - protein, 107 aa, synthetic construct; identical to SEQ ID NO: 15258
  REGION 1..107: note = Description of Artificial Sequence: Synthetic polypeptide
  REGION 1..107: note = VL of XENP019048

SEQ ID NO: 20968 - protein, 11 aa, synthetic construct
  REGION 1..11: note = Description of Artificial Sequence: Synthetic peptide
  REGION 1..11: note = XENP019048 vlCDR1
RASQSVSNDVA

SEQ ID NO: 20969 - protein, 7 aa, synthetic construct
  REGION 1..7: note = Description of Artificial Sequence: Synthetic peptide
  REGION 1..7: note = XENP019048 vlCDR2
YASHRYT

SEQ ID NO: 20970 - protein, 9 aa, synthetic construct
  REGION 1..9: note = Description of Artificial Sequence: Synthetic peptide
  REGION 1..9: note = XENP019048 vlCDR3
QQDWSSPRT

SEQ ID NO: 20971 - protein, 451 aa, synthetic construct; identical to SEQ ID NO: 16221
  REGION 1..451: note = Description of Artificial Sequence: Synthetic polypeptide
  REGION 1..451: note = XENP019049 1G6_H1_L1.172_IgG1_PVA_/S267K Heavy Chain

SEQ ID NO: 20972 - protein, 122 aa, synthetic construct; identical to SEQ ID NO: 10922
  REGION 1..122: note = Description of Artificial Sequence: Synthetic polypeptide
  REGION 1..122: note = VH of XENP019049

SEQ ID NO: 20973 - protein, 5 aa, synthetic construct
  REGION 1..5: note = Description of Artificial Sequence: Synthetic peptide
  REGION 1..5: note = XENP019049 vhCDR1
NYWMN

SEQ ID NO: 20974 - protein, 19 aa, synthetic construct
  REGION 1..19: note = Description of Artificial Sequence: Synthetic peptide
  REGION 1..19: note = XENP019049 vhCDR2
EIRLKSNNYATHYAEPVKG

SEQ ID NO: 20975 - protein, 11 aa, synthetic construct
  REGION 1..11: note = Description of Artificial Sequence: Synthetic peptide
  REGION 1..11: note = XENP019049 vhCDR3
YYGNYGGYFDV

SEQ ID NO: 20976 - protein, 214 aa, synthetic construct
  REGION 1..214: note = Description of Artificial Sequence: Synthetic polypeptide
  REGION 1..214: note = XENP019049 1G6_H1_L1.172_IgG1_PVA_/S267K Light Chain
SIVMTQSPATLSVSPGERATLSCRASQSVSNDVAWYQQKPGQSPRLLINYASHRYTSVPDRFTGSGYGTEFTLTISSLQSEDFAVYFCQQDFSSPRTFGGGTKVEIKRTVAAPSVFIFPPSDEQLKSGTASVVCLLNNFYPREAKVQWKVDNALQSGNSQESVTEQDSKDSTYSLSSTLTLSKADYEKHKVYACEVTHQGLSSPVTKSFNRGEC

SEQ ID NO: 20977 - protein, 107 aa, synthetic construct; identical to SEQ ID NO: 15267
  REGION 1..107: note = Description of Artificial Sequence: Synthetic polypeptide
  REGION 1..107: note = VL of XENP019049

SEQ ID NO: 20978 - protein, 11 aa, synthetic construct
  REGION 1..11: note = Description of Artificial Sequence: Synthetic peptide
  REGION 1..11: note = XENP019049 vlCDR1
RASQSVSNDVA

SEQ ID NO: 20979 - protein, 7 aa, synthetic construct
  REGION 1..7: note = Description of Artificial Sequence: Synthetic peptide
  REGION 1..7: note = XENP019049 vlCDR2
YASHRYT

SEQ ID NO: 20980 - protein, 9 aa, synthetic construct
  REGION 1..9: note = Description of Artificial Sequence: Synthetic peptide
  REGION 1..9: note = XENP019049 vlCDR3
QQDFSSPRT

SEQ ID NO: 20981 - protein, 451 aa, synthetic construct; identical to SEQ ID NO: 16221
  REGION 1..451: note = Description of Artificial Sequence: Synthetic polypeptide
  REGION 1..451: note = XENP019050 1G6_H1_L1.173_IgG1_PVA_/S267K Heavy Chain

SEQ ID NO: 20982 - protein, 122 aa, synthetic construct; identical to SEQ ID NO: 10922
  REGION 1..122: note = Description of Artificial Sequence: Synthetic polypeptide
  REGION 1..122: note = VH of XENP019050

SEQ ID NO: 20983 - protein, 5 aa, synthetic construct
  REGION 1..5: note = Description of Artificial Sequence: Synthetic peptide
  REGION 1..5: note = XENP019050 vhCDR1
NYWMN

SEQ ID NO: 20984 - protein, 19 aa, synthetic construct
  REGION 1..19: note = Description of Artificial Sequence: Synthetic peptide
  REGION 1..19: note = XENP019050 vhCDR2
EIRLKSNNYATHYAEPVKG

SEQ ID NO: 20985 - protein, 11 aa, synthetic construct
  REGION 1..11: note = Description of Artificial Sequence: Synthetic peptide
  REGION 1..11: note = XENP019050 vhCDR3
YYGNYGGYFDV

SEQ ID NO: 20986 - protein, 214 aa, synthetic construct
  REGION 1..214: note = Description of Artificial Sequence: Synthetic polypeptide
  REGION 1..214: note = XENP019050 1G6_H1_L1.173_IgG1_PVA_/S267K Light Chain
SIVMTQSPATLSVSPGERATLSCRASQSVSNDVAWYQQKPGQSPRLLINYASHRYTGVPDRFTGSGYGTEFTLTISSLQSEDFAVYFCQQDFGSPRTFGGGTKVEIKRTVAAPSVFIFPPSDEQLKSGTASVVCLLNNFYPREAKVQWKVDNALQSGNSQESVTEQDSKDSTYSLSSTLTLSKADYEKHKVYACEVTHQGLSSPVTKSFNRGEC

SEQ ID NO: 20987 - protein, 107 aa, synthetic construct; identical to SEQ ID NO: 15276
  REGION 1..107: note = Description of Artificial Sequence: Synthetic polypeptide
  REGION 1..107: note = VL of XENP019050

SEQ ID NO: 20988 - protein, 11 aa, synthetic construct
  REGION 1..11: note = Description of Artificial Sequence: Synthetic peptide
  REGION 1..11: note = XENP019050 vlCDR1
RASQSVSNDVA

SEQ ID NO: 20989 - protein, 7 aa, synthetic construct
  REGION 1..7: note = Description of Artificial Sequence: Synthetic peptide
  REGION 1..7: note = XENP019050 vlCDR2
YASHRYT

SEQ ID NO: 20990 - protein, 9 aa, synthetic construct
  REGION 1..9: note = Description of Artificial Sequence: Synthetic peptide
  REGION 1..9: note = XENP019050 vlCDR3
QQDFGSPRT

SEQ ID NO: 20991 - protein, 451 aa, synthetic construct; identical to SEQ ID NO: 16221
  REGION 1..451: note = Description of Artificial Sequence: Synthetic polypeptide
  REGION 1..451: note = XENP019051 1G6_H1_L1.174_IgG1_PVA_/S267K Heavy Chain

SEQ ID NO: 20992 - protein, 122 aa, synthetic construct; identical to SEQ ID NO: 10922
  REGION 1..122: note = Description of Artificial Sequence: Synthetic polypeptide
  REGION 1..122: note = VH of XENP019051

SEQ ID NO: 20993 - protein, 5 aa, synthetic construct
  REGION 1..5: note = Description of Artificial Sequence: Synthetic peptide
  REGION 1..5: note = XENP019051 vhCDR1
NYWMN

SEQ ID NO: 20994 - protein, 19 aa, synthetic construct
  REGION 1..19: note = Description of Artificial Sequence: Synthetic peptide
  REGION 1..19: note = XENP019051 vhCDR2
EIRLKSNNYATHYAEPVKG

SEQ ID NO: 20995 - protein, 11 aa, synthetic construct
  REGION 1..11: note = Description of Artificial Sequence: Synthetic peptide
  REGION 1..11: note = XENP019051 vhCDR3
YYGNYGGYFDV

SEQ ID NO: 20996 - protein, 214 aa, synthetic construct
  REGION 1..214: note = Description of Artificial Sequence: Synthetic polypeptide
  REGION 1..214: note = XENP019051 1G6_H1_L1.174_IgG1_PVA_/S267K Light Chain
SIVMTQSPATLSVSPGERATLSCRASQSVSNDVAWYQQKPGQSPRLLINYASHRYTGVPDRFTGSGYGTEFTLTISSLQSEDFAVYFCQQDWGSPRTFGGGTKVEIKRTVAAPSVFIFPPSDEQLKSGTASVVCLLNNFYPREAKVQWKVDNALQSGNSQESVTEQDSKDSTYSLSSTLTLSKADYEKHKVYACEVTHQGLSSPVTKSFNRGEC

SEQ ID NO: 20997 - protein, 107 aa, synthetic construct; identical to SEQ ID NO: 15285
  REGION 1..107: note = Description of Artificial Sequence: Synthetic polypeptide
  REGION 1..107: note = VL of XENP019051

SEQ ID NO: 20998 - protein, 11 aa, synthetic construct
  REGION 1..11: note = Description of Artificial Sequence: Synthetic peptide
  REGION 1..11: note = XENP019051 vlCDR1
RASQSVSNDVA

SEQ ID NO: 20999 - protein, 7 aa, synthetic construct
  REGION 1..7: note = Description of Artificial Sequence: Synthetic peptide
  REGION 1..7: note = XENP019051 vlCDR2
YASHRYT

SEQ ID NO: 21000 - protein, 9 aa, synthetic construct
  REGION 1..9: note = Description of Artificial Sequence: Synthetic peptide
  REGION 1..9: note = XENP019051 vlCDR3
QQDWGSPRT

SEQ ID NO: 21001 - protein, 451 aa, synthetic construct; identical to SEQ ID NO: 16221
  REGION 1..451: note = Description of Artificial Sequence: Synthetic polypeptide
  REGION 1..451: note = XENP019052 1G6_H1_L1.175_IgG1_PVA_/S267K Heavy Chain

SEQ ID NO: 21002 - protein, 122 aa, synthetic construct; identical to SEQ ID NO: 10922
  REGION 1..122: note = Description of Artificial Sequence: Synthetic polypeptide
  REGION 1..122: note = VH of XENP019052

SEQ ID NO: 21003 - protein, 5 aa, synthetic construct
  REGION 1..5: note = Description of Artificial Sequence: Synthetic peptide
  REGION 1..5: note = XENP019052 vhCDR1
NYWMN

SEQ ID NO: 21004 - protein, 19 aa, synthetic construct
  REGION 1..19: note = Description of Artificial Sequence: Synthetic peptide
  REGION 1..19: note = XENP019052 vhCDR2
EIRLKSNNYATHYAEPVKG

SEQ ID NO: 21005 - protein, 11 aa, synthetic construct
  REGION 1..11: note = Description of Artificial Sequence: Synthetic peptide
  REGION 1..11: note = XENP019052 vhCDR3
YYGNYGGYFDV

SEQ ID NO: 21006 - protein, 214 aa, synthetic construct
  REGION 1..214: note = Description of Artificial Sequence: Synthetic polypeptide
  REGION 1..214: note = XENP019052 1G6_H1_L1.175_IgG1_PVA_/S267K Light Chain
SIVMTQSPATLSVSPGERATLSCRASQSVGNDVAWYQQKPGQSPRLLINYASHRYTSVPDRFTGSGYGTEFTLTISSLQSEDFAVYFCQQDWSSPRTFGGGTKVEIKRTVAAPSVFIFPPSDEQLKSGTASVVCLLNNFYPREAKVQWKVDNALQSGNSQESVTEQDSKDSTYSLSSTLTLSKADYEKHKVYACEVTHQGLSSPVTKSFNRGEC

SEQ ID NO: 21007 - protein, 107 aa, synthetic construct; identical to SEQ ID NO: 15294
  REGION 1..107: note = Description of Artificial Sequence: Synthetic polypeptide
  REGION 1..107: note = VL of XENP019052

SEQ ID NO: 21008 - protein, 11 aa, synthetic construct
  REGION 1..11: note = Description of Artificial Sequence: Synthetic peptide
  REGION 1..11: note = XENP019052 vlCDR1
RASQSVGNDVA

SEQ ID NO: 21009 - protein, 7 aa, synthetic construct
  REGION 1..7: note = Description of Artificial Sequence: Synthetic peptide
  REGION 1..7: note = XENP019052 vlCDR2
YASHRYT

SEQ ID NO: 21010 - protein, 9 aa, synthetic construct
  REGION 1..9: note = Description of Artificial Sequence: Synthetic peptide
  REGION 1..9: note = XENP019052 vlCDR3
QQDWSSPRT

SEQ ID NO: 21011 - protein, 451 aa, synthetic construct; identical to SEQ ID NO: 16221
  REGION 1..451: note = Description of Artificial Sequence: Synthetic polypeptide
  REGION 1..451: note = XENP019053 1G6_H1_L1.176_IgG1_PVA_/S267K Heavy Chain

SEQ ID NO: 21012 - protein, 122 aa, synthetic construct; identical to SEQ ID NO: 10922
  REGION 1..122: note = Description of Artificial Sequence: Synthetic polypeptide
  REGION 1..122: note = VH of XENP019053

SEQ ID NO: 21013 - protein, 5 aa, synthetic construct
  REGION 1..5: note = Description of Artificial Sequence: Synthetic peptide
  REGION 1..5: note = XENP019053 vhCDR1
NYWMN

SEQ ID NO: 21014 - protein, 19 aa, synthetic construct
  REGION 1..19: note = Description of Artificial Sequence: Synthetic peptide
  REGION 1..19: note = XENP019053 vhCDR2
EIRLKSNNYATHYAEPVKG

SEQ ID NO: 21015 - protein, 11 aa, synthetic construct
  REGION 1..11: note = Description of Artificial Sequence: Synthetic peptide
  REGION 1..11: note = XENP019053 vhCDR3
YYGNYGGYFDV

SEQ ID NO: 21016 - protein, 214 aa, synthetic construct
  REGION 1..214: note = Description of Artificial Sequence: Synthetic polypeptide
  REGION 1..214: note = XENP019053 1G6_H1_L1.176_IgG1_PVA_/S267K Light Chain
SIVMTQSPATLSVSPGERATLSCRASQSVGNDVAWYQQKPGQSPRLLINYASWRYTSVPDRFTGSGYGTEFTLTISSLQSEDFAVYFCQQDYSSPRTFGGGTKVEIKRTVAAPSVFIFPPSDEQLKSGTASVVCLLNNFYPREAKVQWKVDNALQSGNSQESVTEQDSKDSTYSLSSTLTLSKADYEKHKVYACEVTHQGLSSPVTKSFNRGEC

SEQ ID NO: 21017 - protein, 107 aa, synthetic construct; identical to SEQ ID NO: 15303
  REGION 1..107: note = Description of Artificial Sequence: Synthetic polypeptide
  REGION 1..107: note = VL of XENP019053

SEQ ID NO: 21018 - protein, 11 aa, synthetic construct
  REGION 1..11: note = Description of Artificial Sequence: Synthetic peptide
  REGION 1..11: note = XENP019053 vlCDR1
RASQSVGNDVA

SEQ ID NO: 21019 - protein, 7 aa, synthetic construct
  REGION 1..7: note = Description of Artificial Sequence: Synthetic peptide
  REGION 1..7: note = XENP019053 vlCDR2
YASWRYT

SEQ ID NO: 21020 - protein, 9 aa, synthetic construct
  REGION 1..9: note = Description of Artificial Sequence: Synthetic peptide
  REGION 1..9: note = XENP019053 vlCDR3
QQDYSSPRT

SEQ ID NO: 21021 - protein, 451 aa, synthetic construct; identical to SEQ ID NO: 16221
  REGION 1..451: note = Description of Artificial Sequence: Synthetic polypeptide
  REGION 1..451: note = XENP019054 1G6_H1_L1.177_IgG1_PVA_/S267K Heavy Chain

SEQ ID NO: 21022 - protein, 122 aa, synthetic construct; identical to SEQ ID NO: 10922
  REGION 1..122: note = Description of Artificial Sequence: Synthetic polypeptide
  REGION 1..122: note = VH of XENP019054

SEQ ID NO: 21023 - protein, 5 aa, synthetic construct
  REGION 1..5: note = Description of Artificial Sequence: Synthetic peptide
  REGION 1..5: note = XENP019054 vhCDR1
NYWMN

SEQ ID NO: 21024 - protein, 19 aa, synthetic construct
  REGION 1..19: note = Description of Artificial Sequence: Synthetic peptide
  REGION 1..19: note = XENP019054 vhCDR2
EIRLKSNNYATHYAEPVKG

SEQ ID NO: 21025 - protein, 11 aa, synthetic construct
  REGION 1..11: note = Description of Artificial Sequence: Synthetic peptide
  REGION 1..11: note = XENP019054 vhCDR3
YYGNYGGYFDV

SEQ ID NO: 21026 - protein, 214 aa, synthetic construct
  REGION 1..214: note = Description of Artificial Sequence: Synthetic polypeptide
  REGION 1..214: note = XENP019054 1G6_H1_L1.177_IgG1_PVA_/S267K Light Chain
SIVMTQSPATLSVSPGERATLSCRASQSVGNDVAWYQQKPGQSPRLLINYASHRYTSVPDRFTGSGYGTEFTLTISSLQSEDFAVYFCQQDFSSPRTFGGGTKVEIKRTVAAPSVFIFPPSDEQLKSGTASVVCLLNNFYPREAKVQWKVDNALQSGNSQESVTEQDSKDSTYSLSSTLTLSKADYEKHKVYACEVTHQGLSSPVTKSFNRGEC

SEQ ID NO: 21027 - protein, 107 aa, synthetic construct; identical to SEQ ID NO: 15312
  REGION 1..107: note = Description of Artificial Sequence: Synthetic polypeptide
  REGION 1..107: note = VL of XENP019054

SEQ ID NO: 21028 - protein, 11 aa, synthetic construct
  REGION 1..11: note = Description of Artificial Sequence: Synthetic peptide
  REGION 1..11: note = XENP019054 vlCDR1
RASQSVGNDVA

SEQ ID NO: 21029 - protein, 7 aa, synthetic construct
  REGION 1..7: note = Description of Artificial Sequence: Synthetic peptide
  REGION 1..7: note = XENP019054 vlCDR2
YASHRYT

SEQ ID NO: 21030 - protein, 9 aa, synthetic construct
  REGION 1..9: note = Description of Artificial Sequence: Synthetic peptide
  REGION 1..9: note = XENP019054 vlCDR3
QQDFSSPRT

SEQ ID NO: 21031 - protein, 451 aa, synthetic construct; identical to SEQ ID NO: 16221
  REGION 1..451: note = Description of Artificial Sequence: Synthetic polypeptide
  REGION 1..451: note = XENP019055 1G6_H1_L1.178_IgG1_PVA_/S267K Heavy Chain

SEQ ID NO: 21032 - protein, 122 aa, synthetic construct; identical to SEQ ID NO: 10922
  REGION 1..122: note = Description of Artificial Sequence: Synthetic polypeptide
  REGION 1..122: note = VH of XENP019055

SEQ ID NO: 21033 - protein, 5 aa, synthetic construct
  REGION 1..5: note = Description of Artificial Sequence: Synthetic peptide
  REGION 1..5: note = XENP019055 vhCDR1
NYWMN

SEQ ID NO: 21034 - protein, 19 aa, synthetic construct
  REGION 1..19: note = Description of Artificial Sequence: Synthetic peptide
  REGION 1..19: note = XENP019055 vhCDR2
EIRLKSNNYATHYAEPVKG

SEQ ID NO: 21035 - protein, 11 aa, synthetic construct
  REGION 1..11: note = Description of Artificial Sequence: Synthetic peptide
  REGION 1..11: note = XENP019055 vhCDR3
YYGNYGGYFDV

SEQ ID NO: 21036 - protein, 214 aa, synthetic construct
  REGION 1..214: note = Description of Artificial Sequence: Synthetic polypeptide
  REGION 1..214: note = XENP019055 1G6_H1_L1.178_IgG1_PVA_/S267K Light Chain
SIVMTQSPATLSVSPGERATLSCRASQSVGNDVAWYQQKPGQSPRLLINYASHRYTSVPDRFTGSGYGTEFTLTISSLQSEDFAVYFCQQDGSSPRTFGGGTKVEIKRTVAAPSVFIFPPSDEQLKSGTASVVCLLNNFYPREAKVQWKVDNALQSGNSQESVTEQDSKDSTYSLSSTLTLSKADYEKHKVYACEVTHQGLSSPVTKSFNRGEC

SEQ ID NO: 21037 - protein, 107 aa, synthetic construct; identical to SEQ ID NO: 15321
  REGION 1..107: note = Description of Artificial Sequence: Synthetic polypeptide
  REGION 1..107: note = VL of XENP019055

SEQ ID NO: 21038 - protein, 11 aa, synthetic construct
  REGION 1..11: note = Description of Artificial Sequence: Synthetic peptide
  REGION 1..11: note = XENP019055 vlCDR1
RASQSVGNDVA

SEQ ID NO: 21039 - protein, 7 aa, synthetic construct
  REGION 1..7: note = Description of Artificial Sequence: Synthetic peptide
  REGION 1..7: note = XENP019055 vlCDR2
YASHRYT

SEQ ID NO: 21040 - protein, 9 aa, synthetic construct
  REGION 1..9: note = Description of Artificial Sequence: Synthetic peptide
  REGION 1..9: note = XENP019055 vlCDR3
QQDGSSPRT

SEQ ID NO: 21041 - protein, 451 aa, synthetic construct; identical to SEQ ID NO: 16221
  REGION 1..451: note = Description of Artificial Sequence: Synthetic polypeptide
  REGION 1..451: note = XENP019056 1G6_H1_L1.179_IgG1_PVA_/S267K Heavy Chain

SEQ ID NO: 21042 - protein, 122 aa, synthetic construct; identical to SEQ ID NO: 10922
  REGION 1..122: note = Description of Artificial Sequence: Synthetic polypeptide
  REGION 1..122: note = VH of XENP019056

SEQ ID NO: 21043 - protein, 5 aa, synthetic construct
  REGION 1..5: note = Description of Artificial Sequence: Synthetic peptide
  REGION 1..5: note = XENP019056 vhCDR1
NYWMN

SEQ ID NO: 21044 - protein, 19 aa, synthetic construct
  REGION 1..19: note = Description of Artificial Sequence: Synthetic peptide
  REGION 1..19: note = XENP019056 vhCDR2
EIRLKSNNYATHYAEPVKG

SEQ ID NO: 21045 - protein, 11 aa, synthetic construct
  REGION 1..11: note = Description of Artificial Sequence: Synthetic peptide
  REGION 1..11: note = XENP019056 vhCDR3
YYGNYGGYFDV

SEQ ID NO: 21046 - protein, 214 aa, synthetic construct
  REGION 1..214: note = Description of Artificial Sequence: Synthetic polypeptide
  REGION 1..214: note = XENP019056 1G6_H1_L1.179_IgG1_PVA_/S267K Light Chain
SIVMTQSPATLSVSPGERATLSCRASQSVSNDVAWYQQKPGQSPRLLINYASWRYTSVPDRFTGSGYGTEFTLTISSLQSEDFAVYFCQQDFSSPRTFGGGTKVEIKRTVAAPSVFIFPPSDEQLKSGTASVVCLLNNFYPREAKVQWKVDNALQSGNSQESVTEQDSKDSTYSLSSTLTLSKADYEKHKVYACEVTHQGLSSPVTKSFNRGEC

SEQ ID NO: 21047 - protein, 107 aa, synthetic construct; identical to SEQ ID NO: 15330
  REGION 1..107: note = Description of Artificial Sequence: Synthetic polypeptide
  REGION 1..107: note = VL of XENP019056

SEQ ID NO: 21048 - protein, 11 aa, synthetic construct
  REGION 1..11: note = Description of Artificial Sequence: Synthetic peptide
  REGION 1..11: note = XENP019056 vlCDR1
RASQSVSNDVA

SEQ ID NO: 21049 - protein, 7 aa, synthetic construct
  REGION 1..7: note = Description of Artificial Sequence: Synthetic peptide
  REGION 1..7: note = XENP019056 vlCDR2
YASWRYT

SEQ ID NO: 21050 - protein, 9 aa, synthetic construct
  REGION 1..9: note = Description of Artificial Sequence: Synthetic peptide
  REGION 1..9: note = XENP019056 vlCDR3
QQDFSSPRT

SEQ ID NO: 21051 - protein, 451 aa, synthetic construct; identical to SEQ ID NO: 16221
  REGION 1..451: note = Description of Artificial Sequence: Synthetic polypeptide
  REGION 1..451: note = XENP019057 1G6_H1_L1.180_IgG1_PVA_/S267K Heavy Chain

SEQ ID NO: 21052 - protein, 122 aa, synthetic construct; identical to SEQ ID NO: 10922
  REGION 1..122: note = Description of Artificial Sequence: Synthetic polypeptide
  REGION 1..122: note = VH of XENP019057

SEQ ID NO: 21053 - protein, 5 aa, synthetic construct
  REGION 1..5: note = Description of Artificial Sequence: Synthetic peptide
  REGION 1..5: note = XENP019057 vhCDR1
NYWMN

SEQ ID NO: 21054 - protein, 19 aa, synthetic construct
  REGION 1..19: note = Description of Artificial Sequence: Synthetic peptide
  REGION 1..19: note = XENP019057 vhCDR2
EIRLKSNNYATHYAEPVKG

SEQ ID NO: 21055 - protein, 11 aa, synthetic construct
  REGION 1..11: note = Description of Artificial Sequence: Synthetic peptide
  REGION 1..11: note = XENP019057 vhCDR3
YYGNYGGYFDV

SEQ ID NO: 21056 - protein, 214 aa, synthetic construct
  REGION 1..214: note = Description of Artificial Sequence: Synthetic polypeptide
  REGION 1..214: note = XENP019057 1G6_H1_L1.180_IgG1_PVA_/S267K Light Chain
SIVMTQSPATLSVSPGERATLSCRASQSVSNDVAWYQQKPGQSPRLLINYASWRYTSVPDRFTGSGYGTEFTLTISSLQSEDFAVYFCQQDWSSPRTFGGGTKVEIKRTVAAPSVFIFPPSDEQLKSGTASVVCLLNNFYPREAKVQWKVDNALQSGNSQESVTEQDSKDSTYSLSSTLTLSKADYEKHKVYACEVTHQGLSSPVTKSFNRGEC

SEQ ID NO: 21057 - protein, 107 aa, synthetic construct; identical to SEQ ID NO: 15339
  REGION 1..107: note = Description of Artificial Sequence: Synthetic polypeptide
  REGION 1..107: note = VL of XENP019057

SEQ ID NO: 21058 - protein, 11 aa, synthetic construct
  REGION 1..11: note = Description of Artificial Sequence: Synthetic peptide
  REGION 1..11: note = XENP019057 vlCDR1
RASQSVSNDVA

SEQ ID NO: 21059 - protein, 7 aa, synthetic construct
  REGION 1..7: note = Description of Artificial Sequence: Synthetic peptide
  REGION 1..7: note = XENP019057 vlCDR2
YASWRYT

SEQ ID NO: 21060 - protein, 9 aa, synthetic construct
  REGION 1..9: note = Description of Artificial Sequence: Synthetic peptide
  REGION 1..9: note = XENP019057 vlCDR3
QQDWSSPRT

SEQ ID NO: 21061 - protein, 451 aa, synthetic construct; identical to SEQ ID NO: 16221
  REGION 1..451: note = Description of Artificial Sequence: Synthetic polypeptide
  REGION 1..451: note = XENP019058 1G6_H1_L1.181_IgG1_PVA_/S267K Heavy Chain

SEQ ID NO: 21062 - protein, 122 aa, synthetic construct; identical to SEQ ID NO: 10922
  REGION 1..122: note = Description of Artificial Sequence: Synthetic polypeptide
  REGION 1..122: note = VH of XENP019058

SEQ ID NO: 21063 - protein, 5 aa, synthetic construct
  REGION 1..5: note = Description of Artificial Sequence: Synthetic peptide
  REGION 1..5: note = XENP019058 vhCDR1
NYWMN

SEQ ID NO: 21064 - protein, 19 aa, synthetic construct
  REGION 1..19: note = Description of Artificial Sequence: Synthetic peptide
  REGION 1..19: note = XENP019058 vhCDR2
EIRLKSNNYATHYAEPVKG

SEQ ID NO: 21065 - protein, 11 aa, synthetic construct
  REGION 1..11: note = Description of Artificial Sequence: Synthetic peptide
  REGION 1..11: note = XENP019058 vhCDR3
YYGNYGGYFDV

SEQ ID NO: 21066 - protein, 214 aa, synthetic construct
  REGION 1..214: note = Description of Artificial Sequence: Synthetic polypeptide
  REGION 1..214: note = XENP019058 1G6_H1_L1.181_IgG1_PVA_/S267K Light Chain
SIVMTQSPATLSVSPGERATLSCRASQSVSNDVAWYQQKPGQSPRLLINYASWRYTSVPDRFTGSGYGTEFTLTISSLQSEDFAVYFCQQDGSSPRTFGGGTKVEIKRTVAAPSVFIFPPSDEQLKSGTASVVCLLNNFYPREAKVQWKVDNALQSGNSQESVTEQDSKDSTYSLSSTLTLSKADYEKHKVYACEVTHQGLSSPVTKSFNRGEC

SEQ ID NO: 21067 - protein, 107 aa, synthetic construct; identical to SEQ ID NO: 15348
  REGION 1..107: note = Description of Artificial Sequence: Synthetic polypeptide
  REGION 1..107: note = VL of XENP019058

SEQ ID NO: 21068 - protein, 11 aa, synthetic construct
  REGION 1..11: note = Description of Artificial Sequence: Synthetic peptide
  REGION 1..11: note = XENP019058 vlCDR1
RASQSVSNDVA

SEQ ID NO: 21069 - protein, 7 aa, synthetic construct
  REGION 1..7: note = Description of Artificial Sequence: Synthetic peptide
  REGION 1..7: note = XENP019058 vlCDR2
YASWRYT

SEQ ID NO: 21070 - protein, 9 aa, synthetic construct
  REGION 1..9: note = Description of Artificial Sequence: Synthetic peptide
  REGION 1..9: note = XENP019058 vlCDR3
QQDGSSPRT

SEQ ID NO: 21071 - protein, 451 aa, synthetic construct; identical to SEQ ID NO: 16221
  REGION 1..451: note = Description of Artificial Sequence: Synthetic polypeptide
  REGION 1..451: note = XENP019059 1G6_H1_L1.182_IgG1_PVA_/S267K Heavy Chain

SEQ ID NO: 21072 - protein, 122 aa, synthetic construct; identical to SEQ ID NO: 10922
  REGION 1..122: note = Description of Artificial Sequence: Synthetic polypeptide
  REGION 1..122: note = VH of XENP019059

SEQ ID NO: 21073 - protein, 5 aa, synthetic construct
  REGION 1..5: note = Description of Artificial Sequence: Synthetic peptide
  REGION 1..5: note = XENP019059 vhCDR1
NYWMN

SEQ ID NO: 21074 - protein, 19 aa, synthetic construct
  REGION 1..19: note = Description of Artificial Sequence: Synthetic peptide
  REGION 1..19: note = XENP019059 vhCDR2
EIRLKSNNYATHYAEPVKG

SEQ ID NO: 21075 - protein, 11 aa, synthetic construct
  REGION 1..11: note = Description of Artificial Sequence: Synthetic peptide
  REGION 1..11: note = XENP019059 vhCDR3
YYGNYGGYFDV

SEQ ID NO: 21076 - protein, 214 aa, synthetic construct
  REGION 1..214: note = Description of Artificial Sequence: Synthetic polypeptide
  REGION 1..214: note = XENP019059 1G6_H1_L1.182_IgG1_PVA_/S267K Light Chain
SIVMTQSPATLSVSPGERATLSCRASQSVGNDVAWYQQKPGQSPRLLINYASWRYTSVPDRFTGSGYGTEFTLTISSLQSEDFAVYFCQQDWSSPRTFGGGTKVEIKRTVAAPSVFIFPPSDEQLKSGTASVVCLLNNFYPREAKVQWKVDNALQSGNSQESVTEQDSKDSTYSLSSTLTLSKADYEKHKVYACEVTHQGLSSPVTKSFNRGEC

SEQ ID NO: 21077 - protein, 107 aa, synthetic construct; identical to SEQ ID NO: 15357
  REGION 1..107: note = Description of Artificial Sequence: Synthetic polypeptide
  REGION 1..107: note = VL of XENP019059

SEQ ID NO: 21078 - protein, 11 aa, synthetic construct
  REGION 1..11: note = Description of Artificial Sequence: Synthetic peptide
  REGION 1..11: note = XENP019059 vlCDR1
RASQSVGNDVA

SEQ ID NO: 21079 - protein, 7 aa, synthetic construct
  REGION 1..7: note = Description of Artificial Sequence: Synthetic peptide
  REGION 1..7: note = XENP019059 vlCDR2
YASWRYT

SEQ ID NO: 21080 - protein, 9 aa, synthetic construct
  REGION 1..9: note = Description of Artificial Sequence: Synthetic peptide
  REGION 1..9: note = XENP019059 vlCDR3
QQDWSSPRT

SEQ ID NO: 21081 - protein, 451 aa, synthetic construct; identical to SEQ ID NO: 16221
  REGION 1..451: note = Description of Artificial Sequence: Synthetic polypeptide
  REGION 1..451: note = XENP019060 1G6_H1_L1.183_IgG1_PVA_/S267K Heavy Chain

SEQ ID NO: 21082 - protein, 122 aa, synthetic construct; identical to SEQ ID NO: 10922
  REGION 1..122: note = Description of Artificial Sequence: Synthetic polypeptide
  REGION 1..122: note = VH of XENP019060

SEQ ID NO: 21083 - protein, 5 aa, synthetic construct
  REGION 1..5: note = Description of Artificial Sequence: Synthetic peptide
  REGION 1..5: note = XENP019060 vhCDR1
NYWMN

SEQ ID NO: 21084 - protein, 19 aa, synthetic construct
  REGION 1..19: note = Description of Artificial Sequence: Synthetic peptide
  REGION 1..19: note = XENP019060 vhCDR2
EIRLKSNNYATHYAEPVKG

SEQ ID NO: 21085 - protein, 11 aa, synthetic construct
  REGION 1..11: note = Description of Artificial Sequence: Synthetic peptide
  REGION 1..11: note = XENP019060 vhCDR3
YYGNYGGYFDV

SEQ ID NO: 21086 - protein, 214 aa, synthetic construct
  REGION 1..214: note = Description of Artificial Sequence: Synthetic polypeptide
  REGION 1..214: note = XENP019060 1G6_H1_L1.183_IgG1_PVA_/S267K Light Chain
SIVMTQSPATLSVSPGERATLSCRASQSVGNDVAWYQQKPGQSPRLLINYASWRYTSVPDRFTGSGYGTEFTLTISSLQSEDFAVYFCQQDFSSPRTFGGGTKVEIKRTVAAPSVFIFPPSDEQLKSGTASVVCLLNNFYPREAKVQWKVDNALQSGNSQESVTEQDSKDSTYSLSSTLTLSKADYEKHKVYACEVTHQGLSSPVTKSFNRGEC

SEQ ID NO: 21087 - protein, 107 aa, synthetic construct; identical to SEQ ID NO: 15366
  REGION 1..107: note = Description of Artificial Sequence: Synthetic polypeptide
  REGION 1..107: note = VL of XENP019060

SEQ ID NO: 21088 - protein, 11 aa, synthetic construct
  REGION 1..11: note = Description of Artificial Sequence: Synthetic peptide
  REGION 1..11: note = XENP019060 vlCDR1
RASQSVGNDVA

SEQ ID NO: 21089 - protein, 7 aa, synthetic construct
  REGION 1..7: note = Description of Artificial Sequence: Synthetic peptide
  REGION 1..7: note = XENP019060 vlCDR2
YASWRYT

SEQ ID NO: 21090 - protein, 9 aa, synthetic construct
  REGION 1..9: note = Description of Artificial Sequence: Synthetic peptide
  REGION 1..9: note = XENP019060 vlCDR3
QQDFSSPRT

SEQ ID NO: 21091 - protein, 451 aa, synthetic construct; identical to SEQ ID NO: 16221
  REGION 1..451: note = Description of Artificial Sequence: Synthetic polypeptide
  REGION 1..451: note = XENP019061 1G6_H1_L1.184_IgG1_PVA_/S267K Heavy Chain

SEQ ID NO: 21092 - protein, 122 aa, synthetic construct; identical to SEQ ID NO: 10922
  REGION 1..122: note = Description of Artificial Sequence: Synthetic polypeptide
  REGION 1..122: note = VH of XENP019061

SEQ ID NO: 21093 - protein, 5 aa, synthetic construct
  REGION 1..5: note = Description of Artificial Sequence: Synthetic peptide
  REGION 1..5: note = XENP019061 vhCDR1
NYWMN

SEQ ID NO: 21094 - protein, 19 aa, synthetic construct
  REGION 1..19: note = Description of Artificial Sequence: Synthetic peptide
  REGION 1..19: note = XENP019061 vhCDR2
EIRLKSNNYATHYAEPVKG

SEQ ID NO: 21095 - protein, 11 aa, synthetic construct
  REGION 1..11: note = Description of Artificial Sequence: Synthetic peptide
  REGION 1..11: note = XENP019061 vhCDR3
YYGNYGGYFDV

SEQ ID NO: 21096 - protein, 214 aa, synthetic construct
  REGION 1..214: note = Description of Artificial Sequence: Synthetic polypeptide
  REGION 1..214: note = XENP019061 1G6_H1_L1.184_IgG1_PVA_/S267K Light Chain
SIVMTQSPATLSVSPGERATLSCRASQSVGNDVAWYQQKPGQSPRLLINYASWRYTSVPDRFTGSGYGTEFTLTISSLQSEDFAVYFCQQDGSSPRTFGGGTKVEIKRTVAAPSVFIFPPSDEQLKSGTASVVCLLNNFYPREAKVQWKVDNALQSGNSQESVTEQDSKDSTYSLSSTLTLSKADYEKHKVYACEVTHQGLSSPVTKSFNRGEC

SEQ ID NO: 21097 - protein, 107 aa, synthetic construct; identical to SEQ ID NO: 15375
  REGION 1..107: note = Description of Artificial Sequence: Synthetic polypeptide
  REGION 1..107: note = VL of XENP019061

SEQ ID NO: 21098 - protein, 11 aa, synthetic construct
  REGION 1..11: note = Description of Artificial Sequence: Synthetic peptide
  REGION 1..11: note = XENP019061 vlCDR1
RASQSVGNDVA

SEQ ID NO: 21099 - protein, 7 aa, synthetic construct
  REGION 1..7: note = Description of Artificial Sequence: Synthetic peptide
  REGION 1..7: note = XENP019061 vlCDR2
YASWRYT

SEQ ID NO: 21100 - protein, 9 aa, synthetic construct
  REGION 1..9: note = Description of Artificial Sequence: Synthetic peptide
  REGION 1..9: note = XENP019061 vlCDR3
QQDGSSPRT

SEQ ID NO: 21101 - protein, 451 aa, synthetic construct; identical to SEQ ID NO: 16221
  REGION 1..451: note = Description of Artificial Sequence: Synthetic polypeptide
  REGION 1..451: note = XENP019062 1G6_H1_L1.185_IgG1_PVA_/S267K Heavy Chain

SEQ ID NO: 21102 - protein, 122 aa, synthetic construct; identical to SEQ ID NO: 10922
  REGION 1..122: note = Description of Artificial Sequence: Synthetic polypeptide
  REGION 1..122: note = VH of XENP019062

SEQ ID NO: 21103 - protein, 5 aa, synthetic construct
  REGION 1..5: note = Description of Artificial Sequence: Synthetic peptide
  REGION 1..5: note = XENP019062 vhCDR1
NYWMN

SEQ ID NO: 21104 - protein, 19 aa, synthetic construct
  REGION 1..19: note = Description of Artificial Sequence: Synthetic peptide
  REGION 1..19: note = XENP019062 vhCDR2
EIRLKSNNYATHYAEPVKG

SEQ ID NO: 21105 - protein, 11 aa, synthetic construct
  REGION 1..11: note = Description of Artificial Sequence: Synthetic peptide
  REGION 1..11: note = XENP019062 vhCDR3
YYGNYGGYFDV

SEQ ID NO: 21106 - protein, 214 aa, synthetic construct
  REGION 1..214: note = Description of Artificial Sequence: Synthetic polypeptide
  REGION 1..214: note = XENP019062 1G6_H1_L1.185_IgG1_PVA_/S267K Light Chain
EIVMTQSPATLSVSPGERATLSCRASQSVSNDLAWYQQKPGQSPRLLINYASHRYTGVPARFSGSGYGTEFTLTISSLQSEDFAVYYCQQDYSSPRTFGGGTKVEIKRTVAAPSVFIFPPSDEQLKSGTASVVCLLNNFYPREAKVQWKVDNALQSGNSQESVTEQDSKDSTYSLSSTLTLSKADYEKHKVYACEVTHQGLSSPVTKSFNRGEC

SEQ ID NO: 21107 - protein, 107 aa, synthetic construct; identical to SEQ ID NO: 15384
  REGION 1..107: note = Description of Artificial Sequence: Synthetic polypeptide
  REGION 1..107: note = VL of XENP019062

SEQ ID NO: 21108 - protein, 11 aa, synthetic construct
  REGION 1..11: note = Description of Artificial Sequence: Synthetic peptide
  REGION 1..11: note = XENP019062 vlCDR1
RASQSVSNDLA

SEQ ID NO: 21109 - protein, 7 aa, synthetic construct
  REGION 1..7: note = Description of Artificial Sequence: Synthetic peptide
  REGION 1..7: note = XENP019062 vlCDR2
YASHRYT

SEQ ID NO: 21110 - protein, 9 aa, synthetic construct
  REGION 1..9: note = Description of Artificial Sequence: Synthetic peptide
  REGION 1..9: note = XENP019062 vlCDR3
QQDYSSPRT

SEQ ID NO: 21111 - protein, 451 aa, synthetic construct; identical to SEQ ID NO: 16221
  REGION 1..451: note = Description of Artificial Sequence: Synthetic polypeptide
  REGION 1..451: note = XENP019063 1G6_H1_L1.186_IgG1_PVA_/S267K Heavy Chain

SEQ ID NO: 21112 - protein, 122 aa, synthetic construct; identical to SEQ ID NO: 10922
  REGION 1..122: note = Description of Artificial Sequence: Synthetic polypeptide
  REGION 1..122: note = VH of XENP019063

SEQ ID NO: 21113 - protein, 5 aa, synthetic construct
  REGION 1..5: note = Description of Artificial Sequence: Synthetic peptide
  REGION 1..5: note = XENP019063 vhCDR1
NYWMN

SEQ ID NO: 21114 - protein, 19 aa, synthetic construct
  REGION 1..19: note = Description of Artificial Sequence: Synthetic peptide
  REGION 1..19: note = XENP019063 vhCDR2
EIRLKSNNYATHYAEPVKG

SEQ ID NO: 21115 - protein, 11 aa, synthetic construct
  REGION 1..11: note = Description of Artificial Sequence: Synthetic peptide
  REGION 1..11: note = XENP019063 vhCDR3
YYGNYGGYFDV

SEQ ID NO: 21116 - protein, 214 aa, synthetic construct
  REGION 1..214: note = Description of Artificial Sequence: Synthetic polypeptide
  REGION 1..214: note = XENP019063 1G6_H1_L1.186_IgG1_PVA_/S267K Light Chain
DIVMTQSPATLSVSPGERATLSCRASQSVSNDLAWYQQKPGQSPRLLINYASHRYTGVPDRFSGSGYGTEFTLTISSLQSEDFAVYYCQQDYSSPRTFGGGTKVEIKRTVAAPSVFIFPPSDEQLKSGTASVVCLLNNFYPREAKVQWKVDNALQSGNSQESVTEQDSKDSTYSLSSTLTLSKADYEKHKVYACEVTHQGLSSPVTKSFNRGEC

SEQ ID NO: 21117 - protein, 107 aa, synthetic construct; identical to SEQ ID NO: 15393
  REGION 1..107: note = Description of Artificial Sequence: Synthetic polypeptide
  REGION 1..107: note = VL of XENP019063

SEQ ID NO: 21118 - protein, 11 aa, synthetic construct
  REGION 1..11: note = Description of Artificial Sequence: Synthetic peptide
  REGION 1..11: note = XENP019063 vlCDR1
RASQSVSNDLA

SEQ ID NO: 21119 - protein, 7 aa, synthetic construct
  REGION 1..7: note = Description of Artificial Sequence: Synthetic peptide
  REGION 1..7: note = XENP019063 vlCDR2
YASHRYT

SEQ ID NO: 21120 - protein, 9 aa, synthetic construct
  REGION 1..9: note = Description of Artificial Sequence: Synthetic peptide
  REGION 1..9: note = XENP019063 vlCDR3
QQDYSSPRT

SEQ ID NO: 21121 - protein, 451 aa, synthetic construct; identical to SEQ ID NO: 20621
  REGION 1..451: note = Description of Artificial Sequence: Synthetic polypeptide
  REGION 1..451: note = XENP019160 1G6_H1.269_L1.116_IgG1_PVA_/S267K Heavy Chain

SEQ ID NO: 21122 - protein, 122 aa, synthetic construct; identical to SEQ ID NO: 14951
  REGION 1..122: note = Description of Artificial Sequence: Synthetic polypeptide
  REGION 1..122: note = VH of XENP019160

SEQ ID NO: 21123 - protein, 5 aa, synthetic construct
  REGION 1..5: note = Description of Artificial Sequence: Synthetic peptide
  REGION 1..5: note = XENP019160 vhCDR1
NFWMN

SEQ ID NO: 21124 - protein, 19 aa, synthetic construct
  REGION 1..19: note = Description of Artificial Sequence: Synthetic peptide
  REGION 1..19: note = XENP019160 vhCDR2
EIRLYSNNYATHYAEPVKG

SEQ ID NO: 21125 - protein, 11 aa, synthetic construct
  REGION 1..11: note = Description of Artificial Sequence: Synthetic peptide
  REGION 1..11: note = XENP019160 vhCDR3
YYGNYGGYFDV

SEQ ID NO: 21126 - protein, 214 aa, synthetic construct; identical to SEQ ID NO: 19936
  REGION 1..214: note = Description of Artificial Sequence: Synthetic polypeptide
  REGION 1..214: note = XENP019160 1G6_H1.269_L1.116_IgG1_PVA_/S267K Light Chain

SEQ ID NO: 21127 - protein, 107 aa, synthetic construct; identical to SEQ ID NO: 14214
  REGION 1..107: note = Description of Artificial Sequence: Synthetic polypeptide
  REGION 1..107: note = VL of XENP019160

SEQ ID NO: 21128 - protein, 11 aa, synthetic construct
  REGION 1..11: note = Description of Artificial Sequence: Synthetic peptide
  REGION 1..11: note = XENP019160 vlCDR1
RASQSVSNDVA

SEQ ID NO: 21129 - protein, 7 aa, synthetic construct
  REGION 1..7: note = Description of Artificial Sequence: Synthetic peptide
  REGION 1..7: note = XENP019160 vlCDR2
YASHRYT

SEQ ID NO: 21130 - protein, 9 aa, synthetic construct
  REGION 1..9: note = Description of Artificial Sequence: Synthetic peptide
  REGION 1..9: note = XENP019160 vlCDR3
QQDFSSPRT

SEQ ID NO: 21131 - protein, 451 aa, synthetic construct; identical to SEQ ID NO: 20641
  REGION 1..451: note = Description of Artificial Sequence: Synthetic polypeptide
  REGION 1..451: note = XENP019161 1G6_H1.271_L1.116_IgG1_PVA_/S267K Heavy Chain

SEQ ID NO: 21132 - protein, 122 aa, synthetic construct; identical to SEQ ID NO: 14969
  REGION 1..122: note = Description of Artificial Sequence: Synthetic polypeptide
  REGION 1..122: note = VH of XENP019161

SEQ ID NO: 21133 - protein, 5 aa, synthetic construct
  REGION 1..5: note = Description of Artificial Sequence: Synthetic peptide
  REGION 1..5: note = XENP019161 vhCDR1
NYWMN

SEQ ID NO: 21134 - protein, 19 aa, synthetic construct
  REGION 1..19: note = Description of Artificial Sequence: Synthetic peptide
  REGION 1..19: note = XENP019161 vhCDR2
EIRLYSNNYATHYAEPVKG

SEQ ID NO: 21135 - protein, 11 aa, synthetic construct
  REGION 1..11: note = Description of Artificial Sequence: Synthetic peptide
  REGION 1..11: note = XENP019161 vhCDR3
YYGNYGGYFDV

SEQ ID NO: 21136 - protein, 214 aa, synthetic construct; identical to SEQ ID NO: 19936
  REGION 1..214: note = Description of Artificial Sequence: Synthetic polypeptide
  REGION 1..214: note = XENP019161 1G6_H1.271_L1.116_IgG1_PVA_/S267K Light Chain

SEQ ID NO: 21137 - protein, 107 aa, synthetic construct; identical to SEQ ID NO: 14214
  REGION 1..107: note = Description of Artificial Sequence: Synthetic polypeptide
  REGION 1..107: note = VL of XENP019161

SEQ ID NO: 21138 - protein, 11 aa, synthetic construct
  REGION 1..11: note = Description of Artificial Sequence: Synthetic peptide
  REGION 1..11: note = XENP019161 vlCDR1
RASQSVSNDVA

SEQ ID NO: 21139 - protein, 7 aa, synthetic construct
  REGION 1..7: note = Description of Artificial Sequence: Synthetic peptide
  REGION 1..7: note = XENP019161 vlCDR2
YASHRYT

SEQ ID NO: 21140 - protein, 9 aa, synthetic construct
  REGION 1..9: note = Description of Artificial Sequence: Synthetic peptide
  REGION 1..9: note = XENP019161 vlCDR3
QQDFSSPRT

SEQ ID NO: 21141 - protein, 451 aa, synthetic construct; identical to SEQ ID NO: 20651
  REGION 1..451: note = Description of Artificial Sequence: Synthetic polypeptide
  REGION 1..451: note = XENP019162 1G6_H1.272_L1.116_IgG1_PVA_/S267K Heavy Chain

SEQ ID NO: 21142 - protein, 122 aa, synthetic construct; identical to SEQ ID NO: 14978
  REGION 1..122: note = Description of Artificial Sequence: Synthetic polypeptide
  REGION 1..122: note = VH of XENP019162

SEQ ID NO: 21143 - protein, 5 aa, synthetic construct
  REGION 1..5: note = Description of Artificial Sequence: Synthetic peptide
  REGION 1..5: note = XENP019162 vhCDR1
NFWMN

SEQ ID NO: 21144 - protein, 19 aa, synthetic construct
  REGION 1..19: note = Description of Artificial Sequence: Synthetic peptide
  REGION 1..19: note = XENP019162 vhCDR2
EIRLYSNNYATHYAEPVKG

SEQ ID NO: 21145 - protein, 11 aa, synthetic construct
  REGION 1..11: note = Description of Artificial Sequence: Synthetic peptide
  REGION 1..11: note = XENP019162 vhCDR3
YYGNYGGYFDV

SEQ ID NO: 21146 - protein, 214 aa, synthetic construct; identical to SEQ ID NO: 19936
  REGION 1..214: note = Description of Artificial Sequence: Synthetic polypeptide
  REGION 1..214: note = XENP019162 1G6_H1.272_L1.116_IgG1_PVA_/S267K Light Chain

SEQ ID NO: 21147 - protein, 107 aa, synthetic construct; identical to SEQ ID NO: 14214
  REGION 1..107: note = Description of Artificial Sequence: Synthetic polypeptide
  REGION 1..107: note = VL of XENP019162

SEQ ID NO: 21148 - protein, 11 aa, synthetic construct
  REGION 1..11: note = Description of Artificial Sequence: Synthetic peptide
  REGION 1..11: note = XENP019162 vlCDR1
RASQSVSNDVA

SEQ ID NO: 21149 - protein, 7 aa, synthetic construct
  REGION 1..7: note = Description of Artificial Sequence: Synthetic peptide
  REGION 1..7: note = XENP019162 vlCDR2
YASHRYT

SEQ ID NO: 21150 - protein, 9 aa, synthetic construct
  REGION 1..9: note = Description of Artificial Sequence: Synthetic peptide
  REGION 1..9: note = XENP019162 vlCDR3
QQDFSSPRT

SEQ ID NO: 21151 - protein, 451 aa, synthetic construct; identical to SEQ ID NO: 17291
  REGION 1..451: note = Description of Artificial Sequence: Synthetic polypeptide
  REGION 1..451: note = XENP019163 1G6_H1.90_L1.177_IgG1_PVA_/S267K Heavy Chain

SEQ ID NO: 21152 - protein, 122 aa, synthetic construct; identical to SEQ ID NO: 11837
  REGION 1..122: note = Description of Artificial Sequence: Synthetic polypeptide
  REGION 1..122: note = VH of XENP019163

SEQ ID NO: 21153 - protein, 5 aa, synthetic construct
  REGION 1..5: note = Description of Artificial Sequence: Synthetic peptide
  REGION 1..5: note = XENP019163 vhCDR1
NYWMN

SEQ ID NO: 21154 - protein, 19 aa, synthetic construct
  REGION 1..19: note = Description of Artificial Sequence: Synthetic peptide
  REGION 1..19: note = XENP019163 vhCDR2
EIRLYSNNYATHYAEPVKG

SEQ ID NO: 21155 - protein, 11 aa, synthetic construct
  REGION 1..11: note = Description of Artificial Sequence: Synthetic peptide
  REGION 1..11: note = XENP019163 vhCDR3
YYGNYGGYFDV

SEQ ID NO: 21156 - protein, 214 aa, synthetic construct; identical to SEQ ID NO: 21026
  REGION 1..214: note = Description of Artificial Sequence: Synthetic polypeptide
  REGION 1..214: note = XENP019163 1G6_H1.90_L1.177_IgG1_PVA_/S267K Light Chain

SEQ ID NO: 21157 - protein, 107 aa, synthetic construct; identical to SEQ ID NO: 15312
  REGION 1..107: note = Description of Artificial Sequence: Synthetic polypeptide
  REGION 1..107: note = VL of XENP019163

SEQ ID NO: 21158 - protein, 11 aa, synthetic construct
  REGION 1..11: note = Description of Artificial Sequence: Synthetic peptide
  REGION 1..11: note = XENP019163 vlCDR1
RASQSVGNDVA

SEQ ID NO: 21159 - protein, 7 aa, synthetic construct
  REGION 1..7: note = Description of Artificial Sequence: Synthetic peptide
  REGION 1..7: note = XENP019163 vlCDR2
YASHRYT

SEQ ID NO: 21160 - protein, 9 aa, synthetic construct
  REGION 1..9: note = Description of Artificial Sequence: Synthetic peptide
  REGION 1..9: note = XENP019163 vlCDR3
QQDFSSPRT

SEQ ID NO: 21161 - protein, 451 aa, synthetic construct; identical to SEQ ID NO: 20621
  REGION 1..451: note = Description of Artificial Sequence: Synthetic polypeptide
  REGION 1..451: note = XENP019164 1G6_H1.269_L1.177_IgG1_PVA_/S267K Heavy Chain

SEQ ID NO: 21162 - protein, 122 aa, synthetic construct; identical to SEQ ID NO: 14951
  REGION 1..122: note = Description of Artificial Sequence: Synthetic polypeptide
  REGION 1..122: note = VH of XENP019164

SEQ ID NO: 21163 - protein, 5 aa, synthetic construct
  REGION 1..5: note = Description of Artificial Sequence: Synthetic peptide
  REGION 1..5: note = XENP019164 vhCDR1
NFWMN

SEQ ID NO: 21164 - protein, 19 aa, synthetic construct
  REGION 1..19: note = Description of Artificial Sequence: Synthetic peptide
  REGION 1..19: note = XENP019164 vhCDR2
EIRLYSNNYATHYAEPVKG

SEQ ID NO: 21165 - protein, 11 aa, synthetic construct
  REGION 1..11: note = Description of Artificial Sequence: Synthetic peptide
  REGION 1..11: note = XENP019164 vhCDR3
YYGNYGGYFDV

SEQ ID NO: 21166 - protein, 214 aa, synthetic construct; identical to SEQ ID NO: 21026
  REGION 1..214: note = Description of Artificial Sequence: Synthetic polypeptide
  REGION 1..214: note = XENP019164 1G6_H1.269_L1.177_IgG1_PVA_/S267K Light Chain

SEQ ID NO: 21167 - protein, 107 aa, synthetic construct; identical to SEQ ID NO: 15312
  REGION 1..107: note = Description of Artificial Sequence: Synthetic polypeptide
  REGION 1..107: note = VL of XENP019164

SEQ ID NO: 21168 - protein, 11 aa, synthetic construct
  REGION 1..11: note = Description of Artificial Sequence: Synthetic peptide
  REGION 1..11: note = XENP019164 vlCDR1
RASQSVGNDVA

SEQ ID NO: 21169 - protein, 7 aa, synthetic construct
  REGION 1..7: note = Description of Artificial Sequence: Synthetic peptide
  REGION 1..7: note = XENP019164 vlCDR2
YASHRYT

SEQ ID NO: 21170 - protein, 9 aa, synthetic construct
  REGION 1..9: note = Description of Artificial Sequence: Synthetic peptide
  REGION 1..9: note = XENP019164 vlCDR3
QQDFSSPRT

SEQ ID NO: 21171 - protein, 451 aa, synthetic construct; identical to SEQ ID NO: 20641
  REGION 1..451: note = Description of Artificial Sequence: Synthetic polypeptide
  REGION 1..451: note = XENP019165 1G6_H1.271_L1.177_IgG1_PVA_/S267K Heavy Chain

SEQ ID NO: 21172 - protein, 122 aa, synthetic construct; identical to SEQ ID NO: 14969
  REGION 1..122: note = Description of Artificial Sequence: Synthetic polypeptide
  REGION 1..122: note = VH of XENP019165

SEQ ID NO: 21173 - protein, 5 aa, synthetic construct
  REGION 1..5: note = Description of Artificial Sequence: Synthetic peptide
  REGION 1..5: note = XENP019165 vhCDR1
NYWMN

SEQ ID NO: 21174 - protein, 19 aa, synthetic construct
  REGION 1..19: note = Description of Artificial Sequence: Synthetic peptide
  REGION 1..19: note = XENP019165 vhCDR2
EIRLYSNNYATHYAEPVKG

SEQ ID NO: 21175 - protein, 11 aa, synthetic construct
  REGION 1..11: note = Description of Artificial Sequence: Synthetic peptide
  REGION 1..11: note = XENP019165 vhCDR3
YYGNYGGYFDV

SEQ ID NO: 21176 - protein, 214 aa, synthetic construct; identical to SEQ ID NO: 21026
  REGION 1..214: note = Description of Artificial Sequence: Synthetic polypeptide
  REGION 1..214: note = XENP019165 1G6_H1.271_L1.177_IgG1_PVA_/S267K Light Chain

SEQ ID NO: 21177 - protein, 107 aa, synthetic construct; identical to SEQ ID NO: 15312
  REGION 1..107: note = Description of Artificial Sequence: Synthetic polypeptide
  REGION 1..107: note = VL of XENP019165

SEQ ID NO: 21178 - protein, 11 aa, synthetic construct
  REGION 1..11: note = Description of Artificial Sequence: Synthetic peptide
  REGION 1..11: note = XENP019165 vlCDR1
RASQSVGNDVA

SEQ ID NO: 21179 - protein, 7 aa, synthetic construct
  REGION 1..7: note = Description of Artificial Sequence: Synthetic peptide
  REGION 1..7: note = XENP019165 vlCDR2
YASHRYT

SEQ ID NO: 21180 - protein, 9 aa, synthetic construct
  REGION 1..9: note = Description of Artificial Sequence: Synthetic peptide
  REGION 1..9: note = XENP019165 vlCDR3
QQDFSSPRT

SEQ ID NO: 21181 - protein, 451 aa, synthetic construct; identical to SEQ ID NO: 20651
  REGION 1..451: note = Description of Artificial Sequence: Synthetic polypeptide
  REGION 1..451: note = XENP019166 1G6_H1.272_L1.177_IgG1_PVA_/S267K Heavy Chain

SEQ ID NO: 21182 - protein, 122 aa, synthetic construct; identical to SEQ ID NO: 14978
  REGION 1..122: note = Description of Artificial Sequence: Synthetic polypeptide
  REGION 1..122: note = VH of XENP019166

SEQ ID NO: 21183 - protein, 5 aa, synthetic construct
  REGION 1..5: note = Description of Artificial Sequence: Synthetic peptide
  REGION 1..5: note = XENP019166 vhCDR1
NFWMN

SEQ ID NO: 21184 - protein, 19 aa, synthetic construct
  REGION 1..19: note = Description of Artificial Sequence: Synthetic peptide
  REGION 1..19: note = XENP019166 vhCDR2
EIRLYSNNYATHYAEPVKG

SEQ ID NO: 21185 - protein, 11 aa, synthetic construct
  REGION 1..11: note = Description of Artificial Sequence: Synthetic peptide
  REGION 1..11: note = XENP019166 vhCDR3
YYGNYGGYFDV

SEQ ID NO: 21186 - protein, 214 aa, synthetic construct; identical to SEQ ID NO: 21026
  REGION 1..214: note = Description of Artificial Sequence: Synthetic polypeptide
  REGION 1..214: note = XENP019166 1G6_H1.272_L1.177_IgG1_PVA_/S267K Light Chain

SEQ ID NO: 21187 - protein, 107 aa, synthetic construct; identical to SEQ ID NO: 15312
  REGION 1..107: note = Description of Artificial Sequence: Synthetic polypeptide
  REGION 1..107: note = VL of XENP019166

SEQ ID NO: 21188 - protein, 11 aa, synthetic construct
  REGION 1..11: note = Description of Artificial Sequence: Synthetic peptide
  REGION 1..11: note = XENP019166 vlCDR1
RASQSVGNDVA

SEQ ID NO: 21189 - protein, 7 aa, synthetic construct
  REGION 1..7: note = Description of Artificial Sequence: Synthetic peptide
  REGION 1..7: note = XENP019166 vlCDR2
YASHRYT

SEQ ID NO: 21190 - protein, 9 aa, synthetic construct
  REGION 1..9: note = Description of Artificial Sequence: Synthetic peptide
  REGION 1..9: note = XENP019166 vlCDR3
QQDFSSPRT

SEQ ID NO: 21191 - protein, 451 aa, synthetic construct; identical to SEQ ID NO: 17291
  REGION 1..451: note = Description of Artificial Sequence: Synthetic polypeptide
  REGION 1..451: note = XENP019167 1G6_H1.90_L1.175_IgG1_PVA_/S267K Heavy Chain

SEQ ID NO: 21192 - protein, 122 aa, synthetic construct; identical to SEQ ID NO: 11837
  REGION 1..122: note = Description of Artificial Sequence: Synthetic polypeptide
  REGION 1..122: note = VH of XENP019167

SEQ ID NO: 21193 - protein, 5 aa, synthetic construct
  REGION 1..5: note = Description of Artificial Sequence: Synthetic peptide
  REGION 1..5: note = XENP019167 vhCDR1
NYWMN

SEQ ID NO: 21194 - protein, 19 aa, synthetic construct
  REGION 1..19: note = Description of Artificial Sequence: Synthetic peptide
  REGION 1..19: note = XENP019167 vhCDR2
EIRLYSNNYATHYAEPVKG

SEQ ID NO: 21195 - protein, 11 aa, synthetic construct
  REGION 1..11: note = Description of Artificial Sequence: Synthetic peptide
  REGION 1..11: note = XENP019167 vhCDR3
YYGNYGGYFDV

SEQ ID NO: 21196 - protein, 214 aa, synthetic construct; identical to SEQ ID NO: 21006
  REGION 1..214: note = Description of Artificial Sequence: Synthetic polypeptide
  REGION 1..214: note = XENP019167 1G6_H1.90_L1.175_IgG1_PVA_/S267K Light Chain

SEQ ID NO: 21197 - protein, 107 aa, synthetic construct; identical to SEQ ID NO: 15294
  REGION 1..107: note = Description of Artificial Sequence: Synthetic polypeptide
  REGION 1..107: note = VL of XENP019167

SEQ ID NO: 21198 - protein, 11 aa, synthetic construct
  REGION 1..11: note = Description of Artificial Sequence: Synthetic peptide
  REGION 1..11: note = XENP019167 vlCDR1
RASQSVGNDVA

SEQ ID NO: 21199 - protein, 7 aa, synthetic construct
  REGION 1..7: note = Description of Artificial Sequence: Synthetic peptide
  REGION 1..7: note = XENP019167 vlCDR2
YASHRYT

SEQ ID NO: 21200 - protein, 9 aa, synthetic construct
  REGION 1..9: note = Description of Artificial Sequence: Synthetic peptide
  REGION 1..9: note = XENP019167 vlCDR3
QQDWSSPRT

SEQ ID NO: 21201 - protein, 451 aa, synthetic construct; identical to SEQ ID NO: 20621
  REGION 1..451: note = Description of Artificial Sequence: Synthetic polypeptide
  REGION 1..451: note = XENP019168 1G6_H1.269_L1.175_IgG1_PVA_/S267K Heavy Chain

SEQ ID NO: 21202 - protein, 122 aa, synthetic construct; identical to SEQ ID NO: 14951
  REGION 1..122: note = Description of Artificial Sequence: Synthetic polypeptide
  REGION 1..122: note = VH of XENP019168

SEQ ID NO: 21203 - protein, 5 aa, synthetic construct
  REGION 1..5: note = Description of Artificial Sequence: Synthetic peptide
  REGION 1..5: note = XENP019168 vhCDR1
NFWMN

SEQ ID NO: 21204 - protein, 19 aa, synthetic construct
  REGION 1..19: note = Description of Artificial Sequence: Synthetic peptide
  REGION 1..19: note = XENP019168 vhCDR2
EIRLYSNNYATHYAEPVKG

SEQ ID NO: 21205 - protein, 11 aa, synthetic construct
  REGION 1..11: note = Description of Artificial Sequence: Synthetic peptide
  REGION 1..11: note = XENP019168 vhCDR3
YYGNYGGYFDV

SEQ ID NO: 21206 - protein, 214 aa, synthetic construct; identical to SEQ ID NO: 21006
  REGION 1..214: note = Description of Artificial Sequence: Synthetic polypeptide
  REGION 1..214: note = XENP019168 1G6_H1.269_L1.175_IgG1_PVA_/S267K Light Chain

SEQ ID NO: 21207 - protein, 107 aa, synthetic construct; identical to SEQ ID NO: 15294
  REGION 1..107: note = Description of Artificial Sequence: Synthetic polypeptide
  REGION 1..107: note = VL of XENP019168

SEQ ID NO: 21208 - protein, 11 aa, synthetic construct
  REGION 1..11: note = Description of Artificial Sequence: Synthetic peptide
  REGION 1..11: note = XENP019168 vlCDR1
RASQSVGNDVA

SEQ ID NO: 21209 - protein, 7 aa, synthetic construct
  REGION 1..7: note = Description of Artificial Sequence: Synthetic peptide
  REGION 1..7: note = XENP019168 vlCDR2
YASHRYT

SEQ ID NO: 21210 - protein, 9 aa, synthetic construct
  REGION 1..9: note = Description of Artificial Sequence: Synthetic peptide
  REGION 1..9: note = XENP019168 vlCDR3
QQDWSSPRT

SEQ ID NO: 21211 - protein, 451 aa, synthetic construct; identical to SEQ ID NO: 20641
  REGION 1..451: note = Description of Artificial Sequence: Synthetic polypeptide
  REGION 1..451: note = XENP019169 1G6_H1.271_L1.175_IgG1_PVA_/S267K Heavy Chain

SEQ ID NO: 21212 - protein, 122 aa, synthetic construct; identical to SEQ ID NO: 14969
  REGION 1..122: note = Description of Artificial Sequence: Synthetic polypeptide
  REGION 1..122: note = VH of XENP019169

SEQ ID NO: 21213 - protein, 5 aa, synthetic construct
  REGION 1..5: note = Description of Artificial Sequence: Synthetic peptide
  REGION 1..5: note = XENP019169 vhCDR1
NYWMN

SEQ ID NO: 21214 - protein, 19 aa, synthetic construct
  REGION 1..19: note = Description of Artificial Sequence: Synthetic peptide
  REGION 1..19: note = XENP019169 vhCDR2
EIRLYSNNYATHYAEPVKG

SEQ ID NO: 21215 - protein, 11 aa, synthetic construct
  REGION 1..11: note = Description of Artificial Sequence: Synthetic peptide
  REGION 1..11: note = XENP019169 vhCDR3
YYGNYGGYFDV

SEQ ID NO: 21216 - protein, 214 aa, synthetic construct; identical to SEQ ID NO: 21006
  REGION 1..214: note = Description of Artificial Sequence: Synthetic polypeptide
  REGION 1..214: note = XENP019169 1G6_H1.271_L1.175_IgG1_PVA_/S267K Light Chain

SEQ ID NO: 21217 - protein, 107 aa, synthetic construct; identical to SEQ ID NO: 15294
  REGION 1..107: note = Description of Artificial Sequence: Synthetic polypeptide
  REGION 1..107: note = VL of XENP019169

SEQ ID NO: 21218 - protein, 11 aa, synthetic construct
  REGION 1..11: note = Description of Artificial Sequence: Synthetic peptide
  REGION 1..11: note = XENP019169 vlCDR1
RASQSVGNDVA

SEQ ID NO: 21219 - protein, 7 aa, synthetic construct
  REGION 1..7: note = Description of Artificial Sequence: Synthetic peptide
  REGION 1..7: note = XENP019169 vlCDR2
YASHRYT

SEQ ID NO: 21220 - protein, 9 aa, synthetic construct
  REGION 1..9: note = Description of Artificial Sequence: Synthetic peptide
  REGION 1..9: note = XENP019169 vlCDR3
QQDWSSPRT

SEQ ID NO: 21221 - protein, 451 aa, synthetic construct; identical to SEQ ID NO: 20651
  REGION 1..451: note = Description of Artificial Sequence: Synthetic polypeptide
  REGION 1..451: note = XENP019170 1G6_H1.272_L1.175_IgG1_PVA_/S267K Heavy Chain

SEQ ID NO: 21222 - protein, 122 aa, synthetic construct; identical to SEQ ID NO: 14978
  REGION 1..122: note = Description of Artificial Sequence: Synthetic polypeptide
  REGION 1..122: note = VH of XENP019170

SEQ ID NO: 21223 - protein, 5 aa, synthetic construct
  REGION 1..5: note = Description of Artificial Sequence: Synthetic peptide
  REGION 1..5: note = XENP019170 vhCDR1
NFWMN

SEQ ID NO: 21224 - protein, 19 aa, synthetic construct
  REGION 1..19: note = Description of Artificial Sequence: Synthetic peptide
  REGION 1..19: note = XENP019170 vhCDR2
EIRLYSNNYATHYAEPVKG

SEQ ID NO: 21225 - protein, 11 aa, synthetic construct
  REGION 1..11: note = Description of Artificial Sequence: Synthetic peptide
  REGION 1..11: note = XENP019170 vhCDR3
YYGNYGGYFDV

SEQ ID NO: 21226 - protein, 214 aa, synthetic construct; identical to SEQ ID NO: 21006
  REGION 1..214: note = Description of Artificial Sequence: Synthetic polypeptide
  REGION 1..214: note = XENP019170 1G6_H1.272_L1.175_IgG1_PVA_/S267K Light Chain

SEQ ID NO: 21227 - protein, 107 aa, synthetic construct; identical to SEQ ID NO: 15294
  REGION 1..107: note = Description of Artificial Sequence: Synthetic polypeptide
  REGION 1..107: note = VL of XENP019170

SEQ ID NO: 21228 - protein, 11 aa, synthetic construct
  REGION 1..11: note = Description of Artificial Sequence: Synthetic peptide
  REGION 1..11: note = XENP019170 vlCDR1
RASQSVGNDVA

SEQ ID NO: 21229 - protein, 7 aa, synthetic construct
  REGION 1..7: note = Description of Artificial Sequence: Synthetic peptide
  REGION 1..7: note = XENP019170 vlCDR2
YASHRYT

SEQ ID NO: 21230 - protein, 9 aa, synthetic construct
  REGION 1..9: note = Description of Artificial Sequence: Synthetic peptide
  REGION 1..9: note = XENP019170 vlCDR3
QQDWSSPRT

SEQ ID NO: 21231 - protein, 451 aa, synthetic construct; identical to SEQ ID NO: 16221
  REGION 1..451: note = Description of Artificial Sequence: Synthetic polypeptide
  REGION 1..451: note = XENP019172 1G6_H1_L1.190_IgG1_PVA_/S267K Heavy Chain

SEQ ID NO: 21232 - protein, 122 aa, synthetic construct; identical to SEQ ID NO: 10922
  REGION 1..122: note = Description of Artificial Sequence: Synthetic polypeptide
  REGION 1..122: note = VH of XENP019172

SEQ ID NO: 21233 - protein, 5 aa, synthetic construct
  REGION 1..5: note = Description of Artificial Sequence: Synthetic peptide
  REGION 1..5: note = XENP019172 vhCDR1
NYWMN

SEQ ID NO: 21234 - protein, 19 aa, synthetic construct
  REGION 1..19: note = Description of Artificial Sequence: Synthetic peptide
  REGION 1..19: note = XENP019172 vhCDR2
EIRLKSNNYATHYAEPVKG

SEQ ID NO: 21235 - protein, 11 aa, synthetic construct
  REGION 1..11: note = Description of Artificial Sequence: Synthetic peptide
  REGION 1..11: note = XENP019172 vhCDR3
YYGNYGGYFDV

SEQ ID NO: 21236 - protein, 214 aa, synthetic construct
  REGION 1..214: note = Description of Artificial Sequence: Synthetic polypeptide
  REGION 1..214: note = XENP019172 1G6_H1_L1.190_IgG1_PVA_/S267K Light Chain
SIVMTQSPATLSVSPGERATLSCRASQSVGNDVAWYQQKPGQSPRLLINYASHRYTGVPDRFTGSGYGTEFTLTISSLQSEDFAVYFCQQDFSSPRTFGGGTKVEIKRTVAAPSVFIFPPSDEQLKSGTASVVCLLNNFYPREAKVQWKVDNALQSGNSQESVTEQDSKDSTYSLSSTLTLSKADYEKHKVYACEVTHQGLSSPVTKSFNRGEC

SEQ ID NO: 21237 - protein, 107 aa, synthetic construct; identical to SEQ ID NO: 15504
  REGION 1..107: note = Description of Artificial Sequence: Synthetic polypeptide
  REGION 1..107: note = VL of XENP019172

SEQ ID NO: 21238 - protein, 11 aa, synthetic construct
  REGION 1..11: note = Description of Artificial Sequence: Synthetic peptide
  REGION 1..11: note = XENP019172 vlCDR1
RASQSVGNDVA

SEQ ID NO: 21239 - protein, 7 aa, synthetic construct
  REGION 1..7: note = Description of Artificial Sequence: Synthetic peptide
  REGION 1..7: note = XENP019172 vlCDR2
YASHRYT

SEQ ID NO: 21240 - protein, 9 aa, synthetic construct
  REGION 1..9: note = Description of Artificial Sequence: Synthetic peptide
  REGION 1..9: note = XENP019172 vlCDR3
QQDFSSPRT

SEQ ID NO: 21241 - protein, 451 aa, synthetic construct; identical to SEQ ID NO: 16221
  REGION 1..451: note = Description of Artificial Sequence: Synthetic polypeptide
  REGION 1..451: note = XENP019173 1G6_H1_L1.191_IgG1_PVA_/S267K Heavy Chain

SEQ ID NO: 21242 - protein, 122 aa, synthetic construct; identical to SEQ ID NO: 10922
  REGION 1..122: note = Description of Artificial Sequence: Synthetic polypeptide
  REGION 1..122: note = VH of XENP019173

SEQ ID NO: 21243 - protein, 5 aa, synthetic construct
  REGION 1..5: note = Description of Artificial Sequence: Synthetic peptide
  REGION 1..5: note = XENP019173 vhCDR1
NYWMN

SEQ ID NO: 21244 - protein, 19 aa, synthetic construct
  REGION 1..19: note = Description of Artificial Sequence: Synthetic peptide
  REGION 1..19: note = XENP019173 vhCDR2
EIRLKSNNYATHYAEPVKG

SEQ ID NO: 21245 - protein, 11 aa, synthetic construct
  REGION 1..11: note = Description of Artificial Sequence: Synthetic peptide
  REGION 1..11: note = XENP019173 vhCDR3
YYGNYGGYFDV

SEQ ID NO: 21246 - protein, 214 aa, synthetic construct
  REGION 1..214: note = Description of Artificial Sequence: Synthetic polypeptide
  REGION 1..214: note = XENP019173 1G6_H1_L1.191_IgG1_PVA_/S267K Light Chain
SIVMTQSPATLSVSPGERATLSCRASQSVGNDVAWYQQKPGQSPRLLINYASHRYTGVPDRFTGSGYGTEFTLTISSLQSEDFAVYFCQQDWSSPRTFGGGTKVEIKRTVAAPSVFIFPPSDEQLKSGTASVVCLLNNFYPREAKVQWKVDNALQSGNSQESVTEQDSKDSTYSLSSTLTLSKADYEKHKVYACEVTHQGLSSPVTKSFNRGEC

SEQ ID NO: 21247 - protein, 107 aa, synthetic construct; identical to SEQ ID NO: 15513
  REGION 1..107: note = Description of Artificial Sequence: Synthetic polypeptide
  REGION 1..107: note = VL of XENP019173

SEQ ID NO: 21248 - protein, 11 aa, synthetic construct
  REGION 1..11: note = Description of Artificial Sequence: Synthetic peptide
  REGION 1..11: note = XENP019173 vlCDR1
RASQSVGNDVA

SEQ ID NO: 21249 - protein, 7 aa, synthetic construct
  REGION 1..7: note = Description of Artificial Sequence: Synthetic peptide
  REGION 1..7: note = XENP019173 vlCDR2
YASHRYT

SEQ ID NO: 21250 - protein, 9 aa, synthetic construct
  REGION 1..9: note = Description of Artificial Sequence: Synthetic peptide
  REGION 1..9: note = XENP019173 vlCDR3
QQDWSSPRT

SEQ ID NO: 21251 - protein, 451 aa, synthetic construct; identical to SEQ ID NO: 17291
  REGION 1..451: note = Description of Artificial Sequence: Synthetic polypeptide
  REGION 1..451: note = XENP019174 1G6_H1.90_L1.190_IgG1_PVA_/S267K Heavy Chain

SEQ ID NO: 21252 - protein, 122 aa, synthetic construct; identical to SEQ ID NO: 11837
  REGION 1..122: note = Description of Artificial Sequence: Synthetic polypeptide
  REGION 1..122: note = VH of XENP019174

SEQ ID NO: 21253 - protein, 5 aa, synthetic construct
  REGION 1..5: note = Description of Artificial Sequence: Synthetic peptide
  REGION 1..5: note = XENP019174 vhCDR1
NYWMN

SEQ ID NO: 21254 - protein, 19 aa, synthetic construct
  REGION 1..19: note = Description of Artificial Sequence: Synthetic peptide
  REGION 1..19: note = XENP019174 vhCDR2
EIRLYSNNYATHYAEPVKG

SEQ ID NO: 21255 - protein, 11 aa, synthetic construct
  REGION 1..11: note = Description of Artificial Sequence: Synthetic peptide
  REGION 1..11: note = XENP019174 vhCDR3
YYGNYGGYFDV

SEQ ID NO: 21256 - protein, 214 aa, synthetic construct; identical to SEQ ID NO: 21236
  REGION 1..214: note = Description of Artificial Sequence: Synthetic polypeptide
  REGION 1..214: note = XENP019174 1G6_H1.90_L1.190_IgG1_PVA_/S267K Light Chain

SEQ ID NO: 21257 - protein, 107 aa, synthetic construct; identical to SEQ ID NO: 15504
  REGION 1..107: note = Description of Artificial Sequence: Synthetic polypeptide
  REGION 1..107: note = VL of XENP019174

SEQ ID NO: 21258 - protein, 11 aa, synthetic construct
  REGION 1..11: note = Description of Artificial Sequence: Synthetic peptide
  REGION 1..11: note = XENP019174 vlCDR1
RASQSVGNDVA

SEQ ID NO: 21259 - protein, 7 aa, synthetic construct
  REGION 1..7: note = Description of Artificial Sequence: Synthetic peptide
  REGION 1..7: note = XENP019174 vlCDR2
YASHRYT

SEQ ID NO: 21260 - protein, 9 aa, synthetic construct
  REGION 1..9: note = Description of Artificial Sequence: Synthetic peptide
  REGION 1..9: note = XENP019174 vlCDR3
QQDFSSPRT

SEQ ID NO: 21261 - protein, 451 aa, synthetic construct; identical to SEQ ID NO: 17291
  REGION 1..451: note = Description of Artificial Sequence: Synthetic polypeptide
  REGION 1..451: note = XENP019175 1G6_H1.90_L1.191_IgG1_PVA_/S267K Heavy Chain

SEQ ID NO: 21262 - protein, 122 aa, synthetic construct; identical to SEQ ID NO: 11837
  REGION 1..122: note = Description of Artificial Sequence: Synthetic polypeptide
  REGION 1..122: note = VH of XENP019175

SEQ ID NO: 21263 - protein, 5 aa, synthetic construct
  REGION 1..5: note = Description of Artificial Sequence: Synthetic peptide
  REGION 1..5: note = XENP019175 vhCDR1
NYWMN

SEQ ID NO: 21264 - protein, 19 aa, synthetic construct
  REGION 1..19: note = Description of Artificial Sequence: Synthetic peptide
  REGION 1..19: note = XENP019175 vhCDR2
EIRLYSNNYATHYAEPVKG

SEQ ID NO: 21265 - protein, 11 aa, synthetic construct
  REGION 1..11: note = Description of Artificial Sequence: Synthetic peptide
  REGION 1..11: note = XENP019175 vhCDR3
YYGNYGGYFDV

SEQ ID NO: 21266 - protein, 214 aa, synthetic construct; identical to SEQ ID NO: 21246
  REGION 1..214: note = Description of Artificial Sequence: Synthetic polypeptide
  REGION 1..214: note = XENP019175 1G6_H1.90_L1.191_IgG1_PVA_/S267K Light Chain

SEQ ID NO: 21267 - protein, 107 aa, synthetic construct; identical to SEQ ID NO: 15513
  REGION 1..107: note = Description of Artificial Sequence: Synthetic polypeptide
  REGION 1..107: note = VL of XENP019175

SEQ ID NO: 21268 - protein, 11 aa, synthetic construct
  REGION 1..11: note = Description of Artificial Sequence: Synthetic peptide
  REGION 1..11: note = XENP019175 vlCDR1
RASQSVGNDVA

SEQ ID NO: 21269 - protein, 7 aa, synthetic construct
  REGION 1..7: note = Description of Artificial Sequence: Synthetic peptide
  REGION 1..7: note = XENP019175 vlCDR2
YASHRYT

SEQ ID NO: 21270 - protein, 9 aa, synthetic construct
  REGION 1..9: note = Description of Artificial Sequence: Synthetic peptide
  REGION 1..9: note = XENP019175 vlCDR3
QQDWSSPRT

SEQ ID NO: 21271 - protein, 451 aa, synthetic construct; identical to SEQ ID NO: 20621
  REGION 1..451: note = Description of Artificial Sequence: Synthetic polypeptide
  REGION 1..451: note = XENP019176 1G6_H1.269_L1.190_IgG1_PVA_/S267K Heavy Chain

SEQ ID NO: 21272 - protein, 122 aa, synthetic construct; identical to SEQ ID NO: 14951
  REGION 1..122: note = Description of Artificial Sequence: Synthetic polypeptide
  REGION 1..122: note = VH of XENP019176

SEQ ID NO: 21273 - protein, 5 aa, synthetic construct
  REGION 1..5: note = Description of Artificial Sequence: Synthetic peptide
  REGION 1..5: note = XENP019176 vhCDR1
NFWMN

SEQ ID NO: 21274 - protein, 19 aa, synthetic construct
  REGION 1..19: note = Description of Artificial Sequence: Synthetic peptide
  REGION 1..19: note = XENP019176 vhCDR2
EIRLYSNNYATHYAEPVKG

SEQ ID NO: 21275 - protein, 11 aa, synthetic construct
  REGION 1..11: note = Description of Artificial Sequence: Synthetic peptide
  REGION 1..11: note = XENP019176 vhCDR3
YYGNYGGYFDV

SEQ ID NO: 21276 - protein, 214 aa, synthetic construct; identical to SEQ ID NO: 21236
  REGION 1..214: note = Description of Artificial Sequence: Synthetic polypeptide
  REGION 1..214: note = XENP019176 1G6_H1.269_L1.190_IgG1_PVA_/S267K Light Chain

SEQ ID NO: 21277 - protein, 107 aa, synthetic construct; identical to SEQ ID NO: 15504
  REGION 1..107: note = Description of Artificial Sequence: Synthetic polypeptide
  REGION 1..107: note = VL of XENP019176

SEQ ID NO: 21278 - protein, 11 aa, synthetic construct
  REGION 1..11: note = Description of Artificial Sequence: Synthetic peptide
  REGION 1..11: note = XENP019176 vlCDR1
RASQSVGNDVA

SEQ ID NO: 21279 - protein, 7 aa, synthetic construct
  REGION 1..7: note = Description of Artificial Sequence: Synthetic peptide
  REGION 1..7: note = XENP019176 vlCDR2
YASHRYT

SEQ ID NO: 21280 - protein, 9 aa, synthetic construct
  REGION 1..9: note = Description of Artificial Sequence: Synthetic peptide
  REGION 1..9: note = XENP019176 vlCDR3
QQDFSSPRT

SEQ ID NO: 21281 - protein, 451 aa, synthetic construct; identical to SEQ ID NO: 20641
  REGION 1..451: note = Description of Artificial Sequence: Synthetic polypeptide
  REGION 1..451: note = XENP019177 1G6_H1.271_L1.190_IgG1_PVA_/S267K Heavy Chain

SEQ ID NO: 21282 - protein, 122 aa, synthetic construct; identical to SEQ ID NO: 14969
  REGION 1..122: note = Description of Artificial Sequence: Synthetic polypeptide
  REGION 1..122: note = VH of XENP019177

SEQ ID NO: 21283 - protein, 5 aa, synthetic construct
  REGION 1..5: note = Description of Artificial Sequence: Synthetic peptide
  REGION 1..5: note = XENP019177 vhCDR1
NYWMN

SEQ ID NO: 21284 - protein, 19 aa, synthetic construct
  REGION 1..19: note = Description of Artificial Sequence: Synthetic peptide
  REGION 1..19: note = XENP019177 vhCDR2
EIRLYSNNYATHYAEPVKG

SEQ ID NO: 21285 - protein, 11 aa, synthetic construct
  REGION 1..11: note = Description of Artificial Sequence: Synthetic peptide
  REGION 1..11: note = XENP019177 vhCDR3
YYGNYGGYFDV

SEQ ID NO: 21286 - protein, 214 aa, synthetic construct; identical to SEQ ID NO: 21236
  REGION 1..214: note = Description of Artificial Sequence: Synthetic polypeptide
  REGION 1..214: note = XENP019177 1G6_H1.271_L1.190_IgG1_PVA_/S267K Light Chain

SEQ ID NO: 21287 - protein, 107 aa, synthetic construct; identical to SEQ ID NO: 15504
  REGION 1..107: note = Description of Artificial Sequence: Synthetic polypeptide
  REGION 1..107: note = VL of XENP019177

SEQ ID NO: 21288 - protein, 11 aa, synthetic construct
  REGION 1..11: note = Description of Artificial Sequence: Synthetic peptide
  REGION 1..11: note = XENP019177 vlCDR1
RASQSVGNDVA

SEQ ID NO: 21289 - protein, 7 aa, synthetic construct
  REGION 1..7: note = Description of Artificial Sequence: Synthetic peptide
  REGION 1..7: note = XENP019177 vlCDR2
YASHRYT

SEQ ID NO: 21290 - protein, 9 aa, synthetic construct
  REGION 1..9: note = Description of Artificial Sequence: Synthetic peptide
  REGION 1..9: note = XENP019177 vlCDR3
QQDFSSPRT

SEQ ID NO: 21291 - protein, 451 aa, synthetic construct; identical to SEQ ID NO: 20651
  REGION 1..451: note = Description of Artificial Sequence: Synthetic polypeptide
  REGION 1..451: note = XENP019178 1G6_H1.272_L1.190_IgG1_PVA_/S267K Heavy Chain

SEQ ID NO: 21292 - protein, 122 aa, synthetic construct; identical to SEQ ID NO: 14978
  REGION 1..122: note = Description of Artificial Sequence: Synthetic polypeptide
  REGION 1..122: note = VH of XENP019178

SEQ ID NO: 21293 - protein, 5 aa, synthetic construct
  REGION 1..5: note = Description of Artificial Sequence: Synthetic peptide
  REGION 1..5: note = XENP019178 vhCDR1
NFWMN

SEQ ID NO: 21294 - protein, 19 aa, synthetic construct
  REGION 1..19: note = Description of Artificial Sequence: Synthetic peptide
  REGION 1..19: note = XENP019178 vhCDR2
EIRLYSNNYATHYAEPVKG

SEQ ID NO: 21295 - protein, 11 aa, synthetic construct
  REGION 1..11: note = Description of Artificial Sequence: Synthetic peptide
  REGION 1..11: note = XENP019178 vhCDR3
YYGNYGGYFDV

SEQ ID NO: 21296 - protein, 214 aa, synthetic construct; identical to SEQ ID NO: 21236
  REGION 1..214: note = Description of Artificial Sequence: Synthetic polypeptide
  REGION 1..214: note = XENP019178 1G6_H1.272_L1.190_IgG1_PVA_/S267K Light Chain

SEQ ID NO: 21297 - protein, 107 aa, synthetic construct; identical to SEQ ID NO: 15504
  REGION 1..107: note = Description of Artificial Sequence: Synthetic polypeptide
  REGION 1..107: note = VL of XENP019178

SEQ ID NO: 21298 - protein, 11 aa, synthetic construct
  REGION 1..11: note = Description of Artificial Sequence: Synthetic peptide
  REGION 1..11: note = XENP019178 vlCDR1
RASQSVGNDVA

SEQ ID NO: 21299 - protein, 7 aa, synthetic construct
  REGION 1..7: note = Description of Artificial Sequence: Synthetic peptide
  REGION 1..7: note = XENP019178 vlCDR2
YASHRYT

SEQ ID NO: 21300 - protein, 9 aa, synthetic construct
  REGION 1..9: note = Description of Artificial Sequence: Synthetic peptide
  REGION 1..9: note = XENP019178 vlCDR3
QQDFSSPRT

SEQ ID NO: 21301 - protein, 451 aa, synthetic construct; identical to SEQ ID NO: 20621
  REGION 1..451: note = Description of Artificial Sequence: Synthetic polypeptide
  REGION 1..451: note = XENP019179 1G6_H1.269_L1.191_IgG1_PVA_/S267K Heavy Chain

SEQ ID NO: 21302 - protein, 122 aa, synthetic construct; identical to SEQ ID NO: 14951
  REGION 1..122: note = Description of Artificial Sequence: Synthetic polypeptide
  REGION 1..122: note = VH of XENP019179

SEQ ID NO: 21303 - protein, 5 aa, synthetic construct
  REGION 1..5: note = Description of Artificial Sequence: Synthetic peptide
  REGION 1..5: note = XENP019179 vhCDR1
NFWMN

SEQ ID NO: 21304 - protein, 19 aa, synthetic construct
  REGION 1..19: note = Description of Artificial Sequence: Synthetic peptide
  REGION 1..19: note = XENP019179 vhCDR2
EIRLYSNNYATHYAEPVKG

SEQ ID NO: 21305 - protein, 11 aa, synthetic construct
  REGION 1..11: note = Description of Artificial Sequence: Synthetic peptide
  REGION 1..11: note = XENP019179 vhCDR3
YYGNYGGYFDV

SEQ ID NO: 21306 - protein, 214 aa, synthetic construct; identical to SEQ ID NO: 21246
  REGION 1..214: note = Description of Artificial Sequence: Synthetic polypeptide
  REGION 1..214: note = XENP019179 1G6_H1.269_L1.191_IgG1_PVA_/S267K Light Chain

SEQ ID NO: 21307 - protein, 107 aa, synthetic construct; identical to SEQ ID NO: 15513
  REGION 1..107: note = Description of Artificial Sequence: Synthetic polypeptide
  REGION 1..107: note = VL of XENP019179

SEQ ID NO: 21308 - protein, 11 aa, synthetic construct
  REGION 1..11: note = Description of Artificial Sequence: Synthetic peptide
  REGION 1..11: note = XENP019179 vlCDR1
RASQSVGNDVA

SEQ ID NO: 21309 - protein, 7 aa, synthetic construct
  REGION 1..7: note = Description of Artificial Sequence: Synthetic peptide
  REGION 1..7: note = XENP019179 vlCDR2
YASHRYT

SEQ ID NO: 21310 - protein, 9 aa, synthetic construct
  REGION 1..9: note = Description of Artificial Sequence: Synthetic peptide
  REGION 1..9: note = XENP019179 vlCDR3
QQDWSSPRT

SEQ ID NO: 21311 - protein, 451 aa, synthetic construct; identical to SEQ ID NO: 20641
  REGION 1..451: note = Description of Artificial Sequence: Synthetic polypeptide
  REGION 1..451: note = XENP019180 1G6_H1.271_L1.191_IgG1_PVA_/S267K Heavy Chain

SEQ ID NO: 21312 - protein, 122 aa, synthetic construct; identical to SEQ ID NO: 14969
  REGION 1..122: note = Description of Artificial Sequence: Synthetic polypeptide
  REGION 1..122: note = VH of XENP019180

SEQ ID NO: 21313 - protein, 5 aa, synthetic construct
  REGION 1..5: note = Description of Artificial Sequence: Synthetic peptide
  REGION 1..5: note = XENP019180 vhCDR1
NYWMN

SEQ ID NO: 21314 - protein, 19 aa, synthetic construct
  REGION 1..19: note = Description of Artificial Sequence: Synthetic peptide
  REGION 1..19: note = XENP019180 vhCDR2
EIRLYSNNYATHYAEPVKG

SEQ ID NO: 21315 - protein, 11 aa, synthetic construct
  REGION 1..11: note = Description of Artificial Sequence: Synthetic peptide
  REGION 1..11: note = XENP019180 vhCDR3
YYGNYGGYFDV

SEQ ID NO: 21316 - protein, 214 aa, synthetic construct; identical to SEQ ID NO: 21246
  REGION 1..214: note = Description of Artificial Sequence: Synthetic polypeptide
  REGION 1..214: note = XENP019180 1G6_H1.271_L1.191_IgG1_PVA_/S267K Light Chain

SEQ ID NO: 21317 - protein, 107 aa, synthetic construct; identical to SEQ ID NO: 15513
  REGION 1..107: note = Description of Artificial Sequence: Synthetic polypeptide
  REGION 1..107: note = VL of XENP019180

SEQ ID NO: 21318 - protein, 11 aa, synthetic construct
  REGION 1..11: note = Description of Artificial Sequence: Synthetic peptide
  REGION 1..11: note = XENP019180 vlCDR1
RASQSVGNDVA

SEQ ID NO: 21319 - protein, 7 aa, synthetic construct
  REGION 1..7: note = Description of Artificial Sequence: Synthetic peptide
  REGION 1..7: note = XENP019180 vlCDR2
YASHRYT

SEQ ID NO: 21320 - protein, 9 aa, synthetic construct
  REGION 1..9: note = Description of Artificial Sequence: Synthetic peptide
  REGION 1..9: note = XENP019180 vlCDR3
QQDWSSPRT

SEQ ID NO: 21321 - protein, 451 aa, synthetic construct; identical to SEQ ID NO: 20651
  REGION 1..451: note = Description of Artificial Sequence: Synthetic polypeptide
  REGION 1..451: note = XENP019181 1G6_H1.272_L1.191_IgG1_PVA_/S267K Heavy Chain

SEQ ID NO: 21322 - protein, 122 aa, synthetic construct; identical to SEQ ID NO: 14978
  REGION 1..122: note = Description of Artificial Sequence: Synthetic polypeptide
  REGION 1..122: note = VH of XENP019181

SEQ ID NO: 21323 - protein, 5 aa, synthetic construct
  REGION 1..5: note = Description of Artificial Sequence: Synthetic peptide
  REGION 1..5: note = XENP019181 vhCDR1
NFWMN

SEQ ID NO: 21324 - protein, 19 aa, synthetic construct
  REGION 1..19: note = Description of Artificial Sequence: Synthetic peptide
  REGION 1..19: note = XENP019181 vhCDR2
EIRLYSNNYATHYAEPVKG

SEQ ID NO: 21325 - protein, 11 aa, synthetic construct
  REGION 1..11: note = Description of Artificial Sequence: Synthetic peptide
  REGION 1..11: note = XENP019181 vhCDR3
YYGNYGGYFDV

SEQ ID NO: 21326 - protein, 214 aa, synthetic construct; identical to SEQ ID NO: 21246
  REGION 1..214: note = Description of Artificial Sequence: Synthetic polypeptide
  REGION 1..214: note = XENP019181 1G6_H1.272_L1.191_IgG1_PVA_/S267K Light Chain

SEQ ID NO: 21327 - protein, 107 aa, synthetic construct; identical to SEQ ID NO: 15513
  REGION 1..107: note = Description of Artificial Sequence: Synthetic polypeptide
  REGION 1..107: note = VL of XENP019181

SEQ ID NO: 21328 - protein, 11 aa, synthetic construct
  REGION 1..11: note = Description of Artificial Sequence: Synthetic peptide
  REGION 1..11: note = XENP019181 vlCDR1
RASQSVGNDVA

SEQ ID NO: 21329 - protein, 7 aa, synthetic construct
  REGION 1..7: note = Description of Artificial Sequence: Synthetic peptide
  REGION 1..7: note = XENP019181 vlCDR2
YASHRYT

SEQ ID NO: 21330 - protein, 9 aa, synthetic construct
  REGION 1..9: note = Description of Artificial Sequence: Synthetic peptide
  REGION 1..9: note = XENP019181 vlCDR3
QQDWSSPRT

SEQ ID NO: 21331 - protein, 451 aa, synthetic construct; identical to SEQ ID NO: 16221
  REGION 1..451: note = Description of Artificial Sequence: Synthetic polypeptide
  REGION 1..451: note = XENP019193 1G6_H1_L1.188_IgG1_PVA_/S267K Heavy Chain

SEQ ID NO: 21332 - protein, 122 aa, synthetic construct; identical to SEQ ID NO: 10922
  REGION 1..122: note = Description of Artificial Sequence: Synthetic polypeptide
  REGION 1..122: note = VH of XENP019193

SEQ ID NO: 21333 - protein, 5 aa, synthetic construct
  REGION 1..5: note = Description of Artificial Sequence: Synthetic peptide
  REGION 1..5: note = XENP019193 vhCDR1
NYWMN

SEQ ID NO: 21334 - protein, 19 aa, synthetic construct
  REGION 1..19: note = Description of Artificial Sequence: Synthetic peptide
  REGION 1..19: note = XENP019193 vhCDR2
EIRLKSNNYATHYAEPVKG

SEQ ID NO: 21335 - protein, 11 aa, synthetic construct
  REGION 1..11: note = Description of Artificial Sequence: Synthetic peptide
  REGION 1..11: note = XENP019193 vhCDR3
YYGNYGGYFDV

SEQ ID NO: 21336 - protein, 214 aa, synthetic construct
  REGION 1..214: note = Description of Artificial Sequence: Synthetic polypeptide
  REGION 1..214: note = XENP019193 1G6_H1_L1.188_IgG1_PVA_/S267K Light Chain
EIVMTQSPATLSVSPGERVTLTCRASQSVGNDVAWYQQKPGQSPRLLINYASHRYTGVPDRFTGSGYGTEFTLTISSVQSEDFAVYFCQQDFSSPRTFGGGTKVEIKRTVAAPSVFIFPPSDEQLKSGTASVVCLLNNFYPREAKVQWKVDNALQSGNSQESVTEQDSKDSTYSLSSTLTLSKADYEKHKVYACEVTHQGLSSPVTKSFNRGEC

SEQ ID NO: 21337 - protein, 107 aa, synthetic construct; identical to SEQ ID NO: 15531
  REGION 1..107: note = Description of Artificial Sequence: Synthetic polypeptide
  REGION 1..107: note = VL of XENP019193

SEQ ID NO: 21338 - protein, 11 aa, synthetic construct
  REGION 1..11: note = Description of Artificial Sequence: Synthetic peptide
  REGION 1..11: note = XENP019193 vlCDR1
RASQSVGNDVA

SEQ ID NO: 21339 - protein, 7 aa, synthetic construct
  REGION 1..7: note = Description of Artificial Sequence: Synthetic peptide
  REGION 1..7: note = XENP019193 vlCDR2
YASHRYT

SEQ ID NO: 21340 - protein, 9 aa, synthetic construct
  REGION 1..9: note = Description of Artificial Sequence: Synthetic peptide
  REGION 1..9: note = XENP019193 vlCDR3
QQDFSSPRT

SEQ ID NO: 21341 - protein, 451 aa, synthetic construct; identical to SEQ ID NO: 16221
  REGION 1..451: note = Description of Artificial Sequence: Synthetic polypeptide
  REGION 1..451: note = XENP019194 1G6_H1_L1.189_IgG1_PVA_/S267K Heavy Chain

SEQ ID NO: 21342 - protein, 122 aa, synthetic construct; identical to SEQ ID NO: 10922
  REGION 1..122: note = Description of Artificial Sequence: Synthetic polypeptide
  REGION 1..122: note = VH of XENP019194

SEQ ID NO: 21343 - protein, 5 aa, synthetic construct
  REGION 1..5: note = Description of Artificial Sequence: Synthetic peptide
  REGION 1..5: note = XENP019194 vhCDR1
NYWMN

SEQ ID NO: 21344 - protein, 19 aa, synthetic construct
  REGION 1..19: note = Description of Artificial Sequence: Synthetic peptide
  REGION 1..19: note = XENP019194 vhCDR2
EIRLKSNNYATHYAEPVKG

SEQ ID NO: 21345 - protein, 11 aa, synthetic construct
  REGION 1..11: note = Description of Artificial Sequence: Synthetic peptide
  REGION 1..11: note = XENP019194 vhCDR3
YYGNYGGYFDV

SEQ ID NO: 21346 - protein, 214 aa, synthetic construct
  REGION 1..214: note = Description of Artificial Sequence: Synthetic polypeptide
  REGION 1..214: note = XENP019194 1G6_H1_L1.189_IgG1_PVA_/S267K Light Chain
EIVLTQSPATLSVSPGERVTLTCRASQSVGNDVAWYQQKPGQAPRLLINYASHRYTGVPDRFTGSGYGTEFTLTISSVQSEDFAVYYCQQDFSSPRTFGGGTKVEIKRTVAAPSVFIFPPSDEQLKSGTASVVCLLNNFYPREAKVQWKVDNALQSGNSQESVTEQDSKDSTYSLSSTLTLSKADYEKHKVYACEVTHQGLSSPVTKSFNRGEC

SEQ ID NO: 21347 - protein, 107 aa, synthetic construct; identical to SEQ ID NO: 15540
  REGION 1..107: note = Description of Artificial Sequence: Synthetic polypeptide
  REGION 1..107: note = VL of XENP019194

SEQ ID NO: 21348 - protein, 11 aa, synthetic construct
  REGION 1..11: note = Description of Artificial Sequence: Synthetic peptide
  REGION 1..11: note = XENP019194 vlCDR1
RASQSVGNDVA

SEQ ID NO: 21349 - protein, 7 aa, synthetic construct
  REGION 1..7: note = Description of Artificial Sequence: Synthetic peptide
  REGION 1..7: note = XENP019194 vlCDR2
YASHRYT

SEQ ID NO: 21350 - protein, 9 aa, synthetic construct
  REGION 1..9: note = Description of Artificial Sequence: Synthetic peptide
  REGION 1..9: note = XENP019194 vlCDR3
QQDFSSPRT

SEQ ID NO: 21351 - protein, 451 aa, synthetic construct
  REGION 1..451: note = Description of Artificial Sequence: Synthetic polypeptide
  REGION 1..451: note = XENP019195 1G6_H1.278_L1.188_IgG1_PVA_/S267K Heavy Chain
EVQLVESGGGLVKPGGSLRLSCVASGFTFSNYWMNWVRQAPGKGLEWVAEIRLYSNNYATHYAESVKGRFTISRDDSKSTLYLQMNNLKTEDTGVYYCTRYYGNYGGYFDVWGQGTLVTVSSASTKGPSVFPLAPSSKSTSGGTAALGCLVKDYFPEPVTVSWNSGALTSGVHTFPAVLQSSGLYSLSSVVTVPSSSLGTQTYICNVNHKPSNTKVDKKVEPKSCDKTHTCPPCPAPPVAGPSVFLFPPKPKDTLMISRTPEVTCVVVDVKHEDPEVKFNWYVDGVEVHNAKTKPREEQYNSTYRVVSVLTVLHQDWLNGKEYKCKVSNKALPAPIEKTISKAKGQPREPQVYTLPPSREEMTKNQVSLTCLVKGFYPSDIAVEWESNGQPENNYKTTPPVLDSDGSFFLYSKLTVDKSRWQQGNVFSCSVMHEALHNHYTQKSLSLSPGK

SEQ ID NO: 21352 - protein, 122 aa, synthetic construct; identical to SEQ ID NO: 15521
  REGION 1..122: note = Description of Artificial Sequence: Synthetic polypeptide
  REGION 1..122: note = VH of XENP019195

SEQ ID NO: 21353 - protein, 5 aa, synthetic construct
  REGION 1..5: note = Description of Artificial Sequence: Synthetic peptide
  REGION 1..5: note = XENP019195 vhCDR1
NYWMN

SEQ ID NO: 21354 - protein, 19 aa, synthetic construct
  REGION 1..19: note = Description of Artificial Sequence: Synthetic peptide
  REGION 1..19: note = XENP019195 vhCDR2
EIRLYSNNYATHYAESVKG

SEQ ID NO: 21355 - protein, 11 aa, synthetic construct
  REGION 1..11: note = Description of Artificial Sequence: Synthetic peptide
  REGION 1..11: note = XENP019195 vhCDR3
YYGNYGGYFDV

SEQ ID NO: 21356 - protein, 214 aa, synthetic construct; identical to SEQ ID NO: 21336
  REGION 1..214: note = Description of Artificial Sequence: Synthetic polypeptide
  REGION 1..214: note = XENP019195 1G6_H1.278_L1.188_IgG1_PVA_/S267K Light Chain

SEQ ID NO: 21357 - protein, 107 aa, synthetic construct; identical to SEQ ID NO: 15531
  REGION 1..107: note = Description of Artificial Sequence: Synthetic polypeptide
  REGION 1..107: note = VL of XENP019195

SEQ ID NO: 21358 - protein, 11 aa, synthetic construct
  REGION 1..11: note = Description of Artificial Sequence: Synthetic peptide
  REGION 1..11: note = XENP019195 vlCDR1
RASQSVGNDVA

SEQ ID NO: 21359 - protein, 7 aa, synthetic construct
  REGION 1..7: note = Description of Artificial Sequence: Synthetic peptide
  REGION 1..7: note = XENP019195 vlCDR2
YASHRYT

SEQ ID NO: 21360 - protein, 9 aa, synthetic construct
  REGION 1..9: note = Description of Artificial Sequence: Synthetic peptide
  REGION 1..9: note = XENP019195 vlCDR3
QQDFSSPRT

SEQ ID NO: 21361 - protein, 451 aa, synthetic construct; identical to SEQ ID NO: 21351
  REGION 1..451: note = Description of Artificial Sequence: Synthetic polypeptide
  REGION 1..451: note = XENP019196 1G6_H1.278_L1.189_IgG1_PVA_/S267K Heavy Chain

SEQ ID NO: 21362 - protein, 122 aa, synthetic construct; identical to SEQ ID NO: 15521
  REGION 1..122: note = Description of Artificial Sequence: Synthetic polypeptide
  REGION 1..122: note = VH of XENP019196

SEQ ID NO: 21363 - protein, 5 aa, synthetic construct
  REGION 1..5: note = Description of Artificial Sequence: Synthetic peptide
  REGION 1..5: note = XENP019196 vhCDR1
NYWMN

SEQ ID NO: 21364 - protein, 19 aa, synthetic construct
  REGION 1..19: note = Description of Artificial Sequence: Synthetic peptide
  REGION 1..19: note = XENP019196 vhCDR2
EIRLYSNNYATHYAESVKG

SEQ ID NO: 21365 - protein, 11 aa, synthetic construct
  REGION 1..11: note = Description of Artificial Sequence: Synthetic peptide
  REGION 1..11: note = XENP019196 vhCDR3
YYGNYGGYFDV

SEQ ID NO: 21366 - protein, 214 aa, synthetic construct; identical to SEQ ID NO: 21346
  REGION 1..214: note = Description of Artificial Sequence: Synthetic polypeptide
  REGION 1..214: note = XENP019196 1G6_H1.278_L1.189_IgG1_PVA_/S267K Light Chain

SEQ ID NO: 21367 - protein, 107 aa, synthetic construct; identical to SEQ ID NO: 15540
  REGION 1..107: note = Description of Artificial Sequence: Synthetic polypeptide
  REGION 1..107: note = VL of XENP019196

SEQ ID NO: 21368 - protein, 11 aa, synthetic construct
  REGION 1..11: note = Description of Artificial Sequence: Synthetic peptide
  REGION 1..11: note = XENP019196 vlCDR1
RASQSVGNDVA

SEQ ID NO: 21369 - protein, 7 aa, synthetic construct
  REGION 1..7: note = Description of Artificial Sequence: Synthetic peptide
  REGION 1..7: note = XENP019196 vlCDR2
YASHRYT

SEQ ID NO: 21370 - protein, 9 aa, synthetic construct
  REGION 1..9: note = Description of Artificial Sequence: Synthetic peptide
  REGION 1..9: note = XENP019196 vlCDR3
QQDFSSPRT

SEQ ID NO: 21371 - protein, 451 aa, synthetic construct; identical to SEQ ID NO: 21351
  REGION 1..451: note = Description of Artificial Sequence: Synthetic polypeptide
  REGION 1..451: note = XENP019201 1G6_H1.278_L1_IgG1_PVA_/S267K Heavy Chain

SEQ ID NO: 21372 - protein, 122 aa, synthetic construct; identical to SEQ ID NO: 15521
  REGION 1..122: note = Description of Artificial Sequence: Synthetic polypeptide
  REGION 1..122: note = VH of XENP019201

SEQ ID NO: 21373 - protein, 5 aa, synthetic construct
  REGION 1..5: note = Description of Artificial Sequence: Synthetic peptide
  REGION 1..5: note = XENP019201 vhCDR1
NYWMN

SEQ ID NO: 21374 - protein, 19 aa, synthetic construct
  REGION 1..19: note = Description of Artificial Sequence: Synthetic peptide
  REGION 1..19: note = XENP019201 vhCDR2
EIRLYSNNYATHYAESVKG

SEQ ID NO: 21375 - protein, 11 aa, synthetic construct
  REGION 1..11: note = Description of Artificial Sequence: Synthetic peptide
  REGION 1..11: note = XENP019201 vhCDR3
YYGNYGGYFDV

SEQ ID NO: 21376 - protein, 214 aa, synthetic construct; identical to SEQ ID NO: 16226
  REGION 1..214: note = Description of Artificial Sequence: Synthetic polypeptide
  REGION 1..214: note = XENP019201 1G6_H1.278_L1_IgG1_PVA_/S267K Light Chain

SEQ ID NO: 21377 - protein, 107 aa, synthetic construct; identical to SEQ ID NO: 10923
  REGION 1..107: note = Description of Artificial Sequence: Synthetic polypeptide
  REGION 1..107: note = VL of XENP019201

SEQ ID NO: 21378 - protein, 11 aa, synthetic construct
  REGION 1..11: note = Description of Artificial Sequence: Synthetic peptide
  REGION 1..11: note = XENP019201 vlCDR1
RASQSVSNDVA

SEQ ID NO: 21379 - protein, 7 aa, synthetic construct
  REGION 1..7: note = Description of Artificial Sequence: Synthetic peptide
  REGION 1..7: note = XENP019201 vlCDR2
YASHRYT

SEQ ID NO: 21380 - protein, 9 aa, synthetic construct
  REGION 1..9: note = Description of Artificial Sequence: Synthetic peptide
  REGION 1..9: note = XENP019201 vlCDR3
QQDYSSPRT

SEQ ID NO: 21381 - protein, 451 aa, synthetic construct
  REGION 1..451: note = Description of Artificial Sequence: Synthetic polypeptide
  REGION 1..451: note = XENP019589 1G6_H1.279_L1.189_IgG1_PVA_/S267K Heavy Chain
EVQLVESGGGLVKPGGSLRLSCVASGFTFSNYWMNWVRQAPGKGLEWVAEIRLYSNNYATHYAESVKGRFTISRDDSKSTLYLQMNNLKTEDTGVYYCTRYYGNYGGYFDVWGRGTLVTVSSASTKGPSVFPLAPSSKSTSGGTAALGCLVKDYFPEPVTVSWNSGALTSGVHTFPAVLQSSGLYSLSSVVTVPSSSLGTQTYICNVNHKPSNTKVDKKVEPKSCDKTHTCPPCPAPPVAGPSVFLFPPKPKDTLMISRTPEVTCVVVDVKHEDPEVKFNWYVDGVEVHNAKTKPREEQYNSTYRVVSVLTVLHQDWLNGKEYKCKVSNKALPAPIEKTISKAKGQPREPQVYTLPPSREEMTKNQVSLTCLVKGFYPSDIAVEWESNGQPENNYKTTPPVLDSDGSFFLYSKLTVDKSRWQQGNVFSCSVMHEALHNHYTQKSLSLSPGK

SEQ ID NO: 21382 - protein, 122 aa, synthetic construct; identical to SEQ ID NO: 2872
  REGION 1..122: note = Description of Artificial Sequence: Synthetic polypeptide
  REGION 1..122: note = VH of XENP019589

SEQ ID NO: 21383 - protein, 5 aa, synthetic construct
  REGION 1..5: note = Description of Artificial Sequence: Synthetic peptide
  REGION 1..5: note = XENP019589 vhCDR1
NYWMN

SEQ ID NO: 21384 - protein, 19 aa, synthetic construct
  REGION 1..19: note = Description of Artificial Sequence: Synthetic peptide
  REGION 1..19: note = XENP019589 vhCDR2
EIRLYSNNYATHYAESVKG

SEQ ID NO: 21385 - protein, 11 aa, synthetic construct
  REGION 1..11: note = Description of Artificial Sequence: Synthetic peptide
  REGION 1..11: note = XENP019589 vhCDR3
YYGNYGGYFDV

SEQ ID NO: 21386 - protein, 214 aa, synthetic construct; identical to SEQ ID NO: 21346
  REGION 1..214: note = Description of Artificial Sequence: Synthetic polypeptide
  REGION 1..214: note = XENP019589 1G6_H1.279_L1.189_IgG1_PVA_/S267K Light Chain

SEQ ID NO: 21387 - protein, 107 aa, synthetic construct; identical to SEQ ID NO: 15540
  REGION 1..107: note = Description of Artificial Sequence: Synthetic polypeptide
  REGION 1..107: note = VL of XENP019589

SEQ ID NO: 21388 - protein, 11 aa, synthetic construct
  REGION 1..11: note = Description of Artificial Sequence: Synthetic peptide
  REGION 1..11: note = XENP019589 vlCDR1
RASQSVGNDVA

SEQ ID NO: 21389 - protein, 7 aa, synthetic construct
  REGION 1..7: note = Description of Artificial Sequence: Synthetic peptide
  REGION 1..7: note = XENP019589 vlCDR2
YASHRYT

SEQ ID NO: 21390 - protein, 9 aa, synthetic construct
  REGION 1..9: note = Description of Artificial Sequence: Synthetic peptide
  REGION 1..9: note = XENP019589 vlCDR3
QQDFSSPRT

SEQ ID NO: 21391 - protein, 451 aa, synthetic construct
  REGION 1..451: note = Description of Artificial Sequence: Synthetic polypeptide
  REGION 1..451: note = XENP019590 1G6_H1.280_L1.189_IgG1_PVA_/S267K Heavy Chain
EVQLVESGGGLVKPGGSLRLTCVASGFTFSNYWMNWVRQAPGKGLEWVAEIRLYSNNYATHYAESVKGRFTISRDDSKSTLYLQMNNLKTEDTGVYYCTRYYGNYGGYFDVWGRGTLVTVSSASTKGPSVFPLAPSSKSTSGGTAALGCLVKDYFPEPVTVSWNSGALTSGVHTFPAVLQSSGLYSLSSVVTVPSSSLGTQTYICNVNHKPSNTKVDKKVEPKSCDKTHTCPPCPAPPVAGPSVFLFPPKPKDTLMISRTPEVTCVVVDVKHEDPEVKFNWYVDGVEVHNAKTKPREEQYNSTYRVVSVLTVLHQDWLNGKEYKCKVSNKALPAPIEKTISKAKGQPREPQVYTLPPSREEMTKNQVSLTCLVKGFYPSDIAVEWESNGQPENNYKTTPPVLDSDGSFFLYSKLTVDKSRWQQGNVFSCSVMHEALHNHYTQKSLSLSPGK

SEQ ID NO: 21392 - protein, 122 aa, synthetic construct; identical to SEQ ID NO: 15593
  REGION 1..122: note = Description of Artificial Sequence: Synthetic polypeptide
  REGION 1..122: note = VH of XENP019590

SEQ ID NO: 21393 - protein, 5 aa, synthetic construct
  REGION 1..5: note = Description of Artificial Sequence: Synthetic peptide
  REGION 1..5: note = XENP019590 vhCDR1
NYWMN

SEQ ID NO: 21394 - protein, 19 aa, synthetic construct
  REGION 1..19: note = Description of Artificial Sequence: Synthetic peptide
  REGION 1..19: note = XENP019590 vhCDR2
EIRLYSNNYATHYAESVKG

SEQ ID NO: 21395 - protein, 11 aa, synthetic construct
  REGION 1..11: note = Description of Artificial Sequence: Synthetic peptide
  REGION 1..11: note = XENP019590 vhCDR3
YYGNYGGYFDV

SEQ ID NO: 21396 - protein, 214 aa, synthetic construct; identical to SEQ ID NO: 21346
  REGION 1..214: note = Description of Artificial Sequence: Synthetic polypeptide
  REGION 1..214: note = XENP019590 1G6_H1.280_L1.189_IgG1_PVA_/S267K Light Chain

SEQ ID NO: 21397 - protein, 107 aa, synthetic construct; identical to SEQ ID NO: 15540
  REGION 1..107: note = Description of Artificial Sequence: Synthetic polypeptide
  REGION 1..107: note = VL of XENP019590

SEQ ID NO: 21398 - protein, 11 aa, synthetic construct
  REGION 1..11: note = Description of Artificial Sequence: Synthetic peptide
  REGION 1..11: note = XENP019590 vlCDR1
RASQSVGNDVA

SEQ ID NO: 21399 - protein, 7 aa, synthetic construct
  REGION 1..7: note = Description of Artificial Sequence: Synthetic peptide
  REGION 1..7: note = XENP019590 vlCDR2
YASHRYT

SEQ ID NO: 21400 - protein, 9 aa, synthetic construct
  REGION 1..9: note = Description of Artificial Sequence: Synthetic peptide
  REGION 1..9: note = XENP019590 vlCDR3
QQDFSSPRT

SEQ ID NO: 21401 - protein, 451 aa, synthetic construct
  REGION 1..451: note = Description of Artificial Sequence: Synthetic polypeptide
  REGION 1..451: note = XENP019591 1G6_H1.281_L1.189_IgG1_PVA_/S267K Heavy Chain
EVQLVESGGGLVKPGGSLRLSCVASGFTFSNYWMNWVRQAPGKGLEWVAEIRLYSNNYATHYAESVKGRFTISRDDSKSMLYLQMNNLKTEDTGVYYCTRYYGNYGGYFDVWGRGTLVTVSSASTKGPSVFPLAPSSKSTSGGTAALGCLVKDYFPEPVTVSWNSGALTSGVHTFPAVLQSSGLYSLSSVVTVPSSSLGTQTYICNVNHKPSNTKVDKKVEPKSCDKTHTCPPCPAPPVAGPSVFLFPPKPKDTLMISRTPEVTCVVVDVKHEDPEVKFNWYVDGVEVHNAKTKPREEQYNSTYRVVSVLTVLHQDWLNGKEYKCKVSNKALPAPIEKTISKAKGQPREPQVYTLPPSREEMTKNQVSLTCLVKGFYPSDIAVEWESNGQPENNYKTTPPVLDSDGSFFLYSKLTVDKSRWQQGNVFSCSVMHEALHNHYTQKSLSLSPGK

SEQ ID NO: 21402 - protein, 122 aa, synthetic construct; identical to SEQ ID NO: 15602
  REGION 1..122: note = Description of Artificial Sequence: Synthetic polypeptide
  REGION 1..122: note = VH of XENP019591

SEQ ID NO: 21403 - protein, 5 aa, synthetic construct
  REGION 1..5: note = Description of Artificial Sequence: Synthetic peptide
  REGION 1..5: note = XENP019591 vhCDR1
NYWMN

SEQ ID NO: 21404 - protein, 19 aa, synthetic construct
  REGION 1..19: note = Description of Artificial Sequence: Synthetic peptide
  REGION 1..19: note = XENP019591 vhCDR2
EIRLYSNNYATHYAESVKG

SEQ ID NO: 21405 - protein, 11 aa, synthetic construct
  REGION 1..11: note = Description of Artificial Sequence: Synthetic peptide
  REGION 1..11: note = XENP019591 vhCDR3
YYGNYGGYFDV

SEQ ID NO: 21406 - protein, 214 aa, synthetic construct; identical to SEQ ID NO: 21346
  REGION 1..214: note = Description of Artificial Sequence: Synthetic polypeptide
  REGION 1..214: note = XENP019591 1G6_H1.281_L1.189_IgG1_PVA_/S267K Light Chain

SEQ ID NO: 21407 - protein, 107 aa, synthetic construct; identical to SEQ ID NO: 15540
  REGION 1..107: note = Description of Artificial Sequence: Synthetic polypeptide
  REGION 1..107: note = VL of XENP019591

SEQ ID NO: 21408 - protein, 11 aa, synthetic construct
  REGION 1..11: note = Description of Artificial Sequence: Synthetic peptide
  REGION 1..11: note = XENP019591 vlCDR1
RASQSVGNDVA

SEQ ID NO: 21409 - protein, 7 aa, synthetic construct
  REGION 1..7: note = Description of Artificial Sequence: Synthetic peptide
  REGION 1..7: note = XENP019591 vlCDR2
YASHRYT

SEQ ID NO: 21410 - protein, 9 aa, synthetic construct
  REGION 1..9: note = Description of Artificial Sequence: Synthetic peptide
  REGION 1..9: note = XENP019591 vlCDR3
QQDFSSPRT

SEQ ID NO: 21411 - protein, 451 aa, synthetic construct
  REGION 1..451: note = Description of Artificial Sequence: Synthetic polypeptide
  REGION 1..451: note = XENP019592 1G6_H1.282_L1.189_IgG1_PVA_/S267K Heavy Chain
EVQLVESGGGLVKPGGSLRLTCVASGFTFSNYWMNWVRQAPGKGLEWVAEIRLYSNNYATHYAESVKGRFTISRDDSKSMLYLQMNNLKTEDTGVYYCTRYYGNYGGYFDVWGRGTLVTVSSASTKGPSVFPLAPSSKSTSGGTAALGCLVKDYFPEPVTVSWNSGALTSGVHTFPAVLQSSGLYSLSSVVTVPSSSLGTQTYICNVNHKPSNTKVDKKVEPKSCDKTHTCPPCPAPPVAGPSVFLFPPKPKDTLMISRTPEVTCVVVDVKHEDPEVKFNWYVDGVEVHNAKTKPREEQYNSTYRVVSVLTVLHQDWLNGKEYKCKVSNKALPAPIEKTISKAKGQPREPQVYTLPPSREEMTKNQVSLTCLVKGFYPSDIAVEWESNGQPENNYKTTPPVLDSDGSFFLYSKLTVDKSRWQQGNVFSCSVMHEALHNHYTQKSLSLSPGK

SEQ ID NO: 21412 - protein, 122 aa, synthetic construct; identical to SEQ ID NO: 15611
  REGION 1..122: note = Description of Artificial Sequence: Synthetic polypeptide
  REGION 1..122: note = VH of XENP019592

SEQ ID NO: 21413 - protein, 5 aa, synthetic construct
  REGION 1..5: note = Description of Artificial Sequence: Synthetic peptide
  REGION 1..5: note = XENP019592 vhCDR1
NYWMN

SEQ ID NO: 21414 - protein, 19 aa, synthetic construct
  REGION 1..19: note = Description of Artificial Sequence: Synthetic peptide
  REGION 1..19: note = XENP019592 vhCDR2
EIRLYSNNYATHYAESVKG

SEQ ID NO: 21415 - protein, 11 aa, synthetic construct
  REGION 1..11: note = Description of Artificial Sequence: Synthetic peptide
  REGION 1..11: note = XENP019592 vhCDR3
YYGNYGGYFDV

SEQ ID NO: 21416 - protein, 214 aa, synthetic construct; identical to SEQ ID NO: 21346
  REGION 1..214: note = Description of Artificial Sequence: Synthetic polypeptide
  REGION 1..214: note = XENP019592 1G6_H1.282_L1.189_IgG1_PVA_/S267K Light Chain

SEQ ID NO: 21417 - protein, 107 aa, synthetic construct; identical to SEQ ID NO: 15540
  REGION 1..107: note = Description of Artificial Sequence: Synthetic polypeptide
  REGION 1..107: note = VL of XENP019592

SEQ ID NO: 21418 - protein, 11 aa, synthetic construct
  REGION 1..11: note = Description of Artificial Sequence: Synthetic peptide
  REGION 1..11: note = XENP019592 vlCDR1
RASQSVGNDVA

SEQ ID NO: 21419 - protein, 7 aa, synthetic construct
  REGION 1..7: note = Description of Artificial Sequence: Synthetic peptide
  REGION 1..7: note = XENP019592 vlCDR2
YASHRYT

SEQ ID NO: 21420 - protein, 9 aa, synthetic construct
  REGION 1..9: note = Description of Artificial Sequence: Synthetic peptide
  REGION 1..9: note = XENP019592 vlCDR3
QQDFSSPRT

SEQ ID NO: 21421 - protein, 451 aa, synthetic construct
  REGION 1..451: note = Description of Artificial Sequence: Synthetic polypeptide
  REGION 1..451: note = XENP019593 1G6_H1.283_L1.189_IgG1_PVA_/S267K Heavy Chain
EVQLVESGGGLVKPGGSLRLSCVASGFTFSNYWMNWVRQAPGKGLEWVCEIRLYSNNYATHYAESVKGRFTCSRDDSKSTLYLQMNNLKTEDTGVYYCTRYYGNYGGYFDVWGQGTLVTVSSASTKGPSVFPLAPSSKSTSGGTAALGCLVKDYFPEPVTVSWNSGALTSGVHTFPAVLQSSGLYSLSSVVTVPSSSLGTQTYICNVNHKPSNTKVDKKVEPKSCDKTHTCPPCPAPPVAGPSVFLFPPKPKDTLMISRTPEVTCVVVDVKHEDPEVKFNWYVDGVEVHNAKTKPREEQYNSTYRVVSVLTVLHQDWLNGKEYKCKVSNKALPAPIEKTISKAKGQPREPQVYTLPPSREEMTKNQVSLTCLVKGFYPSDIAVEWESNGQPENNYKTTPPVLDSDGSFFLYSKLTVDKSRWQQGNVFSCSVMHEALHNHYTQKSLSLSPGK

SEQ ID NO: 21422 - protein, 122 aa, synthetic construct; identical to SEQ ID NO: 15620
  REGION 1..122: note = Description of Artificial Sequence: Synthetic polypeptide
  REGION 1..122: note = VH of XENP019593

SEQ ID NO: 21423 - protein, 5 aa, synthetic construct
  REGION 1..5: note = Description of Artificial Sequence: Synthetic peptide
  REGION 1..5: note = XENP019593 vhCDR1
NYWMN

SEQ ID NO: 21424 - protein, 19 aa, synthetic construct
  REGION 1..19: note = Description of Artificial Sequence: Synthetic peptide
  REGION 1..19: note = XENP019593 vhCDR2
EIRLYSNNYATHYAESVKG

SEQ ID NO: 21425 - protein, 11 aa, synthetic construct
  REGION 1..11: note = Description of Artificial Sequence: Synthetic peptide
  REGION 1..11: note = XENP019593 vhCDR3
YYGNYGGYFDV

SEQ ID NO: 21426 - protein, 214 aa, synthetic construct; identical to SEQ ID NO: 21346
  REGION 1..214: note = Description of Artificial Sequence: Synthetic polypeptide
  REGION 1..214: note = XENP019593 1G6_H1.283_L1.189_IgG1_PVA_/S267K Light Chain

SEQ ID NO: 21427 - protein, 107 aa, synthetic construct; identical to SEQ ID NO: 15540
  REGION 1..107: note = Description of Artificial Sequence: Synthetic polypeptide
  REGION 1..107: note = VL of XENP019593

SEQ ID NO: 21428 - protein, 11 aa, synthetic construct
  REGION 1..11: note = Description of Artificial Sequence: Synthetic peptide
  REGION 1..11: note = XENP019593 vlCDR1
RASQSVGNDVA

SEQ ID NO: 21429 - protein, 7 aa, synthetic construct
  REGION 1..7: note = Description of Artificial Sequence: Synthetic peptide
  REGION 1..7: note = XENP019593 vlCDR2
YASHRYT

SEQ ID NO: 21430 - protein, 9 aa, synthetic construct
  REGION 1..9: note = Description of Artificial Sequence: Synthetic peptide
  REGION 1..9: note = XENP019593 vlCDR3
QQDFSSPRT

SEQ ID NO: 21431 - protein, 451 aa, synthetic construct
  REGION 1..451: note = Description of Artificial Sequence: Synthetic polypeptide
  REGION 1..451: note = XENP019594 1G6_H1.284_L1.189_IgG1_PVA_/S267K Heavy Chain
EVQLVESGGGLVKPGGSLRLSCVASGFTFSNYWMNWVRQAPGKGLEWVCEIRLYSNNYATHYAESVKGRFTCSRDDSKSTLYLQMNNLKTEDTGVYYCTRYYGNYGGYFDVWGRGTLVTVSSASTKGPSVFPLAPSSKSTSGGTAALGCLVKDYFPEPVTVSWNSGALTSGVHTFPAVLQSSGLYSLSSVVTVPSSSLGTQTYICNVNHKPSNTKVDKKVEPKSCDKTHTCPPCPAPPVAGPSVFLFPPKPKDTLMISRTPEVTCVVVDVKHEDPEVKFNWYVDGVEVHNAKTKPREEQYNSTYRVVSVLTVLHQDWLNGKEYKCKVSNKALPAPIEKTISKAKGQPREPQVYTLPPSREEMTKNQVSLTCLVKGFYPSDIAVEWESNGQPENNYKTTPPVLDSDGSFFLYSKLTVDKSRWQQGNVFSCSVMHEALHNHYTQKSLSLSPGK

SEQ ID NO: 21432 - protein, 122 aa, synthetic construct; identical to SEQ ID NO: 15629
  REGION 1..122: note = Description of Artificial Sequence: Synthetic polypeptide
  REGION 1..122: note = VH of XENP019594

SEQ ID NO: 21433 - protein, 5 aa, synthetic construct
  REGION 1..5: note = Description of Artificial Sequence: Synthetic peptide
  REGION 1..5: note = XENP019594 vhCDR1
NYWMN

SEQ ID NO: 21434 - protein, 19 aa, synthetic construct
  REGION 1..19: note = Description of Artificial Sequence: Synthetic peptide
  REGION 1..19: note = XENP019594 vhCDR2
EIRLYSNNYATHYAESVKG

SEQ ID NO: 21435 - protein, 11 aa, synthetic construct
  REGION 1..11: note = Description of Artificial Sequence: Synthetic peptide
  REGION 1..11: note = XENP019594 vhCDR3
YYGNYGGYFDV

SEQ ID NO: 21436 - protein, 214 aa, synthetic construct; identical to SEQ ID NO: 21346
  REGION 1..214: note = Description of Artificial Sequence: Synthetic polypeptide
  REGION 1..214: note = XENP019594 1G6_H1.284_L1.189_IgG1_PVA_/S267K Light Chain

SEQ ID NO: 21437 - protein, 107 aa, synthetic construct; identical to SEQ ID NO: 15540
  REGION 1..107: note = Description of Artificial Sequence: Synthetic polypeptide
  REGION 1..107: note = VL of XENP019594

SEQ ID NO: 21438 - protein, 11 aa, synthetic construct
  REGION 1..11: note = Description of Artificial Sequence: Synthetic peptide
  REGION 1..11: note = XENP019594 vlCDR1
RASQSVGNDVA

SEQ ID NO: 21439 - protein, 7 aa, synthetic construct
  REGION 1..7: note = Description of Artificial Sequence: Synthetic peptide
  REGION 1..7: note = XENP019594 vlCDR2
YASHRYT

SEQ ID NO: 21440 - protein, 9 aa, synthetic construct
  REGION 1..9: note = Description of Artificial Sequence: Synthetic peptide
  REGION 1..9: note = XENP019594 vlCDR3
QQDFSSPRT

SEQ ID NO: 21441 - protein, 451 aa, synthetic construct
  REGION 1..451: note = Description of Artificial Sequence: Synthetic polypeptide
  REGION 1..451: note = XENP019595 1G6_H1.285_L1.189_IgG1_PVA_/S267K Heavy Chain
EVQLVESGGGLVKPGGSLRLTCVASGFTFSNYWMNWVRQAPGKGLEWVCEIRLYSNNYATHYAESVKGRFTCSRDDSKSMLYLQMNNLKTEDTGVYYCTRYYGNYGGYFDVWGRGTLVTVSSASTKGPSVFPLAPSSKSTSGGTAALGCLVKDYFPEPVTVSWNSGALTSGVHTFPAVLQSSGLYSLSSVVTVPSSSLGTQTYICNVNHKPSNTKVDKKVEPKSCDKTHTCPPCPAPPVAGPSVFLFPPKPKDTLMISRTPEVTCVVVDVKHEDPEVKFNWYVDGVEVHNAKTKPREEQYNSTYRVVSVLTVLHQDWLNGKEYKCKVSNKALPAPIEKTISKAKGQPREPQVYTLPPSREEMTKNQVSLTCLVKGFYPSDIAVEWESNGQPENNYKTTPPVLDSDGSFFLYSKLTVDKSRWQQGNVFSCSVMHEALHNHYTQKSLSLSPGK

SEQ ID NO: 21442 - protein, 122 aa, synthetic construct; identical to SEQ ID NO: 15638
  REGION 1..122: note = Description of Artificial Sequence: Synthetic polypeptide
  REGION 1..122: note = VH of XENP019595

SEQ ID NO: 21443 - protein, 5 aa, synthetic construct
  REGION 1..5: note = Description of Artificial Sequence: Synthetic peptide
  REGION 1..5: note = XENP019595 vhCDR1
NYWMN

SEQ ID NO: 21444 - protein, 19 aa, synthetic construct
  REGION 1..19: note = Description of Artificial Sequence: Synthetic peptide
  REGION 1..19: note = XENP019595 vhCDR2
EIRLYSNNYATHYAESVKG

SEQ ID NO: 21445 - protein, 11 aa, synthetic construct
  REGION 1..11: note = Description of Artificial Sequence: Synthetic peptide
  REGION 1..11: note = XENP019595 vhCDR3
YYGNYGGYFDV

SEQ ID NO: 21446 - protein, 214 aa, synthetic construct; identical to SEQ ID NO: 21346
  REGION 1..214: note = Description of Artificial Sequence: Synthetic polypeptide
  REGION 1..214: note = XENP019595 1G6_H1.285_L1.189_IgG1_PVA_/S267K Light Chain

SEQ ID NO: 21447 - protein, 107 aa, synthetic construct; identical to SEQ ID NO: 15540
  REGION 1..107: note = Description of Artificial Sequence: Synthetic polypeptide
  REGION 1..107: note = VL of XENP019595

SEQ ID NO: 21448 - protein, 11 aa, synthetic construct
  REGION 1..11: note = Description of Artificial Sequence: Synthetic peptide
  REGION 1..11: note = XENP019595 vlCDR1
RASQSVGNDVA

SEQ ID NO: 21449 - protein, 7 aa, synthetic construct
  REGION 1..7: note = Description of Artificial Sequence: Synthetic peptide
  REGION 1..7: note = XENP019595 vlCDR2
YASHRYT

SEQ ID NO: 21450 - protein, 9 aa, synthetic construct
  REGION 1..9: note = Description of Artificial Sequence: Synthetic peptide
  REGION 1..9: note = XENP019595 vlCDR3
QQDFSSPRT

SEQ ID NO: 21451 - protein, 451 aa, synthetic construct
  REGION 1..451: note = Description of Artificial Sequence: Synthetic polypeptide
  REGION 1..451: note = XENP019596 1G6_H1.286_L1.189_IgG1_PVA_/S267K Heavy Chain
EVQLVESGGGLVKPGGSLRLSCVASGFTFSNYWMNWVRQAPGKGLEWVAEIRLYSDNYATHYAESVKGRFTISRDDSKSTLYLQMNNLKTEDTGVYYCTRYYGNYGGYFDVWGQGTLVTVSSASTKGPSVFPLAPSSKSTSGGTAALGCLVKDYFPEPVTVSWNSGALTSGVHTFPAVLQSSGLYSLSSVVTVPSSSLGTQTYICNVNHKPSNTKVDKKVEPKSCDKTHTCPPCPAPPVAGPSVFLFPPKPKDTLMISRTPEVTCVVVDVKHEDPEVKFNWYVDGVEVHNAKTKPREEQYNSTYRVVSVLTVLHQDWLNGKEYKCKVSNKALPAPIEKTISKAKGQPREPQVYTLPPSREEMTKNQVSLTCLVKGFYPSDIAVEWESNGQPENNYKTTPPVLDSDGSFFLYSKLTVDKSRWQQGNVFSCSVMHEALHNHYTQKSLSLSPGK

SEQ ID NO: 21452 - protein, 122 aa, synthetic construct; identical to SEQ ID NO: 15647
  REGION 1..122: note = Description of Artificial Sequence: Synthetic polypeptide
  REGION 1..122: note = VH of XENP019596

SEQ ID NO: 21453 - protein, 5 aa, synthetic construct
  REGION 1..5: note = Description of Artificial Sequence: Synthetic peptide
  REGION 1..5: note = XENP019596 vhCDR1
NYWMN

SEQ ID NO: 21454 - protein, 19 aa, synthetic construct
  REGION 1..19: note = Description of Artificial Sequence: Synthetic peptide
  REGION 1..19: note = XENP019596 vhCDR2
EIRLYSDNYATHYAESVKG

SEQ ID NO: 21455 - protein, 11 aa, synthetic construct
  REGION 1..11: note = Description of Artificial Sequence: Synthetic peptide
  REGION 1..11: note = XENP019596 vhCDR3
YYGNYGGYFDV

SEQ ID NO: 21456 - protein, 214 aa, synthetic construct; identical to SEQ ID NO: 21346
  REGION 1..214: note = Description of Artificial Sequence: Synthetic polypeptide
  REGION 1..214: note = XENP019596 1G6_H1.286_L1.189_IgG1_PVA_/S267K Light Chain

SEQ ID NO: 21457 - protein, 107 aa, synthetic construct; identical to SEQ ID NO: 15540
  REGION 1..107: note = Description of Artificial Sequence: Synthetic polypeptide
  REGION 1..107: note = VL of XENP019596

SEQ ID NO: 21458 - protein, 11 aa, synthetic construct
  REGION 1..11: note = Description of Artificial Sequence: Synthetic peptide
  REGION 1..11: note = XENP019596 vlCDR1
RASQSVGNDVA

SEQ ID NO: 21459 - protein, 7 aa, synthetic construct
  REGION 1..7: note = Description of Artificial Sequence: Synthetic peptide
  REGION 1..7: note = XENP019596 vlCDR2
YASHRYT

SEQ ID NO: 21460 - protein, 9 aa, synthetic construct
  REGION 1..9: note = Description of Artificial Sequence: Synthetic peptide
  REGION 1..9: note = XENP019596 vlCDR3
QQDFSSPRT

SEQ ID NO: 21461 - protein, 451 aa, synthetic construct; identical to SEQ ID NO: 21351
  REGION 1..451: note = Description of Artificial Sequence: Synthetic polypeptide
  REGION 1..451: note = XENP019601 1G6_H1.278_L1.192_IgG1_PVA_/S267K Heavy Chain

SEQ ID NO: 21462 - protein, 122 aa, synthetic construct; identical to SEQ ID NO: 15521
  REGION 1..122: note = Description of Artificial Sequence: Synthetic polypeptide
  REGION 1..122: note = VH of XENP019601

SEQ ID NO: 21463 - protein, 5 aa, synthetic construct
  REGION 1..5: note = Description of Artificial Sequence: Synthetic peptide
  REGION 1..5: note = XENP019601 vhCDR1
NYWMN

SEQ ID NO: 21464 - protein, 19 aa, synthetic construct
  REGION 1..19: note = Description of Artificial Sequence: Synthetic peptide
  REGION 1..19: note = XENP019601 vhCDR2
EIRLYSNNYATHYAESVKG

SEQ ID NO: 21465 - protein, 11 aa, synthetic construct
  REGION 1..11: note = Description of Artificial Sequence: Synthetic peptide
  REGION 1..11: note = XENP019601 vhCDR3
YYGNYGGYFDV

SEQ ID NO: 21466 - protein, 214 aa, synthetic construct
  REGION 1..214: note = Description of Artificial Sequence: Synthetic polypeptide
  REGION 1..214: note = XENP019601 1G6_H1.278_L1.192_IgG1_PVA_/S267K Light Chain
EIVLTQSPATLSASPGERVTLTCRASQSVGNDVAWYQQKPGQAPRLLINYASHRYTGVPDRFTGSGYGTEFTLTISSVQSEDFAVYYCQQDFSSPRTFGGGTKVEIKRTVAAPSVFIFPPSDEQLKSGTASVVCLLNNFYPREAKVQWKVDNALQSGNSQESVTEQDSKDSTYSLSSTLTLSKADYEKHKVYACEVTHQGLSSPVTKSFNRGEC

SEQ ID NO: 21467 - protein, 107 aa, synthetic construct; identical to SEQ ID NO: 15657
  REGION 1..107: note = Description of Artificial Sequence: Synthetic polypeptide
  REGION 1..107: note = VL of XENP019601

SEQ ID NO: 21468 - protein, 11 aa, synthetic construct
  REGION 1..11: note = Description of Artificial Sequence: Synthetic peptide
  REGION 1..11: note = XENP019601 vlCDR1
RASQSVGNDVA

SEQ ID NO: 21469 - protein, 7 aa, synthetic construct
  REGION 1..7: note = Description of Artificial Sequence: Synthetic peptide
  REGION 1..7: note = XENP019601 vlCDR2
YASHRYT

SEQ ID NO: 21470 - protein, 9 aa, synthetic construct
  REGION 1..9: note = Description of Artificial Sequence: Synthetic peptide
  REGION 1..9: note = XENP019601 vlCDR3
QQDFSSPRT

SEQ ID NO: 21471 - protein, 451 aa, synthetic construct; identical to SEQ ID NO: 21351
  REGION 1..451: note = Description of Artificial Sequence: Synthetic polypeptide
  REGION 1..451: note = XENP019602 1G6_H1.278_L1.193_IgG1_PVA_/S267K Heavy Chain

SEQ ID NO: 21472 - protein, 122 aa, synthetic construct; identical to SEQ ID NO: 15521
  REGION 1..122: note = Description of Artificial Sequence: Synthetic polypeptide
  REGION 1..122: note = VH of XENP019602

SEQ ID NO: 21473 - protein, 5 aa, synthetic construct
  REGION 1..5: note = Description of Artificial Sequence: Synthetic peptide
  REGION 1..5: note = XENP019602 vhCDR1
NYWMN

SEQ ID NO: 21474 - protein, 19 aa, synthetic construct
  REGION 1..19: note = Description of Artificial Sequence: Synthetic peptide
  REGION 1..19: note = XENP019602 vhCDR2
EIRLYSNNYATHYAESVKG

SEQ ID NO: 21475 - protein, 11 aa, synthetic construct
  REGION 1..11: note = Description of Artificial Sequence: Synthetic peptide
  REGION 1..11: note = XENP019602 vhCDR3
YYGNYGGYFDV

SEQ ID NO: 21476 - protein, 214 aa, synthetic construct
  REGION 1..214: note = Description of Artificial Sequence: Synthetic polypeptide
  REGION 1..214: note = XENP019602 1G6_H1.278_L1.193_IgG1_PVA_/S267K Light Chain
EIVLTQSPATLSVSPGERVTLTCRASQSVGNDVAWYQQKPGQAPRLLINYASHRYTGVPDRFTGSGYGTEFTLTISSVQSEDFGVYYCQQDFSSPRTFGGGTKVEIKRTVAAPSVFIFPPSDEQLKSGTASVVCLLNNFYPREAKVQWKVDNALQSGNSQESVTEQDSKDSTYSLSSTLTLSKADYEKHKVYACEVTHQGLSSPVTKSFNRGEC

SEQ ID NO: 21477 - protein, 107 aa, synthetic construct; identical to SEQ ID NO: 15666
  REGION 1..107: note = Description of Artificial Sequence: Synthetic polypeptide
  REGION 1..107: note = VL of XENP019602

SEQ ID NO: 21478 - protein, 11 aa, synthetic construct
  REGION 1..11: note = Description of Artificial Sequence: Synthetic peptide
  REGION 1..11: note = XENP019602 vlCDR1
RASQSVGNDVA

SEQ ID NO: 21479 - protein, 7 aa, synthetic construct
  REGION 1..7: note = Description of Artificial Sequence: Synthetic peptide
  REGION 1..7: note = XENP019602 vlCDR2
YASHRYT

SEQ ID NO: 21480 - protein, 9 aa, synthetic construct
  REGION 1..9: note = Description of Artificial Sequence: Synthetic peptide
  REGION 1..9: note = XENP019602 vlCDR3
QQDFSSPRT

SEQ ID NO: 21481 - protein, 451 aa, synthetic construct; identical to SEQ ID NO: 21351
  REGION 1..451: note = Description of Artificial Sequence: Synthetic polypeptide
  REGION 1..451: note = XENP019603 1G6_H1.278_L1.194_IgG1_PVA_/S267K Heavy Chain

SEQ ID NO: 21482 - protein, 122 aa, synthetic construct; identical to SEQ ID NO: 15521
  REGION 1..122: note = Description of Artificial Sequence: Synthetic polypeptide
  REGION 1..122: note = VH of XENP019603

SEQ ID NO: 21483 - protein, 5 aa, synthetic construct
  REGION 1..5: note = Description of Artificial Sequence: Synthetic peptide
  REGION 1..5: note = XENP019603 vhCDR1
NYWMN

SEQ ID NO: 21484 - protein, 19 aa, synthetic construct
  REGION 1..19: note = Description of Artificial Sequence: Synthetic peptide
  REGION 1..19: note = XENP019603 vhCDR2
EIRLYSNNYATHYAESVKG

SEQ ID NO: 21485 - protein, 11 aa, synthetic construct
  REGION 1..11: note = Description of Artificial Sequence: Synthetic peptide
  REGION 1..11: note = XENP019603 vhCDR3
YYGNYGGYFDV

SEQ ID NO: 21486 - protein, 214 aa, synthetic construct
  REGION 1..214: note = Description of Artificial Sequence: Synthetic polypeptide
  REGION 1..214: note = XENP019603 1G6_H1.278_L1.194_IgG1_PVA_/S267K Light Chain
EIVLTQSPATLSASPGERVTLTCRASQSVGNDVAWYQQKPGQAPRLLINYASHRYTGVPDRFTGSGYGTEFTLTISSVQSEDFGVYYCQQDFSSPRTFGGGTKVEIKRTVAAPSVFIFPPSDEQLKSGTASVVCLLNNFYPREAKVQWKVDNALQSGNSQESVTEQDSKDSTYSLSSTLTLSKADYEKHKVYACEVTHQGLSSPVTKSFNRGEC

SEQ ID NO: 21487 - protein, 107 aa, synthetic construct; identical to SEQ ID NO: 2871
  REGION 1..107: note = Description of Artificial Sequence: Synthetic polypeptide
  REGION 1..107: note = VL of XENP019603

SEQ ID NO: 21488 - protein, 11 aa, synthetic construct
  REGION 1..11: note = Description of Artificial Sequence: Synthetic peptide
  REGION 1..11: note = XENP019603 vlCDR1
RASQSVGNDVA

SEQ ID NO: 21489 - protein, 7 aa, synthetic construct
  REGION 1..7: note = Description of Artificial Sequence: Synthetic peptide
  REGION 1..7: note = XENP019603 vlCDR2
YASHRYT

SEQ ID NO: 21490 - protein, 9 aa, synthetic construct
  REGION 1..9: note = Description of Artificial Sequence: Synthetic peptide
  REGION 1..9: note = XENP019603 vlCDR3
QQDFSSPRT

SEQ ID NO: 21491 - protein, 451 aa, synthetic construct; identical to SEQ ID NO: 21351
  REGION 1..451: note = Description of Artificial Sequence: Synthetic polypeptide
  REGION 1..451: note = XENP019604 1G6_H1.278_L1.195_IgG1_PVA_/S267K Heavy Chain

SEQ ID NO: 21492 - protein, 122 aa, synthetic construct; identical to SEQ ID NO: 15521
  REGION 1..122: note = Description of Artificial Sequence: Synthetic polypeptide
  REGION 1..122: note = VH of XENP019604

SEQ ID NO: 21493 - protein, 5 aa, synthetic construct
  REGION 1..5: note = Description of Artificial Sequence: Synthetic peptide
  REGION 1..5: note = XENP019604 vhCDR1
NYWMN

SEQ ID NO: 21494 - protein, 19 aa, synthetic construct
  REGION 1..19: note = Description of Artificial Sequence: Synthetic peptide
  REGION 1..19: note = XENP019604 vhCDR2
EIRLYSNNYATHYAESVKG

SEQ ID NO: 21495 - protein, 11 aa, synthetic construct
  REGION 1..11: note = Description of Artificial Sequence: Synthetic peptide
  REGION 1..11: note = XENP019604 vhCDR3
YYGNYGGYFDV

SEQ ID NO: 21496 - protein, 214 aa, synthetic construct
  REGION 1..214: note = Description of Artificial Sequence: Synthetic polypeptide
  REGION 1..214: note = XENP019604 1G6_H1.278_L1.195_IgG1_PVA_/S267K Light Chain
EIVLTQSPATLSVSPGERVTLTCRASQSVGNDVAWYQQKPGQAPRLLCNYASHRYTGVPDRFTCSGYGTEFTLTISSVQSEDFAVYYCQQDFSSPRTFGGGTKVEIKRTVAAPSVFIFPPSDEQLKSGTASVVCLLNNFYPREAKVQWKVDNALQSGNSQESVTEQDSKDSTYSLSSTLTLSKADYEKHKVYACEVTHQGLSSPVTKSFNRGEC

SEQ ID NO: 21497 - protein, 107 aa, synthetic construct; identical to SEQ ID NO: 15684
  REGION 1..107: note = Description of Artificial Sequence: Synthetic polypeptide
  REGION 1..107: note = VL of XENP019604

SEQ ID NO: 21498 - protein, 11 aa, synthetic construct
  REGION 1..11: note = Description of Artificial Sequence: Synthetic peptide
  REGION 1..11: note = XENP019604 vlCDR1
RASQSVGNDVA

SEQ ID NO: 21499 - protein, 7 aa, synthetic construct
  REGION 1..7: note = Description of Artificial Sequence: Synthetic peptide
  REGION 1..7: note = XENP019604 vlCDR2
YASHRYT

SEQ ID NO: 21500 - protein, 9 aa, synthetic construct
  REGION 1..9: note = Description of Artificial Sequence: Synthetic peptide
  REGION 1..9: note = XENP019604 vlCDR3
QQDFSSPRT

SEQ ID NO: 21501 - protein, 451 aa, synthetic construct; identical to SEQ ID NO: 21351
  REGION 1..451: note = Description of Artificial Sequence: Synthetic polypeptide
  REGION 1..451: note = XENP019605 1G6_H1.278_L1.196_IgG1_PVA_/S267K Heavy Chain

SEQ ID NO: 21502 - protein, 122 aa, synthetic construct; identical to SEQ ID NO: 15521
  REGION 1..122: note = Description of Artificial Sequence: Synthetic polypeptide
  REGION 1..122: note = VH of XENP019605

SEQ ID NO: 21503 - protein, 5 aa, synthetic construct
  REGION 1..5: note = Description of Artificial Sequence: Synthetic peptide
  REGION 1..5: note = XENP019605 vhCDR1
NYWMN

SEQ ID NO: 21504 - protein, 19 aa, synthetic construct
  REGION 1..19: note = Description of Artificial Sequence: Synthetic peptide
  REGION 1..19: note = XENP019605 vhCDR2
EIRLYSNNYATHYAESVKG

SEQ ID NO: 21505 - protein, 11 aa, synthetic construct
  REGION 1..11: note = Description of Artificial Sequence: Synthetic peptide
  REGION 1..11: note = XENP019605 vhCDR3
YYGNYGGYFDV

SEQ ID NO: 21506 - protein, 214 aa, synthetic construct
  REGION 1..214: note = Description of Artificial Sequence: Synthetic polypeptide
  REGION 1..214: note = XENP019605 1G6_H1.278_L1.196_IgG1_PVA_/S267K Light Chain
EIVLTQSPATLSASPGERVTLTCRASQSVGNDVAWYQQKPGQAPRLLCNYASHRYTGVPDRFTCSGYGTEFTLTISSVQSEDFGVYYCQQDFSSPRTFGGGTKVEIKRTVAAPSVFIFPPSDEQLKSGTASVVCLLNNFYPREAKVQWKVDNALQSGNSQESVTEQDSKDSTYSLSSTLTLSKADYEKHKVYACEVTHQGLSSPVTKSFNRGEC

SEQ ID NO: 21507 - protein, 107 aa, synthetic construct; identical to SEQ ID NO: 15693
  REGION 1..107: note = Description of Artificial Sequence: Synthetic polypeptide
  REGION 1..107: note = VL of XENP019605

SEQ ID NO: 21508 - protein, 11 aa, synthetic construct
  REGION 1..11: note = Description of Artificial Sequence: Synthetic peptide
  REGION 1..11: note = XENP019605 vlCDR1
RASQSVGNDVA

SEQ ID NO: 21509 - protein, 7 aa, synthetic construct
  REGION 1..7: note = Description of Artificial Sequence: Synthetic peptide
  REGION 1..7: note = XENP019605 vlCDR2
YASHRYT

SEQ ID NO: 21510 - protein, 9 aa, synthetic construct
  REGION 1..9: note = Description of Artificial Sequence: Synthetic peptide
  REGION 1..9: note = XENP019605 vlCDR3
QQDFSSPRT

SEQ ID NO: 21511 - protein, 451 aa, synthetic construct; identical to SEQ ID NO: 21351
  REGION 1..451: note = Description of Artificial Sequence: Synthetic polypeptide
  REGION 1..451: note = XENP019606 1G6_H1.278_L1.197_IgG1_PVA_/S267K Heavy Chain

SEQ ID NO: 21512 - protein, 122 aa, synthetic construct; identical to SEQ ID NO: 15521
  REGION 1..122: note = Description of Artificial Sequence: Synthetic polypeptide
  REGION 1..122: note = VH of XENP019606

SEQ ID NO: 21513 - protein, 5 aa, synthetic construct
  REGION 1..5: note = Description of Artificial Sequence: Synthetic peptide
  REGION 1..5: note = XENP019606 vhCDR1
NYWMN

SEQ ID NO: 21514 - protein, 19 aa, synthetic construct
  REGION 1..19: note = Description of Artificial Sequence: Synthetic peptide
  REGION 1..19: note = XENP019606 vhCDR2
EIRLYSNNYATHYAESVKG

SEQ ID NO: 21515 - protein, 11 aa, synthetic construct
  REGION 1..11: note = Description of Artificial Sequence: Synthetic peptide
  REGION 1..11: note = XENP019606 vhCDR3
YYGNYGGYFDV

SEQ ID NO: 21516 - protein, 214 aa, synthetic construct
  REGION 1..214: note = Description of Artificial Sequence: Synthetic polypeptide
  REGION 1..214: note = XENP019606 1G6_H1.278_L1.197_IgG1_PVA_/S267K Light Chain
EIVLTQSPATLSASPGERVTLTCRASQSVGNDVAWYQQKPGQAPRLLCNYASHRYTSVPDRFTCSGYGTEFTLTISSVQSEDFGVYYCQQDFSSPRTFGGGTKVEIKRTVAAPSVFIFPPSDEQLKSGTASVVCLLNNFYPREAKVQWKVDNALQSGNSQESVTEQDSKDSTYSLSSTLTLSKADYEKHKVYACEVTHQGLSSPVTKSFNRGEC

SEQ ID NO: 21517 - protein, 107 aa, synthetic construct; identical to SEQ ID NO: 15702
  REGION 1..107: note = Description of Artificial Sequence: Synthetic polypeptide
  REGION 1..107: note = VL of XENP019606

SEQ ID NO: 21518 - protein, 11 aa, synthetic construct
  REGION 1..11: note = Description of Artificial Sequence: Synthetic peptide
  REGION 1..11: note = XENP019606 vlCDR1
RASQSVGNDVA

SEQ ID NO: 21519 - protein, 7 aa, synthetic construct
  REGION 1..7: note = Description of Artificial Sequence: Synthetic peptide
  REGION 1..7: note = XENP019606 vlCDR2
YASHRYT

SEQ ID NO: 21520 - protein, 9 aa, synthetic construct
  REGION 1..9: note = Description of Artificial Sequence: Synthetic peptide
  REGION 1..9: note = XENP019606 vlCDR3
QQDFSSPRT

SEQ ID NO: 21521 - protein, 451 aa, synthetic construct; identical to SEQ ID NO: 21351
  REGION 1..451: note = Description of Artificial Sequence: Synthetic polypeptide
  REGION 1..451: note = XENP019607 1G6_H1.278_L1.198_IgG1_PVA_/S267K Heavy Chain

SEQ ID NO: 21522 - protein, 122 aa, synthetic construct; identical to SEQ ID NO: 15521
  REGION 1..122: note = Description of Artificial Sequence: Synthetic polypeptide
  REGION 1..122: note = VH of XENP019607

SEQ ID NO: 21523 - protein, 5 aa, synthetic construct
  REGION 1..5: note = Description of Artificial Sequence: Synthetic peptide
  REGION 1..5: note = XENP019607 vhCDR1
NYWMN

SEQ ID NO: 21524 - protein, 19 aa, synthetic construct
  REGION 1..19: note = Description of Artificial Sequence: Synthetic peptide
  REGION 1..19: note = XENP019607 vhCDR2
EIRLYSNNYATHYAESVKG

SEQ ID NO: 21525 - protein, 11 aa, synthetic construct
  REGION 1..11: note = Description of Artificial Sequence: Synthetic peptide
  REGION 1..11: note = XENP019607 vhCDR3
YYGNYGGYFDV

SEQ ID NO: 21526 - protein, 214 aa, synthetic construct
  REGION 1..214: note = Description of Artificial Sequence: Synthetic polypeptide
  REGION 1..214: note = XENP019607 1G6_H1.278_L1.198_IgG1_PVA_/S267K Light Chain
EIVLTQSPSTLSVSPGERVTLTCRASQSVGNDVAWYQQKPGQAPRLLINYASHRYTGVPDRFTGSGYGTEFTLTISSVQSEDFAVYYCQQDFSSPRTFGGGTKVEIKRTVAAPSVFIFPPSDEQLKSGTASVVCLLNNFYPREAKVQWKVDNALQSGNSQESVTEQDSKDSTYSLSSTLTLSKADYEKHKVYACEVTHQGLSSPVTKSFNRGEC

SEQ ID NO: 21527 - protein, 107 aa, synthetic construct; identical to SEQ ID NO: 15711
  REGION 1..107: note = Description of Artificial Sequence: Synthetic polypeptide
  REGION 1..107: note = VL of XENP019607

SEQ ID NO: 21528 - protein, 11 aa, synthetic construct
  REGION 1..11: note = Description of Artificial Sequence: Synthetic peptide
  REGION 1..11: note = XENP019607 vlCDR1
RASQSVGNDVA

SEQ ID NO: 21529 - protein, 7 aa, synthetic construct
  REGION 1..7: note = Description of Artificial Sequence: Synthetic peptide
  REGION 1..7: note = XENP019607 vlCDR2
YASHRYT

SEQ ID NO: 21530 - protein, 9 aa, synthetic construct
  REGION 1..9: note = Description of Artificial Sequence: Synthetic peptide
  REGION 1..9: note = XENP019607 vlCDR3
QQDFSSPRT

SEQ ID NO: 21531 - protein, 451 aa, synthetic construct; identical to SEQ ID NO: 21351
  REGION 1..451: note = Description of Artificial Sequence: Synthetic polypeptide
  REGION 1..451: note = XENP019608 1G6_H1.278_L1.199_IgG1_PVA_/S267K Heavy Chain

SEQ ID NO: 21532 - protein, 122 aa, synthetic construct; identical to SEQ ID NO: 15521
  REGION 1..122: note = Description of Artificial Sequence: Synthetic polypeptide
  REGION 1..122: note = VH of XENP019608

SEQ ID NO: 21533 - protein, 5 aa, synthetic construct
  REGION 1..5: note = Description of Artificial Sequence: Synthetic peptide
  REGION 1..5: note = XENP019608 vhCDR1
NYWMN

SEQ ID NO: 21534 - protein, 19 aa, synthetic construct
  REGION 1..19: note = Description of Artificial Sequence: Synthetic peptide
  REGION 1..19: note = XENP019608 vhCDR2
EIRLYSNNYATHYAESVKG

SEQ ID NO: 21535 - protein, 11 aa, synthetic construct
  REGION 1..11: note = Description of Artificial Sequence: Synthetic peptide
  REGION 1..11: note = XENP019608 vhCDR3
YYGNYGGYFDV

SEQ ID NO: 21536 - protein, 214 aa, synthetic construct
  REGION 1..214: note = Description of Artificial Sequence: Synthetic polypeptide
  REGION 1..214: note = XENP019608 1G6_H1.278_L1.199_IgG1_PVA_/S267K Light Chain
EIVLTQSPDTLSVSPGERVTLTCRASQSVGNDVAWYQQKPGQAPRLLINYASHRYTGVPDRFTGSGYGTEFTLTISSVQSEDFAVYYCQQDFSSPRTFGGGTKVEIKRTVAAPSVFIFPPSDEQLKSGTASVVCLLNNFYPREAKVQWKVDNALQSGNSQESVTEQDSKDSTYSLSSTLTLSKADYEKHKVYACEVTHQGLSSPVTKSFNRGEC

SEQ ID NO: 21537 - protein, 107 aa, synthetic construct; identical to SEQ ID NO: 15720
  REGION 1..107: note = Description of Artificial Sequence: Synthetic polypeptide
  REGION 1..107: note = VL of XENP019608

SEQ ID NO: 21538 - protein, 11 aa, synthetic construct
  REGION 1..11: note = Description of Artificial Sequence: Synthetic peptide
  REGION 1..11: note = XENP019608 vlCDR1
RASQSVGNDVA

SEQ ID NO: 21539 - protein, 7 aa, synthetic construct
  REGION 1..7: note = Description of Artificial Sequence: Synthetic peptide
  REGION 1..7: note = XENP019608 vlCDR2
YASHRYT

SEQ ID NO: 21540 - protein, 9 aa, synthetic construct
  REGION 1..9: note = Description of Artificial Sequence: Synthetic peptide
  REGION 1..9: note = XENP019608 vlCDR3
QQDFSSPRT

SEQ ID NO: 21541 - protein, 451 aa, synthetic construct; identical to SEQ ID NO: 21351
  REGION 1..451: note = Description of Artificial Sequence: Synthetic polypeptide
  REGION 1..451: note = XENP019609 1G6_H1.278_L1.200_IgG1_PVA_/S267K Heavy Chain

SEQ ID NO: 21542 - protein, 122 aa, synthetic construct; identical to SEQ ID NO: 15521
  REGION 1..122: note = Description of Artificial Sequence: Synthetic polypeptide
  REGION 1..122: note = VH of XENP019609

SEQ ID NO: 21543 - protein, 5 aa, synthetic construct
  REGION 1..5: note = Description of Artificial Sequence: Synthetic peptide
  REGION 1..5: note = XENP019609 vhCDR1
NYWMN

SEQ ID NO: 21544 - protein, 19 aa, synthetic construct
  REGION 1..19: note = Description of Artificial Sequence: Synthetic peptide
  REGION 1..19: note = XENP019609 vhCDR2
EIRLYSNNYATHYAESVKG

SEQ ID NO: 21545 - protein, 11 aa, synthetic construct
  REGION 1..11: note = Description of Artificial Sequence: Synthetic peptide
  REGION 1..11: note = XENP019609 vhCDR3
YYGNYGGYFDV

SEQ ID NO: 21546 - protein, 214 aa, synthetic construct
  REGION 1..214: note = Description of Artificial Sequence: Synthetic polypeptide
  REGION 1..214: note = XENP019609 1G6_H1.278_L1.200_IgG1_PVA_/S267K Light Chain
EIVLTQSPATLAVSPGERVTLTCRASQSVGNDVAWYQQKPGQAPRLLINYASHRYTGVPDRFTGSGYGTEFTLTISSVQSEDFAVYYCQQDFSSPRTFGGGTKVEIKRTVAAPSVFIFPPSDEQLKSGTASVVCLLNNFYPREAKVQWKVDNALQSGNSQESVTEQDSKDSTYSLSSTLTLSKADYEKHKVYACEVTHQGLSSPVTKSFNRGEC

SEQ ID NO: 21547 - protein, 107 aa, synthetic construct; identical to SEQ ID NO: 15729
  REGION 1..107: note = Description of Artificial Sequence: Synthetic polypeptide
  REGION 1..107: note = VL of XENP019609

SEQ ID NO: 21548 - protein, 11 aa, synthetic construct
  REGION 1..11: note = Description of Artificial Sequence: Synthetic peptide
  REGION 1..11: note = XENP019609 vlCDR1
RASQSVGNDVA

SEQ ID NO: 21549 - protein, 7 aa, synthetic construct
  REGION 1..7: note = Description of Artificial Sequence: Synthetic peptide
  REGION 1..7: note = XENP019609 vlCDR2
YASHRYT

SEQ ID NO: 21550 - protein, 9 aa, synthetic construct
  REGION 1..9: note = Description of Artificial Sequence: Synthetic peptide
  REGION 1..9: note = XENP019609 vlCDR3
QQDFSSPRT

SEQ ID NO: 21551 - protein, 451 aa, synthetic construct; identical to SEQ ID NO: 21351
  REGION 1..451: note = Description of Artificial Sequence: Synthetic polypeptide
  REGION 1..451: note = XENP019610 1G6_H1.278_L1.201_IgG1_PVA_/S267K Heavy Chain

SEQ ID NO: 21552 - protein, 122 aa, synthetic construct; identical to SEQ ID NO: 15521
  REGION 1..122: note = Description of Artificial Sequence: Synthetic polypeptide
  REGION 1..122: note = VH of XENP019610

SEQ ID NO: 21553 - protein, 5 aa, synthetic construct
  REGION 1..5: note = Description of Artificial Sequence: Synthetic peptide
  REGION 1..5: note = XENP019610 vhCDR1
NYWMN

SEQ ID NO: 21554 - protein, 19 aa, synthetic construct
  REGION 1..19: note = Description of Artificial Sequence: Synthetic peptide
  REGION 1..19: note = XENP019610 vhCDR2
EIRLYSNNYATHYAESVKG

SEQ ID NO: 21555 - protein, 11 aa, synthetic construct
  REGION 1..11: note = Description of Artificial Sequence: Synthetic peptide
  REGION 1..11: note = XENP019610 vhCDR3
YYGNYGGYFDV

SEQ ID NO: 21556 - protein, 214 aa, synthetic construct; identical to SEQ ID NO: 21466
  REGION 1..214: note = Description of Artificial Sequence: Synthetic polypeptide
  REGION 1..214: note = XENP019610 1G6_H1.278_L1.201_IgG1_PVA_/S267K Light Chain

SEQ ID NO: 21557 - protein, 107 aa, synthetic construct; identical to SEQ ID NO: 15657
  REGION 1..107: note = Description of Artificial Sequence: Synthetic polypeptide
  REGION 1..107: note = VL of XENP019610

SEQ ID NO: 21558 - protein, 11 aa, synthetic construct
  REGION 1..11: note = Description of Artificial Sequence: Synthetic peptide
  REGION 1..11: note = XENP019610 vlCDR1
RASQSVGNDVA

SEQ ID NO: 21559 - protein, 7 aa, synthetic construct
  REGION 1..7: note = Description of Artificial Sequence: Synthetic peptide
  REGION 1..7: note = XENP019610 vlCDR2
YASHRYT

SEQ ID NO: 21560 - protein, 9 aa, synthetic construct
  REGION 1..9: note = Description of Artificial Sequence: Synthetic peptide
  REGION 1..9: note = XENP019610 vlCDR3
QQDFSSPRT

SEQ ID NO: 21561 - protein, 451 aa, synthetic construct; identical to SEQ ID NO: 21351
  REGION 1..451: note = Description of Artificial Sequence: Synthetic polypeptide
  REGION 1..451: note = XENP019611 1G6_H1.278_L1.202_IgG1_PVA_/S267K Heavy Chain

SEQ ID NO: 21562 - protein, 122 aa, synthetic construct; identical to SEQ ID NO: 15521
  REGION 1..122: note = Description of Artificial Sequence: Synthetic polypeptide
  REGION 1..122: note = VH of XENP019611

SEQ ID NO: 21563 - protein, 5 aa, synthetic construct
  REGION 1..5: note = Description of Artificial Sequence: Synthetic peptide
  REGION 1..5: note = XENP019611 vhCDR1
NYWMN

SEQ ID NO: 21564 - protein, 19 aa, synthetic construct
  REGION 1..19: note = Description of Artificial Sequence: Synthetic peptide
  REGION 1..19: note = XENP019611 vhCDR2
EIRLYSNNYATHYAESVKG

SEQ ID NO: 21565 - protein, 11 aa, synthetic construct
  REGION 1..11: note = Description of Artificial Sequence: Synthetic peptide
  REGION 1..11: note = XENP019611 vhCDR3
YYGNYGGYFDV

SEQ ID NO: 21566 - protein, 214 aa, synthetic construct
  REGION 1..214: note = Description of Artificial Sequence: Synthetic polypeptide
  REGION 1..214: note = XENP019611 1G6_H1.278_L1.202_IgG1_PVA_/S267K Light Chain
EIVLTQSPATLSVSVGERVTLTCRASQSVGNDVAWYQQKPGQAPRLLINYASHRYTGVPDRFTGSGYGTEFTLTISSVQSEDFAVYYCQQDFSSPRTFGGGTKVEIKRTVAAPSVFIFPPSDEQLKSGTASVVCLLNNFYPREAKVQWKVDNALQSGNSQESVTEQDSKDSTYSLSSTLTLSKADYEKHKVYACEVTHQGLSSPVTKSFNRGEC

SEQ ID NO: 21567 - protein, 107 aa, synthetic construct; identical to SEQ ID NO: 15747
  REGION 1..107: note = Description of Artificial Sequence: Synthetic polypeptide
  REGION 1..107: note = VL of XENP019611

SEQ ID NO: 21568 - protein, 11 aa, synthetic construct
  REGION 1..11: note = Description of Artificial Sequence: Synthetic peptide
  REGION 1..11: note = XENP019611 vlCDR1
RASQSVGNDVA

SEQ ID NO: 21569 - protein, 7 aa, synthetic construct
  REGION 1..7: note = Description of Artificial Sequence: Synthetic peptide
  REGION 1..7: note = XENP019611 vlCDR2
YASHRYT

SEQ ID NO: 21570 - protein, 9 aa, synthetic construct
  REGION 1..9: note = Description of Artificial Sequence: Synthetic peptide
  REGION 1..9: note = XENP019611 vlCDR3
QQDFSSPRT

SEQ ID NO: 21571 - protein, 451 aa, synthetic construct; identical to SEQ ID NO: 21351
  REGION 1..451: note = Description of Artificial Sequence: Synthetic polypeptide
  REGION 1..451: note = XENP019612 1G6_H1.278_L1.203_IgG1_PVA_/S267K Heavy Chain

SEQ ID NO: 21572 - protein, 122 aa, synthetic construct; identical to SEQ ID NO: 15521
  REGION 1..122: note = Description of Artificial Sequence: Synthetic polypeptide
  REGION 1..122: note = VH of XENP019612

SEQ ID NO: 21573 - protein, 5 aa, synthetic construct
  REGION 1..5: note = Description of Artificial Sequence: Synthetic peptide
  REGION 1..5: note = XENP019612 vhCDR1
NYWMN

SEQ ID NO: 21574 - protein, 19 aa, synthetic construct
  REGION 1..19: note = Description of Artificial Sequence: Synthetic peptide
  REGION 1..19: note = XENP019612 vhCDR2
EIRLYSNNYATHYAESVKG

SEQ ID NO: 21575 - protein, 11 aa, synthetic construct
  REGION 1..11: note = Description of Artificial Sequence: Synthetic peptide
  REGION 1..11: note = XENP019612 vhCDR3
YYGNYGGYFDV

SEQ ID NO: 21576 - protein, 214 aa, synthetic construct
  REGION 1..214: note = Description of Artificial Sequence: Synthetic polypeptide
  REGION 1..214: note = XENP019612 1G6_H1.278_L1.203_IgG1_PVA_/S267K Light Chain
EIVLTQSPATLSVSLGERVTLTCRASQSVGNDVAWYQQKPGQAPRLLINYASHRYTGVPDRFTGSGYGTEFTLTISSVQSEDFAVYYCQQDFSSPRTFGGGTKVEIKRTVAAPSVFIFPPSDEQLKSGTASVVCLLNNFYPREAKVQWKVDNALQSGNSQESVTEQDSKDSTYSLSSTLTLSKADYEKHKVYACEVTHQGLSSPVTKSFNRGEC

SEQ ID NO: 21577 - protein, 107 aa, synthetic construct; identical to SEQ ID NO: 15756
  REGION 1..107: note = Description of Artificial Sequence: Synthetic polypeptide
  REGION 1..107: note = VL of XENP019612

SEQ ID NO: 21578 - protein, 11 aa, synthetic construct
  REGION 1..11: note = Description of Artificial Sequence: Synthetic peptide
  REGION 1..11: note = XENP019612 vlCDR1
RASQSVGNDVA

SEQ ID NO: 21579 - protein, 7 aa, synthetic construct
  REGION 1..7: note = Description of Artificial Sequence: Synthetic peptide
  REGION 1..7: note = XENP019612 vlCDR2
YASHRYT

SEQ ID NO: 21580 - protein, 9 aa, synthetic construct
  REGION 1..9: note = Description of Artificial Sequence: Synthetic peptide
  REGION 1..9: note = XENP019612 vlCDR3
QQDFSSPRT

SEQ ID NO: 21581 - protein, 451 aa, synthetic construct; identical to SEQ ID NO: 21351
  REGION 1..451: note = Description of Artificial Sequence: Synthetic polypeptide
  REGION 1..451: note = XENP019613 1G6_H1.278_L1.204_IgG1_PVA_/S267K Heavy Chain

SEQ ID NO: 21582 - protein, 122 aa, synthetic construct; identical to SEQ ID NO: 15521
  REGION 1..122: note = Description of Artificial Sequence: Synthetic polypeptide
  REGION 1..122: note = VH of XENP019613

SEQ ID NO: 21583 - protein, 5 aa, synthetic construct
  REGION 1..5: note = Description of Artificial Sequence: Synthetic peptide
  REGION 1..5: note = XENP019613 vhCDR1
NYWMN

SEQ ID NO: 21584 - protein, 19 aa, synthetic construct
  REGION 1..19: note = Description of Artificial Sequence: Synthetic peptide
  REGION 1..19: note = XENP019613 vhCDR2
EIRLYSNNYATHYAESVKG

SEQ ID NO: 21585 - protein, 11 aa, synthetic construct
  REGION 1..11: note = Description of Artificial Sequence: Synthetic peptide
  REGION 1..11: note = XENP019613 vhCDR3
YYGNYGGYFDV

SEQ ID NO: 21586 - protein, 214 aa, synthetic construct
  REGION 1..214: note = Description of Artificial Sequence: Synthetic polypeptide
  REGION 1..214: note = XENP019613 1G6_H1.278_L1.204_IgG1_PVA_/S267K Light Chain
EIVLTQSPATLSVSPGERVTLNCRASQSVGNDVAWYQQKPGQAPRLLINYASHRYTGVPDRFTGSGYGTEFTLTISSVQSEDFAVYYCQQDFSSPRTFGGGTKVEIKRTVAAPSVFIFPPSDEQLKSGTASVVCLLNNFYPREAKVQWKVDNALQSGNSQESVTEQDSKDSTYSLSSTLTLSKADYEKHKVYACEVTHQGLSSPVTKSFNRGEC

SEQ ID NO: 21587 - protein, 107 aa, synthetic construct; identical to SEQ ID NO: 15765
  REGION 1..107: note = Description of Artificial Sequence: Synthetic polypeptide
  REGION 1..107: note = VL of XENP019613

SEQ ID NO: 21588 - protein, 11 aa, synthetic construct
  REGION 1..11: note = Description of Artificial Sequence: Synthetic peptide
  REGION 1..11: note = XENP019613 vlCDR1
RASQSVGNDVA

SEQ ID NO: 21589 - protein, 7 aa, synthetic construct
  REGION 1..7: note = Description of Artificial Sequence: Synthetic peptide
  REGION 1..7: note = XENP019613 vlCDR2
YASHRYT

SEQ ID NO: 21590 - protein, 9 aa, synthetic construct
  REGION 1..9: note = Description of Artificial Sequence: Synthetic peptide
  REGION 1..9: note = XENP019613 vlCDR3
QQDFSSPRT

SEQ ID NO: 21591 - protein, 451 aa, synthetic construct; identical to SEQ ID NO: 21351
  REGION 1..451: note = Description of Artificial Sequence: Synthetic polypeptide
  REGION 1..451: note = XENP019614 1G6_H1.278_L1.205_IgG1_PVA_/S267K Heavy Chain

SEQ ID NO: 21592 - protein, 122 aa, synthetic construct; identical to SEQ ID NO: 15521
  REGION 1..122: note = Description of Artificial Sequence: Synthetic polypeptide
  REGION 1..122: note = VH of XENP019614

SEQ ID NO: 21593 - protein, 5 aa, synthetic construct
  REGION 1..5: note = Description of Artificial Sequence: Synthetic peptide
  REGION 1..5: note = XENP019614 vhCDR1
NYWMN

SEQ ID NO: 21594 - protein, 19 aa, synthetic construct
  REGION 1..19: note = Description of Artificial Sequence: Synthetic peptide
  REGION 1..19: note = XENP019614 vhCDR2
EIRLYSNNYATHYAESVKG

SEQ ID NO: 21595 - protein, 11 aa, synthetic construct
  REGION 1..11: note = Description of Artificial Sequence: Synthetic peptide
  REGION 1..11: note = XENP019614 vhCDR3
YYGNYGGYFDV

SEQ ID NO: 21596 - protein, 214 aa, synthetic construct
  REGION 1..214: note = Description of Artificial Sequence: Synthetic polypeptide
  REGION 1..214: note = XENP019614 1G6_H1.278_L1.205_IgG1_PVA_/S267K Light Chain
EIVLTQSPATLSVSPGERVTLTCRASQSVGNDVAWYQQKPGKAPRLLINYASHRYTGVPDRFTGSGYGTEFTLTISSVQSEDFAVYYCQQDFSSPRTFGGGTKVEIKRTVAAPSVFIFPPSDEQLKSGTASVVCLLNNFYPREAKVQWKVDNALQSGNSQESVTEQDSKDSTYSLSSTLTLSKADYEKHKVYACEVTHQGLSSPVTKSFNRGEC

SEQ ID NO: 21597 - protein, 107 aa, synthetic construct; identical to SEQ ID NO: 15774
  REGION 1..107: note = Description of Artificial Sequence: Synthetic polypeptide
  REGION 1..107: note = VL of XENP019614

SEQ ID NO: 21598 - protein, 11 aa, synthetic construct
  REGION 1..11: note = Description of Artificial Sequence: Synthetic peptide
  REGION 1..11: note = XENP019614 vlCDR1
RASQSVGNDVA

SEQ ID NO: 21599 - protein, 7 aa, synthetic construct
  REGION 1..7: note = Description of Artificial Sequence: Synthetic peptide
  REGION 1..7: note = XENP019614 vlCDR2
YASHRYT

SEQ ID NO: 21600 - protein, 9 aa, synthetic construct
  REGION 1..9: note = Description of Artificial Sequence: Synthetic peptide
  REGION 1..9: note = XENP019614 vlCDR3
QQDFSSPRT

SEQ ID NO: 21601 - protein, 451 aa, synthetic construct; identical to SEQ ID NO: 21351
  REGION 1..451: note = Description of Artificial Sequence: Synthetic polypeptide
  REGION 1..451: note = XENP019615 1G6_H1.278_L1.206_IgG1_PVA_/S267K Heavy Chain

SEQ ID NO: 21602 - protein, 122 aa, synthetic construct; identical to SEQ ID NO: 15521
  REGION 1..122: note = Description of Artificial Sequence: Synthetic polypeptide
  REGION 1..122: note = VH of XENP019615

SEQ ID NO: 21603 - protein, 5 aa, synthetic construct
  REGION 1..5: note = Description of Artificial Sequence: Synthetic peptide
  REGION 1..5: note = XENP019615 vhCDR1
NYWMN

SEQ ID NO: 21604 - protein, 19 aa, synthetic construct
  REGION 1..19: note = Description of Artificial Sequence: Synthetic peptide
  REGION 1..19: note = XENP019615 vhCDR2
EIRLYSNNYATHYAESVKG

SEQ ID NO: 21605 - protein, 11 aa, synthetic construct
  REGION 1..11: note = Description of Artificial Sequence: Synthetic peptide
  REGION 1..11: note = XENP019615 vhCDR3
YYGNYGGYFDV

SEQ ID NO: 21606 - protein, 214 aa, synthetic construct
  REGION 1..214: note = Description of Artificial Sequence: Synthetic polypeptide
  REGION 1..214: note = XENP019615 1G6_H1.278_L1.206_IgG1_PVA_/S267K Light Chain
EIVLTQSPATLSVSPGERVTLTCRASQSVGNDVAWYQQKPGQAPRLLINYASHRYTGVPDRFTGSGYGTEFTLTISSVQPEDFAVYYCQQDFSSPRTFGGGTKVEIKRTVAAPSVFIFPPSDEQLKSGTASVVCLLNNFYPREAKVQWKVDNALQSGNSQESVTEQDSKDSTYSLSSTLTLSKADYEKHKVYACEVTHQGLSSPVTKSFNRGEC

SEQ ID NO: 21607 - protein, 107 aa, synthetic construct; identical to SEQ ID NO: 15783
  REGION 1..107: note = Description of Artificial Sequence: Synthetic polypeptide
  REGION 1..107: note = VL of XENP019615

SEQ ID NO: 21608 - protein, 11 aa, synthetic construct
  REGION 1..11: note = Description of Artificial Sequence: Synthetic peptide
  REGION 1..11: note = XENP019615 vlCDR1
RASQSVGNDVA

SEQ ID NO: 21609 - protein, 7 aa, synthetic construct
  REGION 1..7: note = Description of Artificial Sequence: Synthetic peptide
  REGION 1..7: note = XENP019615 vlCDR2
YASHRYT

SEQ ID NO: 21610 - protein, 9 aa, synthetic construct
  REGION 1..9: note = Description of Artificial Sequence: Synthetic peptide
  REGION 1..9: note = XENP019615 vlCDR3
QQDFSSPRT

SEQ ID NO: 21611 - protein, 451 aa, synthetic construct; identical to SEQ ID NO: 21351
  REGION 1..451: note = Description of Artificial Sequence: Synthetic polypeptide
  REGION 1..451: note = XENP019616 1G6_H1.278_L1.207_IgG1_PVA_/S267K Heavy Chain

SEQ ID NO: 21612 - protein, 122 aa, synthetic construct; identical to SEQ ID NO: 15521
  REGION 1..122: note = Description of Artificial Sequence: Synthetic polypeptide
  REGION 1..122: note = VH of XENP019616

SEQ ID NO: 21613 - protein, 5 aa, synthetic construct
  REGION 1..5: note = Description of Artificial Sequence: Synthetic peptide
  REGION 1..5: note = XENP019616 vhCDR1
NYWMN

SEQ ID NO: 21614 - protein, 19 aa, synthetic construct
  REGION 1..19: note = Description of Artificial Sequence: Synthetic peptide
  REGION 1..19: note = XENP019616 vhCDR2
EIRLYSNNYATHYAESVKG

SEQ ID NO: 21615 - protein, 11 aa, synthetic construct
  REGION 1..11: note = Description of Artificial Sequence: Synthetic peptide
  REGION 1..11: note = XENP019616 vhCDR3
YYGNYGGYFDV

SEQ ID NO: 21616 - protein, 214 aa, synthetic construct
  REGION 1..214: note = Description of Artificial Sequence: Synthetic polypeptide
  REGION 1..214: note = XENP019616 1G6_H1.278_L1.207_IgG1_PVA_/S267K Light Chain
EIVLTQSPATLSVSPGERVTLTCRASQSVGNDVAWYQQKPGQAPRLLINYASHRYTGVPDRFTGSGYGTEFTLTISSVQSEDVAVYYCQQDFSSPRTFGGGTKVEIKRTVAAPSVFIFPPSDEQLKSGTASVVCLLNNFYPREAKVQWKVDNALQSGNSQESVTEQDSKDSTYSLSSTLTLSKADYEKHKVYACEVTHQGLSSPVTKSFNRGEC

SEQ ID NO: 21617 - protein, 107 aa, synthetic construct; identical to SEQ ID NO: 15792
  REGION 1..107: note = Description of Artificial Sequence: Synthetic polypeptide
  REGION 1..107: note = VL of XENP019616

SEQ ID NO: 21618 - protein, 11 aa, synthetic construct
  REGION 1..11: note = Description of Artificial Sequence: Synthetic peptide
  REGION 1..11: note = XENP019616 vlCDR1
RASQSVGNDVA

SEQ ID NO: 21619 - protein, 7 aa, synthetic construct
  REGION 1..7: note = Description of Artificial Sequence: Synthetic peptide
  REGION 1..7: note = XENP019616 vlCDR2
YASHRYT

SEQ ID NO: 21620 - protein, 9 aa, synthetic construct
  REGION 1..9: note = Description of Artificial Sequence: Synthetic peptide
  REGION 1..9: note = XENP019616 vlCDR3
QQDFSSPRT

SEQ ID NO: 21621 - protein, 451 aa, synthetic construct; identical to SEQ ID NO: 21351
  REGION 1..451: note = Description of Artificial Sequence: Synthetic polypeptide
  REGION 1..451: note = XENP019617 1G6_H1.278_L1.208_IgG1_PVA_/S267K Heavy Chain

SEQ ID NO: 21622 - protein, 122 aa, synthetic construct; identical to SEQ ID NO: 15521
  REGION 1..122: note = Description of Artificial Sequence: Synthetic polypeptide
  REGION 1..122: note = VH of XENP019617

SEQ ID NO: 21623 - protein, 5 aa, synthetic construct
  REGION 1..5: note = Description of Artificial Sequence: Synthetic peptide
  REGION 1..5: note = XENP019617 vhCDR1
NYWMN

SEQ ID NO: 21624 - protein, 19 aa, synthetic construct
  REGION 1..19: note = Description of Artificial Sequence: Synthetic peptide
  REGION 1..19: note = XENP019617 vhCDR2
EIRLYSNNYATHYAESVKG

SEQ ID NO: 21625 - protein, 11 aa, synthetic construct
  REGION 1..11: note = Description of Artificial Sequence: Synthetic peptide
  REGION 1..11: note = XENP019617 vhCDR3
YYGNYGGYFDV

SEQ ID NO: 21626 - protein, 214 aa, synthetic construct
  REGION 1..214: note = Description of Artificial Sequence: Synthetic polypeptide
  REGION 1..214: note = XENP019617 1G6_H1.278_L1.208_IgG1_PVA_/S267K Light Chain
EIVLTQSPATLSVSPGERVTLTCRASQSVGNDVAWYQQKPGQAPRLLINYASHRYTGVPDRFTGSGYGTEFTLTISSVQSEDFATYYCQQDFSSPRTFGGGTKVEIKRTVAAPSVFIFPPSDEQLKSGTASVVCLLNNFYPREAKVQWKVDNALQSGNSQESVTEQDSKDSTYSLSSTLTLSKADYEKHKVYACEVTHQGLSSPVTKSFNRGEC

SEQ ID NO: 21627 - protein, 107 aa, synthetic construct; identical to SEQ ID NO: 15801
  REGION 1..107: note = Description of Artificial Sequence: Synthetic polypeptide
  REGION 1..107: note = VL of XENP019617

SEQ ID NO: 21628 - protein, 11 aa, synthetic construct
  REGION 1..11: note = Description of Artificial Sequence: Synthetic peptide
  REGION 1..11: note = XENP019617 vlCDR1
RASQSVGNDVA

SEQ ID NO: 21629 - protein, 7 aa, synthetic construct
  REGION 1..7: note = Description of Artificial Sequence: Synthetic peptide
  REGION 1..7: note = XENP019617 vlCDR2
YASHRYT

SEQ ID NO: 21630 - protein, 9 aa, synthetic construct
  REGION 1..9: note = Description of Artificial Sequence: Synthetic peptide
  REGION 1..9: note = XENP019617 vlCDR3
QQDFSSPRT

SEQ ID NO: 21631 - protein, 451 aa, synthetic construct; identical to SEQ ID NO: 21381
  REGION 1..451: note = Description of Artificial Sequence: Synthetic polypeptide
  REGION 1..451: note = XENP019678 1G6_H1.279_L1.192_IgG1_PVA_/S267K Heavy Chain

SEQ ID NO: 21632 - protein, 122 aa, synthetic construct; identical to SEQ ID NO: 2872
  REGION 1..122: note = Description of Artificial Sequence: Synthetic polypeptide
  REGION 1..122: note = VH of XENP019678

SEQ ID NO: 21633 - protein, 5 aa, synthetic construct
  REGION 1..5: note = Description of Artificial Sequence: Synthetic peptide
  REGION 1..5: note = XENP019678 vhCDR1
NYWMN

SEQ ID NO: 21634 - protein, 19 aa, synthetic construct
  REGION 1..19: note = Description of Artificial Sequence: Synthetic peptide
  REGION 1..19: note = XENP019678 vhCDR2
EIRLYSNNYATHYAESVKG

SEQ ID NO: 21635 - protein, 11 aa, synthetic construct
  REGION 1..11: note = Description of Artificial Sequence: Synthetic peptide
  REGION 1..11: note = XENP019678 vhCDR3
YYGNYGGYFDV

SEQ ID NO: 21636 - protein, 214 aa, synthetic construct; identical to SEQ ID NO: 21466
  REGION 1..214: note = Description of Artificial Sequence: Synthetic polypeptide
  REGION 1..214: note = XENP019678 1G6_H1.279_L1.192_IgG1_PVA_/S267K Light Chain

SEQ ID NO: 21637 - protein, 107 aa, synthetic construct; identical to SEQ ID NO: 15657
  REGION 1..107: note = Description of Artificial Sequence: Synthetic polypeptide
  REGION 1..107: note = VL of XENP019678

SEQ ID NO: 21638 - protein, 11 aa, synthetic construct
  REGION 1..11: note = Description of Artificial Sequence: Synthetic peptide
  REGION 1..11: note = XENP019678 vlCDR1
RASQSVGNDVA

SEQ ID NO: 21639 - protein, 7 aa, synthetic construct
  REGION 1..7: note = Description of Artificial Sequence: Synthetic peptide
  REGION 1..7: note = XENP019678 vlCDR2
YASHRYT

SEQ ID NO: 21640 - protein, 9 aa, synthetic construct
  REGION 1..9: note = Description of Artificial Sequence: Synthetic peptide
  REGION 1..9: note = XENP019678 vlCDR3
QQDFSSPRT

SEQ ID NO: 21641 - protein, 451 aa, synthetic construct; identical to SEQ ID NO: 21391
  REGION 1..451: note = Description of Artificial Sequence: Synthetic polypeptide
  REGION 1..451: note = XENP019679 1G6_H1.280_L1.192_IgG1_PVA_/S267K Heavy Chain

SEQ ID NO: 21642 - protein, 122 aa, synthetic construct; identical to SEQ ID NO: 15593
  REGION 1..122: note = Description of Artificial Sequence: Synthetic polypeptide
  REGION 1..122: note = VH of XENP019679

SEQ ID NO: 21643 - protein, 5 aa, synthetic construct
  REGION 1..5: note = Description of Artificial Sequence: Synthetic peptide
  REGION 1..5: note = XENP019679 vhCDR1
NYWMN

SEQ ID NO: 21644 - protein, 19 aa, synthetic construct
  REGION 1..19: note = Description of Artificial Sequence: Synthetic peptide
  REGION 1..19: note = XENP019679 vhCDR2
EIRLYSNNYATHYAESVKG

SEQ ID NO: 21645 - protein, 11 aa, synthetic construct
  REGION 1..11: note = Description of Artificial Sequence: Synthetic peptide
  REGION 1..11: note = XENP019679 vhCDR3
YYGNYGGYFDV

SEQ ID NO: 21646 - protein, 214 aa, synthetic construct; identical to SEQ ID NO: 21466
  REGION 1..214: note = Description of Artificial Sequence: Synthetic polypeptide
  REGION 1..214: note = XENP019679 1G6_H1.280_L1.192_IgG1_PVA_/S267K Light Chain

SEQ ID NO: 21647 - protein, 107 aa, synthetic construct; identical to SEQ ID NO: 15657
  REGION 1..107: note = Description of Artificial Sequence: Synthetic polypeptide
  REGION 1..107: note = VL of XENP019679

SEQ ID NO: 21648 - protein, 11 aa, synthetic construct
  REGION 1..11: note = Description of Artificial Sequence: Synthetic peptide
  REGION 1..11: note = XENP019679 vlCDR1
RASQSVGNDVA

SEQ ID NO: 21649 - protein, 7 aa, synthetic construct
  REGION 1..7: note = Description of Artificial Sequence: Synthetic peptide
  REGION 1..7: note = XENP019679 vlCDR2
YASHRYT

SEQ ID NO: 21650 - protein, 9 aa, synthetic construct
  REGION 1..9: note = Description of Artificial Sequence: Synthetic peptide
  REGION 1..9: note = XENP019679 vlCDR3
QQDFSSPRT

SEQ ID NO: 21651 - protein, 451 aa, synthetic construct; identical to SEQ ID NO: 21401
  REGION 1..451: note = Description of Artificial Sequence: Synthetic polypeptide
  REGION 1..451: note = XENP019680 1G6_H1.281_L1.192_IgG1_PVA_/S267K Heavy Chain

SEQ ID NO: 21652 - protein, 122 aa, synthetic construct; identical to SEQ ID NO: 15602
  REGION 1..122: note = Description of Artificial Sequence: Synthetic polypeptide
  REGION 1..122: note = VH of XENP019680

SEQ ID NO: 21653 - protein, 5 aa, synthetic construct
  REGION 1..5: note = Description of Artificial Sequence: Synthetic peptide
  REGION 1..5: note = XENP019680 vhCDR1
NYWMN

SEQ ID NO: 21654 - protein, 19 aa, synthetic construct
  REGION 1..19: note = Description of Artificial Sequence: Synthetic peptide
  REGION 1..19: note = XENP019680 vhCDR2
EIRLYSNNYATHYAESVKG

SEQ ID NO: 21655 - protein, 11 aa, synthetic construct
  REGION 1..11: note = Description of Artificial Sequence: Synthetic peptide
  REGION 1..11: note = XENP019680 vhCDR3
YYGNYGGYFDV

SEQ ID NO: 21656 - protein, 214 aa, synthetic construct; identical to SEQ ID NO: 21466
  REGION 1..214: note = Description of Artificial Sequence: Synthetic polypeptide
  REGION 1..214: note = XENP019680 1G6_H1.281_L1.192_IgG1_PVA_/S267K Light Chain

SEQ ID NO: 21657 - protein, 107 aa, synthetic construct; identical to SEQ ID NO: 15657
  REGION 1..107: note = Description of Artificial Sequence: Synthetic polypeptide
  REGION 1..107: note = VL of XENP019680

SEQ ID NO: 21658 - protein, 11 aa, synthetic construct
  REGION 1..11: note = Description of Artificial Sequence: Synthetic peptide
  REGION 1..11: note = XENP019680 vlCDR1
RASQSVGNDVA

SEQ ID NO: 21659 - protein, 7 aa, synthetic construct
  REGION 1..7: note = Description of Artificial Sequence: Synthetic peptide
  REGION 1..7: note = XENP019680 vlCDR2
YASHRYT

SEQ ID NO: 21660 - protein, 9 aa, synthetic construct
  REGION 1..9: note = Description of Artificial Sequence: Synthetic peptide
  REGION 1..9: note = XENP019680 vlCDR3
QQDFSSPRT

SEQ ID NO: 21661 - protein, 451 aa, synthetic construct; identical to SEQ ID NO: 21411
  REGION 1..451: note = Description of Artificial Sequence: Synthetic polypeptide
  REGION 1..451: note = XENP019681 1G6_H1.282_L1.192_IgG1_PVA_/S267K Heavy Chain

SEQ ID NO: 21662 - protein, 122 aa, synthetic construct; identical to SEQ ID NO: 15611
  REGION 1..122: note = Description of Artificial Sequence: Synthetic polypeptide
  REGION 1..122: note = VH of XENP019681

SEQ ID NO: 21663 - protein, 5 aa, synthetic construct
  REGION 1..5: note = Description of Artificial Sequence: Synthetic peptide
  REGION 1..5: note = XENP019681 vhCDR1
NYWMN

SEQ ID NO: 21664 - protein, 19 aa, synthetic construct
  REGION 1..19: note = Description of Artificial Sequence: Synthetic peptide
  REGION 1..19: note = XENP019681 vhCDR2
EIRLYSNNYATHYAESVKG

SEQ ID NO: 21665 - protein, 11 aa, synthetic construct
  REGION 1..11: note = Description of Artificial Sequence: Synthetic peptide
  REGION 1..11: note = XENP019681 vhCDR3
YYGNYGGYFDV

SEQ ID NO: 21666 - protein, 214 aa, synthetic construct; identical to SEQ ID NO: 21466
  REGION 1..214: note = Description of Artificial Sequence: Synthetic polypeptide
  REGION 1..214: note = XENP019681 1G6_H1.282_L1.192_IgG1_PVA_/S267K Light Chain

SEQ ID NO: 21667 - protein, 107 aa, synthetic construct; identical to SEQ ID NO: 15657
  REGION 1..107: note = Description of Artificial Sequence: Synthetic polypeptide
  REGION 1..107: note = VL of XENP019681

SEQ ID NO: 21668 - protein, 11 aa, synthetic construct
  REGION 1..11: note = Description of Artificial Sequence: Synthetic peptide
  REGION 1..11: note = XENP019681 vlCDR1
RASQSVGNDVA

SEQ ID NO: 21669 - protein, 7 aa, synthetic construct
  REGION 1..7: note = Description of Artificial Sequence: Synthetic peptide
  REGION 1..7: note = XENP019681 vlCDR2
YASHRYT

SEQ ID NO: 21670 - protein, 9 aa, synthetic construct
  REGION 1..9: note = Description of Artificial Sequence: Synthetic peptide
  REGION 1..9: note = XENP019681 vlCDR3
QQDFSSPRT

SEQ ID NO: 21671 - protein, 451 aa, synthetic construct; identical to SEQ ID NO: 21381
  REGION 1..451: note = Description of Artificial Sequence: Synthetic polypeptide
  REGION 1..451: note = XENP019682 1G6_H1.279_L1.193_IgG1_PVA_/S267K Heavy Chain

SEQ ID NO: 21672 - protein, 122 aa, synthetic construct; identical to SEQ ID NO: 2872
  REGION 1..122: note = Description of Artificial Sequence: Synthetic polypeptide
  REGION 1..122: note = VH of XENP019682

SEQ ID NO: 21673 - protein, 5 aa, synthetic construct
  REGION 1..5: note = Description of Artificial Sequence: Synthetic peptide
  REGION 1..5: note = XENP019682 vhCDR1
NYWMN

SEQ ID NO: 21674 - protein, 19 aa, synthetic construct
  REGION 1..19: note = Description of Artificial Sequence: Synthetic peptide
  REGION 1..19: note = XENP019682 vhCDR2
EIRLYSNNYATHYAESVKG

SEQ ID NO: 21675 - protein, 11 aa, synthetic construct
  REGION 1..11: note = Description of Artificial Sequence: Synthetic peptide
  REGION 1..11: note = XENP019682 vhCDR3
YYGNYGGYFDV

SEQ ID NO: 21676 - protein, 214 aa, synthetic construct; identical to SEQ ID NO: 21476
  REGION 1..214: note = Description of Artificial Sequence: Synthetic polypeptide
  REGION 1..214: note = XENP019682 1G6_H1.279_L1.193_IgG1_PVA_/S267K Light Chain

SEQ ID NO: 21677 - protein, 107 aa, synthetic construct; identical to SEQ ID NO: 15666
  REGION 1..107: note = Description of Artificial Sequence: Synthetic polypeptide
  REGION 1..107: note = VL of XENP019682

SEQ ID NO: 21678 - protein, 11 aa, synthetic construct
  REGION 1..11: note = Description of Artificial Sequence: Synthetic peptide
  REGION 1..11: note = XENP019682 vlCDR1
RASQSVGNDVA

SEQ ID NO: 21679 - protein, 7 aa, synthetic construct
  REGION 1..7: note = Description of Artificial Sequence: Synthetic peptide
  REGION 1..7: note = XENP019682 vlCDR2
YASHRYT

SEQ ID NO: 21680 - protein, 9 aa, synthetic construct
  REGION 1..9: note = Description of Artificial Sequence: Synthetic peptide
  REGION 1..9: note = XENP019682 vlCDR3
QQDFSSPRT

SEQ ID NO: 21681 - protein, 451 aa, synthetic construct; identical to SEQ ID NO: 21391
  REGION 1..451: note = Description of Artificial Sequence: Synthetic polypeptide
  REGION 1..451: note = XENP019683 1G6_H1.280_L1.193_IgG1_PVA_/S267K Heavy Chain

SEQ ID NO: 21682 - protein, 122 aa, synthetic construct; identical to SEQ ID NO: 15593
  REGION 1..122: note = Description of Artificial Sequence: Synthetic polypeptide
  REGION 1..122: note = VH of XENP019683

SEQ ID NO: 21683 - protein, 5 aa, synthetic construct
  REGION 1..5: note = Description of Artificial Sequence: Synthetic peptide
  REGION 1..5: note = XENP019683 vhCDR1
NYWMN

SEQ ID NO: 21684 - protein, 19 aa, synthetic construct
  REGION 1..19: note = Description of Artificial Sequence: Synthetic peptide
  REGION 1..19: note = XENP019683 vhCDR2
EIRLYSNNYATHYAESVKG

SEQ ID NO: 21685 - protein, 11 aa, synthetic construct
  REGION 1..11: note = Description of Artificial Sequence: Synthetic peptide
  REGION 1..11: note = XENP019683 vhCDR3
YYGNYGGYFDV

SEQ ID NO: 21686 - protein, 214 aa, synthetic construct; identical to SEQ ID NO: 21476
  REGION 1..214: note = Description of Artificial Sequence: Synthetic polypeptide
  REGION 1..214: note = XENP019683 1G6_H1.280_L1.193_IgG1_PVA_/S267K Light Chain

SEQ ID NO: 21687 - protein, 107 aa, synthetic construct; identical to SEQ ID NO: 15666
  REGION 1..107: note = Description of Artificial Sequence: Synthetic polypeptide
  REGION 1..107: note = VL of XENP019683

SEQ ID NO: 21688 - protein, 11 aa, synthetic construct
  REGION 1..11: note = Description of Artificial Sequence: Synthetic peptide
  REGION 1..11: note = XENP019683 vlCDR1
RASQSVGNDVA

SEQ ID NO: 21689 - protein, 7 aa, synthetic construct
  REGION 1..7: note = Description of Artificial Sequence: Synthetic peptide
  REGION 1..7: note = XENP019683 vlCDR2
YASHRYT

SEQ ID NO: 21690 - protein, 9 aa, synthetic construct
  REGION 1..9: note = Description of Artificial Sequence: Synthetic peptide
  REGION 1..9: note = XENP019683 vlCDR3
QQDFSSPRT

SEQ ID NO: 21691 - protein, 451 aa, synthetic construct; identical to SEQ ID NO: 21401
  REGION 1..451: note = Description of Artificial Sequence: Synthetic polypeptide
  REGION 1..451: note = XENP019684 1G6_H1.281_L1.193_IgG1_PVA_/S267K Heavy Chain

SEQ ID NO: 21692 - protein, 122 aa, synthetic construct; identical to SEQ ID NO: 15602
  REGION 1..122: note = Description of Artificial Sequence: Synthetic polypeptide
  REGION 1..122: note = VH of XENP019684

SEQ ID NO: 21693 - protein, 5 aa, synthetic construct
  REGION 1..5: note = Description of Artificial Sequence: Synthetic peptide
  REGION 1..5: note = XENP019684 vhCDR1
NYWMN

SEQ ID NO: 21694 - protein, 19 aa, synthetic construct
  REGION 1..19: note = Description of Artificial Sequence: Synthetic peptide
  REGION 1..19: note = XENP019684 vhCDR2
EIRLYSNNYATHYAESVKG

SEQ ID NO: 21695 - protein, 11 aa, synthetic construct
  REGION 1..11: note = Description of Artificial Sequence: Synthetic peptide
  REGION 1..11: note = XENP019684 vhCDR3
YYGNYGGYFDV

SEQ ID NO: 21696 - protein, 214 aa, synthetic construct; identical to SEQ ID NO: 21476
  REGION 1..214: note = Description of Artificial Sequence: Synthetic polypeptide
  REGION 1..214: note = XENP019684 1G6_H1.281_L1.193_IgG1_PVA_/S267K Light Chain

SEQ ID NO: 21697 - protein, 107 aa, synthetic construct; identical to SEQ ID NO: 15666
  REGION 1..107: note = Description of Artificial Sequence: Synthetic polypeptide
  REGION 1..107: note = VL of XENP019684

SEQ ID NO: 21698 - protein, 11 aa, synthetic construct
  REGION 1..11: note = Description of Artificial Sequence: Synthetic peptide
  REGION 1..11: note = XENP019684 vlCDR1
RASQSVGNDVA

SEQ ID NO: 21699 - protein, 7 aa, synthetic construct
  REGION 1..7: note = Description of Artificial Sequence: Synthetic peptide
  REGION 1..7: note = XENP019684 vlCDR2
YASHRYT

SEQ ID NO: 21700 - protein, 9 aa, synthetic construct
  REGION 1..9: note = Description of Artificial Sequence: Synthetic peptide
  REGION 1..9: note = XENP019684 vlCDR3
QQDFSSPRT

SEQ ID NO: 21701 - protein, 451 aa, synthetic construct; identical to SEQ ID NO: 21411
  REGION 1..451: note = Description of Artificial Sequence: Synthetic polypeptide
  REGION 1..451: note = XENP019685 1G6_H1.282_L1.193_IgG1_PVA_/S267K Heavy Chain

SEQ ID NO: 21702 - protein, 122 aa, synthetic construct; identical to SEQ ID NO: 15611
  REGION 1..122: note = Description of Artificial Sequence: Synthetic polypeptide
  REGION 1..122: note = VH of XENP019685

SEQ ID NO: 21703 - protein, 5 aa, synthetic construct
  REGION 1..5: note = Description of Artificial Sequence: Synthetic peptide
  REGION 1..5: note = XENP019685 vhCDR1
NYWMN

SEQ ID NO: 21704 - protein, 19 aa, synthetic construct
  REGION 1..19: note = Description of Artificial Sequence: Synthetic peptide
  REGION 1..19: note = XENP019685 vhCDR2
EIRLYSNNYATHYAESVKG

SEQ ID NO: 21705 - protein, 11 aa, synthetic construct
  REGION 1..11: note = Description of Artificial Sequence: Synthetic peptide
  REGION 1..11: note = XENP019685 vhCDR3
YYGNYGGYFDV

SEQ ID NO: 21706 - protein, 214 aa, synthetic construct; identical to SEQ ID NO: 21476
  REGION 1..214: note = Description of Artificial Sequence: Synthetic polypeptide
  REGION 1..214: note = XENP019685 1G6_H1.282_L1.193_IgG1_PVA_/S267K Light Chain

SEQ ID NO: 21707 - protein, 107 aa, synthetic construct; identical to SEQ ID NO: 15666
  REGION 1..107: note = Description of Artificial Sequence: Synthetic polypeptide
  REGION 1..107: note = VL of XENP019685

SEQ ID NO: 21708 - protein, 11 aa, synthetic construct
  REGION 1..11: note = Description of Artificial Sequence: Synthetic peptide
  REGION 1..11: note = XENP019685 vlCDR1
RASQSVGNDVA

SEQ ID NO: 21709 - protein, 7 aa, synthetic construct
  REGION 1..7: note = Description of Artificial Sequence: Synthetic peptide
  REGION 1..7: note = XENP019685 vlCDR2
YASHRYT

SEQ ID NO: 21710 - protein, 9 aa, synthetic construct
  REGION 1..9: note = Description of Artificial Sequence: Synthetic peptide
  REGION 1..9: note = XENP019685 vlCDR3
QQDFSSPRT

SEQ ID NO: 21711 - protein, 451 aa, synthetic construct; identical to SEQ ID NO: 21381
  REGION 1..451: note = Description of Artificial Sequence: Synthetic polypeptide
  REGION 1..451: note = XENP019686 1G6_H1.279_L1.194_IgG1_PVA_/S267K Heavy Chain

SEQ ID NO: 21712 - protein, 122 aa, synthetic construct; identical to SEQ ID NO: 2872
  REGION 1..122: note = Description of Artificial Sequence: Synthetic polypeptide
  REGION 1..122: note = VH of XENP019686

SEQ ID NO: 21713 - protein, 5 aa, synthetic construct
  REGION 1..5: note = Description of Artificial Sequence: Synthetic peptide
  REGION 1..5: note = XENP019686 vhCDR1
NYWMN

SEQ ID NO: 21714 - protein, 19 aa, synthetic construct
  REGION 1..19: note = Description of Artificial Sequence: Synthetic peptide
  REGION 1..19: note = XENP019686 vhCDR2
EIRLYSNNYATHYAESVKG

SEQ ID NO: 21715 - protein, 11 aa, synthetic construct
  REGION 1..11: note = Description of Artificial Sequence: Synthetic peptide
  REGION 1..11: note = XENP019686 vhCDR3
YYGNYGGYFDV

SEQ ID NO: 21716 - protein, 214 aa, synthetic construct; identical to SEQ ID NO: 21486
  REGION 1..214: note = Description of Artificial Sequence: Synthetic polypeptide
  REGION 1..214: note = XENP019686 1G6_H1.279_L1.194_IgG1_PVA_/S267K Light Chain

SEQ ID NO: 21717 - protein, 107 aa, synthetic construct; identical to SEQ ID NO: 2871
  REGION 1..107: note = Description of Artificial Sequence: Synthetic polypeptide
  REGION 1..107: note = VL of XENP019686

SEQ ID NO: 21718 - protein, 11 aa, synthetic construct
  REGION 1..11: note = Description of Artificial Sequence: Synthetic peptide
  REGION 1..11: note = XENP019686 vlCDR1
RASQSVGNDVA

SEQ ID NO: 21719 - protein, 7 aa, synthetic construct
  REGION 1..7: note = Description of Artificial Sequence: Synthetic peptide
  REGION 1..7: note = XENP019686 vlCDR2
YASHRYT

SEQ ID NO: 21720 - protein, 9 aa, synthetic construct
  REGION 1..9: note = Description of Artificial Sequence: Synthetic peptide
  REGION 1..9: note = XENP019686 vlCDR3
QQDFSSPRT

SEQ ID NO: 21721 - protein, 451 aa, synthetic construct; identical to SEQ ID NO: 21391
  REGION 1..451: note = Description of Artificial Sequence: Synthetic polypeptide
  REGION 1..451: note = XENP019687 1G6_H1.280_L1.194_IgG1_PVA_/S267K Heavy Chain

SEQ ID NO: 21722 - protein, 122 aa, synthetic construct; identical to SEQ ID NO: 15593
  REGION 1..122: note = Description of Artificial Sequence: Synthetic polypeptide
  REGION 1..122: note = VH of XENP019687

SEQ ID NO: 21723 - protein, 5 aa, synthetic construct
  REGION 1..5: note = Description of Artificial Sequence: Synthetic peptide
  REGION 1..5: note = XENP019687 vhCDR1
NYWMN

SEQ ID NO: 21724 - protein, 19 aa, synthetic construct
  REGION 1..19: note = Description of Artificial Sequence: Synthetic peptide
  REGION 1..19: note = XENP019687 vhCDR2
EIRLYSNNYATHYAESVKG

SEQ ID NO: 21725 - protein, 11 aa, synthetic construct
  REGION 1..11: note = Description of Artificial Sequence: Synthetic peptide
  REGION 1..11: note = XENP019687 vhCDR3
YYGNYGGYFDV

SEQ ID NO: 21726 - protein, 214 aa, synthetic construct; identical to SEQ ID NO: 21486
  REGION 1..214: note = Description of Artificial Sequence: Synthetic polypeptide
  REGION 1..214: note = XENP019687 1G6_H1.280_L1.194_IgG1_PVA_/S267K Light Chain

SEQ ID NO: 21727 - protein, 107 aa, synthetic construct; identical to SEQ ID NO: 2871
  REGION 1..107: note = Description of Artificial Sequence: Synthetic polypeptide
  REGION 1..107: note = VL of XENP019687

SEQ ID NO: 21728 - protein, 11 aa, synthetic construct
  REGION 1..11: note = Description of Artificial Sequence: Synthetic peptide
  REGION 1..11: note = XENP019687 vlCDR1
RASQSVGNDVA

SEQ ID NO: 21729 - protein, 7 aa, synthetic construct
  REGION 1..7: note = Description of Artificial Sequence: Synthetic peptide
  REGION 1..7: note = XENP019687 vlCDR2
YASHRYT

SEQ ID NO: 21730 - protein, 9 aa, synthetic construct
  REGION 1..9: note = Description of Artificial Sequence: Synthetic peptide
  REGION 1..9: note = XENP019687 vlCDR3
QQDFSSPRT

SEQ ID NO: 21731 - protein, 451 aa, synthetic construct; identical to SEQ ID NO: 21401
  REGION 1..451: note = Description of Artificial Sequence: Synthetic polypeptide
  REGION 1..451: note = XENP019688 1G6_H1.281_L1.194_IgG1_PVA_/S267K Heavy Chain

SEQ ID NO: 21732 - protein, 122 aa, synthetic construct; identical to SEQ ID NO: 15602
  REGION 1..122: note = Description of Artificial Sequence: Synthetic polypeptide
  REGION 1..122: note = VH of XENP019688

SEQ ID NO: 21733 - protein, 5 aa, synthetic construct
  REGION 1..5: note = Description of Artificial Sequence: Synthetic peptide
  REGION 1..5: note = XENP019688 vhCDR1
NYWMN

SEQ ID NO: 21734 - protein, 19 aa, synthetic construct
  REGION 1..19: note = Description of Artificial Sequence: Synthetic peptide
  REGION 1..19: note = XENP019688 vhCDR2
EIRLYSNNYATHYAESVKG

SEQ ID NO: 21735 - protein, 11 aa, synthetic construct
  REGION 1..11: note = Description of Artificial Sequence: Synthetic peptide
  REGION 1..11: note = XENP019688 vhCDR3
YYGNYGGYFDV

SEQ ID NO: 21736 - protein, 214 aa, synthetic construct; identical to SEQ ID NO: 21486
  REGION 1..214: note = Description of Artificial Sequence: Synthetic polypeptide
  REGION 1..214: note = XENP019688 1G6_H1.281_L1.194_IgG1_PVA_/S267K Light Chain

SEQ ID NO: 21737 - protein, 107 aa, synthetic construct; identical to SEQ ID NO: 2871
  REGION 1..107: note = Description of Artificial Sequence: Synthetic polypeptide
  REGION 1..107: note = VL of XENP019688

SEQ ID NO: 21738 - protein, 11 aa, synthetic construct
  REGION 1..11: note = Description of Artificial Sequence: Synthetic peptide
  REGION 1..11: note = XENP019688 vlCDR1
RASQSVGNDVA

SEQ ID NO: 21739 - protein, 7 aa, synthetic construct
  REGION 1..7: note = Description of Artificial Sequence: Synthetic peptide
  REGION 1..7: note = XENP019688 vlCDR2
YASHRYT

SEQ ID NO: 21740 - protein, 9 aa, synthetic construct
  REGION 1..9: note = Description of Artificial Sequence: Synthetic peptide
  REGION 1..9: note = XENP019688 vlCDR3
QQDFSSPRT

SEQ ID NO: 21741 - protein, 451 aa, synthetic construct; identical to SEQ ID NO: 21411
  REGION 1..451: note = Description of Artificial Sequence: Synthetic polypeptide
  REGION 1..451: note = XENP019689 1G6_H1.282_L1.194_IgG1_PVA_/S267K Heavy Chain

SEQ ID NO: 21742 - protein, 122 aa, synthetic construct; identical to SEQ ID NO: 15611
  REGION 1..122: note = Description of Artificial Sequence: Synthetic polypeptide
  REGION 1..122: note = VH of XENP019689

SEQ ID NO: 21743 - protein, 5 aa, synthetic construct
  REGION 1..5: note = Description of Artificial Sequence: Synthetic peptide
  REGION 1..5: note = XENP019689 vhCDR1
NYWMN

SEQ ID NO: 21744 - protein, 19 aa, synthetic construct
  REGION 1..19: note = Description of Artificial Sequence: Synthetic peptide
  REGION 1..19: note = XENP019689 vhCDR2
EIRLYSNNYATHYAESVKG

SEQ ID NO: 21745 - protein, 11 aa, synthetic construct
  REGION 1..11: note = Description of Artificial Sequence: Synthetic peptide
  REGION 1..11: note = XENP019689 vhCDR3
YYGNYGGYFDV

SEQ ID NO: 21746 - protein, 214 aa, synthetic construct; identical to SEQ ID NO: 21486
  REGION 1..214: note = Description of Artificial Sequence: Synthetic polypeptide
  REGION 1..214: note = XENP019689 1G6_H1.282_L1.194_IgG1_PVA_/S267K Light Chain

SEQ ID NO: 21747 - protein, 107 aa, synthetic construct; identical to SEQ ID NO: 2871
  REGION 1..107: note = Description of Artificial Sequence: Synthetic polypeptide
  REGION 1..107: note = VL of XENP019689

SEQ ID NO: 21748 - protein, 11 aa, synthetic construct
  REGION 1..11: note = Description of Artificial Sequence: Synthetic peptide
  REGION 1..11: note = XENP019689 vlCDR1
RASQSVGNDVA

SEQ ID NO: 21749 - protein, 7 aa, synthetic construct
  REGION 1..7: note = Description of Artificial Sequence: Synthetic peptide
  REGION 1..7: note = XENP019689 vlCDR2
YASHRYT

SEQ ID NO: 21750 - protein, 9 aa, synthetic construct
  REGION 1..9: note = Description of Artificial Sequence: Synthetic peptide
  REGION 1..9: note = XENP019689 vlCDR3
QQDFSSPRT

SEQ ID NO: 21751 - protein, 449 aa, synthetic construct
  REGION 1..449: note = Description of Artificial Sequence: Synthetic polypeptide
  REGION 1..449: note = XENP020156 2E9_H1L1_IgG1_PVA_/S267K Heavy Chain
QVQLVQSGAEVKKPGASVKVSCKASGYAFTNYWLGWVRQAPGQGLEWMGNFYPGSSNTYYNEKFQGRVTMTADKSISTAYMELSRLRSDDTAVYFCARHYGTNYRYFDVWGAGTLVTVSSASTKGPSVFPLAPSSKSTSGGTAALGCLVKDYFPEPVTVSWNSGALTSGVHTFPAVLQSSGLYSLSSVVTVPSSSLGTQTYICNVNHKPSNTKVDKKVEPKSCDKTHTCPPCPAPPVAGPSVFLFPPKPKDTLMISRTPEVTCVVVDVKHEDPEVKFNWYVDGVEVHNAKTKPREEQYNSTYRVVSVLTVLHQDWLNGKEYKCKVSNKALPAPIEKTISKAKGQPREPQVYTLPPSREEMTKNQVSLTCLVKGFYPSDIAVEWESNGQPENNYKTTPPVLDSDGSFFLYSKLTVDKSRWQQGNVFSCSVMHEALHNHYTQKSLSLSPGK

SEQ ID NO: 21752 - protein, 120 aa, synthetic construct; identical to SEQ ID NO: 3091
  REGION 1..120: note = Description of Artificial Sequence: Synthetic polypeptide
  REGION 1..120: note = VH of XENP020156

SEQ ID NO: 21753 - protein, 5 aa, synthetic construct
  REGION 1..5: note = Description of Artificial Sequence: Synthetic peptide
  REGION 1..5: note = XENP020156 vhCDR1
NYWLG

SEQ ID NO: 21754 - protein, 17 aa, synthetic construct
  REGION 1..17: note = Description of Artificial Sequence: Synthetic peptide
  REGION 1..17: note = XENP020156 vhCDR2
NFYPGSSNTYYNEKFQG

SEQ ID NO: 21755 - protein, 11 aa, synthetic construct
  REGION 1..11: note = Description of Artificial Sequence: Synthetic peptide
  REGION 1..11: note = XENP020156 vhCDR3
HYGTNYRYFDV

SEQ ID NO: 21756 - protein, 214 aa, synthetic construct; identical to SEQ ID NO: 3140
  REGION 1..214: note = Description of Artificial Sequence: Synthetic polypeptide
  REGION 1..214: note = XENP020156 2E9_H1L1_IgG1_PVA_/S267K Light Chain

SEQ ID NO: 21757 - protein, 107 aa, synthetic construct; identical to SEQ ID NO: 3092
  REGION 1..107: note = Description of Artificial Sequence: Synthetic polypeptide
  REGION 1..107: note = VL of XENP020156

SEQ ID NO: 21758 - protein, 11 aa, synthetic construct
  REGION 1..11: note = Description of Artificial Sequence: Synthetic peptide
  REGION 1..11: note = XENP020156 vlCDR1
RASQSVSNDVA

SEQ ID NO: 21759 - protein, 7 aa, synthetic construct
  REGION 1..7: note = Description of Artificial Sequence: Synthetic peptide
  REGION 1..7: note = XENP020156 vlCDR2
YASNRYT

SEQ ID NO: 21760 - protein, 9 aa, synthetic construct
  REGION 1..9: note = Description of Artificial Sequence: Synthetic peptide
  REGION 1..9: note = XENP020156 vlCDR3
QQDYSSPYT

SEQ ID NO: 21761 - protein, 449 aa, synthetic construct
  REGION 1..449: note = Description of Artificial Sequence: Synthetic polypeptide
  REGION 1..449: note = XENP020157 2E9_H2L1_IgG1_PVA_/S267K Heavy Chain
EVQLVQSGAEVKKPGESLKISCKASGYAFTNYWLGWVRQMPGKGLEWMGNFYPGSSNTYYNPSFQGQVTISADKSISTAYLQWSSLKASDTAMYFCARHYGTNYRYFDVWGAGTLVTVSSASTKGPSVFPLAPSSKSTSGGTAALGCLVKDYFPEPVTVSWNSGALTSGVHTFPAVLQSSGLYSLSSVVTVPSSSLGTQTYICNVNHKPSNTKVDKKVEPKSCDKTHTCPPCPAPPVAGPSVFLFPPKPKDTLMISRTPEVTCVVVDVKHEDPEVKFNWYVDGVEVHNAKTKPREEQYNSTYRVVSVLTVLHQDWLNGKEYKCKVSNKALPAPIEKTISKAKGQPREPQVYTLPPSREEMTKNQVSLTCLVKGFYPSDIAVEWESNGQPENNYKTTPPVLDSDGSFFLYSKLTVDKSRWQQGNVFSCSVMHEALHNHYTQKSLSLSPGK

SEQ ID NO: 21762 - protein, 120 aa, synthetic construct; identical to SEQ ID NO: 16097
  REGION 1..120: note = Description of Artificial Sequence: Synthetic polypeptide
  REGION 1..120: note = VH of XENP020157

SEQ ID NO: 21763 - protein, 5 aa, synthetic construct
  REGION 1..5: note = Description of Artificial Sequence: Synthetic peptide
  REGION 1..5: note = XENP020157 vhCDR1
NYWLG

SEQ ID NO: 21764 - protein, 17 aa, synthetic construct
  REGION 1..17: note = Description of Artificial Sequence: Synthetic peptide
  REGION 1..17: note = XENP020157 vhCDR2
NFYPGSSNTYYNPSFQG

SEQ ID NO: 21765 - protein, 11 aa, synthetic construct
  REGION 1..11: note = Description of Artificial Sequence: Synthetic peptide
  REGION 1..11: note = XENP020157 vhCDR3
HYGTNYRYFDV

SEQ ID NO: 21766 - protein, 214 aa, synthetic construct; identical to SEQ ID NO: 3140
  REGION 1..214: note = Description of Artificial Sequence: Synthetic polypeptide
  REGION 1..214: note = XENP020157 2E9_H2L1_IgG1_PVA_/S267K Light Chain

SEQ ID NO: 21767 - protein, 107 aa, synthetic construct; identical to SEQ ID NO: 3092
  REGION 1..107: note = Description of Artificial Sequence: Synthetic polypeptide
  REGION 1..107: note = VL of XENP020157

SEQ ID NO: 21768 - protein, 11 aa, synthetic construct
  REGION 1..11: note = Description of Artificial Sequence: Synthetic peptide
  REGION 1..11: note = XENP020157 vlCDR1
RASQSVSNDVA

SEQ ID NO: 21769 - protein, 7 aa, synthetic construct
  REGION 1..7: note = Description of Artificial Sequence: Synthetic peptide
  REGION 1..7: note = XENP020157 vlCDR2
YASNRYT

SEQ ID NO: 21770 - protein, 9 aa, synthetic construct
  REGION 1..9: note = Description of Artificial Sequence: Synthetic peptide
  REGION 1..9: note = XENP020157 vlCDR3
QQDYSSPYT

SEQ ID NO: 21771 - protein, 444 aa, synthetic construct
  REGION 1..444: note = Description of Artificial Sequence: Synthetic polypeptide
  REGION 1..444: note = XENP020158 3C11(PD-1)_H1L1_IgG1_PVA_/S267K Heavy Chain
QVQLVQSGAEVKKPGASVKVSCKASGYTFTSYWMHWVRQAPGQGLEWMGAIYPGNIATSYNQKFQGRVTMTADTSTSTAYMELSSLRSEDTAVYYCTTSYVMDYWGQGTLVTVSSASTKGPSVFPLAPSSKSTSGGTAALGCLVKDYFPEPVTVSWNSGALTSGVHTFPAVLQSSGLYSLSSVVTVPSSSLGTQTYICNVNHKPSNTKVDKKVEPKSCDKTHTCPPCPAPPVAGPSVFLFPPKPKDTLMISRTPEVTCVVVDVKHEDPEVKFNWYVDGVEVHNAKTKPREEQYNSTYRVVSVLTVLHQDWLNGKEYKCKVSNKALPAPIEKTISKAKGQPREPQVYTLPPSREEMTKNQVSLTCLVKGFYPSDIAVEWESNGQPENNYKTTPPVLDSDGSFFLYSKLTVDKSRWQQGNVFSCSVMHEALHNHYTQKSLSLSPGK

SEQ ID NO: 21772 - protein, 115 aa, synthetic construct; identical to SEQ ID NO: 16106
  REGION 1..115: note = Description of Artificial Sequence: Synthetic polypeptide
  REGION 1..115: note = VH of XENP020158

SEQ ID NO: 21773 - protein, 5 aa, synthetic construct
  REGION 1..5: note = Description of Artificial Sequence: Synthetic peptide
  REGION 1..5: note = XENP020158 vhCDR1
SYWMH

SEQ ID NO: 21774 - protein, 17 aa, synthetic construct
  REGION 1..17: note = Description of Artificial Sequence: Synthetic peptide
  REGION 1..17: note = XENP020158 vhCDR2
AIYPGNIATSYNQKFQG

SEQ ID NO: 21775 - protein, 6 aa, synthetic construct
  REGION 1..6: note = Description of Artificial Sequence: Synthetic peptide
  REGION 1..6: note = XENP020158 vhCDR3
SYVMDY

SEQ ID NO: 21776 - protein, 214 aa, synthetic construct
  REGION 1..214: note = Description of Artificial Sequence: Synthetic polypeptide
  REGION 1..214: note = XENP020158 3C11(PD-1)_H1L1_IgG1_PVA_/S267K Light Chain
DIVMTQSPSSLSASVGDRVTITCQASQDINSYLSWFQQKPGKSPKTLIYRANRLVDGVPSRFSGSGSGQDYTFTISSLQPEDIATYYCLQYDEFPYTFGGGTKVEIKRTVAAPSVFIFPPSDEQLKSGTASVVCLLNNFYPREAKVQWKVDNALQSGNSQESVTEQDSKDSTYSLSSTLTLSKADYEKHKVYACEVTHQGLSSPVTKSFNRGEC

SEQ ID NO: 21777 - protein, 107 aa, synthetic construct; identical to SEQ ID NO: 16107
  REGION 1..107: note = Description of Artificial Sequence: Synthetic polypeptide
  REGION 1..107: note = VL of XENP020158

SEQ ID NO: 21778 - protein, 11 aa, synthetic construct
  REGION 1..11: note = Description of Artificial Sequence: Synthetic peptide
  REGION 1..11: note = XENP020158 vlCDR1
QASQDINSYLS

SEQ ID NO: 21779 - protein, 7 aa, synthetic construct
  REGION 1..7: note = Description of Artificial Sequence: Synthetic peptide
  REGION 1..7: note = XENP020158 vlCDR2
RANRLVD

SEQ ID NO: 21780 - protein, 9 aa, synthetic construct
  REGION 1..9: note = Description of Artificial Sequence: Synthetic peptide
  REGION 1..9: note = XENP020158 vlCDR3
LQYDEFPYT

SEQ ID NO: 21781 - protein, 441 aa, synthetic construct
  REGION 1..441: note = Description of Artificial Sequence: Synthetic polypeptide
  REGION 1..441: note = XENP020159 3G12_H1L1_IgG1_PVA_/S267K Heavy Chain
QVQLVQSGAEVKKPGASVKVSCKASGYTFTSYWMHWVRQAPGQGLEWMGVIDPSDSYTSYNQKFQGRVTMTVDTSTSTAYMELSSLRSEDTAVYYCTGAYYWGQGTLVTVSSASTKGPSVFPLAPSSKSTSGGTAALGCLVKDYFPEPVTVSWNSGALTSGVHTFPAVLQSSGLYSLSSVVTVPSSSLGTQTYICNVNHKPSNTKVDKKVEPKSCDKTHTCPPCPAPPVAGPSVFLFPPKPKDTLMISRTPEVTCVVVDVKHEDPEVKFNWYVDGVEVHNAKTKPREEQYNSTYRVVSVLTVLHQDWLNGKEYKCKVSNKALPAPIEKTISKAKGQPREPQVYTLPPSREEMTKNQVSLTCLVKGFYPSDIAVEWESNGQPENNYKTTPPVLDSDGSFFLYSKLTVDKSRWQQGNVFSCSVMHEALHNHYTQKSLSLSPGK

SEQ ID NO: 21782 - protein, 112 aa, synthetic construct; identical to SEQ ID NO: 16115
  REGION 1..112: note = Description of Artificial Sequence: Synthetic polypeptide
  REGION 1..112: note = VH of XENP020159

SEQ ID NO: 21783 - protein, 5 aa, synthetic construct
  REGION 1..5: note = Description of Artificial Sequence: Synthetic peptide
  REGION 1..5: note = XENP020159 vhCDR1
SYWMH

SEQ ID NO: 21784 - protein, 17 aa, synthetic construct
  REGION 1..17: note = Description of Artificial Sequence: Synthetic peptide
  REGION 1..17: note = XENP020159 vhCDR2
VIDPSDSYTSYNQKFQG

SEQ ID NO: 21785 - skipped

SEQ ID NO: 21786 - protein, 214 aa, synthetic construct
  REGION 1..214: note = Description of Artificial Sequence: Synthetic polypeptide
  REGION 1..214: note = XENP020159 3G12_H1L1_IgG1_PVA_/S267K Light Chain
DIVLTQSPSSLSASVGDRVTITCRASQGISSNIGWLQQKPGKSFKGLIYHGTNLEDGVPSRFTGSGSGADYTLTISSLQPEDFATYYCVQYAQSPWTFGGGTKVEIKRTVAAPSVFIFPPSDEQLKSGTASVVCLLNNFYPREAKVQWKVDNALQSGNSQESVTEQDSKDSTYSLSSTLTLSKADYEKHKVYACEVTHQGLSSPVTKSFNRGEC

SEQ ID NO: 21787 - protein, 107 aa, synthetic construct; identical to SEQ ID NO: 16116
  REGION 1..107: note = Description of Artificial Sequence: Synthetic polypeptide
  REGION 1..107: note = VL of XENP020159

SEQ ID NO: 21788 - protein, 11 aa, synthetic construct
  REGION 1..11: note = Description of Artificial Sequence: Synthetic peptide
  REGION 1..11: note = XENP020159 vlCDR1
RASQGISSNIG

SEQ ID NO: 21789 - protein, 7 aa, synthetic construct
  REGION 1..7: note = Description of Artificial Sequence: Synthetic peptide
  REGION 1..7: note = XENP020159 vlCDR2
HGTNLED

SEQ ID NO: 21790 - protein, 9 aa, synthetic construct
  REGION 1..9: note = Description of Artificial Sequence: Synthetic peptide
  REGION 1..9: note = XENP020159 vlCDR3
VQYAQSPWT

SEQ ID NO: 21791 - protein, 441 aa, synthetic construct
  REGION 1..441: note = Description of Artificial Sequence: Synthetic polypeptide
  REGION 1..441: note = XENP020160 5C4_H1L1_IgG1_PVA_/S267K Heavy Chain
QVQLVQSGAEVKKPGASVKVSCKASGYTFTDYWMHWLRQAPGQGLEWMGAIDTSDSYPTYNQKFQGRVTMTVDDSTSTAYMELSSLRSEDTAVYYCTRFDYWGQGTLVTVSSASTKGPSVFPLAPSSKSTSGGTAALGCLVKDYFPEPVTVSWNSGALTSGVHTFPAVLQSSGLYSLSSVVTVPSSSLGTQTYICNVNHKPSNTKVDKKVEPKSCDKTHTCPPCPAPPVAGPSVFLFPPKPKDTLMISRTPEVTCVVVDVKHEDPEVKFNWYVDGVEVHNAKTKPREEQYNSTYRVVSVLTVLHQDWLNGKEYKCKVSNKALPAPIEKTISKAKGQPREPQVYTLPPSREEMTKNQVSLTCLVKGFYPSDIAVEWESNGQPENNYKTTPPVLDSDGSFFLYSKLTVDKSRWQQGNVFSCSVMHEALHNHYTQKSLSLSPGK

SEQ ID NO: 21792 - protein, 112 aa, synthetic construct; identical to SEQ ID NO: 16124
  REGION 1..112: note = Description of Artificial Sequence: Synthetic polypeptide
  REGION 1..112: note = VH of XENP020160

SEQ ID NO: 21793 - protein, 5 aa, synthetic construct
  REGION 1..5: note = Description of Artificial Sequence: Synthetic peptide
  REGION 1..5: note = XENP020160 vhCDR1
DYWMH

SEQ ID NO: 21794 - protein, 17 aa, synthetic construct
  REGION 1..17: note = Description of Artificial Sequence: Synthetic peptide
  REGION 1..17: note = XENP020160 vhCDR2
AIDTSDSYPTYNQKFQG

SEQ ID NO: 21795 - skipped

SEQ ID NO: 21796 - protein, 214 aa, synthetic construct
  REGION 1..214: note = Description of Artificial Sequence: Synthetic polypeptide
  REGION 1..214: note = XENP020160 5C4_H1L1_IgG1_PVA_/S267K Light Chain
DIVMTQSPDSLAVSLGERATINCKASQSVSNDVAWYQQKPGQSPKLLIYYASNRYTGVPDRFTGSGYGTDFTLTISSLQAEDVAVYFCQQDYSSPYTFGGGTKVEIKRTVAAPSVFIFPPSDEQLKSGTASVVCLLNNFYPREAKVQWKVDNALQSGNSQESVTEQDSKDSTYSLSSTLTLSKADYEKHKVYACEVTHQGLSSPVTKSFNRGEC

SEQ ID NO: 21797 - protein, 107 aa, synthetic construct; identical to SEQ ID NO: 16125
  REGION 1..107: note = Description of Artificial Sequence: Synthetic polypeptide
  REGION 1..107: note = VL of XENP020160

SEQ ID NO: 21798 - protein, 11 aa, synthetic construct
  REGION 1..11: note = Description of Artificial Sequence: Synthetic peptide
  REGION 1..11: note = XENP020160 vlCDR1
KASQSVSNDVA

SEQ ID NO: 21799 - protein, 7 aa, synthetic construct
  REGION 1..7: note = Description of Artificial Sequence: Synthetic peptide
  REGION 1..7: note = XENP020160 vlCDR2
YASNRYT

SEQ ID NO: 21800 - protein, 9 aa, synthetic construct
  REGION 1..9: note = Description of Artificial Sequence: Synthetic peptide
  REGION 1..9: note = XENP020160 vlCDR3
QQDYSSPYT

SEQ ID NO: 21801 - protein, 441 aa, synthetic construct
  REGION 1..441: note = Description of Artificial Sequence: Synthetic polypeptide
  REGION 1..441: note = XENP020161 5C4_H2L1_IgG1_PVA_/S267K Heavy Chain
QVQLVQSGSELKKPGASVKVSCKASGYTFTDYWMHWLRQAPGQGLEWMGAIDTSDSYPTYNQGFTGRFVFSVDDSVSTAYLQISSLKAEDTAVYYCTRFDYWGQGTLVTVSSASTKGPSVFPLAPSSKSTSGGTAALGCLVKDYFPEPVTVSWNSGALTSGVHTFPAVLQSSGLYSLSSVVTVPSSSLGTQTYICNVNHKPSNTKVDKKVEPKSCDKTHTCPPCPAPPVAGPSVFLFPPKPKDTLMISRTPEVTCVVVDVKHEDPEVKFNWYVDGVEVHNAKTKPREEQYNSTYRVVSVLTVLHQDWLNGKEYKCKVSNKALPAPIEKTISKAKGQPREPQVYTLPPSREEMTKNQVSLTCLVKGFYPSDIAVEWESNGQPENNYKTTPPVLDSDGSFFLYSKLTVDKSRWQQGNVFSCSVMHEALHNHYTQKSLSLSPGK

SEQ ID NO: 21802 - protein, 112 aa, synthetic construct; identical to SEQ ID NO: 16133
  REGION 1..112: note = Description of Artificial Sequence: Synthetic polypeptide
  REGION 1..112: note = VH of XENP020161

SEQ ID NO: 21803 - protein, 5 aa, synthetic construct
  REGION 1..5: note = Description of Artificial Sequence: Synthetic peptide
  REGION 1..5: note = XENP020161 vhCDR1
DYWMH

SEQ ID NO: 21804 - protein, 17 aa, synthetic construct
  REGION 1..17: note = Description of Artificial Sequence: Synthetic peptide
  REGION 1..17: note = XENP020161 vhCDR2
AIDTSDSYPTYNQGFTG

SEQ ID NO: 21805 - skipped

SEQ ID NO: 21806 - protein, 214 aa, synthetic construct; identical to SEQ ID NO: 21796
  REGION 1..214: note = Description of Artificial Sequence: Synthetic polypeptide
  REGION 1..214: note = XENP020161 5C4_H2L1_IgG1_PVA_/S267K Light Chain

SEQ ID NO: 21807 - protein, 107 aa, synthetic construct; identical to SEQ ID NO: 16125
  REGION 1..107: note = Description of Artificial Sequence: Synthetic polypeptide
  REGION 1..107: note = VL of XENP020161

SEQ ID NO: 21808 - protein, 11 aa, synthetic construct
  REGION 1..11: note = Description of Artificial Sequence: Synthetic peptide
  REGION 1..11: note = XENP020161 vlCDR1
KASQSVSNDVA

SEQ ID NO: 21809 - protein, 7 aa, synthetic construct
  REGION 1..7: note = Description of Artificial Sequence: Synthetic peptide
  REGION 1..7: note = XENP020161 vlCDR2
YASNRYT

SEQ ID NO: 21810 - protein, 9 aa, synthetic construct
  REGION 1..9: note = Description of Artificial Sequence: Synthetic peptide
  REGION 1..9: note = XENP020161 vlCDR3
QQDYSSPYT

SEQ ID NO: 21811 - protein, 449 aa, synthetic construct
  REGION 1..449: note = Description of Artificial Sequence: Synthetic polypeptide
  REGION 1..449: note = XENP016436 25F7_H0L0_IgG1_PVA_/S267K Heavy Chain
QVQLQQWGAGLLKPSETLSLTCAVYGGSFSDYYWNWIRQPPGKGLEWIGEINHNGNTNSNPSLKSRVTLSLDTSKNQFSLKLRSVTAADTAVYYCAFGYSDYEYNWFDPWGQGTLVTVSSASTKGPSVFPLAPSSKSTSGGTAALGCLVKDYFPEPVTVSWNSGALTSGVHTFPAVLQSSGLYSLSSVVTVPSSSLGTQTYICNVNHKPSNTKVDKKVEPKSCDKTHTCPPCPAPPVAGPSVFLFPPKPKDTLMISRTPEVTCVVVDVKHEDPEVKFNWYVDGVEVHNAKTKPREEQYNSTYRVVSVLTVLHQDWLNGKEYKCKVSNKALPAPIEKTISKAKGQPREPQVYTLPPSREEMTKNQVSLTCLVKGFYPSDIAVEWESNGQPENNYKTTPPVLDSDGSFFLYSKLTVDKSRWQQGNVFSCSVMHEALHNHYTQKSLSLSPGK

SEQ ID NO: 21812 - protein, 120 aa, synthetic construct
  REGION 1..120: note = Description of Artificial Sequence: Synthetic polypeptide
  REGION 1..120: note = VH of XENP016436
QVQLQQWGAGLLKPSETLSLTCAVYGGSFSDYYWNWIRQPPGKGLEWIGEINHNGNTNSNPSLKSRVTLSLDTSKNQFSLKLRSVTAADTAVYYCAFGYSDYEYNWFDPWGQGTLVTVSS

SEQ ID NO: 21813 - protein, 5 aa, synthetic construct
  REGION 1..5: note = Description of Artificial Sequence: Synthetic peptide
  REGION 1..5: note = XENP016436 vhCDR1
DYYWN

SEQ ID NO: 21814 - protein, 16 aa, synthetic construct
  REGION 1..16: note = Description of Artificial Sequence: Synthetic peptide
  REGION 1..16: note = XENP016436 vhCDR2
EINHNGNTNSNPSLKS

SEQ ID NO: 21815 - protein, 12 aa, synthetic construct
  REGION 1..12: note = Description of Artificial Sequence: Synthetic peptide
  REGION 1..12: note = XENP016436 vhCDR3
GYSDYEYNWFDP

SEQ ID NO: 21816 - protein, 214 aa, synthetic construct
  REGION 1..214: note = Description of Artificial Sequence: Synthetic polypeptide
  REGION 1..214: note = XENP016436 25F7_H0L0_IgG1_PVA_/S267K Light Chain
EIVLTQSPATLSLSPGERATLSCRASQSISSYLAWYQQKPGQAPRLLIYDASNRATGIPARFSGSGSGTDFTLTISSLEPEDFAVYYCQQRSNWPLTFGQGTNLEIKRTVAAPSVFIFPPSDEQLKSGTASVVCLLNNFYPREAKVQWKVDNALQSGNSQESVTEQDSKDSTYSLSSTLTLSKADYEKHKVYACEVTHQGLSSPVTKSFNRGEC

SEQ ID NO: 21817 - protein, 107 aa, synthetic construct; identical to SEQ ID NO: 3821
  REGION 1..107: note = Description of Artificial Sequence: Synthetic polypeptide
  REGION 1..107: note = VL of XENP016436

SEQ ID NO: 21818 - protein, 11 aa, synthetic construct
  REGION 1..11: note = Description of Artificial Sequence: Synthetic peptide
  REGION 1..11: note = XENP016436 vlCDR1
RASQSISSYLA

SEQ ID NO: 21819 - protein, 7 aa, synthetic construct
  REGION 1..7: note = Description of Artificial Sequence: Synthetic peptide
  REGION 1..7: note = XENP016436 vlCDR2
DASNRAT

SEQ ID NO: 21820 - protein, 9 aa, synthetic construct
  REGION 1..9: note = Description of Artificial Sequence: Synthetic peptide
  REGION 1..9: note = XENP016436 vlCDR3
QQRSNWPLT

SEQ ID NO: 21821 - protein, 447 aa, synthetic construct
  REGION 1..447: note = Description of Artificial Sequence: Synthetic polypeptide
  REGION 1..447: note = XENP019353 1H11_H0L0_IgG1_PVA_/S267K Heavy Chain
QIQLVQSGPELKKPGETVKISCKASGYTFTNYGMNWVKQAPGKGLKWMGWINTYTGEPTYADDFKGRFAFSLETSASTAYLQINNLKNEDTATYFCARGRGMGYFDYWGQGTTLTVSSASTKGPSVFPLAPSSKSTSGGTAALGCLVKDYFPEPVTVSWNSGALTSGVHTFPAVLQSSGLYSLSSVVTVPSSSLGTQTYICNVNHKPSDTKVDKKVEPKSCDKTHTCPPCPAPPVAGPSVFLFPPKPKDTLMISRTPEVTCVVVDVKHEDPEVKFNWYVDGVEVHNAKTKPREEEYNSTYRVVSVLTVLHQDWLNGKEYKCKVSNKALPAPIEKTISKAKGQPREPQVYTLPPSREEMTKNQVSLTCDVSGFYPSDIAVEWESDGQPENNYKTTPPVLDSDGSFFLYSKLTVDKSRWEQGDVFSCSVMHEALHNHYTQKSLSLSPGK

SEQ ID NO: 21822 - protein, 118 aa, synthetic construct
  REGION 1..118: note = Description of Artificial Sequence: Synthetic polypeptide
  REGION 1..118: note = VH of XENP019353
QIQLVQSGPELKKPGETVKISCKASGYTFTNYGMNWVKQAPGKGLKWMGWINTYTGEPTYADDFKGRFAFSLETSASTAYLQINNLKNEDTATYFCARGRGMGYFDYWGQGTTLTVSS

SEQ ID NO: 21823 - protein, 5 aa, synthetic construct
  REGION 1..5: note = Description of Artificial Sequence: Synthetic peptide
  REGION 1..5: note = XENP019353 vhCDR1
NYGMN

SEQ ID NO: 21824 - protein, 17 aa, synthetic construct
  REGION 1..17: note = Description of Artificial Sequence: Synthetic peptide
  REGION 1..17: note = XENP019353 vhCDR2
WINTYTGEPTYADDFKG

SEQ ID NO: 21825 - protein, 9 aa, synthetic construct
  REGION 1..9: note = Description of Artificial Sequence: Synthetic peptide
  REGION 1..9: note = XENP019353 vhCDR3
GRGMGYFDY

SEQ ID NO: 21826 - protein, 214 aa, synthetic construct
  REGION 1..214: note = Description of Artificial Sequence: Synthetic polypeptide
  REGION 1..214: note = XENP019353 1H11_H0L0_IgG1_PVA_/S267K Light Chain
DIQMTQSPASLSVSVGETVTITCRASENIYSNLAWYQQKQGKSPQLLVYAATNLADGVPSRFSGSGSGTQYSLKINSLQSGDFGNYYCQHFWTTPRTFGGGTKLEIKRTVAAPSVFIFPPSDEQLKSGTASVVCLLNNFYPREAKVQWKVDNALQSGNSQESVTEQDSKDSTYSLSSTLTLSKADYEKHKVYACEVTHQGLSSPVTKSFNRGEC

SEQ ID NO: 21827 - protein, 107 aa, synthetic construct
  REGION 1..107: note = Description of Artificial Sequence: Synthetic polypeptide
  REGION 1..107: note = VL of XENP019353
DIQMTQSPASLSVSVGETVTITCRASENIYSNLAWYQQKQGKSPQLLVYAATNLADGVPSRFSGSGSGTQYSLKINSLQSGDFGNYYCQHFWTTPRTFGGGTKLEIK

SEQ ID NO: 21828 - protein, 11 aa, synthetic construct
  REGION 1..11: note = Description of Artificial Sequence: Synthetic peptide
  REGION 1..11: note = XENP019353 vlCDR1
RASENIYSNLA

SEQ ID NO: 21829 - protein, 7 aa, synthetic construct
  REGION 1..7: note = Description of Artificial Sequence: Synthetic peptide
  REGION 1..7: note = XENP019353 vlCDR2
AATNLAD

SEQ ID NO: 21830 - protein, 9 aa, synthetic construct
  REGION 1..9: note = Description of Artificial Sequence: Synthetic peptide
  REGION 1..9: note = XENP019353 vlCDR3
QHFWTTPRT

SEQ ID NO: 21831 - protein, 447 aa, synthetic construct
  REGION 1..447: note = Description of Artificial Sequence: Synthetic polypeptide
  REGION 1..447: note = XENP019354 1H11_H1L1_IgG1_PVA_/S267K Heavy Chain
QIQLVQSGAEVKKPGASVKVSCKASGYTFTNYGMNWVRQAPGQGLEWMGWINTYTGEPTYADKFQGRVTMTLDTSTSTAYMELSSLRSEDTAVYFCARGRGMGYFDYWGQGTLVTVSSASTKGPSVFPLAPSSKSTSGGTAALGCLVKDYFPEPVTVSWNSGALTSGVHTFPAVLQSSGLYSLSSVVTVPSSSLGTQTYICNVNHKPSDTKVDKKVEPKSCDKTHTCPPCPAPPVAGPSVFLFPPKPKDTLMISRTPEVTCVVVDVKHEDPEVKFNWYVDGVEVHNAKTKPREEEYNSTYRVVSVLTVLHQDWLNGKEYKCKVSNKALPAPIEKTISKAKGQPREPQVYTLPPSREEMTKNQVSLTCDVSGFYPSDIAVEWESDGQPENNYKTTPPVLDSDGSFFLYSKLTVDKSRWEQGDVFSCSVMHEALHNHYTQKSLSLSPGK

SEQ ID NO: 21832 - protein, 118 aa, synthetic construct
  REGION 1..118: note = Description of Artificial Sequence: Synthetic polypeptide
  REGION 1..118: note = VH of XENP019354
QIQLVQSGAEVKKPGASVKVSCKASGYTFTNYGMNWVRQAPGQGLEWMGWINTYTGEPTYADKFQGRVTMTLDTSTSTAYMELSSLRSEDTAVYFCARGRGMGYFDYWGQGTLVTVSS

SEQ ID NO: 21833 - protein, 5 aa, synthetic construct
  REGION 1..5: note = Description of Artificial Sequence: Synthetic peptide
  REGION 1..5: note = XENP019354 vhCDR1
NYGMN

SEQ ID NO: 21834 - protein, 17 aa, synthetic construct
  REGION 1..17: note = Description of Artificial Sequence: Synthetic peptide
  REGION 1..17: note = XENP019354 vhCDR2
WINTYTGEPTYADKFQG

SEQ ID NO: 21835 - protein, 9 aa, synthetic construct
  REGION 1..9: note = Description of Artificial Sequence: Synthetic peptide
  REGION 1..9: note = XENP019354 vhCDR3
GRGMGYFDY

SEQ ID NO: 21836 - protein, 214 aa, synthetic construct
  REGION 1..214: note = Description of Artificial Sequence: Synthetic polypeptide
  REGION 1..214: note = XENP019354 1H11_H1L1_IgG1_PVA_/S267K Light Chain
DIQMTQSPSSLSASVGDRVTITCRASENIYSNLAWYQQKPGKSPKLLVYAATNLADGVPSRFSGSGSGTDYTLTISSLQPEDFATYYCQHFWTTPRTFGGGTKVEIKRTVAAPSVFIFPPSDEQLKSGTASVVCLLNNFYPREAKVQWKVDNALQSGNSQESVTEQDSKDSTYSLSSTLTLSKADYEKHKVYACEVTHQGLSSPVTKSFNRGEC

SEQ ID NO: 21837 - protein, 107 aa, synthetic construct
  REGION 1..107: note = Description of Artificial Sequence: Synthetic polypeptide
  REGION 1..107: note = VL of XENP019354
DIQMTQSPSSLSASVGDRVTITCRASENIYSNLAWYQQKPGKSPKLLVYAATNLADGVPSRFSGSGSGTDYTLTISSLQPEDFATYYCQHFWTTPRTFGGGTKVEIK

SEQ ID NO: 21838 - protein, 11 aa, synthetic construct
  REGION 1..11: note = Description of Artificial Sequence: Synthetic peptide
  REGION 1..11: note = XENP019354 vlCDR1
RASENIYSNLA

SEQ ID NO: 21839 - protein, 7 aa, synthetic construct
  REGION 1..7: note = Description of Artificial Sequence: Synthetic peptide
  REGION 1..7: note = XENP019354 vlCDR2
AATNLAD

SEQ ID NO: 21840 - protein, 9 aa, synthetic construct
  REGION 1..9: note = Description of Artificial Sequence: Synthetic peptide
  REGION 1..9: note = XENP019354 vlCDR3
QHFWTTPRT

SEQ ID NO: 21841 - protein, 447 aa, synthetic construct; identical to SEQ ID NO: 21831
  REGION 1..447: note = Description of Artificial Sequence: Synthetic polypeptide
  REGION 1..447: note = XENP019355 1H11_H1L2_IgG1_PVA_/S267K Heavy Chain

SEQ ID NO: 21842 - protein, 118 aa, synthetic construct; identical to SEQ ID NO: 21832
  REGION 1..118: note = Description of Artificial Sequence: Synthetic polypeptide
  REGION 1..118: note = VH of XENP019355

SEQ ID NO: 21843 - protein, 5 aa, synthetic construct
  REGION 1..5: note = Description of Artificial Sequence: Synthetic peptide
  REGION 1..5: note = XENP019355 vhCDR1
NYGMN

SEQ ID NO: 21844 - protein, 17 aa, synthetic construct
  REGION 1..17: note = Description of Artificial Sequence: Synthetic peptide
  REGION 1..17: note = XENP019355 vhCDR2
WINTYTGEPTYADKFQG

SEQ ID NO: 21845 - protein, 9 aa, synthetic construct
  REGION 1..9: note = Description of Artificial Sequence: Synthetic peptide
  REGION 1..9: note = XENP019355 vhCDR3
GRGMGYFDY

SEQ ID NO: 21846 - protein, 214 aa, synthetic construct
  REGION 1..214: note = Description of Artificial Sequence: Synthetic polypeptide
  REGION 1..214: note = XENP019355 1H11_H1L2_IgG1_PVA_/S267K Light Chain
DIQMTQSPATLSVSPGERATLSCRASENIYSNLAWYQQKPGQSPRLLVYAATNLADGVPSRFSGSGSGTEYTLTISSLQSEDFAVYYCQHFWTTPRTFGGGTKVEIKRTVAAPSVFIFPPSDEQLKSGTASVVCLLNNFYPREAKVQWKVDNALQSGNSQESVTEQDSKDSTYSLSSTLTLSKADYEKHKVYACEVTHQGLSSPVTKSFNRGEC

SEQ ID NO: 21847 - protein, 107 aa, synthetic construct
  REGION 1..107: note = Description of Artificial Sequence: Synthetic polypeptide
  REGION 1..107: note = VL of XENP019355
DIQMTQSPATLSVSPGERATLSCRASENIYSNLAWYQQKPGQSPRLLVYAATNLADGVPSRFSGSGSGTEYTLTISSLQSEDFAVYYCQHFWTTPRTFGGGTKVEIK

SEQ ID NO: 21848 - protein, 11 aa, synthetic construct
  REGION 1..11: note = Description of Artificial Sequence: Synthetic peptide
  REGION 1..11: note = XENP019355 vlCDR1
RASENIYSNLA

SEQ ID NO: 21849 - protein, 7 aa, synthetic construct
  REGION 1..7: note = Description of Artificial Sequence: Synthetic peptide
  REGION 1..7: note = XENP019355 vlCDR2
AATNLAD

SEQ ID NO: 21850 - protein, 9 aa, synthetic construct
  REGION 1..9: note = Description of Artificial Sequence: Synthetic peptide
  REGION 1..9: note = XENP019355 vlCDR3
QHFWTTPRT

SEQ ID NO: 21851 - protein, 447 aa, synthetic construct
  REGION 1..447: note = Description of Artificial Sequence: Synthetic polypeptide
  REGION 1..447: note = XENP019356 1H11_H2L1_IgG1_PVA_/S267K Heavy Chain
QIQLVQSGSELKKPGASVKVSCKASGYTFTNYGMNWVRQAPGQGLEWMGWINTYTGEPTYADGFTGRFVFSLDTSVSTAYLQISSLKAEDTAVYFCARGRGMGYFDYWGQGTLVTVSSASTKGPSVFPLAPSSKSTSGGTAALGCLVKDYFPEPVTVSWNSGALTSGVHTFPAVLQSSGLYSLSSVVTVPSSSLGTQTYICNVNHKPSDTKVDKKVEPKSCDKTHTCPPCPAPPVAGPSVFLFPPKPKDTLMISRTPEVTCVVVDVKHEDPEVKFNWYVDGVEVHNAKTKPREEEYNSTYRVVSVLTVLHQDWLNGKEYKCKVSNKALPAPIEKTISKAKGQPREPQVYTLPPSREEMTKNQVSLTCDVSGFYPSDIAVEWESDGQPENNYKTTPPVLDSDGSFFLYSKLTVDKSRWEQGDVFSCSVMHEALHNHYTQKSLSLSPGK

SEQ ID NO: 21852 - protein, 118 aa, synthetic construct
  REGION 1..118: note = Description of Artificial Sequence: Synthetic polypeptide
  REGION 1..118: note = VH of XENP019356
QIQLVQSGSELKKPGASVKVSCKASGYTFTNYGMNWVRQAPGQGLEWMGWINTYTGEPTYADGFTGRFVFSLDTSVSTAYLQISSLKAEDTAVYFCARGRGMGYFDYWGQGTLVTVSS

SEQ ID NO: 21853 - protein, 5 aa, synthetic construct
  REGION 1..5: note = Description of Artificial Sequence: Synthetic peptide
  REGION 1..5: note = XENP019356 vhCDR1
NYGMN

SEQ ID NO: 21854 - protein, 17 aa, synthetic construct
  REGION 1..17: note = Description of Artificial Sequence: Synthetic peptide
  REGION 1..17: note = XENP019356 vhCDR2
WINTYTGEPTYADGFTG

SEQ ID NO: 21855 - protein, 9 aa, synthetic construct
  REGION 1..9: note = Description of Artificial Sequence: Synthetic peptide
  REGION 1..9: note = XENP019356 vhCDR3
GRGMGYFDY

SEQ ID NO: 21856 - protein, 214 aa, synthetic construct; identical to SEQ ID NO: 21836
  REGION 1..214: note = Description of Artificial Sequence: Synthetic polypeptide
  REGION 1..214: note = XENP019356 1H11_H2L1_IgG1_PVA_/S267K Light Chain

SEQ ID NO: 21857 - protein, 107 aa, synthetic construct; identical to SEQ ID NO: 21837
  REGION 1..107: note = Description of Artificial Sequence: Synthetic polypeptide
  REGION 1..107: note = VL of XENP019356

SEQ ID NO: 21858 - protein, 11 aa, synthetic construct
  REGION 1..11: note = Description of Artificial Sequence: Synthetic peptide
  REGION 1..11: note = XENP019356 vlCDR1
RASENIYSNLA

SEQ ID NO: 21859 - protein, 7 aa, synthetic construct
  REGION 1..7: note = Description of Artificial Sequence: Synthetic peptide
  REGION 1..7: note = XENP019356 vlCDR2
AATNLAD

SEQ ID NO: 21860 - protein, 9 aa, synthetic construct
  REGION 1..9: note = Description of Artificial Sequence: Synthetic peptide
  REGION 1..9: note = XENP019356 vlCDR3
QHFWTTPRT

SEQ ID NO: 21861 - protein, 447 aa, synthetic construct; identical to SEQ ID NO: 21851
  REGION 1..447: note = Description of Artificial Sequence: Synthetic polypeptide
  REGION 1..447: note = XENP019357 1H11_H2L2_IgG1_PVA_/S267K Heavy Chain

SEQ ID NO: 21862 - protein, 118 aa, synthetic construct; identical to SEQ ID NO: 21852
  REGION 1..118: note = Description of Artificial Sequence: Synthetic polypeptide
  REGION 1..118: note = VH of XENP019357

SEQ ID NO: 21863 - protein, 5 aa, synthetic construct
  REGION 1..5: note = Description of Artificial Sequence: Synthetic peptide
  REGION 1..5: note = XENP019357 vhCDR1
NYGMN

SEQ ID NO: 21864 - protein, 17 aa, synthetic construct
  REGION 1..17: note = Description of Artificial Sequence: Synthetic peptide
  REGION 1..17: note = XENP019357 vhCDR2
WINTYTGEPTYADGFTG

SEQ ID NO: 21865 - protein, 9 aa, synthetic construct
  REGION 1..9: note = Description of Artificial Sequence: Synthetic peptide
  REGION 1..9: note = XENP019357 vhCDR3
GRGMGYFDY

SEQ ID NO: 21866 - protein, 214 aa, synthetic construct; identical to SEQ ID NO: 21846
  REGION 1..214: note = Description of Artificial Sequence: Synthetic polypeptide
  REGION 1..214: note = XENP019357 1H11_H2L2_IgG1_PVA_/S267K Light Chain

SEQ ID NO: 21867 - protein, 107 aa, synthetic construct; identical to SEQ ID NO: 21847
  REGION 1..107: note = Description of Artificial Sequence: Synthetic polypeptide
  REGION 1..107: note = VL of XENP019357

SEQ ID NO: 21868 - protein, 11 aa, synthetic construct
  REGION 1..11: note = Description of Artificial Sequence: Synthetic peptide
  REGION 1..11: note = XENP019357 vlCDR1
RASENIYSNLA

SEQ ID NO: 21869 - protein, 7 aa, synthetic construct
  REGION 1..7: note = Description of Artificial Sequence: Synthetic peptide
  REGION 1..7: note = XENP019357 vlCDR2
AATNLAD

SEQ ID NO: 21870 - protein, 9 aa, synthetic construct
  REGION 1..9: note = Description of Artificial Sequence: Synthetic peptide
  REGION 1..9: note = XENP019357 vlCDR3
QHFWTTPRT

SEQ ID NO: 21871 - protein, 450 aa, synthetic construct
  REGION 1..450: note = Description of Artificial Sequence: Synthetic polypeptide
  REGION 1..450: note = XENP019358 3C11_H1L1_IgG1_PVA_/S267K Heavy Chain
QVQLQESGPGLVKPSETLSLTCTVSGYSITSDYAWNWIRQPPGKKLEWIGYISYSSTSYNPSLKSRVTISRDTSKNQFSLKLSSVTAADTAVYFCARNNLLWSYYYAMDYWGQGTLVTVSSASTKGPSVFPLAPSSKSTSGGTAALGCLVKDYFPEPVTVSWNSGALTSGVHTFPAVLQSSGLYSLSSVVTVPSSSLGTQTYICNVNHKPSDTKVDKKVEPKSCDKTHTCPPCPAPPVAGPSVFLFPPKPKDTLMISRTPEVTCVVVDVKHEDPEVKFNWYVDGVEVHNAKTKPREEEYNSTYRVVSVLTVLHQDWLNGKEYKCKVSNKALPAPIEKTISKAKGQPREPQVYTLPPSREEMTKNQVSLTCDVSGFYPSDIAVEWESDGQPENNYKTTPPVLDSDGSFFLYSKLTVDKSRWEQGDVFSCSVMHEALHNHYTQKSLSLSPGK

SEQ ID NO: 21872 - protein, 121 aa, synthetic construct
  REGION 1..121: note = Description of Artificial Sequence: Synthetic polypeptide
  REGION 1..121: note = VH of XENP019358
QVQLQESGPGLVKPSETLSLTCTVSGYSITSDYAWNWIRQPPGKKLEWIGYISYSSTSYNPSLKSRVTISRDTSKNQFSLKLSSVTAADTAVYFCARNNLLWSYYYAMDYWGQGTLVTVSS

SEQ ID NO: 21873 - protein, 6 aa, synthetic construct
  REGION 1..6: note = Description of Artificial Sequence: Synthetic peptide
  REGION 1..6: note = XENP019358 vhCDR1
SDYAWN

SEQ ID NO: 21874 - protein, 15 aa, synthetic construct
  REGION 1..15: note = Description of Artificial Sequence: Synthetic peptide
  REGION 1..15: note = XENP019358 vhCDR2
YISYSSTSYNPSLKS

SEQ ID NO: 21875 - protein, 13 aa, synthetic construct
  REGION 1..13: note = Description of Artificial Sequence: Synthetic peptide
  REGION 1..13: note = XENP019358 vhCDR3
NNLLWSYYYAMDY

SEQ ID NO: 21876 - protein, 218 aa, synthetic construct
  REGION 1..218: note = Description of Artificial Sequence: Synthetic polypeptide
  REGION 1..218: note = XENP019358 3C11_H1L1_IgG1_PVA_/S267K Light Chain
DIVLTQSPATLSLSPGERATLSCRASESVDSYGNSFMHWYQQKPGQPPRLLIYRASNLESGIPARFSGSGSGTDFTLTISSLEPEDFAVYYCQQSNEDPYTFGGGTKVEIKRTVAAPSVFIFPPSDEQLKSGTASVVCLLNNFYPREAKVQWKVDNALQSGNSQESVTEQDSKDSTYSLSSTLTLSKADYEKHKVYACEVTHQGLSSPVTKSFNRGEC

SEQ ID NO: 21877 - protein, 111 aa, synthetic construct
  REGION 1..111: note = Description of Artificial Sequence: Synthetic polypeptide
  REGION 1..111: note = VL of XENP019358
DIVLTQSPATLSLSPGERATLSCRASESVDSYGNSFMHWYQQKPGQPPRLLIYRASNLESGIPARFSGSGSGTDFTLTISSLEPEDFAVYYCQQSNEDPYTFGGGTKVEIK

SEQ ID NO: 21878 - protein, 15 aa, synthetic construct
  REGION 1..15: note = Description of Artificial Sequence: Synthetic peptide
  REGION 1..15: note = XENP019358 vlCDR1
RASESVDSYGNSFMH

SEQ ID NO: 21879 - protein, 7 aa, synthetic construct
  REGION 1..7: note = Description of Artificial Sequence: Synthetic peptide
  REGION 1..7: note = XENP019358 vlCDR2
RASNLES

SEQ ID NO: 21880 - protein, 9 aa, synthetic construct
  REGION 1..9: note = Description of Artificial Sequence: Synthetic peptide
  REGION 1..9: note = XENP019358 vlCDR3
QQSNEDPYT

SEQ ID NO: 21881 - protein, 447 aa, synthetic construct; identical to SEQ ID NO: 21831
  REGION 1..447: note = Description of Artificial Sequence: Synthetic polypeptide
  REGION 1..447: note = XENP019359 1H11_H1_5D8_L1_IgG1_PVA_/S267K Heavy Chain

SEQ ID NO: 21882 - protein, 118 aa, synthetic construct; identical to SEQ ID NO: 21832
  REGION 1..118: note = Description of Artificial Sequence: Synthetic polypeptide
  REGION 1..118: note = VH of XENP019359

SEQ ID NO: 21883 - protein, 5 aa, synthetic construct
  REGION 1..5: note = Description of Artificial Sequence: Synthetic peptide
  REGION 1..5: note = XENP019359 vhCDR1
NYGMN

SEQ ID NO: 21884 - protein, 17 aa, synthetic construct
  REGION 1..17: note = Description of Artificial Sequence: Synthetic peptide
  REGION 1..17: note = XENP019359 vhCDR2
WINTYTGEPTYADKFQG

SEQ ID NO: 21885 - protein, 9 aa, synthetic construct
  REGION 1..9: note = Description of Artificial Sequence: Synthetic peptide
  REGION 1..9: note = XENP019359 vhCDR3
GRGMGYFDY

SEQ ID NO: 21886 - protein, 214 aa, synthetic construct
  REGION 1..214: note = Description of Artificial Sequence: Synthetic polypeptide
  REGION 1..214: note = XENP019359 1H11_H1_5D8_L1_IgG1_PVA_/S267K Light Chain
DIQMTQSPSSLSASVGDRVTITCRASENIYSNLAWYQQKPGKSPKLLVYAATNLGDGVPSRFSGSGSGTDYTLTISSLQPEDFATYYCQHFWATPRTFGGGTKVEIKRTVAAPSVFIFPPSDEQLKSGTASVVCLLNNFYPREAKVQWKVDNALQSGNSQESVTEQDSKDSTYSLSSTLTLSKADYEKHKVYACEVTHQGLSSPVTKSFNRGEC

SEQ ID NO: 21887 - protein, 107 aa, synthetic construct
  REGION 1..107: note = Description of Artificial Sequence: Synthetic polypeptide
  REGION 1..107: note = VL of XENP019359
DIQMTQSPSSLSASVGDRVTITCRASENIYSNLAWYQQKPGKSPKLLVYAATNLGDGVPSRFSGSGSGTDYTLTISSLQPEDFATYYCQHFWATPRTFGGGTKVEIK

SEQ ID NO: 21888 - protein, 11 aa, synthetic construct
  REGION 1..11: note = Description of Artificial Sequence: Synthetic peptide
  REGION 1..11: note = XENP019359 vlCDR1
RASENIYSNLA

SEQ ID NO: 21889 - protein, 7 aa, synthetic construct
  REGION 1..7: note = Description of Artificial Sequence: Synthetic peptide
  REGION 1..7: note = XENP019359 vlCDR2
AATNLGD

SEQ ID NO: 21890 - protein, 9 aa, synthetic construct
  REGION 1..9: note = Description of Artificial Sequence: Synthetic peptide
  REGION 1..9: note = XENP019359 vlCDR3
QHFWATPRT

SEQ ID NO: 21891 - protein, 444 aa, synthetic construct
  REGION 1..444: note = Description of Artificial Sequence: Synthetic polypeptide
  REGION 1..444: note = XENP019360 8D7_H1L1_IgG1_PVA_/S267K Heavy Chain
QVTLKESGPVLVKPTETLTLTCTVSGFSLSSYGVHWVRQPPGKGLEWLAVIWSGSTDYNPSLKSRLTISKDNSKSQVVLTMTNMDPVDTATYYCARTYYYAMDYWGQGTLVTVSSASTKGPSVFPLAPSSKSTSGGTAALGCLVKDYFPEPVTVSWNSGALTSGVHTFPAVLQSSGLYSLSSVVTVPSSSLGTQTYICNVNHKPSDTKVDKKVEPKSCDKTHTCPPCPAPPVAGPSVFLFPPKPKDTLMISRTPEVTCVVVDVKHEDPEVKFNWYVDGVEVHNAKTKPREEEYNSTYRVVSVLTVLHQDWLNGKEYKCKVSNKALPAPIEKTISKAKGQPREPQVYTLPPSREEMTKNQVSLTCDVSGFYPSDIAVEWESDGQPENNYKTTPPVLDSDGSFFLYSKLTVDKSRWEQGDVFSCSVMHEALHNHYTQKSLSLSPGK

SEQ ID NO: 21892 - protein, 115 aa, synthetic construct
  REGION 1..115: note = Description of Artificial Sequence: Synthetic polypeptide
  REGION 1..115: note = VH of XENP019360
QVTLKESGPVLVKPTETLTLTCTVSGFSLSSYGVHWVRQPPGKGLEWLAVIWSGSTDYNPSLKSRLTISKDNSKSQVVLTMTNMDPVDTATYYCARTYYYAMDYWGQGTLVTVSS

SEQ ID NO: 21893 - protein, 5 aa, synthetic construct
  REGION 1..5: note = Description of Artificial Sequence: Synthetic peptide
  REGION 1..5: note = XENP019360 vhCDR1
SYGVH

SEQ ID NO: 21894 - protein, 15 aa, synthetic construct
  REGION 1..15: note = Description of Artificial Sequence: Synthetic peptide
  REGION 1..15: note = XENP019360 vhCDR2
VIWSGSTDYNPSLKS

SEQ ID NO: 21895 - protein, 8 aa, synthetic construct
  REGION 1..8: note = Description of Artificial Sequence: Synthetic peptide
  REGION 1..8: note = XENP019360 vhCDR3
TYYYAMDY

SEQ ID NO: 21896 - protein, 214 aa, synthetic construct
  REGION 1..214: note = Description of Artificial Sequence: Synthetic polypeptide
  REGION 1..214: note = XENP019360 8D7_H1L1_IgG1_PVA_/S267K Light Chain
DIQMTQSPSSLSASVGDRVTITCRASENIYSNLAWYQQKPGKSPKFLIYAATNLADGVPSRFSGSGSGTDYTLTISSLQPEDFATYYCQHFWGTPWTFGGGTKVEIKRTVAAPSVFIFPPSDEQLKSGTASVVCLLNNFYPREAKVQWKVDNALQSGNSQESVTEQDSKDSTYSLSSTLTLSKADYEKHKVYACEVTHQGLSSPVTKSFNRGEC

SEQ ID NO: 21897 - protein, 107 aa, synthetic construct
  REGION 1..107: note = Description of Artificial Sequence: Synthetic polypeptide
  REGION 1..107: note = VL of XENP019360
DIQMTQSPSSLSASVGDRVTITCRASENIYSNLAWYQQKPGKSPKFLIYAATNLADGVPSRFSGSGSGTDYTLTISSLQPEDFATYYCQHFWGTPWTFGGGTKVEIK

SEQ ID NO: 21898 - protein, 11 aa, synthetic construct
  REGION 1..11: note = Description of Artificial Sequence: Synthetic peptide
  REGION 1..11: note = XENP019360 vlCDR1
RASENIYSNLA

SEQ ID NO: 21899 - protein, 7 aa, synthetic construct
  REGION 1..7: note = Description of Artificial Sequence: Synthetic peptide
  REGION 1..7: note = XENP019360 vlCDR2
AATNLAD

SEQ ID NO: 21900 - protein, 9 aa, synthetic construct
  REGION 1..9: note = Description of Artificial Sequence: Synthetic peptide
  REGION 1..9: note = XENP019360 vlCDR3
QHFWGTPWT

SEQ ID NO: 21901 - protein, 447 aa, synthetic construct
  REGION 1..447: note = Description of Artificial Sequence: Synthetic polypeptide
  REGION 1..447: note = XENP019361 2A11_H0L0_IgG1_PVA_/S267K Heavy Chain
EVQLQQSGAELVRSGASVKLSCTASGFNIKDYYMHWVKQRPEQGLEWIGWIDPENGDTEYAPKFQGKATMTADTSSNTAYLQLSSLTSEDTAVYYCYARGVRQALDYWGQGTSVTVSSASTKGPSVFPLAPSSKSTSGGTAALGCLVKDYFPEPVTVSWNSGALTSGVHTFPAVLQSSGLYSLSSVVTVPSSSLGTQTYICNVNHKPSDTKVDKKVEPKSCDKTHTCPPCPAPPVAGPSVFLFPPKPKDTLMISRTPEVTCVVVDVKHEDPEVKFNWYVDGVEVHNAKTKPREEEYNSTYRVVSVLTVLHQDWLNGKEYKCKVSNKALPAPIEKTISKAKGQPREPQVYTLPPSREEMTKNQVSLTCDVSGFYPSDIAVEWESDGQPENNYKTTPPVLDSDGSFFLYSKLTVDKSRWEQGDVFSCSVMHEALHNHYTQKSLSLSPGK

SEQ ID NO: 21902 - protein, 118 aa, synthetic construct
  REGION 1..118: note = Description of Artificial Sequence: Synthetic polypeptide
  REGION 1..118: note = VH of XENP019361
EVQLQQSGAELVRSGASVKLSCTASGFNIKDYYMHWVKQRPEQGLEWIGWIDPENGDTEYAPKFQGKATMTADTSSNTAYLQLSSLTSEDTAVYYCYARGVRQALDYWGQGTSVTVSS

SEQ ID NO: 21903 - protein, 5 aa, synthetic construct
  REGION 1..5: note = Description of Artificial Sequence: Synthetic peptide
  REGION 1..5: note = XENP019361 vhCDR1
DYYMH

SEQ ID NO: 21904 - protein, 17 aa, synthetic construct
  REGION 1..17: note = Description of Artificial Sequence: Synthetic peptide
  REGION 1..17: note = XENP019361 vhCDR2
WIDPENGDTEYAPKFQG

SEQ ID NO: 21905 - protein, 9 aa, synthetic construct
  REGION 1..9: note = Description of Artificial Sequence: Synthetic peptide
  REGION 1..9: note = XENP019361 vhCDR3
RGVRQALDY

SEQ ID NO: 21906 - protein, 214 aa, synthetic construct
  REGION 1..214: note = Description of Artificial Sequence: Synthetic polypeptide
  REGION 1..214: note = XENP019361 2A11_H0L0_IgG1_PVA_/S267K Light Chain
DIQMTQTTSSLSASLGDRVTISCRASQDIGNYLNWFQQKPDGTVKLLIYYTSRLHSGVPSRFSGSGSGTDYSLTISNLEQEDIATYFCQQGNTLPYTFGGGTKLEIKRTVAAPSVFIFPPSDEQLKSGTASVVCLLNNFYPREAKVQWKVDNALQSGNSQESVTEQDSKDSTYSLSSTLTLSKADYEKHKVYACEVTHQGLSSPVTKSFNRGEC

SEQ ID NO: 21907 - protein, 107 aa, synthetic construct
  REGION 1..107: note = Description of Artificial Sequence: Synthetic polypeptide
  REGION 1..107: note = VL of XENP019361
DIQMTQTTSSLSASLGDRVTISCRASQDIGNYLNWFQQKPDGTVKLLIYYTSRLHSGVPSRFSGSGSGTDYSLTISNLEQEDIATYFCQQGNTLPYTFGGGTKLEIK

SEQ ID NO: 21908 - protein, 11 aa, synthetic construct
  REGION 1..11: note = Description of Artificial Sequence: Synthetic peptide
  REGION 1..11: note = XENP019361 vlCDR1
RASQDIGNYLN

SEQ ID NO: 21909 - protein, 7 aa, synthetic construct
  REGION 1..7: note = Description of Artificial Sequence: Synthetic peptide
  REGION 1..7: note = XENP019361 vlCDR2
YTSRLHS

SEQ ID NO: 21910 - protein, 9 aa, synthetic construct
  REGION 1..9: note = Description of Artificial Sequence: Synthetic peptide
  REGION 1..9: note = XENP019361 vlCDR3
QQGNTLPYT

SEQ ID NO: 21911 - protein, 447 aa, synthetic construct; identical to SEQ ID NO: 2885
  REGION 1..447: note = Description of Artificial Sequence: Synthetic polypeptide
  REGION 1..447: note = XENP019362 2A11_H1L1_IgG1_PVA_/S267K Heavy Chain

SEQ ID NO: 21912 - protein, 118 aa, synthetic construct; identical to SEQ ID NO: 2686
  REGION 1..118: note = Description of Artificial Sequence: Synthetic polypeptide
  REGION 1..118: note = VH of XENP019362

SEQ ID NO: 21913 - protein, 5 aa, synthetic construct
  REGION 1..5: note = Description of Artificial Sequence: Synthetic peptide
  REGION 1..5: note = XENP019362 vhCDR1
DYYMH

SEQ ID NO: 21914 - protein, 17 aa, synthetic construct
  REGION 1..17: note = Description of Artificial Sequence: Synthetic peptide
  REGION 1..17: note = XENP019362 vhCDR2
WIDPENGDTEYAPKFQG

SEQ ID NO: 21915 - protein, 9 aa, synthetic construct
  REGION 1..9: note = Description of Artificial Sequence: Synthetic peptide
  REGION 1..9: note = XENP019362 vhCDR3
RGVRQALDY

SEQ ID NO: 21916 - protein, 214 aa, synthetic construct
  REGION 1..214: note = Description of Artificial Sequence: Synthetic polypeptide
  REGION 1..214: note = XENP019362 2A11_H1L1_IgG1_PVA_/S267K Light Chain
DIQMTQSPSSLSASVGDRVTITCRASQDIGNYLNWFQQKPGKTVKLLIYYTSRLHSGVPSRFSGSGSGTDYTLTISSLQPEDFATYFCQQGNTLPYTFGGGTKVEIKRTVAAPSVFIFPPSDEQLKSGTASVVCLLNNFYPREAKVQWKVDNALQSGNSQESVTEQDSKDSTYSLSSTLTLSKADYEKHKVYACEVTHQGLSSPVTKSFNRGEC

SEQ ID NO: 21917 - protein, 107 aa, synthetic construct
  REGION 1..107: note = Description of Artificial Sequence: Synthetic polypeptide
  REGION 1..107: note = VL of XENP019362
DIQMTQSPSSLSASVGDRVTITCRASQDIGNYLNWFQQKPGKTVKLLIYYTSRLHSGVPSRFSGSGSGTDYTLTISSLQPEDFATYFCQQGNTLPYTFGGGTKVEIK

SEQ ID NO: 21918 - protein, 11 aa, synthetic construct
  REGION 1..11: note = Description of Artificial Sequence: Synthetic peptide
  REGION 1..11: note = XENP019362 vlCDR1
RASQDIGNYLN

SEQ ID NO: 21919 - protein, 7 aa, synthetic construct
  REGION 1..7: note = Description of Artificial Sequence: Synthetic peptide
  REGION 1..7: note = XENP019362 vlCDR2
YTSRLHS

SEQ ID NO: 21920 - protein, 9 aa, synthetic construct
  REGION 1..9: note = Description of Artificial Sequence: Synthetic peptide
  REGION 1..9: note = XENP019362 vlCDR3
QQGNTLPYT

SEQ ID NO: 21921 - protein, 447 aa, synthetic construct; identical to SEQ ID NO: 2885
  REGION 1..447: note = Description of Artificial Sequence: Synthetic polypeptide
  REGION 1..447: note = XENP019363 2A11_H1L2_IgG1_PVA_/S267K Heavy Chain

SEQ ID NO: 21922 - protein, 118 aa, synthetic construct; identical to SEQ ID NO: 2686
  REGION 1..118: note = Description of Artificial Sequence: Synthetic polypeptide
  REGION 1..118: note = VH of XENP019363

SEQ ID NO: 21923 - protein, 5 aa, synthetic construct
  REGION 1..5: note = Description of Artificial Sequence: Synthetic peptide
  REGION 1..5: note = XENP019363 vhCDR1
DYYMH

SEQ ID NO: 21924 - protein, 17 aa, synthetic construct
  REGION 1..17: note = Description of Artificial Sequence: Synthetic peptide
  REGION 1..17: note = XENP019363 vhCDR2
WIDPENGDTEYAPKFQG

SEQ ID NO: 21925 - protein, 9 aa, synthetic construct
  REGION 1..9: note = Description of Artificial Sequence: Synthetic peptide
  REGION 1..9: note = XENP019363 vhCDR3
RGVRQALDY

SEQ ID NO: 21926 - protein, 214 aa, synthetic construct; identical to SEQ ID NO: 2880
  REGION 1..214: note = Description of Artificial Sequence: Synthetic polypeptide
  REGION 1..214: note = XENP019363 2A11_H1L2_IgG1_PVA_/S267K Light Chain

SEQ ID NO: 21927 - protein, 107 aa, synthetic construct; identical to SEQ ID NO: 2881
  REGION 1..107: note = Description of Artificial Sequence: Synthetic polypeptide
  REGION 1..107: note = VL of XENP019363

SEQ ID NO: 21928 - protein, 11 aa, synthetic construct
  REGION 1..11: note = Description of Artificial Sequence: Synthetic peptide
  REGION 1..11: note = XENP019363 vlCDR1
QASQDIGNYLN

SEQ ID NO: 21929 - protein, 7 aa, synthetic construct
  REGION 1..7: note = Description of Artificial Sequence: Synthetic peptide
  REGION 1..7: note = XENP019363 vlCDR2
YTSRLHS

SEQ ID NO: 21930 - protein, 9 aa, synthetic construct
  REGION 1..9: note = Description of Artificial Sequence: Synthetic peptide
  REGION 1..9: note = XENP019363 vlCDR3
QQGNTLPYT

SEQ ID NO: 21931 - protein, 446 aa, synthetic construct
  REGION 1..446: note = Description of Artificial Sequence: Synthetic polypeptide
  REGION 1..446: note = XENP019364 2A11_H2L1_IgG1_PVA_/S267K Heavy Chain
EVQLVQSGAEVKKPGATVKISCKASGFNIKDYYMHWVQQAPGKGLEWMGWIDPENGDTEYAPKFQGRVTITADTSTNTAYMELSSLRSEDTAVYYCARGVRQALDYWGQGTLVTVSSASTKGPSVFPLAPSSKSTSGGTAALGCLVKDYFPEPVTVSWNSGALTSGVHTFPAVLQSSGLYSLSSVVTVPSSSLGTQTYICNVNHKPSDTKVDKKVEPKSCDKTHTCPPCPAPPVAGPSVFLFPPKPKDTLMISRTPEVTCVVVDVKHEDPEVKFNWYVDGVEVHNAKTKPREEEYNSTYRVVSVLTVLHQDWLNGKEYKCKVSNKALPAPIEKTISKAKGQPREPQVYTLPPSREEMTKNQVSLTCDVSGFYPSDIAVEWESDGQPENNYKTTPPVLDSDGSFFLYSKLTVDKSRWEQGDVFSCSVMHEALHNHYTQKSLSLSPGK

SEQ ID NO: 21932 - protein, 117 aa, synthetic construct
  REGION 1..117: note = Description of Artificial Sequence: Synthetic polypeptide
  REGION 1..117: note = VH of XENP019364
EVQLVQSGAEVKKPGATVKISCKASGFNIKDYYMHWVQQAPGKGLEWMGWIDPENGDTEYAPKFQGRVTITADTSTNTAYMELSSLRSEDTAVYYCARGVRQALDYWGQGTLVTVSS

SEQ ID NO: 21933 - protein, 5 aa, synthetic construct
  REGION 1..5: note = Description of Artificial Sequence: Synthetic peptide
  REGION 1..5: note = XENP019364 vhCDR1
DYYMH

SEQ ID NO: 21934 - protein, 17 aa, synthetic construct
  REGION 1..17: note = Description of Artificial Sequence: Synthetic peptide
  REGION 1..17: note = XENP019364 vhCDR2
WIDPENGDTEYAPKFQG

SEQ ID NO: 21935 - protein, 8 aa, synthetic construct
  REGION 1..8: note = Description of Artificial Sequence: Synthetic peptide
  REGION 1..8: note = XENP019364 vhCDR3
GVRQALDY

SEQ ID NO: 21936 - protein, 214 aa, synthetic construct; identical to SEQ ID NO: 21916
  REGION 1..214: note = Description of Artificial Sequence: Synthetic polypeptide
  REGION 1..214: note = XENP019364 2A11_H2L1_IgG1_PVA_/S267K Light Chain

SEQ ID NO: 21937 - protein, 107 aa, synthetic construct; identical to SEQ ID NO: 21917
  REGION 1..107: note = Description of Artificial Sequence: Synthetic polypeptide
  REGION 1..107: note = VL of XENP019364

SEQ ID NO: 21938 - protein, 11 aa, synthetic construct
  REGION 1..11: note = Description of Artificial Sequence: Synthetic peptide
  REGION 1..11: note = XENP019364 vlCDR1
RASQDIGNYLN

SEQ ID NO: 21939 - protein, 7 aa, synthetic construct
  REGION 1..7: note = Description of Artificial Sequence: Synthetic peptide
  REGION 1..7: note = XENP019364 vlCDR2
YTSRLHS

SEQ ID NO: 21940 - protein, 9 aa, synthetic construct
  REGION 1..9: note = Description of Artificial Sequence: Synthetic peptide
  REGION 1..9: note = XENP019364 vlCDR3
QQGNTLPYT

SEQ ID NO: 21941 - protein, 446 aa, synthetic construct; identical to SEQ ID NO: 21931
  REGION 1..446: note = Description of Artificial Sequence: Synthetic polypeptide
  REGION 1..446: note = XENP019365 2A11_H2L2_IgG1_PVA_/S267K Heavy Chain

SEQ ID NO: 21942 - protein, 117 aa, synthetic construct; identical to SEQ ID NO: 21932
  REGION 1..117: note = Description of Artificial Sequence: Synthetic polypeptide
  REGION 1..117: note = VH of XENP019365

SEQ ID NO: 21943 - protein, 5 aa, synthetic construct
  REGION 1..5: note = Description of Artificial Sequence: Synthetic peptide
  REGION 1..5: note = XENP019365 vhCDR1
DYYMH

SEQ ID NO: 21944 - protein, 17 aa, synthetic construct
  REGION 1..17: note = Description of Artificial Sequence: Synthetic peptide
  REGION 1..17: note = XENP019365 vhCDR2
WIDPENGDTEYAPKFQG

SEQ ID NO: 21945 - protein, 8 aa, synthetic construct
  REGION 1..8: note = Description of Artificial Sequence: Synthetic peptide
  REGION 1..8: note = XENP019365 vhCDR3
GVRQALDY

SEQ ID NO: 21946 - protein, 214 aa, synthetic construct; identical to SEQ ID NO: 2880
  REGION 1..214: note = Description of Artificial Sequence: Synthetic polypeptide
  REGION 1..214: note = XENP019365 2A11_H2L2_IgG1_PVA_/S267K Light Chain

SEQ ID NO: 21947 - protein, 107 aa, synthetic construct; identical to SEQ ID NO: 2881
  REGION 1..107: note = Description of Artificial Sequence: Synthetic polypeptide
  REGION 1..107: note = VL of XENP019365

SEQ ID NO: 21948 - protein, 11 aa, synthetic construct
  REGION 1..11: note = Description of Artificial Sequence: Synthetic peptide
  REGION 1..11: note = XENP019365 vlCDR1
QASQDIGNYLN

SEQ ID NO: 21949 - protein, 7 aa, synthetic construct
  REGION 1..7: note = Description of Artificial Sequence: Synthetic peptide
  REGION 1..7: note = XENP019365 vlCDR2
YTSRLHS

SEQ ID NO: 21950 - protein, 9 aa, synthetic construct
  REGION 1..9: note = Description of Artificial Sequence: Synthetic peptide
  REGION 1..9: note = XENP019365 vlCDR3
QQGNTLPYT

SEQ ID NO: 21951 - protein, 447 aa, synthetic construct
  REGION 1..447: note = Description of Artificial Sequence: Synthetic polypeptide
  REGION 1..447: note = XENP019366 2A11_H3L1_IgG1_PVA_/S267K Heavy Chain
EVQLVESGGGVVQPGGSLRLSCAASGFNIKDYYMHWVRQAPGKGLEWVSWIDPENGDTEYAPSVKGRFTISADTSKNSAYLQMNSLRTEDTALYYCYARGVRQALDYWGQGTLVTVSSASTKGPSVFPLAPSSKSTSGGTAALGCLVKDYFPEPVTVSWNSGALTSGVHTFPAVLQSSGLYSLSSVVTVPSSSLGTQTYICNVNHKPSDTKVDKKVEPKSCDKTHTCPPCPAPPVAGPSVFLFPPKPKDTLMISRTPEVTCVVVDVKHEDPEVKFNWYVDGVEVHNAKTKPREEEYNSTYRVVSVLTVLHQDWLNGKEYKCKVSNKALPAPIEKTISKAKGQPREPQVYTLPPSREEMTKNQVSLTCDVSGFYPSDIAVEWESDGQPENNYKTTPPVLDSDGSFFLYSKLTVDKSRWEQGDVFSCSVMHEALHNHYTQKSLSLSPGK

SEQ ID NO: 21952 - protein, 118 aa, synthetic construct
  REGION 1..118: note = Description of Artificial Sequence: Synthetic polypeptide
  REGION 1..118: note = VH of XENP019366
EVQLVESGGGVVQPGGSLRLSCAASGFNIKDYYMHWVRQAPGKGLEWVSWIDPENGDTEYAPSVKGRFTISADTSKNSAYLQMNSLRTEDTALYYCYARGVRQALDYWGQGTLVTVSS

SEQ ID NO: 21953 - protein, 5 aa, synthetic construct
  REGION 1..5: note = Description of Artificial Sequence: Synthetic peptide
  REGION 1..5: note = XENP019366 vhCDR1
DYYMH

SEQ ID NO: 21954 - protein, 17 aa, synthetic construct
  REGION 1..17: note = Description of Artificial Sequence: Synthetic peptide
  REGION 1..17: note = XENP019366 vhCDR2
WIDPENGDTEYAPSVKG

SEQ ID NO: 21955 - protein, 9 aa, synthetic construct
  REGION 1..9: note = Description of Artificial Sequence: Synthetic peptide
  REGION 1..9: note = XENP019366 vhCDR3
RGVRQALDY

SEQ ID NO: 21956 - protein, 214 aa, synthetic construct; identical to SEQ ID NO: 21916
  REGION 1..214: note = Description of Artificial Sequence: Synthetic polypeptide
  REGION 1..214: note = XENP019366 2A11_H3L1_IgG1_PVA_/S267K Light Chain

SEQ ID NO: 21957 - protein, 107 aa, synthetic construct; identical to SEQ ID NO: 21917
  REGION 1..107: note = Description of Artificial Sequence: Synthetic polypeptide
  REGION 1..107: note = VL of XENP019366

SEQ ID NO: 21958 - protein, 11 aa, synthetic construct
  REGION 1..11: note = Description of Artificial Sequence: Synthetic peptide
  REGION 1..11: note = XENP019366 vlCDR1
RASQDIGNYLN

SEQ ID NO: 21959 - protein, 7 aa, synthetic construct
  REGION 1..7: note = Description of Artificial Sequence: Synthetic peptide
  REGION 1..7: note = XENP019366 vlCDR2
YTSRLHS

SEQ ID NO: 21960 - protein, 9 aa, synthetic construct
  REGION 1..9: note = Description of Artificial Sequence: Synthetic peptide
  REGION 1..9: note = XENP019366 vlCDR3
QQGNTLPYT

SEQ ID NO: 21961 - protein, 447 aa, synthetic construct; identical to SEQ ID NO: 21951
  REGION 1..447: note = Description of Artificial Sequence: Synthetic polypeptide
  REGION 1..447: note = XENP019367 2A11_H3L2_IgG1_PVA_/S267K Heavy Chain

SEQ ID NO: 21962 - protein, 118 aa, synthetic construct; identical to SEQ ID NO: 21952
  REGION 1..118: note = Description of Artificial Sequence: Synthetic polypeptide
  REGION 1..118: note = VH of XENP019367

SEQ ID NO: 21963 - protein, 5 aa, synthetic construct
  REGION 1..5: note = Description of Artificial Sequence: Synthetic peptide
  REGION 1..5: note = XENP019367 vhCDR1
DYYMH

SEQ ID NO: 21964 - protein, 17 aa, synthetic construct
  REGION 1..17: note = Description of Artificial Sequence: Synthetic peptide
  REGION 1..17: note = XENP019367 vhCDR2
WIDPENGDTEYAPSVKG

SEQ ID NO: 21965 - protein, 9 aa, synthetic construct
  REGION 1..9: note = Description of Artificial Sequence: Synthetic peptide
  REGION 1..9: note = XENP019367 vhCDR3
RGVRQALDY

SEQ ID NO: 21966 - protein, 214 aa, synthetic construct; identical to SEQ ID NO: 2880
  REGION 1..214: note = Description of Artificial Sequence: Synthetic polypeptide
  REGION 1..214: note = XENP019367 2A11_H3L2_IgG1_PVA_/S267K Light Chain

SEQ ID NO: 21967 - protein, 107 aa, synthetic construct; identical to SEQ ID NO: 2881
  REGION 1..107: note = Description of Artificial Sequence: Synthetic polypeptide
  REGION 1..107: note = VL of XENP019367

SEQ ID NO: 21968 - protein, 11 aa, synthetic construct
  REGION 1..11: note = Description of Artificial Sequence: Synthetic peptide
  REGION 1..11: note = XENP019367 vlCDR1
QASQDIGNYLN

SEQ ID NO: 21969 - protein, 7 aa, synthetic construct
  REGION 1..7: note = Description of Artificial Sequence: Synthetic peptide
  REGION 1..7: note = XENP019367 vlCDR2
YTSRLHS

SEQ ID NO: 21970 - protein, 9 aa, synthetic construct
  REGION 1..9: note = Description of Artificial Sequence: Synthetic peptide
  REGION 1..9: note = XENP019367 vlCDR3
QQGNTLPYT

SEQ ID NO: 21971 - protein, 446 aa, synthetic construct
  REGION 1..446: note = Description of Artificial Sequence: Synthetic polypeptide
  REGION 1..446: note = XENP019368 2A11_H4L1_IgG1_PVA_/S267K Heavy Chain
EVQLVESGGGVVQPGGSLRLSCAASGFNIKDYYMHWVRQAPGKGLEWVSWIDPENGDTEYAPSVKGRFTISADTSKNSAYLQMNSLRTEDTALYYCARGVRQALDYWGQGTLVTVSSASTKGPSVFPLAPSSKSTSGGTAALGCLVKDYFPEPVTVSWNSGALTSGVHTFPAVLQSSGLYSLSSVVTVPSSSLGTQTYICNVNHKPSDTKVDKKVEPKSCDKTHTCPPCPAPPVAGPSVFLFPPKPKDTLMISRTPEVTCVVVDVKHEDPEVKFNWYVDGVEVHNAKTKPREEEYNSTYRVVSVLTVLHQDWLNGKEYKCKVSNKALPAPIEKTISKAKGQPREPQVYTLPPSREEMTKNQVSLTCDVSGFYPSDIAVEWESDGQPENNYKTTPPVLDSDGSFFLYSKLTVDKSRWEQGDVFSCSVMHEALHNHYTQKSLSLSPGK

SEQ ID NO: 21972 - protein, 117 aa, synthetic construct
  REGION 1..117: note = Description of Artificial Sequence: Synthetic polypeptide
  REGION 1..117: note = VH of XENP019368
EVQLVESGGGVVQPGGSLRLSCAASGFNIKDYYMHWVRQAPGKGLEWVSWIDPENGDTEYAPSVKGRFTISADTSKNSAYLQMNSLRTEDTALYYCARGVRQALDYWGQGTLVTVSS

SEQ ID NO: 21973 - protein, 5 aa, synthetic construct
  REGION 1..5: note = Description of Artificial Sequence: Synthetic peptide
  REGION 1..5: note = XENP019368 vhCDR1
DYYMH

SEQ ID NO: 21974 - protein, 17 aa, synthetic construct
  REGION 1..17: note = Description of Artificial Sequence: Synthetic peptide
  REGION 1..17: note = XENP019368 vhCDR2
WIDPENGDTEYAPSVKG

SEQ ID NO: 21975 - protein, 8 aa, synthetic construct
  REGION 1..8: note = Description of Artificial Sequence: Synthetic peptide
  REGION 1..8: note = XENP019368 vhCDR3
GVRQALDY

SEQ ID NO: 21976 - protein, 214 aa, synthetic construct; identical to SEQ ID NO: 21916
  REGION 1..214: note = Description of Artificial Sequence: Synthetic polypeptide
  REGION 1..214: note = XENP019368 2A11_H4L1_IgG1_PVA_/S267K Light Chain

SEQ ID NO: 21977 - protein, 107 aa, synthetic construct; identical to SEQ ID NO: 21917
  REGION 1..107: note = Description of Artificial Sequence: Synthetic polypeptide
  REGION 1..107: note = VL of XENP019368

SEQ ID NO: 21978 - protein, 11 aa, synthetic construct
  REGION 1..11: note = Description of Artificial Sequence: Synthetic peptide
  REGION 1..11: note = XENP019368 vlCDR1
RASQDIGNYLN

SEQ ID NO: 21979 - protein, 7 aa, synthetic construct
  REGION 1..7: note = Description of Artificial Sequence: Synthetic peptide
  REGION 1..7: note = XENP019368 vlCDR2
YTSRLHS

SEQ ID NO: 21980 - protein, 9 aa, synthetic construct
  REGION 1..9: note = Description of Artificial Sequence: Synthetic peptide
  REGION 1..9: note = XENP019368 vlCDR3
QQGNTLPYT

SEQ ID NO: 21981 - protein, 446 aa, synthetic construct; identical to SEQ ID NO: 21971
  REGION 1..446: note = Description of Artificial Sequence: Synthetic polypeptide
  REGION 1..446: note = XENP019369 2A11_H4L2_IgG1_PVA_/S267K Heavy Chain

SEQ ID NO: 21982 - protein, 117 aa, synthetic construct; identical to SEQ ID NO: 21972
  REGION 1..117: note = Description of Artificial Sequence: Synthetic polypeptide
  REGION 1..117: note = VH of XENP019369

SEQ ID NO: 21983 - protein, 5 aa, synthetic construct
  REGION 1..5: note = Description of Artificial Sequence: Synthetic peptide
  REGION 1..5: note = XENP019369 vhCDR1
DYYMH

SEQ ID NO: 21984 - protein, 17 aa, synthetic construct
  REGION 1..17: note = Description of Artificial Sequence: Synthetic peptide
  REGION 1..17: note = XENP019369 vhCDR2
WIDPENGDTEYAPSVKG

SEQ ID NO: 21985 - protein, 8 aa, synthetic construct
  REGION 1..8: note = Description of Artificial Sequence: Synthetic peptide
  REGION 1..8: note = XENP019369 vhCDR3
GVRQALDY

SEQ ID NO: 21986 - protein, 214 aa, synthetic construct; identical to SEQ ID NO: 2880
  REGION 1..214: note = Description of Artificial Sequence: Synthetic polypeptide
  REGION 1..214: note = XENP019369 2A11_H4L2_IgG1_PVA_/S267K Light Chain

SEQ ID NO: 21987 - protein, 107 aa, synthetic construct; identical to SEQ ID NO: 2881
  REGION 1..107: note = Description of Artificial Sequence: Synthetic polypeptide
  REGION 1..107: note = VL of XENP019369

SEQ ID NO: 21988 - protein, 11 aa, synthetic construct
  REGION 1..11: note = Description of Artificial Sequence: Synthetic peptide
  REGION 1..11: note = XENP019369 vlCDR1
QASQDIGNYLN

SEQ ID NO: 21989 - protein, 7 aa, synthetic construct
  REGION 1..7: note = Description of Artificial Sequence: Synthetic peptide
  REGION 1..7: note = XENP019369 vlCDR2
YTSRLHS

SEQ ID NO: 21990 - protein, 9 aa, synthetic construct
  REGION 1..9: note = Description of Artificial Sequence: Synthetic peptide
  REGION 1..9: note = XENP019369 vlCDR3
QQGNTLPYT

SEQ ID NO: 21991 - protein, 445 aa, synthetic construct
  REGION 1..445: note = Description of Artificial Sequence: Synthetic polypeptide
  REGION 1..445: note = XENP019370 3F9_H1_7A6_L2_IgG1_PVA_/S267K Heavy Chain
QVQLQESGPGLVKPSQTLSLTCTVSDFSITSAYYWNWIRQPPGKKLEWIGYISYDSNYYNPSLKSRVTISRDTSKNQFSLKLSSVTAADTAVYYCARGGITTFDYWGQGTLVTVSSASTKGPSVFPLAPSSKSTSGGTAALGCLVKDYFPEPVTVSWNSGALTSGVHTFPAVLQSSGLYSLSSVVTVPSSSLGTQTYICNVNHKPSDTKVDKKVEPKSCDKTHTCPPCPAPPVAGPSVFLFPPKPKDTLMISRTPEVTCVVVDVKHEDPEVKFNWYVDGVEVHNAKTKPREEEYNSTYRVVSVLTVLHQDWLNGKEYKCKVSNKALPAPIEKTISKAKGQPREPQVYTLPPSREEMTKNQVSLTCDVSGFYPSDIAVEWESDGQPENNYKTTPPVLDSDGSFFLYSKLTVDKSRWEQGDVFSCSVMHEALHNHYTQKSLSLSPGK

SEQ ID NO: 21992 - protein, 116 aa, synthetic construct
  REGION 1..116: note = Description of Artificial Sequence: Synthetic polypeptide
  REGION 1..116: note = VH of XENP019370
QVQLQESGPGLVKPSQTLSLTCTVSDFSITSAYYWNWIRQPPGKKLEWIGYISYDSNYYNPSLKSRVTISRDTSKNQFSLKLSSVTAADTAVYYCARGGITTFDYWGQGTLVTVSS

SEQ ID NO: 21993 - protein, 6 aa, synthetic construct
  REGION 1..6: note = Description of Artificial Sequence: Synthetic peptide
  REGION 1..6: note = XENP019370 vhCDR1
SAYYWN

SEQ ID NO: 21994 - protein, 15 aa, synthetic construct
  REGION 1..15: note = Description of Artificial Sequence: Synthetic peptide
  REGION 1..15: note = XENP019370 vhCDR2
YISYDSNYYNPSLKS

SEQ ID NO: 21995 - protein, 8 aa, synthetic construct
  REGION 1..8: note = Description of Artificial Sequence: Synthetic peptide
  REGION 1..8: note = XENP019370 vhCDR3
GGITTFDY

SEQ ID NO: 21996 - protein, 218 aa, synthetic construct
  REGION 1..218: note = Description of Artificial Sequence: Synthetic polypeptide
  REGION 1..218: note = XENP019370 3F9_H1_7A6_L2_IgG1_PVA_/S267K Light Chain
DIVLTQSPATLSLSPGERATLSCRASQSVDYDGDSYMNWYQQKPGQPPRLLIYAASNLESGIPARFSGSGSGTDFTLTISSLEPEDFAVYYCQQSNEDPRTFGGGTKVEIKRTVAAPSVFIFPPSDEQLKSGTASVVCLLNNFYPREAKVQWKVDNALQSGNSQESVTEQDSKDSTYSLSSTLTLSKADYEKHKVYACEVTHQGLSSPVTKSFNRGEC

SEQ ID NO: 21997 - protein, 111 aa, synthetic construct
  REGION 1..111: note = Description of Artificial Sequence: Synthetic polypeptide
  REGION 1..111: note = VL of XENP019370
DIVLTQSPATLSLSPGERATLSCRASQSVDYDGDSYMNWYQQKPGQPPRLLIYAASNLESGIPARFSGSGSGTDFTLTISSLEPEDFAVYYCQQSNEDPRTFGGGTKVEIK

SEQ ID NO: 21998 - protein, 15 aa, synthetic construct
  REGION 1..15: note = Description of Artificial Sequence: Synthetic peptide
  REGION 1..15: note = XENP019370 vlCDR1
RASQSVDYDGDSYMN

SEQ ID NO: 21999 - protein, 7 aa, synthetic construct
  REGION 1..7: note = Description of Artificial Sequence: Synthetic peptide
  REGION 1..7: note = XENP019370 vlCDR2
AASNLES

SEQ ID NO: 22000 - protein, 9 aa, synthetic construct
  REGION 1..9: note = Description of Artificial Sequence: Synthetic peptide
  REGION 1..9: note = XENP019370 vlCDR3
QQSNEDPRT

SEQ ID NO: 22001 - protein, 444 aa, synthetic construct
  REGION 1..444: note = Description of Artificial Sequence: Synthetic polypeptide
  REGION 1..444: note = XENP019371 6A6_H1L1_IgG1_PVA_/S267K Heavy Chain
EVQLVQSGAEVKKPGATVKISCKASGFNIKDYYMHWVQQAPGKGLEWMGWIDPENGDTEYAPKFQGRVTITADTSTNTAYMELSSLRSEDTAVYYCARAAAMDYWGQGTLVTVSSASTKGPSVFPLAPSSKSTSGGTAALGCLVKDYFPEPVTVSWNSGALTSGVHTFPAVLQSSGLYSLSSVVTVPSSSLGTQTYICNVNHKPSDTKVDKKVEPKSCDKTHTCPPCPAPPVAGPSVFLFPPKPKDTLMISRTPEVTCVVVDVKHEDPEVKFNWYVDGVEVHNAKTKPREEEYNSTYRVVSVLTVLHQDWLNGKEYKCKVSNKALPAPIEKTISKAKGQPREPQVYTLPPSREEMTKNQVSLTCDVSGFYPSDIAVEWESDGQPENNYKTTPPVLDSDGSFFLYSKLTVDKSRWEQGDVFSCSVMHEALHNHYTQKSLSLSPGK

SEQ ID NO: 22002 - protein, 115 aa, synthetic construct
  REGION 1..115: note = Description of Artificial Sequence: Synthetic polypeptide
  REGION 1..115: note = VH of XENP019371
EVQLVQSGAEVKKPGATVKISCKASGFNIKDYYMHWVQQAPGKGLEWMGWIDPENGDTEYAPKFQGRVTITADTSTNTAYMELSSLRSEDTAVYYCARAAAMDYWGQGTLVTVSS

SEQ ID NO: 22003 - protein, 5 aa, synthetic construct
  REGION 1..5: note = Description of Artificial Sequence: Synthetic peptide
  REGION 1..5: note = XENP019371 vhCDR1
DYYMH

SEQ ID NO: 22004 - protein, 17 aa, synthetic construct
  REGION 1..17: note = Description of Artificial Sequence: Synthetic peptide
  REGION 1..17: note = XENP019371 vhCDR2
WIDPENGDTEYAPKFQG

SEQ ID NO: 22005 - protein, 6 aa, synthetic construct
  REGION 1..6: note = Description of Artificial Sequence: Synthetic peptide
  REGION 1..6: note = XENP019371 vhCDR3
AAAMDY

SEQ ID NO: 22006 - protein, 214 aa, synthetic construct
  REGION 1..214: note = Description of Artificial Sequence: Synthetic polypeptide
  REGION 1..214: note = XENP019371 6A6_H1L1_IgG1_PVA_/S267K Light Chain
DIQMTQSPSSLSASVGDRVTITCRASQDISNYLNWFQQKPGKTFKLLIYYTSRLHSGVPSRFSGSGSGTDYTLTISSLQPEDFATYFCQQGNTLPYTFGGGTKVEIKRTVAAPSVFIFPPSDEQLKSGTASVVCLLNNFYPREAKVQWKVDNALQSGNSQESVTEQDSKDSTYSLSSTLTLSKADYEKHKVYACEVTHQGLSSPVTKSFNRGEC

SEQ ID NO: 22007 - protein, 107 aa, synthetic construct
  REGION 1..107: note = Description of Artificial Sequence: Synthetic polypeptide
  REGION 1..107: note = VL of XENP019371
DIQMTQSPSSLSASVGDRVTITCRASQDISNYLNWFQQKPGKTFKLLIYYTSRLHSGVPSRFSGSGSGTDYTLTISSLQPEDFATYFCQQGNTLPYTFGGGTKVEIK

SEQ ID NO: 22008 - protein, 11 aa, synthetic construct
  REGION 1..11: note = Description of Artificial Sequence: Synthetic peptide
  REGION 1..11: note = XENP019371 vlCDR1
RASQDISNYLN

SEQ ID NO: 22009 - protein, 7 aa, synthetic construct
  REGION 1..7: note = Description of Artificial Sequence: Synthetic peptide
  REGION 1..7: note = XENP019371 vlCDR2
YTSRLHS

SEQ ID NO: 22010 - protein, 9 aa, synthetic construct
  REGION 1..9: note = Description of Artificial Sequence: Synthetic peptide
  REGION 1..9: note = XENP019371 vlCDR3
QQGNTLPYT

SEQ ID NO: 22011 - protein, 444 aa, synthetic construct
  REGION 1..444: note = Description of Artificial Sequence: Synthetic polypeptide
  REGION 1..444: note = XENP019372 9E7_H0L0_IgG1_PVA_/S267K Heavy Chain
QVQLKQSGPGLVQPSQSLSITCTVSGFSLTRYGIHWVRQSPGKGLEWLGVIWSGVTDYNAAFISRLSISKDNSKSQVFFKLNSLQANDTAIYYCARPYYYAMDYWGQGTSVTVSSASTKGPSVFPLAPSSKSTSGGTAALGCLVKDYFPEPVTVSWNSGALTSGVHTFPAVLQSSGLYSLSSVVTVPSSSLGTQTYICNVNHKPSDTKVDKKVEPKSCDKTHTCPPCPAPPVAGPSVFLFPPKPKDTLMISRTPEVTCVVVDVKHEDPEVKFNWYVDGVEVHNAKTKPREEEYNSTYRVVSVLTVLHQDWLNGKEYKCKVSNKALPAPIEKTISKAKGQPREPQVYTLPPSREEMTKNQVSLTCDVSGFYPSDIAVEWESDGQPENNYKTTPPVLDSDGSFFLYSKLTVDKSRWEQGDVFSCSVMHEALHNHYTQKSLSLSPGK

SEQ ID NO: 22012 - protein, 115 aa, synthetic construct
  REGION 1..115: note = Description of Artificial Sequence: Synthetic polypeptide
  REGION 1..115: note = VH of XENP019372
QVQLKQSGPGLVQPSQSLSITCTVSGFSLTRYGIHWVRQSPGKGLEWLGVIWSGVTDYNAAFISRLSISKDNSKSQVFFKLNSLQANDTAIYYCARPYYYAMDYWGQGTSVTVSS

SEQ ID NO: 22013 - protein, 5 aa, synthetic construct
  REGION 1..5: note = Description of Artificial Sequence: Synthetic peptide
  REGION 1..5: note = XENP019372 vhCDR1
RYGIH

SEQ ID NO: 22014 - protein, 15 aa, synthetic construct
  REGION 1..15: note = Description of Artificial Sequence: Synthetic peptide
  REGION 1..15: note = XENP019372 vhCDR2
VIWSGVTDYNAAFIS

SEQ ID NO: 22015 - protein, 8 aa, synthetic construct
  REGION 1..8: note = Description of Artificial Sequence: Synthetic peptide
  REGION 1..8: note = XENP019372 vhCDR3
PYYYAMDY

SEQ ID NO: 22016 - protein, 214 aa, synthetic construct
  REGION 1..214: note = Description of Artificial Sequence: Synthetic polypeptide
  REGION 1..214: note = XENP019372 9E7_H0L0_IgG1_PVA_/S267K Light Chain
DIQMTQSPASLSVSVGETVTITCRASENIYSNLAWYQQKQGKSPQLLVYAATTLADGVPSRFSGSGSGTQYSLKINSLQSEDFGSYYCQHFWGTPWTFGGGTKLEIKRTVAAPSVFIFPPSDEQLKSGTASVVCLLNNFYPREAKVQWKVDNALQSGNSQESVTEQDSKDSTYSLSSTLTLSKADYEKHKVYACEVTHQGLSSPVTKSFNRGEC

SEQ ID NO: 22017 - protein, 107 aa, synthetic construct
  REGION 1..107: note = Description of Artificial Sequence: Synthetic polypeptide
  REGION 1..107: note = VL of XENP019372
DIQMTQSPASLSVSVGETVTITCRASENIYSNLAWYQQKQGKSPQLLVYAATTLADGVPSRFSGSGSGTQYSLKINSLQSEDFGSYYCQHFWGTPWTFGGGTKLEIK

SEQ ID NO: 22018 - protein, 11 aa, synthetic construct
  REGION 1..11: note = Description of Artificial Sequence: Synthetic peptide
  REGION 1..11: note = XENP019372 vlCDR1
RASENIYSNLA

SEQ ID NO: 22019 - protein, 7 aa, synthetic construct
  REGION 1..7: note = Description of Artificial Sequence: Synthetic peptide
  REGION 1..7: note = XENP019372 vlCDR2
AATTLAD

SEQ ID NO: 22020 - protein, 9 aa, synthetic construct
  REGION 1..9: note = Description of Artificial Sequence: Synthetic peptide
  REGION 1..9: note = XENP019372 vlCDR3
QHFWGTPWT

SEQ ID NO: 22021 - protein, 444 aa, synthetic construct
  REGION 1..444: note = Description of Artificial Sequence: Synthetic polypeptide
  REGION 1..444: note = XENP019373 9E7_H1L1_IgG1_PVA_/S267K Heavy Chain
QVQLVQSGAEVKKPGASVKVSCKVSGFSLTRYGIHWVRQAPGQGLEWMGVIWSGVTDYNAKFQGRVTMTKDNSKSTVYMELSSLRSEDTAVYYCARPYYYAMDYWGQGTLVTVSSASTKGPSVFPLAPSSKSTSGGTAALGCLVKDYFPEPVTVSWNSGALTSGVHTFPAVLQSSGLYSLSSVVTVPSSSLGTQTYICNVNHKPSDTKVDKKVEPKSCDKTHTCPPCPAPPVAGPSVFLFPPKPKDTLMISRTPEVTCVVVDVKHEDPEVKFNWYVDGVEVHNAKTKPREEEYNSTYRVVSVLTVLHQDWLNGKEYKCKVSNKALPAPIEKTISKAKGQPREPQVYTLPPSREEMTKNQVSLTCDVSGFYPSDIAVEWESDGQPENNYKTTPPVLDSDGSFFLYSKLTVDKSRWEQGDVFSCSVMHEALHNHYTQKSLSLSPGK

SEQ ID NO: 22022 - protein, 115 aa, synthetic construct
  REGION 1..115: note = Description of Artificial Sequence: Synthetic polypeptide
  REGION 1..115: note = VH of XENP019373
QVQLVQSGAEVKKPGASVKVSCKVSGFSLTRYGIHWVRQAPGQGLEWMGVIWSGVTDYNAKFQGRVTMTKDNSKSTVYMELSSLRSEDTAVYYCARPYYYAMDYWGQGTLVTVSS

SEQ ID NO: 22023 - protein, 5 aa, synthetic construct
  REGION 1..5: note = Description of Artificial Sequence: Synthetic peptide
  REGION 1..5: note = XENP019373 vhCDR1
RYGIH

SEQ ID NO: 22024 - protein, 15 aa, synthetic construct
  REGION 1..15: note = Description of Artificial Sequence: Synthetic peptide
  REGION 1..15: note = XENP019373 vhCDR2
VIWSGVTDYNAKFQG

SEQ ID NO: 22025 - protein, 8 aa, synthetic construct
  REGION 1..8: note = Description of Artificial Sequence: Synthetic peptide
  REGION 1..8: note = XENP019373 vhCDR3
PYYYAMDY

SEQ ID NO: 22026 - protein, 214 aa, synthetic construct
  REGION 1..214: note = Description of Artificial Sequence: Synthetic polypeptide
  REGION 1..214: note = XENP019373 9E7_H1L1_IgG1_PVA_/S267K Light Chain
DIQMTQSPSSLSASVGDRVTITCRASENIYSNLAWYQQKPGKSPKLLVYAATTLADGVPSRFSGSGSGTDYTLTISSLQPEDFATYYCQHFWGTPWTFGGGTKVEIKRTVAAPSVFIFPPSDEQLKSGTASVVCLLNNFYPREAKVQWKVDNALQSGNSQESVTEQDSKDSTYSLSSTLTLSKADYEKHKVYACEVTHQGLSSPVTKSFNRGEC

SEQ ID NO: 22027 - protein, 107 aa, synthetic construct
  REGION 1..107: note = Description of Artificial Sequence: Synthetic polypeptide
  REGION 1..107: note = VL of XENP019373
DIQMTQSPSSLSASVGDRVTITCRASENIYSNLAWYQQKPGKSPKLLVYAATTLADGVPSRFSGSGSGTDYTLTISSLQPEDFATYYCQHFWGTPWTFGGGTKVEIK

SEQ ID NO: 22028 - protein, 11 aa, synthetic construct
  REGION 1..11: note = Description of Artificial Sequence: Synthetic peptide
  REGION 1..11: note = XENP019373 vlCDR1
RASENIYSNLA

SEQ ID NO: 22029 - protein, 7 aa, synthetic construct
  REGION 1..7: note = Description of Artificial Sequence: Synthetic peptide
  REGION 1..7: note = XENP019373 vlCDR2
AATTLAD

SEQ ID NO: 22030 - protein, 9 aa, synthetic construct
  REGION 1..9: note = Description of Artificial Sequence: Synthetic peptide
  REGION 1..9: note = XENP019373 vlCDR3
QHFWGTPWT

SEQ ID NO: 22031 - protein, 444 aa, synthetic construct; identical to SEQ ID NO: 22021
  REGION 1..444: note = Description of Artificial Sequence: Synthetic polypeptide
  REGION 1..444: note = XENP019374 9E7_H1L2_IgG1_PVA_/S267K Heavy Chain

SEQ ID NO: 22032 - protein, 115 aa, synthetic construct; identical to SEQ ID NO: 22022
  REGION 1..115: note = Description of Artificial Sequence: Synthetic polypeptide
  REGION 1..115: note = VH of XENP019374

SEQ ID NO: 22033 - protein, 5 aa, synthetic construct
  REGION 1..5: note = Description of Artificial Sequence: Synthetic peptide
  REGION 1..5: note = XENP019374 vhCDR1
RYGIH

SEQ ID NO: 22034 - protein, 15 aa, synthetic construct
  REGION 1..15: note = Description of Artificial Sequence: Synthetic peptide
  REGION 1..15: note = XENP019374 vhCDR2
VIWSGVTDYNAKFQG

SEQ ID NO: 22035 - protein, 8 aa, synthetic construct
  REGION 1..8: note = Description of Artificial Sequence: Synthetic peptide
  REGION 1..8: note = XENP019374 vhCDR3
PYYYAMDY

SEQ ID NO: 22036 - protein, 214 aa, synthetic construct
  REGION 1..214: note = Description of Artificial Sequence: Synthetic polypeptide
  REGION 1..214: note = XENP019374 9E7_H1L2_IgG1_PVA_/S267K Light Chain
DIQMTQSPATLSVSPGERATLSCRASENIYSNLAWYQQKPGQSPRLLVYAATTLADGVPSRFSGSGSGTEYTLTISSLQSEDFAVYYCQHFWGTPWTFGGGTKVEIKRTVAAPSVFIFPPSDEQLKSGTASVVCLLNNFYPREAKVQWKVDNALQSGNSQESVTEQDSKDSTYSLSSTLTLSKADYEKHKVYACEVTHQGLSSPVTKSFNRGEC

SEQ ID NO: 22037 - protein, 107 aa, synthetic construct
  REGION 1..107: note = Description of Artificial Sequence: Synthetic polypeptide
  REGION 1..107: note = VL of XENP019374
DIQMTQSPATLSVSPGERATLSCRASENIYSNLAWYQQKPGQSPRLLVYAATTLADGVPSRFSGSGSGTEYTLTISSLQSEDFAVYYCQHFWGTPWTFGGGTKVEIK

SEQ ID NO: 22038 - protein, 11 aa, synthetic construct
  REGION 1..11: note = Description of Artificial Sequence: Synthetic peptide
  REGION 1..11: note = XENP019374 vlCDR1
RASENIYSNLA

SEQ ID NO: 22039 - protein, 7 aa, synthetic construct
  REGION 1..7: note = Description of Artificial Sequence: Synthetic peptide
  REGION 1..7: note = XENP019374 vlCDR2
AATTLAD

SEQ ID NO: 22040 - protein, 9 aa, synthetic construct
  REGION 1..9: note = Description of Artificial Sequence: Synthetic peptide
  REGION 1..9: note = XENP019374 vlCDR3
QHFWGTPWT

SEQ ID NO: 22041 - protein, 444 aa, synthetic construct
  REGION 1..444: note = Description of Artificial Sequence: Synthetic polypeptide
  REGION 1..444: note = XENP019375 9E7_H2L1_IgG1_PVA_/S267K Heavy Chain
QVTLKESGPVLVKPTETLTLTCTVSGFSLTRYGIHWVRQPPGKGLEWLAVIWSGVTDYNPSLKSRLTISKDNSKSQVVLTMTNMDPVDTATYYCARPYYYAMDYWGQGTLVTVSSASTKGPSVFPLAPSSKSTSGGTAALGCLVKDYFPEPVTVSWNSGALTSGVHTFPAVLQSSGLYSLSSVVTVPSSSLGTQTYICNVNHKPSDTKVDKKVEPKSCDKTHTCPPCPAPPVAGPSVFLFPPKPKDTLMISRTPEVTCVVVDVKHEDPEVKFNWYVDGVEVHNAKTKPREEEYNSTYRVVSVLTVLHQDWLNGKEYKCKVSNKALPAPIEKTISKAKGQPREPQVYTLPPSREEMTKNQVSLTCDVSGFYPSDIAVEWESDGQPENNYKTTPPVLDSDGSFFLYSKLTVDKSRWEQGDVFSCSVMHEALHNHYTQKSLSLSPGK

SEQ ID NO: 22042 - protein, 115 aa, synthetic construct
  REGION 1..115: note = Description of Artificial Sequence: Synthetic polypeptide
  REGION 1..115: note = VH of XENP019375
QVTLKESGPVLVKPTETLTLTCTVSGFSLTRYGIHWVRQPPGKGLEWLAVIWSGVTDYNPSLKSRLTISKDNSKSQVVLTMTNMDPVDTATYYCARPYYYAMDYWGQGTLVTVSS

SEQ ID NO: 22043 - protein, 5 aa, synthetic construct
  REGION 1..5: note = Description of Artificial Sequence: Synthetic peptide
  REGION 1..5: note = XENP019375 vhCDR1
RYGIH

SEQ ID NO: 22044 - protein, 15 aa, synthetic construct
  REGION 1..15: note = Description of Artificial Sequence: Synthetic peptide
  REGION 1..15: note = XENP019375 vhCDR2
VIWSGVTDYNPSLKS

SEQ ID NO: 22045 - protein, 8 aa, synthetic construct
  REGION 1..8: note = Description of Artificial Sequence: Synthetic peptide
  REGION 1..8: note = XENP019375 vhCDR3
PYYYAMDY

SEQ ID NO: 22046 - protein, 214 aa, synthetic construct; identical to SEQ ID NO: 22026
  REGION 1..214: note = Description of Artificial Sequence: Synthetic polypeptide
  REGION 1..214: note = XENP019375 9E7_H2L1_IgG1_PVA_/S267K Light Chain

SEQ ID NO: 22047 - protein, 107 aa, synthetic construct; identical to SEQ ID NO: 22027
  REGION 1..107: note = Description of Artificial Sequence: Synthetic polypeptide
  REGION 1..107: note = VL of XENP019375

SEQ ID NO: 22048 - protein, 11 aa, synthetic construct
  REGION 1..11: note = Description of Artificial Sequence: Synthetic peptide
  REGION 1..11: note = XENP019375 vlCDR1
RASENIYSNLA

SEQ ID NO: 22049 - protein, 7 aa, synthetic construct
  REGION 1..7: note = Description of Artificial Sequence: Synthetic peptide
  REGION 1..7: note = XENP019375 vlCDR2
AATTLAD

SEQ ID NO: 22050 - protein, 9 aa, synthetic construct
  REGION 1..9: note = Description of Artificial Sequence: Synthetic peptide
  REGION 1..9: note = XENP019375 vlCDR3
QHFWGTPWT

SEQ ID NO: 22051 - protein, 444 aa, synthetic construct; identical to SEQ ID NO: 22041
  REGION 1..444: note = Description of Artificial Sequence: Synthetic polypeptide
  REGION 1..444: note = XENP019376 9E7_H2L2_IgG1_PVA_/S267K Heavy Chain

SEQ ID NO: 22052 - protein, 115 aa, synthetic construct; identical to SEQ ID NO: 22042
  REGION 1..115: note = Description of Artificial Sequence: Synthetic polypeptide
  REGION 1..115: note = VH of XENP019376

SEQ ID NO: 22053 - protein, 5 aa, synthetic construct
  REGION 1..5: note = Description of Artificial Sequence: Synthetic peptide
  REGION 1..5: note = XENP019376 vhCDR1
RYGIH

SEQ ID NO: 22054 - protein, 15 aa, synthetic construct
  REGION 1..15: note = Description of Artificial Sequence: Synthetic peptide
  REGION 1..15: note = XENP019376 vhCDR2
VIWSGVTDYNPSLKS

SEQ ID NO: 22055 - protein, 8 aa, synthetic construct
  REGION 1..8: note = Description of Artificial Sequence: Synthetic peptide
  REGION 1..8: note = XENP019376 vhCDR3
PYYYAMDY

SEQ ID NO: 22056 - protein, 214 aa, synthetic construct; identical to SEQ ID NO: 22036
  REGION 1..214: note = Description of Artificial Sequence: Synthetic polypeptide
  REGION 1..214: note = XENP019376 9E7_H2L2_IgG1_PVA_/S267K Light Chain

SEQ ID NO: 22057 - protein, 107 aa, synthetic construct; identical to SEQ ID NO: 22037
  REGION 1..107: note = Description of Artificial Sequence: Synthetic polypeptide
  REGION 1..107: note = VL of XENP019376

SEQ ID NO: 22058 - protein, 11 aa, synthetic construct
  REGION 1..11: note = Description of Artificial Sequence: Synthetic peptide
  REGION 1..11: note = XENP019376 vlCDR1
RASENIYSNLA

SEQ ID NO: 22059 - protein, 7 aa, synthetic construct
  REGION 1..7: note = Description of Artificial Sequence: Synthetic peptide
  REGION 1..7: note = XENP019376 vlCDR2
AATTLAD

SEQ ID NO: 22060 - protein, 9 aa, synthetic construct
  REGION 1..9: note = Description of Artificial Sequence: Synthetic peptide
  REGION 1..9: note = XENP019376 vlCDR3
QHFWGTPWT

SEQ ID NO: 22061 - protein, 444 aa, synthetic construct
  REGION 1..444: note = Description of Artificial Sequence: Synthetic polypeptide
  REGION 1..444: note = XENP019377 9E7_H3L1_IgG1_PVA_/S267K Heavy Chain
EVQLVESGGGLVQPGGSLRLSCAVSGFSLTRYGIHWVRQAPGKGLEWVSVIWSGVTDYNPSVKGRFTISKDNSKSTVYLQMNSLRAEDTAVYYCARPYYYAMDYWGQGTLVTVSSASTKGPSVFPLAPSSKSTSGGTAALGCLVKDYFPEPVTVSWNSGALTSGVHTFPAVLQSSGLYSLSSVVTVPSSSLGTQTYICNVNHKPSDTKVDKKVEPKSCDKTHTCPPCPAPPVAGPSVFLFPPKPKDTLMISRTPEVTCVVVDVKHEDPEVKFNWYVDGVEVHNAKTKPREEEYNSTYRVVSVLTVLHQDWLNGKEYKCKVSNKALPAPIEKTISKAKGQPREPQVYTLPPSREEMTKNQVSLTCDVSGFYPSDIAVEWESDGQPENNYKTTPPVLDSDGSFFLYSKLTVDKSRWEQGDVFSCSVMHEALHNHYTQKSLSLSPGK

SEQ ID NO: 22062 - protein, 115 aa, synthetic construct
  REGION 1..115: note = Description of Artificial Sequence: Synthetic polypeptide
  REGION 1..115: note = VH of XENP019377
EVQLVESGGGLVQPGGSLRLSCAVSGFSLTRYGIHWVRQAPGKGLEWVSVIWSGVTDYNPSVKGRFTISKDNSKSTVYLQMNSLRAEDTAVYYCARPYYYAMDYWGQGTLVTVSS

SEQ ID NO: 22063 - protein, 5 aa, synthetic construct
  REGION 1..5: note = Description of Artificial Sequence: Synthetic peptide
  REGION 1..5: note = XENP019377 vhCDR1
RYGIH

SEQ ID NO: 22064 - protein, 15 aa, synthetic construct
  REGION 1..15: note = Description of Artificial Sequence: Synthetic peptide
  REGION 1..15: note = XENP019377 vhCDR2
VIWSGVTDYNPSVKG

SEQ ID NO: 22065 - protein, 8 aa, synthetic construct
  REGION 1..8: note = Description of Artificial Sequence: Synthetic peptide
  REGION 1..8: note = XENP019377 vhCDR3
PYYYAMDY

SEQ ID NO: 22066 - protein, 214 aa, synthetic construct; identical to SEQ ID NO: 22026
  REGION 1..214: note = Description of Artificial Sequence: Synthetic polypeptide
  REGION 1..214: note = XENP019377 9E7_H3L1_IgG1_PVA_/S267K Light Chain

SEQ ID NO: 22067 - protein, 107 aa, synthetic construct; identical to SEQ ID NO: 22027
  REGION 1..107: note = Description of Artificial Sequence: Synthetic polypeptide
  REGION 1..107: note = VL of XENP019377

SEQ ID NO: 22068 - protein, 11 aa, synthetic construct
  REGION 1..11: note = Description of Artificial Sequence: Synthetic peptide
  REGION 1..11: note = XENP019377 vlCDR1
RASENIYSNLA

SEQ ID NO: 22069 - protein, 7 aa, synthetic construct
  REGION 1..7: note = Description of Artificial Sequence: Synthetic peptide
  REGION 1..7: note = XENP019377 vlCDR2
AATTLAD

SEQ ID NO: 22070 - protein, 9 aa, synthetic construct
  REGION 1..9: note = Description of Artificial Sequence: Synthetic peptide
  REGION 1..9: note = XENP019377 vlCDR3
QHFWGTPWT

SEQ ID NO: 22071 - protein, 444 aa, synthetic construct; identical to SEQ ID NO: 22061
  REGION 1..444: note = Description of Artificial Sequence: Synthetic polypeptide
  REGION 1..444: note = XENP019378 9E7_H3L2_IgG1_PVA_/S267K Heavy Chain

SEQ ID NO: 22072 - protein, 115 aa, synthetic construct; identical to SEQ ID NO: 22062
  REGION 1..115: note = Description of Artificial Sequence: Synthetic polypeptide
  REGION 1..115: note = VH of XENP019378

SEQ ID NO: 22073 - protein, 5 aa, synthetic construct
  REGION 1..5: note = Description of Artificial Sequence: Synthetic peptide
  REGION 1..5: note = XENP019378 vhCDR1
RYGIH

SEQ ID NO: 22074 - protein, 15 aa, synthetic construct
  REGION 1..15: note = Description of Artificial Sequence: Synthetic peptide
  REGION 1..15: note = XENP019378 vhCDR2
VIWSGVTDYNPSVKG

SEQ ID NO: 22075 - protein, 8 aa, synthetic construct
  REGION 1..8: note = Description of Artificial Sequence: Synthetic peptide
  REGION 1..8: note = XENP019378 vhCDR3
PYYYAMDY

SEQ ID NO: 22076 - protein, 214 aa, synthetic construct; identical to SEQ ID NO: 22036
  REGION 1..214: note = Description of Artificial Sequence: Synthetic polypeptide
  REGION 1..214: note = XENP019378 9E7_H3L2_IgG1_PVA_/S267K Light Chain

SEQ ID NO: 22077 - protein, 107 aa, synthetic construct; identical to SEQ ID NO: 22037
  REGION 1..107: note = Description of Artificial Sequence: Synthetic polypeptide
  REGION 1..107: note = VL of XENP019378

SEQ ID NO: 22078 - protein, 11 aa, synthetic construct
  REGION 1..11: note = Description of Artificial Sequence: Synthetic peptide
  REGION 1..11: note = XENP019378 vlCDR1
RASENIYSNLA

SEQ ID NO: 22079 - protein, 7 aa, synthetic construct
  REGION 1..7: note = Description of Artificial Sequence: Synthetic peptide
  REGION 1..7: note = XENP019378 vlCDR2
AATTLAD

SEQ ID NO: 22080 - protein, 9 aa, synthetic construct
  REGION 1..9: note = Description of Artificial Sequence: Synthetic peptide
  REGION 1..9: note = XENP019378 vlCDR3
QHFWGTPWT

SEQ ID NO: 22081 - protein, 444 aa, synthetic construct
  REGION 1..444: note = Description of Artificial Sequence: Synthetic polypeptide
  REGION 1..444: note = XENP019379 9E7_H4L1_IgG1_PVA_/S267K Heavy Chain
EVQLVQSGAEVKKPGESLKISCKVSGFSLTRYGIHWVRQMPGKGLEWMGVIWSGVTDYNPSFQGQVTISKDNSISTVYLQWSSLKASDTAMYYCARPYYYAMDYWGQGTLVTVSSASTKGPSVFPLAPSSKSTSGGTAALGCLVKDYFPEPVTVSWNSGALTSGVHTFPAVLQSSGLYSLSSVVTVPSSSLGTQTYICNVNHKPSDTKVDKKVEPKSCDKTHTCPPCPAPPVAGPSVFLFPPKPKDTLMISRTPEVTCVVVDVKHEDPEVKFNWYVDGVEVHNAKTKPREEEYNSTYRVVSVLTVLHQDWLNGKEYKCKVSNKALPAPIEKTISKAKGQPREPQVYTLPPSREEMTKNQVSLTCDVSGFYPSDIAVEWESDGQPENNYKTTPPVLDSDGSFFLYSKLTVDKSRWEQGDVFSCSVMHEALHNHYTQKSLSLSPGK

SEQ ID NO: 22082 - protein, 115 aa, synthetic construct
  REGION 1..115: note = Description of Artificial Sequence: Synthetic polypeptide
  REGION 1..115: note = VH of XENP019379
EVQLVQSGAEVKKPGESLKISCKVSGFSLTRYGIHWVRQMPGKGLEWMGVIWSGVTDYNPSFQGQVTISKDNSISTVYLQWSSLKASDTAMYYCARPYYYAMDYWGQGTLVTVSS

SEQ ID NO: 22083 - protein, 5 aa, synthetic construct
  REGION 1..5: note = Description of Artificial Sequence: Synthetic peptide
  REGION 1..5: note = XENP019379 vhCDR1
RYGIH

SEQ ID NO: 22084 - protein, 15 aa, synthetic construct
  REGION 1..15: note = Description of Artificial Sequence: Synthetic peptide
  REGION 1..15: note = XENP019379 vhCDR2
VIWSGVTDYNPSFQG

SEQ ID NO: 22085 - protein, 8 aa, synthetic construct
  REGION 1..8: note = Description of Artificial Sequence: Synthetic peptide
  REGION 1..8: note = XENP019379 vhCDR3
PYYYAMDY

SEQ ID NO: 22086 - protein, 214 aa, synthetic construct; identical to SEQ ID NO: 22026
  REGION 1..214: note = Description of Artificial Sequence: Synthetic polypeptide
  REGION 1..214: note = XENP019379 9E7_H4L1_IgG1_PVA_/S267K Light Chain

SEQ ID NO: 22087 - protein, 107 aa, synthetic construct; identical to SEQ ID NO: 22027
  REGION 1..107: note = Description of Artificial Sequence: Synthetic polypeptide
  REGION 1..107: note = VL of XENP019379

SEQ ID NO: 22088 - protein, 11 aa, synthetic construct
  REGION 1..11: note = Description of Artificial Sequence: Synthetic peptide
  REGION 1..11: note = XENP019379 vlCDR1
RASENIYSNLA

SEQ ID NO: 22089 - protein, 7 aa, synthetic construct
  REGION 1..7: note = Description of Artificial Sequence: Synthetic peptide
  REGION 1..7: note = XENP019379 vlCDR2
AATTLAD

SEQ ID NO: 22090 - protein, 9 aa, synthetic construct
  REGION 1..9: note = Description of Artificial Sequence: Synthetic peptide
  REGION 1..9: note = XENP019379 vlCDR3
QHFWGTPWT

SEQ ID NO: 22091 - protein, 444 aa, synthetic construct; identical to SEQ ID NO: 22081
  REGION 1..444: note = Description of Artificial Sequence: Synthetic polypeptide
  REGION 1..444: note = XENP019380 9E7_H4L2_IgG1_PVA_/S267K Heavy Chain

SEQ ID NO: 22092 - protein, 115 aa, synthetic construct; identical to SEQ ID NO: 22082
  REGION 1..115: note = Description of Artificial Sequence: Synthetic polypeptide
  REGION 1..115: note = VH of XENP019380

SEQ ID NO: 22093 - protein, 5 aa, synthetic construct
  REGION 1..5: note = Description of Artificial Sequence: Synthetic peptide
  REGION 1..5: note = XENP019380 vhCDR1
RYGIH

SEQ ID NO: 22094 - protein, 15 aa, synthetic construct
  REGION 1..15: note = Description of Artificial Sequence: Synthetic peptide
  REGION 1..15: note = XENP019380 vhCDR2
VIWSGVTDYNPSFQG

SEQ ID NO: 22095 - protein, 8 aa, synthetic construct
  REGION 1..8: note = Description of Artificial Sequence: Synthetic peptide
  REGION 1..8: note = XENP019380 vhCDR3
PYYYAMDY

SEQ ID NO: 22096 - protein, 214 aa, synthetic construct; identical to SEQ ID NO: 22036
  REGION 1..214: note = Description of Artificial Sequence: Synthetic polypeptide
  REGION 1..214: note = XENP019380 9E7_H4L2_IgG1_PVA_/S267K Light Chain

SEQ ID NO: 22097 - protein, 107 aa, synthetic construct; identical to SEQ ID NO: 22037
  REGION 1..107: note = Description of Artificial Sequence: Synthetic polypeptide
  REGION 1..107: note = VL of XENP019380

SEQ ID NO: 22098 - protein, 11 aa, synthetic construct
  REGION 1..11: note = Description of Artificial Sequence: Synthetic peptide
  REGION 1..11: note = XENP019380 vlCDR1
RASENIYSNLA

SEQ ID NO: 22099 - protein, 7 aa, synthetic construct
  REGION 1..7: note = Description of Artificial Sequence: Synthetic peptide
  REGION 1..7: note = XENP019380 vlCDR2
AATTLAD

SEQ ID NO: 22100 - protein, 9 aa, synthetic construct
  REGION 1..9: note = Description of Artificial Sequence: Synthetic peptide
  REGION 1..9: note = XENP019380 vlCDR3
QHFWGTPWT

SEQ ID NO: 22101 - protein, 447 aa, synthetic construct
  REGION 1..447: note = Description of Artificial Sequence: Synthetic polypeptide
  REGION 1..447: note = XENP019381 2A12_H1L1_IgG1_PVA_/S267K Heavy Chain
QIQLVQSGSELKKPGASVKVSCKASGYTFTNYGMNWVRQAPGQGLEWMGWINTYTGEPTYADGFTGRFVFSLDTSVSTAYLQISSLKAEDTAVYFCARLEAIYGSDYWGQGTLVTVSSASTKGPSVFPLAPSSKSTSGGTAALGCLVKDYFPEPVTVSWNSGALTSGVHTFPAVLQSSGLYSLSSVVTVPSSSLGTQTYICNVNHKPSDTKVDKKVEPKSCDKTHTCPPCPAPPVAGPSVFLFPPKPKDTLMISRTPEVTCVVVDVKHEDPEVKFNWYVDGVEVHNAKTKPREEEYNSTYRVVSVLTVLHQDWLNGKEYKCKVSNKALPAPIEKTISKAKGQPREPQVYTLPPSREEMTKNQVSLTCDVSGFYPSDIAVEWESDGQPENNYKTTPPVLDSDGSFFLYSKLTVDKSRWEQGDVFSCSVMHEALHNHYTQKSLSLSPGK

SEQ ID NO: 22102 - protein, 118 aa, synthetic construct
  REGION 1..118: note = Description of Artificial Sequence: Synthetic polypeptide
  REGION 1..118: note = VH of XENP019381
QIQLVQSGSELKKPGASVKVSCKASGYTFTNYGMNWVRQAPGQGLEWMGWINTYTGEPTYADGFTGRFVFSLDTSVSTAYLQISSLKAEDTAVYFCARLEAIYGSDYWGQGTLVTVSS

SEQ ID NO: 22103 - protein, 5 aa, synthetic construct
  REGION 1..5: note = Description of Artificial Sequence: Synthetic peptide
  REGION 1..5: note = XENP019381 vhCDR1
NYGMN

SEQ ID NO: 22104 - protein, 17 aa, synthetic construct
  REGION 1..17: note = Description of Artificial Sequence: Synthetic peptide
  REGION 1..17: note = XENP019381 vhCDR2
WINTYTGEPTYADGFTG

SEQ ID NO: 22105 - protein, 9 aa, synthetic construct
  REGION 1..9: note = Description of Artificial Sequence: Synthetic peptide
  REGION 1..9: note = XENP019381 vhCDR3
LEAIYGSDY

SEQ ID NO: 22106 - protein, 214 aa, synthetic construct
  REGION 1..214: note = Description of Artificial Sequence: Synthetic polypeptide
  REGION 1..214: note = XENP019381 2A12_H1L1_IgG1_PVA_/S267K Light Chain
DIQMTQSPSSLSASVGDRVTITCRASQEISGYLSWLQQKPGKTIKRLIYAASTLDSGVPKRFSDSRSGSDYTLTISSLQPEDFATYYCLQYTSYPFTFGSGTKLEIKRTVAAPSVFIFPPSDEQLKSGTASVVCLLNNFYPREAKVQWKVDNALQSGNSQESVTEQDSKDSTYSLSSTLTLSKADYEKHKVYACEVTHQGLSSPVTKSFNRGEC

SEQ ID NO: 22107 - protein, 107 aa, synthetic construct
  REGION 1..107: note = Description of Artificial Sequence: Synthetic polypeptide
  REGION 1..107: note = VL of XENP019381
DIQMTQSPSSLSASVGDRVTITCRASQEISGYLSWLQQKPGKTIKRLIYAASTLDSGVPKRFSDSRSGSDYTLTISSLQPEDFATYYCLQYTSYPFTFGSGTKLEIK

SEQ ID NO: 22108 - protein, 11 aa, synthetic construct
  REGION 1..11: note = Description of Artificial Sequence: Synthetic peptide
  REGION 1..11: note = XENP019381 vlCDR1
RASQEISGYLS

SEQ ID NO: 22109 - protein, 7 aa, synthetic construct
  REGION 1..7: note = Description of Artificial Sequence: Synthetic peptide
  REGION 1..7: note = XENP019381 vlCDR2
AASTLDS

SEQ ID NO: 22110 - protein, 9 aa, synthetic construct
  REGION 1..9: note = Description of Artificial Sequence: Synthetic peptide
  REGION 1..9: note = XENP019381 vlCDR3
LQYTSYPFT

SEQ ID NO: 22111 - protein, 449 aa, synthetic construct
  REGION 1..449: note = Description of Artificial Sequence: Synthetic polypeptide
  REGION 1..449: note = XENP019382 4C8_H1L1_IgG1_PVA_/S267K Heavy Chain
QVQLVQSGAEVKKPGASVKVSCKASGYTFTDYNMHWVRQAPGQSLEWMGYIYPYTGGTGYNQKFQGRVTMTVDNSISTAYMELSRLRSDDTAVYYCARSDDGYSYAMDYWGQGTLVTVSSASTKGPSVFPLAPSSKSTSGGTAALGCLVKDYFPEPVTVSWNSGALTSGVHTFPAVLQSSGLYSLSSVVTVPSSSLGTQTYICNVNHKPSDTKVDKKVEPKSCDKTHTCPPCPAPPVAGPSVFLFPPKPKDTLMISRTPEVTCVVVDVKHEDPEVKFNWYVDGVEVHNAKTKPREEEYNSTYRVVSVLTVLHQDWLNGKEYKCKVSNKALPAPIEKTISKAKGQPREPQVYTLPPSREEMTKNQVSLTCDVSGFYPSDIAVEWESDGQPENNYKTTPPVLDSDGSFFLYSKLTVDKSRWEQGDVFSCSVMHEALHNHYTQKSLSLSPGK

SEQ ID NO: 22112 - protein, 120 aa, synthetic construct
  REGION 1..120: note = Description of Artificial Sequence: Synthetic polypeptide
  REGION 1..120: note = VH of XENP019382
QVQLVQSGAEVKKPGASVKVSCKASGYTFTDYNMHWVRQAPGQSLEWMGYIYPYTGGTGYNQKFQGRVTMTVDNSISTAYMELSRLRSDDTAVYYCARSDDGYSYAMDYWGQGTLVTVSS

SEQ ID NO: 22113 - protein, 5 aa, synthetic construct
  REGION 1..5: note = Description of Artificial Sequence: Synthetic peptide
  REGION 1..5: note = XENP019382 vhCDR1
DYNMH

SEQ ID NO: 22114 - protein, 17 aa, synthetic construct
  REGION 1..17: note = Description of Artificial Sequence: Synthetic peptide
  REGION 1..17: note = XENP019382 vhCDR2
YIYPYTGGTGYNQKFQG

SEQ ID NO: 22115 - protein, 11 aa, synthetic construct
  REGION 1..11: note = Description of Artificial Sequence: Synthetic peptide
  REGION 1..11: note = XENP019382 vhCDR3
SDDGYSYAMDY

SEQ ID NO: 22116 - protein, 213 aa, synthetic construct
  REGION 1..213: note = Description of Artificial Sequence: Synthetic polypeptide
  REGION 1..213: note = XENP019382 4C8_H1L1_IgG1_PVA_/S267K Light Chain
DIQMTQSPSSLSASVGDRVTITCQASQDISNYLNWYQQKPGKTVKLLIYYTSRLHSGVPSRFSGSGSGTDYTFTISSLQPEDIATYFCQQGNTLWTFGGGTKVEIKRTVAAPSVFIFPPSDEQLKSGTASVVCLLNNFYPREAKVQWKVDNALQSGNSQESVTEQDSKDSTYSLSSTLTLSKADYEKHKVYACEVTHQGLSSPVTKSFNRGEC

SEQ ID NO: 22117 - protein, 106 aa, synthetic construct
  REGION 1..106: note = Description of Artificial Sequence: Synthetic polypeptide
  REGION 1..106: note = VL of XENP019382
DIQMTQSPSSLSASVGDRVTITCQASQDISNYLNWYQQKPGKTVKLLIYYTSRLHSGVPSRFSGSGSGTDYTFTISSLQPEDIATYFCQQGNTLWTFGGGTKVEIK

SEQ ID NO: 22118 - protein, 11 aa, synthetic construct
  REGION 1..11: note = Description of Artificial Sequence: Synthetic peptide
  REGION 1..11: note = XENP019382 vlCDR1
QASQDISNYLN

SEQ ID NO: 22119 - protein, 7 aa, synthetic construct
  REGION 1..7: note = Description of Artificial Sequence: Synthetic peptide
  REGION 1..7: note = XENP019382 vlCDR2
YTSRLHS

SEQ ID NO: 22120 - protein, 8 aa, synthetic construct
  REGION 1..8: note = Description of Artificial Sequence: Synthetic peptide
  REGION 1..8: note = XENP019382 vlCDR3
QQGNTLWT

SEQ ID NO: 22121 - protein, 445 aa, synthetic construct
  REGION 1..445: note = Description of Artificial Sequence: Synthetic polypeptide
  REGION 1..445: note = XENP019383 7A6_H0L0_IgG1_PVA_/S267K Heavy Chain
DVQLQESGPGLVKPSQSLSLTCSVTGYSITSGYFWNWIRQFPGNKLEWMGYISYDSNYYNPSLKNRISITRDTSKNQFFLKLNSVTTEDTATYYCARGGITTFDYWGQGTTLTVSSASTKGPSVFPLAPSSKSTSGGTAALGCLVKDYFPEPVTVSWNSGALTSGVHTFPAVLQSSGLYSLSSVVTVPSSSLGTQTYICNVNHKPSDTKVDKKVEPKSCDKTHTCPPCPAPPVAGPSVFLFPPKPKDTLMISRTPEVTCVVVDVKHEDPEVKFNWYVDGVEVHNAKTKPREEEYNSTYRVVSVLTVLHQDWLNGKEYKCKVSNKALPAPIEKTISKAKGQPREPQVYTLPPSREEMTKNQVSLTCDVSGFYPSDIAVEWESDGQPENNYKTTPPVLDSDGSFFLYSKLTVDKSRWEQGDVFSCSVMHEALHNHYTQKSLSLSPGK

SEQ ID NO: 22122 - protein, 116 aa, synthetic construct
  REGION 1..116: note = Description of Artificial Sequence: Synthetic polypeptide
  REGION 1..116: note = VH of XENP019383
DVQLQESGPGLVKPSQSLSLTCSVTGYSITSGYFWNWIRQFPGNKLEWMGYISYDSNYYNPSLKNRISITRDTSKNQFFLKLNSVTTEDTATYYCARGGITTFDYWGQGTTLTVSS

SEQ ID NO: 22123 - protein, 6 aa, synthetic construct
  REGION 1..6: note = Description of Artificial Sequence: Synthetic peptide
  REGION 1..6: note = XENP019383 vhCDR1
SGYFWN

SEQ ID NO: 22124 - protein, 15 aa, synthetic construct
  REGION 1..15: note = Description of Artificial Sequence: Synthetic peptide
  REGION 1..15: note = XENP019383 vhCDR2
YISYDSNYYNPSLKN

SEQ ID NO: 22125 - protein, 8 aa, synthetic construct
  REGION 1..8: note = Description of Artificial Sequence: Synthetic peptide
  REGION 1..8: note = XENP019383 vhCDR3
GGITTFDY

SEQ ID NO: 22126 - protein, 218 aa, synthetic construct
  REGION 1..218: note = Description of Artificial Sequence: Synthetic polypeptide
  REGION 1..218: note = XENP019383 7A6_H0L0_IgG1_PVA_/S267K Light Chain
DIVLTQSPASLAVSLGQRATISCKASQSVDYDGDSYMNWYQQKPGQPPKLLIYAASNLESGIPARFSGSGSGTDFTLNIHPVEEEDAATYYCQQSNEDPRTFGGGTKLEIKRTVAAPSVFIFPPSDEQLKSGTASVVCLLNNFYPREAKVQWKVDNALQSGNSQESVTEQDSKDSTYSLSSTLTLSKADYEKHKVYACEVTHQGLSSPVTKSFNRGEC

SEQ ID NO: 22127 - protein, 111 aa, synthetic construct
  REGION 1..111: note = Description of Artificial Sequence: Synthetic polypeptide
  REGION 1..111: note = VL of XENP019383
DIVLTQSPASLAVSLGQRATISCKASQSVDYDGDSYMNWYQQKPGQPPKLLIYAASNLESGIPARFSGSGSGTDFTLNIHPVEEEDAATYYCQQSNEDPRTFGGGTKLEIK

SEQ ID NO: 22128 - protein, 15 aa, synthetic construct
  REGION 1..15: note = Description of Artificial Sequence: Synthetic peptide
  REGION 1..15: note = XENP019383 vlCDR1
KASQSVDYDGDSYMN

SEQ ID NO: 22129 - protein, 7 aa, synthetic construct
  REGION 1..7: note = Description of Artificial Sequence: Synthetic peptide
  REGION 1..7: note = XENP019383 vlCDR2
AASNLES

SEQ ID NO: 22130 - protein, 9 aa, synthetic construct
  REGION 1..9: note = Description of Artificial Sequence: Synthetic peptide
  REGION 1..9: note = XENP019383 vlCDR3
QQSNEDPRT

SEQ ID NO: 22131 - protein, 445 aa, synthetic construct
  REGION 1..445: note = Description of Artificial Sequence: Synthetic polypeptide
  REGION 1..445: note = XENP019384 7A6_H1L1_IgG1_PVA_/S267K Heavy Chain
QVQLVESGGGVVQPGRSLRLSCAVSGYSITSGYFWNWIRQAPGKKLEWVAYISYDSNYYNPSVKGRFTISRDTSKNTFYLQMNSLRAEDTAVYYCARGGITTFDYWGQGTLVTVSSASTKGPSVFPLAPSSKSTSGGTAALGCLVKDYFPEPVTVSWNSGALTSGVHTFPAVLQSSGLYSLSSVVTVPSSSLGTQTYICNVNHKPSDTKVDKKVEPKSCDKTHTCPPCPAPPVAGPSVFLFPPKPKDTLMISRTPEVTCVVVDVKHEDPEVKFNWYVDGVEVHNAKTKPREEEYNSTYRVVSVLTVLHQDWLNGKEYKCKVSNKALPAPIEKTISKAKGQPREPQVYTLPPSREEMTKNQVSLTCDVSGFYPSDIAVEWESDGQPENNYKTTPPVLDSDGSFFLYSKLTVDKSRWEQGDVFSCSVMHEALHNHYTQKSLSLSPGK

SEQ ID NO: 22132 - protein, 116 aa, synthetic construct
  REGION 1..116: note = Description of Artificial Sequence: Synthetic polypeptide
  REGION 1..116: note = VH of XENP019384
QVQLVESGGGVVQPGRSLRLSCAVSGYSITSGYFWNWIRQAPGKKLEWVAYISYDSNYYNPSVKGRFTISRDTSKNTFYLQMNSLRAEDTAVYYCARGGITTFDYWGQGTLVTVSS

SEQ ID NO: 22133 - protein, 6 aa, synthetic construct
  REGION 1..6: note = Description of Artificial Sequence: Synthetic peptide
  REGION 1..6: note = XENP019384 vhCDR1
SGYFWN

SEQ ID NO: 22134 - protein, 15 aa, synthetic construct
  REGION 1..15: note = Description of Artificial Sequence: Synthetic peptide
  REGION 1..15: note = XENP019384 vhCDR2
YISYDSNYYNPSVKG

SEQ ID NO: 22135 - protein, 8 aa, synthetic construct
  REGION 1..8: note = Description of Artificial Sequence: Synthetic peptide
  REGION 1..8: note = XENP019384 vhCDR3
GGITTFDY

SEQ ID NO: 22136 - protein, 218 aa, synthetic construct
  REGION 1..218: note = Description of Artificial Sequence: Synthetic polypeptide
  REGION 1..218: note = XENP019384 7A6_H1L1_IgG1_PVA_/S267K Light Chain
DIVLTQSPSSLSASVGDRVTITCRASQSVDYDGDSYMNWYQQKPGKPPKLLIYAASNLESGIPARFSGSGSGTDFTLTISSLQPEDFATYYCQQSNEDPRTFGGGTKVEIKRTVAAPSVFIFPPSDEQLKSGTASVVCLLNNFYPREAKVQWKVDNALQSGNSQESVTEQDSKDSTYSLSSTLTLSKADYEKHKVYACEVTHQGLSSPVTKSFNRGEC

SEQ ID NO: 22137 - protein, 111 aa, synthetic construct
  REGION 1..111: note = Description of Artificial Sequence: Synthetic polypeptide
  REGION 1..111: note = VL of XENP019384
DIVLTQSPSSLSASVGDRVTITCRASQSVDYDGDSYMNWYQQKPGKPPKLLIYAASNLESGIPARFSGSGSGTDFTLTISSLQPEDFATYYCQQSNEDPRTFGGGTKVEIK

SEQ ID NO: 22138 - protein, 15 aa, synthetic construct
  REGION 1..15: note = Description of Artificial Sequence: Synthetic peptide
  REGION 1..15: note = XENP019384 vlCDR1
RASQSVDYDGDSYMN

SEQ ID NO: 22139 - protein, 7 aa, synthetic construct
  REGION 1..7: note = Description of Artificial Sequence: Synthetic peptide
  REGION 1..7: note = XENP019384 vlCDR2
AASNLES

SEQ ID NO: 22140 - protein, 9 aa, synthetic construct
  REGION 1..9: note = Description of Artificial Sequence: Synthetic peptide
  REGION 1..9: note = XENP019384 vlCDR3
QQSNEDPRT

SEQ ID NO: 22141 - protein, 445 aa, synthetic construct; identical to SEQ ID NO: 22131
  REGION 1..445: note = Description of Artificial Sequence: Synthetic polypeptide
  REGION 1..445: note = XENP019385 7A6_H1L2_IgG1_PVA_/S267K Heavy Chain

SEQ ID NO: 22142 - protein, 116 aa, synthetic construct; identical to SEQ ID NO: 22132
  REGION 1..116: note = Description of Artificial Sequence: Synthetic polypeptide
  REGION 1..116: note = VH of XENP019385

SEQ ID NO: 22143 - protein, 6 aa, synthetic construct
  REGION 1..6: note = Description of Artificial Sequence: Synthetic peptide
  REGION 1..6: note = XENP019385 vhCDR1
SGYFWN

SEQ ID NO: 22144 - protein, 15 aa, synthetic construct
  REGION 1..15: note = Description of Artificial Sequence: Synthetic peptide
  REGION 1..15: note = XENP019385 vhCDR2
YISYDSNYYNPSVKG

SEQ ID NO: 22145 - protein, 8 aa, synthetic construct
  REGION 1..8: note = Description of Artificial Sequence: Synthetic peptide
  REGION 1..8: note = XENP019385 vhCDR3
GGITTFDY

SEQ ID NO: 22146 - protein, 218 aa, synthetic construct; identical to SEQ ID NO: 21996
  REGION 1..218: note = Description of Artificial Sequence: Synthetic polypeptide
  REGION 1..218: note = XENP019385 7A6_H1L2_IgG1_PVA_/S267K Light Chain

SEQ ID NO: 22147 - protein, 111 aa, synthetic construct; identical to SEQ ID NO: 21997
  REGION 1..111: note = Description of Artificial Sequence: Synthetic polypeptide
  REGION 1..111: note = VL of XENP019385

SEQ ID NO: 22148 - protein, 15 aa, synthetic construct
  REGION 1..15: note = Description of Artificial Sequence: Synthetic peptide
  REGION 1..15: note = XENP019385 vlCDR1
RASQSVDYDGDSYMN

SEQ ID NO: 22149 - protein, 7 aa, synthetic construct
  REGION 1..7: note = Description of Artificial Sequence: Synthetic peptide
  REGION 1..7: note = XENP019385 vlCDR2
AASNLES

SEQ ID NO: 22150 - protein, 9 aa, synthetic construct
  REGION 1..9: note = Description of Artificial Sequence: Synthetic peptide
  REGION 1..9: note = XENP019385 vlCDR3
QQSNEDPRT

SEQ ID NO: 22151 - protein, 445 aa, synthetic construct; identical to SEQ ID NO: 22131
  REGION 1..445: note = Description of Artificial Sequence: Synthetic polypeptide
  REGION 1..445: note = XENP019386 7A6_H1L3_IgG1_PVA_/S267K Heavy Chain

SEQ ID NO: 22152 - protein, 116 aa, synthetic construct; identical to SEQ ID NO: 22132
  REGION 1..116: note = Description of Artificial Sequence: Synthetic polypeptide
  REGION 1..116: note = VH of XENP019386

SEQ ID NO: 22153 - protein, 6 aa, synthetic construct
  REGION 1..6: note = Description of Artificial Sequence: Synthetic peptide
  REGION 1..6: note = XENP019386 vhCDR1
SGYFWN

SEQ ID NO: 22154 - protein, 15 aa, synthetic construct
  REGION 1..15: note = Description of Artificial Sequence: Synthetic peptide
  REGION 1..15: note = XENP019386 vhCDR2
YISYDSNYYNPSVKG

SEQ ID NO: 22155 - protein, 8 aa, synthetic construct
  REGION 1..8: note = Description of Artificial Sequence: Synthetic peptide
  REGION 1..8: note = XENP019386 vhCDR3
GGITTFDY

SEQ ID NO: 22156 - protein, 218 aa, synthetic construct
  REGION 1..218: note = Description of Artificial Sequence: Synthetic polypeptide
  REGION 1..218: note = XENP019386 7A6_H1L3_IgG1_PVA_/S267K Light Chain
DIVLTQSPDSLAVSLGERATINCKASQSVDYDGDSYMNWYQQKPGQPPKLLIYAASNLESGIPARFSGSGSGTDFTLTISSLQAEDVAVYYCQQSNEDPRTFGGGTKVEIKRTVAAPSVFIFPPSDEQLKSGTASVVCLLNNFYPREAKVQWKVDNALQSGNSQESVTEQDSKDSTYSLSSTLTLSKADYEKHKVYACEVTHQGLSSPVTKSFNRGEC

SEQ ID NO: 22157 - protein, 111 aa, synthetic construct
  REGION 1..111: note = Description of Artificial Sequence: Synthetic polypeptide
  REGION 1..111: note = VL of XENP019386
DIVLTQSPDSLAVSLGERATINCKASQSVDYDGDSYMNWYQQKPGQPPKLLIYAASNLESGIPARFSGSGSGTDFTLTISSLQAEDVAVYYCQQSNEDPRTFGGGTKVEIK

SEQ ID NO: 22158 - protein, 15 aa, synthetic construct
  REGION 1..15: note = Description of Artificial Sequence: Synthetic peptide
  REGION 1..15: note = XENP019386 vlCDR1
KASQSVDYDGDSYMN

SEQ ID NO: 22159 - protein, 7 aa, synthetic construct
  REGION 1..7: note = Description of Artificial Sequence: Synthetic peptide
  REGION 1..7: note = XENP019386 vlCDR2
AASNLES

SEQ ID NO: 22160 - protein, 9 aa, synthetic construct
  REGION 1..9: note = Description of Artificial Sequence: Synthetic peptide
  REGION 1..9: note = XENP019386 vlCDR3
QQSNEDPRT

SEQ ID NO: 22161 - protein, 445 aa, synthetic construct
  REGION 1..445: note = Description of Artificial Sequence: Synthetic polypeptide
  REGION 1..445: note = XENP019387 7A6_H2L1_IgG1_PVA_/S267K Heavy Chain
QVQLQESGPGLVKPSQTLSLTCTVSGYSITSGYFWNWIRQHPGKKLEWIGYISYDSNYYNPSLKSLVTISRDTSKNQFSLKLSSVTAADTAVYYCARGGITTFDYWGQGTLVTVSSASTKGPSVFPLAPSSKSTSGGTAALGCLVKDYFPEPVTVSWNSGALTSGVHTFPAVLQSSGLYSLSSVVTVPSSSLGTQTYICNVNHKPSDTKVDKKVEPKSCDKTHTCPPCPAPPVAGPSVFLFPPKPKDTLMISRTPEVTCVVVDVKHEDPEVKFNWYVDGVEVHNAKTKPREEEYNSTYRVVSVLTVLHQDWLNGKEYKCKVSNKALPAPIEKTISKAKGQPREPQVYTLPPSREEMTKNQVSLTCDVSGFYPSDIAVEWESDGQPENNYKTTPPVLDSDGSFFLYSKLTVDKSRWEQGDVFSCSVMHEALHNHYTQKSLSLSPGK

SEQ ID NO: 22162 - protein, 116 aa, synthetic construct
  REGION 1..116: note = Description of Artificial Sequence: Synthetic polypeptide
  REGION 1..116: note = VH of XENP019387
QVQLQESGPGLVKPSQTLSLTCTVSGYSITSGYFWNWIRQHPGKKLEWIGYISYDSNYYNPSLKSLVTISRDTSKNQFSLKLSSVTAADTAVYYCARGGITTFDYWGQGTLVTVSS

SEQ ID NO: 22163 - protein, 6 aa, synthetic construct
  REGION 1..6: note = Description of Artificial Sequence: Synthetic peptide
  REGION 1..6: note = XENP019387 vhCDR1
SGYFWN

SEQ ID NO: 22164 - protein, 15 aa, synthetic construct
  REGION 1..15: note = Description of Artificial Sequence: Synthetic peptide
  REGION 1..15: note = XENP019387 vhCDR2
YISYDSNYYNPSLKS

SEQ ID NO: 22165 - protein, 8 aa, synthetic construct
  REGION 1..8: note = Description of Artificial Sequence: Synthetic peptide
  REGION 1..8: note = XENP019387 vhCDR3
GGITTFDY

SEQ ID NO: 22166 - protein, 218 aa, synthetic construct; identical to SEQ ID NO: 22136
  REGION 1..218: note = Description of Artificial Sequence: Synthetic polypeptide
  REGION 1..218: note = XENP019387 7A6_H2L1_IgG1_PVA_/S267K Light Chain

SEQ ID NO: 22167 - protein, 111 aa, synthetic construct; identical to SEQ ID NO: 22137
  REGION 1..111: note = Description of Artificial Sequence: Synthetic polypeptide
  REGION 1..111: note = VL of XENP019387

SEQ ID NO: 22168 - protein, 15 aa, synthetic construct
  REGION 1..15: note = Description of Artificial Sequence: Synthetic peptide
  REGION 1..15: note = XENP019387 vlCDR1
RASQSVDYDGDSYMN

SEQ ID NO: 22169 - protein, 7 aa, synthetic construct
  REGION 1..7: note = Description of Artificial Sequence: Synthetic peptide
  REGION 1..7: note = XENP019387 vlCDR2
AASNLES

SEQ ID NO: 22170 - protein, 9 aa, synthetic construct
  REGION 1..9: note = Description of Artificial Sequence: Synthetic peptide
  REGION 1..9: note = XENP019387 vlCDR3
QQSNEDPRT

SEQ ID NO: 22171 - protein, 445 aa, synthetic construct; identical to SEQ ID NO: 22161
  REGION 1..445: note = Description of Artificial Sequence: Synthetic polypeptide
  REGION 1..445: note = XENP019388 7A6_H2L2_IgG1_PVA_/S267K Heavy Chain

SEQ ID NO: 22172 - protein, 116 aa, synthetic construct; identical to SEQ ID NO: 22162
  REGION 1..116: note = Description of Artificial Sequence: Synthetic polypeptide
  REGION 1..116: note = VH of XENP019388

SEQ ID NO: 22173 - protein, 6 aa, synthetic construct
  REGION 1..6: note = Description of Artificial Sequence: Synthetic peptide
  REGION 1..6: note = XENP019388 vhCDR1
SGYFWN

SEQ ID NO: 22174 - protein, 15 aa, synthetic construct
  REGION 1..15: note = Description of Artificial Sequence: Synthetic peptide
  REGION 1..15: note = XENP019388 vhCDR2
YISYDSNYYNPSLKS

SEQ ID NO: 22175 - protein, 8 aa, synthetic construct
  REGION 1..8: note = Description of Artificial Sequence: Synthetic peptide
  REGION 1..8: note = XENP019388 vhCDR3
GGITTFDY

SEQ ID NO: 22176 - protein, 218 aa, synthetic construct; identical to SEQ ID NO: 21996
  REGION 1..218: note = Description of Artificial Sequence: Synthetic polypeptide
  REGION 1..218: note = XENP019388 7A6_H2L2_IgG1_PVA_/S267K Light Chain

SEQ ID NO: 22177 - protein, 111 aa, synthetic construct; identical to SEQ ID NO: 21997
  REGION 1..111: note = Description of Artificial Sequence: Synthetic polypeptide
  REGION 1..111: note = VL of XENP019388

SEQ ID NO: 22178 - protein, 15 aa, synthetic construct
  REGION 1..15: note = Description of Artificial Sequence: Synthetic peptide
  REGION 1..15: note = XENP019388 vlCDR1
RASQSVDYDGDSYMN

SEQ ID NO: 22179 - protein, 7 aa, synthetic construct
  REGION 1..7: note = Description of Artificial Sequence: Synthetic peptide
  REGION 1..7: note = XENP019388 vlCDR2
AASNLES

SEQ ID NO: 22180 - protein, 9 aa, synthetic construct
  REGION 1..9: note = Description of Artificial Sequence: Synthetic peptide
  REGION 1..9: note = XENP019388 vlCDR3
QQSNEDPRT

SEQ ID NO: 22181 - protein, 445 aa, synthetic construct; identical to SEQ ID NO: 22161
  REGION 1..445: note = Description of Artificial Sequence: Synthetic polypeptide
  REGION 1..445: note = XENP019389 7A6_H2L3_IgG1_PVA_/S267K Heavy Chain

SEQ ID NO: 22182 - protein, 116 aa, synthetic construct; identical to SEQ ID NO: 22162
  REGION 1..116: note = Description of Artificial Sequence: Synthetic polypeptide
  REGION 1..116: note = VH of XENP019389

SEQ ID NO: 22183 - protein, 6 aa, synthetic construct
  REGION 1..6: note = Description of Artificial Sequence: Synthetic peptide
  REGION 1..6: note = XENP019389 vhCDR1
SGYFWN

SEQ ID NO: 22184 - protein, 15 aa, synthetic construct
  REGION 1..15: note = Description of Artificial Sequence: Synthetic peptide
  REGION 1..15: note = XENP019389 vhCDR2
YISYDSNYYNPSLKS

SEQ ID NO: 22185 - protein, 8 aa, synthetic construct
  REGION 1..8: note = Description of Artificial Sequence: Synthetic peptide
  REGION 1..8: note = XENP019389 vhCDR3
GGITTFDY

SEQ ID NO: 22186 - protein, 218 aa, synthetic construct; identical to SEQ ID NO: 22156
  REGION 1..218: note = Description of Artificial Sequence: Synthetic polypeptide
  REGION 1..218: note = XENP019389 7A6_H2L3_IgG1_PVA_/S267K Light Chain

SEQ ID NO: 22187 - protein, 111 aa, synthetic construct; identical to SEQ ID NO: 22157
  REGION 1..111: note = Description of Artificial Sequence: Synthetic polypeptide
  REGION 1..111: note = VL of XENP019389

SEQ ID NO: 22188 - protein, 15 aa, synthetic construct
  REGION 1..15: note = Description of Artificial Sequence: Synthetic peptide
  REGION 1..15: note = XENP019389 vlCDR1
KASQSVDYDGDSYMN

SEQ ID NO: 22189 - protein, 7 aa, synthetic construct
  REGION 1..7: note = Description of Artificial Sequence: Synthetic peptide
  REGION 1..7: note = XENP019389 vlCDR2
AASNLES

SEQ ID NO: 22190 - protein, 9 aa, synthetic construct
  REGION 1..9: note = Description of Artificial Sequence: Synthetic peptide
  REGION 1..9: note = XENP019389 vlCDR3
QQSNEDPRT

SEQ ID NO: 22191 - protein, 445 aa, synthetic construct
  REGION 1..445: note = Description of Artificial Sequence: Synthetic polypeptide
  REGION 1..445: note = XENP019390 7A6_H3L1_IgG1_PVA_/S267K Heavy Chain
QVQLQQSGPGLVKPSQTLSLTCAVSGYSITSGYFWNWIRQSPSRKLEWLGYISYDSNYYNPSVKSRITINRDTSKNQFSLQLNSVTPEDTAVYYCARGGITTFDYWGQGTLVTVSSASTKGPSVFPLAPSSKSTSGGTAALGCLVKDYFPEPVTVSWNSGALTSGVHTFPAVLQSSGLYSLSSVVTVPSSSLGTQTYICNVNHKPSDTKVDKKVEPKSCDKTHTCPPCPAPPVAGPSVFLFPPKPKDTLMISRTPEVTCVVVDVKHEDPEVKFNWYVDGVEVHNAKTKPREEEYNSTYRVVSVLTVLHQDWLNGKEYKCKVSNKALPAPIEKTISKAKGQPREPQVYTLPPSREEMTKNQVSLTCDVSGFYPSDIAVEWESDGQPENNYKTTPPVLDSDGSFFLYSKLTVDKSRWEQGDVFSCSVMHEALHNHYTQKSLSLSPGK

SEQ ID NO: 22192 - protein, 116 aa, synthetic construct
  REGION 1..116: note = Description of Artificial Sequence: Synthetic polypeptide
  REGION 1..116: note = VH of XENP019390
QVQLQQSGPGLVKPSQTLSLTCAVSGYSITSGYFWNWIRQSPSRKLEWLGYISYDSNYYNPSVKSRITINRDTSKNQFSLQLNSVTPEDTAVYYCARGGITTFDYWGQGTLVTVSS

SEQ ID NO: 22193 - protein, 6 aa, synthetic construct
  REGION 1..6: note = Description of Artificial Sequence: Synthetic peptide
  REGION 1..6: note = XENP019390 vhCDR1
SGYFWN

SEQ ID NO: 22194 - protein, 15 aa, synthetic construct
  REGION 1..15: note = Description of Artificial Sequence: Synthetic peptide
  REGION 1..15: note = XENP019390 vhCDR2
YISYDSNYYNPSVKS

SEQ ID NO: 22195 - protein, 8 aa, synthetic construct
  REGION 1..8: note = Description of Artificial Sequence: Synthetic peptide
  REGION 1..8: note = XENP019390 vhCDR3
GGITTFDY

SEQ ID NO: 22196 - protein, 218 aa, synthetic construct; identical to SEQ ID NO: 22136
  REGION 1..218: note = Description of Artificial Sequence: Synthetic polypeptide
  REGION 1..218: note = XENP019390 7A6_H3L1_IgG1_PVA_/S267K Light Chain

SEQ ID NO: 22197 - protein, 111 aa, synthetic construct; identical to SEQ ID NO: 22137
  REGION 1..111: note = Description of Artificial Sequence: Synthetic polypeptide
  REGION 1..111: note = VL of XENP019390

SEQ ID NO: 22198 - protein, 15 aa, synthetic construct
  REGION 1..15: note = Description of Artificial Sequence: Synthetic peptide
  REGION 1..15: note = XENP019390 vlCDR1
RASQSVDYDGDSYMN

SEQ ID NO: 22199 - protein, 7 aa, synthetic construct
  REGION 1..7: note = Description of Artificial Sequence: Synthetic peptide
  REGION 1..7: note = XENP019390 vlCDR2
AASNLES

SEQ ID NO: 22200 - protein, 9 aa, synthetic construct
  REGION 1..9: note = Description of Artificial Sequence: Synthetic peptide
  REGION 1..9: note = XENP019390 vlCDR3
QQSNEDPRT

SEQ ID NO: 22201 - protein, 445 aa, synthetic construct; identical to SEQ ID NO: 22191
  REGION 1..445: note = Description of Artificial Sequence: Synthetic polypeptide
  REGION 1..445: note = XENP019391 7A6_H3L2_IgG1_PVA_/S267K Heavy Chain

SEQ ID NO: 22202 - protein, 116 aa, synthetic construct; identical to SEQ ID NO: 22192
  REGION 1..116: note = Description of Artificial Sequence: Synthetic polypeptide
  REGION 1..116: note = VH of XENP019391

SEQ ID NO: 22203 - protein, 6 aa, synthetic construct
  REGION 1..6: note = Description of Artificial Sequence: Synthetic peptide
  REGION 1..6: note = XENP019391 vhCDR1
SGYFWN

SEQ ID NO: 22204 - protein, 15 aa, synthetic construct
  REGION 1..15: note = Description of Artificial Sequence: Synthetic peptide
  REGION 1..15: note = XENP019391 vhCDR2
YISYDSNYYNPSVKS

SEQ ID NO: 22205 - protein, 8 aa, synthetic construct
  REGION 1..8: note = Description of Artificial Sequence: Synthetic peptide
  REGION 1..8: note = XENP019391 vhCDR3
GGITTFDY

SEQ ID NO: 22206 - protein, 218 aa, synthetic construct; identical to SEQ ID NO: 21996
  REGION 1..218: note = Description of Artificial Sequence: Synthetic polypeptide
  REGION 1..218: note = XENP019391 7A6_H3L2_IgG1_PVA_/S267K Light Chain

SEQ ID NO: 22207 - protein, 111 aa, synthetic construct; identical to SEQ ID NO: 21997
  REGION 1..111: note = Description of Artificial Sequence: Synthetic polypeptide
  REGION 1..111: note = VL of XENP019391

SEQ ID NO: 22208 - protein, 15 aa, synthetic construct
  REGION 1..15: note = Description of Artificial Sequence: Synthetic peptide
  REGION 1..15: note = XENP019391 vlCDR1
RASQSVDYDGDSYMN

SEQ ID NO: 22209 - protein, 7 aa, synthetic construct
  REGION 1..7: note = Description of Artificial Sequence: Synthetic peptide
  REGION 1..7: note = XENP019391 vlCDR2
AASNLES

SEQ ID NO: 22210 - protein, 9 aa, synthetic construct
  REGION 1..9: note = Description of Artificial Sequence: Synthetic peptide
  REGION 1..9: note = XENP019391 vlCDR3
QQSNEDPRT

SEQ ID NO: 22211 - protein, 445 aa, synthetic construct; identical to SEQ ID NO: 22191
  REGION 1..445: note = Description of Artificial Sequence: Synthetic polypeptide
  REGION 1..445: note = XENP019392 7A6_H3L3_IgG1_PVA_/S267K Heavy Chain

SEQ ID NO: 22212 - protein, 116 aa, synthetic construct; identical to SEQ ID NO: 22192
  REGION 1..116: note = Description of Artificial Sequence: Synthetic polypeptide
  REGION 1..116: note = VH of XENP019392

SEQ ID NO: 22213 - protein, 6 aa, synthetic construct
  REGION 1..6: note = Description of Artificial Sequence: Synthetic peptide
  REGION 1..6: note = XENP019392 vhCDR1
SGYFWN

SEQ ID NO: 22214 - protein, 15 aa, synthetic construct
  REGION 1..15: note = Description of Artificial Sequence: Synthetic peptide
  REGION 1..15: note = XENP019392 vhCDR2
YISYDSNYYNPSVKS

SEQ ID NO: 22215 - protein, 8 aa, synthetic construct
  REGION 1..8: note = Description of Artificial Sequence: Synthetic peptide
  REGION 1..8: note = XENP019392 vhCDR3
GGITTFDY

SEQ ID NO: 22216 - protein, 218 aa, synthetic construct; identical to SEQ ID NO: 22156
  REGION 1..218: note = Description of Artificial Sequence: Synthetic polypeptide
  REGION 1..218: note = XENP019392 7A6_H3L3_IgG1_PVA_/S267K Light Chain

SEQ ID NO: 22217 - protein, 111 aa, synthetic construct; identical to SEQ ID NO: 22157
  REGION 1..111: note = Description of Artificial Sequence: Synthetic polypeptide
  REGION 1..111: note = VL of XENP019392

SEQ ID NO: 22218 - protein, 15 aa, synthetic construct
  REGION 1..15: note = Description of Artificial Sequence: Synthetic peptide
  REGION 1..15: note = XENP019392 vlCDR1
KASQSVDYDGDSYMN

SEQ ID NO: 22219 - protein, 7 aa, synthetic construct
  REGION 1..7: note = Description of Artificial Sequence: Synthetic peptide
  REGION 1..7: note = XENP019392 vlCDR2
AASNLES

SEQ ID NO: 22220 - protein, 9 aa, synthetic construct
  REGION 1..9: note = Description of Artificial Sequence: Synthetic peptide
  REGION 1..9: note = XENP019392 vlCDR3
QQSNEDPRT

SEQ ID NO: 22221 - protein, 447 aa, synthetic construct
  REGION 1..447: note = Description of Artificial Sequence: Synthetic polypeptide
  REGION 1..447: note = XENP019393 11B2_H1_1H11_L1_IgG1_PVA_/S267K Heavy Chain
QIQLVQSGSELKKPGASVKVSCKTSGYTFTNYGMNWVRQAPGQGLEWMGWINTYTGEPTYADGFTGRFVFSLDTSVSTAYLQISSLKAEDTAVYFCARGRGMGYFDYWGQGTLVTVSSASTKGPSVFPLAPSSKSTSGGTAALGCLVKDYFPEPVTVSWNSGALTSGVHTFPAVLQSSGLYSLSSVVTVPSSSLGTQTYICNVNHKPSDTKVDKKVEPKSCDKTHTCPPCPAPPVAGPSVFLFPPKPKDTLMISRTPEVTCVVVDVKHEDPEVKFNWYVDGVEVHNAKTKPREEEYNSTYRVVSVLTVLHQDWLNGKEYKCKVSNKALPAPIEKTISKAKGQPREPQVYTLPPSREEMTKNQVSLTCDVSGFYPSDIAVEWESDGQPENNYKTTPPVLDSDGSFFLYSKLTVDKSRWEQGDVFSCSVMHEALHNHYTQKSLSLSPGK

SEQ ID NO: 22222 - protein, 118 aa, synthetic construct
  REGION 1..118: note = Description of Artificial Sequence: Synthetic polypeptide
  REGION 1..118: note = VH of XENP019393
QIQLVQSGSELKKPGASVKVSCKTSGYTFTNYGMNWVRQAPGQGLEWMGWINTYTGEPTYADGFTGRFVFSLDTSVSTAYLQISSLKAEDTAVYFCARGRGMGYFDYWGQGTLVTVSS

SEQ ID NO: 22223 - protein, 5 aa, synthetic construct
  REGION 1..5: note = Description of Artificial Sequence: Synthetic peptide
  REGION 1..5: note = XENP019393 vhCDR1
NYGMN

SEQ ID NO: 22224 - protein, 17 aa, synthetic construct
  REGION 1..17: note = Description of Artificial Sequence: Synthetic peptide
  REGION 1..17: note = XENP019393 vhCDR2
WINTYTGEPTYADGFTG

SEQ ID NO: 22225 - protein, 9 aa, synthetic construct
  REGION 1..9: note = Description of Artificial Sequence: Synthetic peptide
  REGION 1..9: note = XENP019393 vhCDR3
GRGMGYFDY

SEQ ID NO: 22226 - protein, 214 aa, synthetic construct; identical to SEQ ID NO: 21836
  REGION 1..214: note = Description of Artificial Sequence: Synthetic polypeptide
  REGION 1..214: note = XENP019393 11B2_H1_1H11_L1_IgG1_PVA_/S267K Light Chain

SEQ ID NO: 22227 - protein, 107 aa, synthetic construct; identical to SEQ ID NO: 21837
  REGION 1..107: note = Description of Artificial Sequence: Synthetic polypeptide
  REGION 1..107: note = VL of XENP019393

SEQ ID NO: 22228 - protein, 11 aa, synthetic construct
  REGION 1..11: note = Description of Artificial Sequence: Synthetic peptide
  REGION 1..11: note = XENP019393 vlCDR1
RASENIYSNLA

SEQ ID NO: 22229 - protein, 7 aa, synthetic construct
  REGION 1..7: note = Description of Artificial Sequence: Synthetic peptide
  REGION 1..7: note = XENP019393 vlCDR2
AATNLAD

SEQ ID NO: 22230 - protein, 9 aa, synthetic construct
  REGION 1..9: note = Description of Artificial Sequence: Synthetic peptide
  REGION 1..9: note = XENP019393 vlCDR3
QHFWTTPRT

SEQ ID NO: 22231 - protein, 447 aa, synthetic construct
  REGION 1..447: note = Description of Artificial Sequence: Synthetic polypeptide
  REGION 1..447: note = XENP019394 2D4_H1L1_IgG1_PVA_/S267K Heavy Chain
QIQLVQSGSELKKPGASVKVSCKASGYTFTNYGMNWVRQAPGQGLEWMGWINTYTGEPTYADGFTGRFVFSLDTSVSTAYLQISSLKAEDTAVYFCARGRGTGYFDNWGQGTLVTVSSASTKGPSVFPLAPSSKSTSGGTAALGCLVKDYFPEPVTVSWNSGALTSGVHTFPAVLQSSGLYSLSSVVTVPSSSLGTQTYICNVNHKPSDTKVDKKVEPKSCDKTHTCPPCPAPPVAGPSVFLFPPKPKDTLMISRTPEVTCVVVDVKHEDPEVKFNWYVDGVEVHNAKTKPREEEYNSTYRVVSVLTVLHQDWLNGKEYKCKVSNKALPAPIEKTISKAKGQPREPQVYTLPPSREEMTKNQVSLTCDVSGFYPSDIAVEWESDGQPENNYKTTPPVLDSDGSFFLYSKLTVDKSRWEQGDVFSCSVMHEALHNHYTQKSLSLSPGK

SEQ ID NO: 22232 - protein, 118 aa, synthetic construct
  REGION 1..118: note = Description of Artificial Sequence: Synthetic polypeptide
  REGION 1..118: note = VH of XENP019394
QIQLVQSGSELKKPGASVKVSCKASGYTFTNYGMNWVRQAPGQGLEWMGWINTYTGEPTYADGFTGRFVFSLDTSVSTAYLQISSLKAEDTAVYFCARGRGTGYFDNWGQGTLVTVSS

SEQ ID NO: 22233 - protein, 5 aa, synthetic construct
  REGION 1..5: note = Description of Artificial Sequence: Synthetic peptide
  REGION 1..5: note = XENP019394 vhCDR1
NYGMN

SEQ ID NO: 22234 - protein, 17 aa, synthetic construct
  REGION 1..17: note = Description of Artificial Sequence: Synthetic peptide
  REGION 1..17: note = XENP019394 vhCDR2
WINTYTGEPTYADGFTG

SEQ ID NO: 22235 - protein, 9 aa, synthetic construct
  REGION 1..9: note = Description of Artificial Sequence: Synthetic peptide
  REGION 1..9: note = XENP019394 vhCDR3
GRGTGYFDN

SEQ ID NO: 22236 - protein, 214 aa, synthetic construct
  REGION 1..214: note = Description of Artificial Sequence: Synthetic polypeptide
  REGION 1..214: note = XENP019394 2D4_H1L1_IgG1_PVA_/S267K Light Chain
DIQMTQSPSSLSASVGDRVTITCRASENIYSNLAWYQQKPGKSPKLLVYAATNLADGVPSRFSGSGSGTDYTLTISSLQPEDFATYYCQHFWVTPRTFGGGTKVEIKRTVAAPSVFIFPPSDEQLKSGTASVVCLLNNFYPREAKVQWKVDNALQSGNSQESVTEQDSKDSTYSLSSTLTLSKADYEKHKVYACEVTHQGLSSPVTKSFNRGEC

SEQ ID NO: 22237 - protein, 107 aa, synthetic construct
  REGION 1..107: note = Description of Artificial Sequence: Synthetic polypeptide
  REGION 1..107: note = VL of XENP019394
DIQMTQSPSSLSASVGDRVTITCRASENIYSNLAWYQQKPGKSPKLLVYAATNLADGVPSRFSGSGSGTDYTLTISSLQPEDFATYYCQHFWVTPRTFGGGTKVEIK

SEQ ID NO: 22238 - protein, 11 aa, synthetic construct
  REGION 1..11: note = Description of Artificial Sequence: Synthetic peptide
  REGION 1..11: note = XENP019394 vlCDR1
RASENIYSNLA

SEQ ID NO: 22239 - protein, 7 aa, synthetic construct
  REGION 1..7: note = Description of Artificial Sequence: Synthetic peptide
  REGION 1..7: note = XENP019394 vlCDR2
AATNLAD

SEQ ID NO: 22240 - protein, 9 aa, synthetic construct
  REGION 1..9: note = Description of Artificial Sequence: Synthetic peptide
  REGION 1..9: note = XENP019394 vlCDR3
QHFWVTPRT

SEQ ID NO: 22241 - protein, 447 aa, synthetic construct
  REGION 1..447: note = Description of Artificial Sequence: Synthetic polypeptide
  REGION 1..447: note = XENP019395 4H9_H1L1_IgG1_PVA_/S267K Heavy Chain
QIQLVQSGSELKKPGASVKVSCKASEYAFINYGMNWVRQAPGQGLEWMGWINTYTGEPTYADGFTGRFVFSLDTSVSTAYLQISSLKAEDTAVYFCARGRGTGYFDYWGQGTLVTVSSASTKGPSVFPLAPSSKSTSGGTAALGCLVKDYFPEPVTVSWNSGALTSGVHTFPAVLQSSGLYSLSSVVTVPSSSLGTQTYICNVNHKPSDTKVDKKVEPKSCDKTHTCPPCPAPPVAGPSVFLFPPKPKDTLMISRTPEVTCVVVDVKHEDPEVKFNWYVDGVEVHNAKTKPREEEYNSTYRVVSVLTVLHQDWLNGKEYKCKVSNKALPAPIEKTISKAKGQPREPQVYTLPPSREEMTKNQVSLTCDVSGFYPSDIAVEWESDGQPENNYKTTPPVLDSDGSFFLYSKLTVDKSRWEQGDVFSCSVMHEALHNHYTQKSLSLSPGK

SEQ ID NO: 22242 - protein, 118 aa, synthetic construct
  REGION 1..118: note = Description of Artificial Sequence: Synthetic polypeptide
  REGION 1..118: note = VH of XENP019395
QIQLVQSGSELKKPGASVKVSCKASEYAFINYGMNWVRQAPGQGLEWMGWINTYTGEPTYADGFTGRFVFSLDTSVSTAYLQISSLKAEDTAVYFCARGRGTGYFDYWGQGTLVTVSS

SEQ ID NO: 22243 - protein, 5 aa, synthetic construct
  REGION 1..5: note = Description of Artificial Sequence: Synthetic peptide
  REGION 1..5: note = XENP019395 vhCDR1
NYGMN

SEQ ID NO: 22244 - protein, 17 aa, synthetic construct
  REGION 1..17: note = Description of Artificial Sequence: Synthetic peptide
  REGION 1..17: note = XENP019395 vhCDR2
WINTYTGEPTYADGFTG

SEQ ID NO: 22245 - protein, 9 aa, synthetic construct
  REGION 1..9: note = Description of Artificial Sequence: Synthetic peptide
  REGION 1..9: note = XENP019395 vhCDR3
GRGTGYFDY

SEQ ID NO: 22246 - protein, 214 aa, synthetic construct
  REGION 1..214: note = Description of Artificial Sequence: Synthetic polypeptide
  REGION 1..214: note = XENP019395 4H9_H1L1_IgG1_PVA_/S267K Light Chain
DIVMTQSPSSLSASVGDRVTITCRASQDVSTAVAWYQQKPGKSPKLLIYSASYRYTGVPDRFSGSGSGTDFTLTISSLQPEDFATYSCQQHYSTSRTFGGGTKVEIKRTVAAPSVFIFPPSDEQLKSGTASVVCLLNNFYPREAKVQWKVDNALQSGNSQESVTEQDSKDSTYSLSSTLTLSKADYEKHKVYACEVTHQGLSSPVTKSFNRGEC

SEQ ID NO: 22247 - protein, 107 aa, synthetic construct
  REGION 1..107: note = Description of Artificial Sequence: Synthetic polypeptide
  REGION 1..107: note = VL of XENP019395
DIVMTQSPSSLSASVGDRVTITCRASQDVSTAVAWYQQKPGKSPKLLIYSASYRYTGVPDRFSGSGSGTDFTLTISSLQPEDFATYSCQQHYSTSRTFGGGTKVEIK

SEQ ID NO: 22248 - protein, 11 aa, synthetic construct
  REGION 1..11: note = Description of Artificial Sequence: Synthetic peptide
  REGION 1..11: note = XENP019395 vlCDR1
RASQDVSTAVA

SEQ ID NO: 22249 - protein, 7 aa, synthetic construct
  REGION 1..7: note = Description of Artificial Sequence: Synthetic peptide
  REGION 1..7: note = XENP019395 vlCDR2
SASYRYT

SEQ ID NO: 22250 - protein, 9 aa, synthetic construct
  REGION 1..9: note = Description of Artificial Sequence: Synthetic peptide
  REGION 1..9: note = XENP019395 vlCDR3
QQHYSTSRT

SEQ ID NO: 22251 - protein, 447 aa, synthetic construct; identical to SEQ ID NO: 22241
  REGION 1..447: note = Description of Artificial Sequence: Synthetic polypeptide
  REGION 1..447: note = XENP019396 4H9_H1L2_IgG1_PVA_/S267K Heavy Chain

SEQ ID NO: 22252 - protein, 118 aa, synthetic construct; identical to SEQ ID NO: 22242
  REGION 1..118: note = Description of Artificial Sequence: Synthetic polypeptide
  REGION 1..118: note = VH of XENP019396

SEQ ID NO: 22253 - protein, 5 aa, synthetic construct
  REGION 1..5: note = Description of Artificial Sequence: Synthetic peptide
  REGION 1..5: note = XENP019396 vhCDR1
NYGMN

SEQ ID NO: 22254 - protein, 17 aa, synthetic construct
  REGION 1..17: note = Description of Artificial Sequence: Synthetic peptide
  REGION 1..17: note = XENP019396 vhCDR2
WINTYTGEPTYADGFTG

SEQ ID NO: 22255 - protein, 9 aa, synthetic construct
  REGION 1..9: note = Description of Artificial Sequence: Synthetic peptide
  REGION 1..9: note = XENP019396 vhCDR3
GRGTGYFDY

SEQ ID NO: 22256 - protein, 214 aa, synthetic construct
  REGION 1..214: note = Description of Artificial Sequence: Synthetic polypeptide
  REGION 1..214: note = XENP019396 4H9_H1L2_IgG1_PVA_/S267K Light Chain
DIVMTQSPDSLAVSLGERATINCKASQDVSTAVAWYQQKPGQSPKLLIYSASYRYTGVPDRFSGSGSGTDFTLTISSLQAEDVAVYSCQQHYSTSRTFGGGTKVEIKRTVAAPSVFIFPPSDEQLKSGTASVVCLLNNFYPREAKVQWKVDNALQSGNSQESVTEQDSKDSTYSLSSTLTLSKADYEKHKVYACEVTHQGLSSPVTKSFNRGEC

SEQ ID NO: 22257 - protein, 107 aa, synthetic construct
  REGION 1..107: note = Description of Artificial Sequence: Synthetic polypeptide
  REGION 1..107: note = VL of XENP019396
DIVMTQSPDSLAVSLGERATINCKASQDVSTAVAWYQQKPGQSPKLLIYSASYRYTGVPDRFSGSGSGTDFTLTISSLQAEDVAVYSCQQHYSTSRTFGGGTKVEIK

SEQ ID NO: 22258 - protein, 11 aa, synthetic construct
  REGION 1..11: note = Description of Artificial Sequence: Synthetic peptide
  REGION 1..11: note = XENP019396 vlCDR1
KASQDVSTAVA

SEQ ID NO: 22259 - protein, 7 aa, synthetic construct
  REGION 1..7: note = Description of Artificial Sequence: Synthetic peptide
  REGION 1..7: note = XENP019396 vlCDR2
SASYRYT

SEQ ID NO: 22260 - protein, 9 aa, synthetic construct
  REGION 1..9: note = Description of Artificial Sequence: Synthetic peptide
  REGION 1..9: note = XENP019396 vlCDR3
QQHYSTSRT

SEQ ID NO: 22261 - protein, 450 aa, synthetic construct
  REGION 1..450: note = Description of Artificial Sequence: Synthetic polypeptide
  REGION 1..450: note = XENP019401 7G8_H0L0_IgG1_PVA_/S267K Heavy Chain
EVKLEESGGGLVQPGGSMKLSCAASGFTFSDAWMDWVRQSPEKGLEWVAEIRTKANNHATYYAESVKGRFTISRDDSKSSVYLQMNSLRAEDTGIYYCTRLANWDWYFDVWGAGTTVTVSSASTKGPSVFPLAPSSKSTSGGTAALGCLVKDYFPEPVTVSWNSGALTSGVHTFPAVLQSSGLYSLSSVVTVPSSSLGTQTYICNVNHKPSDTKVDKKVEPKSCDKTHTCPPCPAPPVAGPSVFLFPPKPKDTLMISRTPEVTCVVVDVKHEDPEVKFNWYVDGVEVHNAKTKPREEEYNSTYRVVSVLTVLHQDWLNGKEYKCKVSNKALPAPIEKTISKAKGQPREPQVYTLPPSREEMTKNQVSLTCDVSGFYPSDIAVEWESDGQPENNYKTTPPVLDSDGSFFLYSKLTVDKSRWEQGDVFSCSVMHEALHNHYTQKSLSLSPGK

SEQ ID NO: 22262 - protein, 121 aa, synthetic construct
  REGION 1..121: note = Description of Artificial Sequence: Synthetic polypeptide
  REGION 1..121: note = VH of XENP019401
EVKLEESGGGLVQPGGSMKLSCAASGFTFSDAWMDWVRQSPEKGLEWVAEIRTKANNHATYYAESVKGRFTISRDDSKSSVYLQMNSLRAEDTGIYYCTRLANWDWYFDVWGAGTTVTVSS

SEQ ID NO: 22263 - protein, 5 aa, synthetic construct
  REGION 1..5: note = Description of Artificial Sequence: Synthetic peptide
  REGION 1..5: note = XENP019401 vhCDR1
DAWMD

SEQ ID NO: 22264 - protein, 19 aa, synthetic construct
  REGION 1..19: note = Description of Artificial Sequence: Synthetic peptide
  REGION 1..19: note = XENP019401 vhCDR2
EIRTKANNHATYYAESVKG

SEQ ID NO: 22265 - protein, 10 aa, synthetic construct
  REGION 1..10: note = Description of Artificial Sequence: Synthetic peptide
  REGION 1..10: note = XENP019401 vhCDR3
LANWDWYFDV

SEQ ID NO: 22266 - protein, 218 aa, synthetic construct
  REGION 1..218: note = Description of Artificial Sequence: Synthetic polypeptide
  REGION 1..218: note = XENP019401 7G8_H0L0_IgG1_PVA_/S267K Light Chain
DTVLTQSPASLAVSLGQRATISCKASQSVDYDGDSYMNWYQQKPGQPPKLLIYAASNLESGIPARLSGSGSGTDFTLNIHPVEEEDAATYYCQQSNEDPFTFGSGTKLEVKRTVAAPSVFIFPPSDEQLKSGTASVVCLLNNFYPREAKVQWKVDNALQSGNSQESVTEQDSKDSTYSLSSTLTLSKADYEKHKVYACEVTHQGLSSPVTKSFNRGEC

SEQ ID NO: 22267 - protein, 111 aa, synthetic construct
  REGION 1..111: note = Description of Artificial Sequence: Synthetic polypeptide
  REGION 1..111: note = VL of XENP019401
DTVLTQSPASLAVSLGQRATISCKASQSVDYDGDSYMNWYQQKPGQPPKLLIYAASNLESGIPARLSGSGSGTDFTLNIHPVEEEDAATYYCQQSNEDPFTFGSGTKLEVK

SEQ ID NO: 22268 - protein, 15 aa, synthetic construct
  REGION 1..15: note = Description of Artificial Sequence: Synthetic peptide
  REGION 1..15: note = XENP019401 vlCDR1
KASQSVDYDGDSYMN

SEQ ID NO: 22269 - protein, 7 aa, synthetic construct
  REGION 1..7: note = Description of Artificial Sequence: Synthetic peptide
  REGION 1..7: note = XENP019401 vlCDR2
AASNLES

SEQ ID NO: 22270 - protein, 9 aa, synthetic construct
  REGION 1..9: note = Description of Artificial Sequence: Synthetic peptide
  REGION 1..9: note = XENP019401 vlCDR3
QQSNEDPFT

SEQ ID NO: 22271 - protein, 450 aa, synthetic construct
  REGION 1..450: note = Description of Artificial Sequence: Synthetic polypeptide
  REGION 1..450: note = XENP019402 7G8_H1L1_IgG1_PVA_/S267K Heavy Chain
QVQLVQSGAEVKKPGASVKVSCKASGFTFSDAWMDWVRQAPGQGLEWMGEIRTKANNHATYYAEKFQGRVTMTRDDSTSTVYMELSSLRSEDTAVYYCTRLANWDWYFDVWGAGTTVTVSSASTKGPSVFPLAPSSKSTSGGTAALGCLVKDYFPEPVTVSWNSGALTSGVHTFPAVLQSSGLYSLSSVVTVPSSSLGTQTYICNVNHKPSDTKVDKKVEPKSCDKTHTCPPCPAPPVAGPSVFLFPPKPKDTLMISRTPEVTCVVVDVKHEDPEVKFNWYVDGVEVHNAKTKPREEEYNSTYRVVSVLTVLHQDWLNGKEYKCKVSNKALPAPIEKTISKAKGQPREPQVYTLPPSREEMTKNQVSLTCDVSGFYPSDIAVEWESDGQPENNYKTTPPVLDSDGSFFLYSKLTVDKSRWEQGDVFSCSVMHEALHNHYTQKSLSLSPGK

SEQ ID NO: 22272 - protein, 121 aa, synthetic construct
  REGION 1..121: note = Description of Artificial Sequence: Synthetic polypeptide
  REGION 1..121: note = VH of XENP019402
QVQLVQSGAEVKKPGASVKVSCKASGFTFSDAWMDWVRQAPGQGLEWMGEIRTKANNHATYYAEKFQGRVTMTRDDSTSTVYMELSSLRSEDTAVYYCTRLANWDWYFDVWGAGTTVTVSS

SEQ ID NO: 22273 - protein, 5 aa, synthetic construct
  REGION 1..5: note = Description of Artificial Sequence: Synthetic peptide
  REGION 1..5: note = XENP019402 vhCDR1
DAWMD

SEQ ID NO: 22274 - protein, 19 aa, synthetic construct
  REGION 1..19: note = Description of Artificial Sequence: Synthetic peptide
  REGION 1..19: note = XENP019402 vhCDR2
EIRTKANNHATYYAEKFQG

SEQ ID NO: 22275 - protein, 10 aa, synthetic construct
  REGION 1..10: note = Description of Artificial Sequence: Synthetic peptide
  REGION 1..10: note = XENP019402 vhCDR3
LANWDWYFDV

SEQ ID NO: 22276 - protein, 218 aa, synthetic construct
  REGION 1..218: note = Description of Artificial Sequence: Synthetic polypeptide
  REGION 1..218: note = XENP019402 7G8_H1L1_IgG1_PVA_/S267K Light Chain
DTVLTQSPSSLSASVGDRVTITCRASQSVDYDGDSYMNWYQQKPGKPPKLLIYAASNLESGIPARLSGSGSGTDFTLTISSLQPEDFATYYCQQSNEDPFTFGSGTKLEIKRTVAAPSVFIFPPSDEQLKSGTASVVCLLNNFYPREAKVQWKVDNALQSGNSQESVTEQDSKDSTYSLSSTLTLSKADYEKHKVYACEVTHQGLSSPVTKSFNRGEC

SEQ ID NO: 22277 - protein, 111 aa, synthetic construct
  REGION 1..111: note = Description of Artificial Sequence: Synthetic polypeptide
  REGION 1..111: note = VL of XENP019402
DTVLTQSPSSLSASVGDRVTITCRASQSVDYDGDSYMNWYQQKPGKPPKLLIYAASNLESGIPARLSGSGSGTDFTLTISSLQPEDFATYYCQQSNEDPFTFGSGTKLEIK

SEQ ID NO: 22278 - protein, 15 aa, synthetic construct
  REGION 1..15: note = Description of Artificial Sequence: Synthetic peptide
  REGION 1..15: note = XENP019402 vlCDR1
RASQSVDYDGDSYMN

SEQ ID NO: 22279 - protein, 7 aa, synthetic construct
  REGION 1..7: note = Description of Artificial Sequence: Synthetic peptide
  REGION 1..7: note = XENP019402 vlCDR2
AASNLES

SEQ ID NO: 22280 - protein, 9 aa, synthetic construct
  REGION 1..9: note = Description of Artificial Sequence: Synthetic peptide
  REGION 1..9: note = XENP019402 vlCDR3
QQSNEDPFT

SEQ ID NO: 22281 - protein, 450 aa, synthetic construct; identical to SEQ ID NO: 22271
  REGION 1..450: note = Description of Artificial Sequence: Synthetic polypeptide
  REGION 1..450: note = XENP019403 7G8_H1L2_IgG1_PVA_/S267K Heavy Chain

SEQ ID NO: 22282 - protein, 121 aa, synthetic construct; identical to SEQ ID NO: 22272
  REGION 1..121: note = Description of Artificial Sequence: Synthetic polypeptide
  REGION 1..121: note = VH of XENP019403

SEQ ID NO: 22283 - protein, 5 aa, synthetic construct
  REGION 1..5: note = Description of Artificial Sequence: Synthetic peptide
  REGION 1..5: note = XENP019403 vhCDR1
DAWMD

SEQ ID NO: 22284 - protein, 19 aa, synthetic construct
  REGION 1..19: note = Description of Artificial Sequence: Synthetic peptide
  REGION 1..19: note = XENP019403 vhCDR2
EIRTKANNHATYYAEKFQG

SEQ ID NO: 22285 - protein, 10 aa, synthetic construct
  REGION 1..10: note = Description of Artificial Sequence: Synthetic peptide
  REGION 1..10: note = XENP019403 vhCDR3
LANWDWYFDV

SEQ ID NO: 22286 - protein, 218 aa, synthetic construct
  REGION 1..218: note = Description of Artificial Sequence: Synthetic polypeptide
  REGION 1..218: note = XENP019403 7G8_H1L2_IgG1_PVA_/S267K Light Chain
DTVLTQSPATLSLSPGERATLSCRASQSVDYDGDSYMNWYQQKPGQPPRLLIYAASNLESGIPARLSGSGSGTDFTLTISSLEPEDFAVYYCQQSNEDPFTFGSGTKLEIKRTVAAPSVFIFPPSDEQLKSGTASVVCLLNNFYPREAKVQWKVDNALQSGNSQESVTEQDSKDSTYSLSSTLTLSKADYEKHKVYACEVTHQGLSSPVTKSFNRGEC

SEQ ID NO: 22287 - protein, 111 aa, synthetic construct
  REGION 1..111: note = Description of Artificial Sequence: Synthetic polypeptide
  REGION 1..111: note = VL of XENP019403
DTVLTQSPATLSLSPGERATLSCRASQSVDYDGDSYMNWYQQKPGQPPRLLIYAASNLESGIPARLSGSGSGTDFTLTISSLEPEDFAVYYCQQSNEDPFTFGSGTKLEIK

SEQ ID NO: 22288 - protein, 15 aa, synthetic construct
  REGION 1..15: note = Description of Artificial Sequence: Synthetic peptide
  REGION 1..15: note = XENP019403 vlCDR1
RASQSVDYDGDSYMN

SEQ ID NO: 22289 - protein, 7 aa, synthetic construct
  REGION 1..7: note = Description of Artificial Sequence: Synthetic peptide
  REGION 1..7: note = XENP019403 vlCDR2
AASNLES

SEQ ID NO: 22290 - protein, 9 aa, synthetic construct
  REGION 1..9: note = Description of Artificial Sequence: Synthetic peptide
  REGION 1..9: note = XENP019403 vlCDR3
QQSNEDPFT

SEQ ID NO: 22291 - protein, 450 aa, synthetic construct; identical to SEQ ID NO: 22271
  REGION 1..450: note = Description of Artificial Sequence: Synthetic polypeptide
  REGION 1..450: note = XENP019404 7G8_H1L3_IgG1_PVA_/S267K Heavy Chain

SEQ ID NO: 22292 - protein, 121 aa, synthetic construct; identical to SEQ ID NO: 22272
  REGION 1..121: note = Description of Artificial Sequence: Synthetic polypeptide
  REGION 1..121: note = VH of XENP019404

SEQ ID NO: 22293 - protein, 5 aa, synthetic construct
  REGION 1..5: note = Description of Artificial Sequence: Synthetic peptide
  REGION 1..5: note = XENP019404 vhCDR1
DAWMD

SEQ ID NO: 22294 - protein, 19 aa, synthetic construct
  REGION 1..19: note = Description of Artificial Sequence: Synthetic peptide
  REGION 1..19: note = XENP019404 vhCDR2
EIRTKANNHATYYAEKFQG

SEQ ID NO: 22295 - protein, 10 aa, synthetic construct
  REGION 1..10: note = Description of Artificial Sequence: Synthetic peptide
  REGION 1..10: note = XENP019404 vhCDR3
LANWDWYFDV

SEQ ID NO: 22296 - protein, 218 aa, synthetic construct
  REGION 1..218: note = Description of Artificial Sequence: Synthetic polypeptide
  REGION 1..218: note = XENP019404 7G8_H1L3_IgG1_PVA_/S267K Light Chain
DTVLTQSPDSLAVSLGERATINCKASQSVDYDGDSYMNWYQQKPGQPPKLLIYAASNLESGIPARLSGSGSGTDFTLTISSLQAEDVAVYYCQQSNEDPFTFGSGTKLEIKRTVAAPSVFIFPPSDEQLKSGTASVVCLLNNFYPREAKVQWKVDNALQSGNSQESVTEQDSKDSTYSLSSTLTLSKADYEKHKVYACEVTHQGLSSPVTKSFNRGEC

SEQ ID NO: 22297 - protein, 111 aa, synthetic construct
  REGION 1..111: note = Description of Artificial Sequence: Synthetic polypeptide
  REGION 1..111: note = VL of XENP019404
DTVLTQSPDSLAVSLGERATINCKASQSVDYDGDSYMNWYQQKPGQPPKLLIYAASNLESGIPARLSGSGSGTDFTLTISSLQAEDVAVYYCQQSNEDPFTFGSGTKLEIK

SEQ ID NO: 22298 - protein, 15 aa, synthetic construct
  REGION 1..15: note = Description of Artificial Sequence: Synthetic peptide
  REGION 1..15: note = XENP019404 vlCDR1
KASQSVDYDGDSYMN

SEQ ID NO: 22299 - protein, 7 aa, synthetic construct
  REGION 1..7: note = Description of Artificial Sequence: Synthetic peptide
  REGION 1..7: note = XENP019404 vlCDR2
AASNLES

SEQ ID NO: 22300 - protein, 9 aa, synthetic construct
  REGION 1..9: note = Description of Artificial Sequence: Synthetic peptide
  REGION 1..9: note = XENP019404 vlCDR3
QQSNEDPFT

SEQ ID NO: 22301 - protein, 450 aa, synthetic construct
  REGION 1..450: note = Description of Artificial Sequence: Synthetic polypeptide
  REGION 1..450: note = XENP019405 7G8_H2L1_IgG1_PVA_/S267K Heavy Chain
EVQLVESGGGLVQPGGSLRLSCAASGFTFSDAWMDWVRQAPGKGLEWVGEIRTKANNHATYYAESVKGRFTISRDDSKSSVYLQMNSLKTEDTAVYYCTRLANWDWYFDVWGAGTTVTVSSASTKGPSVFPLAPSSKSTSGGTAALGCLVKDYFPEPVTVSWNSGALTSGVHTFPAVLQSSGLYSLSSVVTVPSSSLGTQTYICNVNHKPSDTKVDKKVEPKSCDKTHTCPPCPAPPVAGPSVFLFPPKPKDTLMISRTPEVTCVVVDVKHEDPEVKFNWYVDGVEVHNAKTKPREEEYNSTYRVVSVLTVLHQDWLNGKEYKCKVSNKALPAPIEKTISKAKGQPREPQVYTLPPSREEMTKNQVSLTCDVSGFYPSDIAVEWESDGQPENNYKTTPPVLDSDGSFFLYSKLTVDKSRWEQGDVFSCSVMHEALHNHYTQKSLSLSPGK

SEQ ID NO: 22302 - protein, 121 aa, synthetic construct
  REGION 1..121: note = Description of Artificial Sequence: Synthetic polypeptide
  REGION 1..121: note = VH of XENP019405
EVQLVESGGGLVQPGGSLRLSCAASGFTFSDAWMDWVRQAPGKGLEWVGEIRTKANNHATYYAESVKGRFTISRDDSKSSVYLQMNSLKTEDTAVYYCTRLANWDWYFDVWGAGTTVTVSS

SEQ ID NO: 22303 - protein, 5 aa, synthetic construct
  REGION 1..5: note = Description of Artificial Sequence: Synthetic peptide
  REGION 1..5: note = XENP019405 vhCDR1
DAWMD

SEQ ID NO: 22304 - protein, 19 aa, synthetic construct
  REGION 1..19: note = Description of Artificial Sequence: Synthetic peptide
  REGION 1..19: note = XENP019405 vhCDR2
EIRTKANNHATYYAESVKG

SEQ ID NO: 22305 - protein, 10 aa, synthetic construct
  REGION 1..10: note = Description of Artificial Sequence: Synthetic peptide
  REGION 1..10: note = XENP019405 vhCDR3
LANWDWYFDV

SEQ ID NO: 22306 - protein, 218 aa, synthetic construct; identical to SEQ ID NO: 22276
  REGION 1..218: note = Description of Artificial Sequence: Synthetic polypeptide
  REGION 1..218: note = XENP019405 7G8_H2L1_IgG1_PVA_/S267K Light Chain

SEQ ID NO: 22307 - protein, 111 aa, synthetic construct; identical to SEQ ID NO: 22277
  REGION 1..111: note = Description of Artificial Sequence: Synthetic polypeptide
  REGION 1..111: note = VL of XENP019405

SEQ ID NO: 22308 - protein, 15 aa, synthetic construct
  REGION 1..15: note = Description of Artificial Sequence: Synthetic peptide
  REGION 1..15: note = XENP019405 vlCDR1
RASQSVDYDGDSYMN

SEQ ID NO: 22309 - protein, 7 aa, synthetic construct
  REGION 1..7: note = Description of Artificial Sequence: Synthetic peptide
  REGION 1..7: note = XENP019405 vlCDR2
AASNLES

SEQ ID NO: 22310 - protein, 9 aa, synthetic construct
  REGION 1..9: note = Description of Artificial Sequence: Synthetic peptide
  REGION 1..9: note = XENP019405 vlCDR3
QQSNEDPFT

SEQ ID NO: 22311 - protein, 450 aa, synthetic construct; identical to SEQ ID NO: 22301
  REGION 1..450: note = Description of Artificial Sequence: Synthetic polypeptide
  REGION 1..450: note = XENP019406 7G8_H2L2_IgG1_PVA_/S267K Heavy Chain

SEQ ID NO: 22312 - protein, 121 aa, synthetic construct; identical to SEQ ID NO: 22302
  REGION 1..121: note = Description of Artificial Sequence: Synthetic polypeptide
  REGION 1..121: note = VH of XENP019406

SEQ ID NO: 22313 - protein, 5 aa, synthetic construct
  REGION 1..5: note = Description of Artificial Sequence: Synthetic peptide
  REGION 1..5: note = XENP019406 vhCDR1
DAWMD

SEQ ID NO: 22314 - protein, 19 aa, synthetic construct
  REGION 1..19: note = Description of Artificial Sequence: Synthetic peptide
  REGION 1..19: note = XENP019406 vhCDR2
EIRTKANNHATYYAESVKG

SEQ ID NO: 22315 - protein, 10 aa, synthetic construct
  REGION 1..10: note = Description of Artificial Sequence: Synthetic peptide
  REGION 1..10: note = XENP019406 vhCDR3
LANWDWYFDV

SEQ ID NO: 22316 - protein, 218 aa, synthetic construct; identical to SEQ ID NO: 22286
  REGION 1..218: note = Description of Artificial Sequence: Synthetic polypeptide
  REGION 1..218: note = XENP019406 7G8_H2L2_IgG1_PVA_/S267K Light Chain

SEQ ID NO: 22317 - protein, 111 aa, synthetic construct; identical to SEQ ID NO: 22287
  REGION 1..111: note = Description of Artificial Sequence: Synthetic polypeptide
  REGION 1..111: note = VL of XENP019406

SEQ ID NO: 22318 - protein, 15 aa, synthetic construct
  REGION 1..15: note = Description of Artificial Sequence: Synthetic peptide
  REGION 1..15: note = XENP019406 vlCDR1
RASQSVDYDGDSYMN

SEQ ID NO: 22319 - protein, 7 aa, synthetic construct
  REGION 1..7: note = Description of Artificial Sequence: Synthetic peptide
  REGION 1..7: note = XENP019406 vlCDR2
AASNLES

SEQ ID NO: 22320 - protein, 9 aa, synthetic construct
  REGION 1..9: note = Description of Artificial Sequence: Synthetic peptide
  REGION 1..9: note = XENP019406 vlCDR3
QQSNEDPFT

SEQ ID NO: 22321 - protein, 450 aa, synthetic construct; identical to SEQ ID NO: 22301
  REGION 1..450: note = Description of Artificial Sequence: Synthetic polypeptide
  REGION 1..450: note = XENP019407 7G8_H2L3_IgG1_PVA_/S267K Heavy Chain

SEQ ID NO: 22322 - protein, 121 aa, synthetic construct; identical to SEQ ID NO: 22302
  REGION 1..121: note = Description of Artificial Sequence: Synthetic polypeptide
  REGION 1..121: note = VH of XENP019407

SEQ ID NO: 22323 - protein, 5 aa, synthetic construct
  REGION 1..5: note = Description of Artificial Sequence: Synthetic peptide
  REGION 1..5: note = XENP019407 vhCDR1
DAWMD

SEQ ID NO: 22324 - protein, 19 aa, synthetic construct
  REGION 1..19: note = Description of Artificial Sequence: Synthetic peptide
  REGION 1..19: note = XENP019407 vhCDR2
EIRTKANNHATYYAESVKG

SEQ ID NO: 22325 - protein, 10 aa, synthetic construct
  REGION 1..10: note = Description of Artificial Sequence: Synthetic peptide
  REGION 1..10: note = XENP019407 vhCDR3
LANWDWYFDV

SEQ ID NO: 22326 - protein, 218 aa, synthetic construct; identical to SEQ ID NO: 22296
  REGION 1..218: note = Description of Artificial Sequence: Synthetic polypeptide
  REGION 1..218: note = XENP019407 7G8_H2L3_IgG1_PVA_/S267K Light Chain

SEQ ID NO: 22327 - protein, 111 aa, synthetic construct; identical to SEQ ID NO: 22297
  REGION 1..111: note = Description of Artificial Sequence: Synthetic polypeptide
  REGION 1..111: note = VL of XENP019407

SEQ ID NO: 22328 - protein, 15 aa, synthetic construct
  REGION 1..15: note = Description of Artificial Sequence: Synthetic peptide
  REGION 1..15: note = XENP019407 vlCDR1
KASQSVDYDGDSYMN

SEQ ID NO: 22329 - protein, 7 aa, synthetic construct
  REGION 1..7: note = Description of Artificial Sequence: Synthetic peptide
  REGION 1..7: note = XENP019407 vlCDR2
AASNLES

SEQ ID NO: 22330 - protein, 9 aa, synthetic construct
  REGION 1..9: note = Description of Artificial Sequence: Synthetic peptide
  REGION 1..9: note = XENP019407 vlCDR3
QQSNEDPFT

SEQ ID NO: 22331 - protein, 446 aa, synthetic construct
  REGION 1..446: note = Description of Artificial Sequence: Synthetic polypeptide
  REGION 1..446: note = XENP019408 11C12_H1L1_IgG1_PVA_/S267K Heavy Chain
EVQLVESGGGLVQPGGSLRLSCAASGFTFSSFGMHWVRQAPGKGLEWVSYISSDSSTFSYADSVKGRFTISRDNAKNSLYLQMNSLRAEDTAVYYCARYYYGYVDFWGQGTTVTVSSASTKGPSVFPLAPSSKSTSGGTAALGCLVKDYFPEPVTVSWNSGALTSGVHTFPAVLQSSGLYSLSSVVTVPSSSLGTQTYICNVNHKPSDTKVDKKVEPKSCDKTHTCPPCPAPPVAGPSVFLFPPKPKDTLMISRTPEVTCVVVDVKHEDPEVKFNWYVDGVEVHNAKTKPREEEYNSTYRVVSVLTVLHQDWLNGKEYKCKVSNKALPAPIEKTISKAKGQPREPQVYTLPPSREEMTKNQVSLTCDVSGFYPSDIAVEWESDGQPENNYKTTPPVLDSDGSFFLYSKLTVDKSRWEQGDVFSCSVMHEALHNHYTQKSLSLSPGK

SEQ ID NO: 22332 - protein, 117 aa, synthetic construct
  REGION 1..117: note = Description of Artificial Sequence: Synthetic polypeptide
  REGION 1..117: note = VH of XENP019408
EVQLVESGGGLVQPGGSLRLSCAASGFTFSSFGMHWVRQAPGKGLEWVSYISSDSSTFSYADSVKGRFTISRDNAKNSLYLQMNSLRAEDTAVYYCARYYYGYVDFWGQGTTVTVSS

SEQ ID NO: 22333 - protein, 5 aa, synthetic construct
  REGION 1..5: note = Description of Artificial Sequence: Synthetic peptide
  REGION 1..5: note = XENP019408 vhCDR1
SFGMH

SEQ ID NO: 22334 - protein, 17 aa, synthetic construct
  REGION 1..17: note = Description of Artificial Sequence: Synthetic peptide
  REGION 1..17: note = XENP019408 vhCDR2
YISSDSSTFSYADSVKG

SEQ ID NO: 22335 - protein, 8 aa, synthetic construct
  REGION 1..8: note = Description of Artificial Sequence: Synthetic peptide
  REGION 1..8: note = XENP019408 vhCDR3
YYYGYVDF

SEQ ID NO: 22336 - protein, 214 aa, synthetic construct
  REGION 1..214: note = Description of Artificial Sequence: Synthetic polypeptide
  REGION 1..214: note = XENP019408 11C12_H1L1_IgG1_PVA_/S267K Light Chain
DIQMTQSPSSLSASVGDRVTITCRASEDIYNRLAWYQQKPGKAPKLLISGATSFETGVPSRFSGSGSGKDYTLTISSLQPEDFATYYCQQYWSTPWTFGGGTKVEIKRTVAAPSVFIFPPSDEQLKSGTASVVCLLNNFYPREAKVQWKVDNALQSGNSQESVTEQDSKDSTYSLSSTLTLSKADYEKHKVYACEVTHQGLSSPVTKSFNRGEC

SEQ ID NO: 22337 - protein, 107 aa, synthetic construct
  REGION 1..107: note = Description of Artificial Sequence: Synthetic polypeptide
  REGION 1..107: note = VL of XENP019408
DIQMTQSPSSLSASVGDRVTITCRASEDIYNRLAWYQQKPGKAPKLLISGATSFETGVPSRFSGSGSGKDYTLTISSLQPEDFATYYCQQYWSTPWTFGGGTKVEIK

SEQ ID NO: 22338 - protein, 11 aa, synthetic construct
  REGION 1..11: note = Description of Artificial Sequence: Synthetic peptide
  REGION 1..11: note = XENP019408 vlCDR1
RASEDIYNRLA

SEQ ID NO: 22339 - protein, 7 aa, synthetic construct
  REGION 1..7: note = Description of Artificial Sequence: Synthetic peptide
  REGION 1..7: note = XENP019408 vlCDR2
GATSFET

SEQ ID NO: 22340 - protein, 9 aa, synthetic construct
  REGION 1..9: note = Description of Artificial Sequence: Synthetic peptide
  REGION 1..9: note = XENP019408 vlCDR3
QQYWSTPWT

SEQ ID NO: 22341 - protein, 447 aa, synthetic construct; identical to SEQ ID NO: 2885
  REGION 1..447: note = Description of Artificial Sequence: Synthetic polypeptide
  REGION 1..447: note = XENP020023 2A11_H1L0_IgG1_PVA_/S267K Heavy Chain

SEQ ID NO: 22342 - protein, 118 aa, synthetic construct; identical to SEQ ID NO: 2686
  REGION 1..118: note = Description of Artificial Sequence: Synthetic polypeptide
  REGION 1..118: note = VH of XENP020023

SEQ ID NO: 22343 - protein, 5 aa, synthetic construct
  REGION 1..5: note = Description of Artificial Sequence: Synthetic peptide
  REGION 1..5: note = XENP020023 vhCDR1
DYYMH

SEQ ID NO: 22344 - protein, 17 aa, synthetic construct
  REGION 1..17: note = Description of Artificial Sequence: Synthetic peptide
  REGION 1..17: note = XENP020023 vhCDR2
WIDPENGDTEYAPKFQG

SEQ ID NO: 22345 - protein, 9 aa, synthetic construct
  REGION 1..9: note = Description of Artificial Sequence: Synthetic peptide
  REGION 1..9: note = XENP020023 vhCDR3
RGVRQALDY

SEQ ID NO: 22346 - protein, 214 aa, synthetic construct; identical to SEQ ID NO: 21906
  REGION 1..214: note = Description of Artificial Sequence: Synthetic polypeptide
  REGION 1..214: note = XENP020023 2A11_H1L0_IgG1_PVA_/S267K Light Chain

SEQ ID NO: 22347 - protein, 107 aa, synthetic construct; identical to SEQ ID NO: 21907
  REGION 1..107: note = Description of Artificial Sequence: Synthetic polypeptide
  REGION 1..107: note = VL of XENP020023

SEQ ID NO: 22348 - protein, 11 aa, synthetic construct
  REGION 1..11: note = Description of Artificial Sequence: Synthetic peptide
  REGION 1..11: note = XENP020023 vlCDR1
RASQDIGNYLN

SEQ ID NO: 22349 - protein, 7 aa, synthetic construct
  REGION 1..7: note = Description of Artificial Sequence: Synthetic peptide
  REGION 1..7: note = XENP020023 vlCDR2
YTSRLHS

SEQ ID NO: 22350 - protein, 9 aa, synthetic construct
  REGION 1..9: note = Description of Artificial Sequence: Synthetic peptide
  REGION 1..9: note = XENP020023 vlCDR3
QQGNTLPYT

SEQ ID NO: 22351 - protein, 447 aa, synthetic construct; identical to SEQ ID NO: 21901
  REGION 1..447: note = Description of Artificial Sequence: Synthetic polypeptide
  REGION 1..447: note = XENP020024 2A11_H0L1_IgG1_PVA_/S267K Heavy Chain

SEQ ID NO: 22352 - protein, 118 aa, synthetic construct; identical to SEQ ID NO: 21902
  REGION 1..118: note = Description of Artificial Sequence: Synthetic polypeptide
  REGION 1..118: note = VH of XENP020024

SEQ ID NO: 22353 - protein, 5 aa, synthetic construct
  REGION 1..5: note = Description of Artificial Sequence: Synthetic peptide
  REGION 1..5: note = XENP020024 vhCDR1
DYYMH

SEQ ID NO: 22354 - protein, 17 aa, synthetic construct
  REGION 1..17: note = Description of Artificial Sequence: Synthetic peptide
  REGION 1..17: note = XENP020024 vhCDR2
WIDPENGDTEYAPKFQG

SEQ ID NO: 22355 - protein, 9 aa, synthetic construct
  REGION 1..9: note = Description of Artificial Sequence: Synthetic peptide
  REGION 1..9: note = XENP020024 vhCDR3
RGVRQALDY

SEQ ID NO: 22356 - protein, 214 aa, synthetic construct; identical to SEQ ID NO: 21916
  REGION 1..214: note = Description of Artificial Sequence: Synthetic polypeptide
  REGION 1..214: note = XENP020024 2A11_H0L1_IgG1_PVA_/S267K Light Chain

SEQ ID NO: 22357 - protein, 107 aa, synthetic construct; identical to SEQ ID NO: 21917
  REGION 1..107: note = Description of Artificial Sequence: Synthetic polypeptide
  REGION 1..107: note = VL of XENP020024

SEQ ID NO: 22358 - protein, 11 aa, synthetic construct
  REGION 1..11: note = Description of Artificial Sequence: Synthetic peptide
  REGION 1..11: note = XENP020024 vlCDR1
RASQDIGNYLN

SEQ ID NO: 22359 - protein, 7 aa, synthetic construct
  REGION 1..7: note = Description of Artificial Sequence: Synthetic peptide
  REGION 1..7: note = XENP020024 vlCDR2
YTSRLHS

SEQ ID NO: 22360 - protein, 9 aa, synthetic construct
  REGION 1..9: note = Description of Artificial Sequence: Synthetic peptide
  REGION 1..9: note = XENP020024 vlCDR3
QQGNTLPYT

SEQ ID NO: 22361 - protein, 445 aa, synthetic construct; identical to SEQ ID NO: 22131
  REGION 1..445: note = Description of Artificial Sequence: Synthetic polypeptide
  REGION 1..445: note = XENP020025 7A6_H1L0_IgG1_PVA_/S267K Heavy Chain

SEQ ID NO: 22362 - protein, 116 aa, synthetic construct; identical to SEQ ID NO: 22132
  REGION 1..116: note = Description of Artificial Sequence: Synthetic polypeptide
  REGION 1..116: note = VH of XENP020025

SEQ ID NO: 22363 - protein, 6 aa, synthetic construct
  REGION 1..6: note = Description of Artificial Sequence: Synthetic peptide
  REGION 1..6: note = XENP020025 vhCDR1
SGYFWN

SEQ ID NO: 22364 - protein, 15 aa, synthetic construct
  REGION 1..15: note = Description of Artificial Sequence: Synthetic peptide
  REGION 1..15: note = XENP020025 vhCDR2
YISYDSNYYNPSVKG

SEQ ID NO: 22365 - protein, 8 aa, synthetic construct
  REGION 1..8: note = Description of Artificial Sequence: Synthetic peptide
  REGION 1..8: note = XENP020025 vhCDR3
GGITTFDY

SEQ ID NO: 22366 - protein, 218 aa, synthetic construct; identical to SEQ ID NO: 22126
  REGION 1..218: note = Description of Artificial Sequence: Synthetic polypeptide
  REGION 1..218: note = XENP020025 7A6_H1L0_IgG1_PVA_/S267K Light Chain

SEQ ID NO: 22367 - protein, 111 aa, synthetic construct; identical to SEQ ID NO: 22127
  REGION 1..111: note = Description of Artificial Sequence: Synthetic polypeptide
  REGION 1..111: note = VL of XENP020025

SEQ ID NO: 22368 - protein, 15 aa, synthetic construct
  REGION 1..15: note = Description of Artificial Sequence: Synthetic peptide
  REGION 1..15: note = XENP020025 vlCDR1
KASQSVDYDGDSYMN

SEQ ID NO: 22369 - protein, 7 aa, synthetic construct
  REGION 1..7: note = Description of Artificial Sequence: Synthetic peptide
  REGION 1..7: note = XENP020025 vlCDR2
AASNLES

SEQ ID NO: 22370 - protein, 9 aa, synthetic construct
  REGION 1..9: note = Description of Artificial Sequence: Synthetic peptide
  REGION 1..9: note = XENP020025 vlCDR3
QQSNEDPRT

SEQ ID NO: 22371 - protein, 445 aa, synthetic construct; identical to SEQ ID NO: 22121
  REGION 1..445: note = Description of Artificial Sequence: Synthetic polypeptide
  REGION 1..445: note = XENP020026 7A6_H0L1_IgG1_PVA_/S267K Heavy Chain

SEQ ID NO: 22372 - protein, 116 aa, synthetic construct; identical to SEQ ID NO: 22122
  REGION 1..116: note = Description of Artificial Sequence: Synthetic polypeptide
  REGION 1..116: note = VH of XENP020026

SEQ ID NO: 22373 - protein, 6 aa, synthetic construct
  REGION 1..6: note = Description of Artificial Sequence: Synthetic peptide
  REGION 1..6: note = XENP020026 vhCDR1
SGYFWN

SEQ ID NO: 22374 - protein, 15 aa, synthetic construct
  REGION 1..15: note = Description of Artificial Sequence: Synthetic peptide
  REGION 1..15: note = XENP020026 vhCDR2
YISYDSNYYNPSLKN

SEQ ID NO: 22375 - protein, 8 aa, synthetic construct
  REGION 1..8: note = Description of Artificial Sequence: Synthetic peptide
  REGION 1..8: note = XENP020026 vhCDR3
GGITTFDY

SEQ ID NO: 22376 - protein, 218 aa, synthetic construct; identical to SEQ ID NO: 22136
  REGION 1..218: note = Description of Artificial Sequence: Synthetic polypeptide
  REGION 1..218: note = XENP020026 7A6_H0L1_IgG1_PVA_/S267K Light Chain

SEQ ID NO: 22377 - protein, 111 aa, synthetic construct; identical to SEQ ID NO: 22137
  REGION 1..111: note = Description of Artificial Sequence: Synthetic polypeptide
  REGION 1..111: note = VL of XENP020026

SEQ ID NO: 22378 - protein, 15 aa, synthetic construct
  REGION 1..15: note = Description of Artificial Sequence: Synthetic peptide
  REGION 1..15: note = XENP020026 vlCDR1
RASQSVDYDGDSYMN

SEQ ID NO: 22379 - protein, 7 aa, synthetic construct
  REGION 1..7: note = Description of Artificial Sequence: Synthetic peptide
  REGION 1..7: note = XENP020026 vlCDR2
AASNLES

SEQ ID NO: 22380 - protein, 9 aa, synthetic construct
  REGION 1..9: note = Description of Artificial Sequence: Synthetic peptide
  REGION 1..9: note = XENP020026 vlCDR3
QQSNEDPRT

SEQ ID NO: 22381 - protein, 445 aa, synthetic construct; identical to SEQ ID NO: 22121
  REGION 1..445: note = Description of Artificial Sequence: Synthetic polypeptide
  REGION 1..445: note = XENP020027 7A6_H0L3_IgG1_PVA_/S267K Heavy Chain

SEQ ID NO: 22382 - protein, 116 aa, synthetic construct; identical to SEQ ID NO: 22122
  REGION 1..116: note = Description of Artificial Sequence: Synthetic polypeptide
  REGION 1..116: note = VH of XENP020027

SEQ ID NO: 22383 - protein, 6 aa, synthetic construct
  REGION 1..6: note = Description of Artificial Sequence: Synthetic peptide
  REGION 1..6: note = XENP020027 vhCDR1
SGYFWN

SEQ ID NO: 22384 - protein, 15 aa, synthetic construct
  REGION 1..15: note = Description of Artificial Sequence: Synthetic peptide
  REGION 1..15: note = XENP020027 vhCDR2
YISYDSNYYNPSLKN

SEQ ID NO: 22385 - protein, 8 aa, synthetic construct
  REGION 1..8: note = Description of Artificial Sequence: Synthetic peptide
  REGION 1..8: note = XENP020027 vhCDR3
GGITTFDY

SEQ ID NO: 22386 - protein, 218 aa, synthetic construct; identical to SEQ ID NO: 22156
  REGION 1..218: note = Description of Artificial Sequence: Synthetic polypeptide
  REGION 1..218: note = XENP020027 7A6_H0L3_IgG1_PVA_/S267K Light Chain

SEQ ID NO: 22387 - protein, 111 aa, synthetic construct; identical to SEQ ID NO: 22157
  REGION 1..111: note = Description of Artificial Sequence: Synthetic polypeptide
  REGION 1..111: note = VL of XENP020027

SEQ ID NO: 22388 - protein, 15 aa, synthetic construct
  REGION 1..15: note = Description of Artificial Sequence: Synthetic peptide
  REGION 1..15: note = XENP020027 vlCDR1
KASQSVDYDGDSYMN

SEQ ID NO: 22389 - protein, 7 aa, synthetic construct
  REGION 1..7: note = Description of Artificial Sequence: Synthetic peptide
  REGION 1..7: note = XENP020027 vlCDR2
AASNLES

SEQ ID NO: 22390 - protein, 9 aa, synthetic construct
  REGION 1..9: note = Description of Artificial Sequence: Synthetic peptide
  REGION 1..9: note = XENP020027 vlCDR3
QQSNEDPRT

SEQ ID NO: 22391 - protein, 450 aa, synthetic construct; identical to SEQ ID NO: 22271
  REGION 1..450: note = Description of Artificial Sequence: Synthetic polypeptide
  REGION 1..450: note = XENP020028 7G8_H1L0_IgG1_PVA_/S267K Heavy Chain

SEQ ID NO: 22392 - protein, 121 aa, synthetic construct; identical to SEQ ID NO: 22272
  REGION 1..121: note = Description of Artificial Sequence: Synthetic polypeptide
  REGION 1..121: note = VH of XENP020028

SEQ ID NO: 22393 - protein, 5 aa, synthetic construct
  REGION 1..5: note = Description of Artificial Sequence: Synthetic peptide
  REGION 1..5: note = XENP020028 vhCDR1
DAWMD

SEQ ID NO: 22394 - protein, 19 aa, synthetic construct
  REGION 1..19: note = Description of Artificial Sequence: Synthetic peptide
  REGION 1..19: note = XENP020028 vhCDR2
EIRTKANNHATYYAEKFQG

SEQ ID NO: 22395 - protein, 10 aa, synthetic construct
  REGION 1..10: note = Description of Artificial Sequence: Synthetic peptide
  REGION 1..10: note = XENP020028 vhCDR3
LANWDWYFDV

SEQ ID NO: 22396 - protein, 218 aa, synthetic construct; identical to SEQ ID NO: 22266
  REGION 1..218: note = Description of Artificial Sequence: Synthetic polypeptide
  REGION 1..218: note = XENP020028 7G8_H1L0_IgG1_PVA_/S267K Light Chain

SEQ ID NO: 22397 - protein, 111 aa, synthetic construct; identical to SEQ ID NO: 22267
  REGION 1..111: note = Description of Artificial Sequence: Synthetic polypeptide
  REGION 1..111: note = VL of XENP020028

SEQ ID NO: 22398 - protein, 15 aa, synthetic construct
  REGION 1..15: note = Description of Artificial Sequence: Synthetic peptide
  REGION 1..15: note = XENP020028 vlCDR1
KASQSVDYDGDSYMN

SEQ ID NO: 22399 - protein, 7 aa, synthetic construct
  REGION 1..7: note = Description of Artificial Sequence: Synthetic peptide
  REGION 1..7: note = XENP020028 vlCDR2
AASNLES

SEQ ID NO: 22400 - protein, 9 aa, synthetic construct
  REGION 1..9: note = Description of Artificial Sequence: Synthetic peptide
  REGION 1..9: note = XENP020028 vlCDR3
QQSNEDPFT

SEQ ID NO: 22401 - protein, 450 aa, synthetic construct; identical to SEQ ID NO: 22261
  REGION 1..450: note = Description of Artificial Sequence: Synthetic polypeptide
  REGION 1..450: note = XENP020029 7G8_H0L1_IgG1_PVA_/S267K Heavy Chain

SEQ ID NO: 22402 - protein, 121 aa, synthetic construct; identical to SEQ ID NO: 22262
  REGION 1..121: note = Description of Artificial Sequence: Synthetic polypeptide
  REGION 1..121: note = VH of XENP020029

SEQ ID NO: 22403 - protein, 5 aa, synthetic construct
  REGION 1..5: note = Description of Artificial Sequence: Synthetic peptide
  REGION 1..5: note = XENP020029 vhCDR1
DAWMD

SEQ ID NO: 22404 - protein, 19 aa, synthetic construct
  REGION 1..19: note = Description of Artificial Sequence: Synthetic peptide
  REGION 1..19: note = XENP020029 vhCDR2
EIRTKANNHATYYAESVKG

SEQ ID NO: 22405 - protein, 10 aa, synthetic construct
  REGION 1..10: note = Description of Artificial Sequence: Synthetic peptide
  REGION 1..10: note = XENP020029 vhCDR3
LANWDWYFDV

SEQ ID NO: 22406 - protein, 218 aa, synthetic construct; identical to SEQ ID NO: 22276
  REGION 1..218: note = Description of Artificial Sequence: Synthetic polypeptide
  REGION 1..218: note = XENP020029 7G8_H0L1_IgG1_PVA_/S267K Light Chain

SEQ ID NO: 22407 - protein, 111 aa, synthetic construct; identical to SEQ ID NO: 22277
  REGION 1..111: note = Description of Artificial Sequence: Synthetic polypeptide
  REGION 1..111: note = VL of XENP020029

SEQ ID NO: 22408 - protein, 15 aa, synthetic construct
  REGION 1..15: note = Description of Artificial Sequence: Synthetic peptide
  REGION 1..15: note = XENP020029 vlCDR1
RASQSVDYDGDSYMN

SEQ ID NO: 22409 - protein, 7 aa, synthetic construct
  REGION 1..7: note = Description of Artificial Sequence: Synthetic peptide
  REGION 1..7: note = XENP020029 vlCDR2
AASNLES

SEQ ID NO: 22410 - protein, 9 aa, synthetic construct
  REGION 1..9: note = Description of Artificial Sequence: Synthetic peptide
  REGION 1..9: note = XENP020029 vlCDR3
QQSNEDPFT

SEQ ID NO: 22411 - protein, 450 aa, synthetic construct; identical to SEQ ID NO: 22301
  REGION 1..450: note = Description of Artificial Sequence: Synthetic polypeptide
  REGION 1..450: note = XENP020262 7G8_H2L0_IgG1_PVA_/S267K Heavy Chain

SEQ ID NO: 22412 - protein, 121 aa, synthetic construct; identical to SEQ ID NO: 22302
  REGION 1..121: note = Description of Artificial Sequence: Synthetic polypeptide
  REGION 1..121: note = VH of XENP020262

SEQ ID NO: 22413 - protein, 5 aa, synthetic construct
  REGION 1..5: note = Description of Artificial Sequence: Synthetic peptide
  REGION 1..5: note = XENP020262 vhCDR1
DAWMD

SEQ ID NO: 22414 - protein, 19 aa, synthetic construct
  REGION 1..19: note = Description of Artificial Sequence: Synthetic peptide
  REGION 1..19: note = XENP020262 vhCDR2
EIRTKANNHATYYAESVKG

SEQ ID NO: 22415 - protein, 10 aa, synthetic construct
  REGION 1..10: note = Description of Artificial Sequence: Synthetic peptide
  REGION 1..10: note = XENP020262 vhCDR3
LANWDWYFDV

SEQ ID NO: 22416 - protein, 218 aa, synthetic construct; identical to SEQ ID NO: 22266
  REGION 1..218: note = Description of Artificial Sequence: Synthetic polypeptide
  REGION 1..218: note = XENP020262 7G8_H2L0_IgG1_PVA_/S267K Light Chain

SEQ ID NO: 22417 - protein, 111 aa, synthetic construct; identical to SEQ ID NO: 22267
  REGION 1..111: note = Description of Artificial Sequence: Synthetic polypeptide
  REGION 1..111: note = VL of XENP020262

SEQ ID NO: 22418 - protein, 15 aa, synthetic construct
  REGION 1..15: note = Description of Artificial Sequence: Synthetic peptide
  REGION 1..15: note = XENP020262 vlCDR1
KASQSVDYDGDSYMN

SEQ ID NO: 22419 - protein, 7 aa, synthetic construct
  REGION 1..7: note = Description of Artificial Sequence: Synthetic peptide
  REGION 1..7: note = XENP020262 vlCDR2
AASNLES

SEQ ID NO: 22420 - protein, 9 aa, synthetic construct
  REGION 1..9: note = Description of Artificial Sequence: Synthetic peptide
  REGION 1..9: note = XENP020262 vlCDR3
QQSNEDPFT

SEQ ID NO: 22421 - protein, 450 aa, synthetic construct; identical to SEQ ID NO: 22261
  REGION 1..450: note = Description of Artificial Sequence: Synthetic polypeptide
  REGION 1..450: note = XENP020263 7G8_H0L2_IgG1_PVA_/S267K Heavy Chain

SEQ ID NO: 22422 - protein, 121 aa, synthetic construct; identical to SEQ ID NO: 22262
  REGION 1..121: note = Description of Artificial Sequence: Synthetic polypeptide
  REGION 1..121: note = VH of XENP020263

SEQ ID NO: 22423 - protein, 5 aa, synthetic construct
  REGION 1..5: note = Description of Artificial Sequence: Synthetic peptide
  REGION 1..5: note = XENP020263 vhCDR1
DAWMD

SEQ ID NO: 22424 - protein, 19 aa, synthetic construct
  REGION 1..19: note = Description of Artificial Sequence: Synthetic peptide
  REGION 1..19: note = XENP020263 vhCDR2
EIRTKANNHATYYAESVKG

SEQ ID NO: 22425 - protein, 10 aa, synthetic construct
  REGION 1..10: note = Description of Artificial Sequence: Synthetic peptide
  REGION 1..10: note = XENP020263 vhCDR3
LANWDWYFDV

SEQ ID NO: 22426 - protein, 218 aa, synthetic construct; identical to SEQ ID NO: 22286
  REGION 1..218: note = Description of Artificial Sequence: Synthetic polypeptide
  REGION 1..218: note = XENP020263 7G8_H0L2_IgG1_PVA_/S267K Light Chain

SEQ ID NO: 22427 - protein, 111 aa, synthetic construct; identical to SEQ ID NO: 22287
  REGION 1..111: note = Description of Artificial Sequence: Synthetic polypeptide
  REGION 1..111: note = VL of XENP020263

SEQ ID NO: 22428 - protein, 15 aa, synthetic construct
  REGION 1..15: note = Description of Artificial Sequence: Synthetic peptide
  REGION 1..15: note = XENP020263 vlCDR1
RASQSVDYDGDSYMN

SEQ ID NO: 22429 - protein, 7 aa, synthetic construct
  REGION 1..7: note = Description of Artificial Sequence: Synthetic peptide
  REGION 1..7: note = XENP020263 vlCDR2
AASNLES

SEQ ID NO: 22430 - protein, 9 aa, synthetic construct
  REGION 1..9: note = Description of Artificial Sequence: Synthetic peptide
  REGION 1..9: note = XENP020263 vlCDR3
QQSNEDPFT

SEQ ID NO: 22431 - protein, 444 aa, synthetic construct
  REGION 1..444: note = Description of Artificial Sequence: Synthetic polypeptide
  REGION 1..444: note = XENP020412 8D7_H0L0_IgG1_PVA_/S267K Heavy Chain
QVQLKQSGPGLVQPSQSLSITCTVSGFSLSSYGVHWVRQSPGKGLEWLGVIWSGSTDYNAAFISRLSISKDNSKSQVFFKMNSLQPNDTAIYYCARTYYYAMDYWGQGTSVTVSSASTKGPSVFPLAPSSKSTSGGTAALGCLVKDYFPEPVTVSWNSGALTSGVHTFPAVLQSSGLYSLSSVVTVPSSSLGTQTYICNVNHKPSNTKVDKKVEPKSCDKTHTCPPCPAPPVAGPSVFLFPPKPKDTLMISRTPEVTCVVVDVKHEDPEVKFNWYVDGVEVHNAKTKPREEQYNSTYRVVSVLTVLHQDWLNGKEYKCKVSNKALPAPIEKTISKAKGQPREPQVYTLPPSREEMTKNQVSLTCLVKGFYPSDIAVEWESNGQPENNYKTTPPVLDSDGSFFLYSKLTVDKSRWQQGNVFSCSVMHEALHNHYTQKSLSLSPGK

SEQ ID NO: 22432 - protein, 115 aa, synthetic construct
  REGION 1..115: note = Description of Artificial Sequence: Synthetic polypeptide
  REGION 1..115: note = VH of XENP020412
QVQLKQSGPGLVQPSQSLSITCTVSGFSLSSYGVHWVRQSPGKGLEWLGVIWSGSTDYNAAFISRLSISKDNSKSQVFFKMNSLQPNDTAIYYCARTYYYAMDYWGQGTSVTVSS

SEQ ID NO: 22433 - protein, 5 aa, synthetic construct
  REGION 1..5: note = Description of Artificial Sequence: Synthetic peptide
  REGION 1..5: note = XENP020412 vhCDR1
SYGVH

SEQ ID NO: 22434 - protein, 15 aa, synthetic construct
  REGION 1..15: note = Description of Artificial Sequence: Synthetic peptide
  REGION 1..15: note = XENP020412 vhCDR2
VIWSGSTDYNAAFIS

SEQ ID NO: 22435 - protein, 8 aa, synthetic construct
  REGION 1..8: note = Description of Artificial Sequence: Synthetic peptide
  REGION 1..8: note = XENP020412 vhCDR3
TYYYAMDY

SEQ ID NO: 22436 - protein, 214 aa, synthetic construct
  REGION 1..214: note = Description of Artificial Sequence: Synthetic polypeptide
  REGION 1..214: note = XENP020412 8D7_H0L0_IgG1_PVA_/S267K Light Chain
DIQMTQSPASLSVSVGETVTITCRASENIYSNLAWYQQKQGKSPQFLIYAATNLADGVPSRFSGSGSGTQYSLKINSLQSEDFGSYYCQHFWGTPWTFGGGTKLEIKRTVAAPSVFIFPPSDEQLKSGTASVVCLLNNFYPREAKVQWKVDNALQSGNSQESVTEQDSKDSTYSLSSTLTLSKADYEKHKVYACEVTHQGLSSPVTKSFNRGEC

SEQ ID NO: 22437 - protein, 107 aa, synthetic construct
  REGION 1..107: note = Description of Artificial Sequence: Synthetic polypeptide
  REGION 1..107: note = VL of XENP020412
DIQMTQSPASLSVSVGETVTITCRASENIYSNLAWYQQKQGKSPQFLIYAATNLADGVPSRFSGSGSGTQYSLKINSLQSEDFGSYYCQHFWGTPWTFGGGTKLEIK

SEQ ID NO: 22438 - protein, 11 aa, synthetic construct
  REGION 1..11: note = Description of Artificial Sequence: Synthetic peptide
  REGION 1..11: note = XENP020412 vlCDR1
RASENIYSNLA

SEQ ID NO: 22439 - protein, 7 aa, synthetic construct
  REGION 1..7: note = Description of Artificial Sequence: Synthetic peptide
  REGION 1..7: note = XENP020412 vlCDR2
AATNLAD

SEQ ID NO: 22440 - protein, 9 aa, synthetic construct
  REGION 1..9: note = Description of Artificial Sequence: Synthetic peptide
  REGION 1..9: note = XENP020412 vlCDR3
QHFWGTPWT

SEQ ID NO: 22441 - protein, 444 aa, synthetic construct
  REGION 1..444: note = Description of Artificial Sequence: Synthetic polypeptide
  REGION 1..444: note = XENP020413 8D7_H2L1_IgG1_PVA_/S267K Heavy Chain
QVQLVQSGAEVKKPGASVKVSCKVSGFSLSSYGVHWVRQAPGQGLEWLGVIWSGSTDYNAKFQGRVTITKDNSKSTVYFELSSLRSEDTAVYYCARTYYYAMDYWGQGTLVTVSSASTKGPSVFPLAPSSKSTSGGTAALGCLVKDYFPEPVTVSWNSGALTSGVHTFPAVLQSSGLYSLSSVVTVPSSSLGTQTYICNVNHKPSNTKVDKKVEPKSCDKTHTCPPCPAPPVAGPSVFLFPPKPKDTLMISRTPEVTCVVVDVKHEDPEVKFNWYVDGVEVHNAKTKPREEQYNSTYRVVSVLTVLHQDWLNGKEYKCKVSNKALPAPIEKTISKAKGQPREPQVYTLPPSREEMTKNQVSLTCLVKGFYPSDIAVEWESNGQPENNYKTTPPVLDSDGSFFLYSKLTVDKSRWQQGNVFSCSVMHEALHNHYTQKSLSLSPGK

SEQ ID NO: 22442 - protein, 115 aa, synthetic construct
  REGION 1..115: note = Description of Artificial Sequence: Synthetic polypeptide
  REGION 1..115: note = VH of XENP020413
QVQLVQSGAEVKKPGASVKVSCKVSGFSLSSYGVHWVRQAPGQGLEWLGVIWSGSTDYNAKFQGRVTITKDNSKSTVYFELSSLRSEDTAVYYCARTYYYAMDYWGQGTLVTVSS

SEQ ID NO: 22443 - protein, 5 aa, synthetic construct
  REGION 1..5: note = Description of Artificial Sequence: Synthetic peptide
  REGION 1..5: note = XENP020413 vhCDR1
SYGVH

SEQ ID NO: 22444 - protein, 15 aa, synthetic construct
  REGION 1..15: note = Description of Artificial Sequence: Synthetic peptide
  REGION 1..15: note = XENP020413 vhCDR2
VIWSGSTDYNAKFQG

SEQ ID NO: 22445 - protein, 8 aa, synthetic construct
  REGION 1..8: note = Description of Artificial Sequence: Synthetic peptide
  REGION 1..8: note = XENP020413 vhCDR3
TYYYAMDY

SEQ ID NO: 22446 - protein, 214 aa, synthetic construct; identical to SEQ ID NO: 21896
  REGION 1..214: note = Description of Artificial Sequence: Synthetic polypeptide
  REGION 1..214: note = XENP020413 8D7_H2L1_IgG1_PVA_/S267K Light Chain

SEQ ID NO: 22447 - protein, 107 aa, synthetic construct; identical to SEQ ID NO: 21897
  REGION 1..107: note = Description of Artificial Sequence: Synthetic polypeptide
  REGION 1..107: note = VL of XENP020413

SEQ ID NO: 22448 - protein, 11 aa, synthetic construct
  REGION 1..11: note = Description of Artificial Sequence: Synthetic peptide
  REGION 1..11: note = XENP020413 vlCDR1
RASENIYSNLA

SEQ ID NO: 22449 - protein, 7 aa, synthetic construct
  REGION 1..7: note = Description of Artificial Sequence: Synthetic peptide
  REGION 1..7: note = XENP020413 vlCDR2
AATNLAD

SEQ ID NO: 22450 - protein, 9 aa, synthetic construct
  REGION 1..9: note = Description of Artificial Sequence: Synthetic peptide
  REGION 1..9: note = XENP020413 vlCDR3
QHFWGTPWT

SEQ ID NO: 22451 - protein, 444 aa, synthetic construct
  REGION 1..444: note = Description of Artificial Sequence: Synthetic polypeptide
  REGION 1..444: note = XENP020414 8D7_H3L1_IgG1_PVA_/S267K Heavy Chain
QVQLVESGGGVVQPGRSLRLSCAVSGFSLSSYGVHWVRQAPGKGLEWVAVIWSGSTDYNAAVKGRFTISKDNSKSTVYLQMNSLRAEDTAVYYCARTYYYAMDYWGQGTLVTVSSASTKGPSVFPLAPSSKSTSGGTAALGCLVKDYFPEPVTVSWNSGALTSGVHTFPAVLQSSGLYSLSSVVTVPSSSLGTQTYICNVNHKPSNTKVDKKVEPKSCDKTHTCPPCPAPPVAGPSVFLFPPKPKDTLMISRTPEVTCVVVDVKHEDPEVKFNWYVDGVEVHNAKTKPREEQYNSTYRVVSVLTVLHQDWLNGKEYKCKVSNKALPAPIEKTISKAKGQPREPQVYTLPPSREEMTKNQVSLTCLVKGFYPSDIAVEWESNGQPENNYKTTPPVLDSDGSFFLYSKLTVDKSRWQQGNVFSCSVMHEALHNHYTQKSLSLSPGK

SEQ ID NO: 22452 - protein, 115 aa, synthetic construct
  REGION 1..115: note = Description of Artificial Sequence: Synthetic polypeptide
  REGION 1..115: note = VH of XENP020414
QVQLVESGGGVVQPGRSLRLSCAVSGFSLSSYGVHWVRQAPGKGLEWVAVIWSGSTDYNAAVKGRFTISKDNSKSTVYLQMNSLRAEDTAVYYCARTYYYAMDYWGQGTLVTVSS

SEQ ID NO: 22453 - protein, 5 aa, synthetic construct
  REGION 1..5: note = Description of Artificial Sequence: Synthetic peptide
  REGION 1..5: note = XENP020414 vhCDR1
SYGVH

SEQ ID NO: 22454 - protein, 15 aa, synthetic construct
  REGION 1..15: note = Description of Artificial Sequence: Synthetic peptide
  REGION 1..15: note = XENP020414 vhCDR2
VIWSGSTDYNAAVKG

SEQ ID NO: 22455 - protein, 8 aa, synthetic construct
  REGION 1..8: note = Description of Artificial Sequence: Synthetic peptide
  REGION 1..8: note = XENP020414 vhCDR3
TYYYAMDY

SEQ ID NO: 22456 - protein, 214 aa, synthetic construct; identical to SEQ ID NO: 21896
  REGION 1..214: note = Description of Artificial Sequence: Synthetic polypeptide
  REGION 1..214: note = XENP020414 8D7_H3L1_IgG1_PVA_/S267K Light Chain

SEQ ID NO: 22457 - protein, 107 aa, synthetic construct; identical to SEQ ID NO: 21897
  REGION 1..107: note = Description of Artificial Sequence: Synthetic polypeptide
  REGION 1..107: note = VL of XENP020414

SEQ ID NO: 22458 - protein, 11 aa, synthetic construct
  REGION 1..11: note = Description of Artificial Sequence: Synthetic peptide
  REGION 1..11: note = XENP020414 vlCDR1
RASENIYSNLA

SEQ ID NO: 22459 - protein, 7 aa, synthetic construct
  REGION 1..7: note = Description of Artificial Sequence: Synthetic peptide
  REGION 1..7: note = XENP020414 vlCDR2
AATNLAD

SEQ ID NO: 22460 - protein, 9 aa, synthetic construct
  REGION 1..9: note = Description of Artificial Sequence: Synthetic peptide
  REGION 1..9: note = XENP020414 vlCDR3
QHFWGTPWT

SEQ ID NO: 22461 - protein, 449 aa, synthetic construct
  REGION 1..449: note = Description of Artificial Sequence: Synthetic polypeptide
  REGION 1..449: note = XENP020415 4C8_H0L0_IgG1_PVA_/S267K Heavy Chain
EVQLQQSGPELVKPGASVKISCKASGYTFTDYNVHWVKQSHGKSLEWIGYIYPYTGGTGYNQKFKSKATLTVDNSSSTAYMELRSLTSEDSAVYYCARSDDGYSYAMDYWGQGTSVTVSSASTKGPSVFPLAPSSKSTSGGTAALGCLVKDYFPEPVTVSWNSGALTSGVHTFPAVLQSSGLYSLSSVVTVPSSSLGTQTYICNVNHKPSNTKVDKKVEPKSCDKTHTCPPCPAPPVAGPSVFLFPPKPKDTLMISRTPEVTCVVVDVKHEDPEVKFNWYVDGVEVHNAKTKPREEQYNSTYRVVSVLTVLHQDWLNGKEYKCKVSNKALPAPIEKTISKAKGQPREPQVYTLPPSREEMTKNQVSLTCLVKGFYPSDIAVEWESNGQPENNYKTTPPVLDSDGSFFLYSKLTVDKSRWQQGNVFSCSVMHEALHNHYTQKSLSLSPGK

SEQ ID NO: 22462 - protein, 120 aa, synthetic construct
  REGION 1..120: note = Description of Artificial Sequence: Synthetic polypeptide
  REGION 1..120: note = VH of XENP020415
EVQLQQSGPELVKPGASVKISCKASGYTFTDYNVHWVKQSHGKSLEWIGYIYPYTGGTGYNQKFKSKATLTVDNSSSTAYMELRSLTSEDSAVYYCARSDDGYSYAMDYWGQGTSVTVSS

SEQ ID NO: 22463 - protein, 5 aa, synthetic construct
  REGION 1..5: note = Description of Artificial Sequence: Synthetic peptide
  REGION 1..5: note = XENP020415 vhCDR1
DYNVH

SEQ ID NO: 22464 - protein, 17 aa, synthetic construct
  REGION 1..17: note = Description of Artificial Sequence: Synthetic peptide
  REGION 1..17: note = XENP020415 vhCDR2
YIYPYTGGTGYNQKFKS

SEQ ID NO: 22465 - protein, 11 aa, synthetic construct
  REGION 1..11: note = Description of Artificial Sequence: Synthetic peptide
  REGION 1..11: note = XENP020415 vhCDR3
SDDGYSYAMDY

SEQ ID NO: 22466 - protein, 213 aa, synthetic construct
  REGION 1..213: note = Description of Artificial Sequence: Synthetic polypeptide
  REGION 1..213: note = XENP020415 4C8_H0L0_IgG1_PVA_/S267K Light Chain
DIQMTQTTSSLSASLGDRVTISCRASQDISNYLNWYQQKPDGTVKLLIYYTSRLHSGVPSRFSGSGSGTDYSLTISNLEQEDIATYFCQQGNTLWTFGGGTKLEIKRTVAAPSVFIFPPSDEQLKSGTASVVCLLNNFYPREAKVQWKVDNALQSGNSQESVTEQDSKDSTYSLSSTLTLSKADYEKHKVYACEVTHQGLSSPVTKSFNRGEC

SEQ ID NO: 22467 - protein, 106 aa, synthetic construct
  REGION 1..106: note = Description of Artificial Sequence: Synthetic polypeptide
  REGION 1..106: note = VL of XENP020415
DIQMTQTTSSLSASLGDRVTISCRASQDISNYLNWYQQKPDGTVKLLIYYTSRLHSGVPSRFSGSGSGTDYSLTISNLEQEDIATYFCQQGNTLWTFGGGTKLEIK

SEQ ID NO: 22468 - protein, 11 aa, synthetic construct
  REGION 1..11: note = Description of Artificial Sequence: Synthetic peptide
  REGION 1..11: note = XENP020415 vlCDR1
RASQDISNYLN

SEQ ID NO: 22469 - protein, 7 aa, synthetic construct
  REGION 1..7: note = Description of Artificial Sequence: Synthetic peptide
  REGION 1..7: note = XENP020415 vlCDR2
YTSRLHS

SEQ ID NO: 22470 - protein, 8 aa, synthetic construct
  REGION 1..8: note = Description of Artificial Sequence: Synthetic peptide
  REGION 1..8: note = XENP020415 vlCDR3
QQGNTLWT

SEQ ID NO: 22471 - protein, 449 aa, synthetic construct
  REGION 1..449: note = Description of Artificial Sequence: Synthetic polypeptide
  REGION 1..449: note = XENP020416 4C8_H2L1_IgG1_PVA_/S267K Heavy Chain
QVQLVQSGAEVKKPGASVKVSCKASGYTFTDYNVHWVRQAPGQGLEWIGYIYPYTGGTGYNQKFQGRVTLTVDNSISTAYMELSSLRSEDTAVYYCARSDDGYSYAMDYWGQGTLVTVSSASTKGPSVFPLAPSSKSTSGGTAALGCLVKDYFPEPVTVSWNSGALTSGVHTFPAVLQSSGLYSLSSVVTVPSSSLGTQTYICNVNHKPSNTKVDKKVEPKSCDKTHTCPPCPAPPVAGPSVFLFPPKPKDTLMISRTPEVTCVVVDVKHEDPEVKFNWYVDGVEVHNAKTKPREEQYNSTYRVVSVLTVLHQDWLNGKEYKCKVSNKALPAPIEKTISKAKGQPREPQVYTLPPSREEMTKNQVSLTCLVKGFYPSDIAVEWESNGQPENNYKTTPPVLDSDGSFFLYSKLTVDKSRWQQGNVFSCSVMHEALHNHYTQKSLSLSPGK

SEQ ID NO: 22472 - protein, 120 aa, synthetic construct
  REGION 1..120: note = Description of Artificial Sequence: Synthetic polypeptide
  REGION 1..120: note = VH of XENP020416
QVQLVQSGAEVKKPGASVKVSCKASGYTFTDYNVHWVRQAPGQGLEWIGYIYPYTGGTGYNQKFQGRVTLTVDNSISTAYMELSSLRSEDTAVYYCARSDDGYSYAMDYWGQGTLVTVSS

SEQ ID NO: 22473 - protein, 5 aa, synthetic construct
  REGION 1..5: note = Description of Artificial Sequence: Synthetic peptide
  REGION 1..5: note = XENP020416 vhCDR1
DYNVH

SEQ ID NO: 22474 - protein, 17 aa, synthetic construct
  REGION 1..17: note = Description of Artificial Sequence: Synthetic peptide
  REGION 1..17: note = XENP020416 vhCDR2
YIYPYTGGTGYNQKFQG

SEQ ID NO: 22475 - protein, 11 aa, synthetic construct
  REGION 1..11: note = Description of Artificial Sequence: Synthetic peptide
  REGION 1..11: note = XENP020416 vhCDR3
SDDGYSYAMDY

SEQ ID NO: 22476 - protein, 213 aa, synthetic construct; identical to SEQ ID NO: 22116
  REGION 1..213: note = Description of Artificial Sequence: Synthetic polypeptide
  REGION 1..213: note = XENP020416 4C8_H2L1_IgG1_PVA_/S267K Light Chain

SEQ ID NO: 22477 - protein, 106 aa, synthetic construct; identical to SEQ ID NO: 22117
  REGION 1..106: note = Description of Artificial Sequence: Synthetic polypeptide
  REGION 1..106: note = VL of XENP020416

SEQ ID NO: 22478 - protein, 11 aa, synthetic construct
  REGION 1..11: note = Description of Artificial Sequence: Synthetic peptide
  REGION 1..11: note = XENP020416 vlCDR1
QASQDISNYLN

SEQ ID NO: 22479 - protein, 7 aa, synthetic construct
  REGION 1..7: note = Description of Artificial Sequence: Synthetic peptide
  REGION 1..7: note = XENP020416 vlCDR2
YTSRLHS

SEQ ID NO: 22480 - protein, 8 aa, synthetic construct
  REGION 1..8: note = Description of Artificial Sequence: Synthetic peptide
  REGION 1..8: note = XENP020416 vlCDR3
QQGNTLWT

SEQ ID NO: 22481 - protein, 450 aa, synthetic construct
  REGION 1..450: note = Description of Artificial Sequence: Synthetic polypeptide
  REGION 1..450: note = XENP020417 7G8_H3L1_IgG1_PVA_/S267K Heavy Chain
EVQLVESGGGLVQPGGSLRLSCAASGFTFSDAWMDWVRQAPGKGLEWVAEIRTKANNHATYYAESVKGRFTISRDDSKSSVYLQMNSLRAEDTAVYYCTRLANWDWYFDVWGQGTTVTVSSASTKGPSVFPLAPSSKSTSGGTAALGCLVKDYFPEPVTVSWNSGALTSGVHTFPAVLQSSGLYSLSSVVTVPSSSLGTQTYICNVNHKPSNTKVDKKVEPKSCDKTHTCPPCPAPPVAGPSVFLFPPKPKDTLMISRTPEVTCVVVDVKHEDPEVKFNWYVDGVEVHNAKTKPREEQYNSTYRVVSVLTVLHQDWLNGKEYKCKVSNKALPAPIEKTISKAKGQPREPQVYTLPPSREEMTKNQVSLTCLVKGFYPSDIAVEWESNGQPENNYKTTPPVLDSDGSFFLYSKLTVDKSRWQQGNVFSCSVMHEALHNHYTQKSLSLSPGK

SEQ ID NO: 22482 - protein, 121 aa, synthetic construct
  REGION 1..121: note = Description of Artificial Sequence: Synthetic polypeptide
  REGION 1..121: note = VH of XENP020417
EVQLVESGGGLVQPGGSLRLSCAASGFTFSDAWMDWVRQAPGKGLEWVAEIRTKANNHATYYAESVKGRFTISRDDSKSSVYLQMNSLRAEDTAVYYCTRLANWDWYFDVWGQGTTVTVSS

SEQ ID NO: 22483 - protein, 5 aa, synthetic construct
  REGION 1..5: note = Description of Artificial Sequence: Synthetic peptide
  REGION 1..5: note = XENP020417 vhCDR1
DAWMD

SEQ ID NO: 22484 - protein, 19 aa, synthetic construct
  REGION 1..19: note = Description of Artificial Sequence: Synthetic peptide
  REGION 1..19: note = XENP020417 vhCDR2
EIRTKANNHATYYAESVKG

SEQ ID NO: 22485 - protein, 10 aa, synthetic construct
  REGION 1..10: note = Description of Artificial Sequence: Synthetic peptide
  REGION 1..10: note = XENP020417 vhCDR3
LANWDWYFDV

SEQ ID NO: 22486 - protein, 218 aa, synthetic construct; identical to SEQ ID NO: 22276
  REGION 1..218: note = Description of Artificial Sequence: Synthetic polypeptide
  REGION 1..218: note = XENP020417 7G8_H3L1_IgG1_PVA_/S267K Light Chain

SEQ ID NO: 22487 - protein, 111 aa, synthetic construct; identical to SEQ ID NO: 22277
  REGION 1..111: note = Description of Artificial Sequence: Synthetic polypeptide
  REGION 1..111: note = VL of XENP020417

SEQ ID NO: 22488 - protein, 15 aa, synthetic construct
  REGION 1..15: note = Description of Artificial Sequence: Synthetic peptide
  REGION 1..15: note = XENP020417 vlCDR1
RASQSVDYDGDSYMN

SEQ ID NO: 22489 - protein, 7 aa, synthetic construct
  REGION 1..7: note = Description of Artificial Sequence: Synthetic peptide
  REGION 1..7: note = XENP020417 vlCDR2
AASNLES

SEQ ID NO: 22490 - protein, 9 aa, synthetic construct
  REGION 1..9: note = Description of Artificial Sequence: Synthetic peptide
  REGION 1..9: note = XENP020417 vlCDR3
QQSNEDPFT

SEQ ID NO: 22491 - protein, 450 aa, synthetic construct; identical to SEQ ID NO: 22481
  REGION 1..450: note = Description of Artificial Sequence: Synthetic polypeptide
  REGION 1..450: note = XENP020418 7G8_H3L2_IgG1_PVA_/S267K Heavy Chain

SEQ ID NO: 22492 - protein, 121 aa, synthetic construct; identical to SEQ ID NO: 22482
  REGION 1..121: note = Description of Artificial Sequence: Synthetic polypeptide
  REGION 1..121: note = VH of XENP020418

SEQ ID NO: 22493 - protein, 5 aa, synthetic construct
  REGION 1..5: note = Description of Artificial Sequence: Synthetic peptide
  REGION 1..5: note = XENP020418 vhCDR1
DAWMD

SEQ ID NO: 22494 - protein, 19 aa, synthetic construct
  REGION 1..19: note = Description of Artificial Sequence: Synthetic peptide
  REGION 1..19: note = XENP020418 vhCDR2
EIRTKANNHATYYAESVKG

SEQ ID NO: 22495 - protein, 10 aa, synthetic construct
  REGION 1..10: note = Description of Artificial Sequence: Synthetic peptide
  REGION 1..10: note = XENP020418 vhCDR3
LANWDWYFDV

SEQ ID NO: 22496 - protein, 218 aa, synthetic construct; identical to SEQ ID NO: 22286
  REGION 1..218: note = Description of Artificial Sequence: Synthetic polypeptide
  REGION 1..218: note = XENP020418 7G8_H3L2_IgG1_PVA_/S267K Light Chain

SEQ ID NO: 22497 - protein, 111 aa, synthetic construct; identical to SEQ ID NO: 22287
  REGION 1..111: note = Description of Artificial Sequence: Synthetic polypeptide
  REGION 1..111: note = VL of XENP020418

SEQ ID NO: 22498 - protein, 15 aa, synthetic construct
  REGION 1..15: note = Description of Artificial Sequence: Synthetic peptide
  REGION 1..15: note = XENP020418 vlCDR1
RASQSVDYDGDSYMN

SEQ ID NO: 22499 - protein, 7 aa, synthetic construct
  REGION 1..7: note = Description of Artificial Sequence: Synthetic peptide
  REGION 1..7: note = XENP020418 vlCDR2
AASNLES

SEQ ID NO: 22500 - protein, 9 aa, synthetic construct
  REGION 1..9: note = Description of Artificial Sequence: Synthetic peptide
  REGION 1..9: note = XENP020418 vlCDR3
QQSNEDPFT

SEQ ID NO: 22501 - protein, 450 aa, synthetic construct; identical to SEQ ID NO: 22481
  REGION 1..450: note = Description of Artificial Sequence: Synthetic polypeptide
  REGION 1..450: note = XENP020419 7G8_H3L3_IgG1_PVA_/S267K Heavy Chain

SEQ ID NO: 22502 - protein, 121 aa, synthetic construct; identical to SEQ ID NO: 22482
  REGION 1..121: note = Description of Artificial Sequence: Synthetic polypeptide
  REGION 1..121: note = VH of XENP020419

SEQ ID NO: 22503 - protein, 5 aa, synthetic construct
  REGION 1..5: note = Description of Artificial Sequence: Synthetic peptide
  REGION 1..5: note = XENP020419 vhCDR1
DAWMD

SEQ ID NO: 22504 - protein, 19 aa, synthetic construct
  REGION 1..19: note = Description of Artificial Sequence: Synthetic peptide
  REGION 1..19: note = XENP020419 vhCDR2
EIRTKANNHATYYAESVKG

SEQ ID NO: 22505 - protein, 10 aa, synthetic construct
  REGION 1..10: note = Description of Artificial Sequence: Synthetic peptide
  REGION 1..10: note = XENP020419 vhCDR3
LANWDWYFDV

SEQ ID NO: 22506 - protein, 218 aa, synthetic construct; identical to SEQ ID NO: 22296
  REGION 1..218: note = Description of Artificial Sequence: Synthetic polypeptide
  REGION 1..218: note = XENP020419 7G8_H3L3_IgG1_PVA_/S267K Light Chain

SEQ ID NO: 22507 - protein, 111 aa, synthetic construct; identical to SEQ ID NO: 22297
  REGION 1..111: note = Description of Artificial Sequence: Synthetic polypeptide
  REGION 1..111: note = VL of XENP020419

SEQ ID NO: 22508 - protein, 15 aa, synthetic construct
  REGION 1..15: note = Description of Artificial Sequence: Synthetic peptide
  REGION 1..15: note = XENP020419 vlCDR1
KASQSVDYDGDSYMN

SEQ ID NO: 22509 - protein, 7 aa, synthetic construct
  REGION 1..7: note = Description of Artificial Sequence: Synthetic peptide
  REGION 1..7: note = XENP020419 vlCDR2
AASNLES

SEQ ID NO: 22510 - protein, 9 aa, synthetic construct
  REGION 1..9: note = Description of Artificial Sequence: Synthetic peptide
  REGION 1..9: note = XENP020419 vlCDR3
QQSNEDPFT

SEQ ID NO: 22511 - protein, 444 aa, synthetic construct; identical to SEQ ID NO: 22431
  REGION 1..444: note = Description of Artificial Sequence: Synthetic polypeptide
  REGION 1..444: note = XENP020412 8D7_H0L0_IgG1_PVA_/S267K Heavy Chain

SEQ ID NO: 22512 - protein, 115 aa, synthetic construct; identical to SEQ ID NO: 22432
  REGION 1..115: note = Description of Artificial Sequence: Synthetic polypeptide
  REGION 1..115: note = VH of XENP020412

SEQ ID NO: 22513 - protein, 5 aa, synthetic construct
  REGION 1..5: note = Description of Artificial Sequence: Synthetic peptide
  REGION 1..5: note = XENP020412 vhCDR1
SYGVH

SEQ ID NO: 22514 - protein, 15 aa, synthetic construct
  REGION 1..15: note = Description of Artificial Sequence: Synthetic peptide
  REGION 1..15: note = XENP020412 vhCDR2
VIWSGSTDYNAAFIS

SEQ ID NO: 22515 - protein, 8 aa, synthetic construct
  REGION 1..8: note = Description of Artificial Sequence: Synthetic peptide
  REGION 1..8: note = XENP020412 vhCDR3
TYYYAMDY

SEQ ID NO: 22516 - protein, 214 aa, synthetic construct; identical to SEQ ID NO: 22436
  REGION 1..214: note = Description of Artificial Sequence: Synthetic polypeptide
  REGION 1..214: note = XENP020412 8D7_H0L0_IgG1_PVA_/S267K Light Chain

SEQ ID NO: 22517 - protein, 107 aa, synthetic construct; identical to SEQ ID NO: 22437
  REGION 1..107: note = Description of Artificial Sequence: Synthetic polypeptide
  REGION 1..107: note = VL of XENP020412

SEQ ID NO: 22518 - protein, 11 aa, synthetic construct
  REGION 1..11: note = Description of Artificial Sequence: Synthetic peptide
  REGION 1..11: note = XENP020412 vlCDR1
RASENIYSNLA

SEQ ID NO: 22519 - protein, 7 aa, synthetic construct
  REGION 1..7: note = Description of Artificial Sequence: Synthetic peptide
  REGION 1..7: note = XENP020412 vlCDR2
AATNLAD

SEQ ID NO: 22520 - protein, 9 aa, synthetic construct
  REGION 1..9: note = Description of Artificial Sequence: Synthetic peptide
  REGION 1..9: note = XENP020412 vlCDR3
QHFWGTPWT

SEQ ID NO: 22521 - protein, 444 aa, synthetic construct; identical to SEQ ID NO: 22441
  REGION 1..444: note = Description of Artificial Sequence: Synthetic polypeptide
  REGION 1..444: note = XENP020413 8D7_H2L1_IgG1_PVA_/S267K Heavy Chain

SEQ ID NO: 22522 - protein, 115 aa, synthetic construct; identical to SEQ ID NO: 22442
  REGION 1..115: note = Description of Artificial Sequence: Synthetic polypeptide
  REGION 1..115: note = VH of XENP020413

SEQ ID NO: 22523 - protein, 5 aa, synthetic construct
  REGION 1..5: note = Description of Artificial Sequence: Synthetic peptide
  REGION 1..5: note = XENP020413 vhCDR1
SYGVH

SEQ ID NO: 22524 - protein, 15 aa, synthetic construct
  REGION 1..15: note = Description of Artificial Sequence: Synthetic peptide
  REGION 1..15: note = XENP020413 vhCDR2
VIWSGSTDYNAKFQG

SEQ ID NO: 22525 - protein, 8 aa, synthetic construct
  REGION 1..8: note = Description of Artificial Sequence: Synthetic peptide
  REGION 1..8: note = XENP020413 vhCDR3
TYYYAMDY

SEQ ID NO: 22526 - protein, 214 aa, synthetic construct; identical to SEQ ID NO: 21896
  REGION 1..214: note = Description of Artificial Sequence: Synthetic polypeptide
  REGION 1..214: note = XENP020413 8D7_H2L1_IgG1_PVA_/S267K Light Chain

SEQ ID NO: 22527 - protein, 107 aa, synthetic construct; identical to SEQ ID NO: 21897
  REGION 1..107: note = Description of Artificial Sequence: Synthetic polypeptide
  REGION 1..107: note = VL of XENP020413

SEQ ID NO: 22528 - protein, 11 aa, synthetic construct
  REGION 1..11: note = Description of Artificial Sequence: Synthetic peptide
  REGION 1..11: note = XENP020413 vlCDR1
RASENIYSNLA

SEQ ID NO: 22529 - protein, 7 aa, synthetic construct
  REGION 1..7: note = Description of Artificial Sequence: Synthetic peptide
  REGION 1..7: note = XENP020413 vlCDR2
AATNLAD

SEQ ID NO: 22530 - protein, 9 aa, synthetic construct
  REGION 1..9: note = Description of Artificial Sequence: Synthetic peptide
  REGION 1..9: note = XENP020413 vlCDR3
QHFWGTPWT

SEQ ID NO: 22531 - protein, 444 aa, synthetic construct; identical to SEQ ID NO: 22451
  REGION 1..444: note = Description of Artificial Sequence: Synthetic polypeptide
  REGION 1..444: note = XENP020414 8D7_H3L1_IgG1_PVA_/S267K Heavy Chain

SEQ ID NO: 22532 - protein, 115 aa, synthetic construct; identical to SEQ ID NO: 22452
  REGION 1..115: note = Description of Artificial Sequence: Synthetic polypeptide
  REGION 1..115: note = VH of XENP020414

SEQ ID NO: 22533 - protein, 5 aa, synthetic construct
  REGION 1..5: note = Description of Artificial Sequence: Synthetic peptide
  REGION 1..5: note = XENP020414 vhCDR1
SYGVH

SEQ ID NO: 22534 - protein, 15 aa, synthetic construct
  REGION 1..15: note = Description of Artificial Sequence: Synthetic peptide
  REGION 1..15: note = XENP020414 vhCDR2
VIWSGSTDYNAAVKG

SEQ ID NO: 22535 - protein, 8 aa, synthetic construct
  REGION 1..8: note = Description of Artificial Sequence: Synthetic peptide
  REGION 1..8: note = XENP020414 vhCDR3
TYYYAMDY

SEQ ID NO: 22536 - protein, 214 aa, synthetic construct; identical to SEQ ID NO: 21896
  REGION 1..214: note = Description of Artificial Sequence: Synthetic polypeptide
  REGION 1..214: note = XENP020414 8D7_H3L1_IgG1_PVA_/S267K Light Chain

SEQ ID NO: 22537 - protein, 107 aa, synthetic construct; identical to SEQ ID NO: 21897
  REGION 1..107: note = Description of Artificial Sequence: Synthetic polypeptide
  REGION 1..107: note = VL of XENP020414

SEQ ID NO: 22538 - protein, 11 aa, synthetic construct
  REGION 1..11: note = Description of Artificial Sequence: Synthetic peptide
  REGION 1..11: note = XENP020414 vlCDR1
RASENIYSNLA

SEQ ID NO: 22539 - protein, 7 aa, synthetic construct
  REGION 1..7: note = Description of Artificial Sequence: Synthetic peptide
  REGION 1..7: note = XENP020414 vlCDR2
AATNLAD

SEQ ID NO: 22540 - protein, 9 aa, synthetic construct
  REGION 1..9: note = Description of Artificial Sequence: Synthetic peptide
  REGION 1..9: note = XENP020414 vlCDR3
QHFWGTPWT

SEQ ID NO: 22541 - protein, 449 aa, synthetic construct; identical to SEQ ID NO: 22461
  REGION 1..449: note = Description of Artificial Sequence: Synthetic polypeptide
  REGION 1..449: note = XENP020415 4C8_H0L0_IgG1_PVA_/S267K Heavy Chain

SEQ ID NO: 22542 - protein, 120 aa, synthetic construct; identical to SEQ ID NO: 22462
  REGION 1..120: note = Description of Artificial Sequence: Synthetic polypeptide
  REGION 1..120: note = VH of XENP020415

SEQ ID NO: 22543 - protein, 5 aa, synthetic construct
  REGION 1..5: note = Description of Artificial Sequence: Synthetic peptide
  REGION 1..5: note = XENP020415 vhCDR1
DYNVH

SEQ ID NO: 22544 - protein, 17 aa, synthetic construct
  REGION 1..17: note = Description of Artificial Sequence: Synthetic peptide
  REGION 1..17: note = XENP020415 vhCDR2
YIYPYTGGTGYNQKFKS

SEQ ID NO: 22545 - protein, 11 aa, synthetic construct
  REGION 1..11: note = Description of Artificial Sequence: Synthetic peptide
  REGION 1..11: note = XENP020415 vhCDR3
SDDGYSYAMDY

SEQ ID NO: 22546 - protein, 213 aa, synthetic construct; identical to SEQ ID NO: 22466
  REGION 1..213: note = Description of Artificial Sequence: Synthetic polypeptide
  REGION 1..213: note = XENP020415 4C8_H0L0_IgG1_PVA_/S267K Light Chain

SEQ ID NO: 22547 - protein, 106 aa, synthetic construct; identical to SEQ ID NO: 22467
  REGION 1..106: note = Description of Artificial Sequence: Synthetic polypeptide
  REGION 1..106: note = VL of XENP020415

SEQ ID NO: 22548 - protein, 11 aa, synthetic construct
  REGION 1..11: note = Description of Artificial Sequence: Synthetic peptide
  REGION 1..11: note = XENP020415 vlCDR1
RASQDISNYLN

SEQ ID NO: 22549 - protein, 7 aa, synthetic construct
  REGION 1..7: note = Description of Artificial Sequence: Synthetic peptide
  REGION 1..7: note = XENP020415 vlCDR2
YTSRLHS

SEQ ID NO: 22550 - protein, 8 aa, synthetic construct
  REGION 1..8: note = Description of Artificial Sequence: Synthetic peptide
  REGION 1..8: note = XENP020415 vlCDR3
QQGNTLWT

SEQ ID NO: 22551 - protein, 449 aa, synthetic construct; identical to SEQ ID NO: 22471
  REGION 1..449: note = Description of Artificial Sequence: Synthetic polypeptide
  REGION 1..449: note = XENP020416 4C8_H2L1_IgG1_PVA_/S267K Heavy Chain

SEQ ID NO: 22552 - protein, 120 aa, synthetic construct; identical to SEQ ID NO: 22472
  REGION 1..120: note = Description of Artificial Sequence: Synthetic polypeptide
  REGION 1..120: note = VH of XENP020416

SEQ ID NO: 22553 - protein, 5 aa, synthetic construct
  REGION 1..5: note = Description of Artificial Sequence: Synthetic peptide
  REGION 1..5: note = XENP020416 vhCDR1
DYNVH

SEQ ID NO: 22554 - protein, 17 aa, synthetic construct
  REGION 1..17: note = Description of Artificial Sequence: Synthetic peptide
  REGION 1..17: note = XENP020416 vhCDR2
YIYPYTGGTGYNQKFQG

SEQ ID NO: 22555 - protein, 11 aa, synthetic construct
  REGION 1..11: note = Description of Artificial Sequence: Synthetic peptide
  REGION 1..11: note = XENP020416 vhCDR3
SDDGYSYAMDY

SEQ ID NO: 22556 - protein, 213 aa, synthetic construct; identical to SEQ ID NO: 22116
  REGION 1..213: note = Description of Artificial Sequence: Synthetic polypeptide
  REGION 1..213: note = XENP020416 4C8_H2L1_IgG1_PVA_/S267K Light Chain

SEQ ID NO: 22557 - protein, 106 aa, synthetic construct; identical to SEQ ID NO: 22117
  REGION 1..106: note = Description of Artificial Sequence: Synthetic polypeptide
  REGION 1..106: note = VL of XENP020416

SEQ ID NO: 22558 - protein, 11 aa, synthetic construct
  REGION 1..11: note = Description of Artificial Sequence: Synthetic peptide
  REGION 1..11: note = XENP020416 vlCDR1
QASQDISNYLN

SEQ ID NO: 22559 - protein, 7 aa, synthetic construct
  REGION 1..7: note = Description of Artificial Sequence: Synthetic peptide
  REGION 1..7: note = XENP020416 vlCDR2
YTSRLHS

SEQ ID NO: 22560 - protein, 8 aa, synthetic construct
  REGION 1..8: note = Description of Artificial Sequence: Synthetic peptide
  REGION 1..8: note = XENP020416 vlCDR3
QQGNTLWT

SEQ ID NO: 22561 - protein, 450 aa, synthetic construct; identical to SEQ ID NO: 22481
  REGION 1..450: note = Description of Artificial Sequence: Synthetic polypeptide
  REGION 1..450: note = XENP020417 7G8_H3L1_IgG1_PVA_/S267K Heavy Chain

SEQ ID NO: 22562 - protein, 121 aa, synthetic construct; identical to SEQ ID NO: 22482
  REGION 1..121: note = Description of Artificial Sequence: Synthetic polypeptide
  REGION 1..121: note = VH of XENP020417

SEQ ID NO: 22563 - protein, 5 aa, synthetic construct
  REGION 1..5: note = Description of Artificial Sequence: Synthetic peptide
  REGION 1..5: note = XENP020417 vhCDR1
DAWMD

SEQ ID NO: 22564 - protein, 19 aa, synthetic construct
  REGION 1..19: note = Description of Artificial Sequence: Synthetic peptide
  REGION 1..19: note = XENP020417 vhCDR2
EIRTKANNHATYYAESVKG

SEQ ID NO: 22565 - protein, 10 aa, synthetic construct
  REGION 1..10: note = Description of Artificial Sequence: Synthetic peptide
  REGION 1..10: note = XENP020417 vhCDR3
LANWDWYFDV

SEQ ID NO: 22566 - protein, 218 aa, synthetic construct; identical to SEQ ID NO: 22276
  REGION 1..218: note = Description of Artificial Sequence: Synthetic polypeptide
  REGION 1..218: note = XENP020417 7G8_H3L1_IgG1_PVA_/S267K Light Chain

SEQ ID NO: 22567 - protein, 111 aa, synthetic construct; identical to SEQ ID NO: 22277
  REGION 1..111: note = Description of Artificial Sequence: Synthetic polypeptide
  REGION 1..111: note = VL of XENP020417

SEQ ID NO: 22568 - protein, 15 aa, synthetic construct
  REGION 1..15: note = Description of Artificial Sequence: Synthetic peptide
  REGION 1..15: note = XENP020417 vlCDR1
RASQSVDYDGDSYMN

SEQ ID NO: 22569 - protein, 7 aa, synthetic construct
  REGION 1..7: note = Description of Artificial Sequence: Synthetic peptide
  REGION 1..7: note = XENP020417 vlCDR2
AASNLES

SEQ ID NO: 22570 - protein, 9 aa, synthetic construct
  REGION 1..9: note = Description of Artificial Sequence: Synthetic peptide
  REGION 1..9: note = XENP020417 vlCDR3
QQSNEDPFT

SEQ ID NO: 22571 - protein, 450 aa, synthetic construct; identical to SEQ ID NO: 22481
  REGION 1..450: note = Description of Artificial Sequence: Synthetic polypeptide
  REGION 1..450: note = XENP020418 7G8_H3L2_IgG1_PVA_/S267K Heavy Chain

SEQ ID NO: 22572 - protein, 121 aa, synthetic construct; identical to SEQ ID NO: 22482
  REGION 1..121: note = Description of Artificial Sequence: Synthetic polypeptide
  REGION 1..121: note = VH of XENP020418

SEQ ID NO: 22573 - protein, 5 aa, synthetic construct
  REGION 1..5: note = Description of Artificial Sequence: Synthetic peptide
  REGION 1..5: note = XENP020418 vhCDR1
DAWMD

SEQ ID NO: 22574 - protein, 19 aa, synthetic construct
  REGION 1..19: note = Description of Artificial Sequence: Synthetic peptide
  REGION 1..19: note = XENP020418 vhCDR2
EIRTKANNHATYYAESVKG

SEQ ID NO: 22575 - protein, 10 aa, synthetic construct
  REGION 1..10: note = Description of Artificial Sequence: Synthetic peptide
  REGION 1..10: note = XENP020418 vhCDR3
LANWDWYFDV

SEQ ID NO: 22576 - protein, 218 aa, synthetic construct; identical to SEQ ID NO: 22286
  REGION 1..218: note = Description of Artificial Sequence: Synthetic polypeptide
  REGION 1..218: note = XENP020418 7G8_H3L2_IgG1_PVA_/S267K Light Chain

SEQ ID NO: 22577 - protein, 111 aa, synthetic construct; identical to SEQ ID NO: 22287
  REGION 1..111: note = Description of Artificial Sequence: Synthetic polypeptide
  REGION 1..111: note = VL of XENP020418

SEQ ID NO: 22578 - protein, 15 aa, synthetic construct
  REGION 1..15: note = Description of Artificial Sequence: Synthetic peptide
  REGION 1..15: note = XENP020418 vlCDR1
RASQSVDYDGDSYMN

SEQ ID NO: 22579 - protein, 7 aa, synthetic construct
  REGION 1..7: note = Description of Artificial Sequence: Synthetic peptide
  REGION 1..7: note = XENP020418 vlCDR2
AASNLES

SEQ ID NO: 22580 - protein, 9 aa, synthetic construct
  REGION 1..9: note = Description of Artificial Sequence: Synthetic peptide
  REGION 1..9: note = XENP020418 vlCDR3
QQSNEDPFT

SEQ ID NO: 22581 - protein, 450 aa, synthetic construct; identical to SEQ ID NO: 22481
  REGION 1..450: note = Description of Artificial Sequence: Synthetic polypeptide
  REGION 1..450: note = XENP020419 7G8_H3L3_IgG1_PVA_/S267K Heavy Chain

SEQ ID NO: 22582 - protein, 121 aa, synthetic construct; identical to SEQ ID NO: 22482
  REGION 1..121: note = Description of Artificial Sequence: Synthetic polypeptide
  REGION 1..121: note = VH of XENP020419

SEQ ID NO: 22583 - protein, 5 aa, synthetic construct
  REGION 1..5: note = Description of Artificial Sequence: Synthetic peptide
  REGION 1..5: note = XENP020419 vhCDR1
DAWMD

SEQ ID NO: 22584 - protein, 19 aa, synthetic construct
  REGION 1..19: note = Description of Artificial Sequence: Synthetic peptide
  REGION 1..19: note = XENP020419 vhCDR2
EIRTKANNHATYYAESVKG

SEQ ID NO: 22585 - protein, 10 aa, synthetic construct
  REGION 1..10: note = Description of Artificial Sequence: Synthetic peptide
  REGION 1..10: note = XENP020419 vhCDR3
LANWDWYFDV

SEQ ID NO: 22586 - protein, 218 aa, synthetic construct; identical to SEQ ID NO: 22296
  REGION 1..218: note = Description of Artificial Sequence: Synthetic polypeptide
  REGION 1..218: note = XENP020419 7G8_H3L3_IgG1_PVA_/S267K Light Chain

SEQ ID NO: 22587 - protein, 111 aa, synthetic construct; identical to SEQ ID NO: 22297
  REGION 1..111: note = Description of Artificial Sequence: Synthetic polypeptide
  REGION 1..111: note = VL of XENP020419

SEQ ID NO: 22588 - protein, 15 aa, synthetic construct
  REGION 1..15: note = Description of Artificial Sequence: Synthetic peptide
  REGION 1..15: note = XENP020419 vlCDR1
KASQSVDYDGDSYMN

SEQ ID NO: 22589 - protein, 7 aa, synthetic construct
  REGION 1..7: note = Description of Artificial Sequence: Synthetic peptide
  REGION 1..7: note = XENP020419 vlCDR2
AASNLES

SEQ ID NO: 22590 - protein, 9 aa, synthetic construct
  REGION 1..9: note = Description of Artificial Sequence: Synthetic peptide
  REGION 1..9: note = XENP020419 vlCDR3
QQSNEDPFT

SEQ ID NO: 22591 - protein, 449 aa, synthetic construct; identical to SEQ ID NO: 22111
  REGION 1..449: note = Description of Artificial Sequence: Synthetic polypeptide
  REGION 1..449: note = XENP020420 4C8_H1L2_IgG1_PVA_/S267K Heavy Chain

SEQ ID NO: 22592 - protein, 120 aa, synthetic construct; identical to SEQ ID NO: 22112
  REGION 1..120: note = Description of Artificial Sequence: Synthetic polypeptide
  REGION 1..120: note = VH of XENP020420

SEQ ID NO: 22593 - protein, 5 aa, synthetic construct
  REGION 1..5: note = Description of Artificial Sequence: Synthetic peptide
  REGION 1..5: note = XENP020420 vhCDR1
DYNMH

SEQ ID NO: 22594 - protein, 17 aa, synthetic construct
  REGION 1..17: note = Description of Artificial Sequence: Synthetic peptide
  REGION 1..17: note = XENP020420 vhCDR2
YIYPYTGGTGYNQKFQG

SEQ ID NO: 22595 - protein, 11 aa, synthetic construct
  REGION 1..11: note = Description of Artificial Sequence: Synthetic peptide
  REGION 1..11: note = XENP020420 vhCDR3
SDDGYSYAMDY

SEQ ID NO: 22596 - protein, 213 aa, synthetic construct
  REGION 1..213: note = Description of Artificial Sequence: Synthetic polypeptide
  REGION 1..213: note = XENP020420 4C8_H1L2_IgG1_PVA_/S267K Light Chain
DIQMTQSPSSLSASVGDRVTITCRASQDISNYLNWYQQKPGKAPKLLIYYTSRLHSGVPSRFSGSGSGTDYTLTISSLQPEDFATYFCQQGNTLWTFGGGTKVEIKRTVAAPSVFIFPPSDEQLKSGTASVVCLLNNFYPREAKVQWKVDNALQSGNSQESVTEQDSKDSTYSLSSTLTLSKADYEKHKVYACEVTHQGLSSPVTKSFNRGEC

SEQ ID NO: 22597 - protein, 106 aa, synthetic construct
  REGION 1..106: note = Description of Artificial Sequence: Synthetic polypeptide
  REGION 1..106: note = VL of XENP020420
DIQMTQSPSSLSASVGDRVTITCRASQDISNYLNWYQQKPGKAPKLLIYYTSRLHSGVPSRFSGSGSGTDYTLTISSLQPEDFATYFCQQGNTLWTFGGGTKVEIK

SEQ ID NO: 22598 - protein, 11 aa, synthetic construct
  REGION 1..11: note = Description of Artificial Sequence: Synthetic peptide
  REGION 1..11: note = XENP020420 vlCDR1
RASQDISNYLN

SEQ ID NO: 22599 - protein, 7 aa, synthetic construct
  REGION 1..7: note = Description of Artificial Sequence: Synthetic peptide
  REGION 1..7: note = XENP020420 vlCDR2
YTSRLHS

SEQ ID NO: 22600 - protein, 8 aa, synthetic construct
  REGION 1..8: note = Description of Artificial Sequence: Synthetic peptide
  REGION 1..8: note = XENP020420 vlCDR3
QQGNTLWT

SEQ ID NO: 22601 - protein, 449 aa, synthetic construct; identical to SEQ ID NO: 22471
  REGION 1..449: note = Description of Artificial Sequence: Synthetic polypeptide
  REGION 1..449: note = XENP020421 4C8_H2L2_IgG1_PVA_/S267K Heavy Chain

SEQ ID NO: 22602 - protein, 120 aa, synthetic construct; identical to SEQ ID NO: 22472
  REGION 1..120: note = Description of Artificial Sequence: Synthetic polypeptide
  REGION 1..120: note = VH of XENP020421

SEQ ID NO: 22603 - protein, 5 aa, synthetic construct
  REGION 1..5: note = Description of Artificial Sequence: Synthetic peptide
  REGION 1..5: note = XENP020421 vhCDR1
DYNVH

SEQ ID NO: 22604 - protein, 17 aa, synthetic construct
  REGION 1..17: note = Description of Artificial Sequence: Synthetic peptide
  REGION 1..17: note = XENP020421 vhCDR2
YIYPYTGGTGYNQKFQG

SEQ ID NO: 22605 - protein, 11 aa, synthetic construct
  REGION 1..11: note = Description of Artificial Sequence: Synthetic peptide
  REGION 1..11: note = XENP020421 vhCDR3
SDDGYSYAMDY

SEQ ID NO: 22606 - protein, 213 aa, synthetic construct; identical to SEQ ID NO: 22596
  REGION 1..213: note = Description of Artificial Sequence: Synthetic polypeptide
  REGION 1..213: note = XENP020421 4C8_H2L2_IgG1_PVA_/S267K Light Chain

SEQ ID NO: 22607 - protein, 106 aa, synthetic construct; identical to SEQ ID NO: 22597
  REGION 1..106: note = Description of Artificial Sequence: Synthetic polypeptide
  REGION 1..106: note = VL of XENP020421

SEQ ID NO: 22608 - protein, 11 aa, synthetic construct
  REGION 1..11: note = Description of Artificial Sequence: Synthetic peptide
  REGION 1..11: note = XENP020421 vlCDR1
RASQDISNYLN

SEQ ID NO: 22609 - protein, 7 aa, synthetic construct
  REGION 1..7: note = Description of Artificial Sequence: Synthetic peptide
  REGION 1..7: note = XENP020421 vlCDR2
YTSRLHS

SEQ ID NO: 22610 - protein, 8 aa, synthetic construct
  REGION 1..8: note = Description of Artificial Sequence: Synthetic peptide
  REGION 1..8: note = XENP020421 vlCDR3
QQGNTLWT

SEQ ID NO: 22611 - protein, 447 aa, synthetic construct; identical to SEQ ID NO: 21901
  REGION 1..447: note = Description of Artificial Sequence: Synthetic polypeptide
  REGION 1..447: note = XENP019361 2A11_H0L0_IgG1_PVA_/S267K Heavy Chain

SEQ ID NO: 22612 - protein, 118 aa, synthetic construct; identical to SEQ ID NO: 21902
  REGION 1..118: note = Description of Artificial Sequence: Synthetic polypeptide
  REGION 1..118: note = VH of XENP019361

SEQ ID NO: 22613 - protein, 5 aa, synthetic construct
  REGION 1..5: note = Description of Artificial Sequence: Synthetic peptide
  REGION 1..5: note = XENP019361 vhCDR1
DYYMH

SEQ ID NO: 22614 - protein, 17 aa, synthetic construct
  REGION 1..17: note = Description of Artificial Sequence: Synthetic peptide
  REGION 1..17: note = XENP019361 vhCDR2
WIDPENGDTEYAPKFQG

SEQ ID NO: 22615 - protein, 9 aa, synthetic construct
  REGION 1..9: note = Description of Artificial Sequence: Synthetic peptide
  REGION 1..9: note = XENP019361 vhCDR3
RGVRQALDY

SEQ ID NO: 22616 - protein, 214 aa, synthetic construct; identical to SEQ ID NO: 21906
  REGION 1..214: note = Description of Artificial Sequence: Synthetic polypeptide
  REGION 1..214: note = XENP019361 2A11_H0L0_IgG1_PVA_/S267K Light Chain

SEQ ID NO: 22617 - protein, 107 aa, synthetic construct; identical to SEQ ID NO: 21907
  REGION 1..107: note = Description of Artificial Sequence: Synthetic polypeptide
  REGION 1..107: note = VL of XENP019361

SEQ ID NO: 22618 - protein, 11 aa, synthetic construct
  REGION 1..11: note = Description of Artificial Sequence: Synthetic peptide
  REGION 1..11: note = XENP019361 vlCDR1
RASQDIGNYLN

SEQ ID NO: 22619 - protein, 7 aa, synthetic construct
  REGION 1..7: note = Description of Artificial Sequence: Synthetic peptide
  REGION 1..7: note = XENP019361 vlCDR2
YTSRLHS

SEQ ID NO: 22620 - protein, 9 aa, synthetic construct
  REGION 1..9: note = Description of Artificial Sequence: Synthetic peptide
  REGION 1..9: note = XENP019361 vlCDR3
QQGNTLPYT

SEQ ID NO: 22621 - protein, 447 aa, synthetic construct; identical to SEQ ID NO: 2885
  REGION 1..447: note = Description of Artificial Sequence: Synthetic polypeptide
  REGION 1..447: note = XENP019362 2A11_H1L1_IgG1_PVA_/S267K Heavy Chain

SEQ ID NO: 22622 - protein, 118 aa, synthetic construct; identical to SEQ ID NO: 2686
  REGION 1..118: note = Description of Artificial Sequence: Synthetic polypeptide
  REGION 1..118: note = VH of XENP019362

SEQ ID NO: 22623 - protein, 5 aa, synthetic construct
  REGION 1..5: note = Description of Artificial Sequence: Synthetic peptide
  REGION 1..5: note = XENP019362 vhCDR1
DYYMH

SEQ ID NO: 22624 - protein, 17 aa, synthetic construct
  REGION 1..17: note = Description of Artificial Sequence: Synthetic peptide
  REGION 1..17: note = XENP019362 vhCDR2
WIDPENGDTEYAPKFQG

SEQ ID NO: 22625 - protein, 9 aa, synthetic construct
  REGION 1..9: note = Description of Artificial Sequence: Synthetic peptide
  REGION 1..9: note = XENP019362 vhCDR3
RGVRQALDY

SEQ ID NO: 22626 - protein, 214 aa, synthetic construct; identical to SEQ ID NO: 21916
  REGION 1..214: note = Description of Artificial Sequence: Synthetic polypeptide
  REGION 1..214: note = XENP019362 2A11_H1L1_IgG1_PVA_/S267K Light Chain

SEQ ID NO: 22627 - protein, 107 aa, synthetic construct; identical to SEQ ID NO: 21917
  REGION 1..107: note = Description of Artificial Sequence: Synthetic polypeptide
  REGION 1..107: note = VL of XENP019362

SEQ ID NO: 22628 - protein, 11 aa, synthetic construct
  REGION 1..11: note = Description of Artificial Sequence: Synthetic peptide
  REGION 1..11: note = XENP019362 vlCDR1
RASQDIGNYLN

SEQ ID NO: 22629 - protein, 7 aa, synthetic construct
  REGION 1..7: note = Description of Artificial Sequence: Synthetic peptide
  REGION 1..7: note = XENP019362 vlCDR2
YTSRLHS

SEQ ID NO: 22630 - protein, 9 aa, synthetic construct
  REGION 1..9: note = Description of Artificial Sequence: Synthetic peptide
  REGION 1..9: note = XENP019362 vlCDR3
QQGNTLPYT

SEQ ID NO: 22631 - protein, 447 aa, synthetic construct; identical to SEQ ID NO: 2885
  REGION 1..447: note = Description of Artificial Sequence: Synthetic polypeptide
  REGION 1..447: note = XENP019363 2A11_H1L2_IgG1_PVA_/S267K Heavy Chain

SEQ ID NO: 22632 - protein, 118 aa, synthetic construct; identical to SEQ ID NO: 2686
  REGION 1..118: note = Description of Artificial Sequence: Synthetic polypeptide
  REGION 1..118: note = VH of XENP019363

SEQ ID NO: 22633 - protein, 5 aa, synthetic construct
  REGION 1..5: note = Description of Artificial Sequence: Synthetic peptide
  REGION 1..5: note = XENP019363 vhCDR1
DYYMH

SEQ ID NO: 22634 - protein, 17 aa, synthetic construct
  REGION 1..17: note = Description of Artificial Sequence: Synthetic peptide
  REGION 1..17: note = XENP019363 vhCDR2
WIDPENGDTEYAPKFQG

SEQ ID NO: 22635 - protein, 9 aa, synthetic construct
  REGION 1..9: note = Description of Artificial Sequence: Synthetic peptide
  REGION 1..9: note = XENP019363 vhCDR3
RGVRQALDY

SEQ ID NO: 22636 - protein, 214 aa, synthetic construct; identical to SEQ ID NO: 2880
  REGION 1..214: note = Description of Artificial Sequence: Synthetic polypeptide
  REGION 1..214: note = XENP019363 2A11_H1L2_IgG1_PVA_/S267K Light Chain

SEQ ID NO: 22637 - protein, 107 aa, synthetic construct; identical to SEQ ID NO: 2881
  REGION 1..107: note = Description of Artificial Sequence: Synthetic polypeptide
  REGION 1..107: note = VL of XENP019363

SEQ ID NO: 22638 - protein, 11 aa, synthetic construct
  REGION 1..11: note = Description of Artificial Sequence: Synthetic peptide
  REGION 1..11: note = XENP019363 vlCDR1
QASQDIGNYLN

SEQ ID NO: 22639 - protein, 7 aa, synthetic construct
  REGION 1..7: note = Description of Artificial Sequence: Synthetic peptide
  REGION 1..7: note = XENP019363 vlCDR2
YTSRLHS

SEQ ID NO: 22640 - protein, 9 aa, synthetic construct
  REGION 1..9: note = Description of Artificial Sequence: Synthetic peptide
  REGION 1..9: note = XENP019363 vlCDR3
QQGNTLPYT

SEQ ID NO: 22641 - protein, 446 aa, synthetic construct; identical to SEQ ID NO: 21931
  REGION 1..446: note = Description of Artificial Sequence: Synthetic polypeptide
  REGION 1..446: note = XENP019364 2A11_H2L1_IgG1_PVA_/S267K Heavy Chain

SEQ ID NO: 22642 - protein, 117 aa, synthetic construct; identical to SEQ ID NO: 21932
  REGION 1..117: note = Description of Artificial Sequence: Synthetic polypeptide
  REGION 1..117: note = VH of XENP019364

SEQ ID NO: 22643 - protein, 5 aa, synthetic construct
  REGION 1..5: note = Description of Artificial Sequence: Synthetic peptide
  REGION 1..5: note = XENP019364 vhCDR1
DYYMH

SEQ ID NO: 22644 - protein, 17 aa, synthetic construct
  REGION 1..17: note = Description of Artificial Sequence: Synthetic peptide
  REGION 1..17: note = XENP019364 vhCDR2
WIDPENGDTEYAPKFQG

SEQ ID NO: 22645 - protein, 8 aa, synthetic construct
  REGION 1..8: note = Description of Artificial Sequence: Synthetic peptide
  REGION 1..8: note = XENP019364 vhCDR3
GVRQALDY

SEQ ID NO: 22646 - protein, 214 aa, synthetic construct; identical to SEQ ID NO: 21916
  REGION 1..214: note = Description of Artificial Sequence: Synthetic polypeptide
  REGION 1..214: note = XENP019364 2A11_H2L1_IgG1_PVA_/S267K Light Chain

SEQ ID NO: 22647 - protein, 107 aa, synthetic construct; identical to SEQ ID NO: 21917
  REGION 1..107: note = Description of Artificial Sequence: Synthetic polypeptide
  REGION 1..107: note = VL of XENP019364

SEQ ID NO: 22648 - protein, 11 aa, synthetic construct
  REGION 1..11: note = Description of Artificial Sequence: Synthetic peptide
  REGION 1..11: note = XENP019364 vlCDR1
RASQDIGNYLN

SEQ ID NO: 22649 - protein, 7 aa, synthetic construct
  REGION 1..7: note = Description of Artificial Sequence: Synthetic peptide
  REGION 1..7: note = XENP019364 vlCDR2
YTSRLHS

SEQ ID NO: 22650 - protein, 9 aa, synthetic construct
  REGION 1..9: note = Description of Artificial Sequence: Synthetic peptide
  REGION 1..9: note = XENP019364 vlCDR3
QQGNTLPYT

SEQ ID NO: 22651 - protein, 446 aa, synthetic construct; identical to SEQ ID NO: 21931
  REGION 1..446: note = Description of Artificial Sequence: Synthetic polypeptide
  REGION 1..446: note = XENP019365 2A11_H2L2_IgG1_PVA_/S267K Heavy Chain

SEQ ID NO: 22652 - protein, 117 aa, synthetic construct; identical to SEQ ID NO: 21932
  REGION 1..117: note = Description of Artificial Sequence: Synthetic polypeptide
  REGION 1..117: note = VH of XENP019365

SEQ ID NO: 22653 - protein, 5 aa, synthetic construct
  REGION 1..5: note = Description of Artificial Sequence: Synthetic peptide
  REGION 1..5: note = XENP019365 vhCDR1
DYYMH

SEQ ID NO: 22654 - protein, 17 aa, synthetic construct
  REGION 1..17: note = Description of Artificial Sequence: Synthetic peptide
  REGION 1..17: note = XENP019365 vhCDR2
WIDPENGDTEYAPKFQG

SEQ ID NO: 22655 - protein, 8 aa, synthetic construct
  REGION 1..8: note = Description of Artificial Sequence: Synthetic peptide
  REGION 1..8: note = XENP019365 vhCDR3
GVRQALDY

SEQ ID NO: 22656 - protein, 214 aa, synthetic construct; identical to SEQ ID NO: 2880
  REGION 1..214: note = Description of Artificial Sequence: Synthetic polypeptide
  REGION 1..214: note = XENP019365 2A11_H2L2_IgG1_PVA_/S267K Light Chain

SEQ ID NO: 22657 - protein, 107 aa, synthetic construct; identical to SEQ ID NO: 2881
  REGION 1..107: note = Description of Artificial Sequence: Synthetic polypeptide
  REGION 1..107: note = VL of XENP019365

SEQ ID NO: 22658 - protein, 11 aa, synthetic construct
  REGION 1..11: note = Description of Artificial Sequence: Synthetic peptide
  REGION 1..11: note = XENP019365 vlCDR1
QASQDIGNYLN

SEQ ID NO: 22659 - protein, 7 aa, synthetic construct
  REGION 1..7: note = Description of Artificial Sequence: Synthetic peptide
  REGION 1..7: note = XENP019365 vlCDR2
YTSRLHS

SEQ ID NO: 22660 - protein, 9 aa, synthetic construct
  REGION 1..9: note = Description of Artificial Sequence: Synthetic peptide
  REGION 1..9: note = XENP019365 vlCDR3
QQGNTLPYT

SEQ ID NO: 22661 - protein, 447 aa, synthetic construct; identical to SEQ ID NO: 21951
  REGION 1..447: note = Description of Artificial Sequence: Synthetic polypeptide
  REGION 1..447: note = XENP019366 2A11_H3L1_IgG1_PVA_/S267K Heavy Chain

SEQ ID NO: 22662 - protein, 118 aa, synthetic construct; identical to SEQ ID NO: 21952
  REGION 1..118: note = Description of Artificial Sequence: Synthetic polypeptide
  REGION 1..118: note = VH of XENP019366

SEQ ID NO: 22663 - protein, 5 aa, synthetic construct
  REGION 1..5: note = Description of Artificial Sequence: Synthetic peptide
  REGION 1..5: note = XENP019366 vhCDR1
DYYMH

SEQ ID NO: 22664 - protein, 17 aa, synthetic construct
  REGION 1..17: note = Description of Artificial Sequence: Synthetic peptide
  REGION 1..17: note = XENP019366 vhCDR2
WIDPENGDTEYAPSVKG

SEQ ID NO: 22665 - protein, 9 aa, synthetic construct
  REGION 1..9: note = Description of Artificial Sequence: Synthetic peptide
  REGION 1..9: note = XENP019366 vhCDR3
RGVRQALDY

SEQ ID NO: 22666 - protein, 214 aa, synthetic construct; identical to SEQ ID NO: 21916
  REGION 1..214: note = Description of Artificial Sequence: Synthetic polypeptide
  REGION 1..214: note = XENP019366 2A11_H3L1_IgG1_PVA_/S267K Light Chain

SEQ ID NO: 22667 - protein, 107 aa, synthetic construct; identical to SEQ ID NO: 21917
  REGION 1..107: note = Description of Artificial Sequence: Synthetic polypeptide
  REGION 1..107: note = VL of XENP019366

SEQ ID NO: 22668 - protein, 11 aa, synthetic construct
  REGION 1..11: note = Description of Artificial Sequence: Synthetic peptide
  REGION 1..11: note = XENP019366 vlCDR1
RASQDIGNYLN

SEQ ID NO: 22669 - protein, 7 aa, synthetic construct
  REGION 1..7: note = Description of Artificial Sequence: Synthetic peptide
  REGION 1..7: note = XENP019366 vlCDR2
YTSRLHS

SEQ ID NO: 22670 - protein, 9 aa, synthetic construct
  REGION 1..9: note = Description of Artificial Sequence: Synthetic peptide
  REGION 1..9: note = XENP019366 vlCDR3
QQGNTLPYT

SEQ ID NO: 22671 - protein, 447 aa, synthetic construct; identical to SEQ ID NO: 21951
  REGION 1..447: note = Description of Artificial Sequence: Synthetic polypeptide
  REGION 1..447: note = XENP019367 2A11_H3L2_IgG1_PVA_/S267K Heavy Chain

SEQ ID NO: 22672 - protein, 118 aa, synthetic construct; identical to SEQ ID NO: 21952
  REGION 1..118: note = Description of Artificial Sequence: Synthetic polypeptide
  REGION 1..118: note = VH of XENP019367

SEQ ID NO: 22673 - protein, 5 aa, synthetic construct
  REGION 1..5: note = Description of Artificial Sequence: Synthetic peptide
  REGION 1..5: note = XENP019367 vhCDR1
DYYMH

SEQ ID NO: 22674 - protein, 17 aa, synthetic construct
  REGION 1..17: note = Description of Artificial Sequence: Synthetic peptide
  REGION 1..17: note = XENP019367 vhCDR2
WIDPENGDTEYAPSVKG

SEQ ID NO: 22675 - protein, 9 aa, synthetic construct
  REGION 1..9: note = Description of Artificial Sequence: Synthetic peptide
  REGION 1..9: note = XENP019367 vhCDR3
RGVRQALDY

SEQ ID NO: 22676 - protein, 214 aa, synthetic construct; identical to SEQ ID NO: 2880
  REGION 1..214: note = Description of Artificial Sequence: Synthetic polypeptide
  REGION 1..214: note = XENP019367 2A11_H3L2_IgG1_PVA_/S267K Light Chain

SEQ ID NO: 22677 - protein, 107 aa, synthetic construct; identical to SEQ ID NO: 2881
  REGION 1..107: note = Description of Artificial Sequence: Synthetic polypeptide
  REGION 1..107: note = VL of XENP019367

SEQ ID NO: 22678 - protein, 11 aa, synthetic construct
  REGION 1..11: note = Description of Artificial Sequence: Synthetic peptide
  REGION 1..11: note = XENP019367 vlCDR1
QASQDIGNYLN

SEQ ID NO: 22679 - protein, 7 aa, synthetic construct
  REGION 1..7: note = Description of Artificial Sequence: Synthetic peptide
  REGION 1..7: note = XENP019367 vlCDR2
YTSRLHS

SEQ ID NO: 22680 - protein, 9 aa, synthetic construct
  REGION 1..9: note = Description of Artificial Sequence: Synthetic peptide
  REGION 1..9: note = XENP019367 vlCDR3
QQGNTLPYT

SEQ ID NO: 22681 - protein, 446 aa, synthetic construct; identical to SEQ ID NO: 21971
  REGION 1..446: note = Description of Artificial Sequence: Synthetic polypeptide
  REGION 1..446: note = XENP019368 2A11_H4L1_IgG1_PVA_/S267K Heavy Chain

SEQ ID NO: 22682 - protein, 117 aa, synthetic construct; identical to SEQ ID NO: 21972
  REGION 1..117: note = Description of Artificial Sequence: Synthetic polypeptide
  REGION 1..117: note = VH of XENP019368

SEQ ID NO: 22683 - protein, 5 aa, synthetic construct
  REGION 1..5: note = Description of Artificial Sequence: Synthetic peptide
  REGION 1..5: note = XENP019368 vhCDR1
DYYMH

SEQ ID NO: 22684 - protein, 17 aa, synthetic construct
  REGION 1..17: note = Description of Artificial Sequence: Synthetic peptide
  REGION 1..17: note = XENP019368 vhCDR2
WIDPENGDTEYAPSVKG

SEQ ID NO: 22685 - protein, 8 aa, synthetic construct
  REGION 1..8: note = Description of Artificial Sequence: Synthetic peptide
  REGION 1..8: note = XENP019368 vhCDR3
GVRQALDY

SEQ ID NO: 22686 - protein, 214 aa, synthetic construct; identical to SEQ ID NO: 21916
  REGION 1..214: note = Description of Artificial Sequence: Synthetic polypeptide
  REGION 1..214: note = XENP019368 2A11_H4L1_IgG1_PVA_/S267K Light Chain

SEQ ID NO: 22687 - protein, 107 aa, synthetic construct; identical to SEQ ID NO: 21917
  REGION 1..107: note = Description of Artificial Sequence: Synthetic polypeptide
  REGION 1..107: note = VL of XENP019368

SEQ ID NO: 22688 - protein, 11 aa, synthetic construct
  REGION 1..11: note = Description of Artificial Sequence: Synthetic peptide
  REGION 1..11: note = XENP019368 vlCDR1
RASQDIGNYLN

SEQ ID NO: 22689 - protein, 7 aa, synthetic construct
  REGION 1..7: note = Description of Artificial Sequence: Synthetic peptide
  REGION 1..7: note = XENP019368 vlCDR2
YTSRLHS

SEQ ID NO: 22690 - protein, 9 aa, synthetic construct
  REGION 1..9: note = Description of Artificial Sequence: Synthetic peptide
  REGION 1..9: note = XENP019368 vlCDR3
QQGNTLPYT

SEQ ID NO: 22691 - protein, 446 aa, synthetic construct; identical to SEQ ID NO: 21971
  REGION 1..446: note = Description of Artificial Sequence: Synthetic polypeptide
  REGION 1..446: note = XENP019369 2A11_H4L2_IgG1_PVA_/S267K Heavy Chain

SEQ ID NO: 22692 - protein, 117 aa, synthetic construct; identical to SEQ ID NO: 21972
  REGION 1..117: note = Description of Artificial Sequence: Synthetic polypeptide
  REGION 1..117: note = VH of XENP019369

SEQ ID NO: 22693 - protein, 5 aa, synthetic construct
  REGION 1..5: note = Description of Artificial Sequence: Synthetic peptide
  REGION 1..5: note = XENP019369 vhCDR1
DYYMH

SEQ ID NO: 22694 - protein, 17 aa, synthetic construct
  REGION 1..17: note = Description of Artificial Sequence: Synthetic peptide
  REGION 1..17: note = XENP019369 vhCDR2
WIDPENGDTEYAPSVKG

SEQ ID NO: 22695 - protein, 8 aa, synthetic construct
  REGION 1..8: note = Description of Artificial Sequence: Synthetic peptide
  REGION 1..8: note = XENP019369 vhCDR3
GVRQALDY

SEQ ID NO: 22696 - protein, 214 aa, synthetic construct; identical to SEQ ID NO: 2880
  REGION 1..214: note = Description of Artificial Sequence: Synthetic polypeptide
  REGION 1..214: note = XENP019369 2A11_H4L2_IgG1_PVA_/S267K Light Chain

SEQ ID NO: 22697 - protein, 107 aa, synthetic construct; identical to SEQ ID NO: 2881
  REGION 1..107: note = Description of Artificial Sequence: Synthetic polypeptide
  REGION 1..107: note = VL of XENP019369

SEQ ID NO: 22698 - protein, 11 aa, synthetic construct
  REGION 1..11: note = Description of Artificial Sequence: Synthetic peptide
  REGION 1..11: note = XENP019369 vlCDR1
QASQDIGNYLN

SEQ ID NO: 22699 - protein, 7 aa, synthetic construct
  REGION 1..7: note = Description of Artificial Sequence: Synthetic peptide
  REGION 1..7: note = XENP019369 vlCDR2
YTSRLHS

SEQ ID NO: 22700 - protein, 9 aa, synthetic construct
  REGION 1..9: note = Description of Artificial Sequence: Synthetic peptide
  REGION 1..9: note = XENP019369 vlCDR3
QQGNTLPYT

SEQ ID NO: 22701 - protein, 447 aa, synthetic construct; identical to SEQ ID NO: 2885
  REGION 1..447: note = Description of Artificial Sequence: Synthetic polypeptide
  REGION 1..447: note = XENP020023 2A11_H1L0_IgG1_PVA_/S267K Heavy Chain

SEQ ID NO: 22702 - protein, 118 aa, synthetic construct; identical to SEQ ID NO: 2686
  REGION 1..118: note = Description of Artificial Sequence: Synthetic polypeptide
  REGION 1..118: note = VH of XENP020023

SEQ ID NO: 22703 - protein, 5 aa, synthetic construct
  REGION 1..5: note = Description of Artificial Sequence: Synthetic peptide
  REGION 1..5: note = XENP020023 vhCDR1
DYYMH

SEQ ID NO: 22704 - protein, 17 aa, synthetic construct
  REGION 1..17: note = Description of Artificial Sequence: Synthetic peptide
  REGION 1..17: note = XENP020023 vhCDR2
WIDPENGDTEYAPKFQG

SEQ ID NO: 22705 - protein, 9 aa, synthetic construct
  REGION 1..9: note = Description of Artificial Sequence: Synthetic peptide
  REGION 1..9: note = XENP020023 vhCDR3
RGVRQALDY

SEQ ID NO: 22706 - protein, 214 aa, synthetic construct; identical to SEQ ID NO: 21906
  REGION 1..214: note = Description of Artificial Sequence: Synthetic polypeptide
  REGION 1..214: note = XENP020023 2A11_H1L0_IgG1_PVA_/S267K Light Chain

SEQ ID NO: 22707 - protein, 107 aa, synthetic construct; identical to SEQ ID NO: 21907
  REGION 1..107: note = Description of Artificial Sequence: Synthetic polypeptide
  REGION 1..107: note = VL of XENP020023

SEQ ID NO: 22708 - protein, 11 aa, synthetic construct
  REGION 1..11: note = Description of Artificial Sequence: Synthetic peptide
  REGION 1..11: note = XENP020023 vlCDR1
RASQDIGNYLN

SEQ ID NO: 22709 - protein, 7 aa, synthetic construct
  REGION 1..7: note = Description of Artificial Sequence: Synthetic peptide
  REGION 1..7: note = XENP020023 vlCDR2
YTSRLHS

SEQ ID NO: 22710 - protein, 9 aa, synthetic construct
  REGION 1..9: note = Description of Artificial Sequence: Synthetic peptide
  REGION 1..9: note = XENP020023 vlCDR3
QQGNTLPYT

SEQ ID NO: 22711 - protein, 447 aa, synthetic construct; identical to SEQ ID NO: 21901
  REGION 1..447: note = Description of Artificial Sequence: Synthetic polypeptide
  REGION 1..447: note = XENP020024 2A11_H0L1_IgG1_PVA_/S267K Heavy Chain

SEQ ID NO: 22712 - protein, 118 aa, synthetic construct; identical to SEQ ID NO: 21902
  REGION 1..118: note = Description of Artificial Sequence: Synthetic polypeptide
  REGION 1..118: note = VH of XENP020024

SEQ ID NO: 22713 - protein, 5 aa, synthetic construct
  REGION 1..5: note = Description of Artificial Sequence: Synthetic peptide
  REGION 1..5: note = XENP020024 vhCDR1
DYYMH

SEQ ID NO: 22714 - protein, 17 aa, synthetic construct
  REGION 1..17: note = Description of Artificial Sequence: Synthetic peptide
  REGION 1..17: note = XENP020024 vhCDR2
WIDPENGDTEYAPKFQG

SEQ ID NO: 22715 - protein, 9 aa, synthetic construct
  REGION 1..9: note = Description of Artificial Sequence: Synthetic peptide
  REGION 1..9: note = XENP020024 vhCDR3
RGVRQALDY

SEQ ID NO: 22716 - protein, 214 aa, synthetic construct; identical to SEQ ID NO: 21916
  REGION 1..214: note = Description of Artificial Sequence: Synthetic polypeptide
  REGION 1..214: note = XENP020024 2A11_H0L1_IgG1_PVA_/S267K Light Chain

SEQ ID NO: 22717 - protein, 107 aa, synthetic construct; identical to SEQ ID NO: 21917
  REGION 1..107: note = Description of Artificial Sequence: Synthetic polypeptide
  REGION 1..107: note = VL of XENP020024

SEQ ID NO: 22718 - protein, 11 aa, synthetic construct
  REGION 1..11: note = Description of Artificial Sequence: Synthetic peptide
  REGION 1..11: note = XENP020024 vlCDR1
RASQDIGNYLN

SEQ ID NO: 22719 - protein, 7 aa, synthetic construct
  REGION 1..7: note = Description of Artificial Sequence: Synthetic peptide
  REGION 1..7: note = XENP020024 vlCDR2
YTSRLHS

SEQ ID NO: 22720 - protein, 9 aa, synthetic construct
  REGION 1..9: note = Description of Artificial Sequence: Synthetic peptide
  REGION 1..9: note = XENP020024 vlCDR3
QQGNTLPYT

SEQ ID NO: 22721 - protein, 450 aa, synthetic construct; identical to SEQ ID NO: 22261
  REGION 1..450: note = Description of Artificial Sequence: Synthetic polypeptide
  REGION 1..450: note = XENP019401 7G8_H0L0_IgG1_PVA_/S267K Heavy Chain

SEQ ID NO: 22722 - protein, 121 aa, synthetic construct; identical to SEQ ID NO: 22262
  REGION 1..121: note = Description of Artificial Sequence: Synthetic polypeptide
  REGION 1..121: note = VH of XENP019401

SEQ ID NO: 22723 - protein, 5 aa, synthetic construct
  REGION 1..5: note = Description of Artificial Sequence: Synthetic peptide
  REGION 1..5: note = XENP019401 vhCDR1
DAWMD

SEQ ID NO: 22724 - protein, 19 aa, synthetic construct
  REGION 1..19: note = Description of Artificial Sequence: Synthetic peptide
  REGION 1..19: note = XENP019401 vhCDR2
EIRTKANNHATYYAESVKG

SEQ ID NO: 22725 - protein, 10 aa, synthetic construct
  REGION 1..10: note = Description of Artificial Sequence: Synthetic peptide
  REGION 1..10: note = XENP019401 vhCDR3
LANWDWYFDV

SEQ ID NO: 22726 - protein, 218 aa, synthetic construct; identical to SEQ ID NO: 22266
  REGION 1..218: note = Description of Artificial Sequence: Synthetic polypeptide
  REGION 1..218: note = XENP019401 7G8_H0L0_IgG1_PVA_/S267K Light Chain

SEQ ID NO: 22727 - protein, 111 aa, synthetic construct; identical to SEQ ID NO: 22267
  REGION 1..111: note = Description of Artificial Sequence: Synthetic polypeptide
  REGION 1..111: note = VL of XENP019401

SEQ ID NO: 22728 - protein, 15 aa, synthetic construct
  REGION 1..15: note = Description of Artificial Sequence: Synthetic peptide
  REGION 1..15: note = XENP019401 vlCDR1
KASQSVDYDGDSYMN

SEQ ID NO: 22729 - protein, 7 aa, synthetic construct
  REGION 1..7: note = Description of Artificial Sequence: Synthetic peptide
  REGION 1..7: note = XENP019401 vlCDR2
AASNLES

SEQ ID NO: 22730 - protein, 9 aa, synthetic construct
  REGION 1..9: note = Description of Artificial Sequence: Synthetic peptide
  REGION 1..9: note = XENP019401 vlCDR3
QQSNEDPFT

SEQ ID NO: 22731 - protein, 450 aa, synthetic construct; identical to SEQ ID NO: 22271
  REGION 1..450: note = Description of Artificial Sequence: Synthetic polypeptide
  REGION 1..450: note = XENP019402 7G8_H1L1_IgG1_PVA_/S267K Heavy Chain

SEQ ID NO: 22732 - protein, 121 aa, synthetic construct; identical to SEQ ID NO: 22272
  REGION 1..121: note = Description of Artificial Sequence: Synthetic polypeptide
  REGION 1..121: note = VH of XENP019402

SEQ ID NO: 22733 - protein, 5 aa, synthetic construct
  REGION 1..5: note = Description of Artificial Sequence: Synthetic peptide
  REGION 1..5: note = XENP019402 vhCDR1
DAWMD

SEQ ID NO: 22734 - protein, 19 aa, synthetic construct
  REGION 1..19: note = Description of Artificial Sequence: Synthetic peptide
  REGION 1..19: note = XENP019402 vhCDR2
EIRTKANNHATYYAEKFQG

SEQ ID NO: 22735 - protein, 10 aa, synthetic construct
  REGION 1..10: note = Description of Artificial Sequence: Synthetic peptide
  REGION 1..10: note = XENP019402 vhCDR3
LANWDWYFDV

SEQ ID NO: 22736 - protein, 218 aa, synthetic construct; identical to SEQ ID NO: 22276
  REGION 1..218: note = Description of Artificial Sequence: Synthetic polypeptide
  REGION 1..218: note = XENP019402 7G8_H1L1_IgG1_PVA_/S267K Light Chain

SEQ ID NO: 22737 - protein, 111 aa, synthetic construct; identical to SEQ ID NO: 22277
  REGION 1..111: note = Description of Artificial Sequence: Synthetic polypeptide
  REGION 1..111: note = VL of XENP019402

SEQ ID NO: 22738 - protein, 15 aa, synthetic construct
  REGION 1..15: note = Description of Artificial Sequence: Synthetic peptide
  REGION 1..15: note = XENP019402 vlCDR1
RASQSVDYDGDSYMN

SEQ ID NO: 22739 - protein, 7 aa, synthetic construct
  REGION 1..7: note = Description of Artificial Sequence: Synthetic peptide
  REGION 1..7: note = XENP019402 vlCDR2
AASNLES

SEQ ID NO: 22740 - protein, 9 aa, synthetic construct
  REGION 1..9: note = Description of Artificial Sequence: Synthetic peptide
  REGION 1..9: note = XENP019402 vlCDR3
QQSNEDPFT

SEQ ID NO: 22741 - protein, 450 aa, synthetic construct; identical to SEQ ID NO: 22271
  REGION 1..450: note = Description of Artificial Sequence: Synthetic polypeptide
  REGION 1..450: note = XENP019403 7G8_H1L2_IgG1_PVA_/S267K Heavy Chain

SEQ ID NO: 22742 - protein, 121 aa, synthetic construct; identical to SEQ ID NO: 22272
  REGION 1..121: note = Description of Artificial Sequence: Synthetic polypeptide
  REGION 1..121: note = VH of XENP019403

SEQ ID NO: 22743 - protein, 5 aa, synthetic construct
  REGION 1..5: note = Description of Artificial Sequence: Synthetic peptide
  REGION 1..5: note = XENP019403 vhCDR1
DAWMD

SEQ ID NO: 22744 - protein, 19 aa, synthetic construct
  REGION 1..19: note = Description of Artificial Sequence: Synthetic peptide
  REGION 1..19: note = XENP019403 vhCDR2
EIRTKANNHATYYAEKFQG

SEQ ID NO: 22745 - protein, 10 aa, synthetic construct
  REGION 1..10: note = Description of Artificial Sequence: Synthetic peptide
  REGION 1..10: note = XENP019403 vhCDR3
LANWDWYFDV

SEQ ID NO: 22746 - protein, 218 aa, synthetic construct; identical to SEQ ID NO: 22286
  REGION 1..218: note = Description of Artificial Sequence: Synthetic polypeptide
  REGION 1..218: note = XENP019403 7G8_H1L2_IgG1_PVA_/S267K Light Chain

SEQ ID NO: 22747 - protein, 111 aa, synthetic construct; identical to SEQ ID NO: 22287
  REGION 1..111: note = Description of Artificial Sequence: Synthetic polypeptide
  REGION 1..111: note = VL of XENP019403

SEQ ID NO: 22748 - protein, 15 aa, synthetic construct
  REGION 1..15: note = Description of Artificial Sequence: Synthetic peptide
  REGION 1..15: note = XENP019403 vlCDR1
RASQSVDYDGDSYMN

SEQ ID NO: 22749 - protein, 7 aa, synthetic construct
  REGION 1..7: note = Description of Artificial Sequence: Synthetic peptide
  REGION 1..7: note = XENP019403 vlCDR2
AASNLES

SEQ ID NO: 22750 - protein, 9 aa, synthetic construct
  REGION 1..9: note = Description of Artificial Sequence: Synthetic peptide
  REGION 1..9: note = XENP019403 vlCDR3
QQSNEDPFT

SEQ ID NO: 22751 - protein, 450 aa, synthetic construct; identical to SEQ ID NO: 22271
  REGION 1..450: note = Description of Artificial Sequence: Synthetic polypeptide
  REGION 1..450: note = XENP019404 7G8_H1L3_IgG1_PVA_/S267K Heavy Chain

SEQ ID NO: 22752 - protein, 121 aa, synthetic construct; identical to SEQ ID NO: 22272
  REGION 1..121: note = Description of Artificial Sequence: Synthetic polypeptide
  REGION 1..121: note = VH of XENP019404

SEQ ID NO: 22753 - protein, 5 aa, synthetic construct
  REGION 1..5: note = Description of Artificial Sequence: Synthetic peptide
  REGION 1..5: note = XENP019404 vhCDR1
DAWMD

SEQ ID NO: 22754 - protein, 19 aa, synthetic construct
  REGION 1..19: note = Description of Artificial Sequence: Synthetic peptide
  REGION 1..19: note = XENP019404 vhCDR2
EIRTKANNHATYYAEKFQG

SEQ ID NO: 22755 - protein, 10 aa, synthetic construct
  REGION 1..10: note = Description of Artificial Sequence: Synthetic peptide
  REGION 1..10: note = XENP019404 vhCDR3
LANWDWYFDV

SEQ ID NO: 22756 - protein, 218 aa, synthetic construct; identical to SEQ ID NO: 22296
  REGION 1..218: note = Description of Artificial Sequence: Synthetic polypeptide
  REGION 1..218: note = XENP019404 7G8_H1L3_IgG1_PVA_/S267K Light Chain

SEQ ID NO: 22757 - protein, 111 aa, synthetic construct; identical to SEQ ID NO: 22297
  REGION 1..111: note = Description of Artificial Sequence: Synthetic polypeptide
  REGION 1..111: note = VL of XENP019404

SEQ ID NO: 22758 - protein, 15 aa, synthetic construct
  REGION 1..15: note = Description of Artificial Sequence: Synthetic peptide
  REGION 1..15: note = XENP019404 vlCDR1
KASQSVDYDGDSYMN

SEQ ID NO: 22759 - protein, 7 aa, synthetic construct
  REGION 1..7: note = Description of Artificial Sequence: Synthetic peptide
  REGION 1..7: note = XENP019404 vlCDR2
AASNLES

SEQ ID NO: 22760 - protein, 9 aa, synthetic construct
  REGION 1..9: note = Description of Artificial Sequence: Synthetic peptide
  REGION 1..9: note = XENP019404 vlCDR3
QQSNEDPFT

SEQ ID NO: 22761 - protein, 450 aa, synthetic construct; identical to SEQ ID NO: 22301
  REGION 1..450: note = Description of Artificial Sequence: Synthetic polypeptide
  REGION 1..450: note = XENP019405 7G8_H2L1_IgG1_PVA_/S267K Heavy Chain

SEQ ID NO: 22762 - protein, 121 aa, synthetic construct; identical to SEQ ID NO: 22302
  REGION 1..121: note = Description of Artificial Sequence: Synthetic polypeptide
  REGION 1..121: note = VH of XENP019405

SEQ ID NO: 22763 - protein, 5 aa, synthetic construct
  REGION 1..5: note = Description of Artificial Sequence: Synthetic peptide
  REGION 1..5: note = XENP019405 vhCDR1
DAWMD

SEQ ID NO: 22764 - protein, 19 aa, synthetic construct
  REGION 1..19: note = Description of Artificial Sequence: Synthetic peptide
  REGION 1..19: note = XENP019405 vhCDR2
EIRTKANNHATYYAESVKG

SEQ ID NO: 22765 - protein, 10 aa, synthetic construct
  REGION 1..10: note = Description of Artificial Sequence: Synthetic peptide
  REGION 1..10: note = XENP019405 vhCDR3
LANWDWYFDV

SEQ ID NO: 22766 - protein, 218 aa, synthetic construct; identical to SEQ ID NO: 22276
  REGION 1..218: note = Description of Artificial Sequence: Synthetic polypeptide
  REGION 1..218: note = XENP019405 7G8_H2L1_IgG1_PVA_/S267K Light Chain

SEQ ID NO: 22767 - protein, 111 aa, synthetic construct; identical to SEQ ID NO: 22277
  REGION 1..111: note = Description of Artificial Sequence: Synthetic polypeptide
  REGION 1..111: note = VL of XENP019405

SEQ ID NO: 22768 - protein, 15 aa, synthetic construct
  REGION 1..15: note = Description of Artificial Sequence: Synthetic peptide
  REGION 1..15: note = XENP019405 vlCDR1
RASQSVDYDGDSYMN

SEQ ID NO: 22769 - protein, 7 aa, synthetic construct
  REGION 1..7: note = Description of Artificial Sequence: Synthetic peptide
  REGION 1..7: note = XENP019405 vlCDR2
AASNLES

SEQ ID NO: 22770 - protein, 9 aa, synthetic construct
  REGION 1..9: note = Description of Artificial Sequence: Synthetic peptide
  REGION 1..9: note = XENP019405 vlCDR3
QQSNEDPFT

SEQ ID NO: 22771 - protein, 450 aa, synthetic construct; identical to SEQ ID NO: 22301
  REGION 1..450: note = Description of Artificial Sequence: Synthetic polypeptide
  REGION 1..450: note = XENP019406 7G8_H2L2_IgG1_PVA_/S267K Heavy Chain

SEQ ID NO: 22772 - protein, 121 aa, synthetic construct; identical to SEQ ID NO: 22302
  REGION 1..121: note = Description of Artificial Sequence: Synthetic polypeptide
  REGION 1..121: note = VH of XENP019406

SEQ ID NO: 22773 - protein, 5 aa, synthetic construct
  REGION 1..5: note = Description of Artificial Sequence: Synthetic peptide
  REGION 1..5: note = XENP019406 vhCDR1
DAWMD

SEQ ID NO: 22774 - protein, 19 aa, synthetic construct
  REGION 1..19: note = Description of Artificial Sequence: Synthetic peptide
  REGION 1..19: note = XENP019406 vhCDR2
EIRTKANNHATYYAESVKG

SEQ ID NO: 22775 - protein, 10 aa, synthetic construct
  REGION 1..10: note = Description of Artificial Sequence: Synthetic peptide
  REGION 1..10: note = XENP019406 vhCDR3
LANWDWYFDV

SEQ ID NO: 22776 - protein, 218 aa, synthetic construct; identical to SEQ ID NO: 22286
  REGION 1..218: note = Description of Artificial Sequence: Synthetic polypeptide
  REGION 1..218: note = XENP019406 7G8_H2L2_IgG1_PVA_/S267K Light Chain

SEQ ID NO: 22777 - protein, 111 aa, synthetic construct; identical to SEQ ID NO: 22287
  REGION 1..111: note = Description of Artificial Sequence: Synthetic polypeptide
  REGION 1..111: note = VL of XENP019406

SEQ ID NO: 22778 - protein, 15 aa, synthetic construct
  REGION 1..15: note = Description of Artificial Sequence: Synthetic peptide
  REGION 1..15: note = XENP019406 vlCDR1
RASQSVDYDGDSYMN

SEQ ID NO: 22779 - protein, 7 aa, synthetic construct
  REGION 1..7: note = Description of Artificial Sequence: Synthetic peptide
  REGION 1..7: note = XENP019406 vlCDR2
AASNLES

SEQ ID NO: 22780 - protein, 9 aa, synthetic construct
  REGION 1..9: note = Description of Artificial Sequence: Synthetic peptide
  REGION 1..9: note = XENP019406 vlCDR3
QQSNEDPFT

SEQ ID NO: 22781 - protein, 450 aa, synthetic construct; identical to SEQ ID NO: 22301
  REGION 1..450: note = Description of Artificial Sequence: Synthetic polypeptide
  REGION 1..450: note = XENP019407 7G8_H2L3_IgG1_PVA_/S267K Heavy Chain

SEQ ID NO: 22782 - protein, 121 aa, synthetic construct; identical to SEQ ID NO: 22302
  REGION 1..121: note = Description of Artificial Sequence: Synthetic polypeptide
  REGION 1..121: note = VH of XENP019407

SEQ ID NO: 22783 - protein, 5 aa, synthetic construct
  REGION 1..5: note = Description of Artificial Sequence: Synthetic peptide
  REGION 1..5: note = XENP019407 vhCDR1
DAWMD

SEQ ID NO: 22784 - protein, 19 aa, synthetic construct
  REGION 1..19: note = Description of Artificial Sequence: Synthetic peptide
  REGION 1..19: note = XENP019407 vhCDR2
EIRTKANNHATYYAESVKG

SEQ ID NO: 22785 - protein, 10 aa, synthetic construct
  REGION 1..10: note = Description of Artificial Sequence: Synthetic peptide
  REGION 1..10: note = XENP019407 vhCDR3
LANWDWYFDV

SEQ ID NO: 22786 - protein, 218 aa, synthetic construct; identical to SEQ ID NO: 22296
  REGION 1..218: note = Description of Artificial Sequence: Synthetic polypeptide
  REGION 1..218: note = XENP019407 7G8_H2L3_IgG1_PVA_/S267K Light Chain

SEQ ID NO: 22787 - protein, 111 aa, synthetic construct; identical to SEQ ID NO: 22297
  REGION 1..111: note = Description of Artificial Sequence: Synthetic polypeptide
  REGION 1..111: note = VL of XENP019407

SEQ ID NO: 22788 - protein, 15 aa, synthetic construct
  REGION 1..15: note = Description of Artificial Sequence: Synthetic peptide
  REGION 1..15: note = XENP019407 vlCDR1
KASQSVDYDGDSYMN

SEQ ID NO: 22789 - protein, 7 aa, synthetic construct
  REGION 1..7: note = Description of Artificial Sequence: Synthetic peptide
  REGION 1..7: note = XENP019407 vlCDR2
AASNLES

SEQ ID NO: 22790 - protein, 9 aa, synthetic construct
  REGION 1..9: note = Description of Artificial Sequence: Synthetic peptide
  REGION 1..9: note = XENP019407 vlCDR3
QQSNEDPFT

SEQ ID NO: 22791 - protein, 450 aa, synthetic construct; identical to SEQ ID NO: 22271
  REGION 1..450: note = Description of Artificial Sequence: Synthetic polypeptide
  REGION 1..450: note = XENP020028 7G8_H1L0_IgG1_PVA_/S267K Heavy Chain

SEQ ID NO: 22792 - protein, 121 aa, synthetic construct; identical to SEQ ID NO: 22272
  REGION 1..121: note = Description of Artificial Sequence: Synthetic polypeptide
  REGION 1..121: note = VH of XENP020028

SEQ ID NO: 22793 - protein, 5 aa, synthetic construct
  REGION 1..5: note = Description of Artificial Sequence: Synthetic peptide
  REGION 1..5: note = XENP020028 vhCDR1
DAWMD

SEQ ID NO: 22794 - protein, 19 aa, synthetic construct
  REGION 1..19: note = Description of Artificial Sequence: Synthetic peptide
  REGION 1..19: note = XENP020028 vhCDR2
EIRTKANNHATYYAEKFQG

SEQ ID NO: 22795 - protein, 10 aa, synthetic construct
  REGION 1..10: note = Description of Artificial Sequence: Synthetic peptide
  REGION 1..10: note = XENP020028 vhCDR3
LANWDWYFDV

SEQ ID NO: 22796 - protein, 218 aa, synthetic construct; identical to SEQ ID NO: 22266
  REGION 1..218: note = Description of Artificial Sequence: Synthetic polypeptide
  REGION 1..218: note = XENP020028 7G8_H1L0_IgG1_PVA_/S267K Light Chain

SEQ ID NO: 22797 - protein, 111 aa, synthetic construct; identical to SEQ ID NO: 22267
  REGION 1..111: note = Description of Artificial Sequence: Synthetic polypeptide
  REGION 1..111: note = VL of XENP020028

SEQ ID NO: 22798 - protein, 15 aa, synthetic construct
  REGION 1..15: note = Description of Artificial Sequence: Synthetic peptide
  REGION 1..15: note = XENP020028 vlCDR1
KASQSVDYDGDSYMN

SEQ ID NO: 22799 - protein, 7 aa, synthetic construct
  REGION 1..7: note = Description of Artificial Sequence: Synthetic peptide
  REGION 1..7: note = XENP020028 vlCDR2
AASNLES

SEQ ID NO: 22800 - protein, 9 aa, synthetic construct
  REGION 1..9: note = Description of Artificial Sequence: Synthetic peptide
  REGION 1..9: note = XENP020028 vlCDR3
QQSNEDPFT

SEQ ID NO: 22801 - protein, 450 aa, synthetic construct; identical to SEQ ID NO: 22261
  REGION 1..450: note = Description of Artificial Sequence: Synthetic polypeptide
  REGION 1..450: note = XENP020029 7G8_H0L1_IgG1_PVA_/S267K Heavy Chain

SEQ ID NO: 22802 - protein, 121 aa, synthetic construct; identical to SEQ ID NO: 22262
  REGION 1..121: note = Description of Artificial Sequence: Synthetic polypeptide
  REGION 1..121: note = VH of XENP020029

SEQ ID NO: 22803 - protein, 5 aa, synthetic construct
  REGION 1..5: note = Description of Artificial Sequence: Synthetic peptide
  REGION 1..5: note = XENP020029 vhCDR1
DAWMD

SEQ ID NO: 22804 - protein, 19 aa, synthetic construct
  REGION 1..19: note = Description of Artificial Sequence: Synthetic peptide
  REGION 1..19: note = XENP020029 vhCDR2
EIRTKANNHATYYAESVKG

SEQ ID NO: 22805 - protein, 10 aa, synthetic construct
  REGION 1..10: note = Description of Artificial Sequence: Synthetic peptide
  REGION 1..10: note = XENP020029 vhCDR3
LANWDWYFDV

SEQ ID NO: 22806 - protein, 218 aa, synthetic construct; identical to SEQ ID NO: 22276
  REGION 1..218: note = Description of Artificial Sequence: Synthetic polypeptide
  REGION 1..218: note = XENP020029 7G8_H0L1_IgG1_PVA_/S267K Light Chain

SEQ ID NO: 22807 - protein, 111 aa, synthetic construct; identical to SEQ ID NO: 22277
  REGION 1..111: note = Description of Artificial Sequence: Synthetic polypeptide
  REGION 1..111: note = VL of XENP020029

SEQ ID NO: 22808 - protein, 15 aa, synthetic construct
  REGION 1..15: note = Description of Artificial Sequence: Synthetic peptide
  REGION 1..15: note = XENP020029 vlCDR1
RASQSVDYDGDSYMN

SEQ ID NO: 22809 - protein, 7 aa, synthetic construct
  REGION 1..7: note = Description of Artificial Sequence: Synthetic peptide
  REGION 1..7: note = XENP020029 vlCDR2
AASNLES

SEQ ID NO: 22810 - protein, 9 aa, synthetic construct
  REGION 1..9: note = Description of Artificial Sequence: Synthetic peptide
  REGION 1..9: note = XENP020029 vlCDR3
QQSNEDPFT

SEQ ID NO: 22811 - protein, 450 aa, synthetic construct; identical to SEQ ID NO: 22301
  REGION 1..450: note = Description of Artificial Sequence: Synthetic polypeptide
  REGION 1..450: note = XENP020262 7G8_H2L0_IgG1_PVA_/S267K Heavy Chain

SEQ ID NO: 22812 - protein, 121 aa, synthetic construct; identical to SEQ ID NO: 22302
  REGION 1..121: note = Description of Artificial Sequence: Synthetic polypeptide
  REGION 1..121: note = VH of XENP020262

SEQ ID NO: 22813 - protein, 5 aa, synthetic construct
  REGION 1..5: note = Description of Artificial Sequence: Synthetic peptide
  REGION 1..5: note = XENP020262 vhCDR1
DAWMD

SEQ ID NO: 22814 - protein, 19 aa, synthetic construct
  REGION 1..19: note = Description of Artificial Sequence: Synthetic peptide
  REGION 1..19: note = XENP020262 vhCDR2
EIRTKANNHATYYAESVKG

SEQ ID NO: 22815 - protein, 10 aa, synthetic construct
  REGION 1..10: note = Description of Artificial Sequence: Synthetic peptide
  REGION 1..10: note = XENP020262 vhCDR3
LANWDWYFDV

SEQ ID NO: 22816 - protein, 218 aa, synthetic construct; identical to SEQ ID NO: 22266
  REGION 1..218: note = Description of Artificial Sequence: Synthetic polypeptide
  REGION 1..218: note = XENP020262 7G8_H2L0_IgG1_PVA_/S267K Light Chain

SEQ ID NO: 22817 - protein, 111 aa, synthetic construct; identical to SEQ ID NO: 22267
  REGION 1..111: note = Description of Artificial Sequence: Synthetic polypeptide
  REGION 1..111: note = VL of XENP020262

SEQ ID NO: 22818 - protein, 15 aa, synthetic construct
  REGION 1..15: note = Description of Artificial Sequence: Synthetic peptide
  REGION 1..15: note = XENP020262 vlCDR1
KASQSVDYDGDSYMN

SEQ ID NO: 22819 - protein, 7 aa, synthetic construct
  REGION 1..7: note = Description of Artificial Sequence: Synthetic peptide
  REGION 1..7: note = XENP020262 vlCDR2
AASNLES

SEQ ID NO: 22820 - protein, 9 aa, synthetic construct
  REGION 1..9: note = Description of Artificial Sequence: Synthetic peptide
  REGION 1..9: note = XENP020262 vlCDR3
QQSNEDPFT

SEQ ID NO: 22821 - protein, 450 aa, synthetic construct; identical to SEQ ID NO: 22261
  REGION 1..450: note = Description of Artificial Sequence: Synthetic polypeptide
  REGION 1..450: note = XENP020263 7G8_H0L2_IgG1_PVA_/S267K Heavy Chain

SEQ ID NO: 22822 - protein, 121 aa, synthetic construct; identical to SEQ ID NO: 22262
  REGION 1..121: note = Description of Artificial Sequence: Synthetic polypeptide
  REGION 1..121: note = VH of XENP020263

SEQ ID NO: 22823 - protein, 5 aa, synthetic construct
  REGION 1..5: note = Description of Artificial Sequence: Synthetic peptide
  REGION 1..5: note = XENP020263 vhCDR1
DAWMD

SEQ ID NO: 22824 - protein, 19 aa, synthetic construct
  REGION 1..19: note = Description of Artificial Sequence: Synthetic peptide
  REGION 1..19: note = XENP020263 vhCDR2
EIRTKANNHATYYAESVKG

SEQ ID NO: 22825 - protein, 10 aa, synthetic construct
  REGION 1..10: note = Description of Artificial Sequence: Synthetic peptide
  REGION 1..10: note = XENP020263 vhCDR3
LANWDWYFDV

SEQ ID NO: 22826 - protein, 218 aa, synthetic construct; identical to SEQ ID NO: 22286
  REGION 1..218: note = Description of Artificial Sequence: Synthetic polypeptide
  REGION 1..218: note = XENP020263 7G8_H0L2_IgG1_PVA_/S267K Light Chain

SEQ ID NO: 22827 - protein, 111 aa, synthetic construct; identical to SEQ ID NO: 22287
  REGION 1..111: note = Description of Artificial Sequence: Synthetic polypeptide
  REGION 1..111: note = VL of XENP020263

SEQ ID NO: 22828 - protein, 15 aa, synthetic construct
  REGION 1..15: note = Description of Artificial Sequence: Synthetic peptide
  REGION 1..15: note = XENP020263 vlCDR1
RASQSVDYDGDSYMN

SEQ ID NO: 22829 - protein, 7 aa, synthetic construct
  REGION 1..7: note = Description of Artificial Sequence: Synthetic peptide
  REGION 1..7: note = XENP020263 vlCDR2
AASNLES

SEQ ID NO: 22830 - protein, 9 aa, synthetic construct
  REGION 1..9: note = Description of Artificial Sequence: Synthetic peptide
  REGION 1..9: note = XENP020263 vlCDR3
QQSNEDPFT

SEQ ID NO: 22831 - protein, 450 aa, synthetic construct; identical to SEQ ID NO: 22481
  REGION 1..450: note = Description of Artificial Sequence: Synthetic polypeptide
  REGION 1..450: note = XENP020417 7G8_H3L1_IgG1_PVA_/S267K Heavy Chain

SEQ ID NO: 22832 - protein, 121 aa, synthetic construct; identical to SEQ ID NO: 22482
  REGION 1..121: note = Description of Artificial Sequence: Synthetic polypeptide
  REGION 1..121: note = VH of XENP020417

SEQ ID NO: 22833 - protein, 5 aa, synthetic construct
  REGION 1..5: note = Description of Artificial Sequence: Synthetic peptide
  REGION 1..5: note = XENP020417 vhCDR1
DAWMD

SEQ ID NO: 22834 - protein, 19 aa, synthetic construct
  REGION 1..19: note = Description of Artificial Sequence: Synthetic peptide
  REGION 1..19: note = XENP020417 vhCDR2
EIRTKANNHATYYAESVKG

SEQ ID NO: 22835 - protein, 10 aa, synthetic construct
  REGION 1..10: note = Description of Artificial Sequence: Synthetic peptide
  REGION 1..10: note = XENP020417 vhCDR3
LANWDWYFDV

SEQ ID NO: 22836 - protein, 218 aa, synthetic construct; identical to SEQ ID NO: 22276
  REGION 1..218: note = Description of Artificial Sequence: Synthetic polypeptide
  REGION 1..218: note = XENP020417 7G8_H3L1_IgG1_PVA_/S267K Light Chain

SEQ ID NO: 22837 - protein, 111 aa, synthetic construct; identical to SEQ ID NO: 22277
  REGION 1..111: note = Description of Artificial Sequence: Synthetic polypeptide
  REGION 1..111: note = VL of XENP020417

SEQ ID NO: 22838 - protein, 15 aa, synthetic construct
  REGION 1..15: note = Description of Artificial Sequence: Synthetic peptide
  REGION 1..15: note = XENP020417 vlCDR1
RASQSVDYDGDSYMN

SEQ ID NO: 22839 - protein, 7 aa, synthetic construct
  REGION 1..7: note = Description of Artificial Sequence: Synthetic peptide
  REGION 1..7: note = XENP020417 vlCDR2
AASNLES

SEQ ID NO: 22840 - protein, 9 aa, synthetic construct
  REGION 1..9: note = Description of Artificial Sequence: Synthetic peptide
  REGION 1..9: note = XENP020417 vlCDR3
QQSNEDPFT

SEQ ID NO: 22841 - protein, 450 aa, synthetic construct; identical to SEQ ID NO: 22481
  REGION 1..450: note = Description of Artificial Sequence: Synthetic polypeptide
  REGION 1..450: note = XENP020418 7G8_H3L2_IgG1_PVA_/S267K Heavy Chain

SEQ ID NO: 22842 - protein, 121 aa, synthetic construct; identical to SEQ ID NO: 22482
  REGION 1..121: note = Description of Artificial Sequence: Synthetic polypeptide
  REGION 1..121: note = VH of XENP020418

SEQ ID NO: 22843 - protein, 5 aa, synthetic construct
  REGION 1..5: note = Description of Artificial Sequence: Synthetic peptide
  REGION 1..5: note = XENP020418 vhCDR1
DAWMD

SEQ ID NO: 22844 - protein, 19 aa, synthetic construct
  REGION 1..19: note = Description of Artificial Sequence: Synthetic peptide
  REGION 1..19: note = XENP020418 vhCDR2
EIRTKANNHATYYAESVKG

SEQ ID NO: 22845 - protein, 10 aa, synthetic construct
  REGION 1..10: note = Description of Artificial Sequence: Synthetic peptide
  REGION 1..10: note = XENP020418 vhCDR3
LANWDWYFDV

SEQ ID NO: 22846 - protein, 218 aa, synthetic construct; identical to SEQ ID NO: 22286
  REGION 1..218: note = Description of Artificial Sequence: Synthetic polypeptide
  REGION 1..218: note = XENP020418 7G8_H3L2_IgG1_PVA_/S267K Light Chain

SEQ ID NO: 22847 - protein, 111 aa, synthetic construct; identical to SEQ ID NO: 22287
  REGION 1..111: note = Description of Artificial Sequence: Synthetic polypeptide
  REGION 1..111: note = VL of XENP020418

SEQ ID NO: 22848 - protein, 15 aa, synthetic construct
  REGION 1..15: note = Description of Artificial Sequence: Synthetic peptide
  REGION 1..15: note = XENP020418 vlCDR1
RASQSVDYDGDSYMN

SEQ ID NO: 22849 - protein, 7 aa, synthetic construct
  REGION 1..7: note = Description of Artificial Sequence: Synthetic peptide
  REGION 1..7: note = XENP020418 vlCDR2
AASNLES

SEQ ID NO: 22850 - protein, 9 aa, synthetic construct
  REGION 1..9: note = Description of Artificial Sequence: Synthetic peptide
  REGION 1..9: note = XENP020418 vlCDR3
QQSNEDPFT

SEQ ID NO: 22851 - protein, 450 aa, synthetic construct; identical to SEQ ID NO: 22481
  REGION 1..450: note = Description of Artificial Sequence: Synthetic polypeptide
  REGION 1..450: note = XENP020419 7G8_H3L3_IgG1_PVA_/S267K Heavy Chain

SEQ ID NO: 22852 - protein, 121 aa, synthetic construct; identical to SEQ ID NO: 22482
  REGION 1..121: note = Description of Artificial Sequence: Synthetic polypeptide
  REGION 1..121: note = VH of XENP020419

SEQ ID NO: 22853 - protein, 5 aa, synthetic construct
  REGION 1..5: note = Description of Artificial Sequence: Synthetic peptide
  REGION 1..5: note = XENP020419 vhCDR1
DAWMD

SEQ ID NO: 22854 - protein, 19 aa, synthetic construct
  REGION 1..19: note = Description of Artificial Sequence: Synthetic peptide
  REGION 1..19: note = XENP020419 vhCDR2
EIRTKANNHATYYAESVKG

SEQ ID NO: 22855 - protein, 10 aa, synthetic construct
  REGION 1..10: note = Description of Artificial Sequence: Synthetic peptide
  REGION 1..10: note = XENP020419 vhCDR3
LANWDWYFDV

SEQ ID NO: 22856 - protein, 218 aa, synthetic construct; identical to SEQ ID NO: 22296
  REGION 1..218: note = Description of Artificial Sequence: Synthetic polypeptide
  REGION 1..218: note = XENP020419 7G8_H3L3_IgG1_PVA_/S267K Light Chain

SEQ ID NO: 22857 - protein, 111 aa, synthetic construct; identical to SEQ ID NO: 22297
  REGION 1..111: note = Description of Artificial Sequence: Synthetic polypeptide
  REGION 1..111: note = VL of XENP020419

SEQ ID NO: 22858 - protein, 15 aa, synthetic construct
  REGION 1..15: note = Description of Artificial Sequence: Synthetic peptide
  REGION 1..15: note = XENP020419 vlCDR1
KASQSVDYDGDSYMN

SEQ ID NO: 22859 - protein, 7 aa, synthetic construct
  REGION 1..7: note = Description of Artificial Sequence: Synthetic peptide
  REGION 1..7: note = XENP020419 vlCDR2
AASNLES

SEQ ID NO: 22860 - protein, 9 aa, synthetic construct
  REGION 1..9: note = Description of Artificial Sequence: Synthetic peptide
  REGION 1..9: note = XENP020419 vlCDR3
QQSNEDPFT

SEQ ID NO: 22861 - protein, 450 aa, synthetic construct; identical to SEQ ID NO: 22481
  REGION 1..450: note = Description of Artificial Sequence: Synthetic polypeptide
  REGION 1..450: note = XENP020417 7G8_H3L1_IgG1_PVA_/S267K Heavy Chain

SEQ ID NO: 22862 - protein, 121 aa, synthetic construct; identical to SEQ ID NO: 22482
  REGION 1..121: note = Description of Artificial Sequence: Synthetic polypeptide
  REGION 1..121: note = VH of XENP020417

SEQ ID NO: 22863 - protein, 5 aa, synthetic construct
  REGION 1..5: note = Description of Artificial Sequence: Synthetic peptide
  REGION 1..5: note = XENP020417 vhCDR1
DAWMD

SEQ ID NO: 22864 - protein, 19 aa, synthetic construct
  REGION 1..19: note = Description of Artificial Sequence: Synthetic peptide
  REGION 1..19: note = XENP020417 vhCDR2
EIRTKANNHATYYAESVKG

SEQ ID NO: 22865 - protein, 10 aa, synthetic construct
  REGION 1..10: note = Description of Artificial Sequence: Synthetic peptide
  REGION 1..10: note = XENP020417 vhCDR3
LANWDWYFDV

SEQ ID NO: 22866 - protein, 218 aa, synthetic construct; identical to SEQ ID NO: 22276
  REGION 1..218: note = Description of Artificial Sequence: Synthetic polypeptide
  REGION 1..218: note = XENP020417 7G8_H3L1_IgG1_PVA_/S267K Light Chain

SEQ ID NO: 22867 - protein, 111 aa, synthetic construct; identical to SEQ ID NO: 22277
  REGION 1..111: note = Description of Artificial Sequence: Synthetic polypeptide
  REGION 1..111: note = VL of XENP020417

SEQ ID NO: 22868 - protein, 15 aa, synthetic construct
  REGION 1..15: note = Description of Artificial Sequence: Synthetic peptide
  REGION 1..15: note = XENP020417 vlCDR1
RASQSVDYDGDSYMN

SEQ ID NO: 22869 - protein, 7 aa, synthetic construct
  REGION 1..7: note = Description of Artificial Sequence: Synthetic peptide
  REGION 1..7: note = XENP020417 vlCDR2
AASNLES

SEQ ID NO: 22870 - protein, 9 aa, synthetic construct
  REGION 1..9: note = Description of Artificial Sequence: Synthetic peptide
  REGION 1..9: note = XENP020417 vlCDR3
QQSNEDPFT

SEQ ID NO: 22871 - protein, 450 aa, synthetic construct; identical to SEQ ID NO: 22481
  REGION 1..450: note = Description of Artificial Sequence: Synthetic polypeptide
  REGION 1..450: note = XENP020418 7G8_H3L2_IgG1_PVA_/S267K Heavy Chain

SEQ ID NO: 22872 - protein, 121 aa, synthetic construct; identical to SEQ ID NO: 22482
  REGION 1..121: note = Description of Artificial Sequence: Synthetic polypeptide
  REGION 1..121: note = VH of XENP020418

SEQ ID NO: 22873 - protein, 5 aa, synthetic construct
  REGION 1..5: note = Description of Artificial Sequence: Synthetic peptide
  REGION 1..5: note = XENP020418 vhCDR1
DAWMD

SEQ ID NO: 22874 - protein, 19 aa, synthetic construct
  REGION 1..19: note = Description of Artificial Sequence: Synthetic peptide
  REGION 1..19: note = XENP020418 vhCDR2
EIRTKANNHATYYAESVKG

SEQ ID NO: 22875 - protein, 10 aa, synthetic construct
  REGION 1..10: note = Description of Artificial Sequence: Synthetic peptide
  REGION 1..10: note = XENP020418 vhCDR3
LANWDWYFDV

SEQ ID NO: 22876 - protein, 218 aa, synthetic construct; identical to SEQ ID NO: 22286
  REGION 1..218: note = Description of Artificial Sequence: Synthetic polypeptide
  REGION 1..218: note = XENP020418 7G8_H3L2_IgG1_PVA_/S267K Light Chain

SEQ ID NO: 22877 - protein, 111 aa, synthetic construct; identical to SEQ ID NO: 22287
  REGION 1..111: note = Description of Artificial Sequence: Synthetic polypeptide
  REGION 1..111: note = VL of XENP020418

SEQ ID NO: 22878 - protein, 15 aa, synthetic construct
  REGION 1..15: note = Description of Artificial Sequence: Synthetic peptide
  REGION 1..15: note = XENP020418 vlCDR1
RASQSVDYDGDSYMN

SEQ ID NO: 22879 - protein, 7 aa, synthetic construct
  REGION 1..7: note = Description of Artificial Sequence: Synthetic peptide
  REGION 1..7: note = XENP020418 vlCDR2
AASNLES

SEQ ID NO: 22880 - protein, 9 aa, synthetic construct
  REGION 1..9: note = Description of Artificial Sequence: Synthetic peptide
  REGION 1..9: note = XENP020418 vlCDR3
QQSNEDPFT

SEQ ID NO: 22881 - protein, 450 aa, synthetic construct; identical to SEQ ID NO: 22481
  REGION 1..450: note = Description of Artificial Sequence: Synthetic polypeptide
  REGION 1..450: note = XENP020419 7G8_H3L3_IgG1_PVA_/S267K Heavy Chain

SEQ ID NO: 22882 - protein, 121 aa, synthetic construct; identical to SEQ ID NO: 22482
  REGION 1..121: note = Description of Artificial Sequence: Synthetic polypeptide
  REGION 1..121: note = VH of XENP020419

SEQ ID NO: 22883 - protein, 5 aa, synthetic construct
  REGION 1..5: note = Description of Artificial Sequence: Synthetic peptide
  REGION 1..5: note = XENP020419 vhCDR1
DAWMD

SEQ ID NO: 22884 - protein, 19 aa, synthetic construct
  REGION 1..19: note = Description of Artificial Sequence: Synthetic peptide
  REGION 1..19: note = XENP020419 vhCDR2
EIRTKANNHATYYAESVKG

SEQ ID NO: 22885 - protein, 10 aa, synthetic construct
  REGION 1..10: note = Description of Artificial Sequence: Synthetic peptide
  REGION 1..10: note = XENP020419 vhCDR3
LANWDWYFDV

SEQ ID NO: 22886 - protein, 218 aa, synthetic construct; identical to SEQ ID NO: 22296
  REGION 1..218: note = Description of Artificial Sequence: Synthetic polypeptide
  REGION 1..218: note = XENP020419 7G8_H3L3_IgG1_PVA_/S267K Light Chain

SEQ ID NO: 22887 - protein, 111 aa, synthetic construct; identical to SEQ ID NO: 22297
  REGION 1..111: note = Description of Artificial Sequence: Synthetic polypeptide
  REGION 1..111: note = VL of XENP020419

SEQ ID NO: 22888 - protein, 15 aa, synthetic construct
  REGION 1..15: note = Description of Artificial Sequence: Synthetic peptide
  REGION 1..15: note = XENP020419 vlCDR1
KASQSVDYDGDSYMN

SEQ ID NO: 22889 - protein, 7 aa, synthetic construct
  REGION 1..7: note = Description of Artificial Sequence: Synthetic peptide
  REGION 1..7: note = XENP020419 vlCDR2
AASNLES

SEQ ID NO: 22890 - protein, 9 aa, synthetic construct
  REGION 1..9: note = Description of Artificial Sequence: Synthetic peptide
  REGION 1..9: note = XENP020419 vlCDR3
QQSNEDPFT

SEQ ID NO: 22891 - protein, 450 aa, synthetic construct
  REGION 1..450: note = Description of Artificial Sequence: Synthetic polypeptide
  REGION 1..450: note = XENP020449 7G8_H0.1_L0_IgG1_PVA_/S267K Heavy Chain
EVKLEESGGGLVQPGGSMKLSCAASGYTFSDAWMDWVRQSPEKGLEWVAEIRTKANNHATYYAESVKGRFTISRDDSKSSVYLQMNSLRAEDTGIYYCTRLANWDWYFDVWGAGTTVTVSSASTKGPSVFPLAPSSKSTSGGTAALGCLVKDYFPEPVTVSWNSGALTSGVHTFPAVLQSSGLYSLSSVVTVPSSSLGTQTYICNVNHKPSDTKVDKKVEPKSCDKTHTCPPCPAPPVAGPSVFLFPPKPKDTLMISRTPEVTCVVVDVKHEDPEVKFNWYVDGVEVHNAKTKPREEEYNSTYRVVSVLTVLHQDWLNGKEYKCKVSNKALPAPIEKTISKAKGQPREPQVYTLPPSREEMTKNQVSLTCDVSGFYPSDIAVEWESDGQPENNYKTTPPVLDSDGSFFLYSKLTVDKSRWEQGDVFSCSVMHEALHNHYTQKSLSLSPGK

SEQ ID NO: 22892 - protein, 121 aa, synthetic construct
  REGION 1..121: note = Description of Artificial Sequence: Synthetic polypeptide
  REGION 1..121: note = VH of XENP020449
EVKLEESGGGLVQPGGSMKLSCAASGYTFSDAWMDWVRQSPEKGLEWVAEIRTKANNHATYYAESVKGRFTISRDDSKSSVYLQMNSLRAEDTGIYYCTRLANWDWYFDVWGAGTTVTVSS

SEQ ID NO: 22893 - protein, 5 aa, synthetic construct
  REGION 1..5: note = Description of Artificial Sequence: Synthetic peptide
  REGION 1..5: note = XENP020449 vhCDR1
DAWMD

SEQ ID NO: 22894 - protein, 19 aa, synthetic construct
  REGION 1..19: note = Description of Artificial Sequence: Synthetic peptide
  REGION 1..19: note = XENP020449 vhCDR2
EIRTKANNHATYYAESVKG

SEQ ID NO: 22895 - protein, 10 aa, synthetic construct
  REGION 1..10: note = Description of Artificial Sequence: Synthetic peptide
  REGION 1..10: note = XENP020449 vhCDR3
LANWDWYFDV

SEQ ID NO: 22896 - protein, 218 aa, synthetic construct; identical to SEQ ID NO: 22266
  REGION 1..218: note = Description of Artificial Sequence: Synthetic polypeptide
  REGION 1..218: note = XENP020449 7G8_H0.1_L0_IgG1_PVA_/S267K Light Chain

SEQ ID NO: 22897 - protein, 111 aa, synthetic construct; identical to SEQ ID NO: 22267
  REGION 1..111: note = Description of Artificial Sequence: Synthetic polypeptide
  REGION 1..111: note = VL of XENP020449

SEQ ID NO: 22898 - protein, 15 aa, synthetic construct
  REGION 1..15: note = Description of Artificial Sequence: Synthetic peptide
  REGION 1..15: note = XENP020449 vlCDR1
KASQSVDYDGDSYMN

SEQ ID NO: 22899 - protein, 7 aa, synthetic construct
  REGION 1..7: note = Description of Artificial Sequence: Synthetic peptide
  REGION 1..7: note = XENP020449 vlCDR2
AASNLES

SEQ ID NO: 22900 - protein, 9 aa, synthetic construct
  REGION 1..9: note = Description of Artificial Sequence: Synthetic peptide
  REGION 1..9: note = XENP020449 vlCDR3
QQSNEDPFT

SEQ ID NO: 22901 - protein, 450 aa, synthetic construct
  REGION 1..450: note = Description of Artificial Sequence: Synthetic polypeptide
  REGION 1..450: note = XENP020450 7G8_H0.2_L0_IgG1_PVA_/S267K Heavy Chain
EVKLEESGGGLVQPGGSMKLSCAASGGTFSDAWMDWVRQSPEKGLEWVAEIRTKANNHATYYAESVKGRFTISRDDSKSSVYLQMNSLRAEDTGIYYCTRLANWDWYFDVWGAGTTVTVSSASTKGPSVFPLAPSSKSTSGGTAALGCLVKDYFPEPVTVSWNSGALTSGVHTFPAVLQSSGLYSLSSVVTVPSSSLGTQTYICNVNHKPSDTKVDKKVEPKSCDKTHTCPPCPAPPVAGPSVFLFPPKPKDTLMISRTPEVTCVVVDVKHEDPEVKFNWYVDGVEVHNAKTKPREEEYNSTYRVVSVLTVLHQDWLNGKEYKCKVSNKALPAPIEKTISKAKGQPREPQVYTLPPSREEMTKNQVSLTCDVSGFYPSDIAVEWESDGQPENNYKTTPPVLDSDGSFFLYSKLTVDKSRWEQGDVFSCSVMHEALHNHYTQKSLSLSPGK

SEQ ID NO: 22902 - protein, 121 aa, synthetic construct
  REGION 1..121: note = Description of Artificial Sequence: Synthetic polypeptide
  REGION 1..121: note = VH of XENP020450
EVKLEESGGGLVQPGGSMKLSCAASGGTFSDAWMDWVRQSPEKGLEWVAEIRTKANNHATYYAESVKGRFTISRDDSKSSVYLQMNSLRAEDTGIYYCTRLANWDWYFDVWGAGTTVTVSS

SEQ ID NO: 22903 - protein, 5 aa, synthetic construct
  REGION 1..5: note = Description of Artificial Sequence: Synthetic peptide
  REGION 1..5: note = XENP020450 vhCDR1
DAWMD

SEQ ID NO: 22904 - protein, 19 aa, synthetic construct
  REGION 1..19: note = Description of Artificial Sequence: Synthetic peptide
  REGION 1..19: note = XENP020450 vhCDR2
EIRTKANNHATYYAESVKG

SEQ ID NO: 22905 - protein, 10 aa, synthetic construct
  REGION 1..10: note = Description of Artificial Sequence: Synthetic peptide
  REGION 1..10: note = XENP020450 vhCDR3
LANWDWYFDV

SEQ ID NO: 22906 - protein, 218 aa, synthetic construct; identical to SEQ ID NO: 22266
  REGION 1..218: note = Description of Artificial Sequence: Synthetic polypeptide
  REGION 1..218: note = XENP020450 7G8_H0.2_L0_IgG1_PVA_/S267K Light Chain

SEQ ID NO: 22907 - protein, 111 aa, synthetic construct; identical to SEQ ID NO: 22267
  REGION 1..111: note = Description of Artificial Sequence: Synthetic polypeptide
  REGION 1..111: note = VL of XENP020450

SEQ ID NO: 22908 - protein, 15 aa, synthetic construct
  REGION 1..15: note = Description of Artificial Sequence: Synthetic peptide
  REGION 1..15: note = XENP020450 vlCDR1
KASQSVDYDGDSYMN

SEQ ID NO: 22909 - protein, 7 aa, synthetic construct
  REGION 1..7: note = Description of Artificial Sequence: Synthetic peptide
  REGION 1..7: note = XENP020450 vlCDR2
AASNLES

SEQ ID NO: 22910 - protein, 9 aa, synthetic construct
  REGION 1..9: note = Description of Artificial Sequence: Synthetic peptide
  REGION 1..9: note = XENP020450 vlCDR3
QQSNEDPFT

SEQ ID NO: 22911 - protein, 450 aa, synthetic construct
  REGION 1..450: note = Description of Artificial Sequence: Synthetic polypeptide
  REGION 1..450: note = XENP020451 7G8_H0.3_L0_IgG1_PVA_/S267K Heavy Chain
EVKLEESGGGLVQPGGSMKLSCAASGDTFSDAWMDWVRQSPEKGLEWVAEIRTKANNHATYYAESVKGRFTISRDDSKSSVYLQMNSLRAEDTGIYYCTRLANWDWYFDVWGAGTTVTVSSASTKGPSVFPLAPSSKSTSGGTAALGCLVKDYFPEPVTVSWNSGALTSGVHTFPAVLQSSGLYSLSSVVTVPSSSLGTQTYICNVNHKPSDTKVDKKVEPKSCDKTHTCPPCPAPPVAGPSVFLFPPKPKDTLMISRTPEVTCVVVDVKHEDPEVKFNWYVDGVEVHNAKTKPREEEYNSTYRVVSVLTVLHQDWLNGKEYKCKVSNKALPAPIEKTISKAKGQPREPQVYTLPPSREEMTKNQVSLTCDVSGFYPSDIAVEWESDGQPENNYKTTPPVLDSDGSFFLYSKLTVDKSRWEQGDVFSCSVMHEALHNHYTQKSLSLSPGK

SEQ ID NO: 22912 - protein, 121 aa, synthetic construct
  REGION 1..121: note = Description of Artificial Sequence: Synthetic polypeptide
  REGION 1..121: note = VH of XENP020451
EVKLEESGGGLVQPGGSMKLSCAASGDTFSDAWMDWVRQSPEKGLEWVAEIRTKANNHATYYAESVKGRFTISRDDSKSSVYLQMNSLRAEDTGIYYCTRLANWDWYFDVWGAGTTVTVSS

SEQ ID NO: 22913 - protein, 5 aa, synthetic construct
  REGION 1..5: note = Description of Artificial Sequence: Synthetic peptide
  REGION 1..5: note = XENP020451 vhCDR1
DAWMD

SEQ ID NO: 22914 - protein, 19 aa, synthetic construct
  REGION 1..19: note = Description of Artificial Sequence: Synthetic peptide
  REGION 1..19: note = XENP020451 vhCDR2
EIRTKANNHATYYAESVKG

SEQ ID NO: 22915 - protein, 10 aa, synthetic construct
  REGION 1..10: note = Description of Artificial Sequence: Synthetic peptide
  REGION 1..10: note = XENP020451 vhCDR3
LANWDWYFDV

SEQ ID NO: 22916 - protein, 218 aa, synthetic construct; identical to SEQ ID NO: 22266
  REGION 1..218: note = Description of Artificial Sequence: Synthetic polypeptide
  REGION 1..218: note = XENP020451 7G8_H0.3_L0_IgG1_PVA_/S267K Light Chain

SEQ ID NO: 22917 - protein, 111 aa, synthetic construct; identical to SEQ ID NO: 22267
  REGION 1..111: note = Description of Artificial Sequence: Synthetic polypeptide
  REGION 1..111: note = VL of XENP020451

SEQ ID NO: 22918 - protein, 15 aa, synthetic construct
  REGION 1..15: note = Description of Artificial Sequence: Synthetic peptide
  REGION 1..15: note = XENP020451 vlCDR1
KASQSVDYDGDSYMN

SEQ ID NO: 22919 - protein, 7 aa, synthetic construct
  REGION 1..7: note = Description of Artificial Sequence: Synthetic peptide
  REGION 1..7: note = XENP020451 vlCDR2
AASNLES

SEQ ID NO: 22920 - protein, 9 aa, synthetic construct
  REGION 1..9: note = Description of Artificial Sequence: Synthetic peptide
  REGION 1..9: note = XENP020451 vlCDR3
QQSNEDPFT

SEQ ID NO: 22921 - protein, 450 aa, synthetic construct
  REGION 1..450: note = Description of Artificial Sequence: Synthetic polypeptide
  REGION 1..450: note = XENP020452 7G8_H0.4_L0_IgG1_PVA_/S267K Heavy Chain
EVKLEESGGGLVQPGGSMKLSCAASGFSFSDAWMDWVRQSPEKGLEWVAEIRTKANNHATYYAESVKGRFTISRDDSKSSVYLQMNSLRAEDTGIYYCTRLANWDWYFDVWGAGTTVTVSSASTKGPSVFPLAPSSKSTSGGTAALGCLVKDYFPEPVTVSWNSGALTSGVHTFPAVLQSSGLYSLSSVVTVPSSSLGTQTYICNVNHKPSDTKVDKKVEPKSCDKTHTCPPCPAPPVAGPSVFLFPPKPKDTLMISRTPEVTCVVVDVKHEDPEVKFNWYVDGVEVHNAKTKPREEEYNSTYRVVSVLTVLHQDWLNGKEYKCKVSNKALPAPIEKTISKAKGQPREPQVYTLPPSREEMTKNQVSLTCDVSGFYPSDIAVEWESDGQPENNYKTTPPVLDSDGSFFLYSKLTVDKSRWEQGDVFSCSVMHEALHNHYTQKSLSLSPGK

SEQ ID NO: 22922 - protein, 121 aa, synthetic construct
  REGION 1..121: note = Description of Artificial Sequence: Synthetic polypeptide
  REGION 1..121: note = VH of XENP020452
EVKLEESGGGLVQPGGSMKLSCAASGFSFSDAWMDWVRQSPEKGLEWVAEIRTKANNHATYYAESVKGRFTISRDDSKSSVYLQMNSLRAEDTGIYYCTRLANWDWYFDVWGAGTTVTVSS

SEQ ID NO: 22923 - protein, 5 aa, synthetic construct
  REGION 1..5: note = Description of Artificial Sequence: Synthetic peptide
  REGION 1..5: note = XENP020452 vhCDR1
DAWMD

SEQ ID NO: 22924 - protein, 19 aa, synthetic construct
  REGION 1..19: note = Description of Artificial Sequence: Synthetic peptide
  REGION 1..19: note = XENP020452 vhCDR2
EIRTKANNHATYYAESVKG

SEQ ID NO: 22925 - protein, 10 aa, synthetic construct
  REGION 1..10: note = Description of Artificial Sequence: Synthetic peptide
  REGION 1..10: note = XENP020452 vhCDR3
LANWDWYFDV

SEQ ID NO: 22926 - protein, 218 aa, synthetic construct; identical to SEQ ID NO: 22266
  REGION 1..218: note = Description of Artificial Sequence: Synthetic polypeptide
  REGION 1..218: note = XENP020452 7G8_H0.4_L0_IgG1_PVA_/S267K Light Chain

SEQ ID NO: 22927 - protein, 111 aa, synthetic construct; identical to SEQ ID NO: 22267
  REGION 1..111: note = Description of Artificial Sequence: Synthetic polypeptide
  REGION 1..111: note = VL of XENP020452

SEQ ID NO: 22928 - protein, 15 aa, synthetic construct
  REGION 1..15: note = Description of Artificial Sequence: Synthetic peptide
  REGION 1..15: note = XENP020452 vlCDR1
KASQSVDYDGDSYMN

SEQ ID NO: 22929 - protein, 7 aa, synthetic construct
  REGION 1..7: note = Description of Artificial Sequence: Synthetic peptide
  REGION 1..7: note = XENP020452 vlCDR2
AASNLES

SEQ ID NO: 22930 - protein, 9 aa, synthetic construct
  REGION 1..9: note = Description of Artificial Sequence: Synthetic peptide
  REGION 1..9: note = XENP020452 vlCDR3
QQSNEDPFT

SEQ ID NO: 22931 - protein, 450 aa, synthetic construct
  REGION 1..450: note = Description of Artificial Sequence: Synthetic polypeptide
  REGION 1..450: note = XENP020453 7G8_H0.5_L0_IgG1_PVA_/S267K Heavy Chain
EVKLEESGGGLVQPGGSMKLSCAASGFTFTDAWMDWVRQSPEKGLEWVAEIRTKANNHATYYAESVKGRFTISRDDSKSSVYLQMNSLRAEDTGIYYCTRLANWDWYFDVWGAGTTVTVSSASTKGPSVFPLAPSSKSTSGGTAALGCLVKDYFPEPVTVSWNSGALTSGVHTFPAVLQSSGLYSLSSVVTVPSSSLGTQTYICNVNHKPSDTKVDKKVEPKSCDKTHTCPPCPAPPVAGPSVFLFPPKPKDTLMISRTPEVTCVVVDVKHEDPEVKFNWYVDGVEVHNAKTKPREEEYNSTYRVVSVLTVLHQDWLNGKEYKCKVSNKALPAPIEKTISKAKGQPREPQVYTLPPSREEMTKNQVSLTCDVSGFYPSDIAVEWESDGQPENNYKTTPPVLDSDGSFFLYSKLTVDKSRWEQGDVFSCSVMHEALHNHYTQKSLSLSPGK

SEQ ID NO: 22932 - protein, 121 aa, synthetic construct
  REGION 1..121: note = Description of Artificial Sequence: Synthetic polypeptide
  REGION 1..121: note = VH of XENP020453
EVKLEESGGGLVQPGGSMKLSCAASGFTFTDAWMDWVRQSPEKGLEWVAEIRTKANNHATYYAESVKGRFTISRDDSKSSVYLQMNSLRAEDTGIYYCTRLANWDWYFDVWGAGTTVTVSS

SEQ ID NO: 22933 - protein, 5 aa, synthetic construct
  REGION 1..5: note = Description of Artificial Sequence: Synthetic peptide
  REGION 1..5: note = XENP020453 vhCDR1
DAWMD

SEQ ID NO: 22934 - protein, 19 aa, synthetic construct
  REGION 1..19: note = Description of Artificial Sequence: Synthetic peptide
  REGION 1..19: note = XENP020453 vhCDR2
EIRTKANNHATYYAESVKG

SEQ ID NO: 22935 - protein, 10 aa, synthetic construct
  REGION 1..10: note = Description of Artificial Sequence: Synthetic peptide
  REGION 1..10: note = XENP020453 vhCDR3
LANWDWYFDV

SEQ ID NO: 22936 - protein, 218 aa, synthetic construct; identical to SEQ ID NO: 22266
  REGION 1..218: note = Description of Artificial Sequence: Synthetic polypeptide
  REGION 1..218: note = XENP020453 7G8_H0.5_L0_IgG1_PVA_/S267K Light Chain

SEQ ID NO: 22937 - protein, 111 aa, synthetic construct; identical to SEQ ID NO: 22267
  REGION 1..111: note = Description of Artificial Sequence: Synthetic polypeptide
  REGION 1..111: note = VL of XENP020453

SEQ ID NO: 22938 - protein, 15 aa, synthetic construct
  REGION 1..15: note = Description of Artificial Sequence: Synthetic peptide
  REGION 1..15: note = XENP020453 vlCDR1
KASQSVDYDGDSYMN

SEQ ID NO: 22939 - protein, 7 aa, synthetic construct
  REGION 1..7: note = Description of Artificial Sequence: Synthetic peptide
  REGION 1..7: note = XENP020453 vlCDR2
AASNLES

SEQ ID NO: 22940 - protein, 9 aa, synthetic construct
  REGION 1..9: note = Description of Artificial Sequence: Synthetic peptide
  REGION 1..9: note = XENP020453 vlCDR3
QQSNEDPFT

SEQ ID NO: 22941 - protein, 450 aa, synthetic construct
  REGION 1..450: note = Description of Artificial Sequence: Synthetic polypeptide
  REGION 1..450: note = XENP020454 7G8_H0.6_L0_IgG1_PVA_/S267K Heavy Chain
EVKLEESGGGLVQPGGSMKLSCAASGFTFDDAWMDWVRQSPEKGLEWVAEIRTKANNHATYYAESVKGRFTISRDDSKSSVYLQMNSLRAEDTGIYYCTRLANWDWYFDVWGAGTTVTVSSASTKGPSVFPLAPSSKSTSGGTAALGCLVKDYFPEPVTVSWNSGALTSGVHTFPAVLQSSGLYSLSSVVTVPSSSLGTQTYICNVNHKPSDTKVDKKVEPKSCDKTHTCPPCPAPPVAGPSVFLFPPKPKDTLMISRTPEVTCVVVDVKHEDPEVKFNWYVDGVEVHNAKTKPREEEYNSTYRVVSVLTVLHQDWLNGKEYKCKVSNKALPAPIEKTISKAKGQPREPQVYTLPPSREEMTKNQVSLTCDVSGFYPSDIAVEWESDGQPENNYKTTPPVLDSDGSFFLYSKLTVDKSRWEQGDVFSCSVMHEALHNHYTQKSLSLSPGK

SEQ ID NO: 22942 - protein, 121 aa, synthetic construct
  REGION 1..121: note = Description of Artificial Sequence: Synthetic polypeptide
  REGION 1..121: note = VH of XENP020454
EVKLEESGGGLVQPGGSMKLSCAASGFTFDDAWMDWVRQSPEKGLEWVAEIRTKANNHATYYAESVKGRFTISRDDSKSSVYLQMNSLRAEDTGIYYCTRLANWDWYFDVWGAGTTVTVSS

SEQ ID NO: 22943 - protein, 5 aa, synthetic construct
  REGION 1..5: note = Description of Artificial Sequence: Synthetic peptide
  REGION 1..5: note = XENP020454 vhCDR1
DAWMD

SEQ ID NO: 22944 - protein, 19 aa, synthetic construct
  REGION 1..19: note = Description of Artificial Sequence: Synthetic peptide
  REGION 1..19: note = XENP020454 vhCDR2
EIRTKANNHATYYAESVKG

SEQ ID NO: 22945 - protein, 10 aa, synthetic construct
  REGION 1..10: note = Description of Artificial Sequence: Synthetic peptide
  REGION 1..10: note = XENP020454 vhCDR3
LANWDWYFDV

SEQ ID NO: 22946 - protein, 218 aa, synthetic construct; identical to SEQ ID NO: 22266
  REGION 1..218: note = Description of Artificial Sequence: Synthetic polypeptide
  REGION 1..218: note = XENP020454 7G8_H0.6_L0_IgG1_PVA_/S267K Light Chain

SEQ ID NO: 22947 - protein, 111 aa, synthetic construct; identical to SEQ ID NO: 22267
  REGION 1..111: note = Description of Artificial Sequence: Synthetic polypeptide
  REGION 1..111: note = VL of XENP020454

SEQ ID NO: 22948 - protein, 15 aa, synthetic construct
  REGION 1..15: note = Description of Artificial Sequence: Synthetic peptide
  REGION 1..15: note = XENP020454 vlCDR1
KASQSVDYDGDSYMN

SEQ ID NO: 22949 - protein, 7 aa, synthetic construct
  REGION 1..7: note = Description of Artificial Sequence: Synthetic peptide
  REGION 1..7: note = XENP020454 vlCDR2
AASNLES

SEQ ID NO: 22950 - protein, 9 aa, synthetic construct
  REGION 1..9: note = Description of Artificial Sequence: Synthetic peptide
  REGION 1..9: note = XENP020454 vlCDR3
QQSNEDPFT

SEQ ID NO: 22951 - protein, 450 aa, synthetic construct
  REGION 1..450: note = Description of Artificial Sequence: Synthetic polypeptide
  REGION 1..450: note = XENP020455 7G8_H0.7_L0_IgG1_PVA_/S267K Heavy Chain
EVKLEESGGGLVQPGGSMKLSCAASGFTFGDAWMDWVRQSPEKGLEWVAEIRTKANNHATYYAESVKGRFTISRDDSKSSVYLQMNSLRAEDTGIYYCTRLANWDWYFDVWGAGTTVTVSSASTKGPSVFPLAPSSKSTSGGTAALGCLVKDYFPEPVTVSWNSGALTSGVHTFPAVLQSSGLYSLSSVVTVPSSSLGTQTYICNVNHKPSDTKVDKKVEPKSCDKTHTCPPCPAPPVAGPSVFLFPPKPKDTLMISRTPEVTCVVVDVKHEDPEVKFNWYVDGVEVHNAKTKPREEEYNSTYRVVSVLTVLHQDWLNGKEYKCKVSNKALPAPIEKTISKAKGQPREPQVYTLPPSREEMTKNQVSLTCDVSGFYPSDIAVEWESDGQPENNYKTTPPVLDSDGSFFLYSKLTVDKSRWEQGDVFSCSVMHEALHNHYTQKSLSLSPGK

SEQ ID NO: 22952 - protein, 121 aa, synthetic construct
  REGION 1..121: note = Description of Artificial Sequence: Synthetic polypeptide
  REGION 1..121: note = VH of XENP020455
EVKLEESGGGLVQPGGSMKLSCAASGFTFGDAWMDWVRQSPEKGLEWVAEIRTKANNHATYYAESVKGRFTISRDDSKSSVYLQMNSLRAEDTGIYYCTRLANWDWYFDVWGAGTTVTVSS

SEQ ID NO: 22953 - protein, 5 aa, synthetic construct
  REGION 1..5: note = Description of Artificial Sequence: Synthetic peptide
  REGION 1..5: note = XENP020455 vhCDR1
DAWMD

SEQ ID NO: 22954 - protein, 19 aa, synthetic construct
  REGION 1..19: note = Description of Artificial Sequence: Synthetic peptide
  REGION 1..19: note = XENP020455 vhCDR2
EIRTKANNHATYYAESVKG

SEQ ID NO: 22955 - protein, 10 aa, synthetic construct
  REGION 1..10: note = Description of Artificial Sequence: Synthetic peptide
  REGION 1..10: note = XENP020455 vhCDR3
LANWDWYFDV

SEQ ID NO: 22956 - protein, 218 aa, synthetic construct; identical to SEQ ID NO: 22266
  REGION 1..218: note = Description of Artificial Sequence: Synthetic polypeptide
  REGION 1..218: note = XENP020455 7G8_H0.7_L0_IgG1_PVA_/S267K Light Chain

SEQ ID NO: 22957 - protein, 111 aa, synthetic construct; identical to SEQ ID NO: 22267
  REGION 1..111: note = Description of Artificial Sequence: Synthetic polypeptide
  REGION 1..111: note = VL of XENP020455

SEQ ID NO: 22958 - protein, 15 aa, synthetic construct
  REGION 1..15: note = Description of Artificial Sequence: Synthetic peptide
  REGION 1..15: note = XENP020455 vlCDR1
KASQSVDYDGDSYMN

SEQ ID NO: 22959 - protein, 7 aa, synthetic construct
  REGION 1..7: note = Description of Artificial Sequence: Synthetic peptide
  REGION 1..7: note = XENP020455 vlCDR2
AASNLES

SEQ ID NO: 22960 - protein, 9 aa, synthetic construct
  REGION 1..9: note = Description of Artificial Sequence: Synthetic peptide
  REGION 1..9: note = XENP020455 vlCDR3
QQSNEDPFT

SEQ ID NO: 22961 - protein, 450 aa, synthetic construct
  REGION 1..450: note = Description of Artificial Sequence: Synthetic polypeptide
  REGION 1..450: note = XENP020456 7G8_H0.8_L0_IgG1_PVA_/S267K Heavy Chain
EVKLEESGGGLVQPGGSMKLSCAASGFTFSNAWMDWVRQSPEKGLEWVAEIRTKANNHATYYAESVKGRFTISRDDSKSSVYLQMNSLRAEDTGIYYCTRLANWDWYFDVWGAGTTVTVSSASTKGPSVFPLAPSSKSTSGGTAALGCLVKDYFPEPVTVSWNSGALTSGVHTFPAVLQSSGLYSLSSVVTVPSSSLGTQTYICNVNHKPSDTKVDKKVEPKSCDKTHTCPPCPAPPVAGPSVFLFPPKPKDTLMISRTPEVTCVVVDVKHEDPEVKFNWYVDGVEVHNAKTKPREEEYNSTYRVVSVLTVLHQDWLNGKEYKCKVSNKALPAPIEKTISKAKGQPREPQVYTLPPSREEMTKNQVSLTCDVSGFYPSDIAVEWESDGQPENNYKTTPPVLDSDGSFFLYSKLTVDKSRWEQGDVFSCSVMHEALHNHYTQKSLSLSPGK

SEQ ID NO: 22962 - protein, 121 aa, synthetic construct
  REGION 1..121: note = Description of Artificial Sequence: Synthetic polypeptide
  REGION 1..121: note = VH of XENP020456
EVKLEESGGGLVQPGGSMKLSCAASGFTFSNAWMDWVRQSPEKGLEWVAEIRTKANNHATYYAESVKGRFTISRDDSKSSVYLQMNSLRAEDTGIYYCTRLANWDWYFDVWGAGTTVTVSS

SEQ ID NO: 22963 - protein, 5 aa, synthetic construct
  REGION 1..5: note = Description of Artificial Sequence: Synthetic peptide
  REGION 1..5: note = XENP020456 vhCDR1
NAWMD

SEQ ID NO: 22964 - protein, 19 aa, synthetic construct
  REGION 1..19: note = Description of Artificial Sequence: Synthetic peptide
  REGION 1..19: note = XENP020456 vhCDR2
EIRTKANNHATYYAESVKG

SEQ ID NO: 22965 - protein, 10 aa, synthetic construct
  REGION 1..10: note = Description of Artificial Sequence: Synthetic peptide
  REGION 1..10: note = XENP020456 vhCDR3
LANWDWYFDV

SEQ ID NO: 22966 - protein, 218 aa, synthetic construct; identical to SEQ ID NO: 22266
  REGION 1..218: note = Description of Artificial Sequence: Synthetic polypeptide
  REGION 1..218: note = XENP020456 7G8_H0.8_L0_IgG1_PVA_/S267K Light Chain

SEQ ID NO: 22967 - protein, 111 aa, synthetic construct; identical to SEQ ID NO: 22267
  REGION 1..111: note = Description of Artificial Sequence: Synthetic polypeptide
  REGION 1..111: note = VL of XENP020456

SEQ ID NO: 22968 - protein, 15 aa, synthetic construct
  REGION 1..15: note = Description of Artificial Sequence: Synthetic peptide
  REGION 1..15: note = XENP020456 vlCDR1
KASQSVDYDGDSYMN

SEQ ID NO: 22969 - protein, 7 aa, synthetic construct
  REGION 1..7: note = Description of Artificial Sequence: Synthetic peptide
  REGION 1..7: note = XENP020456 vlCDR2
AASNLES

SEQ ID NO: 22970 - protein, 9 aa, synthetic construct
  REGION 1..9: note = Description of Artificial Sequence: Synthetic peptide
  REGION 1..9: note = XENP020456 vlCDR3
QQSNEDPFT

SEQ ID NO: 22971 - protein, 450 aa, synthetic construct
  REGION 1..450: note = Description of Artificial Sequence: Synthetic polypeptide
  REGION 1..450: note = XENP020457 7G8_H0.9_L0_IgG1_PVA_/S267K Heavy Chain
EVKLEESGGGLVQPGGSMKLSCAASGFTFSEAWMDWVRQSPEKGLEWVAEIRTKANNHATYYAESVKGRFTISRDDSKSSVYLQMNSLRAEDTGIYYCTRLANWDWYFDVWGAGTTVTVSSASTKGPSVFPLAPSSKSTSGGTAALGCLVKDYFPEPVTVSWNSGALTSGVHTFPAVLQSSGLYSLSSVVTVPSSSLGTQTYICNVNHKPSDTKVDKKVEPKSCDKTHTCPPCPAPPVAGPSVFLFPPKPKDTLMISRTPEVTCVVVDVKHEDPEVKFNWYVDGVEVHNAKTKPREEEYNSTYRVVSVLTVLHQDWLNGKEYKCKVSNKALPAPIEKTISKAKGQPREPQVYTLPPSREEMTKNQVSLTCDVSGFYPSDIAVEWESDGQPENNYKTTPPVLDSDGSFFLYSKLTVDKSRWEQGDVFSCSVMHEALHNHYTQKSLSLSPGK

SEQ ID NO: 22972 - protein, 121 aa, synthetic construct
  REGION 1..121: note = Description of Artificial Sequence: Synthetic polypeptide
  REGION 1..121: note = VH of XENP020457
EVKLEESGGGLVQPGGSMKLSCAASGFTFSEAWMDWVRQSPEKGLEWVAEIRTKANNHATYYAESVKGRFTISRDDSKSSVYLQMNSLRAEDTGIYYCTRLANWDWYFDVWGAGTTVTVSS

SEQ ID NO: 22973 - protein, 5 aa, synthetic construct
  REGION 1..5: note = Description of Artificial Sequence: Synthetic peptide
  REGION 1..5: note = XENP020457 vhCDR1
EAWMD

SEQ ID NO: 22974 - protein, 19 aa, synthetic construct
  REGION 1..19: note = Description of Artificial Sequence: Synthetic peptide
  REGION 1..19: note = XENP020457 vhCDR2
EIRTKANNHATYYAESVKG

SEQ ID NO: 22975 - protein, 10 aa, synthetic construct
  REGION 1..10: note = Description of Artificial Sequence: Synthetic peptide
  REGION 1..10: note = XENP020457 vhCDR3
LANWDWYFDV

SEQ ID NO: 22976 - protein, 218 aa, synthetic construct; identical to SEQ ID NO: 22266
  REGION 1..218: note = Description of Artificial Sequence: Synthetic polypeptide
  REGION 1..218: note = XENP020457 7G8_H0.9_L0_IgG1_PVA_/S267K Light Chain

SEQ ID NO: 22977 - protein, 111 aa, synthetic construct; identical to SEQ ID NO: 22267
  REGION 1..111: note = Description of Artificial Sequence: Synthetic polypeptide
  REGION 1..111: note = VL of XENP020457

SEQ ID NO: 22978 - protein, 15 aa, synthetic construct
  REGION 1..15: note = Description of Artificial Sequence: Synthetic peptide
  REGION 1..15: note = XENP020457 vlCDR1
KASQSVDYDGDSYMN

SEQ ID NO: 22979 - protein, 7 aa, synthetic construct
  REGION 1..7: note = Description of Artificial Sequence: Synthetic peptide
  REGION 1..7: note = XENP020457 vlCDR2
AASNLES

SEQ ID NO: 22980 - protein, 9 aa, synthetic construct
  REGION 1..9: note = Description of Artificial Sequence: Synthetic peptide
  REGION 1..9: note = XENP020457 vlCDR3
QQSNEDPFT

SEQ ID NO: 22981 - protein, 450 aa, synthetic construct
  REGION 1..450: note = Description of Artificial Sequence: Synthetic polypeptide
  REGION 1..450: note = XENP020458 7G8_H0.10_L0_IgG1_PVA_/S267K Heavy Chain
EVKLEESGGGLVQPGGSMKLSCAASGFTFSHAWMDWVRQSPEKGLEWVAEIRTKANNHATYYAESVKGRFTISRDDSKSSVYLQMNSLRAEDTGIYYCTRLANWDWYFDVWGAGTTVTVSSASTKGPSVFPLAPSSKSTSGGTAALGCLVKDYFPEPVTVSWNSGALTSGVHTFPAVLQSSGLYSLSSVVTVPSSSLGTQTYICNVNHKPSDTKVDKKVEPKSCDKTHTCPPCPAPPVAGPSVFLFPPKPKDTLMISRTPEVTCVVVDVKHEDPEVKFNWYVDGVEVHNAKTKPREEEYNSTYRVVSVLTVLHQDWLNGKEYKCKVSNKALPAPIEKTISKAKGQPREPQVYTLPPSREEMTKNQVSLTCDVSGFYPSDIAVEWESDGQPENNYKTTPPVLDSDGSFFLYSKLTVDKSRWEQGDVFSCSVMHEALHNHYTQKSLSLSPGK

SEQ ID NO: 22982 - protein, 121 aa, synthetic construct
  REGION 1..121: note = Description of Artificial Sequence: Synthetic polypeptide
  REGION 1..121: note = VH of XENP020458
EVKLEESGGGLVQPGGSMKLSCAASGFTFSHAWMDWVRQSPEKGLEWVAEIRTKANNHATYYAESVKGRFTISRDDSKSSVYLQMNSLRAEDTGIYYCTRLANWDWYFDVWGAGTTVTVSS

SEQ ID NO: 22983 - protein, 5 aa, synthetic construct
  REGION 1..5: note = Description of Artificial Sequence: Synthetic peptide
  REGION 1..5: note = XENP020458 vhCDR1
HAWMD

SEQ ID NO: 22984 - protein, 19 aa, synthetic construct
  REGION 1..19: note = Description of Artificial Sequence: Synthetic peptide
  REGION 1..19: note = XENP020458 vhCDR2
EIRTKANNHATYYAESVKG

SEQ ID NO: 22985 - protein, 10 aa, synthetic construct
  REGION 1..10: note = Description of Artificial Sequence: Synthetic peptide
  REGION 1..10: note = XENP020458 vhCDR3
LANWDWYFDV

SEQ ID NO: 22986 - protein, 218 aa, synthetic construct; identical to SEQ ID NO: 22266
  REGION 1..218: note = Description of Artificial Sequence: Synthetic polypeptide
  REGION 1..218: note = XENP020458 7G8_H0.10_L0_IgG1_PVA_/S267K Light Chain

SEQ ID NO: 22987 - protein, 111 aa, synthetic construct; identical to SEQ ID NO: 22267
  REGION 1..111: note = Description of Artificial Sequence: Synthetic polypeptide
  REGION 1..111: note = VL of XENP020458

SEQ ID NO: 22988 - protein, 15 aa, synthetic construct
  REGION 1..15: note = Description of Artificial Sequence: Synthetic peptide
  REGION 1..15: note = XENP020458 vlCDR1
KASQSVDYDGDSYMN

SEQ ID NO: 22989 - protein, 7 aa, synthetic construct
  REGION 1..7: note = Description of Artificial Sequence: Synthetic peptide
  REGION 1..7: note = XENP020458 vlCDR2
AASNLES

SEQ ID NO: 22990 - protein, 9 aa, synthetic construct
  REGION 1..9: note = Description of Artificial Sequence: Synthetic peptide
  REGION 1..9: note = XENP020458 vlCDR3
QQSNEDPFT

SEQ ID NO: 22991 - protein, 450 aa, synthetic construct
  REGION 1..450: note = Description of Artificial Sequence: Synthetic polypeptide
  REGION 1..450: note = XENP020459 7G8_H0.11_L0_IgG1_PVA_/S267K Heavy Chain
EVKLEESGGGLVQPGGSMKLSCAASGFTFSSAWMDWVRQSPEKGLEWVAEIRTKANNHATYYAESVKGRFTISRDDSKSSVYLQMNSLRAEDTGIYYCTRLANWDWYFDVWGAGTTVTVSSASTKGPSVFPLAPSSKSTSGGTAALGCLVKDYFPEPVTVSWNSGALTSGVHTFPAVLQSSGLYSLSSVVTVPSSSLGTQTYICNVNHKPSDTKVDKKVEPKSCDKTHTCPPCPAPPVAGPSVFLFPPKPKDTLMISRTPEVTCVVVDVKHEDPEVKFNWYVDGVEVHNAKTKPREEEYNSTYRVVSVLTVLHQDWLNGKEYKCKVSNKALPAPIEKTISKAKGQPREPQVYTLPPSREEMTKNQVSLTCDVSGFYPSDIAVEWESDGQPENNYKTTPPVLDSDGSFFLYSKLTVDKSRWEQGDVFSCSVMHEALHNHYTQKSLSLSPGK

SEQ ID NO: 22992 - protein, 121 aa, synthetic construct
  REGION 1..121: note = Description of Artificial Sequence: Synthetic polypeptide
  REGION 1..121: note = VH of XENP020459
EVKLEESGGGLVQPGGSMKLSCAASGFTFSSAWMDWVRQSPEKGLEWVAEIRTKANNHATYYAESVKGRFTISRDDSKSSVYLQMNSLRAEDTGIYYCTRLANWDWYFDVWGAGTTVTVSS

SEQ ID NO: 22993 - protein, 5 aa, synthetic construct
  REGION 1..5: note = Description of Artificial Sequence: Synthetic peptide
  REGION 1..5: note = XENP020459 vhCDR1
SAWMD

SEQ ID NO: 22994 - protein, 19 aa, synthetic construct
  REGION 1..19: note = Description of Artificial Sequence: Synthetic peptide
  REGION 1..19: note = XENP020459 vhCDR2
EIRTKANNHATYYAESVKG

SEQ ID NO: 22995 - protein, 10 aa, synthetic construct
  REGION 1..10: note = Description of Artificial Sequence: Synthetic peptide
  REGION 1..10: note = XENP020459 vhCDR3
LANWDWYFDV

SEQ ID NO: 22996 - protein, 218 aa, synthetic construct; identical to SEQ ID NO: 22266
  REGION 1..218: note = Description of Artificial Sequence: Synthetic polypeptide
  REGION 1..218: note = XENP020459 7G8_H0.11_L0_IgG1_PVA_/S267K Light Chain

SEQ ID NO: 22997 - protein, 111 aa, synthetic construct; identical to SEQ ID NO: 22267
  REGION 1..111: note = Description of Artificial Sequence: Synthetic polypeptide
  REGION 1..111: note = VL of XENP020459

SEQ ID NO: 22998 - protein, 15 aa, synthetic construct
  REGION 1..15: note = Description of Artificial Sequence: Synthetic peptide
  REGION 1..15: note = XENP020459 vlCDR1
KASQSVDYDGDSYMN

SEQ ID NO: 22999 - protein, 7 aa, synthetic construct
  REGION 1..7: note = Description of Artificial Sequence: Synthetic peptide
  REGION 1..7: note = XENP020459 vlCDR2
AASNLES

SEQ ID NO: 23000 - protein, 9 aa, synthetic construct
  REGION 1..9: note = Description of Artificial Sequence: Synthetic peptide
  REGION 1..9: note = XENP020459 vlCDR3
QQSNEDPFT

SEQ ID NO: 23001 - protein, 450 aa, synthetic construct
  REGION 1..450: note = Description of Artificial Sequence: Synthetic polypeptide
  REGION 1..450: note = XENP020460 7G8_H0.12_L0_IgG1_PVA_/S267K Heavy Chain
EVKLEESGGGLVQPGGSMKLSCAASGFTFSRAWMDWVRQSPEKGLEWVAEIRTKANNHATYYAESVKGRFTISRDDSKSSVYLQMNSLRAEDTGIYYCTRLANWDWYFDVWGAGTTVTVSSASTKGPSVFPLAPSSKSTSGGTAALGCLVKDYFPEPVTVSWNSGALTSGVHTFPAVLQSSGLYSLSSVVTVPSSSLGTQTYICNVNHKPSDTKVDKKVEPKSCDKTHTCPPCPAPPVAGPSVFLFPPKPKDTLMISRTPEVTCVVVDVKHEDPEVKFNWYVDGVEVHNAKTKPREEEYNSTYRVVSVLTVLHQDWLNGKEYKCKVSNKALPAPIEKTISKAKGQPREPQVYTLPPSREEMTKNQVSLTCDVSGFYPSDIAVEWESDGQPENNYKTTPPVLDSDGSFFLYSKLTVDKSRWEQGDVFSCSVMHEALHNHYTQKSLSLSPGK

SEQ ID NO: 23002 - protein, 121 aa, synthetic construct
  REGION 1..121: note = Description of Artificial Sequence: Synthetic polypeptide
  REGION 1..121: note = VH of XENP020460
EVKLEESGGGLVQPGGSMKLSCAASGFTFSRAWMDWVRQSPEKGLEWVAEIRTKANNHATYYAESVKGRFTISRDDSKSSVYLQMNSLRAEDTGIYYCTRLANWDWYFDVWGAGTTVTVSS

SEQ ID NO: 23003 - protein, 5 aa, synthetic construct
  REGION 1..5: note = Description of Artificial Sequence: Synthetic peptide
  REGION 1..5: note = XENP020460 vhCDR1
RAWMD

SEQ ID NO: 23004 - protein, 19 aa, synthetic construct
  REGION 1..19: note = Description of Artificial Sequence: Synthetic peptide
  REGION 1..19: note = XENP020460 vhCDR2
EIRTKANNHATYYAESVKG

SEQ ID NO: 23005 - protein, 10 aa, synthetic construct
  REGION 1..10: note = Description of Artificial Sequence: Synthetic peptide
  REGION 1..10: note = XENP020460 vhCDR3
LANWDWYFDV

SEQ ID NO: 23006 - protein, 218 aa, synthetic construct; identical to SEQ ID NO: 22266
  REGION 1..218: note = Description of Artificial Sequence: Synthetic polypeptide
  REGION 1..218: note = XENP020460 7G8_H0.12_L0_IgG1_PVA_/S267K Light Chain

SEQ ID NO: 23007 - protein, 111 aa, synthetic construct; identical to SEQ ID NO: 22267
  REGION 1..111: note = Description of Artificial Sequence: Synthetic polypeptide
  REGION 1..111: note = VL of XENP020460

SEQ ID NO: 23008 - protein, 15 aa, synthetic construct
  REGION 1..15: note = Description of Artificial Sequence: Synthetic peptide
  REGION 1..15: note = XENP020460 vlCDR1
KASQSVDYDGDSYMN

SEQ ID NO: 23009 - protein, 7 aa, synthetic construct
  REGION 1..7: note = Description of Artificial Sequence: Synthetic peptide
  REGION 1..7: note = XENP020460 vlCDR2
AASNLES

SEQ ID NO: 23010 - protein, 9 aa, synthetic construct
  REGION 1..9: note = Description of Artificial Sequence: Synthetic peptide
  REGION 1..9: note = XENP020460 vlCDR3
QQSNEDPFT

SEQ ID NO: 23011 - protein, 450 aa, synthetic construct
  REGION 1..450: note = Description of Artificial Sequence: Synthetic polypeptide
  REGION 1..450: note = XENP020461 7G8_H0.13_L0_IgG1_PVA_/S267K Heavy Chain
EVKLEESGGGLVQPGGSMKLSCAASGFTFSLAWMDWVRQSPEKGLEWVAEIRTKANNHATYYAESVKGRFTISRDDSKSSVYLQMNSLRAEDTGIYYCTRLANWDWYFDVWGAGTTVTVSSASTKGPSVFPLAPSSKSTSGGTAALGCLVKDYFPEPVTVSWNSGALTSGVHTFPAVLQSSGLYSLSSVVTVPSSSLGTQTYICNVNHKPSDTKVDKKVEPKSCDKTHTCPPCPAPPVAGPSVFLFPPKPKDTLMISRTPEVTCVVVDVKHEDPEVKFNWYVDGVEVHNAKTKPREEEYNSTYRVVSVLTVLHQDWLNGKEYKCKVSNKALPAPIEKTISKAKGQPREPQVYTLPPSREEMTKNQVSLTCDVSGFYPSDIAVEWESDGQPENNYKTTPPVLDSDGSFFLYSKLTVDKSRWEQGDVFSCSVMHEALHNHYTQKSLSLSPGK

SEQ ID NO: 23012 - protein, 121 aa, synthetic construct
  REGION 1..121: note = Description of Artificial Sequence: Synthetic polypeptide
  REGION 1..121: note = VH of XENP020461
EVKLEESGGGLVQPGGSMKLSCAASGFTFSLAWMDWVRQSPEKGLEWVAEIRTKANNHATYYAESVKGRFTISRDDSKSSVYLQMNSLRAEDTGIYYCTRLANWDWYFDVWGAGTTVTVSS

SEQ ID NO: 23013 - protein, 5 aa, synthetic construct
  REGION 1..5: note = Description of Artificial Sequence: Synthetic peptide
  REGION 1..5: note = XENP020461 vhCDR1
LAWMD

SEQ ID NO: 23014 - protein, 19 aa, synthetic construct
  REGION 1..19: note = Description of Artificial Sequence: Synthetic peptide
  REGION 1..19: note = XENP020461 vhCDR2
EIRTKANNHATYYAESVKG

SEQ ID NO: 23015 - protein, 10 aa, synthetic construct
  REGION 1..10: note = Description of Artificial Sequence: Synthetic peptide
  REGION 1..10: note = XENP020461 vhCDR3
LANWDWYFDV

SEQ ID NO: 23016 - protein, 218 aa, synthetic construct; identical to SEQ ID NO: 22266
  REGION 1..218: note = Description of Artificial Sequence: Synthetic polypeptide
  REGION 1..218: note = XENP020461 7G8_H0.13_L0_IgG1_PVA_/S267K Light Chain

SEQ ID NO: 23017 - protein, 111 aa, synthetic construct; identical to SEQ ID NO: 22267
  REGION 1..111: note = Description of Artificial Sequence: Synthetic polypeptide
  REGION 1..111: note = VL of XENP020461

SEQ ID NO: 23018 - protein, 15 aa, synthetic construct
  REGION 1..15: note = Description of Artificial Sequence: Synthetic peptide
  REGION 1..15: note = XENP020461 vlCDR1
KASQSVDYDGDSYMN

SEQ ID NO: 23019 - protein, 7 aa, synthetic construct
  REGION 1..7: note = Description of Artificial Sequence: Synthetic peptide
  REGION 1..7: note = XENP020461 vlCDR2
AASNLES

SEQ ID NO: 23020 - protein, 9 aa, synthetic construct
  REGION 1..9: note = Description of Artificial Sequence: Synthetic peptide
  REGION 1..9: note = XENP020461 vlCDR3
QQSNEDPFT

SEQ ID NO: 23021 - protein, 450 aa, synthetic construct
  REGION 1..450: note = Description of Artificial Sequence: Synthetic polypeptide
  REGION 1..450: note = XENP020462 7G8_H0.14_L0_IgG1_PVA_/S267K Heavy Chain
EVKLEESGGGLVQPGGSMKLSCAASGFTFSTAWMDWVRQSPEKGLEWVAEIRTKANNHATYYAESVKGRFTISRDDSKSSVYLQMNSLRAEDTGIYYCTRLANWDWYFDVWGAGTTVTVSSASTKGPSVFPLAPSSKSTSGGTAALGCLVKDYFPEPVTVSWNSGALTSGVHTFPAVLQSSGLYSLSSVVTVPSSSLGTQTYICNVNHKPSDTKVDKKVEPKSCDKTHTCPPCPAPPVAGPSVFLFPPKPKDTLMISRTPEVTCVVVDVKHEDPEVKFNWYVDGVEVHNAKTKPREEEYNSTYRVVSVLTVLHQDWLNGKEYKCKVSNKALPAPIEKTISKAKGQPREPQVYTLPPSREEMTKNQVSLTCDVSGFYPSDIAVEWESDGQPENNYKTTPPVLDSDGSFFLYSKLTVDKSRWEQGDVFSCSVMHEALHNHYTQKSLSLSPGK

SEQ ID NO: 23022 - protein, 121 aa, synthetic construct
  REGION 1..121: note = Description of Artificial Sequence: Synthetic polypeptide
  REGION 1..121: note = VH of XENP020462
EVKLEESGGGLVQPGGSMKLSCAASGFTFSTAWMDWVRQSPEKGLEWVAEIRTKANNHATYYAESVKGRFTISRDDSKSSVYLQMNSLRAEDTGIYYCTRLANWDWYFDVWGAGTTVTVSS

SEQ ID NO: 23023 - protein, 5 aa, synthetic construct
  REGION 1..5: note = Description of Artificial Sequence: Synthetic peptide
  REGION 1..5: note = XENP020462 vhCDR1
TAWMD

SEQ ID NO: 23024 - protein, 19 aa, synthetic construct
  REGION 1..19: note = Description of Artificial Sequence: Synthetic peptide
  REGION 1..19: note = XENP020462 vhCDR2
EIRTKANNHATYYAESVKG

SEQ ID NO: 23025 - protein, 10 aa, synthetic construct
  REGION 1..10: note = Description of Artificial Sequence: Synthetic peptide
  REGION 1..10: note = XENP020462 vhCDR3
LANWDWYFDV

SEQ ID NO: 23026 - protein, 218 aa, synthetic construct; identical to SEQ ID NO: 22266
  REGION 1..218: note = Description of Artificial Sequence: Synthetic polypeptide
  REGION 1..218: note = XENP020462 7G8_H0.14_L0_IgG1_PVA_/S267K Light Chain

SEQ ID NO: 23027 - protein, 111 aa, synthetic construct; identical to SEQ ID NO: 22267
  REGION 1..111: note = Description of Artificial Sequence: Synthetic polypeptide
  REGION 1..111: note = VL of XENP020462

SEQ ID NO: 23028 - protein, 15 aa, synthetic construct
  REGION 1..15: note = Description of Artificial Sequence: Synthetic peptide
  REGION 1..15: note = XENP020462 vlCDR1
KASQSVDYDGDSYMN

SEQ ID NO: 23029 - protein, 7 aa, synthetic construct
  REGION 1..7: note = Description of Artificial Sequence: Synthetic peptide
  REGION 1..7: note = XENP020462 vlCDR2
AASNLES

SEQ ID NO: 23030 - protein, 9 aa, synthetic construct
  REGION 1..9: note = Description of Artificial Sequence: Synthetic peptide
  REGION 1..9: note = XENP020462 vlCDR3
QQSNEDPFT

SEQ ID NO: 23031 - protein, 450 aa, synthetic construct
  REGION 1..450: note = Description of Artificial Sequence: Synthetic polypeptide
  REGION 1..450: note = XENP020463 7G8_H0.15_L0_IgG1_PVA_/S267K Heavy Chain
EVKLEESGGGLVQPGGSMKLSCAASGFTFSGAWMDWVRQSPEKGLEWVAEIRTKANNHATYYAESVKGRFTISRDDSKSSVYLQMNSLRAEDTGIYYCTRLANWDWYFDVWGAGTTVTVSSASTKGPSVFPLAPSSKSTSGGTAALGCLVKDYFPEPVTVSWNSGALTSGVHTFPAVLQSSGLYSLSSVVTVPSSSLGTQTYICNVNHKPSDTKVDKKVEPKSCDKTHTCPPCPAPPVAGPSVFLFPPKPKDTLMISRTPEVTCVVVDVKHEDPEVKFNWYVDGVEVHNAKTKPREEEYNSTYRVVSVLTVLHQDWLNGKEYKCKVSNKALPAPIEKTISKAKGQPREPQVYTLPPSREEMTKNQVSLTCDVSGFYPSDIAVEWESDGQPENNYKTTPPVLDSDGSFFLYSKLTVDKSRWEQGDVFSCSVMHEALHNHYTQKSLSLSPGK

SEQ ID NO: 23032 - protein, 121 aa, synthetic construct
  REGION 1..121: note = Description of Artificial Sequence: Synthetic polypeptide
  REGION 1..121: note = VH of XENP020463
EVKLEESGGGLVQPGGSMKLSCAASGFTFSGAWMDWVRQSPEKGLEWVAEIRTKANNHATYYAESVKGRFTISRDDSKSSVYLQMNSLRAEDTGIYYCTRLANWDWYFDVWGAGTTVTVSS

SEQ ID NO: 23033 - protein, 5 aa, synthetic construct
  REGION 1..5: note = Description of Artificial Sequence: Synthetic peptide
  REGION 1..5: note = XENP020463 vhCDR1
GAWMD

SEQ ID NO: 23034 - protein, 19 aa, synthetic construct
  REGION 1..19: note = Description of Artificial Sequence: Synthetic peptide
  REGION 1..19: note = XENP020463 vhCDR2
EIRTKANNHATYYAESVKG

SEQ ID NO: 23035 - protein, 10 aa, synthetic construct
  REGION 1..10: note = Description of Artificial Sequence: Synthetic peptide
  REGION 1..10: note = XENP020463 vhCDR3
LANWDWYFDV

SEQ ID NO: 23036 - protein, 218 aa, synthetic construct; identical to SEQ ID NO: 22266
  REGION 1..218: note = Description of Artificial Sequence: Synthetic polypeptide
  REGION 1..218: note = XENP020463 7G8_H0.15_L0_IgG1_PVA_/S267K Light Chain

SEQ ID NO: 23037 - protein, 111 aa, synthetic construct; identical to SEQ ID NO: 22267
  REGION 1..111: note = Description of Artificial Sequence: Synthetic polypeptide
  REGION 1..111: note = VL of XENP020463

SEQ ID NO: 23038 - protein, 15 aa, synthetic construct
  REGION 1..15: note = Description of Artificial Sequence: Synthetic peptide
  REGION 1..15: note = XENP020463 vlCDR1
KASQSVDYDGDSYMN

SEQ ID NO: 23039 - protein, 7 aa, synthetic construct
  REGION 1..7: note = Description of Artificial Sequence: Synthetic peptide
  REGION 1..7: note = XENP020463 vlCDR2
AASNLES

SEQ ID NO: 23040 - protein, 9 aa, synthetic construct
  REGION 1..9: note = Description of Artificial Sequence: Synthetic peptide
  REGION 1..9: note = XENP020463 vlCDR3
QQSNEDPFT

SEQ ID NO: 23041 - protein, 450 aa, synthetic construct
  REGION 1..450: note = Description of Artificial Sequence: Synthetic polypeptide
  REGION 1..450: note = XENP020464 7G8_H0.16_L0_IgG1_PVA_/S267K Heavy Chain
EVKLEESGGGLVQPGGSMKLSCAASGFTFSYAWMDWVRQSPEKGLEWVAEIRTKANNHATYYAESVKGRFTISRDDSKSSVYLQMNSLRAEDTGIYYCTRLANWDWYFDVWGAGTTVTVSSASTKGPSVFPLAPSSKSTSGGTAALGCLVKDYFPEPVTVSWNSGALTSGVHTFPAVLQSSGLYSLSSVVTVPSSSLGTQTYICNVNHKPSDTKVDKKVEPKSCDKTHTCPPCPAPPVAGPSVFLFPPKPKDTLMISRTPEVTCVVVDVKHEDPEVKFNWYVDGVEVHNAKTKPREEEYNSTYRVVSVLTVLHQDWLNGKEYKCKVSNKALPAPIEKTISKAKGQPREPQVYTLPPSREEMTKNQVSLTCDVSGFYPSDIAVEWESDGQPENNYKTTPPVLDSDGSFFLYSKLTVDKSRWEQGDVFSCSVMHEALHNHYTQKSLSLSPGK

SEQ ID NO: 23042 - protein, 121 aa, synthetic construct
  REGION 1..121: note = Description of Artificial Sequence: Synthetic polypeptide
  REGION 1..121: note = VH of XENP020464
EVKLEESGGGLVQPGGSMKLSCAASGFTFSYAWMDWVRQSPEKGLEWVAEIRTKANNHATYYAESVKGRFTISRDDSKSSVYLQMNSLRAEDTGIYYCTRLANWDWYFDVWGAGTTVTVSS

SEQ ID NO: 23043 - protein, 5 aa, synthetic construct
  REGION 1..5: note = Description of Artificial Sequence: Synthetic peptide
  REGION 1..5: note = XENP020464 vhCDR1
YAWMD

SEQ ID NO: 23044 - protein, 19 aa, synthetic construct
  REGION 1..19: note = Description of Artificial Sequence: Synthetic peptide
  REGION 1..19: note = XENP020464 vhCDR2
EIRTKANNHATYYAESVKG

SEQ ID NO: 23045 - protein, 10 aa, synthetic construct
  REGION 1..10: note = Description of Artificial Sequence: Synthetic peptide
  REGION 1..10: note = XENP020464 vhCDR3
LANWDWYFDV

SEQ ID NO: 23046 - protein, 218 aa, synthetic construct; identical to SEQ ID NO: 22266
  REGION 1..218: note = Description of Artificial Sequence: Synthetic polypeptide
  REGION 1..218: note = XENP020464 7G8_H0.16_L0_IgG1_PVA_/S267K Light Chain

SEQ ID NO: 23047 - protein, 111 aa, synthetic construct; identical to SEQ ID NO: 22267
  REGION 1..111: note = Description of Artificial Sequence: Synthetic polypeptide
  REGION 1..111: note = VL of XENP020464

SEQ ID NO: 23048 - protein, 15 aa, synthetic construct
  REGION 1..15: note = Description of Artificial Sequence: Synthetic peptide
  REGION 1..15: note = XENP020464 vlCDR1
KASQSVDYDGDSYMN

SEQ ID NO: 23049 - protein, 7 aa, synthetic construct
  REGION 1..7: note = Description of Artificial Sequence: Synthetic peptide
  REGION 1..7: note = XENP020464 vlCDR2
AASNLES

SEQ ID NO: 23050 - protein, 9 aa, synthetic construct
  REGION 1..9: note = Description of Artificial Sequence: Synthetic peptide
  REGION 1..9: note = XENP020464 vlCDR3
QQSNEDPFT

SEQ ID NO: 23051 - protein, 450 aa, synthetic construct
  REGION 1..450: note = Description of Artificial Sequence: Synthetic polypeptide
  REGION 1..450: note = XENP020465 7G8_H0.17_L0_IgG1_PVA_/S267K Heavy Chain
EVKLEESGGGLVQPGGSMKLSCAASGFTFSDSWMDWVRQSPEKGLEWVAEIRTKANNHATYYAESVKGRFTISRDDSKSSVYLQMNSLRAEDTGIYYCTRLANWDWYFDVWGAGTTVTVSSASTKGPSVFPLAPSSKSTSGGTAALGCLVKDYFPEPVTVSWNSGALTSGVHTFPAVLQSSGLYSLSSVVTVPSSSLGTQTYICNVNHKPSDTKVDKKVEPKSCDKTHTCPPCPAPPVAGPSVFLFPPKPKDTLMISRTPEVTCVVVDVKHEDPEVKFNWYVDGVEVHNAKTKPREEEYNSTYRVVSVLTVLHQDWLNGKEYKCKVSNKALPAPIEKTISKAKGQPREPQVYTLPPSREEMTKNQVSLTCDVSGFYPSDIAVEWESDGQPENNYKTTPPVLDSDGSFFLYSKLTVDKSRWEQGDVFSCSVMHEALHNHYTQKSLSLSPGK

SEQ ID NO: 23052 - protein, 121 aa, synthetic construct
  REGION 1..121: note = Description of Artificial Sequence: Synthetic polypeptide
  REGION 1..121: note = VH of XENP020465
EVKLEESGGGLVQPGGSMKLSCAASGFTFSDSWMDWVRQSPEKGLEWVAEIRTKANNHATYYAESVKGRFTISRDDSKSSVYLQMNSLRAEDTGIYYCTRLANWDWYFDVWGAGTTVTVSS

SEQ ID NO: 23053 - protein, 5 aa, synthetic construct
  REGION 1..5: note = Description of Artificial Sequence: Synthetic peptide
  REGION 1..5: note = XENP020465 vhCDR1
DSWMD

SEQ ID NO: 23054 - protein, 19 aa, synthetic construct
  REGION 1..19: note = Description of Artificial Sequence: Synthetic peptide
  REGION 1..19: note = XENP020465 vhCDR2
EIRTKANNHATYYAESVKG

SEQ ID NO: 23055 - protein, 10 aa, synthetic construct
  REGION 1..10: note = Description of Artificial Sequence: Synthetic peptide
  REGION 1..10: note = XENP020465 vhCDR3
LANWDWYFDV

SEQ ID NO: 23056 - protein, 218 aa, synthetic construct; identical to SEQ ID NO: 22266
  REGION 1..218: note = Description of Artificial Sequence: Synthetic polypeptide
  REGION 1..218: note = XENP020465 7G8_H0.17_L0_IgG1_PVA_/S267K Light Chain

SEQ ID NO: 23057 - protein, 111 aa, synthetic construct; identical to SEQ ID NO: 22267
  REGION 1..111: note = Description of Artificial Sequence: Synthetic polypeptide
  REGION 1..111: note = VL of XENP020465

SEQ ID NO: 23058 - protein, 15 aa, synthetic construct
  REGION 1..15: note = Description of Artificial Sequence: Synthetic peptide
  REGION 1..15: note = XENP020465 vlCDR1
KASQSVDYDGDSYMN

SEQ ID NO: 23059 - protein, 7 aa, synthetic construct
  REGION 1..7: note = Description of Artificial Sequence: Synthetic peptide
  REGION 1..7: note = XENP020465 vlCDR2
AASNLES

SEQ ID NO: 23060 - protein, 9 aa, synthetic construct
  REGION 1..9: note = Description of Artificial Sequence: Synthetic peptide
  REGION 1..9: note = XENP020465 vlCDR3
QQSNEDPFT

SEQ ID NO: 23061 - protein, 450 aa, synthetic construct
  REGION 1..450: note = Description of Artificial Sequence: Synthetic polypeptide
  REGION 1..450: note = XENP020466 7G8_H0.18_L0_IgG1_PVA_/S267K Heavy Chain
EVKLEESGGGLVQPGGSMKLSCAASGFTFSDTWMDWVRQSPEKGLEWVAEIRTKANNHATYYAESVKGRFTISRDDSKSSVYLQMNSLRAEDTGIYYCTRLANWDWYFDVWGAGTTVTVSSASTKGPSVFPLAPSSKSTSGGTAALGCLVKDYFPEPVTVSWNSGALTSGVHTFPAVLQSSGLYSLSSVVTVPSSSLGTQTYICNVNHKPSDTKVDKKVEPKSCDKTHTCPPCPAPPVAGPSVFLFPPKPKDTLMISRTPEVTCVVVDVKHEDPEVKFNWYVDGVEVHNAKTKPREEEYNSTYRVVSVLTVLHQDWLNGKEYKCKVSNKALPAPIEKTISKAKGQPREPQVYTLPPSREEMTKNQVSLTCDVSGFYPSDIAVEWESDGQPENNYKTTPPVLDSDGSFFLYSKLTVDKSRWEQGDVFSCSVMHEALHNHYTQKSLSLSPGK

SEQ ID NO: 23062 - protein, 121 aa, synthetic construct
  REGION 1..121: note = Description of Artificial Sequence: Synthetic polypeptide
  REGION 1..121: note = VH of XENP020466
EVKLEESGGGLVQPGGSMKLSCAASGFTFSDTWMDWVRQSPEKGLEWVAEIRTKANNHATYYAESVKGRFTISRDDSKSSVYLQMNSLRAEDTGIYYCTRLANWDWYFDVWGAGTTVTVSS

SEQ ID NO: 23063 - protein, 5 aa, synthetic construct
  REGION 1..5: note = Description of Artificial Sequence: Synthetic peptide
  REGION 1..5: note = XENP020466 vhCDR1
DTWMD

SEQ ID NO: 23064 - protein, 19 aa, synthetic construct
  REGION 1..19: note = Description of Artificial Sequence: Synthetic peptide
  REGION 1..19: note = XENP020466 vhCDR2
EIRTKANNHATYYAESVKG

SEQ ID NO: 23065 - protein, 10 aa, synthetic construct
  REGION 1..10: note = Description of Artificial Sequence: Synthetic peptide
  REGION 1..10: note = XENP020466 vhCDR3
LANWDWYFDV

SEQ ID NO: 23066 - protein, 218 aa, synthetic construct; identical to SEQ ID NO: 22266
  REGION 1..218: note = Description of Artificial Sequence: Synthetic polypeptide
  REGION 1..218: note = XENP020466 7G8_H0.18_L0_IgG1_PVA_/S267K Light Chain

SEQ ID NO: 23067 - protein, 111 aa, synthetic construct; identical to SEQ ID NO: 22267
  REGION 1..111: note = Description of Artificial Sequence: Synthetic polypeptide
  REGION 1..111: note = VL of XENP020466

SEQ ID NO: 23068 - protein, 15 aa, synthetic construct
  REGION 1..15: note = Description of Artificial Sequence: Synthetic peptide
  REGION 1..15: note = XENP020466 vlCDR1
KASQSVDYDGDSYMN

SEQ ID NO: 23069 - protein, 7 aa, synthetic construct
  REGION 1..7: note = Description of Artificial Sequence: Synthetic peptide
  REGION 1..7: note = XENP020466 vlCDR2
AASNLES

SEQ ID NO: 23070 - protein, 9 aa, synthetic construct
  REGION 1..9: note = Description of Artificial Sequence: Synthetic peptide
  REGION 1..9: note = XENP020466 vlCDR3
QQSNEDPFT

SEQ ID NO: 23071 - protein, 450 aa, synthetic construct
  REGION 1..450: note = Description of Artificial Sequence: Synthetic polypeptide
  REGION 1..450: note = XENP020467 7G8_H0.19_L0_IgG1_PVA_/S267K Heavy Chain
EVKLEESGGGLVQPGGSMKLSCAASGFTFSDGWMDWVRQSPEKGLEWVAEIRTKANNHATYYAESVKGRFTISRDDSKSSVYLQMNSLRAEDTGIYYCTRLANWDWYFDVWGAGTTVTVSSASTKGPSVFPLAPSSKSTSGGTAALGCLVKDYFPEPVTVSWNSGALTSGVHTFPAVLQSSGLYSLSSVVTVPSSSLGTQTYICNVNHKPSDTKVDKKVEPKSCDKTHTCPPCPAPPVAGPSVFLFPPKPKDTLMISRTPEVTCVVVDVKHEDPEVKFNWYVDGVEVHNAKTKPREEEYNSTYRVVSVLTVLHQDWLNGKEYKCKVSNKALPAPIEKTISKAKGQPREPQVYTLPPSREEMTKNQVSLTCDVSGFYPSDIAVEWESDGQPENNYKTTPPVLDSDGSFFLYSKLTVDKSRWEQGDVFSCSVMHEALHNHYTQKSLSLSPGK

SEQ ID NO: 23072 - protein, 121 aa, synthetic construct
  REGION 1..121: note = Description of Artificial Sequence: Synthetic polypeptide
  REGION 1..121: note = VH of XENP020467
EVKLEESGGGLVQPGGSMKLSCAASGFTFSDGWMDWVRQSPEKGLEWVAEIRTKANNHATYYAESVKGRFTISRDDSKSSVYLQMNSLRAEDTGIYYCTRLANWDWYFDVWGAGTTVTVSS

SEQ ID NO: 23073 - protein, 5 aa, synthetic construct
  REGION 1..5: note = Description of Artificial Sequence: Synthetic peptide
  REGION 1..5: note = XENP020467 vhCDR1
DGWMD

SEQ ID NO: 23074 - protein, 19 aa, synthetic construct
  REGION 1..19: note = Description of Artificial Sequence: Synthetic peptide
  REGION 1..19: note = XENP020467 vhCDR2
EIRTKANNHATYYAESVKG

SEQ ID NO: 23075 - protein, 10 aa, synthetic construct
  REGION 1..10: note = Description of Artificial Sequence: Synthetic peptide
  REGION 1..10: note = XENP020467 vhCDR3
LANWDWYFDV

SEQ ID NO: 23076 - protein, 218 aa, synthetic construct; identical to SEQ ID NO: 22266
  REGION 1..218: note = Description of Artificial Sequence: Synthetic polypeptide
  REGION 1..218: note = XENP020467 7G8_H0.19_L0_IgG1_PVA_/S267K Light Chain

SEQ ID NO: 23077 - protein, 111 aa, synthetic construct; identical to SEQ ID NO: 22267
  REGION 1..111: note = Description of Artificial Sequence: Synthetic polypeptide
  REGION 1..111: note = VL of XENP020467

SEQ ID NO: 23078 - protein, 15 aa, synthetic construct
  REGION 1..15: note = Description of Artificial Sequence: Synthetic peptide
  REGION 1..15: note = XENP020467 vlCDR1
KASQSVDYDGDSYMN

SEQ ID NO: 23079 - protein, 7 aa, synthetic construct
  REGION 1..7: note = Description of Artificial Sequence: Synthetic peptide
  REGION 1..7: note = XENP020467 vlCDR2
AASNLES

SEQ ID NO: 23080 - protein, 9 aa, synthetic construct
  REGION 1..9: note = Description of Artificial Sequence: Synthetic peptide
  REGION 1..9: note = XENP020467 vlCDR3
QQSNEDPFT

SEQ ID NO: 23081 - protein, 450 aa, synthetic construct
  REGION 1..450: note = Description of Artificial Sequence: Synthetic polypeptide
  REGION 1..450: note = XENP020468 7G8_H0.20_L0_IgG1_PVA_/S267K Heavy Chain
EVKLEESGGGLVQPGGSMKLSCAASGFTFSDHWMDWVRQSPEKGLEWVAEIRTKANNHATYYAESVKGRFTISRDDSKSSVYLQMNSLRAEDTGIYYCTRLANWDWYFDVWGAGTTVTVSSASTKGPSVFPLAPSSKSTSGGTAALGCLVKDYFPEPVTVSWNSGALTSGVHTFPAVLQSSGLYSLSSVVTVPSSSLGTQTYICNVNHKPSDTKVDKKVEPKSCDKTHTCPPCPAPPVAGPSVFLFPPKPKDTLMISRTPEVTCVVVDVKHEDPEVKFNWYVDGVEVHNAKTKPREEEYNSTYRVVSVLTVLHQDWLNGKEYKCKVSNKALPAPIEKTISKAKGQPREPQVYTLPPSREEMTKNQVSLTCDVSGFYPSDIAVEWESDGQPENNYKTTPPVLDSDGSFFLYSKLTVDKSRWEQGDVFSCSVMHEALHNHYTQKSLSLSPGK

SEQ ID NO: 23082 - protein, 121 aa, synthetic construct
  REGION 1..121: note = Description of Artificial Sequence: Synthetic polypeptide
  REGION 1..121: note = VH of XENP020468
EVKLEESGGGLVQPGGSMKLSCAASGFTFSDHWMDWVRQSPEKGLEWVAEIRTKANNHATYYAESVKGRFTISRDDSKSSVYLQMNSLRAEDTGIYYCTRLANWDWYFDVWGAGTTVTVSS

SEQ ID NO: 23083 - protein, 5 aa, synthetic construct
  REGION 1..5: note = Description of Artificial Sequence: Synthetic peptide
  REGION 1..5: note = XENP020468 vhCDR1
DHWMD

SEQ ID NO: 23084 - protein, 19 aa, synthetic construct
  REGION 1..19: note = Description of Artificial Sequence: Synthetic peptide
  REGION 1..19: note = XENP020468 vhCDR2
EIRTKANNHATYYAESVKG

SEQ ID NO: 23085 - protein, 10 aa, synthetic construct
  REGION 1..10: note = Description of Artificial Sequence: Synthetic peptide
  REGION 1..10: note = XENP020468 vhCDR3
LANWDWYFDV

SEQ ID NO: 23086 - protein, 218 aa, synthetic construct; identical to SEQ ID NO: 22266
  REGION 1..218: note = Description of Artificial Sequence: Synthetic polypeptide
  REGION 1..218: note = XENP020468 7G8_H0.20_L0_IgG1_PVA_/S267K Light Chain

SEQ ID NO: 23087 - protein, 111 aa, synthetic construct; identical to SEQ ID NO: 22267
  REGION 1..111: note = Description of Artificial Sequence: Synthetic polypeptide
  REGION 1..111: note = VL of XENP020468

SEQ ID NO: 23088 - protein, 15 aa, synthetic construct
  REGION 1..15: note = Description of Artificial Sequence: Synthetic peptide
  REGION 1..15: note = XENP020468 vlCDR1
KASQSVDYDGDSYMN

SEQ ID NO: 23089 - protein, 7 aa, synthetic construct
  REGION 1..7: note = Description of Artificial Sequence: Synthetic peptide
  REGION 1..7: note = XENP020468 vlCDR2
AASNLES

SEQ ID NO: 23090 - protein, 9 aa, synthetic construct
  REGION 1..9: note = Description of Artificial Sequence: Synthetic peptide
  REGION 1..9: note = XENP020468 vlCDR3
QQSNEDPFT

SEQ ID NO: 23091 - protein, 450 aa, synthetic construct
  REGION 1..450: note = Description of Artificial Sequence: Synthetic polypeptide
  REGION 1..450: note = XENP020469 7G8_H0.21_L0_IgG1_PVA_/S267K Heavy Chain
EVKLEESGGGLVQPGGSMKLSCAASGFTFSDDWMDWVRQSPEKGLEWVAEIRTKANNHATYYAESVKGRFTISRDDSKSSVYLQMNSLRAEDTGIYYCTRLANWDWYFDVWGAGTTVTVSSASTKGPSVFPLAPSSKSTSGGTAALGCLVKDYFPEPVTVSWNSGALTSGVHTFPAVLQSSGLYSLSSVVTVPSSSLGTQTYICNVNHKPSDTKVDKKVEPKSCDKTHTCPPCPAPPVAGPSVFLFPPKPKDTLMISRTPEVTCVVVDVKHEDPEVKFNWYVDGVEVHNAKTKPREEEYNSTYRVVSVLTVLHQDWLNGKEYKCKVSNKALPAPIEKTISKAKGQPREPQVYTLPPSREEMTKNQVSLTCDVSGFYPSDIAVEWESDGQPENNYKTTPPVLDSDGSFFLYSKLTVDKSRWEQGDVFSCSVMHEALHNHYTQKSLSLSPGK

SEQ ID NO: 23092 - protein, 121 aa, synthetic construct
  REGION 1..121: note = Description of Artificial Sequence: Synthetic polypeptide
  REGION 1..121: note = VH of XENP020469
EVKLEESGGGLVQPGGSMKLSCAASGFTFSDDWMDWVRQSPEKGLEWVAEIRTKANNHATYYAESVKGRFTISRDDSKSSVYLQMNSLRAEDTGIYYCTRLANWDWYFDVWGAGTTVTVSS

SEQ ID NO: 23093 - protein, 5 aa, synthetic construct
  REGION 1..5: note = Description of Artificial Sequence: Synthetic peptide
  REGION 1..5: note = XENP020469 vhCDR1
DDWMD

SEQ ID NO: 23094 - protein, 19 aa, synthetic construct
  REGION 1..19: note = Description of Artificial Sequence: Synthetic peptide
  REGION 1..19: note = XENP020469 vhCDR2
EIRTKANNHATYYAESVKG

SEQ ID NO: 23095 - protein, 10 aa, synthetic construct
  REGION 1..10: note = Description of Artificial Sequence: Synthetic peptide
  REGION 1..10: note = XENP020469 vhCDR3
LANWDWYFDV

SEQ ID NO: 23096 - protein, 218 aa, synthetic construct; identical to SEQ ID NO: 22266
  REGION 1..218: note = Description of Artificial Sequence: Synthetic polypeptide
  REGION 1..218: note = XENP020469 7G8_H0.21_L0_IgG1_PVA_/S267K Light Chain

SEQ ID NO: 23097 - protein, 111 aa, synthetic construct; identical to SEQ ID NO: 22267
  REGION 1..111: note = Description of Artificial Sequence: Synthetic polypeptide
  REGION 1..111: note = VL of XENP020469

SEQ ID NO: 23098 - protein, 15 aa, synthetic construct
  REGION 1..15: note = Description of Artificial Sequence: Synthetic peptide
  REGION 1..15: note = XENP020469 vlCDR1
KASQSVDYDGDSYMN

SEQ ID NO: 23099 - protein, 7 aa, synthetic construct
  REGION 1..7: note = Description of Artificial Sequence: Synthetic peptide
  REGION 1..7: note = XENP020469 vlCDR2
AASNLES

SEQ ID NO: 23100 - protein, 9 aa, synthetic construct
  REGION 1..9: note = Description of Artificial Sequence: Synthetic peptide
  REGION 1..9: note = XENP020469 vlCDR3
QQSNEDPFT

SEQ ID NO: 23101 - protein, 450 aa, synthetic construct
  REGION 1..450: note = Description of Artificial Sequence: Synthetic polypeptide
  REGION 1..450: note = XENP020470 7G8_H0.22_L0_IgG1_PVA_/S267K Heavy Chain
EVKLEESGGGLVQPGGSMKLSCAASGFTFSDLWMDWVRQSPEKGLEWVAEIRTKANNHATYYAESVKGRFTISRDDSKSSVYLQMNSLRAEDTGIYYCTRLANWDWYFDVWGAGTTVTVSSASTKGPSVFPLAPSSKSTSGGTAALGCLVKDYFPEPVTVSWNSGALTSGVHTFPAVLQSSGLYSLSSVVTVPSSSLGTQTYICNVNHKPSDTKVDKKVEPKSCDKTHTCPPCPAPPVAGPSVFLFPPKPKDTLMISRTPEVTCVVVDVKHEDPEVKFNWYVDGVEVHNAKTKPREEEYNSTYRVVSVLTVLHQDWLNGKEYKCKVSNKALPAPIEKTISKAKGQPREPQVYTLPPSREEMTKNQVSLTCDVSGFYPSDIAVEWESDGQPENNYKTTPPVLDSDGSFFLYSKLTVDKSRWEQGDVFSCSVMHEALHNHYTQKSLSLSPGK

SEQ ID NO: 23102 - protein, 121 aa, synthetic construct
  REGION 1..121: note = Description of Artificial Sequence: Synthetic polypeptide
  REGION 1..121: note = VH of XENP020470
EVKLEESGGGLVQPGGSMKLSCAASGFTFSDLWMDWVRQSPEKGLEWVAEIRTKANNHATYYAESVKGRFTISRDDSKSSVYLQMNSLRAEDTGIYYCTRLANWDWYFDVWGAGTTVTVSS

SEQ ID NO: 23103 - protein, 5 aa, synthetic construct
  REGION 1..5: note = Description of Artificial Sequence: Synthetic peptide
  REGION 1..5: note = XENP020470 vhCDR1
DLWMD

SEQ ID NO: 23104 - protein, 19 aa, synthetic construct
  REGION 1..19: note = Description of Artificial Sequence: Synthetic peptide
  REGION 1..19: note = XENP020470 vhCDR2
EIRTKANNHATYYAESVKG

SEQ ID NO: 23105 - protein, 10 aa, synthetic construct
  REGION 1..10: note = Description of Artificial Sequence: Synthetic peptide
  REGION 1..10: note = XENP020470 vhCDR3
LANWDWYFDV

SEQ ID NO: 23106 - protein, 218 aa, synthetic construct; identical to SEQ ID NO: 22266
  REGION 1..218: note = Description of Artificial Sequence: Synthetic polypeptide
  REGION 1..218: note = XENP020470 7G8_H0.22_L0_IgG1_PVA_/S267K Light Chain

SEQ ID NO: 23107 - protein, 111 aa, synthetic construct; identical to SEQ ID NO: 22267
  REGION 1..111: note = Description of Artificial Sequence: Synthetic polypeptide
  REGION 1..111: note = VL of XENP020470

SEQ ID NO: 23108 - protein, 15 aa, synthetic construct
  REGION 1..15: note = Description of Artificial Sequence: Synthetic peptide
  REGION 1..15: note = XENP020470 vlCDR1
KASQSVDYDGDSYMN

SEQ ID NO: 23109 - protein, 7 aa, synthetic construct
  REGION 1..7: note = Description of Artificial Sequence: Synthetic peptide
  REGION 1..7: note = XENP020470 vlCDR2
AASNLES

SEQ ID NO: 23110 - protein, 9 aa, synthetic construct
  REGION 1..9: note = Description of Artificial Sequence: Synthetic peptide
  REGION 1..9: note = XENP020470 vlCDR3
QQSNEDPFT

SEQ ID NO: 23111 - protein, 450 aa, synthetic construct
  REGION 1..450: note = Description of Artificial Sequence: Synthetic polypeptide
  REGION 1..450: note = XENP020471 7G8_H0.23_L0_IgG1_PVA_/S267K Heavy Chain
EVKLEESGGGLVQPGGSMKLSCAASGFTFSDKWMDWVRQSPEKGLEWVAEIRTKANNHATYYAESVKGRFTISRDDSKSSVYLQMNSLRAEDTGIYYCTRLANWDWYFDVWGAGTTVTVSSASTKGPSVFPLAPSSKSTSGGTAALGCLVKDYFPEPVTVSWNSGALTSGVHTFPAVLQSSGLYSLSSVVTVPSSSLGTQTYICNVNHKPSDTKVDKKVEPKSCDKTHTCPPCPAPPVAGPSVFLFPPKPKDTLMISRTPEVTCVVVDVKHEDPEVKFNWYVDGVEVHNAKTKPREEEYNSTYRVVSVLTVLHQDWLNGKEYKCKVSNKALPAPIEKTISKAKGQPREPQVYTLPPSREEMTKNQVSLTCDVSGFYPSDIAVEWESDGQPENNYKTTPPVLDSDGSFFLYSKLTVDKSRWEQGDVFSCSVMHEALHNHYTQKSLSLSPGK

SEQ ID NO: 23112 - protein, 121 aa, synthetic construct
  REGION 1..121: note = Description of Artificial Sequence: Synthetic polypeptide
  REGION 1..121: note = VH of XENP020471
EVKLEESGGGLVQPGGSMKLSCAASGFTFSDKWMDWVRQSPEKGLEWVAEIRTKANNHATYYAESVKGRFTISRDDSKSSVYLQMNSLRAEDTGIYYCTRLANWDWYFDVWGAGTTVTVSS

SEQ ID NO: 23113 - protein, 5 aa, synthetic construct
  REGION 1..5: note = Description of Artificial Sequence: Synthetic peptide
  REGION 1..5: note = XENP020471 vhCDR1
DKWMD

SEQ ID NO: 23114 - protein, 19 aa, synthetic construct
  REGION 1..19: note = Description of Artificial Sequence: Synthetic peptide
  REGION 1..19: note = XENP020471 vhCDR2
EIRTKANNHATYYAESVKG

SEQ ID NO: 23115 - protein, 10 aa, synthetic construct
  REGION 1..10: note = Description of Artificial Sequence: Synthetic peptide
  REGION 1..10: note = XENP020471 vhCDR3
LANWDWYFDV

SEQ ID NO: 23116 - protein, 218 aa, synthetic construct; identical to SEQ ID NO: 22266
  REGION 1..218: note = Description of Artificial Sequence: Synthetic polypeptide
  REGION 1..218: note = XENP020471 7G8_H0.23_L0_IgG1_PVA_/S267K Light Chain

SEQ ID NO: 23117 - protein, 111 aa, synthetic construct; identical to SEQ ID NO: 22267
  REGION 1..111: note = Description of Artificial Sequence: Synthetic polypeptide
  REGION 1..111: note = VL of XENP020471

SEQ ID NO: 23118 - protein, 15 aa, synthetic construct
  REGION 1..15: note = Description of Artificial Sequence: Synthetic peptide
  REGION 1..15: note = XENP020471 vlCDR1
KASQSVDYDGDSYMN

SEQ ID NO: 23119 - protein, 7 aa, synthetic construct
  REGION 1..7: note = Description of Artificial Sequence: Synthetic peptide
  REGION 1..7: note = XENP020471 vlCDR2
AASNLES

SEQ ID NO: 23120 - protein, 9 aa, synthetic construct
  REGION 1..9: note = Description of Artificial Sequence: Synthetic peptide
  REGION 1..9: note = XENP020471 vlCDR3
QQSNEDPFT

SEQ ID NO: 23121 - protein, 450 aa, synthetic construct
  REGION 1..450: note = Description of Artificial Sequence: Synthetic polypeptide
  REGION 1..450: note = XENP020472 7G8_H0.24_L0_IgG1_PVA_/S267K Heavy Chain
EVKLEESGGGLVQPGGSMKLSCAASGFTFSDYWMDWVRQSPEKGLEWVAEIRTKANNHATYYAESVKGRFTISRDDSKSSVYLQMNSLRAEDTGIYYCTRLANWDWYFDVWGAGTTVTVSSASTKGPSVFPLAPSSKSTSGGTAALGCLVKDYFPEPVTVSWNSGALTSGVHTFPAVLQSSGLYSLSSVVTVPSSSLGTQTYICNVNHKPSDTKVDKKVEPKSCDKTHTCPPCPAPPVAGPSVFLFPPKPKDTLMISRTPEVTCVVVDVKHEDPEVKFNWYVDGVEVHNAKTKPREEEYNSTYRVVSVLTVLHQDWLNGKEYKCKVSNKALPAPIEKTISKAKGQPREPQVYTLPPSREEMTKNQVSLTCDVSGFYPSDIAVEWESDGQPENNYKTTPPVLDSDGSFFLYSKLTVDKSRWEQGDVFSCSVMHEALHNHYTQKSLSLSPGK

SEQ ID NO: 23122 - protein, 121 aa, synthetic construct
  REGION 1..121: note = Description of Artificial Sequence: Synthetic polypeptide
  REGION 1..121: note = VH of XENP020472
EVKLEESGGGLVQPGGSMKLSCAASGFTFSDYWMDWVRQSPEKGLEWVAEIRTKANNHATYYAESVKGRFTISRDDSKSSVYLQMNSLRAEDTGIYYCTRLANWDWYFDVWGAGTTVTVSS

SEQ ID NO: 23123 - protein, 5 aa, synthetic construct
  REGION 1..5: note = Description of Artificial Sequence: Synthetic peptide
  REGION 1..5: note = XENP020472 vhCDR1
DYWMD

SEQ ID NO: 23124 - protein, 19 aa, synthetic construct
  REGION 1..19: note = Description of Artificial Sequence: Synthetic peptide
  REGION 1..19: note = XENP020472 vhCDR2
EIRTKANNHATYYAESVKG

SEQ ID NO: 23125 - protein, 10 aa, synthetic construct
  REGION 1..10: note = Description of Artificial Sequence: Synthetic peptide
  REGION 1..10: note = XENP020472 vhCDR3
LANWDWYFDV

SEQ ID NO: 23126 - protein, 218 aa, synthetic construct; identical to SEQ ID NO: 22266
  REGION 1..218: note = Description of Artificial Sequence: Synthetic polypeptide
  REGION 1..218: note = XENP020472 7G8_H0.24_L0_IgG1_PVA_/S267K Light Chain

SEQ ID NO: 23127 - protein, 111 aa, synthetic construct; identical to SEQ ID NO: 22267
  REGION 1..111: note = Description of Artificial Sequence: Synthetic polypeptide
  REGION 1..111: note = VL of XENP020472

SEQ ID NO: 23128 - protein, 15 aa, synthetic construct
  REGION 1..15: note = Description of Artificial Sequence: Synthetic peptide
  REGION 1..15: note = XENP020472 vlCDR1
KASQSVDYDGDSYMN

SEQ ID NO: 23129 - protein, 7 aa, synthetic construct
  REGION 1..7: note = Description of Artificial Sequence: Synthetic peptide
  REGION 1..7: note = XENP020472 vlCDR2
AASNLES

SEQ ID NO: 23130 - protein, 9 aa, synthetic construct
  REGION 1..9: note = Description of Artificial Sequence: Synthetic peptide
  REGION 1..9: note = XENP020472 vlCDR3
QQSNEDPFT

SEQ ID NO: 23131 - protein, 450 aa, synthetic construct
  REGION 1..450: note = Description of Artificial Sequence: Synthetic polypeptide
  REGION 1..450: note = XENP020473 7G8_H0.25_L0_IgG1_PVA_/S267K Heavy Chain
EVKLEESGGGLVQPGGSMKLSCAASGFTFSDAYMDWVRQSPEKGLEWVAEIRTKANNHATYYAESVKGRFTISRDDSKSSVYLQMNSLRAEDTGIYYCTRLANWDWYFDVWGAGTTVTVSSASTKGPSVFPLAPSSKSTSGGTAALGCLVKDYFPEPVTVSWNSGALTSGVHTFPAVLQSSGLYSLSSVVTVPSSSLGTQTYICNVNHKPSDTKVDKKVEPKSCDKTHTCPPCPAPPVAGPSVFLFPPKPKDTLMISRTPEVTCVVVDVKHEDPEVKFNWYVDGVEVHNAKTKPREEEYNSTYRVVSVLTVLHQDWLNGKEYKCKVSNKALPAPIEKTISKAKGQPREPQVYTLPPSREEMTKNQVSLTCDVSGFYPSDIAVEWESDGQPENNYKTTPPVLDSDGSFFLYSKLTVDKSRWEQGDVFSCSVMHEALHNHYTQKSLSLSPGK

SEQ ID NO: 23132 - protein, 121 aa, synthetic construct
  REGION 1..121: note = Description of Artificial Sequence: Synthetic polypeptide
  REGION 1..121: note = VH of XENP020473
EVKLEESGGGLVQPGGSMKLSCAASGFTFSDAYMDWVRQSPEKGLEWVAEIRTKANNHATYYAESVKGRFTISRDDSKSSVYLQMNSLRAEDTGIYYCTRLANWDWYFDVWGAGTTVTVSS

SEQ ID NO: 23133 - protein, 5 aa, synthetic construct
  REGION 1..5: note = Description of Artificial Sequence: Synthetic peptide
  REGION 1..5: note = XENP020473 vhCDR1
DAYMD

SEQ ID NO: 23134 - protein, 19 aa, synthetic construct
  REGION 1..19: note = Description of Artificial Sequence: Synthetic peptide
  REGION 1..19: note = XENP020473 vhCDR2
EIRTKANNHATYYAESVKG

SEQ ID NO: 23135 - protein, 10 aa, synthetic construct
  REGION 1..10: note = Description of Artificial Sequence: Synthetic peptide
  REGION 1..10: note = XENP020473 vhCDR3
LANWDWYFDV

SEQ ID NO: 23136 - protein, 218 aa, synthetic construct; identical to SEQ ID NO: 22266
  REGION 1..218: note = Description of Artificial Sequence: Synthetic polypeptide
  REGION 1..218: note = XENP020473 7G8_H0.25_L0_IgG1_PVA_/S267K Light Chain

SEQ ID NO: 23137 - protein, 111 aa, synthetic construct; identical to SEQ ID NO: 22267
  REGION 1..111: note = Description of Artificial Sequence: Synthetic polypeptide
  REGION 1..111: note = VL of XENP020473

SEQ ID NO: 23138 - protein, 15 aa, synthetic construct
  REGION 1..15: note = Description of Artificial Sequence: Synthetic peptide
  REGION 1..15: note = XENP020473 vlCDR1
KASQSVDYDGDSYMN

SEQ ID NO: 23139 - protein, 7 aa, synthetic construct
  REGION 1..7: note = Description of Artificial Sequence: Synthetic peptide
  REGION 1..7: note = XENP020473 vlCDR2
AASNLES

SEQ ID NO: 23140 - protein, 9 aa, synthetic construct
  REGION 1..9: note = Description of Artificial Sequence: Synthetic peptide
  REGION 1..9: note = XENP020473 vlCDR3
QQSNEDPFT

SEQ ID NO: 23141 - protein, 450 aa, synthetic construct
  REGION 1..450: note = Description of Artificial Sequence: Synthetic polypeptide
  REGION 1..450: note = XENP020474 7G8_H0.26_L0_IgG1_PVA_/S267K Heavy Chain
EVKLEESGGGLVQPGGSMKLSCAASGFTFSDAFMDWVRQSPEKGLEWVAEIRTKANNHATYYAESVKGRFTISRDDSKSSVYLQMNSLRAEDTGIYYCTRLANWDWYFDVWGAGTTVTVSSASTKGPSVFPLAPSSKSTSGGTAALGCLVKDYFPEPVTVSWNSGALTSGVHTFPAVLQSSGLYSLSSVVTVPSSSLGTQTYICNVNHKPSDTKVDKKVEPKSCDKTHTCPPCPAPPVAGPSVFLFPPKPKDTLMISRTPEVTCVVVDVKHEDPEVKFNWYVDGVEVHNAKTKPREEEYNSTYRVVSVLTVLHQDWLNGKEYKCKVSNKALPAPIEKTISKAKGQPREPQVYTLPPSREEMTKNQVSLTCDVSGFYPSDIAVEWESDGQPENNYKTTPPVLDSDGSFFLYSKLTVDKSRWEQGDVFSCSVMHEALHNHYTQKSLSLSPGK

SEQ ID NO: 23142 - protein, 121 aa, synthetic construct
  REGION 1..121: note = Description of Artificial Sequence: Synthetic polypeptide
  REGION 1..121: note = VH of XENP020474
EVKLEESGGGLVQPGGSMKLSCAASGFTFSDAFMDWVRQSPEKGLEWVAEIRTKANNHATYYAESVKGRFTISRDDSKSSVYLQMNSLRAEDTGIYYCTRLANWDWYFDVWGAGTTVTVSS

SEQ ID NO: 23143 - protein, 5 aa, synthetic construct
  REGION 1..5: note = Description of Artificial Sequence: Synthetic peptide
  REGION 1..5: note = XENP020474 vhCDR1
DAFMD

SEQ ID NO: 23144 - protein, 19 aa, synthetic construct
  REGION 1..19: note = Description of Artificial Sequence: Synthetic peptide
  REGION 1..19: note = XENP020474 vhCDR2
EIRTKANNHATYYAESVKG

SEQ ID NO: 23145 - protein, 10 aa, synthetic construct
  REGION 1..10: note = Description of Artificial Sequence: Synthetic peptide
  REGION 1..10: note = XENP020474 vhCDR3
LANWDWYFDV

SEQ ID NO: 23146 - protein, 218 aa, synthetic construct; identical to SEQ ID NO: 22266
  REGION 1..218: note = Description of Artificial Sequence: Synthetic polypeptide
  REGION 1..218: note = XENP020474 7G8_H0.26_L0_IgG1_PVA_/S267K Light Chain

SEQ ID NO: 23147 - protein, 111 aa, synthetic construct; identical to SEQ ID NO: 22267
  REGION 1..111: note = Description of Artificial Sequence: Synthetic polypeptide
  REGION 1..111: note = VL of XENP020474

SEQ ID NO: 23148 - protein, 15 aa, synthetic construct
  REGION 1..15: note = Description of Artificial Sequence: Synthetic peptide
  REGION 1..15: note = XENP020474 vlCDR1
KASQSVDYDGDSYMN

SEQ ID NO: 23149 - protein, 7 aa, synthetic construct
  REGION 1..7: note = Description of Artificial Sequence: Synthetic peptide
  REGION 1..7: note = XENP020474 vlCDR2
AASNLES

SEQ ID NO: 23150 - protein, 9 aa, synthetic construct
  REGION 1..9: note = Description of Artificial Sequence: Synthetic peptide
  REGION 1..9: note = XENP020474 vlCDR3
QQSNEDPFT

SEQ ID NO: 23151 - protein, 450 aa, synthetic construct
  REGION 1..450: note = Description of Artificial Sequence: Synthetic polypeptide
  REGION 1..450: note = XENP020475 7G8_H0.27_L0_IgG1_PVA_/S267K Heavy Chain
EVKLEESGGGLVQPGGSMKLSCAASGFTFSDAWMDWVRQSPEKGLEWVAEIKTKANNHATYYAESVKGRFTISRDDSKSSVYLQMNSLRAEDTGIYYCTRLANWDWYFDVWGAGTTVTVSSASTKGPSVFPLAPSSKSTSGGTAALGCLVKDYFPEPVTVSWNSGALTSGVHTFPAVLQSSGLYSLSSVVTVPSSSLGTQTYICNVNHKPSDTKVDKKVEPKSCDKTHTCPPCPAPPVAGPSVFLFPPKPKDTLMISRTPEVTCVVVDVKHEDPEVKFNWYVDGVEVHNAKTKPREEEYNSTYRVVSVLTVLHQDWLNGKEYKCKVSNKALPAPIEKTISKAKGQPREPQVYTLPPSREEMTKNQVSLTCDVSGFYPSDIAVEWESDGQPENNYKTTPPVLDSDGSFFLYSKLTVDKSRWEQGDVFSCSVMHEALHNHYTQKSLSLSPGK

SEQ ID NO: 23152 - protein, 121 aa, synthetic construct
  REGION 1..121: note = Description of Artificial Sequence: Synthetic polypeptide
  REGION 1..121: note = VH of XENP020475
EVKLEESGGGLVQPGGSMKLSCAASGFTFSDAWMDWVRQSPEKGLEWVAEIKTKANNHATYYAESVKGRFTISRDDSKSSVYLQMNSLRAEDTGIYYCTRLANWDWYFDVWGAGTTVTVSS

SEQ ID NO: 23153 - protein, 5 aa, synthetic construct
  REGION 1..5: note = Description of Artificial Sequence: Synthetic peptide
  REGION 1..5: note = XENP020475 vhCDR1
DAWMD

SEQ ID NO: 23154 - protein, 19 aa, synthetic construct
  REGION 1..19: note = Description of Artificial Sequence: Synthetic peptide
  REGION 1..19: note = XENP020475 vhCDR2
EIKTKANNHATYYAESVKG

SEQ ID NO: 23155 - protein, 10 aa, synthetic construct
  REGION 1..10: note = Description of Artificial Sequence: Synthetic peptide
  REGION 1..10: note = XENP020475 vhCDR3
LANWDWYFDV

SEQ ID NO: 23156 - protein, 218 aa, synthetic construct; identical to SEQ ID NO: 22266
  REGION 1..218: note = Description of Artificial Sequence: Synthetic polypeptide
  REGION 1..218: note = XENP020475 7G8_H0.27_L0_IgG1_PVA_/S267K Light Chain

SEQ ID NO: 23157 - protein, 111 aa, synthetic construct; identical to SEQ ID NO: 22267
  REGION 1..111: note = Description of Artificial Sequence: Synthetic polypeptide
  REGION 1..111: note = VL of XENP020475

SEQ ID NO: 23158 - protein, 15 aa, synthetic construct
  REGION 1..15: note = Description of Artificial Sequence: Synthetic peptide
  REGION 1..15: note = XENP020475 vlCDR1
KASQSVDYDGDSYMN

SEQ ID NO: 23159 - protein, 7 aa, synthetic construct
  REGION 1..7: note = Description of Artificial Sequence: Synthetic peptide
  REGION 1..7: note = XENP020475 vlCDR2
AASNLES

SEQ ID NO: 23160 - protein, 9 aa, synthetic construct
  REGION 1..9: note = Description of Artificial Sequence: Synthetic peptide
  REGION 1..9: note = XENP020475 vlCDR3
QQSNEDPFT

SEQ ID NO: 23161 - protein, 450 aa, synthetic construct
  REGION 1..450: note = Description of Artificial Sequence: Synthetic polypeptide
  REGION 1..450: note = XENP020476 7G8_H0.28_L0_IgG1_PVA_/S267K Heavy Chain
EVKLEESGGGLVQPGGSMKLSCAASGFTFSDAWMDWVRQSPEKGLEWVAEIETKANNHATYYAESVKGRFTISRDDSKSSVYLQMNSLRAEDTGIYYCTRLANWDWYFDVWGAGTTVTVSSASTKGPSVFPLAPSSKSTSGGTAALGCLVKDYFPEPVTVSWNSGALTSGVHTFPAVLQSSGLYSLSSVVTVPSSSLGTQTYICNVNHKPSDTKVDKKVEPKSCDKTHTCPPCPAPPVAGPSVFLFPPKPKDTLMISRTPEVTCVVVDVKHEDPEVKFNWYVDGVEVHNAKTKPREEEYNSTYRVVSVLTVLHQDWLNGKEYKCKVSNKALPAPIEKTISKAKGQPREPQVYTLPPSREEMTKNQVSLTCDVSGFYPSDIAVEWESDGQPENNYKTTPPVLDSDGSFFLYSKLTVDKSRWEQGDVFSCSVMHEALHNHYTQKSLSLSPGK

SEQ ID NO: 23162 - protein, 121 aa, synthetic construct
  REGION 1..121: note = Description of Artificial Sequence: Synthetic polypeptide
  REGION 1..121: note = VH of XENP020476
EVKLEESGGGLVQPGGSMKLSCAASGFTFSDAWMDWVRQSPEKGLEWVAEIETKANNHATYYAESVKGRFTISRDDSKSSVYLQMNSLRAEDTGIYYCTRLANWDWYFDVWGAGTTVTVSS

SEQ ID NO: 23163 - protein, 5 aa, synthetic construct
  REGION 1..5: note = Description of Artificial Sequence: Synthetic peptide
  REGION 1..5: note = XENP020476 vhCDR1
DAWMD

SEQ ID NO: 23164 - protein, 19 aa, synthetic construct
  REGION 1..19: note = Description of Artificial Sequence: Synthetic peptide
  REGION 1..19: note = XENP020476 vhCDR2
EIETKANNHATYYAESVKG

SEQ ID NO: 23165 - protein, 10 aa, synthetic construct
  REGION 1..10: note = Description of Artificial Sequence: Synthetic peptide
  REGION 1..10: note = XENP020476 vhCDR3
LANWDWYFDV

SEQ ID NO: 23166 - protein, 218 aa, synthetic construct; identical to SEQ ID NO: 22266
  REGION 1..218: note = Description of Artificial Sequence: Synthetic polypeptide
  REGION 1..218: note = XENP020476 7G8_H0.28_L0_IgG1_PVA_/S267K Light Chain

SEQ ID NO: 23167 - protein, 111 aa, synthetic construct; identical to SEQ ID NO: 22267
  REGION 1..111: note = Description of Artificial Sequence: Synthetic polypeptide
  REGION 1..111: note = VL of XENP020476

SEQ ID NO: 23168 - protein, 15 aa, synthetic construct
  REGION 1..15: note = Description of Artificial Sequence: Synthetic peptide
  REGION 1..15: note = XENP020476 vlCDR1
KASQSVDYDGDSYMN

SEQ ID NO: 23169 - protein, 7 aa, synthetic construct
  REGION 1..7: note = Description of Artificial Sequence: Synthetic peptide
  REGION 1..7: note = XENP020476 vlCDR2
AASNLES

SEQ ID NO: 23170 - protein, 9 aa, synthetic construct
  REGION 1..9: note = Description of Artificial Sequence: Synthetic peptide
  REGION 1..9: note = XENP020476 vlCDR3
QQSNEDPFT

SEQ ID NO: 23171 - protein, 450 aa, synthetic construct
  REGION 1..450: note = Description of Artificial Sequence: Synthetic polypeptide
  REGION 1..450: note = XENP020477 7G8_H0.29_L0_IgG1_PVA_/S267K Heavy Chain
EVKLEESGGGLVQPGGSMKLSCAASGFTFSDAWMDWVRQSPEKGLEWVAEIDTKANNHATYYAESVKGRFTISRDDSKSSVYLQMNSLRAEDTGIYYCTRLANWDWYFDVWGAGTTVTVSSASTKGPSVFPLAPSSKSTSGGTAALGCLVKDYFPEPVTVSWNSGALTSGVHTFPAVLQSSGLYSLSSVVTVPSSSLGTQTYICNVNHKPSDTKVDKKVEPKSCDKTHTCPPCPAPPVAGPSVFLFPPKPKDTLMISRTPEVTCVVVDVKHEDPEVKFNWYVDGVEVHNAKTKPREEEYNSTYRVVSVLTVLHQDWLNGKEYKCKVSNKALPAPIEKTISKAKGQPREPQVYTLPPSREEMTKNQVSLTCDVSGFYPSDIAVEWESDGQPENNYKTTPPVLDSDGSFFLYSKLTVDKSRWEQGDVFSCSVMHEALHNHYTQKSLSLSPGK

SEQ ID NO: 23172 - protein, 121 aa, synthetic construct
  REGION 1..121: note = Description of Artificial Sequence: Synthetic polypeptide
  REGION 1..121: note = VH of XENP020477
EVKLEESGGGLVQPGGSMKLSCAASGFTFSDAWMDWVRQSPEKGLEWVAEIDTKANNHATYYAESVKGRFTISRDDSKSSVYLQMNSLRAEDTGIYYCTRLANWDWYFDVWGAGTTVTVSS

SEQ ID NO: 23173 - protein, 5 aa, synthetic construct
  REGION 1..5: note = Description of Artificial Sequence: Synthetic peptide
  REGION 1..5: note = XENP020477 vhCDR1
DAWMD

SEQ ID NO: 23174 - protein, 19 aa, synthetic construct
  REGION 1..19: note = Description of Artificial Sequence: Synthetic peptide
  REGION 1..19: note = XENP020477 vhCDR2
EIDTKANNHATYYAESVKG

SEQ ID NO: 23175 - protein, 10 aa, synthetic construct
  REGION 1..10: note = Description of Artificial Sequence: Synthetic peptide
  REGION 1..10: note = XENP020477 vhCDR3
LANWDWYFDV

SEQ ID NO: 23176 - protein, 218 aa, synthetic construct; identical to SEQ ID NO: 22266
  REGION 1..218: note = Description of Artificial Sequence: Synthetic polypeptide
  REGION 1..218: note = XENP020477 7G8_H0.29_L0_IgG1_PVA_/S267K Light Chain

SEQ ID NO: 23177 - protein, 111 aa, synthetic construct; identical to SEQ ID NO: 22267
  REGION 1..111: note = Description of Artificial Sequence: Synthetic polypeptide
  REGION 1..111: note = VL of XENP020477

SEQ ID NO: 23178 - protein, 15 aa, synthetic construct
  REGION 1..15: note = Description of Artificial Sequence: Synthetic peptide
  REGION 1..15: note = XENP020477 vlCDR1
KASQSVDYDGDSYMN

SEQ ID NO: 23179 - protein, 7 aa, synthetic construct
  REGION 1..7: note = Description of Artificial Sequence: Synthetic peptide
  REGION 1..7: note = XENP020477 vlCDR2
AASNLES

SEQ ID NO: 23180 - protein, 9 aa, synthetic construct
  REGION 1..9: note = Description of Artificial Sequence: Synthetic peptide
  REGION 1..9: note = XENP020477 vlCDR3
QQSNEDPFT

SEQ ID NO: 23181 - protein, 450 aa, synthetic construct
  REGION 1..450: note = Description of Artificial Sequence: Synthetic polypeptide
  REGION 1..450: note = XENP020478 7G8_H0.30_L0_IgG1_PVA_/S267K Heavy Chain
EVKLEESGGGLVQPGGSMKLSCAASGFTFSDAWMDWVRQSPEKGLEWVAEIHTKANNHATYYAESVKGRFTISRDDSKSSVYLQMNSLRAEDTGIYYCTRLANWDWYFDVWGAGTTVTVSSASTKGPSVFPLAPSSKSTSGGTAALGCLVKDYFPEPVTVSWNSGALTSGVHTFPAVLQSSGLYSLSSVVTVPSSSLGTQTYICNVNHKPSDTKVDKKVEPKSCDKTHTCPPCPAPPVAGPSVFLFPPKPKDTLMISRTPEVTCVVVDVKHEDPEVKFNWYVDGVEVHNAKTKPREEEYNSTYRVVSVLTVLHQDWLNGKEYKCKVSNKALPAPIEKTISKAKGQPREPQVYTLPPSREEMTKNQVSLTCDVSGFYPSDIAVEWESDGQPENNYKTTPPVLDSDGSFFLYSKLTVDKSRWEQGDVFSCSVMHEALHNHYTQKSLSLSPGK

SEQ ID NO: 23182 - protein, 121 aa, synthetic construct
  REGION 1..121: note = Description of Artificial Sequence: Synthetic polypeptide
  REGION 1..121: note = VH of XENP020478
EVKLEESGGGLVQPGGSMKLSCAASGFTFSDAWMDWVRQSPEKGLEWVAEIHTKANNHATYYAESVKGRFTISRDDSKSSVYLQMNSLRAEDTGIYYCTRLANWDWYFDVWGAGTTVTVSS

SEQ ID NO: 23183 - protein, 5 aa, synthetic construct
  REGION 1..5: note = Description of Artificial Sequence: Synthetic peptide
  REGION 1..5: note = XENP020478 vhCDR1
DAWMD

SEQ ID NO: 23184 - protein, 19 aa, synthetic construct
  REGION 1..19: note = Description of Artificial Sequence: Synthetic peptide
  REGION 1..19: note = XENP020478 vhCDR2
EIHTKANNHATYYAESVKG

SEQ ID NO: 23185 - protein, 10 aa, synthetic construct
  REGION 1..10: note = Description of Artificial Sequence: Synthetic peptide
  REGION 1..10: note = XENP020478 vhCDR3
LANWDWYFDV

SEQ ID NO: 23186 - protein, 218 aa, synthetic construct; identical to SEQ ID NO: 22266
  REGION 1..218: note = Description of Artificial Sequence: Synthetic polypeptide
  REGION 1..218: note = XENP020478 7G8_H0.30_L0_IgG1_PVA_/S267K Light Chain

SEQ ID NO: 23187 - protein, 111 aa, synthetic construct; identical to SEQ ID NO: 22267
  REGION 1..111: note = Description of Artificial Sequence: Synthetic polypeptide
  REGION 1..111: note = VL of XENP020478

SEQ ID NO: 23188 - protein, 15 aa, synthetic construct
  REGION 1..15: note = Description of Artificial Sequence: Synthetic peptide
  REGION 1..15: note = XENP020478 vlCDR1
KASQSVDYDGDSYMN

SEQ ID NO: 23189 - protein, 7 aa, synthetic construct
  REGION 1..7: note = Description of Artificial Sequence: Synthetic peptide
  REGION 1..7: note = XENP020478 vlCDR2
AASNLES

SEQ ID NO: 23190 - protein, 9 aa, synthetic construct
  REGION 1..9: note = Description of Artificial Sequence: Synthetic peptide
  REGION 1..9: note = XENP020478 vlCDR3
QQSNEDPFT

SEQ ID NO: 23191 - protein, 450 aa, synthetic construct
  REGION 1..450: note = Description of Artificial Sequence: Synthetic polypeptide
  REGION 1..450: note = XENP020479 7G8_H0.31_L0_IgG1_PVA_/S267K Heavy Chain
EVKLEESGGGLVQPGGSMKLSCAASGFTFSDAWMDWVRQSPEKGLEWVAEISTKANNHATYYAESVKGRFTISRDDSKSSVYLQMNSLRAEDTGIYYCTRLANWDWYFDVWGAGTTVTVSSASTKGPSVFPLAPSSKSTSGGTAALGCLVKDYFPEPVTVSWNSGALTSGVHTFPAVLQSSGLYSLSSVVTVPSSSLGTQTYICNVNHKPSDTKVDKKVEPKSCDKTHTCPPCPAPPVAGPSVFLFPPKPKDTLMISRTPEVTCVVVDVKHEDPEVKFNWYVDGVEVHNAKTKPREEEYNSTYRVVSVLTVLHQDWLNGKEYKCKVSNKALPAPIEKTISKAKGQPREPQVYTLPPSREEMTKNQVSLTCDVSGFYPSDIAVEWESDGQPENNYKTTPPVLDSDGSFFLYSKLTVDKSRWEQGDVFSCSVMHEALHNHYTQKSLSLSPGK

SEQ ID NO: 23192 - protein, 121 aa, synthetic construct
  REGION 1..121: note = Description of Artificial Sequence: Synthetic polypeptide
  REGION 1..121: note = VH of XENP020479
EVKLEESGGGLVQPGGSMKLSCAASGFTFSDAWMDWVRQSPEKGLEWVAEISTKANNHATYYAESVKGRFTISRDDSKSSVYLQMNSLRAEDTGIYYCTRLANWDWYFDVWGAGTTVTVSS

SEQ ID NO: 23193 - protein, 5 aa, synthetic construct
  REGION 1..5: note = Description of Artificial Sequence: Synthetic peptide
  REGION 1..5: note = XENP020479 vhCDR1
DAWMD

SEQ ID NO: 23194 - protein, 19 aa, synthetic construct
  REGION 1..19: note = Description of Artificial Sequence: Synthetic peptide
  REGION 1..19: note = XENP020479 vhCDR2
EISTKANNHATYYAESVKG

SEQ ID NO: 23195 - protein, 10 aa, synthetic construct
  REGION 1..10: note = Description of Artificial Sequence: Synthetic peptide
  REGION 1..10: note = XENP020479 vhCDR3
LANWDWYFDV

SEQ ID NO: 23196 - protein, 218 aa, synthetic construct; identical to SEQ ID NO: 22266
  REGION 1..218: note = Description of Artificial Sequence: Synthetic polypeptide
  REGION 1..218: note = XENP020479 7G8_H0.31_L0_IgG1_PVA_/S267K Light Chain

SEQ ID NO: 23197 - protein, 111 aa, synthetic construct; identical to SEQ ID NO: 22267
  REGION 1..111: note = Description of Artificial Sequence: Synthetic polypeptide
  REGION 1..111: note = VL of XENP020479

SEQ ID NO: 23198 - protein, 15 aa, synthetic construct
  REGION 1..15: note = Description of Artificial Sequence: Synthetic peptide
  REGION 1..15: note = XENP020479 vlCDR1
KASQSVDYDGDSYMN

SEQ ID NO: 23199 - protein, 7 aa, synthetic construct
  REGION 1..7: note = Description of Artificial Sequence: Synthetic peptide
  REGION 1..7: note = XENP020479 vlCDR2
AASNLES

SEQ ID NO: 23200 - protein, 9 aa, synthetic construct
  REGION 1..9: note = Description of Artificial Sequence: Synthetic peptide
  REGION 1..9: note = XENP020479 vlCDR3
QQSNEDPFT

SEQ ID NO: 23201 - protein, 450 aa, synthetic construct
  REGION 1..450: note = Description of Artificial Sequence: Synthetic polypeptide
  REGION 1..450: note = XENP020480 7G8_H0.32_L0_IgG1_PVA_/S267K Heavy Chain
EVKLEESGGGLVQPGGSMKLSCAASGFTFSDAWMDWVRQSPEKGLEWVAEIGTKANNHATYYAESVKGRFTISRDDSKSSVYLQMNSLRAEDTGIYYCTRLANWDWYFDVWGAGTTVTVSSASTKGPSVFPLAPSSKSTSGGTAALGCLVKDYFPEPVTVSWNSGALTSGVHTFPAVLQSSGLYSLSSVVTVPSSSLGTQTYICNVNHKPSDTKVDKKVEPKSCDKTHTCPPCPAPPVAGPSVFLFPPKPKDTLMISRTPEVTCVVVDVKHEDPEVKFNWYVDGVEVHNAKTKPREEEYNSTYRVVSVLTVLHQDWLNGKEYKCKVSNKALPAPIEKTISKAKGQPREPQVYTLPPSREEMTKNQVSLTCDVSGFYPSDIAVEWESDGQPENNYKTTPPVLDSDGSFFLYSKLTVDKSRWEQGDVFSCSVMHEALHNHYTQKSLSLSPGK

SEQ ID NO: 23202 - protein, 121 aa, synthetic construct
  REGION 1..121: note = Description of Artificial Sequence: Synthetic polypeptide
  REGION 1..121: note = VH of XENP020480
EVKLEESGGGLVQPGGSMKLSCAASGFTFSDAWMDWVRQSPEKGLEWVAEIGTKANNHATYYAESVKGRFTISRDDSKSSVYLQMNSLRAEDTGIYYCTRLANWDWYFDVWGAGTTVTVSS

SEQ ID NO: 23203 - protein, 5 aa, synthetic construct
  REGION 1..5: note = Description of Artificial Sequence: Synthetic peptide
  REGION 1..5: note = XENP020480 vhCDR1
DAWMD

SEQ ID NO: 23204 - protein, 19 aa, synthetic construct
  REGION 1..19: note = Description of Artificial Sequence: Synthetic peptide
  REGION 1..19: note = XENP020480 vhCDR2
EIGTKANNHATYYAESVKG

SEQ ID NO: 23205 - protein, 10 aa, synthetic construct
  REGION 1..10: note = Description of Artificial Sequence: Synthetic peptide
  REGION 1..10: note = XENP020480 vhCDR3
LANWDWYFDV

SEQ ID NO: 23206 - protein, 218 aa, synthetic construct; identical to SEQ ID NO: 22266
  REGION 1..218: note = Description of Artificial Sequence: Synthetic polypeptide
  REGION 1..218: note = XENP020480 7G8_H0.32_L0_IgG1_PVA_/S267K Light Chain

SEQ ID NO: 23207 - protein, 111 aa, synthetic construct; identical to SEQ ID NO: 22267
  REGION 1..111: note = Description of Artificial Sequence: Synthetic polypeptide
  REGION 1..111: note = VL of XENP020480

SEQ ID NO: 23208 - protein, 15 aa, synthetic construct
  REGION 1..15: note = Description of Artificial Sequence: Synthetic peptide
  REGION 1..15: note = XENP020480 vlCDR1
KASQSVDYDGDSYMN

SEQ ID NO: 23209 - protein, 7 aa, synthetic construct
  REGION 1..7: note = Description of Artificial Sequence: Synthetic peptide
  REGION 1..7: note = XENP020480 vlCDR2
AASNLES

SEQ ID NO: 23210 - protein, 9 aa, synthetic construct
  REGION 1..9: note = Description of Artificial Sequence: Synthetic peptide
  REGION 1..9: note = XENP020480 vlCDR3
QQSNEDPFT

SEQ ID NO: 23211 - protein, 450 aa, synthetic construct
  REGION 1..450: note = Description of Artificial Sequence: Synthetic polypeptide
  REGION 1..450: note = XENP020481 7G8_H0.33_L0_IgG1_PVA_/S267K Heavy Chain
EVKLEESGGGLVQPGGSMKLSCAASGFTFSDAWMDWVRQSPEKGLEWVAEIYTKANNHATYYAESVKGRFTISRDDSKSSVYLQMNSLRAEDTGIYYCTRLANWDWYFDVWGAGTTVTVSSASTKGPSVFPLAPSSKSTSGGTAALGCLVKDYFPEPVTVSWNSGALTSGVHTFPAVLQSSGLYSLSSVVTVPSSSLGTQTYICNVNHKPSDTKVDKKVEPKSCDKTHTCPPCPAPPVAGPSVFLFPPKPKDTLMISRTPEVTCVVVDVKHEDPEVKFNWYVDGVEVHNAKTKPREEEYNSTYRVVSVLTVLHQDWLNGKEYKCKVSNKALPAPIEKTISKAKGQPREPQVYTLPPSREEMTKNQVSLTCDVSGFYPSDIAVEWESDGQPENNYKTTPPVLDSDGSFFLYSKLTVDKSRWEQGDVFSCSVMHEALHNHYTQKSLSLSPGK

SEQ ID NO: 23212 - protein, 121 aa, synthetic construct
  REGION 1..121: note = Description of Artificial Sequence: Synthetic polypeptide
  REGION 1..121: note = VH of XENP020481
EVKLEESGGGLVQPGGSMKLSCAASGFTFSDAWMDWVRQSPEKGLEWVAEIYTKANNHATYYAESVKGRFTISRDDSKSSVYLQMNSLRAEDTGIYYCTRLANWDWYFDVWGAGTTVTVSS

SEQ ID NO: 23213 - protein, 5 aa, synthetic construct
  REGION 1..5: note = Description of Artificial Sequence: Synthetic peptide
  REGION 1..5: note = XENP020481 vhCDR1
DAWMD

SEQ ID NO: 23214 - protein, 19 aa, synthetic construct
  REGION 1..19: note = Description of Artificial Sequence: Synthetic peptide
  REGION 1..19: note = XENP020481 vhCDR2
EIYTKANNHATYYAESVKG

SEQ ID NO: 23215 - protein, 10 aa, synthetic construct
  REGION 1..10: note = Description of Artificial Sequence: Synthetic peptide
  REGION 1..10: note = XENP020481 vhCDR3
LANWDWYFDV

SEQ ID NO: 23216 - protein, 218 aa, synthetic construct; identical to SEQ ID NO: 22266
  REGION 1..218: note = Description of Artificial Sequence: Synthetic polypeptide
  REGION 1..218: note = XENP020481 7G8_H0.33_L0_IgG1_PVA_/S267K Light Chain

SEQ ID NO: 23217 - protein, 111 aa, synthetic construct; identical to SEQ ID NO: 22267
  REGION 1..111: note = Description of Artificial Sequence: Synthetic polypeptide
  REGION 1..111: note = VL of XENP020481

SEQ ID NO: 23218 - protein, 15 aa, synthetic construct
  REGION 1..15: note = Description of Artificial Sequence: Synthetic peptide
  REGION 1..15: note = XENP020481 vlCDR1
KASQSVDYDGDSYMN

SEQ ID NO: 23219 - protein, 7 aa, synthetic construct
  REGION 1..7: note = Description of Artificial Sequence: Synthetic peptide
  REGION 1..7: note = XENP020481 vlCDR2
AASNLES

SEQ ID NO: 23220 - protein, 9 aa, synthetic construct
  REGION 1..9: note = Description of Artificial Sequence: Synthetic peptide
  REGION 1..9: note = XENP020481 vlCDR3
QQSNEDPFT

SEQ ID NO: 23221 - protein, 450 aa, synthetic construct
  REGION 1..450: note = Description of Artificial Sequence: Synthetic polypeptide
  REGION 1..450: note = XENP020482 7G8_H0.34_L0_IgG1_PVA_/S267K Heavy Chain
EVKLEESGGGLVQPGGSMKLSCAASGFTFSDAWMDWVRQSPEKGLEWVAEIITKANNHATYYAESVKGRFTISRDDSKSSVYLQMNSLRAEDTGIYYCTRLANWDWYFDVWGAGTTVTVSSASTKGPSVFPLAPSSKSTSGGTAALGCLVKDYFPEPVTVSWNSGALTSGVHTFPAVLQSSGLYSLSSVVTVPSSSLGTQTYICNVNHKPSDTKVDKKVEPKSCDKTHTCPPCPAPPVAGPSVFLFPPKPKDTLMISRTPEVTCVVVDVKHEDPEVKFNWYVDGVEVHNAKTKPREEEYNSTYRVVSVLTVLHQDWLNGKEYKCKVSNKALPAPIEKTISKAKGQPREPQVYTLPPSREEMTKNQVSLTCDVSGFYPSDIAVEWESDGQPENNYKTTPPVLDSDGSFFLYSKLTVDKSRWEQGDVFSCSVMHEALHNHYTQKSLSLSPGK

SEQ ID NO: 23222 - protein, 121 aa, synthetic construct
  REGION 1..121: note = Description of Artificial Sequence: Synthetic polypeptide
  REGION 1..121: note = VH of XENP020482
EVKLEESGGGLVQPGGSMKLSCAASGFTFSDAWMDWVRQSPEKGLEWVAEIITKANNHATYYAESVKGRFTISRDDSKSSVYLQMNSLRAEDTGIYYCTRLANWDWYFDVWGAGTTVTVSS

SEQ ID NO: 23223 - protein, 5 aa, synthetic construct
  REGION 1..5: note = Description of Artificial Sequence: Synthetic peptide
  REGION 1..5: note = XENP020482 vhCDR1
DAWMD

SEQ ID NO: 23224 - protein, 19 aa, synthetic construct
  REGION 1..19: note = Description of Artificial Sequence: Synthetic peptide
  REGION 1..19: note = XENP020482 vhCDR2
EIITKANNHATYYAESVKG

SEQ ID NO: 23225 - protein, 10 aa, synthetic construct
  REGION 1..10: note = Description of Artificial Sequence: Synthetic peptide
  REGION 1..10: note = XENP020482 vhCDR3
LANWDWYFDV

SEQ ID NO: 23226 - protein, 218 aa, synthetic construct; identical to SEQ ID NO: 22266
  REGION 1..218: note = Description of Artificial Sequence: Synthetic polypeptide
  REGION 1..218: note = XENP020482 7G8_H0.34_L0_IgG1_PVA_/S267K Light Chain

SEQ ID NO: 23227 - protein, 111 aa, synthetic construct; identical to SEQ ID NO: 22267
  REGION 1..111: note = Description of Artificial Sequence: Synthetic polypeptide
  REGION 1..111: note = VL of XENP020482

SEQ ID NO: 23228 - protein, 15 aa, synthetic construct
  REGION 1..15: note = Description of Artificial Sequence: Synthetic peptide
  REGION 1..15: note = XENP020482 vlCDR1
KASQSVDYDGDSYMN

SEQ ID NO: 23229 - protein, 7 aa, synthetic construct
  REGION 1..7: note = Description of Artificial Sequence: Synthetic peptide
  REGION 1..7: note = XENP020482 vlCDR2
AASNLES

SEQ ID NO: 23230 - protein, 9 aa, synthetic construct
  REGION 1..9: note = Description of Artificial Sequence: Synthetic peptide
  REGION 1..9: note = XENP020482 vlCDR3
QQSNEDPFT

SEQ ID NO: 23231 - protein, 450 aa, synthetic construct
  REGION 1..450: note = Description of Artificial Sequence: Synthetic polypeptide
  REGION 1..450: note = XENP020483 7G8_H0.35_L0_IgG1_PVA_/S267K Heavy Chain
EVKLEESGGGLVQPGGSMKLSCAASGFTFSDAWMDWVRQSPEKGLEWVAEIWTKANNHATYYAESVKGRFTISRDDSKSSVYLQMNSLRAEDTGIYYCTRLANWDWYFDVWGAGTTVTVSSASTKGPSVFPLAPSSKSTSGGTAALGCLVKDYFPEPVTVSWNSGALTSGVHTFPAVLQSSGLYSLSSVVTVPSSSLGTQTYICNVNHKPSDTKVDKKVEPKSCDKTHTCPPCPAPPVAGPSVFLFPPKPKDTLMISRTPEVTCVVVDVKHEDPEVKFNWYVDGVEVHNAKTKPREEEYNSTYRVVSVLTVLHQDWLNGKEYKCKVSNKALPAPIEKTISKAKGQPREPQVYTLPPSREEMTKNQVSLTCDVSGFYPSDIAVEWESDGQPENNYKTTPPVLDSDGSFFLYSKLTVDKSRWEQGDVFSCSVMHEALHNHYTQKSLSLSPGK

SEQ ID NO: 23232 - protein, 121 aa, synthetic construct
  REGION 1..121: note = Description of Artificial Sequence: Synthetic polypeptide
  REGION 1..121: note = VH of XENP020483
EVKLEESGGGLVQPGGSMKLSCAASGFTFSDAWMDWVRQSPEKGLEWVAEIWTKANNHATYYAESVKGRFTISRDDSKSSVYLQMNSLRAEDTGIYYCTRLANWDWYFDVWGAGTTVTVSS

SEQ ID NO: 23233 - protein, 5 aa, synthetic construct
  REGION 1..5: note = Description of Artificial Sequence: Synthetic peptide
  REGION 1..5: note = XENP020483 vhCDR1
DAWMD

SEQ ID NO: 23234 - protein, 19 aa, synthetic construct
  REGION 1..19: note = Description of Artificial Sequence: Synthetic peptide
  REGION 1..19: note = XENP020483 vhCDR2
EIWTKANNHATYYAESVKG

SEQ ID NO: 23235 - protein, 10 aa, synthetic construct
  REGION 1..10: note = Description of Artificial Sequence: Synthetic peptide
  REGION 1..10: note = XENP020483 vhCDR3
LANWDWYFDV

SEQ ID NO: 23236 - protein, 218 aa, synthetic construct; identical to SEQ ID NO: 22266
  REGION 1..218: note = Description of Artificial Sequence: Synthetic polypeptide
  REGION 1..218: note = XENP020483 7G8_H0.35_L0_IgG1_PVA_/S267K Light Chain

SEQ ID NO: 23237 - protein, 111 aa, synthetic construct; identical to SEQ ID NO: 22267
  REGION 1..111: note = Description of Artificial Sequence: Synthetic polypeptide
  REGION 1..111: note = VL of XENP020483

SEQ ID NO: 23238 - protein, 15 aa, synthetic construct
  REGION 1..15: note = Description of Artificial Sequence: Synthetic peptide
  REGION 1..15: note = XENP020483 vlCDR1
KASQSVDYDGDSYMN

SEQ ID NO: 23239 - protein, 7 aa, synthetic construct
  REGION 1..7: note = Description of Artificial Sequence: Synthetic peptide
  REGION 1..7: note = XENP020483 vlCDR2
AASNLES

SEQ ID NO: 23240 - protein, 9 aa, synthetic construct
  REGION 1..9: note = Description of Artificial Sequence: Synthetic peptide
  REGION 1..9: note = XENP020483 vlCDR3
QQSNEDPFT

SEQ ID NO: 23241 - protein, 450 aa, synthetic construct
  REGION 1..450: note = Description of Artificial Sequence: Synthetic polypeptide
  REGION 1..450: note = XENP020484 7G8_H0.36_L0_IgG1_PVA_/S267K Heavy Chain
EVKLEESGGGLVQPGGSMKLSCAASGFTFSDAWMDWVRQSPEKGLEWVAEIRVKANNHATYYAESVKGRFTISRDDSKSSVYLQMNSLRAEDTGIYYCTRLANWDWYFDVWGAGTTVTVSSASTKGPSVFPLAPSSKSTSGGTAALGCLVKDYFPEPVTVSWNSGALTSGVHTFPAVLQSSGLYSLSSVVTVPSSSLGTQTYICNVNHKPSDTKVDKKVEPKSCDKTHTCPPCPAPPVAGPSVFLFPPKPKDTLMISRTPEVTCVVVDVKHEDPEVKFNWYVDGVEVHNAKTKPREEEYNSTYRVVSVLTVLHQDWLNGKEYKCKVSNKALPAPIEKTISKAKGQPREPQVYTLPPSREEMTKNQVSLTCDVSGFYPSDIAVEWESDGQPENNYKTTPPVLDSDGSFFLYSKLTVDKSRWEQGDVFSCSVMHEALHNHYTQKSLSLSPGK

SEQ ID NO: 23242 - protein, 121 aa, synthetic construct
  REGION 1..121: note = Description of Artificial Sequence: Synthetic polypeptide
  REGION 1..121: note = VH of XENP020484
EVKLEESGGGLVQPGGSMKLSCAASGFTFSDAWMDWVRQSPEKGLEWVAEIRVKANNHATYYAESVKGRFTISRDDSKSSVYLQMNSLRAEDTGIYYCTRLANWDWYFDVWGAGTTVTVSS

SEQ ID NO: 23243 - protein, 5 aa, synthetic construct
  REGION 1..5: note = Description of Artificial Sequence: Synthetic peptide
  REGION 1..5: note = XENP020484 vhCDR1
DAWMD

SEQ ID NO: 23244 - protein, 19 aa, synthetic construct
  REGION 1..19: note = Description of Artificial Sequence: Synthetic peptide
  REGION 1..19: note = XENP020484 vhCDR2
EIRVKANNHATYYAESVKG

SEQ ID NO: 23245 - protein, 10 aa, synthetic construct
  REGION 1..10: note = Description of Artificial Sequence: Synthetic peptide
  REGION 1..10: note = XENP020484 vhCDR3
LANWDWYFDV

SEQ ID NO: 23246 - protein, 218 aa, synthetic construct; identical to SEQ ID NO: 22266
  REGION 1..218: note = Description of Artificial Sequence: Synthetic polypeptide
  REGION 1..218: note = XENP020484 7G8_H0.36_L0_IgG1_PVA_/S267K Light Chain

SEQ ID NO: 23247 - protein, 111 aa, synthetic construct; identical to SEQ ID NO: 22267
  REGION 1..111: note = Description of Artificial Sequence: Synthetic polypeptide
  REGION 1..111: note = VL of XENP020484

SEQ ID NO: 23248 - protein, 15 aa, synthetic construct
  REGION 1..15: note = Description of Artificial Sequence: Synthetic peptide
  REGION 1..15: note = XENP020484 vlCDR1
KASQSVDYDGDSYMN

SEQ ID NO: 23249 - protein, 7 aa, synthetic construct
  REGION 1..7: note = Description of Artificial Sequence: Synthetic peptide
  REGION 1..7: note = XENP020484 vlCDR2
AASNLES

SEQ ID NO: 23250 - protein, 9 aa, synthetic construct
  REGION 1..9: note = Description of Artificial Sequence: Synthetic peptide
  REGION 1..9: note = XENP020484 vlCDR3
QQSNEDPFT

SEQ ID NO: 23251 - protein, 450 aa, synthetic construct
  REGION 1..450: note = Description of Artificial Sequence: Synthetic polypeptide
  REGION 1..450: note = XENP020485 7G8_H0.37_L0_IgG1_PVA_/S267K Heavy Chain
EVKLEESGGGLVQPGGSMKLSCAASGFTFSDAWMDWVRQSPEKGLEWVAEIRSKANNHATYYAESVKGRFTISRDDSKSSVYLQMNSLRAEDTGIYYCTRLANWDWYFDVWGAGTTVTVSSASTKGPSVFPLAPSSKSTSGGTAALGCLVKDYFPEPVTVSWNSGALTSGVHTFPAVLQSSGLYSLSSVVTVPSSSLGTQTYICNVNHKPSDTKVDKKVEPKSCDKTHTCPPCPAPPVAGPSVFLFPPKPKDTLMISRTPEVTCVVVDVKHEDPEVKFNWYVDGVEVHNAKTKPREEEYNSTYRVVSVLTVLHQDWLNGKEYKCKVSNKALPAPIEKTISKAKGQPREPQVYTLPPSREEMTKNQVSLTCDVSGFYPSDIAVEWESDGQPENNYKTTPPVLDSDGSFFLYSKLTVDKSRWEQGDVFSCSVMHEALHNHYTQKSLSLSPGK

SEQ ID NO: 23252 - protein, 121 aa, synthetic construct
  REGION 1..121: note = Description of Artificial Sequence: Synthetic polypeptide
  REGION 1..121: note = VH of XENP020485
EVKLEESGGGLVQPGGSMKLSCAASGFTFSDAWMDWVRQSPEKGLEWVAEIRSKANNHATYYAESVKGRFTISRDDSKSSVYLQMNSLRAEDTGIYYCTRLANWDWYFDVWGAGTTVTVSS

SEQ ID NO: 23253 - protein, 5 aa, synthetic construct
  REGION 1..5: note = Description of Artificial Sequence: Synthetic peptide
  REGION 1..5: note = XENP020485 vhCDR1
DAWMD

SEQ ID NO: 23254 - protein, 19 aa, synthetic construct
  REGION 1..19: note = Description of Artificial Sequence: Synthetic peptide
  REGION 1..19: note = XENP020485 vhCDR2
EIRSKANNHATYYAESVKG

SEQ ID NO: 23255 - protein, 10 aa, synthetic construct
  REGION 1..10: note = Description of Artificial Sequence: Synthetic peptide
  REGION 1..10: note = XENP020485 vhCDR3
LANWDWYFDV

SEQ ID NO: 23256 - protein, 218 aa, synthetic construct; identical to SEQ ID NO: 22266
  REGION 1..218: note = Description of Artificial Sequence: Synthetic polypeptide
  REGION 1..218: note = XENP020485 7G8_H0.37_L0_IgG1_PVA_/S267K Light Chain

SEQ ID NO: 23257 - protein, 111 aa, synthetic construct; identical to SEQ ID NO: 22267
  REGION 1..111: note = Description of Artificial Sequence: Synthetic polypeptide
  REGION 1..111: note = VL of XENP020485

SEQ ID NO: 23258 - protein, 15 aa, synthetic construct
  REGION 1..15: note = Description of Artificial Sequence: Synthetic peptide
  REGION 1..15: note = XENP020485 vlCDR1
KASQSVDYDGDSYMN

SEQ ID NO: 23259 - protein, 7 aa, synthetic construct
  REGION 1..7: note = Description of Artificial Sequence: Synthetic peptide
  REGION 1..7: note = XENP020485 vlCDR2
AASNLES

SEQ ID NO: 23260 - protein, 9 aa, synthetic construct
  REGION 1..9: note = Description of Artificial Sequence: Synthetic peptide
  REGION 1..9: note = XENP020485 vlCDR3
QQSNEDPFT

SEQ ID NO: 23261 - protein, 450 aa, synthetic construct
  REGION 1..450: note = Description of Artificial Sequence: Synthetic polypeptide
  REGION 1..450: note = XENP020486 7G8_H0.38_L0_IgG1_PVA_/S267K Heavy Chain
EVKLEESGGGLVQPGGSMKLSCAASGFTFSDAWMDWVRQSPEKGLEWVAEIRAKANNHATYYAESVKGRFTISRDDSKSSVYLQMNSLRAEDTGIYYCTRLANWDWYFDVWGAGTTVTVSSASTKGPSVFPLAPSSKSTSGGTAALGCLVKDYFPEPVTVSWNSGALTSGVHTFPAVLQSSGLYSLSSVVTVPSSSLGTQTYICNVNHKPSDTKVDKKVEPKSCDKTHTCPPCPAPPVAGPSVFLFPPKPKDTLMISRTPEVTCVVVDVKHEDPEVKFNWYVDGVEVHNAKTKPREEEYNSTYRVVSVLTVLHQDWLNGKEYKCKVSNKALPAPIEKTISKAKGQPREPQVYTLPPSREEMTKNQVSLTCDVSGFYPSDIAVEWESDGQPENNYKTTPPVLDSDGSFFLYSKLTVDKSRWEQGDVFSCSVMHEALHNHYTQKSLSLSPGK

SEQ ID NO: 23262 - protein, 121 aa, synthetic construct
  REGION 1..121: note = Description of Artificial Sequence: Synthetic polypeptide
  REGION 1..121: note = VH of XENP020486
EVKLEESGGGLVQPGGSMKLSCAASGFTFSDAWMDWVRQSPEKGLEWVAEIRAKANNHATYYAESVKGRFTISRDDSKSSVYLQMNSLRAEDTGIYYCTRLANWDWYFDVWGAGTTVTVSS

SEQ ID NO: 23263 - protein, 5 aa, synthetic construct
  REGION 1..5: note = Description of Artificial Sequence: Synthetic peptide
  REGION 1..5: note = XENP020486 vhCDR1
DAWMD

SEQ ID NO: 23264 - protein, 19 aa, synthetic construct
  REGION 1..19: note = Description of Artificial Sequence: Synthetic peptide
  REGION 1..19: note = XENP020486 vhCDR2
EIRAKANNHATYYAESVKG

SEQ ID NO: 23265 - protein, 10 aa, synthetic construct
  REGION 1..10: note = Description of Artificial Sequence: Synthetic peptide
  REGION 1..10: note = XENP020486 vhCDR3
LANWDWYFDV

SEQ ID NO: 23266 - protein, 218 aa, synthetic construct; identical to SEQ ID NO: 22266
  REGION 1..218: note = Description of Artificial Sequence: Synthetic polypeptide
  REGION 1..218: note = XENP020486 7G8_H0.38_L0_IgG1_PVA_/S267K Light Chain

SEQ ID NO: 23267 - protein, 111 aa, synthetic construct; identical to SEQ ID NO: 22267
  REGION 1..111: note = Description of Artificial Sequence: Synthetic polypeptide
  REGION 1..111: note = VL of XENP020486

SEQ ID NO: 23268 - protein, 15 aa, synthetic construct
  REGION 1..15: note = Description of Artificial Sequence: Synthetic peptide
  REGION 1..15: note = XENP020486 vlCDR1
KASQSVDYDGDSYMN

SEQ ID NO: 23269 - protein, 7 aa, synthetic construct
  REGION 1..7: note = Description of Artificial Sequence: Synthetic peptide
  REGION 1..7: note = XENP020486 vlCDR2
AASNLES

SEQ ID NO: 23270 - protein, 9 aa, synthetic construct
  REGION 1..9: note = Description of Artificial Sequence: Synthetic peptide
  REGION 1..9: note = XENP020486 vlCDR3
QQSNEDPFT

SEQ ID NO: 23271 - protein, 450 aa, synthetic construct
  REGION 1..450: note = Description of Artificial Sequence: Synthetic polypeptide
  REGION 1..450: note = XENP020487 7G8_H0.39_L0_IgG1_PVA_/S267K Heavy Chain
EVKLEESGGGLVQPGGSMKLSCAASGFTFSDAWMDWVRQSPEKGLEWVAEIRIKANNHATYYAESVKGRFTISRDDSKSSVYLQMNSLRAEDTGIYYCTRLANWDWYFDVWGAGTTVTVSSASTKGPSVFPLAPSSKSTSGGTAALGCLVKDYFPEPVTVSWNSGALTSGVHTFPAVLQSSGLYSLSSVVTVPSSSLGTQTYICNVNHKPSDTKVDKKVEPKSCDKTHTCPPCPAPPVAGPSVFLFPPKPKDTLMISRTPEVTCVVVDVKHEDPEVKFNWYVDGVEVHNAKTKPREEEYNSTYRVVSVLTVLHQDWLNGKEYKCKVSNKALPAPIEKTISKAKGQPREPQVYTLPPSREEMTKNQVSLTCDVSGFYPSDIAVEWESDGQPENNYKTTPPVLDSDGSFFLYSKLTVDKSRWEQGDVFSCSVMHEALHNHYTQKSLSLSPGK

SEQ ID NO: 23272 - protein, 121 aa, synthetic construct
  REGION 1..121: note = Description of Artificial Sequence: Synthetic polypeptide
  REGION 1..121: note = VH of XENP020487
EVKLEESGGGLVQPGGSMKLSCAASGFTFSDAWMDWVRQSPEKGLEWVAEIRIKANNHATYYAESVKGRFTISRDDSKSSVYLQMNSLRAEDTGIYYCTRLANWDWYFDVWGAGTTVTVSS

SEQ ID NO: 23273 - protein, 5 aa, synthetic construct
  REGION 1..5: note = Description of Artificial Sequence: Synthetic peptide
  REGION 1..5: note = XENP020487 vhCDR1
DAWMD

SEQ ID NO: 23274 - protein, 19 aa, synthetic construct
  REGION 1..19: note = Description of Artificial Sequence: Synthetic peptide
  REGION 1..19: note = XENP020487 vhCDR2
EIRIKANNHATYYAESVKG

SEQ ID NO: 23275 - protein, 10 aa, synthetic construct
  REGION 1..10: note = Description of Artificial Sequence: Synthetic peptide
  REGION 1..10: note = XENP020487 vhCDR3
LANWDWYFDV

SEQ ID NO: 23276 - protein, 218 aa, synthetic construct; identical to SEQ ID NO: 22266
  REGION 1..218: note = Description of Artificial Sequence: Synthetic polypeptide
  REGION 1..218: note = XENP020487 7G8_H0.39_L0_IgG1_PVA_/S267K Light Chain

SEQ ID NO: 23277 - protein, 111 aa, synthetic construct; identical to SEQ ID NO: 22267
  REGION 1..111: note = Description of Artificial Sequence: Synthetic polypeptide
  REGION 1..111: note = VL of XENP020487

SEQ ID NO: 23278 - protein, 15 aa, synthetic construct
  REGION 1..15: note = Description of Artificial Sequence: Synthetic peptide
  REGION 1..15: note = XENP020487 vlCDR1
KASQSVDYDGDSYMN

SEQ ID NO: 23279 - protein, 7 aa, synthetic construct
  REGION 1..7: note = Description of Artificial Sequence: Synthetic peptide
  REGION 1..7: note = XENP020487 vlCDR2
AASNLES

SEQ ID NO: 23280 - protein, 9 aa, synthetic construct
  REGION 1..9: note = Description of Artificial Sequence: Synthetic peptide
  REGION 1..9: note = XENP020487 vlCDR3
QQSNEDPFT

SEQ ID NO: 23281 - protein, 450 aa, synthetic construct
  REGION 1..450: note = Description of Artificial Sequence: Synthetic polypeptide
  REGION 1..450: note = XENP020488 7G8_H0.40_L0_IgG1_PVA_/S267K Heavy Chain
EVKLEESGGGLVQPGGSMKLSCAASGFTFSDAWMDWVRQSPEKGLEWVAEIRQKANNHATYYAESVKGRFTISRDDSKSSVYLQMNSLRAEDTGIYYCTRLANWDWYFDVWGAGTTVTVSSASTKGPSVFPLAPSSKSTSGGTAALGCLVKDYFPEPVTVSWNSGALTSGVHTFPAVLQSSGLYSLSSVVTVPSSSLGTQTYICNVNHKPSDTKVDKKVEPKSCDKTHTCPPCPAPPVAGPSVFLFPPKPKDTLMISRTPEVTCVVVDVKHEDPEVKFNWYVDGVEVHNAKTKPREEEYNSTYRVVSVLTVLHQDWLNGKEYKCKVSNKALPAPIEKTISKAKGQPREPQVYTLPPSREEMTKNQVSLTCDVSGFYPSDIAVEWESDGQPENNYKTTPPVLDSDGSFFLYSKLTVDKSRWEQGDVFSCSVMHEALHNHYTQKSLSLSPGK

SEQ ID NO: 23282 - protein, 121 aa, synthetic construct
  REGION 1..121: note = Description of Artificial Sequence: Synthetic polypeptide
  REGION 1..121: note = VH of XENP020488
EVKLEESGGGLVQPGGSMKLSCAASGFTFSDAWMDWVRQSPEKGLEWVAEIRQKANNHATYYAESVKGRFTISRDDSKSSVYLQMNSLRAEDTGIYYCTRLANWDWYFDVWGAGTTVTVSS

SEQ ID NO: 23283 - protein, 5 aa, synthetic construct
  REGION 1..5: note = Description of Artificial Sequence: Synthetic peptide
  REGION 1..5: note = XENP020488 vhCDR1
DAWMD

SEQ ID NO: 23284 - protein, 19 aa, synthetic construct
  REGION 1..19: note = Description of Artificial Sequence: Synthetic peptide
  REGION 1..19: note = XENP020488 vhCDR2
EIRQKANNHATYYAESVKG

SEQ ID NO: 23285 - protein, 10 aa, synthetic construct
  REGION 1..10: note = Description of Artificial Sequence: Synthetic peptide
  REGION 1..10: note = XENP020488 vhCDR3
LANWDWYFDV

SEQ ID NO: 23286 - protein, 218 aa, synthetic construct; identical to SEQ ID NO: 22266
  REGION 1..218: note = Description of Artificial Sequence: Synthetic polypeptide
  REGION 1..218: note = XENP020488 7G8_H0.40_L0_IgG1_PVA_/S267K Light Chain

SEQ ID NO: 23287 - protein, 111 aa, synthetic construct; identical to SEQ ID NO: 22267
  REGION 1..111: note = Description of Artificial Sequence: Synthetic polypeptide
  REGION 1..111: note = VL of XENP020488

SEQ ID NO: 23288 - protein, 15 aa, synthetic construct
  REGION 1..15: note = Description of Artificial Sequence: Synthetic peptide
  REGION 1..15: note = XENP020488 vlCDR1
KASQSVDYDGDSYMN

SEQ ID NO: 23289 - protein, 7 aa, synthetic construct
  REGION 1..7: note = Description of Artificial Sequence: Synthetic peptide
  REGION 1..7: note = XENP020488 vlCDR2
AASNLES

SEQ ID NO: 23290 - protein, 9 aa, synthetic construct
  REGION 1..9: note = Description of Artificial Sequence: Synthetic peptide
  REGION 1..9: note = XENP020488 vlCDR3
QQSNEDPFT

SEQ ID NO: 23291 - protein, 450 aa, synthetic construct
  REGION 1..450: note = Description of Artificial Sequence: Synthetic polypeptide
  REGION 1..450: note = XENP020489 7G8_H0.41_L0_IgG1_PVA_/S267K Heavy Chain
EVKLEESGGGLVQPGGSMKLSCAASGFTFSDAWMDWVRQSPEKGLEWVAEIRHKANNHATYYAESVKGRFTISRDDSKSSVYLQMNSLRAEDTGIYYCTRLANWDWYFDVWGAGTTVTVSSASTKGPSVFPLAPSSKSTSGGTAALGCLVKDYFPEPVTVSWNSGALTSGVHTFPAVLQSSGLYSLSSVVTVPSSSLGTQTYICNVNHKPSDTKVDKKVEPKSCDKTHTCPPCPAPPVAGPSVFLFPPKPKDTLMISRTPEVTCVVVDVKHEDPEVKFNWYVDGVEVHNAKTKPREEEYNSTYRVVSVLTVLHQDWLNGKEYKCKVSNKALPAPIEKTISKAKGQPREPQVYTLPPSREEMTKNQVSLTCDVSGFYPSDIAVEWESDGQPENNYKTTPPVLDSDGSFFLYSKLTVDKSRWEQGDVFSCSVMHEALHNHYTQKSLSLSPGK

SEQ ID NO: 23292 - protein, 121 aa, synthetic construct
  REGION 1..121: note = Description of Artificial Sequence: Synthetic polypeptide
  REGION 1..121: note = VH of XENP020489
EVKLEESGGGLVQPGGSMKLSCAASGFTFSDAWMDWVRQSPEKGLEWVAEIRHKANNHATYYAESVKGRFTISRDDSKSSVYLQMNSLRAEDTGIYYCTRLANWDWYFDVWGAGTTVTVSS

SEQ ID NO: 23293 - protein, 5 aa, synthetic construct
  REGION 1..5: note = Description of Artificial Sequence: Synthetic peptide
  REGION 1..5: note = XENP020489 vhCDR1
DAWMD

SEQ ID NO: 23294 - protein, 19 aa, synthetic construct
  REGION 1..19: note = Description of Artificial Sequence: Synthetic peptide
  REGION 1..19: note = XENP020489 vhCDR2
EIRHKANNHATYYAESVKG

SEQ ID NO: 23295 - protein, 10 aa, synthetic construct
  REGION 1..10: note = Description of Artificial Sequence: Synthetic peptide
  REGION 1..10: note = XENP020489 vhCDR3
LANWDWYFDV

SEQ ID NO: 23296 - protein, 218 aa, synthetic construct; identical to SEQ ID NO: 22266
  REGION 1..218: note = Description of Artificial Sequence: Synthetic polypeptide
  REGION 1..218: note = XENP020489 7G8_H0.41_L0_IgG1_PVA_/S267K Light Chain

SEQ ID NO: 23297 - protein, 111 aa, synthetic construct; identical to SEQ ID NO: 22267
  REGION 1..111: note = Description of Artificial Sequence: Synthetic polypeptide
  REGION 1..111: note = VL of XENP020489

SEQ ID NO: 23298 - protein, 15 aa, synthetic construct
  REGION 1..15: note = Description of Artificial Sequence: Synthetic peptide
  REGION 1..15: note = XENP020489 vlCDR1
KASQSVDYDGDSYMN

SEQ ID NO: 23299 - protein, 7 aa, synthetic construct
  REGION 1..7: note = Description of Artificial Sequence: Synthetic peptide
  REGION 1..7: note = XENP020489 vlCDR2
AASNLES

SEQ ID NO: 23300 - protein, 9 aa, synthetic construct
  REGION 1..9: note = Description of Artificial Sequence: Synthetic peptide
  REGION 1..9: note = XENP020489 vlCDR3
QQSNEDPFT

SEQ ID NO: 23301 - protein, 450 aa, synthetic construct
  REGION 1..450: note = Description of Artificial Sequence: Synthetic polypeptide
  REGION 1..450: note = XENP020490 7G8_H0.42_L0_IgG1_PVA_/S267K Heavy Chain
EVKLEESGGGLVQPGGSMKLSCAASGFTFSDAWMDWVRQSPEKGLEWVAEIRDKANNHATYYAESVKGRFTISRDDSKSSVYLQMNSLRAEDTGIYYCTRLANWDWYFDVWGAGTTVTVSSASTKGPSVFPLAPSSKSTSGGTAALGCLVKDYFPEPVTVSWNSGALTSGVHTFPAVLQSSGLYSLSSVVTVPSSSLGTQTYICNVNHKPSDTKVDKKVEPKSCDKTHTCPPCPAPPVAGPSVFLFPPKPKDTLMISRTPEVTCVVVDVKHEDPEVKFNWYVDGVEVHNAKTKPREEEYNSTYRVVSVLTVLHQDWLNGKEYKCKVSNKALPAPIEKTISKAKGQPREPQVYTLPPSREEMTKNQVSLTCDVSGFYPSDIAVEWESDGQPENNYKTTPPVLDSDGSFFLYSKLTVDKSRWEQGDVFSCSVMHEALHNHYTQKSLSLSPGK

SEQ ID NO: 23302 - protein, 121 aa, synthetic construct
  REGION 1..121: note = Description of Artificial Sequence: Synthetic polypeptide
  REGION 1..121: note = VH of XENP020490
EVKLEESGGGLVQPGGSMKLSCAASGFTFSDAWMDWVRQSPEKGLEWVAEIRDKANNHATYYAESVKGRFTISRDDSKSSVYLQMNSLRAEDTGIYYCTRLANWDWYFDVWGAGTTVTVSS

SEQ ID NO: 23303 - protein, 5 aa, synthetic construct
  REGION 1..5: note = Description of Artificial Sequence: Synthetic peptide
  REGION 1..5: note = XENP020490 vhCDR1
DAWMD

SEQ ID NO: 23304 - protein, 19 aa, synthetic construct
  REGION 1..19: note = Description of Artificial Sequence: Synthetic peptide
  REGION 1..19: note = XENP020490 vhCDR2
EIRDKANNHATYYAESVKG

SEQ ID NO: 23305 - protein, 10 aa, synthetic construct
  REGION 1..10: note = Description of Artificial Sequence: Synthetic peptide
  REGION 1..10: note = XENP020490 vhCDR3
LANWDWYFDV

SEQ ID NO: 23306 - protein, 218 aa, synthetic construct; identical to SEQ ID NO: 22266
  REGION 1..218: note = Description of Artificial Sequence: Synthetic polypeptide
  REGION 1..218: note = XENP020490 7G8_H0.42_L0_IgG1_PVA_/S267K Light Chain

SEQ ID NO: 23307 - protein, 111 aa, synthetic construct; identical to SEQ ID NO: 22267
  REGION 1..111: note = Description of Artificial Sequence: Synthetic polypeptide
  REGION 1..111: note = VL of XENP020490

SEQ ID NO: 23308 - protein, 15 aa, synthetic construct
  REGION 1..15: note = Description of Artificial Sequence: Synthetic peptide
  REGION 1..15: note = XENP020490 vlCDR1
KASQSVDYDGDSYMN

SEQ ID NO: 23309 - protein, 7 aa, synthetic construct
  REGION 1..7: note = Description of Artificial Sequence: Synthetic peptide
  REGION 1..7: note = XENP020490 vlCDR2
AASNLES

SEQ ID NO: 23310 - protein, 9 aa, synthetic construct
  REGION 1..9: note = Description of Artificial Sequence: Synthetic peptide
  REGION 1..9: note = XENP020490 vlCDR3
QQSNEDPFT

SEQ ID NO: 23311 - protein, 450 aa, synthetic construct
  REGION 1..450: note = Description of Artificial Sequence: Synthetic polypeptide
  REGION 1..450: note = XENP020491 7G8_H0.43_L0_IgG1_PVA_/S267K Heavy Chain
EVKLEESGGGLVQPGGSMKLSCAASGFTFSDAWMDWVRQSPEKGLEWVAEIRKKANNHATYYAESVKGRFTISRDDSKSSVYLQMNSLRAEDTGIYYCTRLANWDWYFDVWGAGTTVTVSSASTKGPSVFPLAPSSKSTSGGTAALGCLVKDYFPEPVTVSWNSGALTSGVHTFPAVLQSSGLYSLSSVVTVPSSSLGTQTYICNVNHKPSDTKVDKKVEPKSCDKTHTCPPCPAPPVAGPSVFLFPPKPKDTLMISRTPEVTCVVVDVKHEDPEVKFNWYVDGVEVHNAKTKPREEEYNSTYRVVSVLTVLHQDWLNGKEYKCKVSNKALPAPIEKTISKAKGQPREPQVYTLPPSREEMTKNQVSLTCDVSGFYPSDIAVEWESDGQPENNYKTTPPVLDSDGSFFLYSKLTVDKSRWEQGDVFSCSVMHEALHNHYTQKSLSLSPGK

SEQ ID NO: 23312 - protein, 121 aa, synthetic construct
  REGION 1..121: note = Description of Artificial Sequence: Synthetic polypeptide
  REGION 1..121: note = VH of XENP020491
EVKLEESGGGLVQPGGSMKLSCAASGFTFSDAWMDWVRQSPEKGLEWVAEIRKKANNHATYYAESVKGRFTISRDDSKSSVYLQMNSLRAEDTGIYYCTRLANWDWYFDVWGAGTTVTVSS

SEQ ID NO: 23313 - protein, 5 aa, synthetic construct
  REGION 1..5: note = Description of Artificial Sequence: Synthetic peptide
  REGION 1..5: note = XENP020491 vhCDR1
DAWMD

SEQ ID NO: 23314 - protein, 19 aa, synthetic construct
  REGION 1..19: note = Description of Artificial Sequence: Synthetic peptide
  REGION 1..19: note = XENP020491 vhCDR2
EIRKKANNHATYYAESVKG

SEQ ID NO: 23315 - protein, 10 aa, synthetic construct
  REGION 1..10: note = Description of Artificial Sequence: Synthetic peptide
  REGION 1..10: note = XENP020491 vhCDR3
LANWDWYFDV

SEQ ID NO: 23316 - protein, 218 aa, synthetic construct; identical to SEQ ID NO: 22266
  REGION 1..218: note = Description of Artificial Sequence: Synthetic polypeptide
  REGION 1..218: note = XENP020491 7G8_H0.43_L0_IgG1_PVA_/S267K Light Chain

SEQ ID NO: 23317 - protein, 111 aa, synthetic construct; identical to SEQ ID NO: 22267
  REGION 1..111: note = Description of Artificial Sequence: Synthetic polypeptide
  REGION 1..111: note = VL of XENP020491

SEQ ID NO: 23318 - protein, 15 aa, synthetic construct
  REGION 1..15: note = Description of Artificial Sequence: Synthetic peptide
  REGION 1..15: note = XENP020491 vlCDR1
KASQSVDYDGDSYMN

SEQ ID NO: 23319 - protein, 7 aa, synthetic construct
  REGION 1..7: note = Description of Artificial Sequence: Synthetic peptide
  REGION 1..7: note = XENP020491 vlCDR2
AASNLES

SEQ ID NO: 23320 - protein, 9 aa, synthetic construct
  REGION 1..9: note = Description of Artificial Sequence: Synthetic peptide
  REGION 1..9: note = XENP020491 vlCDR3
QQSNEDPFT

SEQ ID NO: 23321 - protein, 450 aa, synthetic construct
  REGION 1..450: note = Description of Artificial Sequence: Synthetic polypeptide
  REGION 1..450: note = XENP020492 7G8_H0.44_L0_IgG1_PVA_/S267K Heavy Chain
EVKLEESGGGLVQPGGSMKLSCAASGFTFSDAWMDWVRQSPEKGLEWVAEIRYKANNHATYYAESVKGRFTISRDDSKSSVYLQMNSLRAEDTGIYYCTRLANWDWYFDVWGAGTTVTVSSASTKGPSVFPLAPSSKSTSGGTAALGCLVKDYFPEPVTVSWNSGALTSGVHTFPAVLQSSGLYSLSSVVTVPSSSLGTQTYICNVNHKPSDTKVDKKVEPKSCDKTHTCPPCPAPPVAGPSVFLFPPKPKDTLMISRTPEVTCVVVDVKHEDPEVKFNWYVDGVEVHNAKTKPREEEYNSTYRVVSVLTVLHQDWLNGKEYKCKVSNKALPAPIEKTISKAKGQPREPQVYTLPPSREEMTKNQVSLTCDVSGFYPSDIAVEWESDGQPENNYKTTPPVLDSDGSFFLYSKLTVDKSRWEQGDVFSCSVMHEALHNHYTQKSLSLSPGK

SEQ ID NO: 23322 - protein, 121 aa, synthetic construct
  REGION 1..121: note = Description of Artificial Sequence: Synthetic polypeptide
  REGION 1..121: note = VH of XENP020492
EVKLEESGGGLVQPGGSMKLSCAASGFTFSDAWMDWVRQSPEKGLEWVAEIRYKANNHATYYAESVKGRFTISRDDSKSSVYLQMNSLRAEDTGIYYCTRLANWDWYFDVWGAGTTVTVSS

SEQ ID NO: 23323 - protein, 5 aa, synthetic construct
  REGION 1..5: note = Description of Artificial Sequence: Synthetic peptide
  REGION 1..5: note = XENP020492 vhCDR1
DAWMD

SEQ ID NO: 23324 - protein, 19 aa, synthetic construct
  REGION 1..19: note = Description of Artificial Sequence: Synthetic peptide
  REGION 1..19: note = XENP020492 vhCDR2
EIRYKANNHATYYAESVKG

SEQ ID NO: 23325 - protein, 10 aa, synthetic construct
  REGION 1..10: note = Description of Artificial Sequence: Synthetic peptide
  REGION 1..10: note = XENP020492 vhCDR3
LANWDWYFDV

SEQ ID NO: 23326 - protein, 218 aa, synthetic construct; identical to SEQ ID NO: 22266
  REGION 1..218: note = Description of Artificial Sequence: Synthetic polypeptide
  REGION 1..218: note = XENP020492 7G8_H0.44_L0_IgG1_PVA_/S267K Light Chain

SEQ ID NO: 23327 - protein, 111 aa, synthetic construct; identical to SEQ ID NO: 22267
  REGION 1..111: note = Description of Artificial Sequence: Synthetic polypeptide
  REGION 1..111: note = VL of XENP020492

SEQ ID NO: 23328 - protein, 15 aa, synthetic construct
  REGION 1..15: note = Description of Artificial Sequence: Synthetic peptide
  REGION 1..15: note = XENP020492 vlCDR1
KASQSVDYDGDSYMN

SEQ ID NO: 23329 - protein, 7 aa, synthetic construct
  REGION 1..7: note = Description of Artificial Sequence: Synthetic peptide
  REGION 1..7: note = XENP020492 vlCDR2
AASNLES

SEQ ID NO: 23330 - protein, 9 aa, synthetic construct
  REGION 1..9: note = Description of Artificial Sequence: Synthetic peptide
  REGION 1..9: note = XENP020492 vlCDR3
QQSNEDPFT

SEQ ID NO: 23331 - protein, 450 aa, synthetic construct
  REGION 1..450: note = Description of Artificial Sequence: Synthetic polypeptide
  REGION 1..450: note = XENP020493 7G8_H0.45_L0_IgG1_PVA_/S267K Heavy Chain
EVKLEESGGGLVQPGGSMKLSCAASGFTFSDAWMDWVRQSPEKGLEWVAEIRTRANNHATYYAESVKGRFTISRDDSKSSVYLQMNSLRAEDTGIYYCTRLANWDWYFDVWGAGTTVTVSSASTKGPSVFPLAPSSKSTSGGTAALGCLVKDYFPEPVTVSWNSGALTSGVHTFPAVLQSSGLYSLSSVVTVPSSSLGTQTYICNVNHKPSDTKVDKKVEPKSCDKTHTCPPCPAPPVAGPSVFLFPPKPKDTLMISRTPEVTCVVVDVKHEDPEVKFNWYVDGVEVHNAKTKPREEEYNSTYRVVSVLTVLHQDWLNGKEYKCKVSNKALPAPIEKTISKAKGQPREPQVYTLPPSREEMTKNQVSLTCDVSGFYPSDIAVEWESDGQPENNYKTTPPVLDSDGSFFLYSKLTVDKSRWEQGDVFSCSVMHEALHNHYTQKSLSLSPGK

SEQ ID NO: 23332 - protein, 121 aa, synthetic construct
  REGION 1..121: note = Description of Artificial Sequence: Synthetic polypeptide
  REGION 1..121: note = VH of XENP020493
EVKLEESGGGLVQPGGSMKLSCAASGFTFSDAWMDWVRQSPEKGLEWVAEIRTRANNHATYYAESVKGRFTISRDDSKSSVYLQMNSLRAEDTGIYYCTRLANWDWYFDVWGAGTTVTVSS

SEQ ID NO: 23333 - protein, 5 aa, synthetic construct
  REGION 1..5: note = Description of Artificial Sequence: Synthetic peptide
  REGION 1..5: note = XENP020493 vhCDR1
DAWMD

SEQ ID NO: 23334 - protein, 19 aa, synthetic construct
  REGION 1..19: note = Description of Artificial Sequence: Synthetic peptide
  REGION 1..19: note = XENP020493 vhCDR2
EIRTRANNHATYYAESVKG

SEQ ID NO: 23335 - protein, 10 aa, synthetic construct
  REGION 1..10: note = Description of Artificial Sequence: Synthetic peptide
  REGION 1..10: note = XENP020493 vhCDR3
LANWDWYFDV

SEQ ID NO: 23336 - protein, 218 aa, synthetic construct; identical to SEQ ID NO: 22266
  REGION 1..218: note = Description of Artificial Sequence: Synthetic polypeptide
  REGION 1..218: note = XENP020493 7G8_H0.45_L0_IgG1_PVA_/S267K Light Chain

SEQ ID NO: 23337 - protein, 111 aa, synthetic construct; identical to SEQ ID NO: 22267
  REGION 1..111: note = Description of Artificial Sequence: Synthetic polypeptide
  REGION 1..111: note = VL of XENP020493

SEQ ID NO: 23338 - protein, 15 aa, synthetic construct
  REGION 1..15: note = Description of Artificial Sequence: Synthetic peptide
  REGION 1..15: note = XENP020493 vlCDR1
KASQSVDYDGDSYMN

SEQ ID NO: 23339 - protein, 7 aa, synthetic construct
  REGION 1..7: note = Description of Artificial Sequence: Synthetic peptide
  REGION 1..7: note = XENP020493 vlCDR2
AASNLES

SEQ ID NO: 23340 - protein, 9 aa, synthetic construct
  REGION 1..9: note = Description of Artificial Sequence: Synthetic peptide
  REGION 1..9: note = XENP020493 vlCDR3
QQSNEDPFT

SEQ ID NO: 23341 - protein, 450 aa, synthetic construct
  REGION 1..450: note = Description of Artificial Sequence: Synthetic polypeptide
  REGION 1..450: note = XENP020494 7G8_H0.46_L0_IgG1_PVA_/S267K Heavy Chain
EVKLEESGGGLVQPGGSMKLSCAASGFTFSDAWMDWVRQSPEKGLEWVAEIRTEANNHATYYAESVKGRFTISRDDSKSSVYLQMNSLRAEDTGIYYCTRLANWDWYFDVWGAGTTVTVSSASTKGPSVFPLAPSSKSTSGGTAALGCLVKDYFPEPVTVSWNSGALTSGVHTFPAVLQSSGLYSLSSVVTVPSSSLGTQTYICNVNHKPSDTKVDKKVEPKSCDKTHTCPPCPAPPVAGPSVFLFPPKPKDTLMISRTPEVTCVVVDVKHEDPEVKFNWYVDGVEVHNAKTKPREEEYNSTYRVVSVLTVLHQDWLNGKEYKCKVSNKALPAPIEKTISKAKGQPREPQVYTLPPSREEMTKNQVSLTCDVSGFYPSDIAVEWESDGQPENNYKTTPPVLDSDGSFFLYSKLTVDKSRWEQGDVFSCSVMHEALHNHYTQKSLSLSPGK

SEQ ID NO: 23342 - protein, 121 aa, synthetic construct
  REGION 1..121: note = Description of Artificial Sequence: Synthetic polypeptide
  REGION 1..121: note = VH of XENP020494
EVKLEESGGGLVQPGGSMKLSCAASGFTFSDAWMDWVRQSPEKGLEWVAEIRTEANNHATYYAESVKGRFTISRDDSKSSVYLQMNSLRAEDTGIYYCTRLANWDWYFDVWGAGTTVTVSS

SEQ ID NO: 23343 - protein, 5 aa, synthetic construct
  REGION 1..5: note = Description of Artificial Sequence: Synthetic peptide
  REGION 1..5: note = XENP020494 vhCDR1
DAWMD

SEQ ID NO: 23344 - protein, 19 aa, synthetic construct
  REGION 1..19: note = Description of Artificial Sequence: Synthetic peptide
  REGION 1..19: note = XENP020494 vhCDR2
EIRTEANNHATYYAESVKG

SEQ ID NO: 23345 - protein, 10 aa, synthetic construct
  REGION 1..10: note = Description of Artificial Sequence: Synthetic peptide
  REGION 1..10: note = XENP020494 vhCDR3
LANWDWYFDV

SEQ ID NO: 23346 - protein, 218 aa, synthetic construct; identical to SEQ ID NO: 22266
  REGION 1..218: note = Description of Artificial Sequence: Synthetic polypeptide
  REGION 1..218: note = XENP020494 7G8_H0.46_L0_IgG1_PVA_/S267K Light Chain

SEQ ID NO: 23347 - protein, 111 aa, synthetic construct; identical to SEQ ID NO: 22267
  REGION 1..111: note = Description of Artificial Sequence: Synthetic polypeptide
  REGION 1..111: note = VL of XENP020494

SEQ ID NO: 23348 - protein, 15 aa, synthetic construct
  REGION 1..15: note = Description of Artificial Sequence: Synthetic peptide
  REGION 1..15: note = XENP020494 vlCDR1
KASQSVDYDGDSYMN

SEQ ID NO: 23349 - protein, 7 aa, synthetic construct
  REGION 1..7: note = Description of Artificial Sequence: Synthetic peptide
  REGION 1..7: note = XENP020494 vlCDR2
AASNLES

SEQ ID NO: 23350 - protein, 9 aa, synthetic construct
  REGION 1..9: note = Description of Artificial Sequence: Synthetic peptide
  REGION 1..9: note = XENP020494 vlCDR3
QQSNEDPFT

SEQ ID NO: 23351 - protein, 450 aa, synthetic construct
  REGION 1..450: note = Description of Artificial Sequence: Synthetic polypeptide
  REGION 1..450: note = XENP020495 7G8_H0.47_L0_IgG1_PVA_/S267K Heavy Chain
EVKLEESGGGLVQPGGSMKLSCAASGFTFSDAWMDWVRQSPEKGLEWVAEIRTHANNHATYYAESVKGRFTISRDDSKSSVYLQMNSLRAEDTGIYYCTRLANWDWYFDVWGAGTTVTVSSASTKGPSVFPLAPSSKSTSGGTAALGCLVKDYFPEPVTVSWNSGALTSGVHTFPAVLQSSGLYSLSSVVTVPSSSLGTQTYICNVNHKPSDTKVDKKVEPKSCDKTHTCPPCPAPPVAGPSVFLFPPKPKDTLMISRTPEVTCVVVDVKHEDPEVKFNWYVDGVEVHNAKTKPREEEYNSTYRVVSVLTVLHQDWLNGKEYKCKVSNKALPAPIEKTISKAKGQPREPQVYTLPPSREEMTKNQVSLTCDVSGFYPSDIAVEWESDGQPENNYKTTPPVLDSDGSFFLYSKLTVDKSRWEQGDVFSCSVMHEALHNHYTQKSLSLSPGK

SEQ ID NO: 23352 - protein, 121 aa, synthetic construct
  REGION 1..121: note = Description of Artificial Sequence: Synthetic polypeptide
  REGION 1..121: note = VH of XENP020495
EVKLEESGGGLVQPGGSMKLSCAASGFTFSDAWMDWVRQSPEKGLEWVAEIRTHANNHATYYAESVKGRFTISRDDSKSSVYLQMNSLRAEDTGIYYCTRLANWDWYFDVWGAGTTVTVSS

SEQ ID NO: 23353 - protein, 5 aa, synthetic construct
  REGION 1..5: note = Description of Artificial Sequence: Synthetic peptide
  REGION 1..5: note = XENP020495 vhCDR1
DAWMD

SEQ ID NO: 23354 - protein, 19 aa, synthetic construct
  REGION 1..19: note = Description of Artificial Sequence: Synthetic peptide
  REGION 1..19: note = XENP020495 vhCDR2
EIRTHANNHATYYAESVKG

SEQ ID NO: 23355 - protein, 10 aa, synthetic construct
  REGION 1..10: note = Description of Artificial Sequence: Synthetic peptide
  REGION 1..10: note = XENP020495 vhCDR3
LANWDWYFDV

SEQ ID NO: 23356 - protein, 218 aa, synthetic construct; identical to SEQ ID NO: 22266
  REGION 1..218: note = Description of Artificial Sequence: Synthetic polypeptide
  REGION 1..218: note = XENP020495 7G8_H0.47_L0_IgG1_PVA_/S267K Light Chain

SEQ ID NO: 23357 - protein, 111 aa, synthetic construct; identical to SEQ ID NO: 22267
  REGION 1..111: note = Description of Artificial Sequence: Synthetic polypeptide
  REGION 1..111: note = VL of XENP020495

SEQ ID NO: 23358 - protein, 15 aa, synthetic construct
  REGION 1..15: note = Description of Artificial Sequence: Synthetic peptide
  REGION 1..15: note = XENP020495 vlCDR1
KASQSVDYDGDSYMN

SEQ ID NO: 23359 - protein, 7 aa, synthetic construct
  REGION 1..7: note = Description of Artificial Sequence: Synthetic peptide
  REGION 1..7: note = XENP020495 vlCDR2
AASNLES

SEQ ID NO: 23360 - protein, 9 aa, synthetic construct
  REGION 1..9: note = Description of Artificial Sequence: Synthetic peptide
  REGION 1..9: note = XENP020495 vlCDR3
QQSNEDPFT

SEQ ID NO: 23361 - protein, 450 aa, synthetic construct
  REGION 1..450: note = Description of Artificial Sequence: Synthetic polypeptide
  REGION 1..450: note = XENP020496 7G8_H0.48_L0_IgG1_PVA_/S267K Heavy Chain
EVKLEESGGGLVQPGGSMKLSCAASGFTFSDAWMDWVRQSPEKGLEWVAEIRTSANNHATYYAESVKGRFTISRDDSKSSVYLQMNSLRAEDTGIYYCTRLANWDWYFDVWGAGTTVTVSSASTKGPSVFPLAPSSKSTSGGTAALGCLVKDYFPEPVTVSWNSGALTSGVHTFPAVLQSSGLYSLSSVVTVPSSSLGTQTYICNVNHKPSDTKVDKKVEPKSCDKTHTCPPCPAPPVAGPSVFLFPPKPKDTLMISRTPEVTCVVVDVKHEDPEVKFNWYVDGVEVHNAKTKPREEEYNSTYRVVSVLTVLHQDWLNGKEYKCKVSNKALPAPIEKTISKAKGQPREPQVYTLPPSREEMTKNQVSLTCDVSGFYPSDIAVEWESDGQPENNYKTTPPVLDSDGSFFLYSKLTVDKSRWEQGDVFSCSVMHEALHNHYTQKSLSLSPGK

SEQ ID NO: 23362 - protein, 121 aa, synthetic construct
  REGION 1..121: note = Description of Artificial Sequence: Synthetic polypeptide
  REGION 1..121: note = VH of XENP020496
EVKLEESGGGLVQPGGSMKLSCAASGFTFSDAWMDWVRQSPEKGLEWVAEIRTSANNHATYYAESVKGRFTISRDDSKSSVYLQMNSLRAEDTGIYYCTRLANWDWYFDVWGAGTTVTVSS

SEQ ID NO: 23363 - protein, 5 aa, synthetic construct
  REGION 1..5: note = Description of Artificial Sequence: Synthetic peptide
  REGION 1..5: note = XENP020496 vhCDR1
DAWMD

SEQ ID NO: 23364 - protein, 19 aa, synthetic construct
  REGION 1..19: note = Description of Artificial Sequence: Synthetic peptide
  REGION 1..19: note = XENP020496 vhCDR2
EIRTSANNHATYYAESVKG

SEQ ID NO: 23365 - protein, 10 aa, synthetic construct
  REGION 1..10: note = Description of Artificial Sequence: Synthetic peptide
  REGION 1..10: note = XENP020496 vhCDR3
LANWDWYFDV

SEQ ID NO: 23366 - protein, 218 aa, synthetic construct; identical to SEQ ID NO: 22266
  REGION 1..218: note = Description of Artificial Sequence: Synthetic polypeptide
  REGION 1..218: note = XENP020496 7G8_H0.48_L0_IgG1_PVA_/S267K Light Chain

SEQ ID NO: 23367 - protein, 111 aa, synthetic construct; identical to SEQ ID NO: 22267
  REGION 1..111: note = Description of Artificial Sequence: Synthetic polypeptide
  REGION 1..111: note = VL of XENP020496

SEQ ID NO: 23368 - protein, 15 aa, synthetic construct
  REGION 1..15: note = Description of Artificial Sequence: Synthetic peptide
  REGION 1..15: note = XENP020496 vlCDR1
KASQSVDYDGDSYMN

SEQ ID NO: 23369 - protein, 7 aa, synthetic construct
  REGION 1..7: note = Description of Artificial Sequence: Synthetic peptide
  REGION 1..7: note = XENP020496 vlCDR2
AASNLES

SEQ ID NO: 23370 - protein, 9 aa, synthetic construct
  REGION 1..9: note = Description of Artificial Sequence: Synthetic peptide
  REGION 1..9: note = XENP020496 vlCDR3
QQSNEDPFT

SEQ ID NO: 23371 - protein, 450 aa, synthetic construct
  REGION 1..450: note = Description of Artificial Sequence: Synthetic polypeptide
  REGION 1..450: note = XENP020501 7G8_H0.49_L0_IgG1_PVA_/S267K Heavy Chain
EVKLEESGGGLVQPGGSMKLSCAASGFTFSDAWMDWVRQSPEKGLEWVAEIRTDANNHATYYAESVKGRFTISRDDSKSSVYLQMNSLRAEDTGIYYCTRLANWDWYFDVWGAGTTVTVSSASTKGPSVFPLAPSSKSTSGGTAALGCLVKDYFPEPVTVSWNSGALTSGVHTFPAVLQSSGLYSLSSVVTVPSSSLGTQTYICNVNHKPSDTKVDKKVEPKSCDKTHTCPPCPAPPVAGPSVFLFPPKPKDTLMISRTPEVTCVVVDVKHEDPEVKFNWYVDGVEVHNAKTKPREEEYNSTYRVVSVLTVLHQDWLNGKEYKCKVSNKALPAPIEKTISKAKGQPREPQVYTLPPSREEMTKNQVSLTCDVSGFYPSDIAVEWESDGQPENNYKTTPPVLDSDGSFFLYSKLTVDKSRWEQGDVFSCSVMHEALHNHYTQKSLSLSPGK

SEQ ID NO: 23372 - protein, 121 aa, synthetic construct
  REGION 1..121: note = Description of Artificial Sequence: Synthetic polypeptide
  REGION 1..121: note = VH of XENP020501
EVKLEESGGGLVQPGGSMKLSCAASGFTFSDAWMDWVRQSPEKGLEWVAEIRTDANNHATYYAESVKGRFTISRDDSKSSVYLQMNSLRAEDTGIYYCTRLANWDWYFDVWGAGTTVTVSS

SEQ ID NO: 23373 - protein, 5 aa, synthetic construct
  REGION 1..5: note = Description of Artificial Sequence: Synthetic peptide
  REGION 1..5: note = XENP020501 vhCDR1
DAWMD

SEQ ID NO: 23374 - protein, 19 aa, synthetic construct
  REGION 1..19: note = Description of Artificial Sequence: Synthetic peptide
  REGION 1..19: note = XENP020501 vhCDR2
EIRTDANNHATYYAESVKG

SEQ ID NO: 23375 - protein, 10 aa, synthetic construct
  REGION 1..10: note = Description of Artificial Sequence: Synthetic peptide
  REGION 1..10: note = XENP020501 vhCDR3
LANWDWYFDV

SEQ ID NO: 23376 - protein, 218 aa, synthetic construct; identical to SEQ ID NO: 22266
  REGION 1..218: note = Description of Artificial Sequence: Synthetic polypeptide
  REGION 1..218: note = XENP020501 7G8_H0.49_L0_IgG1_PVA_/S267K Light Chain

SEQ ID NO: 23377 - protein, 111 aa, synthetic construct; identical to SEQ ID NO: 22267
  REGION 1..111: note = Description of Artificial Sequence: Synthetic polypeptide
  REGION 1..111: note = VL of XENP020501

SEQ ID NO: 23378 - protein, 15 aa, synthetic construct
  REGION 1..15: note = Description of Artificial Sequence: Synthetic peptide
  REGION 1..15: note = XENP020501 vlCDR1
KASQSVDYDGDSYMN

SEQ ID NO: 23379 - protein, 7 aa, synthetic construct
  REGION 1..7: note = Description of Artificial Sequence: Synthetic peptide
  REGION 1..7: note = XENP020501 vlCDR2
AASNLES

SEQ ID NO: 23380 - protein, 9 aa, synthetic construct
  REGION 1..9: note = Description of Artificial Sequence: Synthetic peptide
  REGION 1..9: note = XENP020501 vlCDR3
QQSNEDPFT

SEQ ID NO: 23381 - protein, 450 aa, synthetic construct
  REGION 1..450: note = Description of Artificial Sequence: Synthetic polypeptide
  REGION 1..450: note = XENP020502 7G8_H0.50_L0_IgG1_PVA_/S267K Heavy Chain
EVKLEESGGGLVQPGGSMKLSCAASGFTFSDAWMDWVRQSPEKGLEWVAEIRTAANNHATYYAESVKGRFTISRDDSKSSVYLQMNSLRAEDTGIYYCTRLANWDWYFDVWGAGTTVTVSSASTKGPSVFPLAPSSKSTSGGTAALGCLVKDYFPEPVTVSWNSGALTSGVHTFPAVLQSSGLYSLSSVVTVPSSSLGTQTYICNVNHKPSDTKVDKKVEPKSCDKTHTCPPCPAPPVAGPSVFLFPPKPKDTLMISRTPEVTCVVVDVKHEDPEVKFNWYVDGVEVHNAKTKPREEEYNSTYRVVSVLTVLHQDWLNGKEYKCKVSNKALPAPIEKTISKAKGQPREPQVYTLPPSREEMTKNQVSLTCDVSGFYPSDIAVEWESDGQPENNYKTTPPVLDSDGSFFLYSKLTVDKSRWEQGDVFSCSVMHEALHNHYTQKSLSLSPGK

SEQ ID NO: 23382 - protein, 121 aa, synthetic construct
  REGION 1..121: note = Description of Artificial Sequence: Synthetic polypeptide
  REGION 1..121: note = VH of XENP020502
EVKLEESGGGLVQPGGSMKLSCAASGFTFSDAWMDWVRQSPEKGLEWVAEIRTAANNHATYYAESVKGRFTISRDDSKSSVYLQMNSLRAEDTGIYYCTRLANWDWYFDVWGAGTTVTVSS

SEQ ID NO: 23383 - protein, 5 aa, synthetic construct
  REGION 1..5: note = Description of Artificial Sequence: Synthetic peptide
  REGION 1..5: note = XENP020502 vhCDR1
DAWMD

SEQ ID NO: 23384 - protein, 19 aa, synthetic construct
  REGION 1..19: note = Description of Artificial Sequence: Synthetic peptide
  REGION 1..19: note = XENP020502 vhCDR2
EIRTAANNHATYYAESVKG

SEQ ID NO: 23385 - protein, 10 aa, synthetic construct
  REGION 1..10: note = Description of Artificial Sequence: Synthetic peptide
  REGION 1..10: note = XENP020502 vhCDR3
LANWDWYFDV

SEQ ID NO: 23386 - protein, 218 aa, synthetic construct; identical to SEQ ID NO: 22266
  REGION 1..218: note = Description of Artificial Sequence: Synthetic polypeptide
  REGION 1..218: note = XENP020502 7G8_H0.50_L0_IgG1_PVA_/S267K Light Chain

SEQ ID NO: 23387 - protein, 111 aa, synthetic construct; identical to SEQ ID NO: 22267
  REGION 1..111: note = Description of Artificial Sequence: Synthetic polypeptide
  REGION 1..111: note = VL of XENP020502

SEQ ID NO: 23388 - protein, 15 aa, synthetic construct
  REGION 1..15: note = Description of Artificial Sequence: Synthetic peptide
  REGION 1..15: note = XENP020502 vlCDR1
KASQSVDYDGDSYMN

SEQ ID NO: 23389 - protein, 7 aa, synthetic construct
  REGION 1..7: note = Description of Artificial Sequence: Synthetic peptide
  REGION 1..7: note = XENP020502 vlCDR2
AASNLES

SEQ ID NO: 23390 - protein, 9 aa, synthetic construct
  REGION 1..9: note = Description of Artificial Sequence: Synthetic peptide
  REGION 1..9: note = XENP020502 vlCDR3
QQSNEDPFT

SEQ ID NO: 23391 - protein, 450 aa, synthetic construct
  REGION 1..450: note = Description of Artificial Sequence: Synthetic polypeptide
  REGION 1..450: note = XENP020503 7G8_H0.51_L0_IgG1_PVA_/S267K Heavy Chain
EVKLEESGGGLVQPGGSMKLSCAASGFTFSDAWMDWVRQSPEKGLEWVAEIRTGANNHATYYAESVKGRFTISRDDSKSSVYLQMNSLRAEDTGIYYCTRLANWDWYFDVWGAGTTVTVSSASTKGPSVFPLAPSSKSTSGGTAALGCLVKDYFPEPVTVSWNSGALTSGVHTFPAVLQSSGLYSLSSVVTVPSSSLGTQTYICNVNHKPSDTKVDKKVEPKSCDKTHTCPPCPAPPVAGPSVFLFPPKPKDTLMISRTPEVTCVVVDVKHEDPEVKFNWYVDGVEVHNAKTKPREEEYNSTYRVVSVLTVLHQDWLNGKEYKCKVSNKALPAPIEKTISKAKGQPREPQVYTLPPSREEMTKNQVSLTCDVSGFYPSDIAVEWESDGQPENNYKTTPPVLDSDGSFFLYSKLTVDKSRWEQGDVFSCSVMHEALHNHYTQKSLSLSPGK

SEQ ID NO: 23392 - protein, 121 aa, synthetic construct
  REGION 1..121: note = Description of Artificial Sequence: Synthetic polypeptide
  REGION 1..121: note = VH of XENP020503
EVKLEESGGGLVQPGGSMKLSCAASGFTFSDAWMDWVRQSPEKGLEWVAEIRTGANNHATYYAESVKGRFTISRDDSKSSVYLQMNSLRAEDTGIYYCTRLANWDWYFDVWGAGTTVTVSS

SEQ ID NO: 23393 - protein, 5 aa, synthetic construct
  REGION 1..5: note = Description of Artificial Sequence: Synthetic peptide
  REGION 1..5: note = XENP020503 vhCDR1
DAWMD

SEQ ID NO: 23394 - protein, 19 aa, synthetic construct
  REGION 1..19: note = Description of Artificial Sequence: Synthetic peptide
  REGION 1..19: note = XENP020503 vhCDR2
EIRTGANNHATYYAESVKG

SEQ ID NO: 23395 - protein, 10 aa, synthetic construct
  REGION 1..10: note = Description of Artificial Sequence: Synthetic peptide
  REGION 1..10: note = XENP020503 vhCDR3
LANWDWYFDV

SEQ ID NO: 23396 - protein, 218 aa, synthetic construct; identical to SEQ ID NO: 22266
  REGION 1..218: note = Description of Artificial Sequence: Synthetic polypeptide
  REGION 1..218: note = XENP020503 7G8_H0.51_L0_IgG1_PVA_/S267K Light Chain

SEQ ID NO: 23397 - protein, 111 aa, synthetic construct; identical to SEQ ID NO: 22267
  REGION 1..111: note = Description of Artificial Sequence: Synthetic polypeptide
  REGION 1..111: note = VL of XENP020503

SEQ ID NO: 23398 - protein, 15 aa, synthetic construct
  REGION 1..15: note = Description of Artificial Sequence: Synthetic peptide
  REGION 1..15: note = XENP020503 vlCDR1
KASQSVDYDGDSYMN

SEQ ID NO: 23399 - protein, 7 aa, synthetic construct
  REGION 1..7: note = Description of Artificial Sequence: Synthetic peptide
  REGION 1..7: note = XENP020503 vlCDR2
AASNLES

SEQ ID NO: 23400 - protein, 9 aa, synthetic construct
  REGION 1..9: note = Description of Artificial Sequence: Synthetic peptide
  REGION 1..9: note = XENP020503 vlCDR3
QQSNEDPFT

SEQ ID NO: 23401 - protein, 450 aa, synthetic construct
  REGION 1..450: note = Description of Artificial Sequence: Synthetic polypeptide
  REGION 1..450: note = XENP020504 7G8_H0.52_L0_IgG1_PVA_/S267K Heavy Chain
EVKLEESGGGLVQPGGSMKLSCAASGFTFSDAWMDWVRQSPEKGLEWVAEIRTYANNHATYYAESVKGRFTISRDDSKSSVYLQMNSLRAEDTGIYYCTRLANWDWYFDVWGAGTTVTVSSASTKGPSVFPLAPSSKSTSGGTAALGCLVKDYFPEPVTVSWNSGALTSGVHTFPAVLQSSGLYSLSSVVTVPSSSLGTQTYICNVNHKPSDTKVDKKVEPKSCDKTHTCPPCPAPPVAGPSVFLFPPKPKDTLMISRTPEVTCVVVDVKHEDPEVKFNWYVDGVEVHNAKTKPREEEYNSTYRVVSVLTVLHQDWLNGKEYKCKVSNKALPAPIEKTISKAKGQPREPQVYTLPPSREEMTKNQVSLTCDVSGFYPSDIAVEWESDGQPENNYKTTPPVLDSDGSFFLYSKLTVDKSRWEQGDVFSCSVMHEALHNHYTQKSLSLSPGK

SEQ ID NO: 23402 - protein, 121 aa, synthetic construct
  REGION 1..121: note = Description of Artificial Sequence: Synthetic polypeptide
  REGION 1..121: note = VH of XENP020504
EVKLEESGGGLVQPGGSMKLSCAASGFTFSDAWMDWVRQSPEKGLEWVAEIRTYANNHATYYAESVKGRFTISRDDSKSSVYLQMNSLRAEDTGIYYCTRLANWDWYFDVWGAGTTVTVSS

SEQ ID NO: 23403 - protein, 5 aa, synthetic construct
  REGION 1..5: note = Description of Artificial Sequence: Synthetic peptide
  REGION 1..5: note = XENP020504 vhCDR1
DAWMD

SEQ ID NO: 23404 - protein, 19 aa, synthetic construct
  REGION 1..19: note = Description of Artificial Sequence: Synthetic peptide
  REGION 1..19: note = XENP020504 vhCDR2
EIRTYANNHATYYAESVKG

SEQ ID NO: 23405 - protein, 10 aa, synthetic construct
  REGION 1..10: note = Description of Artificial Sequence: Synthetic peptide
  REGION 1..10: note = XENP020504 vhCDR3
LANWDWYFDV

SEQ ID NO: 23406 - protein, 218 aa, synthetic construct; identical to SEQ ID NO: 22266
  REGION 1..218: note = Description of Artificial Sequence: Synthetic polypeptide
  REGION 1..218: note = XENP020504 7G8_H0.52_L0_IgG1_PVA_/S267K Light Chain

SEQ ID NO: 23407 - protein, 111 aa, synthetic construct; identical to SEQ ID NO: 22267
  REGION 1..111: note = Description of Artificial Sequence: Synthetic polypeptide
  REGION 1..111: note = VL of XENP020504

SEQ ID NO: 23408 - protein, 15 aa, synthetic construct
  REGION 1..15: note = Description of Artificial Sequence: Synthetic peptide
  REGION 1..15: note = XENP020504 vlCDR1
KASQSVDYDGDSYMN

SEQ ID NO: 23409 - protein, 7 aa, synthetic construct
  REGION 1..7: note = Description of Artificial Sequence: Synthetic peptide
  REGION 1..7: note = XENP020504 vlCDR2
AASNLES

SEQ ID NO: 23410 - protein, 9 aa, synthetic construct
  REGION 1..9: note = Description of Artificial Sequence: Synthetic peptide
  REGION 1..9: note = XENP020504 vlCDR3
QQSNEDPFT

SEQ ID NO: 23411 - protein, 450 aa, synthetic construct
  REGION 1..450: note = Description of Artificial Sequence: Synthetic polypeptide
  REGION 1..450: note = XENP020505 7G8_H0.53_L0_IgG1_PVA_/S267K Heavy Chain
EVKLEESGGGLVQPGGSMKLSCAASGFTFSDAWMDWVRQSPEKGLEWVAEIRTIANNHATYYAESVKGRFTISRDDSKSSVYLQMNSLRAEDTGIYYCTRLANWDWYFDVWGAGTTVTVSSASTKGPSVFPLAPSSKSTSGGTAALGCLVKDYFPEPVTVSWNSGALTSGVHTFPAVLQSSGLYSLSSVVTVPSSSLGTQTYICNVNHKPSDTKVDKKVEPKSCDKTHTCPPCPAPPVAGPSVFLFPPKPKDTLMISRTPEVTCVVVDVKHEDPEVKFNWYVDGVEVHNAKTKPREEEYNSTYRVVSVLTVLHQDWLNGKEYKCKVSNKALPAPIEKTISKAKGQPREPQVYTLPPSREEMTKNQVSLTCDVSGFYPSDIAVEWESDGQPENNYKTTPPVLDSDGSFFLYSKLTVDKSRWEQGDVFSCSVMHEALHNHYTQKSLSLSPGK

SEQ ID NO: 23412 - protein, 121 aa, synthetic construct
  REGION 1..121: note = Description of Artificial Sequence: Synthetic polypeptide
  REGION 1..121: note = VH of XENP020505
EVKLEESGGGLVQPGGSMKLSCAASGFTFSDAWMDWVRQSPEKGLEWVAEIRTIANNHATYYAESVKGRFTISRDDSKSSVYLQMNSLRAEDTGIYYCTRLANWDWYFDVWGAGTTVTVSS

SEQ ID NO: 23413 - protein, 5 aa, synthetic construct
  REGION 1..5: note = Description of Artificial Sequence: Synthetic peptide
  REGION 1..5: note = XENP020505 vhCDR1
DAWMD

SEQ ID NO: 23414 - protein, 19 aa, synthetic construct
  REGION 1..19: note = Description of Artificial Sequence: Synthetic peptide
  REGION 1..19: note = XENP020505 vhCDR2
EIRTIANNHATYYAESVKG

SEQ ID NO: 23415 - protein, 10 aa, synthetic construct
  REGION 1..10: note = Description of Artificial Sequence: Synthetic peptide
  REGION 1..10: note = XENP020505 vhCDR3
LANWDWYFDV

SEQ ID NO: 23416 - protein, 218 aa, synthetic construct; identical to SEQ ID NO: 22266
  REGION 1..218: note = Description of Artificial Sequence: Synthetic polypeptide
  REGION 1..218: note = XENP020505 7G8_H0.53_L0_IgG1_PVA_/S267K Light Chain

SEQ ID NO: 23417 - protein, 111 aa, synthetic construct; identical to SEQ ID NO: 22267
  REGION 1..111: note = Description of Artificial Sequence: Synthetic polypeptide
  REGION 1..111: note = VL of XENP020505

SEQ ID NO: 23418 - protein, 15 aa, synthetic construct
  REGION 1..15: note = Description of Artificial Sequence: Synthetic peptide
  REGION 1..15: note = XENP020505 vlCDR1
KASQSVDYDGDSYMN

SEQ ID NO: 23419 - protein, 7 aa, synthetic construct
  REGION 1..7: note = Description of Artificial Sequence: Synthetic peptide
  REGION 1..7: note = XENP020505 vlCDR2
AASNLES

SEQ ID NO: 23420 - protein, 9 aa, synthetic construct
  REGION 1..9: note = Description of Artificial Sequence: Synthetic peptide
  REGION 1..9: note = XENP020505 vlCDR3
QQSNEDPFT

SEQ ID NO: 23421 - protein, 450 aa, synthetic construct
  REGION 1..450: note = Description of Artificial Sequence: Synthetic polypeptide
  REGION 1..450: note = XENP020506 7G8_H0.54_L0_IgG1_PVA_/S267K Heavy Chain
EVKLEESGGGLVQPGGSMKLSCAASGFTFSDAWMDWVRQSPEKGLEWVAEIRTKSNNHATYYAESVKGRFTISRDDSKSSVYLQMNSLRAEDTGIYYCTRLANWDWYFDVWGAGTTVTVSSASTKGPSVFPLAPSSKSTSGGTAALGCLVKDYFPEPVTVSWNSGALTSGVHTFPAVLQSSGLYSLSSVVTVPSSSLGTQTYICNVNHKPSDTKVDKKVEPKSCDKTHTCPPCPAPPVAGPSVFLFPPKPKDTLMISRTPEVTCVVVDVKHEDPEVKFNWYVDGVEVHNAKTKPREEEYNSTYRVVSVLTVLHQDWLNGKEYKCKVSNKALPAPIEKTISKAKGQPREPQVYTLPPSREEMTKNQVSLTCDVSGFYPSDIAVEWESDGQPENNYKTTPPVLDSDGSFFLYSKLTVDKSRWEQGDVFSCSVMHEALHNHYTQKSLSLSPGK

SEQ ID NO: 23422 - protein, 121 aa, synthetic construct
  REGION 1..121: note = Description of Artificial Sequence: Synthetic polypeptide
  REGION 1..121: note = VH of XENP020506
EVKLEESGGGLVQPGGSMKLSCAASGFTFSDAWMDWVRQSPEKGLEWVAEIRTKSNNHATYYAESVKGRFTISRDDSKSSVYLQMNSLRAEDTGIYYCTRLANWDWYFDVWGAGTTVTVSS

SEQ ID NO: 23423 - protein, 5 aa, synthetic construct
  REGION 1..5: note = Description of Artificial Sequence: Synthetic peptide
  REGION 1..5: note = XENP020506 vhCDR1
DAWMD

SEQ ID NO: 23424 - protein, 19 aa, synthetic construct
  REGION 1..19: note = Description of Artificial Sequence: Synthetic peptide
  REGION 1..19: note = XENP020506 vhCDR2
EIRTKSNNHATYYAESVKG

SEQ ID NO: 23425 - protein, 10 aa, synthetic construct
  REGION 1..10: note = Description of Artificial Sequence: Synthetic peptide
  REGION 1..10: note = XENP020506 vhCDR3
LANWDWYFDV

SEQ ID NO: 23426 - protein, 218 aa, synthetic construct; identical to SEQ ID NO: 22266
  REGION 1..218: note = Description of Artificial Sequence: Synthetic polypeptide
  REGION 1..218: note = XENP020506 7G8_H0.54_L0_IgG1_PVA_/S267K Light Chain

SEQ ID NO: 23427 - protein, 111 aa, synthetic construct; identical to SEQ ID NO: 22267
  REGION 1..111: note = Description of Artificial Sequence: Synthetic polypeptide
  REGION 1..111: note = VL of XENP020506

SEQ ID NO: 23428 - protein, 15 aa, synthetic construct
  REGION 1..15: note = Description of Artificial Sequence: Synthetic peptide
  REGION 1..15: note = XENP020506 vlCDR1
KASQSVDYDGDSYMN

SEQ ID NO: 23429 - protein, 7 aa, synthetic construct
  REGION 1..7: note = Description of Artificial Sequence: Synthetic peptide
  REGION 1..7: note = XENP020506 vlCDR2
AASNLES

SEQ ID NO: 23430 - protein, 9 aa, synthetic construct
  REGION 1..9: note = Description of Artificial Sequence: Synthetic peptide
  REGION 1..9: note = XENP020506 vlCDR3
QQSNEDPFT

SEQ ID NO: 23431 - protein, 450 aa, synthetic construct
  REGION 1..450: note = Description of Artificial Sequence: Synthetic polypeptide
  REGION 1..450: note = XENP020507 7G8_H0.55_L0_IgG1_PVA_/S267K Heavy Chain
EVKLEESGGGLVQPGGSMKLSCAASGFTFSDAWMDWVRQSPEKGLEWVAEIRTKTNNHATYYAESVKGRFTISRDDSKSSVYLQMNSLRAEDTGIYYCTRLANWDWYFDVWGAGTTVTVSSASTKGPSVFPLAPSSKSTSGGTAALGCLVKDYFPEPVTVSWNSGALTSGVHTFPAVLQSSGLYSLSSVVTVPSSSLGTQTYICNVNHKPSDTKVDKKVEPKSCDKTHTCPPCPAPPVAGPSVFLFPPKPKDTLMISRTPEVTCVVVDVKHEDPEVKFNWYVDGVEVHNAKTKPREEEYNSTYRVVSVLTVLHQDWLNGKEYKCKVSNKALPAPIEKTISKAKGQPREPQVYTLPPSREEMTKNQVSLTCDVSGFYPSDIAVEWESDGQPENNYKTTPPVLDSDGSFFLYSKLTVDKSRWEQGDVFSCSVMHEALHNHYTQKSLSLSPGK

SEQ ID NO: 23432 - protein, 121 aa, synthetic construct
  REGION 1..121: note = Description of Artificial Sequence: Synthetic polypeptide
  REGION 1..121: note = VH of XENP020507
EVKLEESGGGLVQPGGSMKLSCAASGFTFSDAWMDWVRQSPEKGLEWVAEIRTKTNNHATYYAESVKGRFTISRDDSKSSVYLQMNSLRAEDTGIYYCTRLANWDWYFDVWGAGTTVTVSS

SEQ ID NO: 23433 - protein, 5 aa, synthetic construct
  REGION 1..5: note = Description of Artificial Sequence: Synthetic peptide
  REGION 1..5: note = XENP020507 vhCDR1
DAWMD

SEQ ID NO: 23434 - protein, 19 aa, synthetic construct
  REGION 1..19: note = Description of Artificial Sequence: Synthetic peptide
  REGION 1..19: note = XENP020507 vhCDR2
EIRTKTNNHATYYAESVKG

SEQ ID NO: 23435 - protein, 10 aa, synthetic construct
  REGION 1..10: note = Description of Artificial Sequence: Synthetic peptide
  REGION 1..10: note = XENP020507 vhCDR3
LANWDWYFDV

SEQ ID NO: 23436 - protein, 218 aa, synthetic construct; identical to SEQ ID NO: 22266
  REGION 1..218: note = Description of Artificial Sequence: Synthetic polypeptide
  REGION 1..218: note = XENP020507 7G8_H0.55_L0_IgG1_PVA_/S267K Light Chain

SEQ ID NO: 23437 - protein, 111 aa, synthetic construct; identical to SEQ ID NO: 22267
  REGION 1..111: note = Description of Artificial Sequence: Synthetic polypeptide
  REGION 1..111: note = VL of XENP020507

SEQ ID NO: 23438 - protein, 15 aa, synthetic construct
  REGION 1..15: note = Description of Artificial Sequence: Synthetic peptide
  REGION 1..15: note = XENP020507 vlCDR1
KASQSVDYDGDSYMN

SEQ ID NO: 23439 - protein, 7 aa, synthetic construct
  REGION 1..7: note = Description of Artificial Sequence: Synthetic peptide
  REGION 1..7: note = XENP020507 vlCDR2
AASNLES

SEQ ID NO: 23440 - protein, 9 aa, synthetic construct
  REGION 1..9: note = Description of Artificial Sequence: Synthetic peptide
  REGION 1..9: note = XENP020507 vlCDR3
QQSNEDPFT

SEQ ID NO: 23441 - protein, 450 aa, synthetic construct
  REGION 1..450: note = Description of Artificial Sequence: Synthetic polypeptide
  REGION 1..450: note = XENP020508 7G8_H0.56_L0_IgG1_PVA_/S267K Heavy Chain
EVKLEESGGGLVQPGGSMKLSCAASGFTFSDAWMDWVRQSPEKGLEWVAEIRTKGNNHATYYAESVKGRFTISRDDSKSSVYLQMNSLRAEDTGIYYCTRLANWDWYFDVWGAGTTVTVSSASTKGPSVFPLAPSSKSTSGGTAALGCLVKDYFPEPVTVSWNSGALTSGVHTFPAVLQSSGLYSLSSVVTVPSSSLGTQTYICNVNHKPSDTKVDKKVEPKSCDKTHTCPPCPAPPVAGPSVFLFPPKPKDTLMISRTPEVTCVVVDVKHEDPEVKFNWYVDGVEVHNAKTKPREEEYNSTYRVVSVLTVLHQDWLNGKEYKCKVSNKALPAPIEKTISKAKGQPREPQVYTLPPSREEMTKNQVSLTCDVSGFYPSDIAVEWESDGQPENNYKTTPPVLDSDGSFFLYSKLTVDKSRWEQGDVFSCSVMHEALHNHYTQKSLSLSPGK

SEQ ID NO: 23442 - protein, 121 aa, synthetic construct
  REGION 1..121: note = Description of Artificial Sequence: Synthetic polypeptide
  REGION 1..121: note = VH of XENP020508
EVKLEESGGGLVQPGGSMKLSCAASGFTFSDAWMDWVRQSPEKGLEWVAEIRTKGNNHATYYAESVKGRFTISRDDSKSSVYLQMNSLRAEDTGIYYCTRLANWDWYFDVWGAGTTVTVSS

SEQ ID NO: 23443 - protein, 5 aa, synthetic construct
  REGION 1..5: note = Description of Artificial Sequence: Synthetic peptide
  REGION 1..5: note = XENP020508 vhCDR1
DAWMD

SEQ ID NO: 23444 - protein, 19 aa, synthetic construct
  REGION 1..19: note = Description of Artificial Sequence: Synthetic peptide
  REGION 1..19: note = XENP020508 vhCDR2
EIRTKGNNHATYYAESVKG

SEQ ID NO: 23445 - protein, 10 aa, synthetic construct
  REGION 1..10: note = Description of Artificial Sequence: Synthetic peptide
  REGION 1..10: note = XENP020508 vhCDR3
LANWDWYFDV

SEQ ID NO: 23446 - protein, 218 aa, synthetic construct; identical to SEQ ID NO: 22266
  REGION 1..218: note = Description of Artificial Sequence: Synthetic polypeptide
  REGION 1..218: note = XENP020508 7G8_H0.56_L0_IgG1_PVA_/S267K Light Chain

SEQ ID NO: 23447 - protein, 111 aa, synthetic construct; identical to SEQ ID NO: 22267
  REGION 1..111: note = Description of Artificial Sequence: Synthetic polypeptide
  REGION 1..111: note = VL of XENP020508

SEQ ID NO: 23448 - protein, 15 aa, synthetic construct
  REGION 1..15: note = Description of Artificial Sequence: Synthetic peptide
  REGION 1..15: note = XENP020508 vlCDR1
KASQSVDYDGDSYMN

SEQ ID NO: 23449 - protein, 7 aa, synthetic construct
  REGION 1..7: note = Description of Artificial Sequence: Synthetic peptide
  REGION 1..7: note = XENP020508 vlCDR2
AASNLES

SEQ ID NO: 23450 - protein, 9 aa, synthetic construct
  REGION 1..9: note = Description of Artificial Sequence: Synthetic peptide
  REGION 1..9: note = XENP020508 vlCDR3
QQSNEDPFT

SEQ ID NO: 23451 - protein, 450 aa, synthetic construct
  REGION 1..450: note = Description of Artificial Sequence: Synthetic polypeptide
  REGION 1..450: note = XENP020509 7G8_H0.57_L0_IgG1_PVA_/S267K Heavy Chain
EVKLEESGGGLVQPGGSMKLSCAASGFTFSDAWMDWVRQSPEKGLEWVAEIRTKHNNHATYYAESVKGRFTISRDDSKSSVYLQMNSLRAEDTGIYYCTRLANWDWYFDVWGAGTTVTVSSASTKGPSVFPLAPSSKSTSGGTAALGCLVKDYFPEPVTVSWNSGALTSGVHTFPAVLQSSGLYSLSSVVTVPSSSLGTQTYICNVNHKPSDTKVDKKVEPKSCDKTHTCPPCPAPPVAGPSVFLFPPKPKDTLMISRTPEVTCVVVDVKHEDPEVKFNWYVDGVEVHNAKTKPREEEYNSTYRVVSVLTVLHQDWLNGKEYKCKVSNKALPAPIEKTISKAKGQPREPQVYTLPPSREEMTKNQVSLTCDVSGFYPSDIAVEWESDGQPENNYKTTPPVLDSDGSFFLYSKLTVDKSRWEQGDVFSCSVMHEALHNHYTQKSLSLSPGK

SEQ ID NO: 23452 - protein, 121 aa, synthetic construct
  REGION 1..121: note = Description of Artificial Sequence: Synthetic polypeptide
  REGION 1..121: note = VH of XENP020509
EVKLEESGGGLVQPGGSMKLSCAASGFTFSDAWMDWVRQSPEKGLEWVAEIRTKHNNHATYYAESVKGRFTISRDDSKSSVYLQMNSLRAEDTGIYYCTRLANWDWYFDVWGAGTTVTVSS

SEQ ID NO: 23453 - protein, 5 aa, synthetic construct
  REGION 1..5: note = Description of Artificial Sequence: Synthetic peptide
  REGION 1..5: note = XENP020509 vhCDR1
DAWMD

SEQ ID NO: 23454 - protein, 19 aa, synthetic construct
  REGION 1..19: note = Description of Artificial Sequence: Synthetic peptide
  REGION 1..19: note = XENP020509 vhCDR2
EIRTKHNNHATYYAESVKG

SEQ ID NO: 23455 - protein, 10 aa, synthetic construct
  REGION 1..10: note = Description of Artificial Sequence: Synthetic peptide
  REGION 1..10: note = XENP020509 vhCDR3
LANWDWYFDV

SEQ ID NO: 23456 - protein, 218 aa, synthetic construct; identical to SEQ ID NO: 22266
  REGION 1..218: note = Description of Artificial Sequence: Synthetic polypeptide
  REGION 1..218: note = XENP020509 7G8_H0.57_L0_IgG1_PVA_/S267K Light Chain

SEQ ID NO: 23457 - protein, 111 aa, synthetic construct; identical to SEQ ID NO: 22267
  REGION 1..111: note = Description of Artificial Sequence: Synthetic polypeptide
  REGION 1..111: note = VL of XENP020509

SEQ ID NO: 23458 - protein, 15 aa, synthetic construct
  REGION 1..15: note = Description of Artificial Sequence: Synthetic peptide
  REGION 1..15: note = XENP020509 vlCDR1
KASQSVDYDGDSYMN

SEQ ID NO: 23459 - protein, 7 aa, synthetic construct
  REGION 1..7: note = Description of Artificial Sequence: Synthetic peptide
  REGION 1..7: note = XENP020509 vlCDR2
AASNLES

SEQ ID NO: 23460 - protein, 9 aa, synthetic construct
  REGION 1..9: note = Description of Artificial Sequence: Synthetic peptide
  REGION 1..9: note = XENP020509 vlCDR3
QQSNEDPFT

SEQ ID NO: 23461 - protein, 450 aa, synthetic construct
  REGION 1..450: note = Description of Artificial Sequence: Synthetic polypeptide
  REGION 1..450: note = XENP020510 7G8_H0.58_L0_IgG1_PVA_/S267K Heavy Chain
EVKLEESGGGLVQPGGSMKLSCAASGFTFSDAWMDWVRQSPEKGLEWVAEIRTKQNNHATYYAESVKGRFTISRDDSKSSVYLQMNSLRAEDTGIYYCTRLANWDWYFDVWGAGTTVTVSSASTKGPSVFPLAPSSKSTSGGTAALGCLVKDYFPEPVTVSWNSGALTSGVHTFPAVLQSSGLYSLSSVVTVPSSSLGTQTYICNVNHKPSDTKVDKKVEPKSCDKTHTCPPCPAPPVAGPSVFLFPPKPKDTLMISRTPEVTCVVVDVKHEDPEVKFNWYVDGVEVHNAKTKPREEEYNSTYRVVSVLTVLHQDWLNGKEYKCKVSNKALPAPIEKTISKAKGQPREPQVYTLPPSREEMTKNQVSLTCDVSGFYPSDIAVEWESDGQPENNYKTTPPVLDSDGSFFLYSKLTVDKSRWEQGDVFSCSVMHEALHNHYTQKSLSLSPGK

SEQ ID NO: 23462 - protein, 121 aa, synthetic construct
  REGION 1..121: note = Description of Artificial Sequence: Synthetic polypeptide
  REGION 1..121: note = VH of XENP020510
EVKLEESGGGLVQPGGSMKLSCAASGFTFSDAWMDWVRQSPEKGLEWVAEIRTKQNNHATYYAESVKGRFTISRDDSKSSVYLQMNSLRAEDTGIYYCTRLANWDWYFDVWGAGTTVTVSS

SEQ ID NO: 23463 - protein, 5 aa, synthetic construct
  REGION 1..5: note = Description of Artificial Sequence: Synthetic peptide
  REGION 1..5: note = XENP020510 vhCDR1
DAWMD

SEQ ID NO: 23464 - protein, 19 aa, synthetic construct
  REGION 1..19: note = Description of Artificial Sequence: Synthetic peptide
  REGION 1..19: note = XENP020510 vhCDR2
EIRTKQNNHATYYAESVKG

SEQ ID NO: 23465 - protein, 10 aa, synthetic construct
  REGION 1..10: note = Description of Artificial Sequence: Synthetic peptide
  REGION 1..10: note = XENP020510 vhCDR3
LANWDWYFDV

SEQ ID NO: 23466 - protein, 218 aa, synthetic construct; identical to SEQ ID NO: 22266
  REGION 1..218: note = Description of Artificial Sequence: Synthetic polypeptide
  REGION 1..218: note = XENP020510 7G8_H0.58_L0_IgG1_PVA_/S267K Light Chain

SEQ ID NO: 23467 - protein, 111 aa, synthetic construct; identical to SEQ ID NO: 22267
  REGION 1..111: note = Description of Artificial Sequence: Synthetic polypeptide
  REGION 1..111: note = VL of XENP020510

SEQ ID NO: 23468 - protein, 15 aa, synthetic construct
  REGION 1..15: note = Description of Artificial Sequence: Synthetic peptide
  REGION 1..15: note = XENP020510 vlCDR1
KASQSVDYDGDSYMN

SEQ ID NO: 23469 - protein, 7 aa, synthetic construct
  REGION 1..7: note = Description of Artificial Sequence: Synthetic peptide
  REGION 1..7: note = XENP020510 vlCDR2
AASNLES

SEQ ID NO: 23470 - protein, 9 aa, synthetic construct
  REGION 1..9: note = Description of Artificial Sequence: Synthetic peptide
  REGION 1..9: note = XENP020510 vlCDR3
QQSNEDPFT

SEQ ID NO: 23471 - protein, 450 aa, synthetic construct
  REGION 1..450: note = Description of Artificial Sequence: Synthetic polypeptide
  REGION 1..450: note = XENP020511 7G8_H0.59_L0_IgG1_PVA_/S267K Heavy Chain
EVKLEESGGGLVQPGGSMKLSCAASGFTFSDAWMDWVRQSPEKGLEWVAEIRTKDNNHATYYAESVKGRFTISRDDSKSSVYLQMNSLRAEDTGIYYCTRLANWDWYFDVWGAGTTVTVSSASTKGPSVFPLAPSSKSTSGGTAALGCLVKDYFPEPVTVSWNSGALTSGVHTFPAVLQSSGLYSLSSVVTVPSSSLGTQTYICNVNHKPSDTKVDKKVEPKSCDKTHTCPPCPAPPVAGPSVFLFPPKPKDTLMISRTPEVTCVVVDVKHEDPEVKFNWYVDGVEVHNAKTKPREEEYNSTYRVVSVLTVLHQDWLNGKEYKCKVSNKALPAPIEKTISKAKGQPREPQVYTLPPSREEMTKNQVSLTCDVSGFYPSDIAVEWESDGQPENNYKTTPPVLDSDGSFFLYSKLTVDKSRWEQGDVFSCSVMHEALHNHYTQKSLSLSPGK

SEQ ID NO: 23472 - protein, 121 aa, synthetic construct
  REGION 1..121: note = Description of Artificial Sequence: Synthetic polypeptide
  REGION 1..121: note = VH of XENP020511
EVKLEESGGGLVQPGGSMKLSCAASGFTFSDAWMDWVRQSPEKGLEWVAEIRTKDNNHATYYAESVKGRFTISRDDSKSSVYLQMNSLRAEDTGIYYCTRLANWDWYFDVWGAGTTVTVSS

SEQ ID NO: 23473 - protein, 5 aa, synthetic construct
  REGION 1..5: note = Description of Artificial Sequence: Synthetic peptide
  REGION 1..5: note = XENP020511 vhCDR1
DAWMD

SEQ ID NO: 23474 - protein, 19 aa, synthetic construct
  REGION 1..19: note = Description of Artificial Sequence: Synthetic peptide
  REGION 1..19: note = XENP020511 vhCDR2
EIRTKDNNHATYYAESVKG

SEQ ID NO: 23475 - protein, 10 aa, synthetic construct
  REGION 1..10: note = Description of Artificial Sequence: Synthetic peptide
  REGION 1..10: note = XENP020511 vhCDR3
LANWDWYFDV

SEQ ID NO: 23476 - protein, 218 aa, synthetic construct; identical to SEQ ID NO: 22266
  REGION 1..218: note = Description of Artificial Sequence: Synthetic polypeptide
  REGION 1..218: note = XENP020511 7G8_H0.59_L0_IgG1_PVA_/S267K Light Chain

SEQ ID NO: 23477 - protein, 111 aa, synthetic construct; identical to SEQ ID NO: 22267
  REGION 1..111: note = Description of Artificial Sequence: Synthetic polypeptide
  REGION 1..111: note = VL of XENP020511

SEQ ID NO: 23478 - protein, 15 aa, synthetic construct
  REGION 1..15: note = Description of Artificial Sequence: Synthetic peptide
  REGION 1..15: note = XENP020511 vlCDR1
KASQSVDYDGDSYMN

SEQ ID NO: 23479 - protein, 7 aa, synthetic construct
  REGION 1..7: note = Description of Artificial Sequence: Synthetic peptide
  REGION 1..7: note = XENP020511 vlCDR2
AASNLES

SEQ ID NO: 23480 - protein, 9 aa, synthetic construct
  REGION 1..9: note = Description of Artificial Sequence: Synthetic peptide
  REGION 1..9: note = XENP020511 vlCDR3
QQSNEDPFT

SEQ ID NO: 23481 - protein, 450 aa, synthetic construct
  REGION 1..450: note = Description of Artificial Sequence: Synthetic polypeptide
  REGION 1..450: note = XENP020512 7G8_H0.60_L0_IgG1_PVA_/S267K Heavy Chain
EVKLEESGGGLVQPGGSMKLSCAASGFTFSDAWMDWVRQSPEKGLEWVAEIRTKLNNHATYYAESVKGRFTISRDDSKSSVYLQMNSLRAEDTGIYYCTRLANWDWYFDVWGAGTTVTVSSASTKGPSVFPLAPSSKSTSGGTAALGCLVKDYFPEPVTVSWNSGALTSGVHTFPAVLQSSGLYSLSSVVTVPSSSLGTQTYICNVNHKPSDTKVDKKVEPKSCDKTHTCPPCPAPPVAGPSVFLFPPKPKDTLMISRTPEVTCVVVDVKHEDPEVKFNWYVDGVEVHNAKTKPREEEYNSTYRVVSVLTVLHQDWLNGKEYKCKVSNKALPAPIEKTISKAKGQPREPQVYTLPPSREEMTKNQVSLTCDVSGFYPSDIAVEWESDGQPENNYKTTPPVLDSDGSFFLYSKLTVDKSRWEQGDVFSCSVMHEALHNHYTQKSLSLSPGK

SEQ ID NO: 23482 - protein, 121 aa, synthetic construct
  REGION 1..121: note = Description of Artificial Sequence: Synthetic polypeptide
  REGION 1..121: note = VH of XENP020512
EVKLEESGGGLVQPGGSMKLSCAASGFTFSDAWMDWVRQSPEKGLEWVAEIRTKLNNHATYYAESVKGRFTISRDDSKSSVYLQMNSLRAEDTGIYYCTRLANWDWYFDVWGAGTTVTVSS

SEQ ID NO: 23483 - protein, 5 aa, synthetic construct
  REGION 1..5: note = Description of Artificial Sequence: Synthetic peptide
  REGION 1..5: note = XENP020512 vhCDR1
DAWMD

SEQ ID NO: 23484 - protein, 19 aa, synthetic construct
  REGION 1..19: note = Description of Artificial Sequence: Synthetic peptide
  REGION 1..19: note = XENP020512 vhCDR2
EIRTKLNNHATYYAESVKG

SEQ ID NO: 23485 - protein, 10 aa, synthetic construct
  REGION 1..10: note = Description of Artificial Sequence: Synthetic peptide
  REGION 1..10: note = XENP020512 vhCDR3
LANWDWYFDV

SEQ ID NO: 23486 - protein, 218 aa, synthetic construct; identical to SEQ ID NO: 22266
  REGION 1..218: note = Description of Artificial Sequence: Synthetic polypeptide
  REGION 1..218: note = XENP020512 7G8_H0.60_L0_IgG1_PVA_/S267K Light Chain

SEQ ID NO: 23487 - protein, 111 aa, synthetic construct; identical to SEQ ID NO: 22267
  REGION 1..111: note = Description of Artificial Sequence: Synthetic polypeptide
  REGION 1..111: note = VL of XENP020512

SEQ ID NO: 23488 - protein, 15 aa, synthetic construct
  REGION 1..15: note = Description of Artificial Sequence: Synthetic peptide
  REGION 1..15: note = XENP020512 vlCDR1
KASQSVDYDGDSYMN

SEQ ID NO: 23489 - protein, 7 aa, synthetic construct
  REGION 1..7: note = Description of Artificial Sequence: Synthetic peptide
  REGION 1..7: note = XENP020512 vlCDR2
AASNLES

SEQ ID NO: 23490 - protein, 9 aa, synthetic construct
  REGION 1..9: note = Description of Artificial Sequence: Synthetic peptide
  REGION 1..9: note = XENP020512 vlCDR3
QQSNEDPFT

SEQ ID NO: 23491 - protein, 450 aa, synthetic construct
  REGION 1..450: note = Description of Artificial Sequence: Synthetic polypeptide
  REGION 1..450: note = XENP020513 7G8_H0.61_L0_IgG1_PVA_/S267K Heavy Chain
EVKLEESGGGLVQPGGSMKLSCAASGFTFSDAWMDWVRQSPEKGLEWVAEIRTKKNNHATYYAESVKGRFTISRDDSKSSVYLQMNSLRAEDTGIYYCTRLANWDWYFDVWGAGTTVTVSSASTKGPSVFPLAPSSKSTSGGTAALGCLVKDYFPEPVTVSWNSGALTSGVHTFPAVLQSSGLYSLSSVVTVPSSSLGTQTYICNVNHKPSDTKVDKKVEPKSCDKTHTCPPCPAPPVAGPSVFLFPPKPKDTLMISRTPEVTCVVVDVKHEDPEVKFNWYVDGVEVHNAKTKPREEEYNSTYRVVSVLTVLHQDWLNGKEYKCKVSNKALPAPIEKTISKAKGQPREPQVYTLPPSREEMTKNQVSLTCDVSGFYPSDIAVEWESDGQPENNYKTTPPVLDSDGSFFLYSKLTVDKSRWEQGDVFSCSVMHEALHNHYTQKSLSLSPGK

SEQ ID NO: 23492 - protein, 121 aa, synthetic construct
  REGION 1..121: note = Description of Artificial Sequence: Synthetic polypeptide
  REGION 1..121: note = VH of XENP020513
EVKLEESGGGLVQPGGSMKLSCAASGFTFSDAWMDWVRQSPEKGLEWVAEIRTKKNNHATYYAESVKGRFTISRDDSKSSVYLQMNSLRAEDTGIYYCTRLANWDWYFDVWGAGTTVTVSS

SEQ ID NO: 23493 - protein, 5 aa, synthetic construct
  REGION 1..5: note = Description of Artificial Sequence: Synthetic peptide
  REGION 1..5: note = XENP020513 vhCDR1
DAWMD

SEQ ID NO: 23494 - protein, 19 aa, synthetic construct
  REGION 1..19: note = Description of Artificial Sequence: Synthetic peptide
  REGION 1..19: note = XENP020513 vhCDR2
EIRTKKNNHATYYAESVKG

SEQ ID NO: 23495 - protein, 10 aa, synthetic construct
  REGION 1..10: note = Description of Artificial Sequence: Synthetic peptide
  REGION 1..10: note = XENP020513 vhCDR3
LANWDWYFDV

SEQ ID NO: 23496 - protein, 218 aa, synthetic construct; identical to SEQ ID NO: 22266
  REGION 1..218: note = Description of Artificial Sequence: Synthetic polypeptide
  REGION 1..218: note = XENP020513 7G8_H0.61_L0_IgG1_PVA_/S267K Light Chain

SEQ ID NO: 23497 - protein, 111 aa, synthetic construct; identical to SEQ ID NO: 22267
  REGION 1..111: note = Description of Artificial Sequence: Synthetic polypeptide
  REGION 1..111: note = VL of XENP020513

SEQ ID NO: 23498 - protein, 15 aa, synthetic construct
  REGION 1..15: note = Description of Artificial Sequence: Synthetic peptide
  REGION 1..15: note = XENP020513 vlCDR1
KASQSVDYDGDSYMN

SEQ ID NO: 23499 - protein, 7 aa, synthetic construct
  REGION 1..7: note = Description of Artificial Sequence: Synthetic peptide
  REGION 1..7: note = XENP020513 vlCDR2
AASNLES

SEQ ID NO: 23500 - protein, 9 aa, synthetic construct
  REGION 1..9: note = Description of Artificial Sequence: Synthetic peptide
  REGION 1..9: note = XENP020513 vlCDR3
QQSNEDPFT

SEQ ID NO: 23501 - protein, 450 aa, synthetic construct
  REGION 1..450: note = Description of Artificial Sequence: Synthetic polypeptide
  REGION 1..450: note = XENP020514 7G8_H0.62_L0_IgG1_PVA_/S267K Heavy Chain
EVKLEESGGGLVQPGGSMKLSCAASGFTFSDAWMDWVRQSPEKGLEWVAEIRTKYNNHATYYAESVKGRFTISRDDSKSSVYLQMNSLRAEDTGIYYCTRLANWDWYFDVWGAGTTVTVSSASTKGPSVFPLAPSSKSTSGGTAALGCLVKDYFPEPVTVSWNSGALTSGVHTFPAVLQSSGLYSLSSVVTVPSSSLGTQTYICNVNHKPSDTKVDKKVEPKSCDKTHTCPPCPAPPVAGPSVFLFPPKPKDTLMISRTPEVTCVVVDVKHEDPEVKFNWYVDGVEVHNAKTKPREEEYNSTYRVVSVLTVLHQDWLNGKEYKCKVSNKALPAPIEKTISKAKGQPREPQVYTLPPSREEMTKNQVSLTCDVSGFYPSDIAVEWESDGQPENNYKTTPPVLDSDGSFFLYSKLTVDKSRWEQGDVFSCSVMHEALHNHYTQKSLSLSPGK

SEQ ID NO: 23502 - protein, 121 aa, synthetic construct
  REGION 1..121: note = Description of Artificial Sequence: Synthetic polypeptide
  REGION 1..121: note = VH of XENP020514
EVKLEESGGGLVQPGGSMKLSCAASGFTFSDAWMDWVRQSPEKGLEWVAEIRTKYNNHATYYAESVKGRFTISRDDSKSSVYLQMNSLRAEDTGIYYCTRLANWDWYFDVWGAGTTVTVSS

SEQ ID NO: 23503 - protein, 5 aa, synthetic construct
  REGION 1..5: note = Description of Artificial Sequence: Synthetic peptide
  REGION 1..5: note = XENP020514 vhCDR1
DAWMD

SEQ ID NO: 23504 - protein, 19 aa, synthetic construct
  REGION 1..19: note = Description of Artificial Sequence: Synthetic peptide
  REGION 1..19: note = XENP020514 vhCDR2
EIRTKYNNHATYYAESVKG

SEQ ID NO: 23505 - protein, 10 aa, synthetic construct
  REGION 1..10: note = Description of Artificial Sequence: Synthetic peptide
  REGION 1..10: note = XENP020514 vhCDR3
LANWDWYFDV

SEQ ID NO: 23506 - protein, 218 aa, synthetic construct; identical to SEQ ID NO: 22266
  REGION 1..218: note = Description of Artificial Sequence: Synthetic polypeptide
  REGION 1..218: note = XENP020514 7G8_H0.62_L0_IgG1_PVA_/S267K Light Chain

SEQ ID NO: 23507 - protein, 111 aa, synthetic construct; identical to SEQ ID NO: 22267
  REGION 1..111: note = Description of Artificial Sequence: Synthetic polypeptide
  REGION 1..111: note = VL of XENP020514

SEQ ID NO: 23508 - protein, 15 aa, synthetic construct
  REGION 1..15: note = Description of Artificial Sequence: Synthetic peptide
  REGION 1..15: note = XENP020514 vlCDR1
KASQSVDYDGDSYMN

SEQ ID NO: 23509 - protein, 7 aa, synthetic construct
  REGION 1..7: note = Description of Artificial Sequence: Synthetic peptide
  REGION 1..7: note = XENP020514 vlCDR2
AASNLES

SEQ ID NO: 23510 - protein, 9 aa, synthetic construct
  REGION 1..9: note = Description of Artificial Sequence: Synthetic peptide
  REGION 1..9: note = XENP020514 vlCDR3
QQSNEDPFT

SEQ ID NO: 23511 - protein, 450 aa, synthetic construct
  REGION 1..450: note = Description of Artificial Sequence: Synthetic polypeptide
  REGION 1..450: note = XENP020515 7G8_H0.63_L0_IgG1_PVA_/S267K Heavy Chain
EVKLEESGGGLVQPGGSMKLSCAASGFTFSDAWMDWVRQSPEKGLEWVAEIRTKADNHATYYAESVKGRFTISRDDSKSSVYLQMNSLRAEDTGIYYCTRLANWDWYFDVWGAGTTVTVSSASTKGPSVFPLAPSSKSTSGGTAALGCLVKDYFPEPVTVSWNSGALTSGVHTFPAVLQSSGLYSLSSVVTVPSSSLGTQTYICNVNHKPSDTKVDKKVEPKSCDKTHTCPPCPAPPVAGPSVFLFPPKPKDTLMISRTPEVTCVVVDVKHEDPEVKFNWYVDGVEVHNAKTKPREEEYNSTYRVVSVLTVLHQDWLNGKEYKCKVSNKALPAPIEKTISKAKGQPREPQVYTLPPSREEMTKNQVSLTCDVSGFYPSDIAVEWESDGQPENNYKTTPPVLDSDGSFFLYSKLTVDKSRWEQGDVFSCSVMHEALHNHYTQKSLSLSPGK

SEQ ID NO: 23512 - protein, 121 aa, synthetic construct
  REGION 1..121: note = Description of Artificial Sequence: Synthetic polypeptide
  REGION 1..121: note = VH of XENP020515
EVKLEESGGGLVQPGGSMKLSCAASGFTFSDAWMDWVRQSPEKGLEWVAEIRTKADNHATYYAESVKGRFTISRDDSKSSVYLQMNSLRAEDTGIYYCTRLANWDWYFDVWGAGTTVTVSS

SEQ ID NO: 23513 - protein, 5 aa, synthetic construct
  REGION 1..5: note = Description of Artificial Sequence: Synthetic peptide
  REGION 1..5: note = XENP020515 vhCDR1
DAWMD

SEQ ID NO: 23514 - protein, 19 aa, synthetic construct
  REGION 1..19: note = Description of Artificial Sequence: Synthetic peptide
  REGION 1..19: note = XENP020515 vhCDR2
EIRTKADNHATYYAESVKG

SEQ ID NO: 23515 - protein, 10 aa, synthetic construct
  REGION 1..10: note = Description of Artificial Sequence: Synthetic peptide
  REGION 1..10: note = XENP020515 vhCDR3
LANWDWYFDV

SEQ ID NO: 23516 - protein, 218 aa, synthetic construct; identical to SEQ ID NO: 22266
  REGION 1..218: note = Description of Artificial Sequence: Synthetic polypeptide
  REGION 1..218: note = XENP020515 7G8_H0.63_L0_IgG1_PVA_/S267K Light Chain

SEQ ID NO: 23517 - protein, 111 aa, synthetic construct; identical to SEQ ID NO: 22267
  REGION 1..111: note = Description of Artificial Sequence: Synthetic polypeptide
  REGION 1..111: note = VL of XENP020515

SEQ ID NO: 23518 - protein, 15 aa, synthetic construct
  REGION 1..15: note = Description of Artificial Sequence: Synthetic peptide
  REGION 1..15: note = XENP020515 vlCDR1
KASQSVDYDGDSYMN

SEQ ID NO: 23519 - protein, 7 aa, synthetic construct
  REGION 1..7: note = Description of Artificial Sequence: Synthetic peptide
  REGION 1..7: note = XENP020515 vlCDR2
AASNLES

SEQ ID NO: 23520 - protein, 9 aa, synthetic construct
  REGION 1..9: note = Description of Artificial Sequence: Synthetic peptide
  REGION 1..9: note = XENP020515 vlCDR3
QQSNEDPFT

SEQ ID NO: 23521 - protein, 450 aa, synthetic construct
  REGION 1..450: note = Description of Artificial Sequence: Synthetic polypeptide
  REGION 1..450: note = XENP020516 7G8_H0.64_L0_IgG1_PVA_/S267K Heavy Chain
EVKLEESGGGLVQPGGSMKLSCAASGFTFSDAWMDWVRQSPEKGLEWVAEIRTKAHNHATYYAESVKGRFTISRDDSKSSVYLQMNSLRAEDTGIYYCTRLANWDWYFDVWGAGTTVTVSSASTKGPSVFPLAPSSKSTSGGTAALGCLVKDYFPEPVTVSWNSGALTSGVHTFPAVLQSSGLYSLSSVVTVPSSSLGTQTYICNVNHKPSDTKVDKKVEPKSCDKTHTCPPCPAPPVAGPSVFLFPPKPKDTLMISRTPEVTCVVVDVKHEDPEVKFNWYVDGVEVHNAKTKPREEEYNSTYRVVSVLTVLHQDWLNGKEYKCKVSNKALPAPIEKTISKAKGQPREPQVYTLPPSREEMTKNQVSLTCDVSGFYPSDIAVEWESDGQPENNYKTTPPVLDSDGSFFLYSKLTVDKSRWEQGDVFSCSVMHEALHNHYTQKSLSLSPGK

SEQ ID NO: 23522 - protein, 121 aa, synthetic construct
  REGION 1..121: note = Description of Artificial Sequence: Synthetic polypeptide
  REGION 1..121: note = VH of XENP020516
EVKLEESGGGLVQPGGSMKLSCAASGFTFSDAWMDWVRQSPEKGLEWVAEIRTKAHNHATYYAESVKGRFTISRDDSKSSVYLQMNSLRAEDTGIYYCTRLANWDWYFDVWGAGTTVTVSS

SEQ ID NO: 23523 - protein, 5 aa, synthetic construct
  REGION 1..5: note = Description of Artificial Sequence: Synthetic peptide
  REGION 1..5: note = XENP020516 vhCDR1
DAWMD

SEQ ID NO: 23524 - protein, 19 aa, synthetic construct
  REGION 1..19: note = Description of Artificial Sequence: Synthetic peptide
  REGION 1..19: note = XENP020516 vhCDR2
EIRTKAHNHATYYAESVKG

SEQ ID NO: 23525 - protein, 10 aa, synthetic construct
  REGION 1..10: note = Description of Artificial Sequence: Synthetic peptide
  REGION 1..10: note = XENP020516 vhCDR3
LANWDWYFDV

SEQ ID NO: 23526 - protein, 218 aa, synthetic construct; identical to SEQ ID NO: 22266
  REGION 1..218: note = Description of Artificial Sequence: Synthetic polypeptide
  REGION 1..218: note = XENP020516 7G8_H0.64_L0_IgG1_PVA_/S267K Light Chain

SEQ ID NO: 23527 - protein, 111 aa, synthetic construct; identical to SEQ ID NO: 22267
  REGION 1..111: note = Description of Artificial Sequence: Synthetic polypeptide
  REGION 1..111: note = VL of XENP020516

SEQ ID NO: 23528 - protein, 15 aa, synthetic construct
  REGION 1..15: note = Description of Artificial Sequence: Synthetic peptide
  REGION 1..15: note = XENP020516 vlCDR1
KASQSVDYDGDSYMN

SEQ ID NO: 23529 - protein, 7 aa, synthetic construct
  REGION 1..7: note = Description of Artificial Sequence: Synthetic peptide
  REGION 1..7: note = XENP020516 vlCDR2
AASNLES

SEQ ID NO: 23530 - protein, 9 aa, synthetic construct
  REGION 1..9: note = Description of Artificial Sequence: Synthetic peptide
  REGION 1..9: note = XENP020516 vlCDR3
QQSNEDPFT

SEQ ID NO: 23531 - protein, 450 aa, synthetic construct
  REGION 1..450: note = Description of Artificial Sequence: Synthetic polypeptide
  REGION 1..450: note = XENP020517 7G8_H0.65_L0_IgG1_PVA_/S267K Heavy Chain
EVKLEESGGGLVQPGGSMKLSCAASGFTFSDAWMDWVRQSPEKGLEWVAEIRTKAENHATYYAESVKGRFTISRDDSKSSVYLQMNSLRAEDTGIYYCTRLANWDWYFDVWGAGTTVTVSSASTKGPSVFPLAPSSKSTSGGTAALGCLVKDYFPEPVTVSWNSGALTSGVHTFPAVLQSSGLYSLSSVVTVPSSSLGTQTYICNVNHKPSDTKVDKKVEPKSCDKTHTCPPCPAPPVAGPSVFLFPPKPKDTLMISRTPEVTCVVVDVKHEDPEVKFNWYVDGVEVHNAKTKPREEEYNSTYRVVSVLTVLHQDWLNGKEYKCKVSNKALPAPIEKTISKAKGQPREPQVYTLPPSREEMTKNQVSLTCDVSGFYPSDIAVEWESDGQPENNYKTTPPVLDSDGSFFLYSKLTVDKSRWEQGDVFSCSVMHEALHNHYTQKSLSLSPGK

SEQ ID NO: 23532 - protein, 121 aa, synthetic construct
  REGION 1..121: note = Description of Artificial Sequence: Synthetic polypeptide
  REGION 1..121: note = VH of XENP020517
EVKLEESGGGLVQPGGSMKLSCAASGFTFSDAWMDWVRQSPEKGLEWVAEIRTKAENHATYYAESVKGRFTISRDDSKSSVYLQMNSLRAEDTGIYYCTRLANWDWYFDVWGAGTTVTVSS

SEQ ID NO: 23533 - protein, 5 aa, synthetic construct
  REGION 1..5: note = Description of Artificial Sequence: Synthetic peptide
  REGION 1..5: note = XENP020517 vhCDR1
DAWMD

SEQ ID NO: 23534 - protein, 19 aa, synthetic construct
  REGION 1..19: note = Description of Artificial Sequence: Synthetic peptide
  REGION 1..19: note = XENP020517 vhCDR2
EIRTKAENHATYYAESVKG

SEQ ID NO: 23535 - protein, 10 aa, synthetic construct
  REGION 1..10: note = Description of Artificial Sequence: Synthetic peptide
  REGION 1..10: note = XENP020517 vhCDR3
LANWDWYFDV

SEQ ID NO: 23536 - protein, 218 aa, synthetic construct; identical to SEQ ID NO: 22266
  REGION 1..218: note = Description of Artificial Sequence: Synthetic polypeptide
  REGION 1..218: note = XENP020517 7G8_H0.65_L0_IgG1_PVA_/S267K Light Chain

SEQ ID NO: 23537 - protein, 111 aa, synthetic construct; identical to SEQ ID NO: 22267
  REGION 1..111: note = Description of Artificial Sequence: Synthetic polypeptide
  REGION 1..111: note = VL of XENP020517

SEQ ID NO: 23538 - protein, 15 aa, synthetic construct
  REGION 1..15: note = Description of Artificial Sequence: Synthetic peptide
  REGION 1..15: note = XENP020517 vlCDR1
KASQSVDYDGDSYMN

SEQ ID NO: 23539 - protein, 7 aa, synthetic construct
  REGION 1..7: note = Description of Artificial Sequence: Synthetic peptide
  REGION 1..7: note = XENP020517 vlCDR2
AASNLES

SEQ ID NO: 23540 - protein, 9 aa, synthetic construct
  REGION 1..9: note = Description of Artificial Sequence: Synthetic peptide
  REGION 1..9: note = XENP020517 vlCDR3
QQSNEDPFT

SEQ ID NO: 23541 - protein, 450 aa, synthetic construct
  REGION 1..450: note = Description of Artificial Sequence: Synthetic polypeptide
  REGION 1..450: note = XENP020518 7G8_H0.66_L0_IgG1_PVA_/S267K Heavy Chain
EVKLEESGGGLVQPGGSMKLSCAASGFTFSDAWMDWVRQSPEKGLEWVAEIRTKASNHATYYAESVKGRFTISRDDSKSSVYLQMNSLRAEDTGIYYCTRLANWDWYFDVWGAGTTVTVSSASTKGPSVFPLAPSSKSTSGGTAALGCLVKDYFPEPVTVSWNSGALTSGVHTFPAVLQSSGLYSLSSVVTVPSSSLGTQTYICNVNHKPSDTKVDKKVEPKSCDKTHTCPPCPAPPVAGPSVFLFPPKPKDTLMISRTPEVTCVVVDVKHEDPEVKFNWYVDGVEVHNAKTKPREEEYNSTYRVVSVLTVLHQDWLNGKEYKCKVSNKALPAPIEKTISKAKGQPREPQVYTLPPSREEMTKNQVSLTCDVSGFYPSDIAVEWESDGQPENNYKTTPPVLDSDGSFFLYSKLTVDKSRWEQGDVFSCSVMHEALHNHYTQKSLSLSPGK

SEQ ID NO: 23542 - protein, 121 aa, synthetic construct
  REGION 1..121: note = Description of Artificial Sequence: Synthetic polypeptide
  REGION 1..121: note = VH of XENP020518
EVKLEESGGGLVQPGGSMKLSCAASGFTFSDAWMDWVRQSPEKGLEWVAEIRTKASNHATYYAESVKGRFTISRDDSKSSVYLQMNSLRAEDTGIYYCTRLANWDWYFDVWGAGTTVTVSS

SEQ ID NO: 23543 - protein, 5 aa, synthetic construct
  REGION 1..5: note = Description of Artificial Sequence: Synthetic peptide
  REGION 1..5: note = XENP020518 vhCDR1
DAWMD

SEQ ID NO: 23544 - protein, 19 aa, synthetic construct
  REGION 1..19: note = Description of Artificial Sequence: Synthetic peptide
  REGION 1..19: note = XENP020518 vhCDR2
EIRTKASNHATYYAESVKG

SEQ ID NO: 23545 - protein, 10 aa, synthetic construct
  REGION 1..10: note = Description of Artificial Sequence: Synthetic peptide
  REGION 1..10: note = XENP020518 vhCDR3
LANWDWYFDV

SEQ ID NO: 23546 - protein, 218 aa, synthetic construct; identical to SEQ ID NO: 22266
  REGION 1..218: note = Description of Artificial Sequence: Synthetic polypeptide
  REGION 1..218: note = XENP020518 7G8_H0.66_L0_IgG1_PVA_/S267K Light Chain

SEQ ID NO: 23547 - protein, 111 aa, synthetic construct; identical to SEQ ID NO: 22267
  REGION 1..111: note = Description of Artificial Sequence: Synthetic polypeptide
  REGION 1..111: note = VL of XENP020518

SEQ ID NO: 23548 - protein, 15 aa, synthetic construct
  REGION 1..15: note = Description of Artificial Sequence: Synthetic peptide
  REGION 1..15: note = XENP020518 vlCDR1
KASQSVDYDGDSYMN

SEQ ID NO: 23549 - protein, 7 aa, synthetic construct
  REGION 1..7: note = Description of Artificial Sequence: Synthetic peptide
  REGION 1..7: note = XENP020518 vlCDR2
AASNLES

SEQ ID NO: 23550 - protein, 9 aa, synthetic construct
  REGION 1..9: note = Description of Artificial Sequence: Synthetic peptide
  REGION 1..9: note = XENP020518 vlCDR3
QQSNEDPFT

SEQ ID NO: 23551 - protein, 450 aa, synthetic construct
  REGION 1..450: note = Description of Artificial Sequence: Synthetic polypeptide
  REGION 1..450: note = XENP020519 7G8_H0.67_L0_IgG1_PVA_/S267K Heavy Chain
EVKLEESGGGLVQPGGSMKLSCAASGFTFSDAWMDWVRQSPEKGLEWVAEIRTKARNHATYYAESVKGRFTISRDDSKSSVYLQMNSLRAEDTGIYYCTRLANWDWYFDVWGAGTTVTVSSASTKGPSVFPLAPSSKSTSGGTAALGCLVKDYFPEPVTVSWNSGALTSGVHTFPAVLQSSGLYSLSSVVTVPSSSLGTQTYICNVNHKPSDTKVDKKVEPKSCDKTHTCPPCPAPPVAGPSVFLFPPKPKDTLMISRTPEVTCVVVDVKHEDPEVKFNWYVDGVEVHNAKTKPREEEYNSTYRVVSVLTVLHQDWLNGKEYKCKVSNKALPAPIEKTISKAKGQPREPQVYTLPPSREEMTKNQVSLTCDVSGFYPSDIAVEWESDGQPENNYKTTPPVLDSDGSFFLYSKLTVDKSRWEQGDVFSCSVMHEALHNHYTQKSLSLSPGK

SEQ ID NO: 23552 - protein, 121 aa, synthetic construct
  REGION 1..121: note = Description of Artificial Sequence: Synthetic polypeptide
  REGION 1..121: note = VH of XENP020519
EVKLEESGGGLVQPGGSMKLSCAASGFTFSDAWMDWVRQSPEKGLEWVAEIRTKARNHATYYAESVKGRFTISRDDSKSSVYLQMNSLRAEDTGIYYCTRLANWDWYFDVWGAGTTVTVSS

SEQ ID NO: 23553 - protein, 5 aa, synthetic construct
  REGION 1..5: note = Description of Artificial Sequence: Synthetic peptide
  REGION 1..5: note = XENP020519 vhCDR1
DAWMD

SEQ ID NO: 23554 - protein, 19 aa, synthetic construct
  REGION 1..19: note = Description of Artificial Sequence: Synthetic peptide
  REGION 1..19: note = XENP020519 vhCDR2
EIRTKARNHATYYAESVKG

SEQ ID NO: 23555 - protein, 10 aa, synthetic construct
  REGION 1..10: note = Description of Artificial Sequence: Synthetic peptide
  REGION 1..10: note = XENP020519 vhCDR3
LANWDWYFDV

SEQ ID NO: 23556 - protein, 218 aa, synthetic construct; identical to SEQ ID NO: 22266
  REGION 1..218: note = Description of Artificial Sequence: Synthetic polypeptide
  REGION 1..218: note = XENP020519 7G8_H0.67_L0_IgG1_PVA_/S267K Light Chain

SEQ ID NO: 23557 - protein, 111 aa, synthetic construct; identical to SEQ ID NO: 22267
  REGION 1..111: note = Description of Artificial Sequence: Synthetic polypeptide
  REGION 1..111: note = VL of XENP020519

SEQ ID NO: 23558 - protein, 15 aa, synthetic construct
  REGION 1..15: note = Description of Artificial Sequence: Synthetic peptide
  REGION 1..15: note = XENP020519 vlCDR1
KASQSVDYDGDSYMN

SEQ ID NO: 23559 - protein, 7 aa, synthetic construct
  REGION 1..7: note = Description of Artificial Sequence: Synthetic peptide
  REGION 1..7: note = XENP020519 vlCDR2
AASNLES

SEQ ID NO: 23560 - protein, 9 aa, synthetic construct
  REGION 1..9: note = Description of Artificial Sequence: Synthetic peptide
  REGION 1..9: note = XENP020519 vlCDR3
QQSNEDPFT

SEQ ID NO: 23561 - protein, 450 aa, synthetic construct
  REGION 1..450: note = Description of Artificial Sequence: Synthetic polypeptide
  REGION 1..450: note = XENP020520 7G8_H0.68_L0_IgG1_PVA_/S267K Heavy Chain
EVKLEESGGGLVQPGGSMKLSCAASGFTFSDAWMDWVRQSPEKGLEWVAEIRTKALNHATYYAESVKGRFTISRDDSKSSVYLQMNSLRAEDTGIYYCTRLANWDWYFDVWGAGTTVTVSSASTKGPSVFPLAPSSKSTSGGTAALGCLVKDYFPEPVTVSWNSGALTSGVHTFPAVLQSSGLYSLSSVVTVPSSSLGTQTYICNVNHKPSDTKVDKKVEPKSCDKTHTCPPCPAPPVAGPSVFLFPPKPKDTLMISRTPEVTCVVVDVKHEDPEVKFNWYVDGVEVHNAKTKPREEEYNSTYRVVSVLTVLHQDWLNGKEYKCKVSNKALPAPIEKTISKAKGQPREPQVYTLPPSREEMTKNQVSLTCDVSGFYPSDIAVEWESDGQPENNYKTTPPVLDSDGSFFLYSKLTVDKSRWEQGDVFSCSVMHEALHNHYTQKSLSLSPGK

SEQ ID NO: 23562 - protein, 121 aa, synthetic construct
  REGION 1..121: note = Description of Artificial Sequence: Synthetic polypeptide
  REGION 1..121: note = VH of XENP020520
EVKLEESGGGLVQPGGSMKLSCAASGFTFSDAWMDWVRQSPEKGLEWVAEIRTKALNHATYYAESVKGRFTISRDDSKSSVYLQMNSLRAEDTGIYYCTRLANWDWYFDVWGAGTTVTVSS

SEQ ID NO: 23563 - protein, 5 aa, synthetic construct
  REGION 1..5: note = Description of Artificial Sequence: Synthetic peptide
  REGION 1..5: note = XENP020520 vhCDR1
DAWMD

SEQ ID NO: 23564 - protein, 19 aa, synthetic construct
  REGION 1..19: note = Description of Artificial Sequence: Synthetic peptide
  REGION 1..19: note = XENP020520 vhCDR2
EIRTKALNHATYYAESVKG

SEQ ID NO: 23565 - protein, 10 aa, synthetic construct
  REGION 1..10: note = Description of Artificial Sequence: Synthetic peptide
  REGION 1..10: note = XENP020520 vhCDR3
LANWDWYFDV

SEQ ID NO: 23566 - protein, 218 aa, synthetic construct; identical to SEQ ID NO: 22266
  REGION 1..218: note = Description of Artificial Sequence: Synthetic polypeptide
  REGION 1..218: note = XENP020520 7G8_H0.68_L0_IgG1_PVA_/S267K Light Chain

SEQ ID NO: 23567 - protein, 111 aa, synthetic construct; identical to SEQ ID NO: 22267
  REGION 1..111: note = Description of Artificial Sequence: Synthetic polypeptide
  REGION 1..111: note = VL of XENP020520

SEQ ID NO: 23568 - protein, 15 aa, synthetic construct
  REGION 1..15: note = Description of Artificial Sequence: Synthetic peptide
  REGION 1..15: note = XENP020520 vlCDR1
KASQSVDYDGDSYMN

SEQ ID NO: 23569 - protein, 7 aa, synthetic construct
  REGION 1..7: note = Description of Artificial Sequence: Synthetic peptide
  REGION 1..7: note = XENP020520 vlCDR2
AASNLES

SEQ ID NO: 23570 - protein, 9 aa, synthetic construct
  REGION 1..9: note = Description of Artificial Sequence: Synthetic peptide
  REGION 1..9: note = XENP020520 vlCDR3
QQSNEDPFT

SEQ ID NO: 23571 - protein, 450 aa, synthetic construct
  REGION 1..450: note = Description of Artificial Sequence: Synthetic polypeptide
  REGION 1..450: note = XENP020521 7G8_H0.69_L0_IgG1_PVA_/S267K Heavy Chain
EVKLEESGGGLVQPGGSMKLSCAASGFTFSDAWMDWVRQSPEKGLEWVAEIRTKATNHATYYAESVKGRFTISRDDSKSSVYLQMNSLRAEDTGIYYCTRLANWDWYFDVWGAGTTVTVSSASTKGPSVFPLAPSSKSTSGGTAALGCLVKDYFPEPVTVSWNSGALTSGVHTFPAVLQSSGLYSLSSVVTVPSSSLGTQTYICNVNHKPSDTKVDKKVEPKSCDKTHTCPPCPAPPVAGPSVFLFPPKPKDTLMISRTPEVTCVVVDVKHEDPEVKFNWYVDGVEVHNAKTKPREEEYNSTYRVVSVLTVLHQDWLNGKEYKCKVSNKALPAPIEKTISKAKGQPREPQVYTLPPSREEMTKNQVSLTCDVSGFYPSDIAVEWESDGQPENNYKTTPPVLDSDGSFFLYSKLTVDKSRWEQGDVFSCSVMHEALHNHYTQKSLSLSPGK

SEQ ID NO: 23572 - protein, 121 aa, synthetic construct
  REGION 1..121: note = Description of Artificial Sequence: Synthetic polypeptide
  REGION 1..121: note = VH of XENP020521
EVKLEESGGGLVQPGGSMKLSCAASGFTFSDAWMDWVRQSPEKGLEWVAEIRTKATNHATYYAESVKGRFTISRDDSKSSVYLQMNSLRAEDTGIYYCTRLANWDWYFDVWGAGTTVTVSS

SEQ ID NO: 23573 - protein, 5 aa, synthetic construct
  REGION 1..5: note = Description of Artificial Sequence: Synthetic peptide
  REGION 1..5: note = XENP020521 vhCDR1
DAWMD

SEQ ID NO: 23574 - protein, 19 aa, synthetic construct
  REGION 1..19: note = Description of Artificial Sequence: Synthetic peptide
  REGION 1..19: note = XENP020521 vhCDR2
EIRTKATNHATYYAESVKG

SEQ ID NO: 23575 - protein, 10 aa, synthetic construct
  REGION 1..10: note = Description of Artificial Sequence: Synthetic peptide
  REGION 1..10: note = XENP020521 vhCDR3
LANWDWYFDV

SEQ ID NO: 23576 - protein, 218 aa, synthetic construct; identical to SEQ ID NO: 22266
  REGION 1..218: note = Description of Artificial Sequence: Synthetic polypeptide
  REGION 1..218: note = XENP020521 7G8_H0.69_L0_IgG1_PVA_/S267K Light Chain

SEQ ID NO: 23577 - protein, 111 aa, synthetic construct; identical to SEQ ID NO: 22267
  REGION 1..111: note = Description of Artificial Sequence: Synthetic polypeptide
  REGION 1..111: note = VL of XENP020521

SEQ ID NO: 23578 - protein, 15 aa, synthetic construct
  REGION 1..15: note = Description of Artificial Sequence: Synthetic peptide
  REGION 1..15: note = XENP020521 vlCDR1
KASQSVDYDGDSYMN

SEQ ID NO: 23579 - protein, 7 aa, synthetic construct
  REGION 1..7: note = Description of Artificial Sequence: Synthetic peptide
  REGION 1..7: note = XENP020521 vlCDR2
AASNLES

SEQ ID NO: 23580 - protein, 9 aa, synthetic construct
  REGION 1..9: note = Description of Artificial Sequence: Synthetic peptide
  REGION 1..9: note = XENP020521 vlCDR3
QQSNEDPFT

SEQ ID NO: 23581 - protein, 450 aa, synthetic construct
  REGION 1..450: note = Description of Artificial Sequence: Synthetic polypeptide
  REGION 1..450: note = XENP020522 7G8_H0.70_L0_IgG1_PVA_/S267K Heavy Chain
EVKLEESGGGLVQPGGSMKLSCAASGFTFSDAWMDWVRQSPEKGLEWVAEIRTKAGNHATYYAESVKGRFTISRDDSKSSVYLQMNSLRAEDTGIYYCTRLANWDWYFDVWGAGTTVTVSSASTKGPSVFPLAPSSKSTSGGTAALGCLVKDYFPEPVTVSWNSGALTSGVHTFPAVLQSSGLYSLSSVVTVPSSSLGTQTYICNVNHKPSDTKVDKKVEPKSCDKTHTCPPCPAPPVAGPSVFLFPPKPKDTLMISRTPEVTCVVVDVKHEDPEVKFNWYVDGVEVHNAKTKPREEEYNSTYRVVSVLTVLHQDWLNGKEYKCKVSNKALPAPIEKTISKAKGQPREPQVYTLPPSREEMTKNQVSLTCDVSGFYPSDIAVEWESDGQPENNYKTTPPVLDSDGSFFLYSKLTVDKSRWEQGDVFSCSVMHEALHNHYTQKSLSLSPGK

SEQ ID NO: 23582 - protein, 121 aa, synthetic construct
  REGION 1..121: note = Description of Artificial Sequence: Synthetic polypeptide
  REGION 1..121: note = VH of XENP020522
EVKLEESGGGLVQPGGSMKLSCAASGFTFSDAWMDWVRQSPEKGLEWVAEIRTKAGNHATYYAESVKGRFTISRDDSKSSVYLQMNSLRAEDTGIYYCTRLANWDWYFDVWGAGTTVTVSS

SEQ ID NO: 23583 - protein, 5 aa, synthetic construct
  REGION 1..5: note = Description of Artificial Sequence: Synthetic peptide
  REGION 1..5: note = XENP020522 vhCDR1
DAWMD

SEQ ID NO: 23584 - protein, 19 aa, synthetic construct
  REGION 1..19: note = Description of Artificial Sequence: Synthetic peptide
  REGION 1..19: note = XENP020522 vhCDR2
EIRTKAGNHATYYAESVKG

SEQ ID NO: 23585 - protein, 10 aa, synthetic construct
  REGION 1..10: note = Description of Artificial Sequence: Synthetic peptide
  REGION 1..10: note = XENP020522 vhCDR3
LANWDWYFDV

SEQ ID NO: 23586 - protein, 218 aa, synthetic construct; identical to SEQ ID NO: 22266
  REGION 1..218: note = Description of Artificial Sequence: Synthetic polypeptide
  REGION 1..218: note = XENP020522 7G8_H0.70_L0_IgG1_PVA_/S267K Light Chain

SEQ ID NO: 23587 - protein, 111 aa, synthetic construct; identical to SEQ ID NO: 22267
  REGION 1..111: note = Description of Artificial Sequence: Synthetic polypeptide
  REGION 1..111: note = VL of XENP020522

SEQ ID NO: 23588 - protein, 15 aa, synthetic construct
  REGION 1..15: note = Description of Artificial Sequence: Synthetic peptide
  REGION 1..15: note = XENP020522 vlCDR1
KASQSVDYDGDSYMN

SEQ ID NO: 23589 - protein, 7 aa, synthetic construct
  REGION 1..7: note = Description of Artificial Sequence: Synthetic peptide
  REGION 1..7: note = XENP020522 vlCDR2
AASNLES

SEQ ID NO: 23590 - protein, 9 aa, synthetic construct
  REGION 1..9: note = Description of Artificial Sequence: Synthetic peptide
  REGION 1..9: note = XENP020522 vlCDR3
QQSNEDPFT

SEQ ID NO: 23591 - protein, 450 aa, synthetic construct
  REGION 1..450: note = Description of Artificial Sequence: Synthetic polypeptide
  REGION 1..450: note = XENP020523 7G8_H0.71_L0_IgG1_PVA_/S267K Heavy Chain
EVKLEESGGGLVQPGGSMKLSCAASGFTFSDAWMDWVRQSPEKGLEWVAEIRTKAYNHATYYAESVKGRFTISRDDSKSSVYLQMNSLRAEDTGIYYCTRLANWDWYFDVWGAGTTVTVSSASTKGPSVFPLAPSSKSTSGGTAALGCLVKDYFPEPVTVSWNSGALTSGVHTFPAVLQSSGLYSLSSVVTVPSSSLGTQTYICNVNHKPSDTKVDKKVEPKSCDKTHTCPPCPAPPVAGPSVFLFPPKPKDTLMISRTPEVTCVVVDVKHEDPEVKFNWYVDGVEVHNAKTKPREEEYNSTYRVVSVLTVLHQDWLNGKEYKCKVSNKALPAPIEKTISKAKGQPREPQVYTLPPSREEMTKNQVSLTCDVSGFYPSDIAVEWESDGQPENNYKTTPPVLDSDGSFFLYSKLTVDKSRWEQGDVFSCSVMHEALHNHYTQKSLSLSPGK

SEQ ID NO: 23592 - protein, 121 aa, synthetic construct
  REGION 1..121: note = Description of Artificial Sequence: Synthetic polypeptide
  REGION 1..121: note = VH of XENP020523
EVKLEESGGGLVQPGGSMKLSCAASGFTFSDAWMDWVRQSPEKGLEWVAEIRTKAYNHATYYAESVKGRFTISRDDSKSSVYLQMNSLRAEDTGIYYCTRLANWDWYFDVWGAGTTVTVSS

SEQ ID NO: 23593 - protein, 5 aa, synthetic construct
  REGION 1..5: note = Description of Artificial Sequence: Synthetic peptide
  REGION 1..5: note = XENP020523 vhCDR1
DAWMD

SEQ ID NO: 23594 - protein, 19 aa, synthetic construct
  REGION 1..19: note = Description of Artificial Sequence: Synthetic peptide
  REGION 1..19: note = XENP020523 vhCDR2
EIRTKAYNHATYYAESVKG

SEQ ID NO: 23595 - protein, 10 aa, synthetic construct
  REGION 1..10: note = Description of Artificial Sequence: Synthetic peptide
  REGION 1..10: note = XENP020523 vhCDR3
LANWDWYFDV

SEQ ID NO: 23596 - protein, 218 aa, synthetic construct; identical to SEQ ID NO: 22266
  REGION 1..218: note = Description of Artificial Sequence: Synthetic polypeptide
  REGION 1..218: note = XENP020523 7G8_H0.71_L0_IgG1_PVA_/S267K Light Chain

SEQ ID NO: 23597 - protein, 111 aa, synthetic construct; identical to SEQ ID NO: 22267
  REGION 1..111: note = Description of Artificial Sequence: Synthetic polypeptide
  REGION 1..111: note = VL of XENP020523

SEQ ID NO: 23598 - protein, 15 aa, synthetic construct
  REGION 1..15: note = Description of Artificial Sequence: Synthetic peptide
  REGION 1..15: note = XENP020523 vlCDR1
KASQSVDYDGDSYMN

SEQ ID NO: 23599 - protein, 7 aa, synthetic construct
  REGION 1..7: note = Description of Artificial Sequence: Synthetic peptide
  REGION 1..7: note = XENP020523 vlCDR2
AASNLES

SEQ ID NO: 23600 - protein, 9 aa, synthetic construct
  REGION 1..9: note = Description of Artificial Sequence: Synthetic peptide
  REGION 1..9: note = XENP020523 vlCDR3
QQSNEDPFT

SEQ ID NO: 23601 - protein, 450 aa, synthetic construct
  REGION 1..450: note = Description of Artificial Sequence: Synthetic polypeptide
  REGION 1..450: note = XENP020524 7G8_H0.72_L0_IgG1_PVA_/S267K Heavy Chain
EVKLEESGGGLVQPGGSMKLSCAASGFTFSDAWMDWVRQSPEKGLEWVAEIRTKANDHATYYAESVKGRFTISRDDSKSSVYLQMNSLRAEDTGIYYCTRLANWDWYFDVWGAGTTVTVSSASTKGPSVFPLAPSSKSTSGGTAALGCLVKDYFPEPVTVSWNSGALTSGVHTFPAVLQSSGLYSLSSVVTVPSSSLGTQTYICNVNHKPSDTKVDKKVEPKSCDKTHTCPPCPAPPVAGPSVFLFPPKPKDTLMISRTPEVTCVVVDVKHEDPEVKFNWYVDGVEVHNAKTKPREEEYNSTYRVVSVLTVLHQDWLNGKEYKCKVSNKALPAPIEKTISKAKGQPREPQVYTLPPSREEMTKNQVSLTCDVSGFYPSDIAVEWESDGQPENNYKTTPPVLDSDGSFFLYSKLTVDKSRWEQGDVFSCSVMHEALHNHYTQKSLSLSPGK

SEQ ID NO: 23602 - protein, 121 aa, synthetic construct
  REGION 1..121: note = Description of Artificial Sequence: Synthetic polypeptide
  REGION 1..121: note = VH of XENP020524
EVKLEESGGGLVQPGGSMKLSCAASGFTFSDAWMDWVRQSPEKGLEWVAEIRTKANDHATYYAESVKGRFTISRDDSKSSVYLQMNSLRAEDTGIYYCTRLANWDWYFDVWGAGTTVTVSS

SEQ ID NO: 23603 - protein, 5 aa, synthetic construct
  REGION 1..5: note = Description of Artificial Sequence: Synthetic peptide
  REGION 1..5: note = XENP020524 vhCDR1
DAWMD

SEQ ID NO: 23604 - protein, 19 aa, synthetic construct
  REGION 1..19: note = Description of Artificial Sequence: Synthetic peptide
  REGION 1..19: note = XENP020524 vhCDR2
EIRTKANDHATYYAESVKG

SEQ ID NO: 23605 - protein, 10 aa, synthetic construct
  REGION 1..10: note = Description of Artificial Sequence: Synthetic peptide
  REGION 1..10: note = XENP020524 vhCDR3
LANWDWYFDV

SEQ ID NO: 23606 - protein, 218 aa, synthetic construct; identical to SEQ ID NO: 22266
  REGION 1..218: note = Description of Artificial Sequence: Synthetic polypeptide
  REGION 1..218: note = XENP020524 7G8_H0.72_L0_IgG1_PVA_/S267K Light Chain

SEQ ID NO: 23607 - protein, 111 aa, synthetic construct; identical to SEQ ID NO: 22267
  REGION 1..111: note = Description of Artificial Sequence: Synthetic polypeptide
  REGION 1..111: note = VL of XENP020524

SEQ ID NO: 23608 - protein, 15 aa, synthetic construct
  REGION 1..15: note = Description of Artificial Sequence: Synthetic peptide
  REGION 1..15: note = XENP020524 vlCDR1
KASQSVDYDGDSYMN

SEQ ID NO: 23609 - protein, 7 aa, synthetic construct
  REGION 1..7: note = Description of Artificial Sequence: Synthetic peptide
  REGION 1..7: note = XENP020524 vlCDR2
AASNLES

SEQ ID NO: 23610 - protein, 9 aa, synthetic construct
  REGION 1..9: note = Description of Artificial Sequence: Synthetic peptide
  REGION 1..9: note = XENP020524 vlCDR3
QQSNEDPFT

SEQ ID NO: 23611 - protein, 450 aa, synthetic construct
  REGION 1..450: note = Description of Artificial Sequence: Synthetic polypeptide
  REGION 1..450: note = XENP020525 7G8_H0.73_L0_IgG1_PVA_/S267K Heavy Chain
EVKLEESGGGLVQPGGSMKLSCAASGFTFSDAWMDWVRQSPEKGLEWVAEIRTKANHHATYYAESVKGRFTISRDDSKSSVYLQMNSLRAEDTGIYYCTRLANWDWYFDVWGAGTTVTVSSASTKGPSVFPLAPSSKSTSGGTAALGCLVKDYFPEPVTVSWNSGALTSGVHTFPAVLQSSGLYSLSSVVTVPSSSLGTQTYICNVNHKPSDTKVDKKVEPKSCDKTHTCPPCPAPPVAGPSVFLFPPKPKDTLMISRTPEVTCVVVDVKHEDPEVKFNWYVDGVEVHNAKTKPREEEYNSTYRVVSVLTVLHQDWLNGKEYKCKVSNKALPAPIEKTISKAKGQPREPQVYTLPPSREEMTKNQVSLTCDVSGFYPSDIAVEWESDGQPENNYKTTPPVLDSDGSFFLYSKLTVDKSRWEQGDVFSCSVMHEALHNHYTQKSLSLSPGK

SEQ ID NO: 23612 - protein, 121 aa, synthetic construct
  REGION 1..121: note = Description of Artificial Sequence: Synthetic polypeptide
  REGION 1..121: note = VH of XENP020525
EVKLEESGGGLVQPGGSMKLSCAASGFTFSDAWMDWVRQSPEKGLEWVAEIRTKANHHATYYAESVKGRFTISRDDSKSSVYLQMNSLRAEDTGIYYCTRLANWDWYFDVWGAGTTVTVSS

SEQ ID NO: 23613 - protein, 5 aa, synthetic construct
  REGION 1..5: note = Description of Artificial Sequence: Synthetic peptide
  REGION 1..5: note = XENP020525 vhCDR1
DAWMD

SEQ ID NO: 23614 - protein, 19 aa, synthetic construct
  REGION 1..19: note = Description of Artificial Sequence: Synthetic peptide
  REGION 1..19: note = XENP020525 vhCDR2
EIRTKANHHATYYAESVKG

SEQ ID NO: 23615 - protein, 10 aa, synthetic construct
  REGION 1..10: note = Description of Artificial Sequence: Synthetic peptide
  REGION 1..10: note = XENP020525 vhCDR3
LANWDWYFDV

SEQ ID NO: 23616 - protein, 218 aa, synthetic construct; identical to SEQ ID NO: 22266
  REGION 1..218: note = Description of Artificial Sequence: Synthetic polypeptide
  REGION 1..218: note = XENP020525 7G8_H0.73_L0_IgG1_PVA_/S267K Light Chain

SEQ ID NO: 23617 - protein, 111 aa, synthetic construct; identical to SEQ ID NO: 22267
  REGION 1..111: note = Description of Artificial Sequence: Synthetic polypeptide
  REGION 1..111: note = VL of XENP020525

SEQ ID NO: 23618 - protein, 15 aa, synthetic construct
  REGION 1..15: note = Description of Artificial Sequence: Synthetic peptide
  REGION 1..15: note = XENP020525 vlCDR1
KASQSVDYDGDSYMN

SEQ ID NO: 23619 - protein, 7 aa, synthetic construct
  REGION 1..7: note = Description of Artificial Sequence: Synthetic peptide
  REGION 1..7: note = XENP020525 vlCDR2
AASNLES

SEQ ID NO: 23620 - protein, 9 aa, synthetic construct
  REGION 1..9: note = Description of Artificial Sequence: Synthetic peptide
  REGION 1..9: note = XENP020525 vlCDR3
QQSNEDPFT

SEQ ID NO: 23621 - protein, 450 aa, synthetic construct
  REGION 1..450: note = Description of Artificial Sequence: Synthetic polypeptide
  REGION 1..450: note = XENP020526 7G8_H0.74_L0_IgG1_PVA_/S267K Heavy Chain
EVKLEESGGGLVQPGGSMKLSCAASGFTFSDAWMDWVRQSPEKGLEWVAEIRTKANEHATYYAESVKGRFTISRDDSKSSVYLQMNSLRAEDTGIYYCTRLANWDWYFDVWGAGTTVTVSSASTKGPSVFPLAPSSKSTSGGTAALGCLVKDYFPEPVTVSWNSGALTSGVHTFPAVLQSSGLYSLSSVVTVPSSSLGTQTYICNVNHKPSDTKVDKKVEPKSCDKTHTCPPCPAPPVAGPSVFLFPPKPKDTLMISRTPEVTCVVVDVKHEDPEVKFNWYVDGVEVHNAKTKPREEEYNSTYRVVSVLTVLHQDWLNGKEYKCKVSNKALPAPIEKTISKAKGQPREPQVYTLPPSREEMTKNQVSLTCDVSGFYPSDIAVEWESDGQPENNYKTTPPVLDSDGSFFLYSKLTVDKSRWEQGDVFSCSVMHEALHNHYTQKSLSLSPGK

SEQ ID NO: 23622 - protein, 121 aa, synthetic construct
  REGION 1..121: note = Description of Artificial Sequence: Synthetic polypeptide
  REGION 1..121: note = VH of XENP020526
EVKLEESGGGLVQPGGSMKLSCAASGFTFSDAWMDWVRQSPEKGLEWVAEIRTKANEHATYYAESVKGRFTISRDDSKSSVYLQMNSLRAEDTGIYYCTRLANWDWYFDVWGAGTTVTVSS

SEQ ID NO: 23623 - protein, 5 aa, synthetic construct
  REGION 1..5: note = Description of Artificial Sequence: Synthetic peptide
  REGION 1..5: note = XENP020526 vhCDR1
DAWMD

SEQ ID NO: 23624 - protein, 19 aa, synthetic construct
  REGION 1..19: note = Description of Artificial Sequence: Synthetic peptide
  REGION 1..19: note = XENP020526 vhCDR2
EIRTKANEHATYYAESVKG

SEQ ID NO: 23625 - protein, 10 aa, synthetic construct
  REGION 1..10: note = Description of Artificial Sequence: Synthetic peptide
  REGION 1..10: note = XENP020526 vhCDR3
LANWDWYFDV

SEQ ID NO: 23626 - protein, 218 aa, synthetic construct; identical to SEQ ID NO: 22266
  REGION 1..218: note = Description of Artificial Sequence: Synthetic polypeptide
  REGION 1..218: note = XENP020526 7G8_H0.74_L0_IgG1_PVA_/S267K Light Chain

SEQ ID NO: 23627 - protein, 111 aa, synthetic construct; identical to SEQ ID NO: 22267
  REGION 1..111: note = Description of Artificial Sequence: Synthetic polypeptide
  REGION 1..111: note = VL of XENP020526

SEQ ID NO: 23628 - protein, 15 aa, synthetic construct
  REGION 1..15: note = Description of Artificial Sequence: Synthetic peptide
  REGION 1..15: note = XENP020526 vlCDR1
KASQSVDYDGDSYMN

SEQ ID NO: 23629 - protein, 7 aa, synthetic construct
  REGION 1..7: note = Description of Artificial Sequence: Synthetic peptide
  REGION 1..7: note = XENP020526 vlCDR2
AASNLES

SEQ ID NO: 23630 - protein, 9 aa, synthetic construct
  REGION 1..9: note = Description of Artificial Sequence: Synthetic peptide
  REGION 1..9: note = XENP020526 vlCDR3
QQSNEDPFT

SEQ ID NO: 23631 - protein, 450 aa, synthetic construct
  REGION 1..450: note = Description of Artificial Sequence: Synthetic polypeptide
  REGION 1..450: note = XENP020527 7G8_H0.75_L0_IgG1_PVA_/S267K Heavy Chain
EVKLEESGGGLVQPGGSMKLSCAASGFTFSDAWMDWVRQSPEKGLEWVAEIRTKANSHATYYAESVKGRFTISRDDSKSSVYLQMNSLRAEDTGIYYCTRLANWDWYFDVWGAGTTVTVSSASTKGPSVFPLAPSSKSTSGGTAALGCLVKDYFPEPVTVSWNSGALTSGVHTFPAVLQSSGLYSLSSVVTVPSSSLGTQTYICNVNHKPSDTKVDKKVEPKSCDKTHTCPPCPAPPVAGPSVFLFPPKPKDTLMISRTPEVTCVVVDVKHEDPEVKFNWYVDGVEVHNAKTKPREEEYNSTYRVVSVLTVLHQDWLNGKEYKCKVSNKALPAPIEKTISKAKGQPREPQVYTLPPSREEMTKNQVSLTCDVSGFYPSDIAVEWESDGQPENNYKTTPPVLDSDGSFFLYSKLTVDKSRWEQGDVFSCSVMHEALHNHYTQKSLSLSPGK

SEQ ID NO: 23632 - protein, 121 aa, synthetic construct
  REGION 1..121: note = Description of Artificial Sequence: Synthetic polypeptide
  REGION 1..121: note = VH of XENP020527
EVKLEESGGGLVQPGGSMKLSCAASGFTFSDAWMDWVRQSPEKGLEWVAEIRTKANSHATYYAESVKGRFTISRDDSKSSVYLQMNSLRAEDTGIYYCTRLANWDWYFDVWGAGTTVTVSS

SEQ ID NO: 23633 - protein, 5 aa, synthetic construct
  REGION 1..5: note = Description of Artificial Sequence: Synthetic peptide
  REGION 1..5: note = XENP020527 vhCDR1
DAWMD

SEQ ID NO: 23634 - protein, 19 aa, synthetic construct
  REGION 1..19: note = Description of Artificial Sequence: Synthetic peptide
  REGION 1..19: note = XENP020527 vhCDR2
EIRTKANSHATYYAESVKG

SEQ ID NO: 23635 - protein, 10 aa, synthetic construct
  REGION 1..10: note = Description of Artificial Sequence: Synthetic peptide
  REGION 1..10: note = XENP020527 vhCDR3
LANWDWYFDV

SEQ ID NO: 23636 - protein, 218 aa, synthetic construct; identical to SEQ ID NO: 22266
  REGION 1..218: note = Description of Artificial Sequence: Synthetic polypeptide
  REGION 1..218: note = XENP020527 7G8_H0.75_L0_IgG1_PVA_/S267K Light Chain

SEQ ID NO: 23637 - protein, 111 aa, synthetic construct; identical to SEQ ID NO: 22267
  REGION 1..111: note = Description of Artificial Sequence: Synthetic polypeptide
  REGION 1..111: note = VL of XENP020527

SEQ ID NO: 23638 - protein, 15 aa, synthetic construct
  REGION 1..15: note = Description of Artificial Sequence: Synthetic peptide
  REGION 1..15: note = XENP020527 vlCDR1
KASQSVDYDGDSYMN

SEQ ID NO: 23639 - protein, 7 aa, synthetic construct
  REGION 1..7: note = Description of Artificial Sequence: Synthetic peptide
  REGION 1..7: note = XENP020527 vlCDR2
AASNLES

SEQ ID NO: 23640 - protein, 9 aa, synthetic construct
  REGION 1..9: note = Description of Artificial Sequence: Synthetic peptide
  REGION 1..9: note = XENP020527 vlCDR3
QQSNEDPFT

SEQ ID NO: 23641 - protein, 450 aa, synthetic construct
  REGION 1..450: note = Description of Artificial Sequence: Synthetic polypeptide
  REGION 1..450: note = XENP020528 7G8_H0.76_L0_IgG1_PVA_/S267K Heavy Chain
EVKLEESGGGLVQPGGSMKLSCAASGFTFSDAWMDWVRQSPEKGLEWVAEIRTKANRHATYYAESVKGRFTISRDDSKSSVYLQMNSLRAEDTGIYYCTRLANWDWYFDVWGAGTTVTVSSASTKGPSVFPLAPSSKSTSGGTAALGCLVKDYFPEPVTVSWNSGALTSGVHTFPAVLQSSGLYSLSSVVTVPSSSLGTQTYICNVNHKPSDTKVDKKVEPKSCDKTHTCPPCPAPPVAGPSVFLFPPKPKDTLMISRTPEVTCVVVDVKHEDPEVKFNWYVDGVEVHNAKTKPREEEYNSTYRVVSVLTVLHQDWLNGKEYKCKVSNKALPAPIEKTISKAKGQPREPQVYTLPPSREEMTKNQVSLTCDVSGFYPSDIAVEWESDGQPENNYKTTPPVLDSDGSFFLYSKLTVDKSRWEQGDVFSCSVMHEALHNHYTQKSLSLSPGK

SEQ ID NO: 23642 - protein, 121 aa, synthetic construct
  REGION 1..121: note = Description of Artificial Sequence: Synthetic polypeptide
  REGION 1..121: note = VH of XENP020528
EVKLEESGGGLVQPGGSMKLSCAASGFTFSDAWMDWVRQSPEKGLEWVAEIRTKANRHATYYAESVKGRFTISRDDSKSSVYLQMNSLRAEDTGIYYCTRLANWDWYFDVWGAGTTVTVSS

SEQ ID NO: 23643 - protein, 5 aa, synthetic construct
  REGION 1..5: note = Description of Artificial Sequence: Synthetic peptide
  REGION 1..5: note = XENP020528 vhCDR1
DAWMD

SEQ ID NO: 23644 - protein, 19 aa, synthetic construct
  REGION 1..19: note = Description of Artificial Sequence: Synthetic peptide
  REGION 1..19: note = XENP020528 vhCDR2
EIRTKANRHATYYAESVKG

SEQ ID NO: 23645 - protein, 10 aa, synthetic construct
  REGION 1..10: note = Description of Artificial Sequence: Synthetic peptide
  REGION 1..10: note = XENP020528 vhCDR3
LANWDWYFDV

SEQ ID NO: 23646 - protein, 218 aa, synthetic construct; identical to SEQ ID NO: 22266
  REGION 1..218: note = Description of Artificial Sequence: Synthetic polypeptide
  REGION 1..218: note = XENP020528 7G8_H0.76_L0_IgG1_PVA_/S267K Light Chain

SEQ ID NO: 23647 - protein, 111 aa, synthetic construct; identical to SEQ ID NO: 22267
  REGION 1..111: note = Description of Artificial Sequence: Synthetic polypeptide
  REGION 1..111: note = VL of XENP020528

SEQ ID NO: 23648 - protein, 15 aa, synthetic construct
  REGION 1..15: note = Description of Artificial Sequence: Synthetic peptide
  REGION 1..15: note = XENP020528 vlCDR1
KASQSVDYDGDSYMN

SEQ ID NO: 23649 - protein, 7 aa, synthetic construct
  REGION 1..7: note = Description of Artificial Sequence: Synthetic peptide
  REGION 1..7: note = XENP020528 vlCDR2
AASNLES

SEQ ID NO: 23650 - protein, 9 aa, synthetic construct
  REGION 1..9: note = Description of Artificial Sequence: Synthetic peptide
  REGION 1..9: note = XENP020528 vlCDR3
QQSNEDPFT

SEQ ID NO: 23651 - protein, 450 aa, synthetic construct
  REGION 1..450: note = Description of Artificial Sequence: Synthetic polypeptide
  REGION 1..450: note = XENP020529 7G8_H0.77_L0_IgG1_PVA_/S267K Heavy Chain
EVKLEESGGGLVQPGGSMKLSCAASGFTFSDAWMDWVRQSPEKGLEWVAEIRTKANLHATYYAESVKGRFTISRDDSKSSVYLQMNSLRAEDTGIYYCTRLANWDWYFDVWGAGTTVTVSSASTKGPSVFPLAPSSKSTSGGTAALGCLVKDYFPEPVTVSWNSGALTSGVHTFPAVLQSSGLYSLSSVVTVPSSSLGTQTYICNVNHKPSDTKVDKKVEPKSCDKTHTCPPCPAPPVAGPSVFLFPPKPKDTLMISRTPEVTCVVVDVKHEDPEVKFNWYVDGVEVHNAKTKPREEEYNSTYRVVSVLTVLHQDWLNGKEYKCKVSNKALPAPIEKTISKAKGQPREPQVYTLPPSREEMTKNQVSLTCDVSGFYPSDIAVEWESDGQPENNYKTTPPVLDSDGSFFLYSKLTVDKSRWEQGDVFSCSVMHEALHNHYTQKSLSLSPGK

SEQ ID NO: 23652 - protein, 121 aa, synthetic construct
  REGION 1..121: note = Description of Artificial Sequence: Synthetic polypeptide
  REGION 1..121: note = VH of XENP020529
EVKLEESGGGLVQPGGSMKLSCAASGFTFSDAWMDWVRQSPEKGLEWVAEIRTKANLHATYYAESVKGRFTISRDDSKSSVYLQMNSLRAEDTGIYYCTRLANWDWYFDVWGAGTTVTVSS

SEQ ID NO: 23653 - protein, 5 aa, synthetic construct
  REGION 1..5: note = Description of Artificial Sequence: Synthetic peptide
  REGION 1..5: note = XENP020529 vhCDR1
DAWMD

SEQ ID NO: 23654 - protein, 19 aa, synthetic construct
  REGION 1..19: note = Description of Artificial Sequence: Synthetic peptide
  REGION 1..19: note = XENP020529 vhCDR2
EIRTKANLHATYYAESVKG

SEQ ID NO: 23655 - protein, 10 aa, synthetic construct
  REGION 1..10: note = Description of Artificial Sequence: Synthetic peptide
  REGION 1..10: note = XENP020529 vhCDR3
LANWDWYFDV

SEQ ID NO: 23656 - protein, 218 aa, synthetic construct; identical to SEQ ID NO: 22266
  REGION 1..218: note = Description of Artificial Sequence: Synthetic polypeptide
  REGION 1..218: note = XENP020529 7G8_H0.77_L0_IgG1_PVA_/S267K Light Chain

SEQ ID NO: 23657 - protein, 111 aa, synthetic construct; identical to SEQ ID NO: 22267
  REGION 1..111: note = Description of Artificial Sequence: Synthetic polypeptide
  REGION 1..111: note = VL of XENP020529

SEQ ID NO: 23658 - protein, 15 aa, synthetic construct
  REGION 1..15: note = Description of Artificial Sequence: Synthetic peptide
  REGION 1..15: note = XENP020529 vlCDR1
KASQSVDYDGDSYMN

SEQ ID NO: 23659 - protein, 7 aa, synthetic construct
  REGION 1..7: note = Description of Artificial Sequence: Synthetic peptide
  REGION 1..7: note = XENP020529 vlCDR2
AASNLES

SEQ ID NO: 23660 - protein, 9 aa, synthetic construct
  REGION 1..9: note = Description of Artificial Sequence: Synthetic peptide
  REGION 1..9: note = XENP020529 vlCDR3
QQSNEDPFT

SEQ ID NO: 23661 - protein, 450 aa, synthetic construct
  REGION 1..450: note = Description of Artificial Sequence: Synthetic polypeptide
  REGION 1..450: note = XENP020530 7G8_H0.78_L0_IgG1_PVA_/S267K Heavy Chain
EVKLEESGGGLVQPGGSMKLSCAASGFTFSDAWMDWVRQSPEKGLEWVAEIRTKANTHATYYAESVKGRFTISRDDSKSSVYLQMNSLRAEDTGIYYCTRLANWDWYFDVWGAGTTVTVSSASTKGPSVFPLAPSSKSTSGGTAALGCLVKDYFPEPVTVSWNSGALTSGVHTFPAVLQSSGLYSLSSVVTVPSSSLGTQTYICNVNHKPSDTKVDKKVEPKSCDKTHTCPPCPAPPVAGPSVFLFPPKPKDTLMISRTPEVTCVVVDVKHEDPEVKFNWYVDGVEVHNAKTKPREEEYNSTYRVVSVLTVLHQDWLNGKEYKCKVSNKALPAPIEKTISKAKGQPREPQVYTLPPSREEMTKNQVSLTCDVSGFYPSDIAVEWESDGQPENNYKTTPPVLDSDGSFFLYSKLTVDKSRWEQGDVFSCSVMHEALHNHYTQKSLSLSPGK

SEQ ID NO: 23662 - protein, 121 aa, synthetic construct
  REGION 1..121: note = Description of Artificial Sequence: Synthetic polypeptide
  REGION 1..121: note = VH of XENP020530
EVKLEESGGGLVQPGGSMKLSCAASGFTFSDAWMDWVRQSPEKGLEWVAEIRTKANTHATYYAESVKGRFTISRDDSKSSVYLQMNSLRAEDTGIYYCTRLANWDWYFDVWGAGTTVTVSS

SEQ ID NO: 23663 - protein, 5 aa, synthetic construct
  REGION 1..5: note = Description of Artificial Sequence: Synthetic peptide
  REGION 1..5: note = XENP020530 vhCDR1
DAWMD

SEQ ID NO: 23664 - protein, 19 aa, synthetic construct
  REGION 1..19: note = Description of Artificial Sequence: Synthetic peptide
  REGION 1..19: note = XENP020530 vhCDR2
EIRTKANTHATYYAESVKG

SEQ ID NO: 23665 - protein, 10 aa, synthetic construct
  REGION 1..10: note = Description of Artificial Sequence: Synthetic peptide
  REGION 1..10: note = XENP020530 vhCDR3
LANWDWYFDV

SEQ ID NO: 23666 - protein, 218 aa, synthetic construct; identical to SEQ ID NO: 22266
  REGION 1..218: note = Description of Artificial Sequence: Synthetic polypeptide
  REGION 1..218: note = XENP020530 7G8_H0.78_L0_IgG1_PVA_/S267K Light Chain

SEQ ID NO: 23667 - protein, 111 aa, synthetic construct; identical to SEQ ID NO: 22267
  REGION 1..111: note = Description of Artificial Sequence: Synthetic polypeptide
  REGION 1..111: note = VL of XENP020530

SEQ ID NO: 23668 - protein, 15 aa, synthetic construct
  REGION 1..15: note = Description of Artificial Sequence: Synthetic peptide
  REGION 1..15: note = XENP020530 vlCDR1
KASQSVDYDGDSYMN

SEQ ID NO: 23669 - protein, 7 aa, synthetic construct
  REGION 1..7: note = Description of Artificial Sequence: Synthetic peptide
  REGION 1..7: note = XENP020530 vlCDR2
AASNLES

SEQ ID NO: 23670 - protein, 9 aa, synthetic construct
  REGION 1..9: note = Description of Artificial Sequence: Synthetic peptide
  REGION 1..9: note = XENP020530 vlCDR3
QQSNEDPFT

SEQ ID NO: 23671 - protein, 450 aa, synthetic construct
  REGION 1..450: note = Description of Artificial Sequence: Synthetic polypeptide
  REGION 1..450: note = XENP020531 7G8_H0.79_L0_IgG1_PVA_/S267K Heavy Chain
EVKLEESGGGLVQPGGSMKLSCAASGFTFSDAWMDWVRQSPEKGLEWVAEIRTKANGHATYYAESVKGRFTISRDDSKSSVYLQMNSLRAEDTGIYYCTRLANWDWYFDVWGAGTTVTVSSASTKGPSVFPLAPSSKSTSGGTAALGCLVKDYFPEPVTVSWNSGALTSGVHTFPAVLQSSGLYSLSSVVTVPSSSLGTQTYICNVNHKPSDTKVDKKVEPKSCDKTHTCPPCPAPPVAGPSVFLFPPKPKDTLMISRTPEVTCVVVDVKHEDPEVKFNWYVDGVEVHNAKTKPREEEYNSTYRVVSVLTVLHQDWLNGKEYKCKVSNKALPAPIEKTISKAKGQPREPQVYTLPPSREEMTKNQVSLTCDVSGFYPSDIAVEWESDGQPENNYKTTPPVLDSDGSFFLYSKLTVDKSRWEQGDVFSCSVMHEALHNHYTQKSLSLSPGK

SEQ ID NO: 23672 - protein, 121 aa, synthetic construct
  REGION 1..121: note = Description of Artificial Sequence: Synthetic polypeptide
  REGION 1..121: note = VH of XENP020531
EVKLEESGGGLVQPGGSMKLSCAASGFTFSDAWMDWVRQSPEKGLEWVAEIRTKANGHATYYAESVKGRFTISRDDSKSSVYLQMNSLRAEDTGIYYCTRLANWDWYFDVWGAGTTVTVSS

SEQ ID NO: 23673 - protein, 5 aa, synthetic construct
  REGION 1..5: note = Description of Artificial Sequence: Synthetic peptide
  REGION 1..5: note = XENP020531 vhCDR1
DAWMD

SEQ ID NO: 23674 - protein, 19 aa, synthetic construct
  REGION 1..19: note = Description of Artificial Sequence: Synthetic peptide
  REGION 1..19: note = XENP020531 vhCDR2
EIRTKANGHATYYAESVKG

SEQ ID NO: 23675 - protein, 10 aa, synthetic construct
  REGION 1..10: note = Description of Artificial Sequence: Synthetic peptide
  REGION 1..10: note = XENP020531 vhCDR3
LANWDWYFDV

SEQ ID NO: 23676 - protein, 218 aa, synthetic construct; identical to SEQ ID NO: 22266
  REGION 1..218: note = Description of Artificial Sequence: Synthetic polypeptide
  REGION 1..218: note = XENP020531 7G8_H0.79_L0_IgG1_PVA_/S267K Light Chain

SEQ ID NO: 23677 - protein, 111 aa, synthetic construct; identical to SEQ ID NO: 22267
  REGION 1..111: note = Description of Artificial Sequence: Synthetic polypeptide
  REGION 1..111: note = VL of XENP020531

SEQ ID NO: 23678 - protein, 15 aa, synthetic construct
  REGION 1..15: note = Description of Artificial Sequence: Synthetic peptide
  REGION 1..15: note = XENP020531 vlCDR1
KASQSVDYDGDSYMN

SEQ ID NO: 23679 - protein, 7 aa, synthetic construct
  REGION 1..7: note = Description of Artificial Sequence: Synthetic peptide
  REGION 1..7: note = XENP020531 vlCDR2
AASNLES

SEQ ID NO: 23680 - protein, 9 aa, synthetic construct
  REGION 1..9: note = Description of Artificial Sequence: Synthetic peptide
  REGION 1..9: note = XENP020531 vlCDR3
QQSNEDPFT

SEQ ID NO: 23681 - protein, 450 aa, synthetic construct
  REGION 1..450: note = Description of Artificial Sequence: Synthetic polypeptide
  REGION 1..450: note = XENP020532 7G8_H0.80_L0_IgG1_PVA_/S267K Heavy Chain
EVKLEESGGGLVQPGGSMKLSCAASGFTFSDAWMDWVRQSPEKGLEWVAEIRTKANYHATYYAESVKGRFTISRDDSKSSVYLQMNSLRAEDTGIYYCTRLANWDWYFDVWGAGTTVTVSSASTKGPSVFPLAPSSKSTSGGTAALGCLVKDYFPEPVTVSWNSGALTSGVHTFPAVLQSSGLYSLSSVVTVPSSSLGTQTYICNVNHKPSDTKVDKKVEPKSCDKTHTCPPCPAPPVAGPSVFLFPPKPKDTLMISRTPEVTCVVVDVKHEDPEVKFNWYVDGVEVHNAKTKPREEEYNSTYRVVSVLTVLHQDWLNGKEYKCKVSNKALPAPIEKTISKAKGQPREPQVYTLPPSREEMTKNQVSLTCDVSGFYPSDIAVEWESDGQPENNYKTTPPVLDSDGSFFLYSKLTVDKSRWEQGDVFSCSVMHEALHNHYTQKSLSLSPGK

SEQ ID NO: 23682 - protein, 121 aa, synthetic construct
  REGION 1..121: note = Description of Artificial Sequence: Synthetic polypeptide
  REGION 1..121: note = VH of XENP020532
EVKLEESGGGLVQPGGSMKLSCAASGFTFSDAWMDWVRQSPEKGLEWVAEIRTKANYHATYYAESVKGRFTISRDDSKSSVYLQMNSLRAEDTGIYYCTRLANWDWYFDVWGAGTTVTVSS

SEQ ID NO: 23683 - protein, 5 aa, synthetic construct
  REGION 1..5: note = Description of Artificial Sequence: Synthetic peptide
  REGION 1..5: note = XENP020532 vhCDR1
DAWMD

SEQ ID NO: 23684 - protein, 19 aa, synthetic construct
  REGION 1..19: note = Description of Artificial Sequence: Synthetic peptide
  REGION 1..19: note = XENP020532 vhCDR2
EIRTKANYHATYYAESVKG

SEQ ID NO: 23685 - protein, 10 aa, synthetic construct
  REGION 1..10: note = Description of Artificial Sequence: Synthetic peptide
  REGION 1..10: note = XENP020532 vhCDR3
LANWDWYFDV

SEQ ID NO: 23686 - protein, 218 aa, synthetic construct; identical to SEQ ID NO: 22266
  REGION 1..218: note = Description of Artificial Sequence: Synthetic polypeptide
  REGION 1..218: note = XENP020532 7G8_H0.80_L0_IgG1_PVA_/S267K Light Chain

SEQ ID NO: 23687 - protein, 111 aa, synthetic construct; identical to SEQ ID NO: 22267
  REGION 1..111: note = Description of Artificial Sequence: Synthetic polypeptide
  REGION 1..111: note = VL of XENP020532

SEQ ID NO: 23688 - protein, 15 aa, synthetic construct
  REGION 1..15: note = Description of Artificial Sequence: Synthetic peptide
  REGION 1..15: note = XENP020532 vlCDR1
KASQSVDYDGDSYMN

SEQ ID NO: 23689 - protein, 7 aa, synthetic construct
  REGION 1..7: note = Description of Artificial Sequence: Synthetic peptide
  REGION 1..7: note = XENP020532 vlCDR2
AASNLES

SEQ ID NO: 23690 - protein, 9 aa, synthetic construct
  REGION 1..9: note = Description of Artificial Sequence: Synthetic peptide
  REGION 1..9: note = XENP020532 vlCDR3
QQSNEDPFT

SEQ ID NO: 23691 - protein, 450 aa, synthetic construct
  REGION 1..450: note = Description of Artificial Sequence: Synthetic polypeptide
  REGION 1..450: note = XENP020533 7G8_H0.81_L0_IgG1_PVA_/S267K Heavy Chain
EVKLEESGGGLVQPGGSMKLSCAASGFTFSDAWMDWVRQSPEKGLEWVAEIRTKANNYATYYAESVKGRFTISRDDSKSSVYLQMNSLRAEDTGIYYCTRLANWDWYFDVWGAGTTVTVSSASTKGPSVFPLAPSSKSTSGGTAALGCLVKDYFPEPVTVSWNSGALTSGVHTFPAVLQSSGLYSLSSVVTVPSSSLGTQTYICNVNHKPSDTKVDKKVEPKSCDKTHTCPPCPAPPVAGPSVFLFPPKPKDTLMISRTPEVTCVVVDVKHEDPEVKFNWYVDGVEVHNAKTKPREEEYNSTYRVVSVLTVLHQDWLNGKEYKCKVSNKALPAPIEKTISKAKGQPREPQVYTLPPSREEMTKNQVSLTCDVSGFYPSDIAVEWESDGQPENNYKTTPPVLDSDGSFFLYSKLTVDKSRWEQGDVFSCSVMHEALHNHYTQKSLSLSPGK

SEQ ID NO: 23692 - protein, 121 aa, synthetic construct
  REGION 1..121: note = Description of Artificial Sequence: Synthetic polypeptide
  REGION 1..121: note = VH of XENP020533
EVKLEESGGGLVQPGGSMKLSCAASGFTFSDAWMDWVRQSPEKGLEWVAEIRTKANNYATYYAESVKGRFTISRDDSKSSVYLQMNSLRAEDTGIYYCTRLANWDWYFDVWGAGTTVTVSS

SEQ ID NO: 23693 - protein, 5 aa, synthetic construct
  REGION 1..5: note = Description of Artificial Sequence: Synthetic peptide
  REGION 1..5: note = XENP020533 vhCDR1
DAWMD

SEQ ID NO: 23694 - protein, 19 aa, synthetic construct
  REGION 1..19: note = Description of Artificial Sequence: Synthetic peptide
  REGION 1..19: note = XENP020533 vhCDR2
EIRTKANNYATYYAESVKG

SEQ ID NO: 23695 - protein, 10 aa, synthetic construct
  REGION 1..10: note = Description of Artificial Sequence: Synthetic peptide
  REGION 1..10: note = XENP020533 vhCDR3
LANWDWYFDV

SEQ ID NO: 23696 - protein, 218 aa, synthetic construct; identical to SEQ ID NO: 22266
  REGION 1..218: note = Description of Artificial Sequence: Synthetic polypeptide
  REGION 1..218: note = XENP020533 7G8_H0.81_L0_IgG1_PVA_/S267K Light Chain

SEQ ID NO: 23697 - protein, 111 aa, synthetic construct; identical to SEQ ID NO: 22267
  REGION 1..111: note = Description of Artificial Sequence: Synthetic polypeptide
  REGION 1..111: note = VL of XENP020533

SEQ ID NO: 23698 - protein, 15 aa, synthetic construct
  REGION 1..15: note = Description of Artificial Sequence: Synthetic peptide
  REGION 1..15: note = XENP020533 vlCDR1
KASQSVDYDGDSYMN

SEQ ID NO: 23699 - protein, 7 aa, synthetic construct
  REGION 1..7: note = Description of Artificial Sequence: Synthetic peptide
  REGION 1..7: note = XENP020533 vlCDR2
AASNLES

SEQ ID NO: 23700 - protein, 9 aa, synthetic construct
  REGION 1..9: note = Description of Artificial Sequence: Synthetic peptide
  REGION 1..9: note = XENP020533 vlCDR3
QQSNEDPFT

SEQ ID NO: 23701 - protein, 450 aa, synthetic construct
  REGION 1..450: note = Description of Artificial Sequence: Synthetic polypeptide
  REGION 1..450: note = XENP020534 7G8_H0.82_L0_IgG1_PVA_/S267K Heavy Chain
EVKLEESGGGLVQPGGSMKLSCAASGFTFSDAWMDWVRQSPEKGLEWVAEIRTKANNQATYYAESVKGRFTISRDDSKSSVYLQMNSLRAEDTGIYYCTRLANWDWYFDVWGAGTTVTVSSASTKGPSVFPLAPSSKSTSGGTAALGCLVKDYFPEPVTVSWNSGALTSGVHTFPAVLQSSGLYSLSSVVTVPSSSLGTQTYICNVNHKPSDTKVDKKVEPKSCDKTHTCPPCPAPPVAGPSVFLFPPKPKDTLMISRTPEVTCVVVDVKHEDPEVKFNWYVDGVEVHNAKTKPREEEYNSTYRVVSVLTVLHQDWLNGKEYKCKVSNKALPAPIEKTISKAKGQPREPQVYTLPPSREEMTKNQVSLTCDVSGFYPSDIAVEWESDGQPENNYKTTPPVLDSDGSFFLYSKLTVDKSRWEQGDVFSCSVMHEALHNHYTQKSLSLSPGK

SEQ ID NO: 23702 - protein, 121 aa, synthetic construct
  REGION 1..121: note = Description of Artificial Sequence: Synthetic polypeptide
  REGION 1..121: note = VH of XENP020534
EVKLEESGGGLVQPGGSMKLSCAASGFTFSDAWMDWVRQSPEKGLEWVAEIRTKANNQATYYAESVKGRFTISRDDSKSSVYLQMNSLRAEDTGIYYCTRLANWDWYFDVWGAGTTVTVSS

SEQ ID NO: 23703 - protein, 5 aa, synthetic construct
  REGION 1..5: note = Description of Artificial Sequence: Synthetic peptide
  REGION 1..5: note = XENP020534 vhCDR1
DAWMD

SEQ ID NO: 23704 - protein, 19 aa, synthetic construct
  REGION 1..19: note = Description of Artificial Sequence: Synthetic peptide
  REGION 1..19: note = XENP020534 vhCDR2
EIRTKANNQATYYAESVKG

SEQ ID NO: 23705 - protein, 10 aa, synthetic construct
  REGION 1..10: note = Description of Artificial Sequence: Synthetic peptide
  REGION 1..10: note = XENP020534 vhCDR3
LANWDWYFDV

SEQ ID NO: 23706 - protein, 218 aa, synthetic construct; identical to SEQ ID NO: 22266
  REGION 1..218: note = Description of Artificial Sequence: Synthetic polypeptide
  REGION 1..218: note = XENP020534 7G8_H0.82_L0_IgG1_PVA_/S267K Light Chain

SEQ ID NO: 23707 - protein, 111 aa, synthetic construct; identical to SEQ ID NO: 22267
  REGION 1..111: note = Description of Artificial Sequence: Synthetic polypeptide
  REGION 1..111: note = VL of XENP020534

SEQ ID NO: 23708 - protein, 15 aa, synthetic construct
  REGION 1..15: note = Description of Artificial Sequence: Synthetic peptide
  REGION 1..15: note = XENP020534 vlCDR1
KASQSVDYDGDSYMN

SEQ ID NO: 23709 - protein, 7 aa, synthetic construct
  REGION 1..7: note = Description of Artificial Sequence: Synthetic peptide
  REGION 1..7: note = XENP020534 vlCDR2
AASNLES

SEQ ID NO: 23710 - protein, 9 aa, synthetic construct
  REGION 1..9: note = Description of Artificial Sequence: Synthetic peptide
  REGION 1..9: note = XENP020534 vlCDR3
QQSNEDPFT

SEQ ID NO: 23711 - protein, 450 aa, synthetic construct
  REGION 1..450: note = Description of Artificial Sequence: Synthetic polypeptide
  REGION 1..450: note = XENP020535 7G8_H0.83_L0_IgG1_PVA_/S267K Heavy Chain
EVKLEESGGGLVQPGGSMKLSCAASGFTFSDAWMDWVRQSPEKGLEWVAEIRTKANNDATYYAESVKGRFTISRDDSKSSVYLQMNSLRAEDTGIYYCTRLANWDWYFDVWGAGTTVTVSSASTKGPSVFPLAPSSKSTSGGTAALGCLVKDYFPEPVTVSWNSGALTSGVHTFPAVLQSSGLYSLSSVVTVPSSSLGTQTYICNVNHKPSDTKVDKKVEPKSCDKTHTCPPCPAPPVAGPSVFLFPPKPKDTLMISRTPEVTCVVVDVKHEDPEVKFNWYVDGVEVHNAKTKPREEEYNSTYRVVSVLTVLHQDWLNGKEYKCKVSNKALPAPIEKTISKAKGQPREPQVYTLPPSREEMTKNQVSLTCDVSGFYPSDIAVEWESDGQPENNYKTTPPVLDSDGSFFLYSKLTVDKSRWEQGDVFSCSVMHEALHNHYTQKSLSLSPGK

SEQ ID NO: 23712 - protein, 121 aa, synthetic construct
  REGION 1..121: note = Description of Artificial Sequence: Synthetic polypeptide
  REGION 1..121: note = VH of XENP020535
EVKLEESGGGLVQPGGSMKLSCAASGFTFSDAWMDWVRQSPEKGLEWVAEIRTKANNDATYYAESVKGRFTISRDDSKSSVYLQMNSLRAEDTGIYYCTRLANWDWYFDVWGAGTTVTVSS

SEQ ID NO: 23713 - protein, 5 aa, synthetic construct
  REGION 1..5: note = Description of Artificial Sequence: Synthetic peptide
  REGION 1..5: note = XENP020535 vhCDR1
DAWMD

SEQ ID NO: 23714 - protein, 19 aa, synthetic construct
  REGION 1..19: note = Description of Artificial Sequence: Synthetic peptide
  REGION 1..19: note = XENP020535 vhCDR2
EIRTKANNDATYYAESVKG

SEQ ID NO: 23715 - protein, 10 aa, synthetic construct
  REGION 1..10: note = Description of Artificial Sequence: Synthetic peptide
  REGION 1..10: note = XENP020535 vhCDR3
LANWDWYFDV

SEQ ID NO: 23716 - protein, 218 aa, synthetic construct; identical to SEQ ID NO: 22266
  REGION 1..218: note = Description of Artificial Sequence: Synthetic polypeptide
  REGION 1..218: note = XENP020535 7G8_H0.83_L0_IgG1_PVA_/S267K Light Chain

SEQ ID NO: 23717 - protein, 111 aa, synthetic construct; identical to SEQ ID NO: 22267
  REGION 1..111: note = Description of Artificial Sequence: Synthetic polypeptide
  REGION 1..111: note = VL of XENP020535

SEQ ID NO: 23718 - protein, 15 aa, synthetic construct
  REGION 1..15: note = Description of Artificial Sequence: Synthetic peptide
  REGION 1..15: note = XENP020535 vlCDR1
KASQSVDYDGDSYMN

SEQ ID NO: 23719 - protein, 7 aa, synthetic construct
  REGION 1..7: note = Description of Artificial Sequence: Synthetic peptide
  REGION 1..7: note = XENP020535 vlCDR2
AASNLES

SEQ ID NO: 23720 - protein, 9 aa, synthetic construct
  REGION 1..9: note = Description of Artificial Sequence: Synthetic peptide
  REGION 1..9: note = XENP020535 vlCDR3
QQSNEDPFT

SEQ ID NO: 23721 - protein, 450 aa, synthetic construct
  REGION 1..450: note = Description of Artificial Sequence: Synthetic polypeptide
  REGION 1..450: note = XENP020536 7G8_H0.84_L0_IgG1_PVA_/S267K Heavy Chain
EVKLEESGGGLVQPGGSMKLSCAASGFTFSDAWMDWVRQSPEKGLEWVAEIRTKANNFATYYAESVKGRFTISRDDSKSSVYLQMNSLRAEDTGIYYCTRLANWDWYFDVWGAGTTVTVSSASTKGPSVFPLAPSSKSTSGGTAALGCLVKDYFPEPVTVSWNSGALTSGVHTFPAVLQSSGLYSLSSVVTVPSSSLGTQTYICNVNHKPSDTKVDKKVEPKSCDKTHTCPPCPAPPVAGPSVFLFPPKPKDTLMISRTPEVTCVVVDVKHEDPEVKFNWYVDGVEVHNAKTKPREEEYNSTYRVVSVLTVLHQDWLNGKEYKCKVSNKALPAPIEKTISKAKGQPREPQVYTLPPSREEMTKNQVSLTCDVSGFYPSDIAVEWESDGQPENNYKTTPPVLDSDGSFFLYSKLTVDKSRWEQGDVFSCSVMHEALHNHYTQKSLSLSPGK

SEQ ID NO: 23722 - protein, 121 aa, synthetic construct
  REGION 1..121: note = Description of Artificial Sequence: Synthetic polypeptide
  REGION 1..121: note = VH of XENP020536
EVKLEESGGGLVQPGGSMKLSCAASGFTFSDAWMDWVRQSPEKGLEWVAEIRTKANNFATYYAESVKGRFTISRDDSKSSVYLQMNSLRAEDTGIYYCTRLANWDWYFDVWGAGTTVTVSS

SEQ ID NO: 23723 - protein, 5 aa, synthetic construct
  REGION 1..5: note = Description of Artificial Sequence: Synthetic peptide
  REGION 1..5: note = XENP020536 vhCDR1
DAWMD

SEQ ID NO: 23724 - protein, 19 aa, synthetic construct
  REGION 1..19: note = Description of Artificial Sequence: Synthetic peptide
  REGION 1..19: note = XENP020536 vhCDR2
EIRTKANNFATYYAESVKG

SEQ ID NO: 23725 - protein, 10 aa, synthetic construct
  REGION 1..10: note = Description of Artificial Sequence: Synthetic peptide
  REGION 1..10: note = XENP020536 vhCDR3
LANWDWYFDV

SEQ ID NO: 23726 - protein, 218 aa, synthetic construct; identical to SEQ ID NO: 22266
  REGION 1..218: note = Description of Artificial Sequence: Synthetic polypeptide
  REGION 1..218: note = XENP020536 7G8_H0.84_L0_IgG1_PVA_/S267K Light Chain

SEQ ID NO: 23727 - protein, 111 aa, synthetic construct; identical to SEQ ID NO: 22267
  REGION 1..111: note = Description of Artificial Sequence: Synthetic polypeptide
  REGION 1..111: note = VL of XENP020536

SEQ ID NO: 23728 - protein, 15 aa, synthetic construct
  REGION 1..15: note = Description of Artificial Sequence: Synthetic peptide
  REGION 1..15: note = XENP020536 vlCDR1
KASQSVDYDGDSYMN

SEQ ID NO: 23729 - protein, 7 aa, synthetic construct
  REGION 1..7: note = Description of Artificial Sequence: Synthetic peptide
  REGION 1..7: note = XENP020536 vlCDR2
AASNLES

SEQ ID NO: 23730 - protein, 9 aa, synthetic construct
  REGION 1..9: note = Description of Artificial Sequence: Synthetic peptide
  REGION 1..9: note = XENP020536 vlCDR3
QQSNEDPFT

SEQ ID NO: 23731 - protein, 450 aa, synthetic construct
  REGION 1..450: note = Description of Artificial Sequence: Synthetic polypeptide
  REGION 1..450: note = XENP020537 7G8_H0.85_L0_IgG1_PVA_/S267K Heavy Chain
EVKLEESGGGLVQPGGSMKLSCAASGFTFSDAWMDWVRQSPEKGLEWVAEIRTKANNAATYYAESVKGRFTISRDDSKSSVYLQMNSLRAEDTGIYYCTRLANWDWYFDVWGAGTTVTVSSASTKGPSVFPLAPSSKSTSGGTAALGCLVKDYFPEPVTVSWNSGALTSGVHTFPAVLQSSGLYSLSSVVTVPSSSLGTQTYICNVNHKPSDTKVDKKVEPKSCDKTHTCPPCPAPPVAGPSVFLFPPKPKDTLMISRTPEVTCVVVDVKHEDPEVKFNWYVDGVEVHNAKTKPREEEYNSTYRVVSVLTVLHQDWLNGKEYKCKVSNKALPAPIEKTISKAKGQPREPQVYTLPPSREEMTKNQVSLTCDVSGFYPSDIAVEWESDGQPENNYKTTPPVLDSDGSFFLYSKLTVDKSRWEQGDVFSCSVMHEALHNHYTQKSLSLSPGK

SEQ ID NO: 23732 - protein, 121 aa, synthetic construct
  REGION 1..121: note = Description of Artificial Sequence: Synthetic polypeptide
  REGION 1..121: note = VH of XENP020537
EVKLEESGGGLVQPGGSMKLSCAASGFTFSDAWMDWVRQSPEKGLEWVAEIRTKANNAATYYAESVKGRFTISRDDSKSSVYLQMNSLRAEDTGIYYCTRLANWDWYFDVWGAGTTVTVSS

SEQ ID NO: 23733 - protein, 5 aa, synthetic construct
  REGION 1..5: note = Description of Artificial Sequence: Synthetic peptide
  REGION 1..5: note = XENP020537 vhCDR1
DAWMD

SEQ ID NO: 23734 - protein, 19 aa, synthetic construct
  REGION 1..19: note = Description of Artificial Sequence: Synthetic peptide
  REGION 1..19: note = XENP020537 vhCDR2
EIRTKANNAATYYAESVKG

SEQ ID NO: 23735 - protein, 10 aa, synthetic construct
  REGION 1..10: note = Description of Artificial Sequence: Synthetic peptide
  REGION 1..10: note = XENP020537 vhCDR3
LANWDWYFDV

SEQ ID NO: 23736 - protein, 218 aa, synthetic construct; identical to SEQ ID NO: 22266
  REGION 1..218: note = Description of Artificial Sequence: Synthetic polypeptide
  REGION 1..218: note = XENP020537 7G8_H0.85_L0_IgG1_PVA_/S267K Light Chain

SEQ ID NO: 23737 - protein, 111 aa, synthetic construct; identical to SEQ ID NO: 22267
  REGION 1..111: note = Description of Artificial Sequence: Synthetic polypeptide
  REGION 1..111: note = VL of XENP020537

SEQ ID NO: 23738 - protein, 15 aa, synthetic construct
  REGION 1..15: note = Description of Artificial Sequence: Synthetic peptide
  REGION 1..15: note = XENP020537 vlCDR1
KASQSVDYDGDSYMN

SEQ ID NO: 23739 - protein, 7 aa, synthetic construct
  REGION 1..7: note = Description of Artificial Sequence: Synthetic peptide
  REGION 1..7: note = XENP020537 vlCDR2
AASNLES

SEQ ID NO: 23740 - protein, 9 aa, synthetic construct
  REGION 1..9: note = Description of Artificial Sequence: Synthetic peptide
  REGION 1..9: note = XENP020537 vlCDR3
QQSNEDPFT

SEQ ID NO: 23741 - protein, 450 aa, synthetic construct
  REGION 1..450: note = Description of Artificial Sequence: Synthetic polypeptide
  REGION 1..450: note = XENP020538 7G8_H0.86_L0_IgG1_PVA_/S267K Heavy Chain
EVKLEESGGGLVQPGGSMKLSCAASGFTFSDAWMDWVRQSPEKGLEWVAEIRTKANNKATYYAESVKGRFTISRDDSKSSVYLQMNSLRAEDTGIYYCTRLANWDWYFDVWGAGTTVTVSSASTKGPSVFPLAPSSKSTSGGTAALGCLVKDYFPEPVTVSWNSGALTSGVHTFPAVLQSSGLYSLSSVVTVPSSSLGTQTYICNVNHKPSDTKVDKKVEPKSCDKTHTCPPCPAPPVAGPSVFLFPPKPKDTLMISRTPEVTCVVVDVKHEDPEVKFNWYVDGVEVHNAKTKPREEEYNSTYRVVSVLTVLHQDWLNGKEYKCKVSNKALPAPIEKTISKAKGQPREPQVYTLPPSREEMTKNQVSLTCDVSGFYPSDIAVEWESDGQPENNYKTTPPVLDSDGSFFLYSKLTVDKSRWEQGDVFSCSVMHEALHNHYTQKSLSLSPGK

SEQ ID NO: 23742 - protein, 121 aa, synthetic construct
  REGION 1..121: note = Description of Artificial Sequence: Synthetic polypeptide
  REGION 1..121: note = VH of XENP020538
EVKLEESGGGLVQPGGSMKLSCAASGFTFSDAWMDWVRQSPEKGLEWVAEIRTKANNKATYYAESVKGRFTISRDDSKSSVYLQMNSLRAEDTGIYYCTRLANWDWYFDVWGAGTTVTVSS

SEQ ID NO: 23743 - protein, 5 aa, synthetic construct
  REGION 1..5: note = Description of Artificial Sequence: Synthetic peptide
  REGION 1..5: note = XENP020538 vhCDR1
DAWMD

SEQ ID NO: 23744 - protein, 19 aa, synthetic construct
  REGION 1..19: note = Description of Artificial Sequence: Synthetic peptide
  REGION 1..19: note = XENP020538 vhCDR2
EIRTKANNKATYYAESVKG

SEQ ID NO: 23745 - protein, 10 aa, synthetic construct
  REGION 1..10: note = Description of Artificial Sequence: Synthetic peptide
  REGION 1..10: note = XENP020538 vhCDR3
LANWDWYFDV

SEQ ID NO: 23746 - protein, 218 aa, synthetic construct; identical to SEQ ID NO: 22266
  REGION 1..218: note = Description of Artificial Sequence: Synthetic polypeptide
  REGION 1..218: note = XENP020538 7G8_H0.86_L0_IgG1_PVA_/S267K Light Chain

SEQ ID NO: 23747 - protein, 111 aa, synthetic construct; identical to SEQ ID NO: 22267
  REGION 1..111: note = Description of Artificial Sequence: Synthetic polypeptide
  REGION 1..111: note = VL of XENP020538

SEQ ID NO: 23748 - protein, 15 aa, synthetic construct
  REGION 1..15: note = Description of Artificial Sequence: Synthetic peptide
  REGION 1..15: note = XENP020538 vlCDR1
KASQSVDYDGDSYMN

SEQ ID NO: 23749 - protein, 7 aa, synthetic construct
  REGION 1..7: note = Description of Artificial Sequence: Synthetic peptide
  REGION 1..7: note = XENP020538 vlCDR2
AASNLES

SEQ ID NO: 23750 - protein, 9 aa, synthetic construct
  REGION 1..9: note = Description of Artificial Sequence: Synthetic peptide
  REGION 1..9: note = XENP020538 vlCDR3
QQSNEDPFT

SEQ ID NO: 23751 - protein, 450 aa, synthetic construct
  REGION 1..450: note = Description of Artificial Sequence: Synthetic polypeptide
  REGION 1..450: note = XENP020539 7G8_H0.87_L0_IgG1_PVA_/S267K Heavy Chain
EVKLEESGGGLVQPGGSMKLSCAASGFTFSDAWMDWVRQSPEKGLEWVAEIRTKANNGATYYAESVKGRFTISRDDSKSSVYLQMNSLRAEDTGIYYCTRLANWDWYFDVWGAGTTVTVSSASTKGPSVFPLAPSSKSTSGGTAALGCLVKDYFPEPVTVSWNSGALTSGVHTFPAVLQSSGLYSLSSVVTVPSSSLGTQTYICNVNHKPSDTKVDKKVEPKSCDKTHTCPPCPAPPVAGPSVFLFPPKPKDTLMISRTPEVTCVVVDVKHEDPEVKFNWYVDGVEVHNAKTKPREEEYNSTYRVVSVLTVLHQDWLNGKEYKCKVSNKALPAPIEKTISKAKGQPREPQVYTLPPSREEMTKNQVSLTCDVSGFYPSDIAVEWESDGQPENNYKTTPPVLDSDGSFFLYSKLTVDKSRWEQGDVFSCSVMHEALHNHYTQKSLSLSPGK

SEQ ID NO: 23752 - protein, 121 aa, synthetic construct
  REGION 1..121: note = Description of Artificial Sequence: Synthetic polypeptide
  REGION 1..121: note = VH of XENP020539
EVKLEESGGGLVQPGGSMKLSCAASGFTFSDAWMDWVRQSPEKGLEWVAEIRTKANNGATYYAESVKGRFTISRDDSKSSVYLQMNSLRAEDTGIYYCTRLANWDWYFDVWGAGTTVTVSS

SEQ ID NO: 23753 - protein, 5 aa, synthetic construct
  REGION 1..5: note = Description of Artificial Sequence: Synthetic peptide
  REGION 1..5: note = XENP020539 vhCDR1
DAWMD

SEQ ID NO: 23754 - protein, 19 aa, synthetic construct
  REGION 1..19: note = Description of Artificial Sequence: Synthetic peptide
  REGION 1..19: note = XENP020539 vhCDR2
EIRTKANNGATYYAESVKG

SEQ ID NO: 23755 - protein, 10 aa, synthetic construct
  REGION 1..10: note = Description of Artificial Sequence: Synthetic peptide
  REGION 1..10: note = XENP020539 vhCDR3
LANWDWYFDV

SEQ ID NO: 23756 - protein, 218 aa, synthetic construct; identical to SEQ ID NO: 22266
  REGION 1..218: note = Description of Artificial Sequence: Synthetic polypeptide
  REGION 1..218: note = XENP020539 7G8_H0.87_L0_IgG1_PVA_/S267K Light Chain

SEQ ID NO: 23757 - protein, 111 aa, synthetic construct; identical to SEQ ID NO: 22267
  REGION 1..111: note = Description of Artificial Sequence: Synthetic polypeptide
  REGION 1..111: note = VL of XENP020539

SEQ ID NO: 23758 - protein, 15 aa, synthetic construct
  REGION 1..15: note = Description of Artificial Sequence: Synthetic peptide
  REGION 1..15: note = XENP020539 vlCDR1
KASQSVDYDGDSYMN

SEQ ID NO: 23759 - protein, 7 aa, synthetic construct
  REGION 1..7: note = Description of Artificial Sequence: Synthetic peptide
  REGION 1..7: note = XENP020539 vlCDR2
AASNLES

SEQ ID NO: 23760 - protein, 9 aa, synthetic construct
  REGION 1..9: note = Description of Artificial Sequence: Synthetic peptide
  REGION 1..9: note = XENP020539 vlCDR3
QQSNEDPFT

SEQ ID NO: 23761 - protein, 450 aa, synthetic construct
  REGION 1..450: note = Description of Artificial Sequence: Synthetic polypeptide
  REGION 1..450: note = XENP020540 7G8_H0.88_L0_IgG1_PVA_/S267K Heavy Chain
EVKLEESGGGLVQPGGSMKLSCAASGFTFSDAWMDWVRQSPEKGLEWVAEIRTKANNLATYYAESVKGRFTISRDDSKSSVYLQMNSLRAEDTGIYYCTRLANWDWYFDVWGAGTTVTVSSASTKGPSVFPLAPSSKSTSGGTAALGCLVKDYFPEPVTVSWNSGALTSGVHTFPAVLQSSGLYSLSSVVTVPSSSLGTQTYICNVNHKPSDTKVDKKVEPKSCDKTHTCPPCPAPPVAGPSVFLFPPKPKDTLMISRTPEVTCVVVDVKHEDPEVKFNWYVDGVEVHNAKTKPREEEYNSTYRVVSVLTVLHQDWLNGKEYKCKVSNKALPAPIEKTISKAKGQPREPQVYTLPPSREEMTKNQVSLTCDVSGFYPSDIAVEWESDGQPENNYKTTPPVLDSDGSFFLYSKLTVDKSRWEQGDVFSCSVMHEALHNHYTQKSLSLSPGK

SEQ ID NO: 23762 - protein, 121 aa, synthetic construct
  REGION 1..121: note = Description of Artificial Sequence: Synthetic polypeptide
  REGION 1..121: note = VH of XENP020540
EVKLEESGGGLVQPGGSMKLSCAASGFTFSDAWMDWVRQSPEKGLEWVAEIRTKANNLATYYAESVKGRFTISRDDSKSSVYLQMNSLRAEDTGIYYCTRLANWDWYFDVWGAGTTVTVSS

SEQ ID NO: 23763 - protein, 5 aa, synthetic construct
  REGION 1..5: note = Description of Artificial Sequence: Synthetic peptide
  REGION 1..5: note = XENP020540 vhCDR1
DAWMD

SEQ ID NO: 23764 - protein, 19 aa, synthetic construct
  REGION 1..19: note = Description of Artificial Sequence: Synthetic peptide
  REGION 1..19: note = XENP020540 vhCDR2
EIRTKANNLATYYAESVKG

SEQ ID NO: 23765 - protein, 10 aa, synthetic construct
  REGION 1..10: note = Description of Artificial Sequence: Synthetic peptide
  REGION 1..10: note = XENP020540 vhCDR3
LANWDWYFDV

SEQ ID NO: 23766 - protein, 218 aa, synthetic construct; identical to SEQ ID NO: 22266
  REGION 1..218: note = Description of Artificial Sequence: Synthetic polypeptide
  REGION 1..218: note = XENP020540 7G8_H0.88_L0_IgG1_PVA_/S267K Light Chain

SEQ ID NO: 23767 - protein, 111 aa, synthetic construct; identical to SEQ ID NO: 22267
  REGION 1..111: note = Description of Artificial Sequence: Synthetic polypeptide
  REGION 1..111: note = VL of XENP020540

SEQ ID NO: 23768 - protein, 15 aa, synthetic construct
  REGION 1..15: note = Description of Artificial Sequence: Synthetic peptide
  REGION 1..15: note = XENP020540 vlCDR1
KASQSVDYDGDSYMN

SEQ ID NO: 23769 - protein, 7 aa, synthetic construct
  REGION 1..7: note = Description of Artificial Sequence: Synthetic peptide
  REGION 1..7: note = XENP020540 vlCDR2
AASNLES

SEQ ID NO: 23770 - protein, 9 aa, synthetic construct
  REGION 1..9: note = Description of Artificial Sequence: Synthetic peptide
  REGION 1..9: note = XENP020540 vlCDR3
QQSNEDPFT

SEQ ID NO: 23771 - protein, 450 aa, synthetic construct
  REGION 1..450: note = Description of Artificial Sequence: Synthetic polypeptide
  REGION 1..450: note = XENP020541 7G8_H0.89_L0_IgG1_PVA_/S267K Heavy Chain
EVKLEESGGGLVQPGGSMKLSCAASGFTFSDAWMDWVRQSPEKGLEWVAEIRTKANNHGTYYAESVKGRFTISRDDSKSSVYLQMNSLRAEDTGIYYCTRLANWDWYFDVWGAGTTVTVSSASTKGPSVFPLAPSSKSTSGGTAALGCLVKDYFPEPVTVSWNSGALTSGVHTFPAVLQSSGLYSLSSVVTVPSSSLGTQTYICNVNHKPSDTKVDKKVEPKSCDKTHTCPPCPAPPVAGPSVFLFPPKPKDTLMISRTPEVTCVVVDVKHEDPEVKFNWYVDGVEVHNAKTKPREEEYNSTYRVVSVLTVLHQDWLNGKEYKCKVSNKALPAPIEKTISKAKGQPREPQVYTLPPSREEMTKNQVSLTCDVSGFYPSDIAVEWESDGQPENNYKTTPPVLDSDGSFFLYSKLTVDKSRWEQGDVFSCSVMHEALHNHYTQKSLSLSPGK

SEQ ID NO: 23772 - protein, 121 aa, synthetic construct
  REGION 1..121: note = Description of Artificial Sequence: Synthetic polypeptide
  REGION 1..121: note = VH of XENP020541
EVKLEESGGGLVQPGGSMKLSCAASGFTFSDAWMDWVRQSPEKGLEWVAEIRTKANNHGTYYAESVKGRFTISRDDSKSSVYLQMNSLRAEDTGIYYCTRLANWDWYFDVWGAGTTVTVSS

SEQ ID NO: 23773 - protein, 5 aa, synthetic construct
  REGION 1..5: note = Description of Artificial Sequence: Synthetic peptide
  REGION 1..5: note = XENP020541 vhCDR1
DAWMD

SEQ ID NO: 23774 - protein, 19 aa, synthetic construct
  REGION 1..19: note = Description of Artificial Sequence: Synthetic peptide
  REGION 1..19: note = XENP020541 vhCDR2
EIRTKANNHGTYYAESVKG

SEQ ID NO: 23775 - protein, 10 aa, synthetic construct
  REGION 1..10: note = Description of Artificial Sequence: Synthetic peptide
  REGION 1..10: note = XENP020541 vhCDR3
LANWDWYFDV

SEQ ID NO: 23776 - protein, 218 aa, synthetic construct; identical to SEQ ID NO: 22266
  REGION 1..218: note = Description of Artificial Sequence: Synthetic polypeptide
  REGION 1..218: note = XENP020541 7G8_H0.89_L0_IgG1_PVA_/S267K Light Chain

SEQ ID NO: 23777 - protein, 111 aa, synthetic construct; identical to SEQ ID NO: 22267
  REGION 1..111: note = Description of Artificial Sequence: Synthetic polypeptide
  REGION 1..111: note = VL of XENP020541

SEQ ID NO: 23778 - protein, 15 aa, synthetic construct
  REGION 1..15: note = Description of Artificial Sequence: Synthetic peptide
  REGION 1..15: note = XENP020541 vlCDR1
KASQSVDYDGDSYMN

SEQ ID NO: 23779 - protein, 7 aa, synthetic construct
  REGION 1..7: note = Description of Artificial Sequence: Synthetic peptide
  REGION 1..7: note = XENP020541 vlCDR2
AASNLES

SEQ ID NO: 23780 - protein, 9 aa, synthetic construct
  REGION 1..9: note = Description of Artificial Sequence: Synthetic peptide
  REGION 1..9: note = XENP020541 vlCDR3
QQSNEDPFT

SEQ ID NO: 23781 - protein, 450 aa, synthetic construct
  REGION 1..450: note = Description of Artificial Sequence: Synthetic polypeptide
  REGION 1..450: note = XENP020542 7G8_H0.90_L0_IgG1_PVA_/S267K Heavy Chain
EVKLEESGGGLVQPGGSMKLSCAASGFTFSDAWMDWVRQSPEKGLEWVAEIRTKANNHHTYYAESVKGRFTISRDDSKSSVYLQMNSLRAEDTGIYYCTRLANWDWYFDVWGAGTTVTVSSASTKGPSVFPLAPSSKSTSGGTAALGCLVKDYFPEPVTVSWNSGALTSGVHTFPAVLQSSGLYSLSSVVTVPSSSLGTQTYICNVNHKPSDTKVDKKVEPKSCDKTHTCPPCPAPPVAGPSVFLFPPKPKDTLMISRTPEVTCVVVDVKHEDPEVKFNWYVDGVEVHNAKTKPREEEYNSTYRVVSVLTVLHQDWLNGKEYKCKVSNKALPAPIEKTISKAKGQPREPQVYTLPPSREEMTKNQVSLTCDVSGFYPSDIAVEWESDGQPENNYKTTPPVLDSDGSFFLYSKLTVDKSRWEQGDVFSCSVMHEALHNHYTQKSLSLSPGK

SEQ ID NO: 23782 - protein, 121 aa, synthetic construct
  REGION 1..121: note = Description of Artificial Sequence: Synthetic polypeptide
  REGION 1..121: note = VH of XENP020542
EVKLEESGGGLVQPGGSMKLSCAASGFTFSDAWMDWVRQSPEKGLEWVAEIRTKANNHHTYYAESVKGRFTISRDDSKSSVYLQMNSLRAEDTGIYYCTRLANWDWYFDVWGAGTTVTVSS

SEQ ID NO: 23783 - protein, 5 aa, synthetic construct
  REGION 1..5: note = Description of Artificial Sequence: Synthetic peptide
  REGION 1..5: note = XENP020542 vhCDR1
DAWMD

SEQ ID NO: 23784 - protein, 19 aa, synthetic construct
  REGION 1..19: note = Description of Artificial Sequence: Synthetic peptide
  REGION 1..19: note = XENP020542 vhCDR2
EIRTKANNHHTYYAESVKG

SEQ ID NO: 23785 - protein, 10 aa, synthetic construct
  REGION 1..10: note = Description of Artificial Sequence: Synthetic peptide
  REGION 1..10: note = XENP020542 vhCDR3
LANWDWYFDV

SEQ ID NO: 23786 - protein, 218 aa, synthetic construct; identical to SEQ ID NO: 22266
  REGION 1..218: note = Description of Artificial Sequence: Synthetic polypeptide
  REGION 1..218: note = XENP020542 7G8_H0.90_L0_IgG1_PVA_/S267K Light Chain

SEQ ID NO: 23787 - protein, 111 aa, synthetic construct; identical to SEQ ID NO: 22267
  REGION 1..111: note = Description of Artificial Sequence: Synthetic polypeptide
  REGION 1..111: note = VL of XENP020542

SEQ ID NO: 23788 - protein, 15 aa, synthetic construct
  REGION 1..15: note = Description of Artificial Sequence: Synthetic peptide
  REGION 1..15: note = XENP020542 vlCDR1
KASQSVDYDGDSYMN

SEQ ID NO: 23789 - protein, 7 aa, synthetic construct
  REGION 1..7: note = Description of Artificial Sequence: Synthetic peptide
  REGION 1..7: note = XENP020542 vlCDR2
AASNLES

SEQ ID NO: 23790 - protein, 9 aa, synthetic construct
  REGION 1..9: note = Description of Artificial Sequence: Synthetic peptide
  REGION 1..9: note = XENP020542 vlCDR3
QQSNEDPFT

SEQ ID NO: 23791 - protein, 450 aa, synthetic construct
  REGION 1..450: note = Description of Artificial Sequence: Synthetic polypeptide
  REGION 1..450: note = XENP020543 7G8_H0.91_L0_IgG1_PVA_/S267K Heavy Chain
EVKLEESGGGLVQPGGSMKLSCAASGFTFSDAWMDWVRQSPEKGLEWVAEIRTKANNHQTYYAESVKGRFTISRDDSKSSVYLQMNSLRAEDTGIYYCTRLANWDWYFDVWGAGTTVTVSSASTKGPSVFPLAPSSKSTSGGTAALGCLVKDYFPEPVTVSWNSGALTSGVHTFPAVLQSSGLYSLSSVVTVPSSSLGTQTYICNVNHKPSDTKVDKKVEPKSCDKTHTCPPCPAPPVAGPSVFLFPPKPKDTLMISRTPEVTCVVVDVKHEDPEVKFNWYVDGVEVHNAKTKPREEEYNSTYRVVSVLTVLHQDWLNGKEYKCKVSNKALPAPIEKTISKAKGQPREPQVYTLPPSREEMTKNQVSLTCDVSGFYPSDIAVEWESDGQPENNYKTTPPVLDSDGSFFLYSKLTVDKSRWEQGDVFSCSVMHEALHNHYTQKSLSLSPGK

SEQ ID NO: 23792 - protein, 121 aa, synthetic construct
  REGION 1..121: note = Description of Artificial Sequence: Synthetic polypeptide
  REGION 1..121: note = VH of XENP020543
EVKLEESGGGLVQPGGSMKLSCAASGFTFSDAWMDWVRQSPEKGLEWVAEIRTKANNHQTYYAESVKGRFTISRDDSKSSVYLQMNSLRAEDTGIYYCTRLANWDWYFDVWGAGTTVTVSS

SEQ ID NO: 23793 - protein, 5 aa, synthetic construct
  REGION 1..5: note = Description of Artificial Sequence: Synthetic peptide
  REGION 1..5: note = XENP020543 vhCDR1
DAWMD

SEQ ID NO: 23794 - protein, 19 aa, synthetic construct
  REGION 1..19: note = Description of Artificial Sequence: Synthetic peptide
  REGION 1..19: note = XENP020543 vhCDR2
EIRTKANNHQTYYAESVKG

SEQ ID NO: 23795 - protein, 10 aa, synthetic construct
  REGION 1..10: note = Description of Artificial Sequence: Synthetic peptide
  REGION 1..10: note = XENP020543 vhCDR3
LANWDWYFDV

SEQ ID NO: 23796 - protein, 218 aa, synthetic construct; identical to SEQ ID NO: 22266
  REGION 1..218: note = Description of Artificial Sequence: Synthetic polypeptide
  REGION 1..218: note = XENP020543 7G8_H0.91_L0_IgG1_PVA_/S267K Light Chain

SEQ ID NO: 23797 - protein, 111 aa, synthetic construct; identical to SEQ ID NO: 22267
  REGION 1..111: note = Description of Artificial Sequence: Synthetic polypeptide
  REGION 1..111: note = VL of XENP020543

SEQ ID NO: 23798 - protein, 15 aa, synthetic construct
  REGION 1..15: note = Description of Artificial Sequence: Synthetic peptide
  REGION 1..15: note = XENP020543 vlCDR1
KASQSVDYDGDSYMN

SEQ ID NO: 23799 - protein, 7 aa, synthetic construct
  REGION 1..7: note = Description of Artificial Sequence: Synthetic peptide
  REGION 1..7: note = XENP020543 vlCDR2
AASNLES

SEQ ID NO: 23800 - protein, 9 aa, synthetic construct
  REGION 1..9: note = Description of Artificial Sequence: Synthetic peptide
  REGION 1..9: note = XENP020543 vlCDR3
QQSNEDPFT

SEQ ID NO: 23801 - protein, 450 aa, synthetic construct
  REGION 1..450: note = Description of Artificial Sequence: Synthetic polypeptide
  REGION 1..450: note = XENP020544 7G8_H0.92_L0_IgG1_PVA_/S267K Heavy Chain
EVKLEESGGGLVQPGGSMKLSCAASGFTFSDAWMDWVRQSPEKGLEWVAEIRTKANNHDTYYAESVKGRFTISRDDSKSSVYLQMNSLRAEDTGIYYCTRLANWDWYFDVWGAGTTVTVSSASTKGPSVFPLAPSSKSTSGGTAALGCLVKDYFPEPVTVSWNSGALTSGVHTFPAVLQSSGLYSLSSVVTVPSSSLGTQTYICNVNHKPSDTKVDKKVEPKSCDKTHTCPPCPAPPVAGPSVFLFPPKPKDTLMISRTPEVTCVVVDVKHEDPEVKFNWYVDGVEVHNAKTKPREEEYNSTYRVVSVLTVLHQDWLNGKEYKCKVSNKALPAPIEKTISKAKGQPREPQVYTLPPSREEMTKNQVSLTCDVSGFYPSDIAVEWESDGQPENNYKTTPPVLDSDGSFFLYSKLTVDKSRWEQGDVFSCSVMHEALHNHYTQKSLSLSPGK

SEQ ID NO: 23802 - protein, 121 aa, synthetic construct
  REGION 1..121: note = Description of Artificial Sequence: Synthetic polypeptide
  REGION 1..121: note = VH of XENP020544
EVKLEESGGGLVQPGGSMKLSCAASGFTFSDAWMDWVRQSPEKGLEWVAEIRTKANNHDTYYAESVKGRFTISRDDSKSSVYLQMNSLRAEDTGIYYCTRLANWDWYFDVWGAGTTVTVSS

SEQ ID NO: 23803 - protein, 5 aa, synthetic construct
  REGION 1..5: note = Description of Artificial Sequence: Synthetic peptide
  REGION 1..5: note = XENP020544 vhCDR1
DAWMD

SEQ ID NO: 23804 - protein, 19 aa, synthetic construct
  REGION 1..19: note = Description of Artificial Sequence: Synthetic peptide
  REGION 1..19: note = XENP020544 vhCDR2
EIRTKANNHDTYYAESVKG

SEQ ID NO: 23805 - protein, 10 aa, synthetic construct
  REGION 1..10: note = Description of Artificial Sequence: Synthetic peptide
  REGION 1..10: note = XENP020544 vhCDR3
LANWDWYFDV

SEQ ID NO: 23806 - protein, 218 aa, synthetic construct; identical to SEQ ID NO: 22266
  REGION 1..218: note = Description of Artificial Sequence: Synthetic polypeptide
  REGION 1..218: note = XENP020544 7G8_H0.92_L0_IgG1_PVA_/S267K Light Chain

SEQ ID NO: 23807 - protein, 111 aa, synthetic construct; identical to SEQ ID NO: 22267
  REGION 1..111: note = Description of Artificial Sequence: Synthetic polypeptide
  REGION 1..111: note = VL of XENP020544

SEQ ID NO: 23808 - protein, 15 aa, synthetic construct
  REGION 1..15: note = Description of Artificial Sequence: Synthetic peptide
  REGION 1..15: note = XENP020544 vlCDR1
KASQSVDYDGDSYMN

SEQ ID NO: 23809 - protein, 7 aa, synthetic construct
  REGION 1..7: note = Description of Artificial Sequence: Synthetic peptide
  REGION 1..7: note = XENP020544 vlCDR2
AASNLES

SEQ ID NO: 23810 - protein, 9 aa, synthetic construct
  REGION 1..9: note = Description of Artificial Sequence: Synthetic peptide
  REGION 1..9: note = XENP020544 vlCDR3
QQSNEDPFT

SEQ ID NO: 23811 - protein, 450 aa, synthetic construct
  REGION 1..450: note = Description of Artificial Sequence: Synthetic polypeptide
  REGION 1..450: note = XENP020545 7G8_H0.93_L0_IgG1_PVA_/S267K Heavy Chain
EVKLEESGGGLVQPGGSMKLSCAASGFTFSDAWMDWVRQSPEKGLEWVAEIRTKANNHLTYYAESVKGRFTISRDDSKSSVYLQMNSLRAEDTGIYYCTRLANWDWYFDVWGAGTTVTVSSASTKGPSVFPLAPSSKSTSGGTAALGCLVKDYFPEPVTVSWNSGALTSGVHTFPAVLQSSGLYSLSSVVTVPSSSLGTQTYICNVNHKPSDTKVDKKVEPKSCDKTHTCPPCPAPPVAGPSVFLFPPKPKDTLMISRTPEVTCVVVDVKHEDPEVKFNWYVDGVEVHNAKTKPREEEYNSTYRVVSVLTVLHQDWLNGKEYKCKVSNKALPAPIEKTISKAKGQPREPQVYTLPPSREEMTKNQVSLTCDVSGFYPSDIAVEWESDGQPENNYKTTPPVLDSDGSFFLYSKLTVDKSRWEQGDVFSCSVMHEALHNHYTQKSLSLSPGK

SEQ ID NO: 23812 - protein, 121 aa, synthetic construct
  REGION 1..121: note = Description of Artificial Sequence: Synthetic polypeptide
  REGION 1..121: note = VH of XENP020545
EVKLEESGGGLVQPGGSMKLSCAASGFTFSDAWMDWVRQSPEKGLEWVAEIRTKANNHLTYYAESVKGRFTISRDDSKSSVYLQMNSLRAEDTGIYYCTRLANWDWYFDVWGAGTTVTVSS

SEQ ID NO: 23813 - protein, 5 aa, synthetic construct
  REGION 1..5: note = Description of Artificial Sequence: Synthetic peptide
  REGION 1..5: note = XENP020545 vhCDR1
DAWMD

SEQ ID NO: 23814 - protein, 19 aa, synthetic construct
  REGION 1..19: note = Description of Artificial Sequence: Synthetic peptide
  REGION 1..19: note = XENP020545 vhCDR2
EIRTKANNHLTYYAESVKG

SEQ ID NO: 23815 - protein, 10 aa, synthetic construct
  REGION 1..10: note = Description of Artificial Sequence: Synthetic peptide
  REGION 1..10: note = XENP020545 vhCDR3
LANWDWYFDV

SEQ ID NO: 23816 - protein, 218 aa, synthetic construct; identical to SEQ ID NO: 22266
  REGION 1..218: note = Description of Artificial Sequence: Synthetic polypeptide
  REGION 1..218: note = XENP020545 7G8_H0.93_L0_IgG1_PVA_/S267K Light Chain

SEQ ID NO: 23817 - protein, 111 aa, synthetic construct; identical to SEQ ID NO: 22267
  REGION 1..111: note = Description of Artificial Sequence: Synthetic polypeptide
  REGION 1..111: note = VL of XENP020545

SEQ ID NO: 23818 - protein, 15 aa, synthetic construct
  REGION 1..15: note = Description of Artificial Sequence: Synthetic peptide
  REGION 1..15: note = XENP020545 vlCDR1
KASQSVDYDGDSYMN

SEQ ID NO: 23819 - protein, 7 aa, synthetic construct
  REGION 1..7: note = Description of Artificial Sequence: Synthetic peptide
  REGION 1..7: note = XENP020545 vlCDR2
AASNLES

SEQ ID NO: 23820 - protein, 9 aa, synthetic construct
  REGION 1..9: note = Description of Artificial Sequence: Synthetic peptide
  REGION 1..9: note = XENP020545 vlCDR3
QQSNEDPFT

SEQ ID NO: 23821 - protein, 450 aa, synthetic construct
  REGION 1..450: note = Description of Artificial Sequence: Synthetic polypeptide
  REGION 1..450: note = XENP020546 7G8_H0.94_L0_IgG1_PVA_/S267K Heavy Chain
EVKLEESGGGLVQPGGSMKLSCAASGFTFSDAWMDWVRQSPEKGLEWVAEIRTKANNHKTYYAESVKGRFTISRDDSKSSVYLQMNSLRAEDTGIYYCTRLANWDWYFDVWGAGTTVTVSSASTKGPSVFPLAPSSKSTSGGTAALGCLVKDYFPEPVTVSWNSGALTSGVHTFPAVLQSSGLYSLSSVVTVPSSSLGTQTYICNVNHKPSDTKVDKKVEPKSCDKTHTCPPCPAPPVAGPSVFLFPPKPKDTLMISRTPEVTCVVVDVKHEDPEVKFNWYVDGVEVHNAKTKPREEEYNSTYRVVSVLTVLHQDWLNGKEYKCKVSNKALPAPIEKTISKAKGQPREPQVYTLPPSREEMTKNQVSLTCDVSGFYPSDIAVEWESDGQPENNYKTTPPVLDSDGSFFLYSKLTVDKSRWEQGDVFSCSVMHEALHNHYTQKSLSLSPGK

SEQ ID NO: 23822 - protein, 121 aa, synthetic construct
  REGION 1..121: note = Description of Artificial Sequence: Synthetic polypeptide
  REGION 1..121: note = VH of XENP020546
EVKLEESGGGLVQPGGSMKLSCAASGFTFSDAWMDWVRQSPEKGLEWVAEIRTKANNHKTYYAESVKGRFTISRDDSKSSVYLQMNSLRAEDTGIYYCTRLANWDWYFDVWGAGTTVTVSS

SEQ ID NO: 23823 - protein, 5 aa, synthetic construct
  REGION 1..5: note = Description of Artificial Sequence: Synthetic peptide
  REGION 1..5: note = XENP020546 vhCDR1
DAWMD

SEQ ID NO: 23824 - protein, 19 aa, synthetic construct
  REGION 1..19: note = Description of Artificial Sequence: Synthetic peptide
  REGION 1..19: note = XENP020546 vhCDR2
EIRTKANNHKTYYAESVKG

SEQ ID NO: 23825 - protein, 10 aa, synthetic construct
  REGION 1..10: note = Description of Artificial Sequence: Synthetic peptide
  REGION 1..10: note = XENP020546 vhCDR3
LANWDWYFDV

SEQ ID NO: 23826 - protein, 218 aa, synthetic construct; identical to SEQ ID NO: 22266
  REGION 1..218: note = Description of Artificial Sequence: Synthetic polypeptide
  REGION 1..218: note = XENP020546 7G8_H0.94_L0_IgG1_PVA_/S267K Light Chain

SEQ ID NO: 23827 - protein, 111 aa, synthetic construct; identical to SEQ ID NO: 22267
  REGION 1..111: note = Description of Artificial Sequence: Synthetic polypeptide
  REGION 1..111: note = VL of XENP020546

SEQ ID NO: 23828 - protein, 15 aa, synthetic construct
  REGION 1..15: note = Description of Artificial Sequence: Synthetic peptide
  REGION 1..15: note = XENP020546 vlCDR1
KASQSVDYDGDSYMN

SEQ ID NO: 23829 - protein, 7 aa, synthetic construct
  REGION 1..7: note = Description of Artificial Sequence: Synthetic peptide
  REGION 1..7: note = XENP020546 vlCDR2
AASNLES

SEQ ID NO: 23830 - protein, 9 aa, synthetic construct
  REGION 1..9: note = Description of Artificial Sequence: Synthetic peptide
  REGION 1..9: note = XENP020546 vlCDR3
QQSNEDPFT

SEQ ID NO: 23831 - protein, 450 aa, synthetic construct
  REGION 1..450: note = Description of Artificial Sequence: Synthetic polypeptide
  REGION 1..450: note = XENP020547 7G8_H0.95_L0_IgG1_PVA_/S267K Heavy Chain
EVKLEESGGGLVQPGGSMKLSCAASGFTFSDAWMDWVRQSPEKGLEWVAEIRTKANNHYTYYAESVKGRFTISRDDSKSSVYLQMNSLRAEDTGIYYCTRLANWDWYFDVWGAGTTVTVSSASTKGPSVFPLAPSSKSTSGGTAALGCLVKDYFPEPVTVSWNSGALTSGVHTFPAVLQSSGLYSLSSVVTVPSSSLGTQTYICNVNHKPSDTKVDKKVEPKSCDKTHTCPPCPAPPVAGPSVFLFPPKPKDTLMISRTPEVTCVVVDVKHEDPEVKFNWYVDGVEVHNAKTKPREEEYNSTYRVVSVLTVLHQDWLNGKEYKCKVSNKALPAPIEKTISKAKGQPREPQVYTLPPSREEMTKNQVSLTCDVSGFYPSDIAVEWESDGQPENNYKTTPPVLDSDGSFFLYSKLTVDKSRWEQGDVFSCSVMHEALHNHYTQKSLSLSPGK

SEQ ID NO: 23832 - protein, 121 aa, synthetic construct
  REGION 1..121: note = Description of Artificial Sequence: Synthetic polypeptide
  REGION 1..121: note = VH of XENP020547
EVKLEESGGGLVQPGGSMKLSCAASGFTFSDAWMDWVRQSPEKGLEWVAEIRTKANNHYTYYAESVKGRFTISRDDSKSSVYLQMNSLRAEDTGIYYCTRLANWDWYFDVWGAGTTVTVSS

SEQ ID NO: 23833 - protein, 5 aa, synthetic construct
  REGION 1..5: note = Description of Artificial Sequence: Synthetic peptide
  REGION 1..5: note = XENP020547 vhCDR1
DAWMD

SEQ ID NO: 23834 - protein, 19 aa, synthetic construct
  REGION 1..19: note = Description of Artificial Sequence: Synthetic peptide
  REGION 1..19: note = XENP020547 vhCDR2
EIRTKANNHYTYYAESVKG

SEQ ID NO: 23835 - protein, 10 aa, synthetic construct
  REGION 1..10: note = Description of Artificial Sequence: Synthetic peptide
  REGION 1..10: note = XENP020547 vhCDR3
LANWDWYFDV

SEQ ID NO: 23836 - protein, 218 aa, synthetic construct; identical to SEQ ID NO: 22266
  REGION 1..218: note = Description of Artificial Sequence: Synthetic polypeptide
  REGION 1..218: note = XENP020547 7G8_H0.95_L0_IgG1_PVA_/S267K Light Chain

SEQ ID NO: 23837 - protein, 111 aa, synthetic construct; identical to SEQ ID NO: 22267
  REGION 1..111: note = Description of Artificial Sequence: Synthetic polypeptide
  REGION 1..111: note = VL of XENP020547

SEQ ID NO: 23838 - protein, 15 aa, synthetic construct
  REGION 1..15: note = Description of Artificial Sequence: Synthetic peptide
  REGION 1..15: note = XENP020547 vlCDR1
KASQSVDYDGDSYMN

SEQ ID NO: 23839 - protein, 7 aa, synthetic construct
  REGION 1..7: note = Description of Artificial Sequence: Synthetic peptide
  REGION 1..7: note = XENP020547 vlCDR2
AASNLES

SEQ ID NO: 23840 - protein, 9 aa, synthetic construct
  REGION 1..9: note = Description of Artificial Sequence: Synthetic peptide
  REGION 1..9: note = XENP020547 vlCDR3
QQSNEDPFT

SEQ ID NO: 23841 - protein, 450 aa, synthetic construct
  REGION 1..450: note = Description of Artificial Sequence: Synthetic polypeptide
  REGION 1..450: note = XENP020548 7G8_H0.96_L0_IgG1_PVA_/S267K Heavy Chain
EVKLEESGGGLVQPGGSMKLSCAASGFTFSDAWMDWVRQSPEKGLEWVAEIRTKANNHATFYAESVKGRFTISRDDSKSSVYLQMNSLRAEDTGIYYCTRLANWDWYFDVWGAGTTVTVSSASTKGPSVFPLAPSSKSTSGGTAALGCLVKDYFPEPVTVSWNSGALTSGVHTFPAVLQSSGLYSLSSVVTVPSSSLGTQTYICNVNHKPSDTKVDKKVEPKSCDKTHTCPPCPAPPVAGPSVFLFPPKPKDTLMISRTPEVTCVVVDVKHEDPEVKFNWYVDGVEVHNAKTKPREEEYNSTYRVVSVLTVLHQDWLNGKEYKCKVSNKALPAPIEKTISKAKGQPREPQVYTLPPSREEMTKNQVSLTCDVSGFYPSDIAVEWESDGQPENNYKTTPPVLDSDGSFFLYSKLTVDKSRWEQGDVFSCSVMHEALHNHYTQKSLSLSPGK

SEQ ID NO: 23842 - protein, 121 aa, synthetic construct
  REGION 1..121: note = Description of Artificial Sequence: Synthetic polypeptide
  REGION 1..121: note = VH of XENP020548
EVKLEESGGGLVQPGGSMKLSCAASGFTFSDAWMDWVRQSPEKGLEWVAEIRTKANNHATFYAESVKGRFTISRDDSKSSVYLQMNSLRAEDTGIYYCTRLANWDWYFDVWGAGTTVTVSS

SEQ ID NO: 23843 - protein, 5 aa, synthetic construct
  REGION 1..5: note = Description of Artificial Sequence: Synthetic peptide
  REGION 1..5: note = XENP020548 vhCDR1
DAWMD

SEQ ID NO: 23844 - protein, 19 aa, synthetic construct
  REGION 1..19: note = Description of Artificial Sequence: Synthetic peptide
  REGION 1..19: note = XENP020548 vhCDR2
EIRTKANNHATFYAESVKG

SEQ ID NO: 23845 - protein, 10 aa, synthetic construct
  REGION 1..10: note = Description of Artificial Sequence: Synthetic peptide
  REGION 1..10: note = XENP020548 vhCDR3
LANWDWYFDV

SEQ ID NO: 23846 - protein, 218 aa, synthetic construct; identical to SEQ ID NO: 22266
  REGION 1..218: note = Description of Artificial Sequence: Synthetic polypeptide
  REGION 1..218: note = XENP020548 7G8_H0.96_L0_IgG1_PVA_/S267K Light Chain

SEQ ID NO: 23847 - protein, 111 aa, synthetic construct; identical to SEQ ID NO: 22267
  REGION 1..111: note = Description of Artificial Sequence: Synthetic polypeptide
  REGION 1..111: note = VL of XENP020548

SEQ ID NO: 23848 - protein, 15 aa, synthetic construct
  REGION 1..15: note = Description of Artificial Sequence: Synthetic peptide
  REGION 1..15: note = XENP020548 vlCDR1
KASQSVDYDGDSYMN

SEQ ID NO: 23849 - protein, 7 aa, synthetic construct
  REGION 1..7: note = Description of Artificial Sequence: Synthetic peptide
  REGION 1..7: note = XENP020548 vlCDR2
AASNLES

SEQ ID NO: 23850 - protein, 9 aa, synthetic construct
  REGION 1..9: note = Description of Artificial Sequence: Synthetic peptide
  REGION 1..9: note = XENP020548 vlCDR3
QQSNEDPFT

SEQ ID NO: 23851 - protein, 450 aa, synthetic construct
  REGION 1..450: note = Description of Artificial Sequence: Synthetic polypeptide
  REGION 1..450: note = XENP020549 7G8_H0.97_L0_IgG1_PVA_/S267K Heavy Chain
EVKLEESGGGLVQPGGSMKLSCAASGFTFSDAWMDWVRQSPEKGLEWVAEIRTKANNHATHYAESVKGRFTISRDDSKSSVYLQMNSLRAEDTGIYYCTRLANWDWYFDVWGAGTTVTVSSASTKGPSVFPLAPSSKSTSGGTAALGCLVKDYFPEPVTVSWNSGALTSGVHTFPAVLQSSGLYSLSSVVTVPSSSLGTQTYICNVNHKPSDTKVDKKVEPKSCDKTHTCPPCPAPPVAGPSVFLFPPKPKDTLMISRTPEVTCVVVDVKHEDPEVKFNWYVDGVEVHNAKTKPREEEYNSTYRVVSVLTVLHQDWLNGKEYKCKVSNKALPAPIEKTISKAKGQPREPQVYTLPPSREEMTKNQVSLTCDVSGFYPSDIAVEWESDGQPENNYKTTPPVLDSDGSFFLYSKLTVDKSRWEQGDVFSCSVMHEALHNHYTQKSLSLSPGK

SEQ ID NO: 23852 - protein, 121 aa, synthetic construct
  REGION 1..121: note = Description of Artificial Sequence: Synthetic polypeptide
  REGION 1..121: note = VH of XENP020549
EVKLEESGGGLVQPGGSMKLSCAASGFTFSDAWMDWVRQSPEKGLEWVAEIRTKANNHATHYAESVKGRFTISRDDSKSSVYLQMNSLRAEDTGIYYCTRLANWDWYFDVWGAGTTVTVSS

SEQ ID NO: 23853 - protein, 5 aa, synthetic construct
  REGION 1..5: note = Description of Artificial Sequence: Synthetic peptide
  REGION 1..5: note = XENP020549 vhCDR1
DAWMD

SEQ ID NO: 23854 - protein, 19 aa, synthetic construct
  REGION 1..19: note = Description of Artificial Sequence: Synthetic peptide
  REGION 1..19: note = XENP020549 vhCDR2
EIRTKANNHATHYAESVKG

SEQ ID NO: 23855 - protein, 10 aa, synthetic construct
  REGION 1..10: note = Description of Artificial Sequence: Synthetic peptide
  REGION 1..10: note = XENP020549 vhCDR3
LANWDWYFDV

SEQ ID NO: 23856 - protein, 218 aa, synthetic construct; identical to SEQ ID NO: 22266
  REGION 1..218: note = Description of Artificial Sequence: Synthetic polypeptide
  REGION 1..218: note = XENP020549 7G8_H0.97_L0_IgG1_PVA_/S267K Light Chain

SEQ ID NO: 23857 - protein, 111 aa, synthetic construct; identical to SEQ ID NO: 22267
  REGION 1..111: note = Description of Artificial Sequence: Synthetic polypeptide
  REGION 1..111: note = VL of XENP020549

SEQ ID NO: 23858 - protein, 15 aa, synthetic construct
  REGION 1..15: note = Description of Artificial Sequence: Synthetic peptide
  REGION 1..15: note = XENP020549 vlCDR1
KASQSVDYDGDSYMN

SEQ ID NO: 23859 - protein, 7 aa, synthetic construct
  REGION 1..7: note = Description of Artificial Sequence: Synthetic peptide
  REGION 1..7: note = XENP020549 vlCDR2
AASNLES

SEQ ID NO: 23860 - protein, 9 aa, synthetic construct
  REGION 1..9: note = Description of Artificial Sequence: Synthetic peptide
  REGION 1..9: note = XENP020549 vlCDR3
QQSNEDPFT

SEQ ID NO: 23861 - protein, 450 aa, synthetic construct
  REGION 1..450: note = Description of Artificial Sequence: Synthetic polypeptide
  REGION 1..450: note = XENP020550 7G8_H0.98_L0_IgG1_PVA_/S267K Heavy Chain
EVKLEESGGGLVQPGGSMKLSCAASGFTFSDAWMDWVRQSPEKGLEWVAEIRTKANNHATLYAESVKGRFTISRDDSKSSVYLQMNSLRAEDTGIYYCTRLANWDWYFDVWGAGTTVTVSSASTKGPSVFPLAPSSKSTSGGTAALGCLVKDYFPEPVTVSWNSGALTSGVHTFPAVLQSSGLYSLSSVVTVPSSSLGTQTYICNVNHKPSDTKVDKKVEPKSCDKTHTCPPCPAPPVAGPSVFLFPPKPKDTLMISRTPEVTCVVVDVKHEDPEVKFNWYVDGVEVHNAKTKPREEEYNSTYRVVSVLTVLHQDWLNGKEYKCKVSNKALPAPIEKTISKAKGQPREPQVYTLPPSREEMTKNQVSLTCDVSGFYPSDIAVEWESDGQPENNYKTTPPVLDSDGSFFLYSKLTVDKSRWEQGDVFSCSVMHEALHNHYTQKSLSLSPGK

SEQ ID NO: 23862 - protein, 121 aa, synthetic construct
  REGION 1..121: note = Description of Artificial Sequence: Synthetic polypeptide
  REGION 1..121: note = VH of XENP020550
EVKLEESGGGLVQPGGSMKLSCAASGFTFSDAWMDWVRQSPEKGLEWVAEIRTKANNHATLYAESVKGRFTISRDDSKSSVYLQMNSLRAEDTGIYYCTRLANWDWYFDVWGAGTTVTVSS

SEQ ID NO: 23863 - protein, 5 aa, synthetic construct
  REGION 1..5: note = Description of Artificial Sequence: Synthetic peptide
  REGION 1..5: note = XENP020550 vhCDR1
DAWMD

SEQ ID NO: 23864 - protein, 19 aa, synthetic construct
  REGION 1..19: note = Description of Artificial Sequence: Synthetic peptide
  REGION 1..19: note = XENP020550 vhCDR2
EIRTKANNHATLYAESVKG

SEQ ID NO: 23865 - protein, 10 aa, synthetic construct
  REGION 1..10: note = Description of Artificial Sequence: Synthetic peptide
  REGION 1..10: note = XENP020550 vhCDR3
LANWDWYFDV

SEQ ID NO: 23866 - protein, 218 aa, synthetic construct; identical to SEQ ID NO: 22266
  REGION 1..218: note = Description of Artificial Sequence: Synthetic polypeptide
  REGION 1..218: note = XENP020550 7G8_H0.98_L0_IgG1_PVA_/S267K Light Chain

SEQ ID NO: 23867 - protein, 111 aa, synthetic construct; identical to SEQ ID NO: 22267
  REGION 1..111: note = Description of Artificial Sequence: Synthetic polypeptide
  REGION 1..111: note = VL of XENP020550

SEQ ID NO: 23868 - protein, 15 aa, synthetic construct
  REGION 1..15: note = Description of Artificial Sequence: Synthetic peptide
  REGION 1..15: note = XENP020550 vlCDR1
KASQSVDYDGDSYMN

SEQ ID NO: 23869 - protein, 7 aa, synthetic construct
  REGION 1..7: note = Description of Artificial Sequence: Synthetic peptide
  REGION 1..7: note = XENP020550 vlCDR2
AASNLES

SEQ ID NO: 23870 - protein, 9 aa, synthetic construct
  REGION 1..9: note = Description of Artificial Sequence: Synthetic peptide
  REGION 1..9: note = XENP020550 vlCDR3
QQSNEDPFT

SEQ ID NO: 23871 - protein, 450 aa, synthetic construct
  REGION 1..450: note = Description of Artificial Sequence: Synthetic polypeptide
  REGION 1..450: note = XENP020551 7G8_H0.99_L0_IgG1_PVA_/S267K Heavy Chain
EVKLEESGGGLVQPGGSMKLSCAASGFTFSDAWMDWVRQSPEKGLEWVAEIRTKANNHATWYAESVKGRFTISRDDSKSSVYLQMNSLRAEDTGIYYCTRLANWDWYFDVWGAGTTVTVSSASTKGPSVFPLAPSSKSTSGGTAALGCLVKDYFPEPVTVSWNSGALTSGVHTFPAVLQSSGLYSLSSVVTVPSSSLGTQTYICNVNHKPSDTKVDKKVEPKSCDKTHTCPPCPAPPVAGPSVFLFPPKPKDTLMISRTPEVTCVVVDVKHEDPEVKFNWYVDGVEVHNAKTKPREEEYNSTYRVVSVLTVLHQDWLNGKEYKCKVSNKALPAPIEKTISKAKGQPREPQVYTLPPSREEMTKNQVSLTCDVSGFYPSDIAVEWESDGQPENNYKTTPPVLDSDGSFFLYSKLTVDKSRWEQGDVFSCSVMHEALHNHYTQKSLSLSPGK

SEQ ID NO: 23872 - protein, 121 aa, synthetic construct
  REGION 1..121: note = Description of Artificial Sequence: Synthetic polypeptide
  REGION 1..121: note = VH of XENP020551
EVKLEESGGGLVQPGGSMKLSCAASGFTFSDAWMDWVRQSPEKGLEWVAEIRTKANNHATWYAESVKGRFTISRDDSKSSVYLQMNSLRAEDTGIYYCTRLANWDWYFDVWGAGTTVTVSS

SEQ ID NO: 23873 - protein, 5 aa, synthetic construct
  REGION 1..5: note = Description of Artificial Sequence: Synthetic peptide
  REGION 1..5: note = XENP020551 vhCDR1
DAWMD

SEQ ID NO: 23874 - protein, 19 aa, synthetic construct
  REGION 1..19: note = Description of Artificial Sequence: Synthetic peptide
  REGION 1..19: note = XENP020551 vhCDR2
EIRTKANNHATWYAESVKG

SEQ ID NO: 23875 - protein, 10 aa, synthetic construct
  REGION 1..10: note = Description of Artificial Sequence: Synthetic peptide
  REGION 1..10: note = XENP020551 vhCDR3
LANWDWYFDV

SEQ ID NO: 23876 - protein, 218 aa, synthetic construct; identical to SEQ ID NO: 22266
  REGION 1..218: note = Description of Artificial Sequence: Synthetic polypeptide
  REGION 1..218: note = XENP020551 7G8_H0.99_L0_IgG1_PVA_/S267K Light Chain

SEQ ID NO: 23877 - protein, 111 aa, synthetic construct; identical to SEQ ID NO: 22267
  REGION 1..111: note = Description of Artificial Sequence: Synthetic polypeptide
  REGION 1..111: note = VL of XENP020551

SEQ ID NO: 23878 - protein, 15 aa, synthetic construct
  REGION 1..15: note = Description of Artificial Sequence: Synthetic peptide
  REGION 1..15: note = XENP020551 vlCDR1
KASQSVDYDGDSYMN

SEQ ID NO: 23879 - protein, 7 aa, synthetic construct
  REGION 1..7: note = Description of Artificial Sequence: Synthetic peptide
  REGION 1..7: note = XENP020551 vlCDR2
AASNLES

SEQ ID NO: 23880 - protein, 9 aa, synthetic construct
  REGION 1..9: note = Description of Artificial Sequence: Synthetic peptide
  REGION 1..9: note = XENP020551 vlCDR3
QQSNEDPFT

SEQ ID NO: 23881 - protein, 450 aa, synthetic construct
  REGION 1..450: note = Description of Artificial Sequence: Synthetic polypeptide
  REGION 1..450: note = XENP020552 7G8_H0.100_L0_IgG1_PVA_/S267K Heavy Chain
EVKLEESGGGLVQPGGSMKLSCAASGFTFSDAWMDWVRQSPEKGLEWVAEIRTKANNHATVYAESVKGRFTISRDDSKSSVYLQMNSLRAEDTGIYYCTRLANWDWYFDVWGAGTTVTVSSASTKGPSVFPLAPSSKSTSGGTAALGCLVKDYFPEPVTVSWNSGALTSGVHTFPAVLQSSGLYSLSSVVTVPSSSLGTQTYICNVNHKPSDTKVDKKVEPKSCDKTHTCPPCPAPPVAGPSVFLFPPKPKDTLMISRTPEVTCVVVDVKHEDPEVKFNWYVDGVEVHNAKTKPREEEYNSTYRVVSVLTVLHQDWLNGKEYKCKVSNKALPAPIEKTISKAKGQPREPQVYTLPPSREEMTKNQVSLTCDVSGFYPSDIAVEWESDGQPENNYKTTPPVLDSDGSFFLYSKLTVDKSRWEQGDVFSCSVMHEALHNHYTQKSLSLSPGK

SEQ ID NO: 23882 - protein, 121 aa, synthetic construct
  REGION 1..121: note = Description of Artificial Sequence: Synthetic polypeptide
  REGION 1..121: note = VH of XENP020552
EVKLEESGGGLVQPGGSMKLSCAASGFTFSDAWMDWVRQSPEKGLEWVAEIRTKANNHATVYAESVKGRFTISRDDSKSSVYLQMNSLRAEDTGIYYCTRLANWDWYFDVWGAGTTVTVSS

SEQ ID NO: 23883 - protein, 5 aa, synthetic construct
  REGION 1..5: note = Description of Artificial Sequence: Synthetic peptide
  REGION 1..5: note = XENP020552 vhCDR1
DAWMD

SEQ ID NO: 23884 - protein, 19 aa, synthetic construct
  REGION 1..19: note = Description of Artificial Sequence: Synthetic peptide
  REGION 1..19: note = XENP020552 vhCDR2
EIRTKANNHATVYAESVKG

SEQ ID NO: 23885 - protein, 10 aa, synthetic construct
  REGION 1..10: note = Description of Artificial Sequence: Synthetic peptide
  REGION 1..10: note = XENP020552 vhCDR3
LANWDWYFDV

SEQ ID NO: 23886 - protein, 218 aa, synthetic construct; identical to SEQ ID NO: 22266
  REGION 1..218: note = Description of Artificial Sequence: Synthetic polypeptide
  REGION 1..218: note = XENP020552 7G8_H0.100_L0_IgG1_PVA_/S267K Light Chain

SEQ ID NO: 23887 - protein, 111 aa, synthetic construct; identical to SEQ ID NO: 22267
  REGION 1..111: note = Description of Artificial Sequence: Synthetic polypeptide
  REGION 1..111: note = VL of XENP020552

SEQ ID NO: 23888 - protein, 15 aa, synthetic construct
  REGION 1..15: note = Description of Artificial Sequence: Synthetic peptide
  REGION 1..15: note = XENP020552 vlCDR1
KASQSVDYDGDSYMN

SEQ ID NO: 23889 - protein, 7 aa, synthetic construct
  REGION 1..7: note = Description of Artificial Sequence: Synthetic peptide
  REGION 1..7: note = XENP020552 vlCDR2
AASNLES

SEQ ID NO: 23890 - protein, 9 aa, synthetic construct
  REGION 1..9: note = Description of Artificial Sequence: Synthetic peptide
  REGION 1..9: note = XENP020552 vlCDR3
QQSNEDPFT

SEQ ID NO: 23891 - protein, 450 aa, synthetic construct
  REGION 1..450: note = Description of Artificial Sequence: Synthetic polypeptide
  REGION 1..450: note = XENP020553 7G8_H0.101_L0_IgG1_PVA_/S267K Heavy Chain
EVKLEESGGGLVQPGGSMKLSCAASGFTFSDAWMDWVRQSPEKGLEWVAEIRTKANNHATAYAESVKGRFTISRDDSKSSVYLQMNSLRAEDTGIYYCTRLANWDWYFDVWGAGTTVTVSSASTKGPSVFPLAPSSKSTSGGTAALGCLVKDYFPEPVTVSWNSGALTSGVHTFPAVLQSSGLYSLSSVVTVPSSSLGTQTYICNVNHKPSDTKVDKKVEPKSCDKTHTCPPCPAPPVAGPSVFLFPPKPKDTLMISRTPEVTCVVVDVKHEDPEVKFNWYVDGVEVHNAKTKPREEEYNSTYRVVSVLTVLHQDWLNGKEYKCKVSNKALPAPIEKTISKAKGQPREPQVYTLPPSREEMTKNQVSLTCDVSGFYPSDIAVEWESDGQPENNYKTTPPVLDSDGSFFLYSKLTVDKSRWEQGDVFSCSVMHEALHNHYTQKSLSLSPGK

SEQ ID NO: 23892 - protein, 121 aa, synthetic construct
  REGION 1..121: note = Description of Artificial Sequence: Synthetic polypeptide
  REGION 1..121: note = VH of XENP020553
EVKLEESGGGLVQPGGSMKLSCAASGFTFSDAWMDWVRQSPEKGLEWVAEIRTKANNHATAYAESVKGRFTISRDDSKSSVYLQMNSLRAEDTGIYYCTRLANWDWYFDVWGAGTTVTVSS

SEQ ID NO: 23893 - protein, 5 aa, synthetic construct
  REGION 1..5: note = Description of Artificial Sequence: Synthetic peptide
  REGION 1..5: note = XENP020553 vhCDR1
DAWMD

SEQ ID NO: 23894 - protein, 19 aa, synthetic construct
  REGION 1..19: note = Description of Artificial Sequence: Synthetic peptide
  REGION 1..19: note = XENP020553 vhCDR2
EIRTKANNHATAYAESVKG

SEQ ID NO: 23895 - protein, 10 aa, synthetic construct
  REGION 1..10: note = Description of Artificial Sequence: Synthetic peptide
  REGION 1..10: note = XENP020553 vhCDR3
LANWDWYFDV

SEQ ID NO: 23896 - protein, 218 aa, synthetic construct; identical to SEQ ID NO: 22266
  REGION 1..218: note = Description of Artificial Sequence: Synthetic polypeptide
  REGION 1..218: note = XENP020553 7G8_H0.101_L0_IgG1_PVA_/S267K Light Chain

SEQ ID NO: 23897 - protein, 111 aa, synthetic construct; identical to SEQ ID NO: 22267
  REGION 1..111: note = Description of Artificial Sequence: Synthetic polypeptide
  REGION 1..111: note = VL of XENP020553

SEQ ID NO: 23898 - protein, 15 aa, synthetic construct
  REGION 1..15: note = Description of Artificial Sequence: Synthetic peptide
  REGION 1..15: note = XENP020553 vlCDR1
KASQSVDYDGDSYMN

SEQ ID NO: 23899 - protein, 7 aa, synthetic construct
  REGION 1..7: note = Description of Artificial Sequence: Synthetic peptide
  REGION 1..7: note = XENP020553 vlCDR2
AASNLES

SEQ ID NO: 23900 - protein, 9 aa, synthetic construct
  REGION 1..9: note = Description of Artificial Sequence: Synthetic peptide
  REGION 1..9: note = XENP020553 vlCDR3
QQSNEDPFT

SEQ ID NO: 23901 - protein, 450 aa, synthetic construct
  REGION 1..450: note = Description of Artificial Sequence: Synthetic polypeptide
  REGION 1..450: note = XENP020554 7G8_H0.102_L0_IgG1_PVA_/S267K Heavy Chain
EVKLEESGGGLVQPGGSMKLSCAASGFTFSDAWMDWVRQSPEKGLEWVAEIRTKANNHATQYAESVKGRFTISRDDSKSSVYLQMNSLRAEDTGIYYCTRLANWDWYFDVWGAGTTVTVSSASTKGPSVFPLAPSSKSTSGGTAALGCLVKDYFPEPVTVSWNSGALTSGVHTFPAVLQSSGLYSLSSVVTVPSSSLGTQTYICNVNHKPSDTKVDKKVEPKSCDKTHTCPPCPAPPVAGPSVFLFPPKPKDTLMISRTPEVTCVVVDVKHEDPEVKFNWYVDGVEVHNAKTKPREEEYNSTYRVVSVLTVLHQDWLNGKEYKCKVSNKALPAPIEKTISKAKGQPREPQVYTLPPSREEMTKNQVSLTCDVSGFYPSDIAVEWESDGQPENNYKTTPPVLDSDGSFFLYSKLTVDKSRWEQGDVFSCSVMHEALHNHYTQKSLSLSPGK

SEQ ID NO: 23902 - protein, 121 aa, synthetic construct
  REGION 1..121: note = Description of Artificial Sequence: Synthetic polypeptide
  REGION 1..121: note = VH of XENP020554
EVKLEESGGGLVQPGGSMKLSCAASGFTFSDAWMDWVRQSPEKGLEWVAEIRTKANNHATQYAESVKGRFTISRDDSKSSVYLQMNSLRAEDTGIYYCTRLANWDWYFDVWGAGTTVTVSS

SEQ ID NO: 23903 - protein, 5 aa, synthetic construct
  REGION 1..5: note = Description of Artificial Sequence: Synthetic peptide
  REGION 1..5: note = XENP020554 vhCDR1
DAWMD

SEQ ID NO: 23904 - protein, 19 aa, synthetic construct
  REGION 1..19: note = Description of Artificial Sequence: Synthetic peptide
  REGION 1..19: note = XENP020554 vhCDR2
EIRTKANNHATQYAESVKG

SEQ ID NO: 23905 - protein, 10 aa, synthetic construct
  REGION 1..10: note = Description of Artificial Sequence: Synthetic peptide
  REGION 1..10: note = XENP020554 vhCDR3
LANWDWYFDV

SEQ ID NO: 23906 - protein, 218 aa, synthetic construct; identical to SEQ ID NO: 22266
  REGION 1..218: note = Description of Artificial Sequence: Synthetic polypeptide
  REGION 1..218: note = XENP020554 7G8_H0.102_L0_IgG1_PVA_/S267K Light Chain

SEQ ID NO: 23907 - protein, 111 aa, synthetic construct; identical to SEQ ID NO: 22267
  REGION 1..111: note = Description of Artificial Sequence: Synthetic polypeptide
  REGION 1..111: note = VL of XENP020554

SEQ ID NO: 23908 - protein, 15 aa, synthetic construct
  REGION 1..15: note = Description of Artificial Sequence: Synthetic peptide
  REGION 1..15: note = XENP020554 vlCDR1
KASQSVDYDGDSYMN

SEQ ID NO: 23909 - protein, 7 aa, synthetic construct
  REGION 1..7: note = Description of Artificial Sequence: Synthetic peptide
  REGION 1..7: note = XENP020554 vlCDR2
AASNLES

SEQ ID NO: 23910 - protein, 9 aa, synthetic construct
  REGION 1..9: note = Description of Artificial Sequence: Synthetic peptide
  REGION 1..9: note = XENP020554 vlCDR3
QQSNEDPFT

SEQ ID NO: 23911 - protein, 450 aa, synthetic construct
  REGION 1..450: note = Description of Artificial Sequence: Synthetic polypeptide
  REGION 1..450: note = XENP020555 7G8_H0.103_L0_IgG1_PVA_/S267K Heavy Chain
EVKLEESGGGLVQPGGSMKLSCAASGFTFSDAWMDWVRQSPEKGLEWVAEIRTKANNHATDYAESVKGRFTISRDDSKSSVYLQMNSLRAEDTGIYYCTRLANWDWYFDVWGAGTTVTVSSASTKGPSVFPLAPSSKSTSGGTAALGCLVKDYFPEPVTVSWNSGALTSGVHTFPAVLQSSGLYSLSSVVTVPSSSLGTQTYICNVNHKPSDTKVDKKVEPKSCDKTHTCPPCPAPPVAGPSVFLFPPKPKDTLMISRTPEVTCVVVDVKHEDPEVKFNWYVDGVEVHNAKTKPREEEYNSTYRVVSVLTVLHQDWLNGKEYKCKVSNKALPAPIEKTISKAKGQPREPQVYTLPPSREEMTKNQVSLTCDVSGFYPSDIAVEWESDGQPENNYKTTPPVLDSDGSFFLYSKLTVDKSRWEQGDVFSCSVMHEALHNHYTQKSLSLSPGK

SEQ ID NO: 23912 - protein, 121 aa, synthetic construct
  REGION 1..121: note = Description of Artificial Sequence: Synthetic polypeptide
  REGION 1..121: note = VH of XENP020555
EVKLEESGGGLVQPGGSMKLSCAASGFTFSDAWMDWVRQSPEKGLEWVAEIRTKANNHATDYAESVKGRFTISRDDSKSSVYLQMNSLRAEDTGIYYCTRLANWDWYFDVWGAGTTVTVSS

SEQ ID NO: 23913 - protein, 5 aa, synthetic construct
  REGION 1..5: note = Description of Artificial Sequence: Synthetic peptide
  REGION 1..5: note = XENP020555 vhCDR1
DAWMD

SEQ ID NO: 23914 - protein, 19 aa, synthetic construct
  REGION 1..19: note = Description of Artificial Sequence: Synthetic peptide
  REGION 1..19: note = XENP020555 vhCDR2
EIRTKANNHATDYAESVKG

SEQ ID NO: 23915 - protein, 10 aa, synthetic construct
  REGION 1..10: note = Description of Artificial Sequence: Synthetic peptide
  REGION 1..10: note = XENP020555 vhCDR3
LANWDWYFDV

SEQ ID NO: 23916 - protein, 218 aa, synthetic construct; identical to SEQ ID NO: 22266
  REGION 1..218: note = Description of Artificial Sequence: Synthetic polypeptide
  REGION 1..218: note = XENP020555 7G8_H0.103_L0_IgG1_PVA_/S267K Light Chain

SEQ ID NO: 23917 - protein, 111 aa, synthetic construct; identical to SEQ ID NO: 22267
  REGION 1..111: note = Description of Artificial Sequence: Synthetic polypeptide
  REGION 1..111: note = VL of XENP020555

SEQ ID NO: 23918 - protein, 15 aa, synthetic construct
  REGION 1..15: note = Description of Artificial Sequence: Synthetic peptide
  REGION 1..15: note = XENP020555 vlCDR1
KASQSVDYDGDSYMN

SEQ ID NO: 23919 - protein, 7 aa, synthetic construct
  REGION 1..7: note = Description of Artificial Sequence: Synthetic peptide
  REGION 1..7: note = XENP020555 vlCDR2
AASNLES

SEQ ID NO: 23920 - protein, 9 aa, synthetic construct
  REGION 1..9: note = Description of Artificial Sequence: Synthetic peptide
  REGION 1..9: note = XENP020555 vlCDR3
QQSNEDPFT

SEQ ID NO: 23921 - protein, 450 aa, synthetic construct
  REGION 1..450: note = Description of Artificial Sequence: Synthetic polypeptide
  REGION 1..450: note = XENP020556 7G8_H0.104_L0_IgG1_PVA_/S267K Heavy Chain
EVKLEESGGGLVQPGGSMKLSCAASGFTFSDAWMDWVRQSPEKGLEWVAEIRTKANNHATKYAESVKGRFTISRDDSKSSVYLQMNSLRAEDTGIYYCTRLANWDWYFDVWGAGTTVTVSSASTKGPSVFPLAPSSKSTSGGTAALGCLVKDYFPEPVTVSWNSGALTSGVHTFPAVLQSSGLYSLSSVVTVPSSSLGTQTYICNVNHKPSDTKVDKKVEPKSCDKTHTCPPCPAPPVAGPSVFLFPPKPKDTLMISRTPEVTCVVVDVKHEDPEVKFNWYVDGVEVHNAKTKPREEEYNSTYRVVSVLTVLHQDWLNGKEYKCKVSNKALPAPIEKTISKAKGQPREPQVYTLPPSREEMTKNQVSLTCDVSGFYPSDIAVEWESDGQPENNYKTTPPVLDSDGSFFLYSKLTVDKSRWEQGDVFSCSVMHEALHNHYTQKSLSLSPGK

SEQ ID NO: 23922 - protein, 121 aa, synthetic construct
  REGION 1..121: note = Description of Artificial Sequence: Synthetic polypeptide
  REGION 1..121: note = VH of XENP020556
EVKLEESGGGLVQPGGSMKLSCAASGFTFSDAWMDWVRQSPEKGLEWVAEIRTKANNHATKYAESVKGRFTISRDDSKSSVYLQMNSLRAEDTGIYYCTRLANWDWYFDVWGAGTTVTVSS

SEQ ID NO: 23923 - protein, 5 aa, synthetic construct
  REGION 1..5: note = Description of Artificial Sequence: Synthetic peptide
  REGION 1..5: note = XENP020556 vhCDR1
DAWMD

SEQ ID NO: 23924 - protein, 19 aa, synthetic construct
  REGION 1..19: note = Description of Artificial Sequence: Synthetic peptide
  REGION 1..19: note = XENP020556 vhCDR2
EIRTKANNHATKYAESVKG

SEQ ID NO: 23925 - protein, 10 aa, synthetic construct
  REGION 1..10: note = Description of Artificial Sequence: Synthetic peptide
  REGION 1..10: note = XENP020556 vhCDR3
LANWDWYFDV

SEQ ID NO: 23926 - protein, 218 aa, synthetic construct; identical to SEQ ID NO: 22266
  REGION 1..218: note = Description of Artificial Sequence: Synthetic polypeptide
  REGION 1..218: note = XENP020556 7G8_H0.104_L0_IgG1_PVA_/S267K Light Chain

SEQ ID NO: 23927 - protein, 111 aa, synthetic construct; identical to SEQ ID NO: 22267
  REGION 1..111: note = Description of Artificial Sequence: Synthetic polypeptide
  REGION 1..111: note = VL of XENP020556

SEQ ID NO: 23928 - protein, 15 aa, synthetic construct
  REGION 1..15: note = Description of Artificial Sequence: Synthetic peptide
  REGION 1..15: note = XENP020556 vlCDR1
KASQSVDYDGDSYMN

SEQ ID NO: 23929 - protein, 7 aa, synthetic construct
  REGION 1..7: note = Description of Artificial Sequence: Synthetic peptide
  REGION 1..7: note = XENP020556 vlCDR2
AASNLES

SEQ ID NO: 23930 - protein, 9 aa, synthetic construct
  REGION 1..9: note = Description of Artificial Sequence: Synthetic peptide
  REGION 1..9: note = XENP020556 vlCDR3
QQSNEDPFT

SEQ ID NO: 23931 - protein, 450 aa, synthetic construct
  REGION 1..450: note = Description of Artificial Sequence: Synthetic polypeptide
  REGION 1..450: note = XENP020557 7G8_H0.105_L0_IgG1_PVA_/S267K Heavy Chain
EVKLEESGGGLVQPGGSMKLSCAASGFTFSDAWMDWVRQSPEKGLEWVAEIRTKANNHATYYAESVKGRFTISRDDSKSSVYLQMNSLRAEDTGIYYCTRIANWDWYFDVWGAGTTVTVSSASTKGPSVFPLAPSSKSTSGGTAALGCLVKDYFPEPVTVSWNSGALTSGVHTFPAVLQSSGLYSLSSVVTVPSSSLGTQTYICNVNHKPSDTKVDKKVEPKSCDKTHTCPPCPAPPVAGPSVFLFPPKPKDTLMISRTPEVTCVVVDVKHEDPEVKFNWYVDGVEVHNAKTKPREEEYNSTYRVVSVLTVLHQDWLNGKEYKCKVSNKALPAPIEKTISKAKGQPREPQVYTLPPSREEMTKNQVSLTCDVSGFYPSDIAVEWESDGQPENNYKTTPPVLDSDGSFFLYSKLTVDKSRWEQGDVFSCSVMHEALHNHYTQKSLSLSPGK

SEQ ID NO: 23932 - protein, 121 aa, synthetic construct
  REGION 1..121: note = Description of Artificial Sequence: Synthetic polypeptide
  REGION 1..121: note = VH of XENP020557
EVKLEESGGGLVQPGGSMKLSCAASGFTFSDAWMDWVRQSPEKGLEWVAEIRTKANNHATYYAESVKGRFTISRDDSKSSVYLQMNSLRAEDTGIYYCTRIANWDWYFDVWGAGTTVTVSS

SEQ ID NO: 23933 - protein, 5 aa, synthetic construct
  REGION 1..5: note = Description of Artificial Sequence: Synthetic peptide
  REGION 1..5: note = XENP020557 vhCDR1
DAWMD

SEQ ID NO: 23934 - protein, 19 aa, synthetic construct
  REGION 1..19: note = Description of Artificial Sequence: Synthetic peptide
  REGION 1..19: note = XENP020557 vhCDR2
EIRTKANNHATYYAESVKG

SEQ ID NO: 23935 - protein, 10 aa, synthetic construct
  REGION 1..10: note = Description of Artificial Sequence: Synthetic peptide
  REGION 1..10: note = XENP020557 vhCDR3
IANWDWYFDV

SEQ ID NO: 23936 - protein, 218 aa, synthetic construct; identical to SEQ ID NO: 22266
  REGION 1..218: note = Description of Artificial Sequence: Synthetic polypeptide
  REGION 1..218: note = XENP020557 7G8_H0.105_L0_IgG1_PVA_/S267K Light Chain

SEQ ID NO: 23937 - protein, 111 aa, synthetic construct; identical to SEQ ID NO: 22267
  REGION 1..111: note = Description of Artificial Sequence: Synthetic polypeptide
  REGION 1..111: note = VL of XENP020557

SEQ ID NO: 23938 - protein, 15 aa, synthetic construct
  REGION 1..15: note = Description of Artificial Sequence: Synthetic peptide
  REGION 1..15: note = XENP020557 vlCDR1
KASQSVDYDGDSYMN

SEQ ID NO: 23939 - protein, 7 aa, synthetic construct
  REGION 1..7: note = Description of Artificial Sequence: Synthetic peptide
  REGION 1..7: note = XENP020557 vlCDR2
AASNLES

SEQ ID NO: 23940 - protein, 9 aa, synthetic construct
  REGION 1..9: note = Description of Artificial Sequence: Synthetic peptide
  REGION 1..9: note = XENP020557 vlCDR3
QQSNEDPFT

SEQ ID NO: 23941 - protein, 450 aa, synthetic construct
  REGION 1..450: note = Description of Artificial Sequence: Synthetic polypeptide
  REGION 1..450: note = XENP020558 7G8_H0.106_L0_IgG1_PVA_/S267K Heavy Chain
EVKLEESGGGLVQPGGSMKLSCAASGFTFSDAWMDWVRQSPEKGLEWVAEIRTKANNHATYYAESVKGRFTISRDDSKSSVYLQMNSLRAEDTGIYYCTRFANWDWYFDVWGAGTTVTVSSASTKGPSVFPLAPSSKSTSGGTAALGCLVKDYFPEPVTVSWNSGALTSGVHTFPAVLQSSGLYSLSSVVTVPSSSLGTQTYICNVNHKPSDTKVDKKVEPKSCDKTHTCPPCPAPPVAGPSVFLFPPKPKDTLMISRTPEVTCVVVDVKHEDPEVKFNWYVDGVEVHNAKTKPREEEYNSTYRVVSVLTVLHQDWLNGKEYKCKVSNKALPAPIEKTISKAKGQPREPQVYTLPPSREEMTKNQVSLTCDVSGFYPSDIAVEWESDGQPENNYKTTPPVLDSDGSFFLYSKLTVDKSRWEQGDVFSCSVMHEALHNHYTQKSLSLSPGK

SEQ ID NO: 23942 - protein, 121 aa, synthetic construct
  REGION 1..121: note = Description of Artificial Sequence: Synthetic polypeptide
  REGION 1..121: note = VH of XENP020558
EVKLEESGGGLVQPGGSMKLSCAASGFTFSDAWMDWVRQSPEKGLEWVAEIRTKANNHATYYAESVKGRFTISRDDSKSSVYLQMNSLRAEDTGIYYCTRFANWDWYFDVWGAGTTVTVSS

SEQ ID NO: 23943 - protein, 5 aa, synthetic construct
  REGION 1..5: note = Description of Artificial Sequence: Synthetic peptide
  REGION 1..5: note = XENP020558 vhCDR1
DAWMD

SEQ ID NO: 23944 - protein, 19 aa, synthetic construct
  REGION 1..19: note = Description of Artificial Sequence: Synthetic peptide
  REGION 1..19: note = XENP020558 vhCDR2
EIRTKANNHATYYAESVKG

SEQ ID NO: 23945 - protein, 10 aa, synthetic construct
  REGION 1..10: note = Description of Artificial Sequence: Synthetic peptide
  REGION 1..10: note = XENP020558 vhCDR3
FANWDWYFDV

SEQ ID NO: 23946 - protein, 218 aa, synthetic construct; identical to SEQ ID NO: 22266
  REGION 1..218: note = Description of Artificial Sequence: Synthetic polypeptide
  REGION 1..218: note = XENP020558 7G8_H0.106_L0_IgG1_PVA_/S267K Light Chain

SEQ ID NO: 23947 - protein, 111 aa, synthetic construct; identical to SEQ ID NO: 22267
  REGION 1..111: note = Description of Artificial Sequence: Synthetic polypeptide
  REGION 1..111: note = VL of XENP020558

SEQ ID NO: 23948 - protein, 15 aa, synthetic construct
  REGION 1..15: note = Description of Artificial Sequence: Synthetic peptide
  REGION 1..15: note = XENP020558 vlCDR1
KASQSVDYDGDSYMN

SEQ ID NO: 23949 - protein, 7 aa, synthetic construct
  REGION 1..7: note = Description of Artificial Sequence: Synthetic peptide
  REGION 1..7: note = XENP020558 vlCDR2
AASNLES

SEQ ID NO: 23950 - protein, 9 aa, synthetic construct
  REGION 1..9: note = Description of Artificial Sequence: Synthetic peptide
  REGION 1..9: note = XENP020558 vlCDR3
QQSNEDPFT

SEQ ID NO: 23951 - protein, 450 aa, synthetic construct
  REGION 1..450: note = Description of Artificial Sequence: Synthetic polypeptide
  REGION 1..450: note = XENP020559 7G8_H0.107_L0_IgG1_PVA_/S267K Heavy Chain
EVKLEESGGGLVQPGGSMKLSCAASGFTFSDAWMDWVRQSPEKGLEWVAEIRTKANNHATYYAESVKGRFTISRDDSKSSVYLQMNSLRAEDTGIYYCTRVANWDWYFDVWGAGTTVTVSSASTKGPSVFPLAPSSKSTSGGTAALGCLVKDYFPEPVTVSWNSGALTSGVHTFPAVLQSSGLYSLSSVVTVPSSSLGTQTYICNVNHKPSDTKVDKKVEPKSCDKTHTCPPCPAPPVAGPSVFLFPPKPKDTLMISRTPEVTCVVVDVKHEDPEVKFNWYVDGVEVHNAKTKPREEEYNSTYRVVSVLTVLHQDWLNGKEYKCKVSNKALPAPIEKTISKAKGQPREPQVYTLPPSREEMTKNQVSLTCDVSGFYPSDIAVEWESDGQPENNYKTTPPVLDSDGSFFLYSKLTVDKSRWEQGDVFSCSVMHEALHNHYTQKSLSLSPGK

SEQ ID NO: 23952 - protein, 121 aa, synthetic construct
  REGION 1..121: note = Description of Artificial Sequence: Synthetic polypeptide
  REGION 1..121: note = VH of XENP020559
EVKLEESGGGLVQPGGSMKLSCAASGFTFSDAWMDWVRQSPEKGLEWVAEIRTKANNHATYYAESVKGRFTISRDDSKSSVYLQMNSLRAEDTGIYYCTRVANWDWYFDVWGAGTTVTVSS

SEQ ID NO: 23953 - protein, 5 aa, synthetic construct
  REGION 1..5: note = Description of Artificial Sequence: Synthetic peptide
  REGION 1..5: note = XENP020559 vhCDR1
DAWMD

SEQ ID NO: 23954 - protein, 19 aa, synthetic construct
  REGION 1..19: note = Description of Artificial Sequence: Synthetic peptide
  REGION 1..19: note = XENP020559 vhCDR2
EIRTKANNHATYYAESVKG

SEQ ID NO: 23955 - protein, 10 aa, synthetic construct
  REGION 1..10: note = Description of Artificial Sequence: Synthetic peptide
  REGION 1..10: note = XENP020559 vhCDR3
VANWDWYFDV

SEQ ID NO: 23956 - protein, 218 aa, synthetic construct; identical to SEQ ID NO: 22266
  REGION 1..218: note = Description of Artificial Sequence: Synthetic polypeptide
  REGION 1..218: note = XENP020559 7G8_H0.107_L0_IgG1_PVA_/S267K Light Chain

SEQ ID NO: 23957 - protein, 111 aa, synthetic construct; identical to SEQ ID NO: 22267
  REGION 1..111: note = Description of Artificial Sequence: Synthetic polypeptide
  REGION 1..111: note = VL of XENP020559

SEQ ID NO: 23958 - protein, 15 aa, synthetic construct
  REGION 1..15: note = Description of Artificial Sequence: Synthetic peptide
  REGION 1..15: note = XENP020559 vlCDR1
KASQSVDYDGDSYMN

SEQ ID NO: 23959 - protein, 7 aa, synthetic construct
  REGION 1..7: note = Description of Artificial Sequence: Synthetic peptide
  REGION 1..7: note = XENP020559 vlCDR2
AASNLES

SEQ ID NO: 23960 - protein, 9 aa, synthetic construct
  REGION 1..9: note = Description of Artificial Sequence: Synthetic peptide
  REGION 1..9: note = XENP020559 vlCDR3
QQSNEDPFT

SEQ ID NO: 23961 - protein, 450 aa, synthetic construct
  REGION 1..450: note = Description of Artificial Sequence: Synthetic polypeptide
  REGION 1..450: note = XENP020560 7G8_H0.108_L0_IgG1_PVA_/S267K Heavy Chain
EVKLEESGGGLVQPGGSMKLSCAASGFTFSDAWMDWVRQSPEKGLEWVAEIRTKANNHATYYAESVKGRFTISRDDSKSSVYLQMNSLRAEDTGIYYCTRYANWDWYFDVWGAGTTVTVSSASTKGPSVFPLAPSSKSTSGGTAALGCLVKDYFPEPVTVSWNSGALTSGVHTFPAVLQSSGLYSLSSVVTVPSSSLGTQTYICNVNHKPSDTKVDKKVEPKSCDKTHTCPPCPAPPVAGPSVFLFPPKPKDTLMISRTPEVTCVVVDVKHEDPEVKFNWYVDGVEVHNAKTKPREEEYNSTYRVVSVLTVLHQDWLNGKEYKCKVSNKALPAPIEKTISKAKGQPREPQVYTLPPSREEMTKNQVSLTCDVSGFYPSDIAVEWESDGQPENNYKTTPPVLDSDGSFFLYSKLTVDKSRWEQGDVFSCSVMHEALHNHYTQKSLSLSPGK

SEQ ID NO: 23962 - protein, 121 aa, synthetic construct
  REGION 1..121: note = Description of Artificial Sequence: Synthetic polypeptide
  REGION 1..121: note = VH of XENP020560
EVKLEESGGGLVQPGGSMKLSCAASGFTFSDAWMDWVRQSPEKGLEWVAEIRTKANNHATYYAESVKGRFTISRDDSKSSVYLQMNSLRAEDTGIYYCTRYANWDWYFDVWGAGTTVTVSS

SEQ ID NO: 23963 - protein, 5 aa, synthetic construct
  REGION 1..5: note = Description of Artificial Sequence: Synthetic peptide
  REGION 1..5: note = XENP020560 vhCDR1
DAWMD

SEQ ID NO: 23964 - protein, 19 aa, synthetic construct
  REGION 1..19: note = Description of Artificial Sequence: Synthetic peptide
  REGION 1..19: note = XENP020560 vhCDR2
EIRTKANNHATYYAESVKG

SEQ ID NO: 23965 - protein, 10 aa, synthetic construct
  REGION 1..10: note = Description of Artificial Sequence: Synthetic peptide
  REGION 1..10: note = XENP020560 vhCDR3
YANWDWYFDV

SEQ ID NO: 23966 - protein, 218 aa, synthetic construct; identical to SEQ ID NO: 22266
  REGION 1..218: note = Description of Artificial Sequence: Synthetic polypeptide
  REGION 1..218: note = XENP020560 7G8_H0.108_L0_IgG1_PVA_/S267K Light Chain

SEQ ID NO: 23967 - protein, 111 aa, synthetic construct; identical to SEQ ID NO: 22267
  REGION 1..111: note = Description of Artificial Sequence: Synthetic polypeptide
  REGION 1..111: note = VL of XENP020560

SEQ ID NO: 23968 - protein, 15 aa, synthetic construct
  REGION 1..15: note = Description of Artificial Sequence: Synthetic peptide
  REGION 1..15: note = XENP020560 vlCDR1
KASQSVDYDGDSYMN

SEQ ID NO: 23969 - protein, 7 aa, synthetic construct
  REGION 1..7: note = Description of Artificial Sequence: Synthetic peptide
  REGION 1..7: note = XENP020560 vlCDR2
AASNLES

SEQ ID NO: 23970 - protein, 9 aa, synthetic construct
  REGION 1..9: note = Description of Artificial Sequence: Synthetic peptide
  REGION 1..9: note = XENP020560 vlCDR3
QQSNEDPFT

SEQ ID NO: 23971 - protein, 450 aa, synthetic construct
  REGION 1..450: note = Description of Artificial Sequence: Synthetic polypeptide
  REGION 1..450: note = XENP020561 7G8_H0.109_L0_IgG1_PVA_/S267K Heavy Chain
EVKLEESGGGLVQPGGSMKLSCAASGFTFSDAWMDWVRQSPEKGLEWVAEIRTKANNHATYYAESVKGRFTISRDDSKSSVYLQMNSLRAEDTGIYYCTRWANWDWYFDVWGAGTTVTVSSASTKGPSVFPLAPSSKSTSGGTAALGCLVKDYFPEPVTVSWNSGALTSGVHTFPAVLQSSGLYSLSSVVTVPSSSLGTQTYICNVNHKPSDTKVDKKVEPKSCDKTHTCPPCPAPPVAGPSVFLFPPKPKDTLMISRTPEVTCVVVDVKHEDPEVKFNWYVDGVEVHNAKTKPREEEYNSTYRVVSVLTVLHQDWLNGKEYKCKVSNKALPAPIEKTISKAKGQPREPQVYTLPPSREEMTKNQVSLTCDVSGFYPSDIAVEWESDGQPENNYKTTPPVLDSDGSFFLYSKLTVDKSRWEQGDVFSCSVMHEALHNHYTQKSLSLSPGK

SEQ ID NO: 23972 - protein, 121 aa, synthetic construct
  REGION 1..121: note = Description of Artificial Sequence: Synthetic polypeptide
  REGION 1..121: note = VH of XENP020561
EVKLEESGGGLVQPGGSMKLSCAASGFTFSDAWMDWVRQSPEKGLEWVAEIRTKANNHATYYAESVKGRFTISRDDSKSSVYLQMNSLRAEDTGIYYCTRWANWDWYFDVWGAGTTVTVSS

SEQ ID NO: 23973 - protein, 5 aa, synthetic construct
  REGION 1..5: note = Description of Artificial Sequence: Synthetic peptide
  REGION 1..5: note = XENP020561 vhCDR1
DAWMD

SEQ ID NO: 23974 - protein, 19 aa, synthetic construct
  REGION 1..19: note = Description of Artificial Sequence: Synthetic peptide
  REGION 1..19: note = XENP020561 vhCDR2
EIRTKANNHATYYAESVKG

SEQ ID NO: 23975 - protein, 10 aa, synthetic construct
  REGION 1..10: note = Description of Artificial Sequence: Synthetic peptide
  REGION 1..10: note = XENP020561 vhCDR3
WANWDWYFDV

SEQ ID NO: 23976 - protein, 218 aa, synthetic construct; identical to SEQ ID NO: 22266
  REGION 1..218: note = Description of Artificial Sequence: Synthetic polypeptide
  REGION 1..218: note = XENP020561 7G8_H0.109_L0_IgG1_PVA_/S267K Light Chain

SEQ ID NO: 23977 - protein, 111 aa, synthetic construct; identical to SEQ ID NO: 22267
  REGION 1..111: note = Description of Artificial Sequence: Synthetic polypeptide
  REGION 1..111: note = VL of XENP020561

SEQ ID NO: 23978 - protein, 15 aa, synthetic construct
  REGION 1..15: note = Description of Artificial Sequence: Synthetic peptide
  REGION 1..15: note = XENP020561 vlCDR1
KASQSVDYDGDSYMN

SEQ ID NO: 23979 - protein, 7 aa, synthetic construct
  REGION 1..7: note = Description of Artificial Sequence: Synthetic peptide
  REGION 1..7: note = XENP020561 vlCDR2
AASNLES

SEQ ID NO: 23980 - protein, 9 aa, synthetic construct
  REGION 1..9: note = Description of Artificial Sequence: Synthetic peptide
  REGION 1..9: note = XENP020561 vlCDR3
QQSNEDPFT

SEQ ID NO: 23981 - protein, 450 aa, synthetic construct
  REGION 1..450: note = Description of Artificial Sequence: Synthetic polypeptide
  REGION 1..450: note = XENP020562 7G8_H0.110_L0_IgG1_PVA_/S267K Heavy Chain
EVKLEESGGGLVQPGGSMKLSCAASGFTFSDAWMDWVRQSPEKGLEWVAEIRTKANNHATYYAESVKGRFTISRDDSKSSVYLQMNSLRAEDTGIYYCTRDANWDWYFDVWGAGTTVTVSSASTKGPSVFPLAPSSKSTSGGTAALGCLVKDYFPEPVTVSWNSGALTSGVHTFPAVLQSSGLYSLSSVVTVPSSSLGTQTYICNVNHKPSDTKVDKKVEPKSCDKTHTCPPCPAPPVAGPSVFLFPPKPKDTLMISRTPEVTCVVVDVKHEDPEVKFNWYVDGVEVHNAKTKPREEEYNSTYRVVSVLTVLHQDWLNGKEYKCKVSNKALPAPIEKTISKAKGQPREPQVYTLPPSREEMTKNQVSLTCDVSGFYPSDIAVEWESDGQPENNYKTTPPVLDSDGSFFLYSKLTVDKSRWEQGDVFSCSVMHEALHNHYTQKSLSLSPGK

SEQ ID NO: 23982 - protein, 121 aa, synthetic construct
  REGION 1..121: note = Description of Artificial Sequence: Synthetic polypeptide
  REGION 1..121: note = VH of XENP020562
EVKLEESGGGLVQPGGSMKLSCAASGFTFSDAWMDWVRQSPEKGLEWVAEIRTKANNHATYYAESVKGRFTISRDDSKSSVYLQMNSLRAEDTGIYYCTRDANWDWYFDVWGAGTTVTVSS

SEQ ID NO: 23983 - protein, 5 aa, synthetic construct
  REGION 1..5: note = Description of Artificial Sequence: Synthetic peptide
  REGION 1..5: note = XENP020562 vhCDR1
DAWMD

SEQ ID NO: 23984 - protein, 19 aa, synthetic construct
  REGION 1..19: note = Description of Artificial Sequence: Synthetic peptide
  REGION 1..19: note = XENP020562 vhCDR2
EIRTKANNHATYYAESVKG

SEQ ID NO: 23985 - protein, 10 aa, synthetic construct
  REGION 1..10: note = Description of Artificial Sequence: Synthetic peptide
  REGION 1..10: note = XENP020562 vhCDR3
DANWDWYFDV

SEQ ID NO: 23986 - protein, 218 aa, synthetic construct; identical to SEQ ID NO: 22266
  REGION 1..218: note = Description of Artificial Sequence: Synthetic polypeptide
  REGION 1..218: note = XENP020562 7G8_H0.110_L0_IgG1_PVA_/S267K Light Chain

SEQ ID NO: 23987 - protein, 111 aa, synthetic construct; identical to SEQ ID NO: 22267
  REGION 1..111: note = Description of Artificial Sequence: Synthetic polypeptide
  REGION 1..111: note = VL of XENP020562

SEQ ID NO: 23988 - protein, 15 aa, synthetic construct
  REGION 1..15: note = Description of Artificial Sequence: Synthetic peptide
  REGION 1..15: note = XENP020562 vlCDR1
KASQSVDYDGDSYMN

SEQ ID NO: 23989 - protein, 7 aa, synthetic construct
  REGION 1..7: note = Description of Artificial Sequence: Synthetic peptide
  REGION 1..7: note = XENP020562 vlCDR2
AASNLES

SEQ ID NO: 23990 - protein, 9 aa, synthetic construct
  REGION 1..9: note = Description of Artificial Sequence: Synthetic peptide
  REGION 1..9: note = XENP020562 vlCDR3
QQSNEDPFT

SEQ ID NO: 23991 - protein, 450 aa, synthetic construct
  REGION 1..450: note = Description of Artificial Sequence: Synthetic polypeptide
  REGION 1..450: note = XENP020563 7G8_H0.111_L0_IgG1_PVA_/S267K Heavy Chain
EVKLEESGGGLVQPGGSMKLSCAASGFTFSDAWMDWVRQSPEKGLEWVAEIRTKANNHATYYAESVKGRFTISRDDSKSSVYLQMNSLRAEDTGIYYCTRAANWDWYFDVWGAGTTVTVSSASTKGPSVFPLAPSSKSTSGGTAALGCLVKDYFPEPVTVSWNSGALTSGVHTFPAVLQSSGLYSLSSVVTVPSSSLGTQTYICNVNHKPSDTKVDKKVEPKSCDKTHTCPPCPAPPVAGPSVFLFPPKPKDTLMISRTPEVTCVVVDVKHEDPEVKFNWYVDGVEVHNAKTKPREEEYNSTYRVVSVLTVLHQDWLNGKEYKCKVSNKALPAPIEKTISKAKGQPREPQVYTLPPSREEMTKNQVSLTCDVSGFYPSDIAVEWESDGQPENNYKTTPPVLDSDGSFFLYSKLTVDKSRWEQGDVFSCSVMHEALHNHYTQKSLSLSPGK

SEQ ID NO: 23992 - protein, 121 aa, synthetic construct
  REGION 1..121: note = Description of Artificial Sequence: Synthetic polypeptide
  REGION 1..121: note = VH of XENP020563
EVKLEESGGGLVQPGGSMKLSCAASGFTFSDAWMDWVRQSPEKGLEWVAEIRTKANNHATYYAESVKGRFTISRDDSKSSVYLQMNSLRAEDTGIYYCTRAANWDWYFDVWGAGTTVTVSS

SEQ ID NO: 23993 - protein, 5 aa, synthetic construct
  REGION 1..5: note = Description of Artificial Sequence: Synthetic peptide
  REGION 1..5: note = XENP020563 vhCDR1
DAWMD

SEQ ID NO: 23994 - protein, 19 aa, synthetic construct
  REGION 1..19: note = Description of Artificial Sequence: Synthetic peptide
  REGION 1..19: note = XENP020563 vhCDR2
EIRTKANNHATYYAESVKG

SEQ ID NO: 23995 - protein, 10 aa, synthetic construct
  REGION 1..10: note = Description of Artificial Sequence: Synthetic peptide
  REGION 1..10: note = XENP020563 vhCDR3
AANWDWYFDV

SEQ ID NO: 23996 - protein, 218 aa, synthetic construct; identical to SEQ ID NO: 22266
  REGION 1..218: note = Description of Artificial Sequence: Synthetic polypeptide
  REGION 1..218: note = XENP020563 7G8_H0.111_L0_IgG1_PVA_/S267K Light Chain

SEQ ID NO: 23997 - protein, 111 aa, synthetic construct; identical to SEQ ID NO: 22267
  REGION 1..111: note = Description of Artificial Sequence: Synthetic polypeptide
  REGION 1..111: note = VL of XENP020563

SEQ ID NO: 23998 - protein, 15 aa, synthetic construct
  REGION 1..15: note = Description of Artificial Sequence: Synthetic peptide
  REGION 1..15: note = XENP020563 vlCDR1
KASQSVDYDGDSYMN

SEQ ID NO: 23999 - protein, 7 aa, synthetic construct
  REGION 1..7: note = Description of Artificial Sequence: Synthetic peptide
  REGION 1..7: note = XENP020563 vlCDR2
AASNLES

SEQ ID NO: 24000 - protein, 9 aa, synthetic construct
  REGION 1..9: note = Description of Artificial Sequence: Synthetic peptide
  REGION 1..9: note = XENP020563 vlCDR3
QQSNEDPFT

SEQ ID NO: 24001 - protein, 450 aa, synthetic construct
  REGION 1..450: note = Description of Artificial Sequence: Synthetic polypeptide
  REGION 1..450: note = XENP020564 7G8_H0.112_L0_IgG1_PVA_/S267K Heavy Chain
EVKLEESGGGLVQPGGSMKLSCAASGFTFSDAWMDWVRQSPEKGLEWVAEIRTKANNHATYYAESVKGRFTISRDDSKSSVYLQMNSLRAEDTGIYYCTRQANWDWYFDVWGAGTTVTVSSASTKGPSVFPLAPSSKSTSGGTAALGCLVKDYFPEPVTVSWNSGALTSGVHTFPAVLQSSGLYSLSSVVTVPSSSLGTQTYICNVNHKPSDTKVDKKVEPKSCDKTHTCPPCPAPPVAGPSVFLFPPKPKDTLMISRTPEVTCVVVDVKHEDPEVKFNWYVDGVEVHNAKTKPREEEYNSTYRVVSVLTVLHQDWLNGKEYKCKVSNKALPAPIEKTISKAKGQPREPQVYTLPPSREEMTKNQVSLTCDVSGFYPSDIAVEWESDGQPENNYKTTPPVLDSDGSFFLYSKLTVDKSRWEQGDVFSCSVMHEALHNHYTQKSLSLSPGK

SEQ ID NO: 24002 - protein, 121 aa, synthetic construct
  REGION 1..121: note = Description of Artificial Sequence: Synthetic polypeptide
  REGION 1..121: note = VH of XENP020564
EVKLEESGGGLVQPGGSMKLSCAASGFTFSDAWMDWVRQSPEKGLEWVAEIRTKANNHATYYAESVKGRFTISRDDSKSSVYLQMNSLRAEDTGIYYCTRQANWDWYFDVWGAGTTVTVSS

SEQ ID NO: 24003 - protein, 5 aa, synthetic construct
  REGION 1..5: note = Description of Artificial Sequence: Synthetic peptide
  REGION 1..5: note = XENP020564 vhCDR1
DAWMD

SEQ ID NO: 24004 - protein, 19 aa, synthetic construct
  REGION 1..19: note = Description of Artificial Sequence: Synthetic peptide
  REGION 1..19: note = XENP020564 vhCDR2
EIRTKANNHATYYAESVKG

SEQ ID NO: 24005 - protein, 10 aa, synthetic construct
  REGION 1..10: note = Description of Artificial Sequence: Synthetic peptide
  REGION 1..10: note = XENP020564 vhCDR3
QANWDWYFDV

SEQ ID NO: 24006 - protein, 218 aa, synthetic construct; identical to SEQ ID NO: 22266
  REGION 1..218: note = Description of Artificial Sequence: Synthetic polypeptide
  REGION 1..218: note = XENP020564 7G8_H0.112_L0_IgG1_PVA_/S267K Light Chain

SEQ ID NO: 24007 - protein, 111 aa, synthetic construct; identical to SEQ ID NO: 22267
  REGION 1..111: note = Description of Artificial Sequence: Synthetic polypeptide
  REGION 1..111: note = VL of XENP020564

SEQ ID NO: 24008 - protein, 15 aa, synthetic construct
  REGION 1..15: note = Description of Artificial Sequence: Synthetic peptide
  REGION 1..15: note = XENP020564 vlCDR1
KASQSVDYDGDSYMN

SEQ ID NO: 24009 - protein, 7 aa, synthetic construct
  REGION 1..7: note = Description of Artificial Sequence: Synthetic peptide
  REGION 1..7: note = XENP020564 vlCDR2
AASNLES

SEQ ID NO: 24010 - protein, 9 aa, synthetic construct
  REGION 1..9: note = Description of Artificial Sequence: Synthetic peptide
  REGION 1..9: note = XENP020564 vlCDR3
QQSNEDPFT

SEQ ID NO: 24011 - protein, 450 aa, synthetic construct
  REGION 1..450: note = Description of Artificial Sequence: Synthetic polypeptide
  REGION 1..450: note = XENP020565 7G8_H0.113_L0_IgG1_PVA_/S267K Heavy Chain
EVKLEESGGGLVQPGGSMKLSCAASGFTFSDAWMDWVRQSPEKGLEWVAEIRTKANNHATYYAESVKGRFTISRDDSKSSVYLQMNSLRAEDTGIYYCTRKANWDWYFDVWGAGTTVTVSSASTKGPSVFPLAPSSKSTSGGTAALGCLVKDYFPEPVTVSWNSGALTSGVHTFPAVLQSSGLYSLSSVVTVPSSSLGTQTYICNVNHKPSDTKVDKKVEPKSCDKTHTCPPCPAPPVAGPSVFLFPPKPKDTLMISRTPEVTCVVVDVKHEDPEVKFNWYVDGVEVHNAKTKPREEEYNSTYRVVSVLTVLHQDWLNGKEYKCKVSNKALPAPIEKTISKAKGQPREPQVYTLPPSREEMTKNQVSLTCDVSGFYPSDIAVEWESDGQPENNYKTTPPVLDSDGSFFLYSKLTVDKSRWEQGDVFSCSVMHEALHNHYTQKSLSLSPGK

SEQ ID NO: 24012 - protein, 121 aa, synthetic construct
  REGION 1..121: note = Description of Artificial Sequence: Synthetic polypeptide
  REGION 1..121: note = VH of XENP020565
EVKLEESGGGLVQPGGSMKLSCAASGFTFSDAWMDWVRQSPEKGLEWVAEIRTKANNHATYYAESVKGRFTISRDDSKSSVYLQMNSLRAEDTGIYYCTRKANWDWYFDVWGAGTTVTVSS

SEQ ID NO: 24013 - protein, 5 aa, synthetic construct
  REGION 1..5: note = Description of Artificial Sequence: Synthetic peptide
  REGION 1..5: note = XENP020565 vhCDR1
DAWMD

SEQ ID NO: 24014 - protein, 19 aa, synthetic construct
  REGION 1..19: note = Description of Artificial Sequence: Synthetic peptide
  REGION 1..19: note = XENP020565 vhCDR2
EIRTKANNHATYYAESVKG

SEQ ID NO: 24015 - protein, 10 aa, synthetic construct
  REGION 1..10: note = Description of Artificial Sequence: Synthetic peptide
  REGION 1..10: note = XENP020565 vhCDR3
KANWDWYFDV

SEQ ID NO: 24016 - protein, 218 aa, synthetic construct; identical to SEQ ID NO: 22266
  REGION 1..218: note = Description of Artificial Sequence: Synthetic polypeptide
  REGION 1..218: note = XENP020565 7G8_H0.113_L0_IgG1_PVA_/S267K Light Chain

SEQ ID NO: 24017 - protein, 111 aa, synthetic construct; identical to SEQ ID NO: 22267
  REGION 1..111: note = Description of Artificial Sequence: Synthetic polypeptide
  REGION 1..111: note = VL of XENP020565

SEQ ID NO: 24018 - protein, 15 aa, synthetic construct
  REGION 1..15: note = Description of Artificial Sequence: Synthetic peptide
  REGION 1..15: note = XENP020565 vlCDR1
KASQSVDYDGDSYMN

SEQ ID NO: 24019 - protein, 7 aa, synthetic construct
  REGION 1..7: note = Description of Artificial Sequence: Synthetic peptide
  REGION 1..7: note = XENP020565 vlCDR2
AASNLES

SEQ ID NO: 24020 - protein, 9 aa, synthetic construct
  REGION 1..9: note = Description of Artificial Sequence: Synthetic peptide
  REGION 1..9: note = XENP020565 vlCDR3
QQSNEDPFT

SEQ ID NO: 24021 - protein, 450 aa, synthetic construct
  REGION 1..450: note = Description of Artificial Sequence: Synthetic polypeptide
  REGION 1..450: note = XENP020566 7G8_H0.114_L0_IgG1_PVA_/S267K Heavy Chain
EVKLEESGGGLVQPGGSMKLSCAASGFTFSDAWMDWVRQSPEKGLEWVAEIRTKANNHATYYAESVKGRFTISRDDSKSSVYLQMNSLRAEDTGIYYCTRLSNWDWYFDVWGAGTTVTVSSASTKGPSVFPLAPSSKSTSGGTAALGCLVKDYFPEPVTVSWNSGALTSGVHTFPAVLQSSGLYSLSSVVTVPSSSLGTQTYICNVNHKPSDTKVDKKVEPKSCDKTHTCPPCPAPPVAGPSVFLFPPKPKDTLMISRTPEVTCVVVDVKHEDPEVKFNWYVDGVEVHNAKTKPREEEYNSTYRVVSVLTVLHQDWLNGKEYKCKVSNKALPAPIEKTISKAKGQPREPQVYTLPPSREEMTKNQVSLTCDVSGFYPSDIAVEWESDGQPENNYKTTPPVLDSDGSFFLYSKLTVDKSRWEQGDVFSCSVMHEALHNHYTQKSLSLSPGK

SEQ ID NO: 24022 - protein, 121 aa, synthetic construct
  REGION 1..121: note = Description of Artificial Sequence: Synthetic polypeptide
  REGION 1..121: note = VH of XENP020566
EVKLEESGGGLVQPGGSMKLSCAASGFTFSDAWMDWVRQSPEKGLEWVAEIRTKANNHATYYAESVKGRFTISRDDSKSSVYLQMNSLRAEDTGIYYCTRLSNWDWYFDVWGAGTTVTVSS

SEQ ID NO: 24023 - protein, 5 aa, synthetic construct
  REGION 1..5: note = Description of Artificial Sequence: Synthetic peptide
  REGION 1..5: note = XENP020566 vhCDR1
DAWMD

SEQ ID NO: 24024 - protein, 19 aa, synthetic construct
  REGION 1..19: note = Description of Artificial Sequence: Synthetic peptide
  REGION 1..19: note = XENP020566 vhCDR2
EIRTKANNHATYYAESVKG

SEQ ID NO: 24025 - protein, 10 aa, synthetic construct
  REGION 1..10: note = Description of Artificial Sequence: Synthetic peptide
  REGION 1..10: note = XENP020566 vhCDR3
LSNWDWYFDV

SEQ ID NO: 24026 - protein, 218 aa, synthetic construct; identical to SEQ ID NO: 22266
  REGION 1..218: note = Description of Artificial Sequence: Synthetic polypeptide
  REGION 1..218: note = XENP020566 7G8_H0.114_L0_IgG1_PVA_/S267K Light Chain

SEQ ID NO: 24027 - protein, 111 aa, synthetic construct; identical to SEQ ID NO: 22267
  REGION 1..111: note = Description of Artificial Sequence: Synthetic polypeptide
  REGION 1..111: note = VL of XENP020566

SEQ ID NO: 24028 - protein, 15 aa, synthetic construct
  REGION 1..15: note = Description of Artificial Sequence: Synthetic peptide
  REGION 1..15: note = XENP020566 vlCDR1
KASQSVDYDGDSYMN

SEQ ID NO: 24029 - protein, 7 aa, synthetic construct
  REGION 1..7: note = Description of Artificial Sequence: Synthetic peptide
  REGION 1..7: note = XENP020566 vlCDR2
AASNLES

SEQ ID NO: 24030 - protein, 9 aa, synthetic construct
  REGION 1..9: note = Description of Artificial Sequence: Synthetic peptide
  REGION 1..9: note = XENP020566 vlCDR3
QQSNEDPFT

SEQ ID NO: 24031 - protein, 450 aa, synthetic construct
  REGION 1..450: note = Description of Artificial Sequence: Synthetic polypeptide
  REGION 1..450: note = XENP020567 7G8_H0.115_L0_IgG1_PVA_/S267K Heavy Chain
EVKLEESGGGLVQPGGSMKLSCAASGFTFSDAWMDWVRQSPEKGLEWVAEIRTKANNHATYYAESVKGRFTISRDDSKSSVYLQMNSLRAEDTGIYYCTRLTNWDWYFDVWGAGTTVTVSSASTKGPSVFPLAPSSKSTSGGTAALGCLVKDYFPEPVTVSWNSGALTSGVHTFPAVLQSSGLYSLSSVVTVPSSSLGTQTYICNVNHKPSDTKVDKKVEPKSCDKTHTCPPCPAPPVAGPSVFLFPPKPKDTLMISRTPEVTCVVVDVKHEDPEVKFNWYVDGVEVHNAKTKPREEEYNSTYRVVSVLTVLHQDWLNGKEYKCKVSNKALPAPIEKTISKAKGQPREPQVYTLPPSREEMTKNQVSLTCDVSGFYPSDIAVEWESDGQPENNYKTTPPVLDSDGSFFLYSKLTVDKSRWEQGDVFSCSVMHEALHNHYTQKSLSLSPGK

SEQ ID NO: 24032 - protein, 121 aa, synthetic construct
  REGION 1..121: note = Description of Artificial Sequence: Synthetic polypeptide
  REGION 1..121: note = VH of XENP020567
EVKLEESGGGLVQPGGSMKLSCAASGFTFSDAWMDWVRQSPEKGLEWVAEIRTKANNHATYYAESVKGRFTISRDDSKSSVYLQMNSLRAEDTGIYYCTRLTNWDWYFDVWGAGTTVTVSS

SEQ ID NO: 24033 - protein, 5 aa, synthetic construct
  REGION 1..5: note = Description of Artificial Sequence: Synthetic peptide
  REGION 1..5: note = XENP020567 vhCDR1
DAWMD

SEQ ID NO: 24034 - protein, 19 aa, synthetic construct
  REGION 1..19: note = Description of Artificial Sequence: Synthetic peptide
  REGION 1..19: note = XENP020567 vhCDR2
EIRTKANNHATYYAESVKG

SEQ ID NO: 24035 - protein, 10 aa, synthetic construct
  REGION 1..10: note = Description of Artificial Sequence: Synthetic peptide
  REGION 1..10: note = XENP020567 vhCDR3
LTNWDWYFDV

SEQ ID NO: 24036 - protein, 218 aa, synthetic construct; identical to SEQ ID NO: 22266
  REGION 1..218: note = Description of Artificial Sequence: Synthetic polypeptide
  REGION 1..218: note = XENP020567 7G8_H0.115_L0_IgG1_PVA_/S267K Light Chain

SEQ ID NO: 24037 - protein, 111 aa, synthetic construct; identical to SEQ ID NO: 22267
  REGION 1..111: note = Description of Artificial Sequence: Synthetic polypeptide
  REGION 1..111: note = VL of XENP020567

SEQ ID NO: 24038 - protein, 15 aa, synthetic construct
  REGION 1..15: note = Description of Artificial Sequence: Synthetic peptide
  REGION 1..15: note = XENP020567 vlCDR1
KASQSVDYDGDSYMN

SEQ ID NO: 24039 - protein, 7 aa, synthetic construct
  REGION 1..7: note = Description of Artificial Sequence: Synthetic peptide
  REGION 1..7: note = XENP020567 vlCDR2
AASNLES

SEQ ID NO: 24040 - protein, 9 aa, synthetic construct
  REGION 1..9: note = Description of Artificial Sequence: Synthetic peptide
  REGION 1..9: note = XENP020567 vlCDR3
QQSNEDPFT

SEQ ID NO: 24041 - protein, 450 aa, synthetic construct
  REGION 1..450: note = Description of Artificial Sequence: Synthetic polypeptide
  REGION 1..450: note = XENP020568 7G8_H0.116_L0_IgG1_PVA_/S267K Heavy Chain
EVKLEESGGGLVQPGGSMKLSCAASGFTFSDAWMDWVRQSPEKGLEWVAEIRTKANNHATYYAESVKGRFTISRDDSKSSVYLQMNSLRAEDTGIYYCTRLGNWDWYFDVWGAGTTVTVSSASTKGPSVFPLAPSSKSTSGGTAALGCLVKDYFPEPVTVSWNSGALTSGVHTFPAVLQSSGLYSLSSVVTVPSSSLGTQTYICNVNHKPSDTKVDKKVEPKSCDKTHTCPPCPAPPVAGPSVFLFPPKPKDTLMISRTPEVTCVVVDVKHEDPEVKFNWYVDGVEVHNAKTKPREEEYNSTYRVVSVLTVLHQDWLNGKEYKCKVSNKALPAPIEKTISKAKGQPREPQVYTLPPSREEMTKNQVSLTCDVSGFYPSDIAVEWESDGQPENNYKTTPPVLDSDGSFFLYSKLTVDKSRWEQGDVFSCSVMHEALHNHYTQKSLSLSPGK

SEQ ID NO: 24042 - protein, 121 aa, synthetic construct
  REGION 1..121: note = Description of Artificial Sequence: Synthetic polypeptide
  REGION 1..121: note = VH of XENP020568
EVKLEESGGGLVQPGGSMKLSCAASGFTFSDAWMDWVRQSPEKGLEWVAEIRTKANNHATYYAESVKGRFTISRDDSKSSVYLQMNSLRAEDTGIYYCTRLGNWDWYFDVWGAGTTVTVSS

SEQ ID NO: 24043 - protein, 5 aa, synthetic construct
  REGION 1..5: note = Description of Artificial Sequence: Synthetic peptide
  REGION 1..5: note = XENP020568 vhCDR1
DAWMD

SEQ ID NO: 24044 - protein, 19 aa, synthetic construct
  REGION 1..19: note = Description of Artificial Sequence: Synthetic peptide
  REGION 1..19: note = XENP020568 vhCDR2
EIRTKANNHATYYAESVKG

SEQ ID NO: 24045 - protein, 10 aa, synthetic construct
  REGION 1..10: note = Description of Artificial Sequence: Synthetic peptide
  REGION 1..10: note = XENP020568 vhCDR3
LGNWDWYFDV

SEQ ID NO: 24046 - protein, 218 aa, synthetic construct; identical to SEQ ID NO: 22266
  REGION 1..218: note = Description of Artificial Sequence: Synthetic polypeptide
  REGION 1..218: note = XENP020568 7G8_H0.116_L0_IgG1_PVA_/S267K Light Chain

SEQ ID NO: 24047 - protein, 111 aa, synthetic construct; identical to SEQ ID NO: 22267
  REGION 1..111: note = Description of Artificial Sequence: Synthetic polypeptide
  REGION 1..111: note = VL of XENP020568

SEQ ID NO: 24048 - protein, 15 aa, synthetic construct
  REGION 1..15: note = Description of Artificial Sequence: Synthetic peptide
  REGION 1..15: note = XENP020568 vlCDR1
KASQSVDYDGDSYMN

SEQ ID NO: 24049 - protein, 7 aa, synthetic construct
  REGION 1..7: note = Description of Artificial Sequence: Synthetic peptide
  REGION 1..7: note = XENP020568 vlCDR2
AASNLES

SEQ ID NO: 24050 - protein, 9 aa, synthetic construct
  REGION 1..9: note = Description of Artificial Sequence: Synthetic peptide
  REGION 1..9: note = XENP020568 vlCDR3
QQSNEDPFT

SEQ ID NO: 24051 - protein, 450 aa, synthetic construct
  REGION 1..450: note = Description of Artificial Sequence: Synthetic polypeptide
  REGION 1..450: note = XENP020569 7G8_H0.117_L0_IgG1_PVA_/S267K Heavy Chain
EVKLEESGGGLVQPGGSMKLSCAASGFTFSDAWMDWVRQSPEKGLEWVAEIRTKANNHATYYAESVKGRFTISRDDSKSSVYLQMNSLRAEDTGIYYCTRLHNWDWYFDVWGAGTTVTVSSASTKGPSVFPLAPSSKSTSGGTAALGCLVKDYFPEPVTVSWNSGALTSGVHTFPAVLQSSGLYSLSSVVTVPSSSLGTQTYICNVNHKPSDTKVDKKVEPKSCDKTHTCPPCPAPPVAGPSVFLFPPKPKDTLMISRTPEVTCVVVDVKHEDPEVKFNWYVDGVEVHNAKTKPREEEYNSTYRVVSVLTVLHQDWLNGKEYKCKVSNKALPAPIEKTISKAKGQPREPQVYTLPPSREEMTKNQVSLTCDVSGFYPSDIAVEWESDGQPENNYKTTPPVLDSDGSFFLYSKLTVDKSRWEQGDVFSCSVMHEALHNHYTQKSLSLSPGK

SEQ ID NO: 24052 - protein, 121 aa, synthetic construct
  REGION 1..121: note = Description of Artificial Sequence: Synthetic polypeptide
  REGION 1..121: note = VH of XENP020569
EVKLEESGGGLVQPGGSMKLSCAASGFTFSDAWMDWVRQSPEKGLEWVAEIRTKANNHATYYAESVKGRFTISRDDSKSSVYLQMNSLRAEDTGIYYCTRLHNWDWYFDVWGAGTTVTVSS

SEQ ID NO: 24053 - protein, 5 aa, synthetic construct
  REGION 1..5: note = Description of Artificial Sequence: Synthetic peptide
  REGION 1..5: note = XENP020569 vhCDR1
DAWMD

SEQ ID NO: 24054 - protein, 19 aa, synthetic construct
  REGION 1..19: note = Description of Artificial Sequence: Synthetic peptide
  REGION 1..19: note = XENP020569 vhCDR2
EIRTKANNHATYYAESVKG

SEQ ID NO: 24055 - protein, 10 aa, synthetic construct
  REGION 1..10: note = Description of Artificial Sequence: Synthetic peptide
  REGION 1..10: note = XENP020569 vhCDR3
LHNWDWYFDV

SEQ ID NO: 24056 - protein, 218 aa, synthetic construct; identical to SEQ ID NO: 22266
  REGION 1..218: note = Description of Artificial Sequence: Synthetic polypeptide
  REGION 1..218: note = XENP020569 7G8_H0.117_L0_IgG1_PVA_/S267K Light Chain

SEQ ID NO: 24057 - protein, 111 aa, synthetic construct; identical to SEQ ID NO: 22267
  REGION 1..111: note = Description of Artificial Sequence: Synthetic polypeptide
  REGION 1..111: note = VL of XENP020569

SEQ ID NO: 24058 - protein, 15 aa, synthetic construct
  REGION 1..15: note = Description of Artificial Sequence: Synthetic peptide
  REGION 1..15: note = XENP020569 vlCDR1
KASQSVDYDGDSYMN

SEQ ID NO: 24059 - protein, 7 aa, synthetic construct
  REGION 1..7: note = Description of Artificial Sequence: Synthetic peptide
  REGION 1..7: note = XENP020569 vlCDR2
AASNLES

SEQ ID NO: 24060 - protein, 9 aa, synthetic construct
  REGION 1..9: note = Description of Artificial Sequence: Synthetic peptide
  REGION 1..9: note = XENP020569 vlCDR3
QQSNEDPFT

SEQ ID NO: 24061 - protein, 450 aa, synthetic construct
  REGION 1..450: note = Description of Artificial Sequence: Synthetic polypeptide
  REGION 1..450: note = XENP020570 7G8_H0.118_L0_IgG1_PVA_/S267K Heavy Chain
EVKLEESGGGLVQPGGSMKLSCAASGFTFSDAWMDWVRQSPEKGLEWVAEIRTKANNHATYYAESVKGRFTISRDDSKSSVYLQMNSLRAEDTGIYYCTRLQNWDWYFDVWGAGTTVTVSSASTKGPSVFPLAPSSKSTSGGTAALGCLVKDYFPEPVTVSWNSGALTSGVHTFPAVLQSSGLYSLSSVVTVPSSSLGTQTYICNVNHKPSDTKVDKKVEPKSCDKTHTCPPCPAPPVAGPSVFLFPPKPKDTLMISRTPEVTCVVVDVKHEDPEVKFNWYVDGVEVHNAKTKPREEEYNSTYRVVSVLTVLHQDWLNGKEYKCKVSNKALPAPIEKTISKAKGQPREPQVYTLPPSREEMTKNQVSLTCDVSGFYPSDIAVEWESDGQPENNYKTTPPVLDSDGSFFLYSKLTVDKSRWEQGDVFSCSVMHEALHNHYTQKSLSLSPGK

SEQ ID NO: 24062 - protein, 121 aa, synthetic construct
  REGION 1..121: note = Description of Artificial Sequence: Synthetic polypeptide
  REGION 1..121: note = VH of XENP020570
EVKLEESGGGLVQPGGSMKLSCAASGFTFSDAWMDWVRQSPEKGLEWVAEIRTKANNHATYYAESVKGRFTISRDDSKSSVYLQMNSLRAEDTGIYYCTRLQNWDWYFDVWGAGTTVTVSS

SEQ ID NO: 24063 - protein, 5 aa, synthetic construct
  REGION 1..5: note = Description of Artificial Sequence: Synthetic peptide
  REGION 1..5: note = XENP020570 vhCDR1
DAWMD

SEQ ID NO: 24064 - protein, 19 aa, synthetic construct
  REGION 1..19: note = Description of Artificial Sequence: Synthetic peptide
  REGION 1..19: note = XENP020570 vhCDR2
EIRTKANNHATYYAESVKG

SEQ ID NO: 24065 - protein, 10 aa, synthetic construct
  REGION 1..10: note = Description of Artificial Sequence: Synthetic peptide
  REGION 1..10: note = XENP020570 vhCDR3
LQNWDWYFDV

SEQ ID NO: 24066 - protein, 218 aa, synthetic construct; identical to SEQ ID NO: 22266
  REGION 1..218: note = Description of Artificial Sequence: Synthetic polypeptide
  REGION 1..218: note = XENP020570 7G8_H0.118_L0_IgG1_PVA_/S267K Light Chain

SEQ ID NO: 24067 - protein, 111 aa, synthetic construct; identical to SEQ ID NO: 22267
  REGION 1..111: note = Description of Artificial Sequence: Synthetic polypeptide
  REGION 1..111: note = VL of XENP020570

SEQ ID NO: 24068 - protein, 15 aa, synthetic construct
  REGION 1..15: note = Description of Artificial Sequence: Synthetic peptide
  REGION 1..15: note = XENP020570 vlCDR1
KASQSVDYDGDSYMN

SEQ ID NO: 24069 - protein, 7 aa, synthetic construct
  REGION 1..7: note = Description of Artificial Sequence: Synthetic peptide
  REGION 1..7: note = XENP020570 vlCDR2
AASNLES

SEQ ID NO: 24070 - protein, 9 aa, synthetic construct
  REGION 1..9: note = Description of Artificial Sequence: Synthetic peptide
  REGION 1..9: note = XENP020570 vlCDR3
QQSNEDPFT

SEQ ID NO: 24071 - protein, 450 aa, synthetic construct
  REGION 1..450: note = Description of Artificial Sequence: Synthetic polypeptide
  REGION 1..450: note = XENP020571 7G8_H0.119_L0_IgG1_PVA_/S267K Heavy Chain
EVKLEESGGGLVQPGGSMKLSCAASGFTFSDAWMDWVRQSPEKGLEWVAEIRTKANNHATYYAESVKGRFTISRDDSKSSVYLQMNSLRAEDTGIYYCTRLDNWDWYFDVWGAGTTVTVSSASTKGPSVFPLAPSSKSTSGGTAALGCLVKDYFPEPVTVSWNSGALTSGVHTFPAVLQSSGLYSLSSVVTVPSSSLGTQTYICNVNHKPSDTKVDKKVEPKSCDKTHTCPPCPAPPVAGPSVFLFPPKPKDTLMISRTPEVTCVVVDVKHEDPEVKFNWYVDGVEVHNAKTKPREEEYNSTYRVVSVLTVLHQDWLNGKEYKCKVSNKALPAPIEKTISKAKGQPREPQVYTLPPSREEMTKNQVSLTCDVSGFYPSDIAVEWESDGQPENNYKTTPPVLDSDGSFFLYSKLTVDKSRWEQGDVFSCSVMHEALHNHYTQKSLSLSPGK

SEQ ID NO: 24072 - protein, 121 aa, synthetic construct
  REGION 1..121: note = Description of Artificial Sequence: Synthetic polypeptide
  REGION 1..121: note = VH of XENP020571
EVKLEESGGGLVQPGGSMKLSCAASGFTFSDAWMDWVRQSPEKGLEWVAEIRTKANNHATYYAESVKGRFTISRDDSKSSVYLQMNSLRAEDTGIYYCTRLDNWDWYFDVWGAGTTVTVSS

SEQ ID NO: 24073 - protein, 5 aa, synthetic construct
  REGION 1..5: note = Description of Artificial Sequence: Synthetic peptide
  REGION 1..5: note = XENP020571 vhCDR1
DAWMD

SEQ ID NO: 24074 - protein, 19 aa, synthetic construct
  REGION 1..19: note = Description of Artificial Sequence: Synthetic peptide
  REGION 1..19: note = XENP020571 vhCDR2
EIRTKANNHATYYAESVKG

SEQ ID NO: 24075 - protein, 10 aa, synthetic construct
  REGION 1..10: note = Description of Artificial Sequence: Synthetic peptide
  REGION 1..10: note = XENP020571 vhCDR3
LDNWDWYFDV

SEQ ID NO: 24076 - protein, 218 aa, synthetic construct; identical to SEQ ID NO: 22266
  REGION 1..218: note = Description of Artificial Sequence: Synthetic polypeptide
  REGION 1..218: note = XENP020571 7G8_H0.119_L0_IgG1_PVA_/S267K Light Chain

SEQ ID NO: 24077 - protein, 111 aa, synthetic construct; identical to SEQ ID NO: 22267
  REGION 1..111: note = Description of Artificial Sequence: Synthetic polypeptide
  REGION 1..111: note = VL of XENP020571

SEQ ID NO: 24078 - protein, 15 aa, synthetic construct
  REGION 1..15: note = Description of Artificial Sequence: Synthetic peptide
  REGION 1..15: note = XENP020571 vlCDR1
KASQSVDYDGDSYMN

SEQ ID NO: 24079 - protein, 7 aa, synthetic construct
  REGION 1..7: note = Description of Artificial Sequence: Synthetic peptide
  REGION 1..7: note = XENP020571 vlCDR2
AASNLES

SEQ ID NO: 24080 - protein, 9 aa, synthetic construct
  REGION 1..9: note = Description of Artificial Sequence: Synthetic peptide
  REGION 1..9: note = XENP020571 vlCDR3
QQSNEDPFT

SEQ ID NO: 24081 - protein, 450 aa, synthetic construct
  REGION 1..450: note = Description of Artificial Sequence: Synthetic polypeptide
  REGION 1..450: note = XENP020572 7G8_H0.120_L0_IgG1_PVA_/S267K Heavy Chain
EVKLEESGGGLVQPGGSMKLSCAASGFTFSDAWMDWVRQSPEKGLEWVAEIRTKANNHATYYAESVKGRFTISRDDSKSSVYLQMNSLRAEDTGIYYCTRLLNWDWYFDVWGAGTTVTVSSASTKGPSVFPLAPSSKSTSGGTAALGCLVKDYFPEPVTVSWNSGALTSGVHTFPAVLQSSGLYSLSSVVTVPSSSLGTQTYICNVNHKPSDTKVDKKVEPKSCDKTHTCPPCPAPPVAGPSVFLFPPKPKDTLMISRTPEVTCVVVDVKHEDPEVKFNWYVDGVEVHNAKTKPREEEYNSTYRVVSVLTVLHQDWLNGKEYKCKVSNKALPAPIEKTISKAKGQPREPQVYTLPPSREEMTKNQVSLTCDVSGFYPSDIAVEWESDGQPENNYKTTPPVLDSDGSFFLYSKLTVDKSRWEQGDVFSCSVMHEALHNHYTQKSLSLSPGK

SEQ ID NO: 24082 - protein, 121 aa, synthetic construct
  REGION 1..121: note = Description of Artificial Sequence: Synthetic polypeptide
  REGION 1..121: note = VH of XENP020572
EVKLEESGGGLVQPGGSMKLSCAASGFTFSDAWMDWVRQSPEKGLEWVAEIRTKANNHATYYAESVKGRFTISRDDSKSSVYLQMNSLRAEDTGIYYCTRLLNWDWYFDVWGAGTTVTVSS

SEQ ID NO: 24083 - protein, 5 aa, synthetic construct
  REGION 1..5: note = Description of Artificial Sequence: Synthetic peptide
  REGION 1..5: note = XENP020572 vhCDR1
DAWMD

SEQ ID NO: 24084 - protein, 19 aa, synthetic construct
  REGION 1..19: note = Description of Artificial Sequence: Synthetic peptide
  REGION 1..19: note = XENP020572 vhCDR2
EIRTKANNHATYYAESVKG

SEQ ID NO: 24085 - protein, 10 aa, synthetic construct
  REGION 1..10: note = Description of Artificial Sequence: Synthetic peptide
  REGION 1..10: note = XENP020572 vhCDR3
LLNWDWYFDV

SEQ ID NO: 24086 - protein, 218 aa, synthetic construct; identical to SEQ ID NO: 22266
  REGION 1..218: note = Description of Artificial Sequence: Synthetic polypeptide
  REGION 1..218: note = XENP020572 7G8_H0.120_L0_IgG1_PVA_/S267K Light Chain

SEQ ID NO: 24087 - protein, 111 aa, synthetic construct; identical to SEQ ID NO: 22267
  REGION 1..111: note = Description of Artificial Sequence: Synthetic polypeptide
  REGION 1..111: note = VL of XENP020572

SEQ ID NO: 24088 - protein, 15 aa, synthetic construct
  REGION 1..15: note = Description of Artificial Sequence: Synthetic peptide
  REGION 1..15: note = XENP020572 vlCDR1
KASQSVDYDGDSYMN

SEQ ID NO: 24089 - protein, 7 aa, synthetic construct
  REGION 1..7: note = Description of Artificial Sequence: Synthetic peptide
  REGION 1..7: note = XENP020572 vlCDR2
AASNLES

SEQ ID NO: 24090 - protein, 9 aa, synthetic construct
  REGION 1..9: note = Description of Artificial Sequence: Synthetic peptide
  REGION 1..9: note = XENP020572 vlCDR3
QQSNEDPFT

SEQ ID NO: 24091 - protein, 450 aa, synthetic construct
  REGION 1..450: note = Description of Artificial Sequence: Synthetic polypeptide
  REGION 1..450: note = XENP020573 7G8_H0.121_L0_IgG1_PVA_/S267K Heavy Chain
EVKLEESGGGLVQPGGSMKLSCAASGFTFSDAWMDWVRQSPEKGLEWVAEIRTKANNHATYYAESVKGRFTISRDDSKSSVYLQMNSLRAEDTGIYYCTRLKNWDWYFDVWGAGTTVTVSSASTKGPSVFPLAPSSKSTSGGTAALGCLVKDYFPEPVTVSWNSGALTSGVHTFPAVLQSSGLYSLSSVVTVPSSSLGTQTYICNVNHKPSDTKVDKKVEPKSCDKTHTCPPCPAPPVAGPSVFLFPPKPKDTLMISRTPEVTCVVVDVKHEDPEVKFNWYVDGVEVHNAKTKPREEEYNSTYRVVSVLTVLHQDWLNGKEYKCKVSNKALPAPIEKTISKAKGQPREPQVYTLPPSREEMTKNQVSLTCDVSGFYPSDIAVEWESDGQPENNYKTTPPVLDSDGSFFLYSKLTVDKSRWEQGDVFSCSVMHEALHNHYTQKSLSLSPGK

SEQ ID NO: 24092 - protein, 121 aa, synthetic construct
  REGION 1..121: note = Description of Artificial Sequence: Synthetic polypeptide
  REGION 1..121: note = VH of XENP020573
EVKLEESGGGLVQPGGSMKLSCAASGFTFSDAWMDWVRQSPEKGLEWVAEIRTKANNHATYYAESVKGRFTISRDDSKSSVYLQMNSLRAEDTGIYYCTRLKNWDWYFDVWGAGTTVTVSS

SEQ ID NO: 24093 - protein, 5 aa, synthetic construct
  REGION 1..5: note = Description of Artificial Sequence: Synthetic peptide
  REGION 1..5: note = XENP020573 vhCDR1
DAWMD

SEQ ID NO: 24094 - protein, 19 aa, synthetic construct
  REGION 1..19: note = Description of Artificial Sequence: Synthetic peptide
  REGION 1..19: note = XENP020573 vhCDR2
EIRTKANNHATYYAESVKG

SEQ ID NO: 24095 - protein, 10 aa, synthetic construct
  REGION 1..10: note = Description of Artificial Sequence: Synthetic peptide
  REGION 1..10: note = XENP020573 vhCDR3
LKNWDWYFDV

SEQ ID NO: 24096 - protein, 218 aa, synthetic construct; identical to SEQ ID NO: 22266
  REGION 1..218: note = Description of Artificial Sequence: Synthetic polypeptide
  REGION 1..218: note = XENP020573 7G8_H0.121_L0_IgG1_PVA_/S267K Light Chain

SEQ ID NO: 24097 - protein, 111 aa, synthetic construct; identical to SEQ ID NO: 22267
  REGION 1..111: note = Description of Artificial Sequence: Synthetic polypeptide
  REGION 1..111: note = VL of XENP020573

SEQ ID NO: 24098 - protein, 15 aa, synthetic construct
  REGION 1..15: note = Description of Artificial Sequence: Synthetic peptide
  REGION 1..15: note = XENP020573 vlCDR1
KASQSVDYDGDSYMN

SEQ ID NO: 24099 - protein, 7 aa, synthetic construct
  REGION 1..7: note = Description of Artificial Sequence: Synthetic peptide
  REGION 1..7: note = XENP020573 vlCDR2
AASNLES

SEQ ID NO: 24100 - protein, 9 aa, synthetic construct
  REGION 1..9: note = Description of Artificial Sequence: Synthetic peptide
  REGION 1..9: note = XENP020573 vlCDR3
QQSNEDPFT

SEQ ID NO: 24101 - protein, 450 aa, synthetic construct
  REGION 1..450: note = Description of Artificial Sequence: Synthetic polypeptide
  REGION 1..450: note = XENP020574 7G8_H0.122_L0_IgG1_PVA_/S267K Heavy Chain
EVKLEESGGGLVQPGGSMKLSCAASGFTFSDAWMDWVRQSPEKGLEWVAEIRTKANNHATYYAESVKGRFTISRDDSKSSVYLQMNSLRAEDTGIYYCTRLYNWDWYFDVWGAGTTVTVSSASTKGPSVFPLAPSSKSTSGGTAALGCLVKDYFPEPVTVSWNSGALTSGVHTFPAVLQSSGLYSLSSVVTVPSSSLGTQTYICNVNHKPSDTKVDKKVEPKSCDKTHTCPPCPAPPVAGPSVFLFPPKPKDTLMISRTPEVTCVVVDVKHEDPEVKFNWYVDGVEVHNAKTKPREEEYNSTYRVVSVLTVLHQDWLNGKEYKCKVSNKALPAPIEKTISKAKGQPREPQVYTLPPSREEMTKNQVSLTCDVSGFYPSDIAVEWESDGQPENNYKTTPPVLDSDGSFFLYSKLTVDKSRWEQGDVFSCSVMHEALHNHYTQKSLSLSPGK

SEQ ID NO: 24102 - protein, 121 aa, synthetic construct
  REGION 1..121: note = Description of Artificial Sequence: Synthetic polypeptide
  REGION 1..121: note = VH of XENP020574
EVKLEESGGGLVQPGGSMKLSCAASGFTFSDAWMDWVRQSPEKGLEWVAEIRTKANNHATYYAESVKGRFTISRDDSKSSVYLQMNSLRAEDTGIYYCTRLYNWDWYFDVWGAGTTVTVSS

SEQ ID NO: 24103 - protein, 5 aa, synthetic construct
  REGION 1..5: note = Description of Artificial Sequence: Synthetic peptide
  REGION 1..5: note = XENP020574 vhCDR1
DAWMD

SEQ ID NO: 24104 - protein, 19 aa, synthetic construct
  REGION 1..19: note = Description of Artificial Sequence: Synthetic peptide
  REGION 1..19: note = XENP020574 vhCDR2
EIRTKANNHATYYAESVKG

SEQ ID NO: 24105 - protein, 10 aa, synthetic construct
  REGION 1..10: note = Description of Artificial Sequence: Synthetic peptide
  REGION 1..10: note = XENP020574 vhCDR3
LYNWDWYFDV

SEQ ID NO: 24106 - protein, 218 aa, synthetic construct; identical to SEQ ID NO: 22266
  REGION 1..218: note = Description of Artificial Sequence: Synthetic polypeptide
  REGION 1..218: note = XENP020574 7G8_H0.122_L0_IgG1_PVA_/S267K Light Chain

SEQ ID NO: 24107 - protein, 111 aa, synthetic construct; identical to SEQ ID NO: 22267
  REGION 1..111: note = Description of Artificial Sequence: Synthetic polypeptide
  REGION 1..111: note = VL of XENP020574

SEQ ID NO: 24108 - protein, 15 aa, synthetic construct
  REGION 1..15: note = Description of Artificial Sequence: Synthetic peptide
  REGION 1..15: note = XENP020574 vlCDR1
KASQSVDYDGDSYMN

SEQ ID NO: 24109 - protein, 7 aa, synthetic construct
  REGION 1..7: note = Description of Artificial Sequence: Synthetic peptide
  REGION 1..7: note = XENP020574 vlCDR2
AASNLES

SEQ ID NO: 24110 - protein, 9 aa, synthetic construct
  REGION 1..9: note = Description of Artificial Sequence: Synthetic peptide
  REGION 1..9: note = XENP020574 vlCDR3
QQSNEDPFT

SEQ ID NO: 24111 - protein, 450 aa, synthetic construct
  REGION 1..450: note = Description of Artificial Sequence: Synthetic polypeptide
  REGION 1..450: note = XENP020575 7G8_H0.123_L0_IgG1_PVA_/S267K Heavy Chain
EVKLEESGGGLVQPGGSMKLSCAASGFTFSDAWMDWVRQSPEKGLEWVAEIRTKANNHATYYAESVKGRFTISRDDSKSSVYLQMNSLRAEDTGIYYCTRLADWDWYFDVWGAGTTVTVSSASTKGPSVFPLAPSSKSTSGGTAALGCLVKDYFPEPVTVSWNSGALTSGVHTFPAVLQSSGLYSLSSVVTVPSSSLGTQTYICNVNHKPSDTKVDKKVEPKSCDKTHTCPPCPAPPVAGPSVFLFPPKPKDTLMISRTPEVTCVVVDVKHEDPEVKFNWYVDGVEVHNAKTKPREEEYNSTYRVVSVLTVLHQDWLNGKEYKCKVSNKALPAPIEKTISKAKGQPREPQVYTLPPSREEMTKNQVSLTCDVSGFYPSDIAVEWESDGQPENNYKTTPPVLDSDGSFFLYSKLTVDKSRWEQGDVFSCSVMHEALHNHYTQKSLSLSPGK

SEQ ID NO: 24112 - protein, 121 aa, synthetic construct
  REGION 1..121: note = Description of Artificial Sequence: Synthetic polypeptide
  REGION 1..121: note = VH of XENP020575
EVKLEESGGGLVQPGGSMKLSCAASGFTFSDAWMDWVRQSPEKGLEWVAEIRTKANNHATYYAESVKGRFTISRDDSKSSVYLQMNSLRAEDTGIYYCTRLADWDWYFDVWGAGTTVTVSS

SEQ ID NO: 24113 - protein, 5 aa, synthetic construct
  REGION 1..5: note = Description of Artificial Sequence: Synthetic peptide
  REGION 1..5: note = XENP020575 vhCDR1
DAWMD

SEQ ID NO: 24114 - protein, 19 aa, synthetic construct
  REGION 1..19: note = Description of Artificial Sequence: Synthetic peptide
  REGION 1..19: note = XENP020575 vhCDR2
EIRTKANNHATYYAESVKG

SEQ ID NO: 24115 - protein, 10 aa, synthetic construct
  REGION 1..10: note = Description of Artificial Sequence: Synthetic peptide
  REGION 1..10: note = XENP020575 vhCDR3
LADWDWYFDV

SEQ ID NO: 24116 - protein, 218 aa, synthetic construct; identical to SEQ ID NO: 22266
  REGION 1..218: note = Description of Artificial Sequence: Synthetic polypeptide
  REGION 1..218: note = XENP020575 7G8_H0.123_L0_IgG1_PVA_/S267K Light Chain

SEQ ID NO: 24117 - protein, 111 aa, synthetic construct; identical to SEQ ID NO: 22267
  REGION 1..111: note = Description of Artificial Sequence: Synthetic polypeptide
  REGION 1..111: note = VL of XENP020575

SEQ ID NO: 24118 - protein, 15 aa, synthetic construct
  REGION 1..15: note = Description of Artificial Sequence: Synthetic peptide
  REGION 1..15: note = XENP020575 vlCDR1
KASQSVDYDGDSYMN

SEQ ID NO: 24119 - protein, 7 aa, synthetic construct
  REGION 1..7: note = Description of Artificial Sequence: Synthetic peptide
  REGION 1..7: note = XENP020575 vlCDR2
AASNLES

SEQ ID NO: 24120 - protein, 9 aa, synthetic construct
  REGION 1..9: note = Description of Artificial Sequence: Synthetic peptide
  REGION 1..9: note = XENP020575 vlCDR3
QQSNEDPFT

SEQ ID NO: 24121 - protein, 450 aa, synthetic construct
  REGION 1..450: note = Description of Artificial Sequence: Synthetic polypeptide
  REGION 1..450: note = XENP020576 7G8_H0.124_L0_IgG1_PVA_/S267K Heavy Chain
EVKLEESGGGLVQPGGSMKLSCAASGFTFSDAWMDWVRQSPEKGLEWVAEIRTKANNHATYYAESVKGRFTISRDDSKSSVYLQMNSLRAEDTGIYYCTRLAHWDWYFDVWGAGTTVTVSSASTKGPSVFPLAPSSKSTSGGTAALGCLVKDYFPEPVTVSWNSGALTSGVHTFPAVLQSSGLYSLSSVVTVPSSSLGTQTYICNVNHKPSDTKVDKKVEPKSCDKTHTCPPCPAPPVAGPSVFLFPPKPKDTLMISRTPEVTCVVVDVKHEDPEVKFNWYVDGVEVHNAKTKPREEEYNSTYRVVSVLTVLHQDWLNGKEYKCKVSNKALPAPIEKTISKAKGQPREPQVYTLPPSREEMTKNQVSLTCDVSGFYPSDIAVEWESDGQPENNYKTTPPVLDSDGSFFLYSKLTVDKSRWEQGDVFSCSVMHEALHNHYTQKSLSLSPGK

SEQ ID NO: 24122 - protein, 121 aa, synthetic construct
  REGION 1..121: note = Description of Artificial Sequence: Synthetic polypeptide
  REGION 1..121: note = VH of XENP020576
EVKLEESGGGLVQPGGSMKLSCAASGFTFSDAWMDWVRQSPEKGLEWVAEIRTKANNHATYYAESVKGRFTISRDDSKSSVYLQMNSLRAEDTGIYYCTRLAHWDWYFDVWGAGTTVTVSS

SEQ ID NO: 24123 - protein, 5 aa, synthetic construct
  REGION 1..5: note = Description of Artificial Sequence: Synthetic peptide
  REGION 1..5: note = XENP020576 vhCDR1
DAWMD

SEQ ID NO: 24124 - protein, 19 aa, synthetic construct
  REGION 1..19: note = Description of Artificial Sequence: Synthetic peptide
  REGION 1..19: note = XENP020576 vhCDR2
EIRTKANNHATYYAESVKG

SEQ ID NO: 24125 - protein, 10 aa, synthetic construct
  REGION 1..10: note = Description of Artificial Sequence: Synthetic peptide
  REGION 1..10: note = XENP020576 vhCDR3
LAHWDWYFDV

SEQ ID NO: 24126 - protein, 218 aa, synthetic construct; identical to SEQ ID NO: 22266
  REGION 1..218: note = Description of Artificial Sequence: Synthetic polypeptide
  REGION 1..218: note = XENP020576 7G8_H0.124_L0_IgG1_PVA_/S267K Light Chain

SEQ ID NO: 24127 - protein, 111 aa, synthetic construct; identical to SEQ ID NO: 22267
  REGION 1..111: note = Description of Artificial Sequence: Synthetic polypeptide
  REGION 1..111: note = VL of XENP020576

SEQ ID NO: 24128 - protein, 15 aa, synthetic construct
  REGION 1..15: note = Description of Artificial Sequence: Synthetic peptide
  REGION 1..15: note = XENP020576 vlCDR1
KASQSVDYDGDSYMN

SEQ ID NO: 24129 - protein, 7 aa, synthetic construct
  REGION 1..7: note = Description of Artificial Sequence: Synthetic peptide
  REGION 1..7: note = XENP020576 vlCDR2
AASNLES

SEQ ID NO: 24130 - protein, 9 aa, synthetic construct
  REGION 1..9: note = Description of Artificial Sequence: Synthetic peptide
  REGION 1..9: note = XENP020576 vlCDR3
QQSNEDPFT

SEQ ID NO: 24131 - protein, 450 aa, synthetic construct
  REGION 1..450: note = Description of Artificial Sequence: Synthetic polypeptide
  REGION 1..450: note = XENP020577 7G8_H0.125_L0_IgG1_PVA_/S267K Heavy Chain
EVKLEESGGGLVQPGGSMKLSCAASGFTFSDAWMDWVRQSPEKGLEWVAEIRTKANNHATYYAESVKGRFTISRDDSKSSVYLQMNSLRAEDTGIYYCTRLAEWDWYFDVWGAGTTVTVSSASTKGPSVFPLAPSSKSTSGGTAALGCLVKDYFPEPVTVSWNSGALTSGVHTFPAVLQSSGLYSLSSVVTVPSSSLGTQTYICNVNHKPSDTKVDKKVEPKSCDKTHTCPPCPAPPVAGPSVFLFPPKPKDTLMISRTPEVTCVVVDVKHEDPEVKFNWYVDGVEVHNAKTKPREEEYNSTYRVVSVLTVLHQDWLNGKEYKCKVSNKALPAPIEKTISKAKGQPREPQVYTLPPSREEMTKNQVSLTCDVSGFYPSDIAVEWESDGQPENNYKTTPPVLDSDGSFFLYSKLTVDKSRWEQGDVFSCSVMHEALHNHYTQKSLSLSPGK

SEQ ID NO: 24132 - protein, 121 aa, synthetic construct
  REGION 1..121: note = Description of Artificial Sequence: Synthetic polypeptide
  REGION 1..121: note = VH of XENP020577
EVKLEESGGGLVQPGGSMKLSCAASGFTFSDAWMDWVRQSPEKGLEWVAEIRTKANNHATYYAESVKGRFTISRDDSKSSVYLQMNSLRAEDTGIYYCTRLAEWDWYFDVWGAGTTVTVSS

SEQ ID NO: 24133 - protein, 5 aa, synthetic construct
  REGION 1..5: note = Description of Artificial Sequence: Synthetic peptide
  REGION 1..5: note = XENP020577 vhCDR1
DAWMD

SEQ ID NO: 24134 - protein, 19 aa, synthetic construct
  REGION 1..19: note = Description of Artificial Sequence: Synthetic peptide
  REGION 1..19: note = XENP020577 vhCDR2
EIRTKANNHATYYAESVKG

SEQ ID NO: 24135 - protein, 10 aa, synthetic construct
  REGION 1..10: note = Description of Artificial Sequence: Synthetic peptide
  REGION 1..10: note = XENP020577 vhCDR3
LAEWDWYFDV

SEQ ID NO: 24136 - protein, 218 aa, synthetic construct; identical to SEQ ID NO: 22266
  REGION 1..218: note = Description of Artificial Sequence: Synthetic polypeptide
  REGION 1..218: note = XENP020577 7G8_H0.125_L0_IgG1_PVA_/S267K Light Chain

SEQ ID NO: 24137 - protein, 111 aa, synthetic construct; identical to SEQ ID NO: 22267
  REGION 1..111: note = Description of Artificial Sequence: Synthetic polypeptide
  REGION 1..111: note = VL of XENP020577

SEQ ID NO: 24138 - protein, 15 aa, synthetic construct
  REGION 1..15: note = Description of Artificial Sequence: Synthetic peptide
  REGION 1..15: note = XENP020577 vlCDR1
KASQSVDYDGDSYMN

SEQ ID NO: 24139 - protein, 7 aa, synthetic construct
  REGION 1..7: note = Description of Artificial Sequence: Synthetic peptide
  REGION 1..7: note = XENP020577 vlCDR2
AASNLES

SEQ ID NO: 24140 - protein, 9 aa, synthetic construct
  REGION 1..9: note = Description of Artificial Sequence: Synthetic peptide
  REGION 1..9: note = XENP020577 vlCDR3
QQSNEDPFT

SEQ ID NO: 24141 - protein, 450 aa, synthetic construct
  REGION 1..450: note = Description of Artificial Sequence: Synthetic polypeptide
  REGION 1..450: note = XENP020578 7G8_H0.126_L0_IgG1_PVA_/S267K Heavy Chain
EVKLEESGGGLVQPGGSMKLSCAASGFTFSDAWMDWVRQSPEKGLEWVAEIRTKANNHATYYAESVKGRFTISRDDSKSSVYLQMNSLRAEDTGIYYCTRLASWDWYFDVWGAGTTVTVSSASTKGPSVFPLAPSSKSTSGGTAALGCLVKDYFPEPVTVSWNSGALTSGVHTFPAVLQSSGLYSLSSVVTVPSSSLGTQTYICNVNHKPSDTKVDKKVEPKSCDKTHTCPPCPAPPVAGPSVFLFPPKPKDTLMISRTPEVTCVVVDVKHEDPEVKFNWYVDGVEVHNAKTKPREEEYNSTYRVVSVLTVLHQDWLNGKEYKCKVSNKALPAPIEKTISKAKGQPREPQVYTLPPSREEMTKNQVSLTCDVSGFYPSDIAVEWESDGQPENNYKTTPPVLDSDGSFFLYSKLTVDKSRWEQGDVFSCSVMHEALHNHYTQKSLSLSPGK

SEQ ID NO: 24142 - protein, 121 aa, synthetic construct
  REGION 1..121: note = Description of Artificial Sequence: Synthetic polypeptide
  REGION 1..121: note = VH of XENP020578
EVKLEESGGGLVQPGGSMKLSCAASGFTFSDAWMDWVRQSPEKGLEWVAEIRTKANNHATYYAESVKGRFTISRDDSKSSVYLQMNSLRAEDTGIYYCTRLASWDWYFDVWGAGTTVTVSS

SEQ ID NO: 24143 - protein, 5 aa, synthetic construct
  REGION 1..5: note = Description of Artificial Sequence: Synthetic peptide
  REGION 1..5: note = XENP020578 vhCDR1
DAWMD

SEQ ID NO: 24144 - protein, 19 aa, synthetic construct
  REGION 1..19: note = Description of Artificial Sequence: Synthetic peptide
  REGION 1..19: note = XENP020578 vhCDR2
EIRTKANNHATYYAESVKG

SEQ ID NO: 24145 - protein, 10 aa, synthetic construct
  REGION 1..10: note = Description of Artificial Sequence: Synthetic peptide
  REGION 1..10: note = XENP020578 vhCDR3
LASWDWYFDV

SEQ ID NO: 24146 - protein, 218 aa, synthetic construct; identical to SEQ ID NO: 22266
  REGION 1..218: note = Description of Artificial Sequence: Synthetic polypeptide
  REGION 1..218: note = XENP020578 7G8_H0.126_L0_IgG1_PVA_/S267K Light Chain

SEQ ID NO: 24147 - protein, 111 aa, synthetic construct; identical to SEQ ID NO: 22267
  REGION 1..111: note = Description of Artificial Sequence: Synthetic polypeptide
  REGION 1..111: note = VL of XENP020578

SEQ ID NO: 24148 - protein, 15 aa, synthetic construct
  REGION 1..15: note = Description of Artificial Sequence: Synthetic peptide
  REGION 1..15: note = XENP020578 vlCDR1
KASQSVDYDGDSYMN

SEQ ID NO: 24149 - protein, 7 aa, synthetic construct
  REGION 1..7: note = Description of Artificial Sequence: Synthetic peptide
  REGION 1..7: note = XENP020578 vlCDR2
AASNLES

SEQ ID NO: 24150 - protein, 9 aa, synthetic construct
  REGION 1..9: note = Description of Artificial Sequence: Synthetic peptide
  REGION 1..9: note = XENP020578 vlCDR3
QQSNEDPFT

SEQ ID NO: 24151 - protein, 450 aa, synthetic construct
  REGION 1..450: note = Description of Artificial Sequence: Synthetic polypeptide
  REGION 1..450: note = XENP020579 7G8_H0.127_L0_IgG1_PVA_/S267K Heavy Chain
EVKLEESGGGLVQPGGSMKLSCAASGFTFSDAWMDWVRQSPEKGLEWVAEIRTKANNHATYYAESVKGRFTISRDDSKSSVYLQMNSLRAEDTGIYYCTRLARWDWYFDVWGAGTTVTVSSASTKGPSVFPLAPSSKSTSGGTAALGCLVKDYFPEPVTVSWNSGALTSGVHTFPAVLQSSGLYSLSSVVTVPSSSLGTQTYICNVNHKPSDTKVDKKVEPKSCDKTHTCPPCPAPPVAGPSVFLFPPKPKDTLMISRTPEVTCVVVDVKHEDPEVKFNWYVDGVEVHNAKTKPREEEYNSTYRVVSVLTVLHQDWLNGKEYKCKVSNKALPAPIEKTISKAKGQPREPQVYTLPPSREEMTKNQVSLTCDVSGFYPSDIAVEWESDGQPENNYKTTPPVLDSDGSFFLYSKLTVDKSRWEQGDVFSCSVMHEALHNHYTQKSLSLSPGK

SEQ ID NO: 24152 - protein, 121 aa, synthetic construct
  REGION 1..121: note = Description of Artificial Sequence: Synthetic polypeptide
  REGION 1..121: note = VH of XENP020579
EVKLEESGGGLVQPGGSMKLSCAASGFTFSDAWMDWVRQSPEKGLEWVAEIRTKANNHATYYAESVKGRFTISRDDSKSSVYLQMNSLRAEDTGIYYCTRLARWDWYFDVWGAGTTVTVSS

SEQ ID NO: 24153 - protein, 5 aa, synthetic construct
  REGION 1..5: note = Description of Artificial Sequence: Synthetic peptide
  REGION 1..5: note = XENP020579 vhCDR1
DAWMD

SEQ ID NO: 24154 - protein, 19 aa, synthetic construct
  REGION 1..19: note = Description of Artificial Sequence: Synthetic peptide
  REGION 1..19: note = XENP020579 vhCDR2
EIRTKANNHATYYAESVKG

SEQ ID NO: 24155 - protein, 10 aa, synthetic construct
  REGION 1..10: note = Description of Artificial Sequence: Synthetic peptide
  REGION 1..10: note = XENP020579 vhCDR3
LARWDWYFDV

SEQ ID NO: 24156 - protein, 218 aa, synthetic construct; identical to SEQ ID NO: 22266
  REGION 1..218: note = Description of Artificial Sequence: Synthetic polypeptide
  REGION 1..218: note = XENP020579 7G8_H0.127_L0_IgG1_PVA_/S267K Light Chain

SEQ ID NO: 24157 - protein, 111 aa, synthetic construct; identical to SEQ ID NO: 22267
  REGION 1..111: note = Description of Artificial Sequence: Synthetic polypeptide
  REGION 1..111: note = VL of XENP020579

SEQ ID NO: 24158 - protein, 15 aa, synthetic construct
  REGION 1..15: note = Description of Artificial Sequence: Synthetic peptide
  REGION 1..15: note = XENP020579 vlCDR1
KASQSVDYDGDSYMN

SEQ ID NO: 24159 - protein, 7 aa, synthetic construct
  REGION 1..7: note = Description of Artificial Sequence: Synthetic peptide
  REGION 1..7: note = XENP020579 vlCDR2
AASNLES

SEQ ID NO: 24160 - protein, 9 aa, synthetic construct
  REGION 1..9: note = Description of Artificial Sequence: Synthetic peptide
  REGION 1..9: note = XENP020579 vlCDR3
QQSNEDPFT

SEQ ID NO: 24161 - protein, 450 aa, synthetic construct
  REGION 1..450: note = Description of Artificial Sequence: Synthetic polypeptide
  REGION 1..450: note = XENP020580 7G8_H0.128_L0_IgG1_PVA_/S267K Heavy Chain
EVKLEESGGGLVQPGGSMKLSCAASGFTFSDAWMDWVRQSPEKGLEWVAEIRTKANNHATYYAESVKGRFTISRDDSKSSVYLQMNSLRAEDTGIYYCTRLALWDWYFDVWGAGTTVTVSSASTKGPSVFPLAPSSKSTSGGTAALGCLVKDYFPEPVTVSWNSGALTSGVHTFPAVLQSSGLYSLSSVVTVPSSSLGTQTYICNVNHKPSDTKVDKKVEPKSCDKTHTCPPCPAPPVAGPSVFLFPPKPKDTLMISRTPEVTCVVVDVKHEDPEVKFNWYVDGVEVHNAKTKPREEEYNSTYRVVSVLTVLHQDWLNGKEYKCKVSNKALPAPIEKTISKAKGQPREPQVYTLPPSREEMTKNQVSLTCDVSGFYPSDIAVEWESDGQPENNYKTTPPVLDSDGSFFLYSKLTVDKSRWEQGDVFSCSVMHEALHNHYTQKSLSLSPGK

SEQ ID NO: 24162 - protein, 121 aa, synthetic construct
  REGION 1..121: note = Description of Artificial Sequence: Synthetic polypeptide
  REGION 1..121: note = VH of XENP020580
EVKLEESGGGLVQPGGSMKLSCAASGFTFSDAWMDWVRQSPEKGLEWVAEIRTKANNHATYYAESVKGRFTISRDDSKSSVYLQMNSLRAEDTGIYYCTRLALWDWYFDVWGAGTTVTVSS

SEQ ID NO: 24163 - protein, 5 aa, synthetic construct
  REGION 1..5: note = Description of Artificial Sequence: Synthetic peptide
  REGION 1..5: note = XENP020580 vhCDR1
DAWMD

SEQ ID NO: 24164 - protein, 19 aa, synthetic construct
  REGION 1..19: note = Description of Artificial Sequence: Synthetic peptide
  REGION 1..19: note = XENP020580 vhCDR2
EIRTKANNHATYYAESVKG

SEQ ID NO: 24165 - protein, 10 aa, synthetic construct
  REGION 1..10: note = Description of Artificial Sequence: Synthetic peptide
  REGION 1..10: note = XENP020580 vhCDR3
LALWDWYFDV

SEQ ID NO: 24166 - protein, 218 aa, synthetic construct; identical to SEQ ID NO: 22266
  REGION 1..218: note = Description of Artificial Sequence: Synthetic polypeptide
  REGION 1..218: note = XENP020580 7G8_H0.128_L0_IgG1_PVA_/S267K Light Chain

SEQ ID NO: 24167 - protein, 111 aa, synthetic construct; identical to SEQ ID NO: 22267
  REGION 1..111: note = Description of Artificial Sequence: Synthetic polypeptide
  REGION 1..111: note = VL of XENP020580

SEQ ID NO: 24168 - protein, 15 aa, synthetic construct
  REGION 1..15: note = Description of Artificial Sequence: Synthetic peptide
  REGION 1..15: note = XENP020580 vlCDR1
KASQSVDYDGDSYMN

SEQ ID NO: 24169 - protein, 7 aa, synthetic construct
  REGION 1..7: note = Description of Artificial Sequence: Synthetic peptide
  REGION 1..7: note = XENP020580 vlCDR2
AASNLES

SEQ ID NO: 24170 - protein, 9 aa, synthetic construct
  REGION 1..9: note = Description of Artificial Sequence: Synthetic peptide
  REGION 1..9: note = XENP020580 vlCDR3
QQSNEDPFT

SEQ ID NO: 24171 - protein, 450 aa, synthetic construct
  REGION 1..450: note = Description of Artificial Sequence: Synthetic polypeptide
  REGION 1..450: note = XENP020581 7G8_H0.129_L0_IgG1_PVA_/S267K Heavy Chain
EVKLEESGGGLVQPGGSMKLSCAASGFTFSDAWMDWVRQSPEKGLEWVAEIRTKANNHATYYAESVKGRFTISRDDSKSSVYLQMNSLRAEDTGIYYCTRLATWDWYFDVWGAGTTVTVSSASTKGPSVFPLAPSSKSTSGGTAALGCLVKDYFPEPVTVSWNSGALTSGVHTFPAVLQSSGLYSLSSVVTVPSSSLGTQTYICNVNHKPSDTKVDKKVEPKSCDKTHTCPPCPAPPVAGPSVFLFPPKPKDTLMISRTPEVTCVVVDVKHEDPEVKFNWYVDGVEVHNAKTKPREEEYNSTYRVVSVLTVLHQDWLNGKEYKCKVSNKALPAPIEKTISKAKGQPREPQVYTLPPSREEMTKNQVSLTCDVSGFYPSDIAVEWESDGQPENNYKTTPPVLDSDGSFFLYSKLTVDKSRWEQGDVFSCSVMHEALHNHYTQKSLSLSPGK

SEQ ID NO: 24172 - protein, 121 aa, synthetic construct
  REGION 1..121: note = Description of Artificial Sequence: Synthetic polypeptide
  REGION 1..121: note = VH of XENP020581
EVKLEESGGGLVQPGGSMKLSCAASGFTFSDAWMDWVRQSPEKGLEWVAEIRTKANNHATYYAESVKGRFTISRDDSKSSVYLQMNSLRAEDTGIYYCTRLATWDWYFDVWGAGTTVTVSS

SEQ ID NO: 24173 - protein, 5 aa, synthetic construct
  REGION 1..5: note = Description of Artificial Sequence: Synthetic peptide
  REGION 1..5: note = XENP020581 vhCDR1
DAWMD

SEQ ID NO: 24174 - protein, 19 aa, synthetic construct
  REGION 1..19: note = Description of Artificial Sequence: Synthetic peptide
  REGION 1..19: note = XENP020581 vhCDR2
EIRTKANNHATYYAESVKG

SEQ ID NO: 24175 - protein, 10 aa, synthetic construct
  REGION 1..10: note = Description of Artificial Sequence: Synthetic peptide
  REGION 1..10: note = XENP020581 vhCDR3
LATWDWYFDV

SEQ ID NO: 24176 - protein, 218 aa, synthetic construct; identical to SEQ ID NO: 22266
  REGION 1..218: note = Description of Artificial Sequence: Synthetic polypeptide
  REGION 1..218: note = XENP020581 7G8_H0.129_L0_IgG1_PVA_/S267K Light Chain

SEQ ID NO: 24177 - protein, 111 aa, synthetic construct; identical to SEQ ID NO: 22267
  REGION 1..111: note = Description of Artificial Sequence: Synthetic polypeptide
  REGION 1..111: note = VL of XENP020581

SEQ ID NO: 24178 - protein, 15 aa, synthetic construct
  REGION 1..15: note = Description of Artificial Sequence: Synthetic peptide
  REGION 1..15: note = XENP020581 vlCDR1
KASQSVDYDGDSYMN

SEQ ID NO: 24179 - protein, 7 aa, synthetic construct
  REGION 1..7: note = Description of Artificial Sequence: Synthetic peptide
  REGION 1..7: note = XENP020581 vlCDR2
AASNLES

SEQ ID NO: 24180 - protein, 9 aa, synthetic construct
  REGION 1..9: note = Description of Artificial Sequence: Synthetic peptide
  REGION 1..9: note = XENP020581 vlCDR3
QQSNEDPFT

SEQ ID NO: 24181 - protein, 450 aa, synthetic construct
  REGION 1..450: note = Description of Artificial Sequence: Synthetic polypeptide
  REGION 1..450: note = XENP020582 7G8_H0.130_L0_IgG1_PVA_/S267K Heavy Chain
EVKLEESGGGLVQPGGSMKLSCAASGFTFSDAWMDWVRQSPEKGLEWVAEIRTKANNHATYYAESVKGRFTISRDDSKSSVYLQMNSLRAEDTGIYYCTRLAGWDWYFDVWGAGTTVTVSSASTKGPSVFPLAPSSKSTSGGTAALGCLVKDYFPEPVTVSWNSGALTSGVHTFPAVLQSSGLYSLSSVVTVPSSSLGTQTYICNVNHKPSDTKVDKKVEPKSCDKTHTCPPCPAPPVAGPSVFLFPPKPKDTLMISRTPEVTCVVVDVKHEDPEVKFNWYVDGVEVHNAKTKPREEEYNSTYRVVSVLTVLHQDWLNGKEYKCKVSNKALPAPIEKTISKAKGQPREPQVYTLPPSREEMTKNQVSLTCDVSGFYPSDIAVEWESDGQPENNYKTTPPVLDSDGSFFLYSKLTVDKSRWEQGDVFSCSVMHEALHNHYTQKSLSLSPGK

SEQ ID NO: 24182 - protein, 121 aa, synthetic construct
  REGION 1..121: note = Description of Artificial Sequence: Synthetic polypeptide
  REGION 1..121: note = VH of XENP020582
EVKLEESGGGLVQPGGSMKLSCAASGFTFSDAWMDWVRQSPEKGLEWVAEIRTKANNHATYYAESVKGRFTISRDDSKSSVYLQMNSLRAEDTGIYYCTRLAGWDWYFDVWGAGTTVTVSS

SEQ ID NO: 24183 - protein, 5 aa, synthetic construct
  REGION 1..5: note = Description of Artificial Sequence: Synthetic peptide
  REGION 1..5: note = XENP020582 vhCDR1
DAWMD

SEQ ID NO: 24184 - protein, 19 aa, synthetic construct
  REGION 1..19: note = Description of Artificial Sequence: Synthetic peptide
  REGION 1..19: note = XENP020582 vhCDR2
EIRTKANNHATYYAESVKG

SEQ ID NO: 24185 - protein, 10 aa, synthetic construct
  REGION 1..10: note = Description of Artificial Sequence: Synthetic peptide
  REGION 1..10: note = XENP020582 vhCDR3
LAGWDWYFDV

SEQ ID NO: 24186 - protein, 218 aa, synthetic construct; identical to SEQ ID NO: 22266
  REGION 1..218: note = Description of Artificial Sequence: Synthetic polypeptide
  REGION 1..218: note = XENP020582 7G8_H0.130_L0_IgG1_PVA_/S267K Light Chain

SEQ ID NO: 24187 - protein, 111 aa, synthetic construct; identical to SEQ ID NO: 22267
  REGION 1..111: note = Description of Artificial Sequence: Synthetic polypeptide
  REGION 1..111: note = VL of XENP020582

SEQ ID NO: 24188 - protein, 15 aa, synthetic construct
  REGION 1..15: note = Description of Artificial Sequence: Synthetic peptide
  REGION 1..15: note = XENP020582 vlCDR1
KASQSVDYDGDSYMN

SEQ ID NO: 24189 - protein, 7 aa, synthetic construct
  REGION 1..7: note = Description of Artificial Sequence: Synthetic peptide
  REGION 1..7: note = XENP020582 vlCDR2
AASNLES

SEQ ID NO: 24190 - protein, 9 aa, synthetic construct
  REGION 1..9: note = Description of Artificial Sequence: Synthetic peptide
  REGION 1..9: note = XENP020582 vlCDR3
QQSNEDPFT

SEQ ID NO: 24191 - protein, 450 aa, synthetic construct
  REGION 1..450: note = Description of Artificial Sequence: Synthetic polypeptide
  REGION 1..450: note = XENP020583 7G8_H0.131_L0_IgG1_PVA_/S267K Heavy Chain
EVKLEESGGGLVQPGGSMKLSCAASGFTFSDAWMDWVRQSPEKGLEWVAEIRTKANNHATYYAESVKGRFTISRDDSKSSVYLQMNSLRAEDTGIYYCTRLAYWDWYFDVWGAGTTVTVSSASTKGPSVFPLAPSSKSTSGGTAALGCLVKDYFPEPVTVSWNSGALTSGVHTFPAVLQSSGLYSLSSVVTVPSSSLGTQTYICNVNHKPSDTKVDKKVEPKSCDKTHTCPPCPAPPVAGPSVFLFPPKPKDTLMISRTPEVTCVVVDVKHEDPEVKFNWYVDGVEVHNAKTKPREEEYNSTYRVVSVLTVLHQDWLNGKEYKCKVSNKALPAPIEKTISKAKGQPREPQVYTLPPSREEMTKNQVSLTCDVSGFYPSDIAVEWESDGQPENNYKTTPPVLDSDGSFFLYSKLTVDKSRWEQGDVFSCSVMHEALHNHYTQKSLSLSPGK

SEQ ID NO: 24192 - protein, 121 aa, synthetic construct
  REGION 1..121: note = Description of Artificial Sequence: Synthetic polypeptide
  REGION 1..121: note = VH of XENP020583
EVKLEESGGGLVQPGGSMKLSCAASGFTFSDAWMDWVRQSPEKGLEWVAEIRTKANNHATYYAESVKGRFTISRDDSKSSVYLQMNSLRAEDTGIYYCTRLAYWDWYFDVWGAGTTVTVSS

SEQ ID NO: 24193 - protein, 5 aa, synthetic construct
  REGION 1..5: note = Description of Artificial Sequence: Synthetic peptide
  REGION 1..5: note = XENP020583 vhCDR1
DAWMD

SEQ ID NO: 24194 - protein, 19 aa, synthetic construct
  REGION 1..19: note = Description of Artificial Sequence: Synthetic peptide
  REGION 1..19: note = XENP020583 vhCDR2
EIRTKANNHATYYAESVKG

SEQ ID NO: 24195 - protein, 10 aa, synthetic construct
  REGION 1..10: note = Description of Artificial Sequence: Synthetic peptide
  REGION 1..10: note = XENP020583 vhCDR3
LAYWDWYFDV

SEQ ID NO: 24196 - protein, 218 aa, synthetic construct; identical to SEQ ID NO: 22266
  REGION 1..218: note = Description of Artificial Sequence: Synthetic polypeptide
  REGION 1..218: note = XENP020583 7G8_H0.131_L0_IgG1_PVA_/S267K Light Chain

SEQ ID NO: 24197 - protein, 111 aa, synthetic construct; identical to SEQ ID NO: 22267
  REGION 1..111: note = Description of Artificial Sequence: Synthetic polypeptide
  REGION 1..111: note = VL of XENP020583

SEQ ID NO: 24198 - protein, 15 aa, synthetic construct
  REGION 1..15: note = Description of Artificial Sequence: Synthetic peptide
  REGION 1..15: note = XENP020583 vlCDR1
KASQSVDYDGDSYMN

SEQ ID NO: 24199 - protein, 7 aa, synthetic construct
  REGION 1..7: note = Description of Artificial Sequence: Synthetic peptide
  REGION 1..7: note = XENP020583 vlCDR2
AASNLES

SEQ ID NO: 24200 - protein, 9 aa, synthetic construct
  REGION 1..9: note = Description of Artificial Sequence: Synthetic peptide
  REGION 1..9: note = XENP020583 vlCDR3
QQSNEDPFT

SEQ ID NO: 24201 - protein, 450 aa, synthetic construct
  REGION 1..450: note = Description of Artificial Sequence: Synthetic polypeptide
  REGION 1..450: note = XENP020584 7G8_H0.132_L0_IgG1_PVA_/S267K Heavy Chain
EVKLEESGGGLVQPGGSMKLSCAASGFTFSDAWMDWVRQSPEKGLEWVAEIRTKANNHATYYAESVKGRFTISRDDSKSSVYLQMNSLRAEDTGIYYCTRLANFDWYFDVWGAGTTVTVSSASTKGPSVFPLAPSSKSTSGGTAALGCLVKDYFPEPVTVSWNSGALTSGVHTFPAVLQSSGLYSLSSVVTVPSSSLGTQTYICNVNHKPSDTKVDKKVEPKSCDKTHTCPPCPAPPVAGPSVFLFPPKPKDTLMISRTPEVTCVVVDVKHEDPEVKFNWYVDGVEVHNAKTKPREEEYNSTYRVVSVLTVLHQDWLNGKEYKCKVSNKALPAPIEKTISKAKGQPREPQVYTLPPSREEMTKNQVSLTCDVSGFYPSDIAVEWESDGQPENNYKTTPPVLDSDGSFFLYSKLTVDKSRWEQGDVFSCSVMHEALHNHYTQKSLSLSPGK

SEQ ID NO: 24202 - protein, 121 aa, synthetic construct
  REGION 1..121: note = Description of Artificial Sequence: Synthetic polypeptide
  REGION 1..121: note = VH of XENP020584
EVKLEESGGGLVQPGGSMKLSCAASGFTFSDAWMDWVRQSPEKGLEWVAEIRTKANNHATYYAESVKGRFTISRDDSKSSVYLQMNSLRAEDTGIYYCTRLANFDWYFDVWGAGTTVTVSS

SEQ ID NO: 24203 - protein, 5 aa, synthetic construct
  REGION 1..5: note = Description of Artificial Sequence: Synthetic peptide
  REGION 1..5: note = XENP020584 vhCDR1
DAWMD

SEQ ID NO: 24204 - protein, 19 aa, synthetic construct
  REGION 1..19: note = Description of Artificial Sequence: Synthetic peptide
  REGION 1..19: note = XENP020584 vhCDR2
EIRTKANNHATYYAESVKG

SEQ ID NO: 24205 - protein, 10 aa, synthetic construct
  REGION 1..10: note = Description of Artificial Sequence: Synthetic peptide
  REGION 1..10: note = XENP020584 vhCDR3
LANFDWYFDV

SEQ ID NO: 24206 - protein, 218 aa, synthetic construct; identical to SEQ ID NO: 22266
  REGION 1..218: note = Description of Artificial Sequence: Synthetic polypeptide
  REGION 1..218: note = XENP020584 7G8_H0.132_L0_IgG1_PVA_/S267K Light Chain

SEQ ID NO: 24207 - protein, 111 aa, synthetic construct; identical to SEQ ID NO: 22267
  REGION 1..111: note = Description of Artificial Sequence: Synthetic polypeptide
  REGION 1..111: note = VL of XENP020584

SEQ ID NO: 24208 - protein, 15 aa, synthetic construct
  REGION 1..15: note = Description of Artificial Sequence: Synthetic peptide
  REGION 1..15: note = XENP020584 vlCDR1
KASQSVDYDGDSYMN

SEQ ID NO: 24209 - protein, 7 aa, synthetic construct
  REGION 1..7: note = Description of Artificial Sequence: Synthetic peptide
  REGION 1..7: note = XENP020584 vlCDR2
AASNLES

SEQ ID NO: 24210 - protein, 9 aa, synthetic construct
  REGION 1..9: note = Description of Artificial Sequence: Synthetic peptide
  REGION 1..9: note = XENP020584 vlCDR3
QQSNEDPFT

SEQ ID NO: 24211 - protein, 450 aa, synthetic construct
  REGION 1..450: note = Description of Artificial Sequence: Synthetic polypeptide
  REGION 1..450: note = XENP020585 7G8_H0.133_L0_IgG1_PVA_/S267K Heavy Chain
EVKLEESGGGLVQPGGSMKLSCAASGFTFSDAWMDWVRQSPEKGLEWVAEIRTKANNHATYYAESVKGRFTISRDDSKSSVYLQMNSLRAEDTGIYYCTRLANLDWYFDVWGAGTTVTVSSASTKGPSVFPLAPSSKSTSGGTAALGCLVKDYFPEPVTVSWNSGALTSGVHTFPAVLQSSGLYSLSSVVTVPSSSLGTQTYICNVNHKPSDTKVDKKVEPKSCDKTHTCPPCPAPPVAGPSVFLFPPKPKDTLMISRTPEVTCVVVDVKHEDPEVKFNWYVDGVEVHNAKTKPREEEYNSTYRVVSVLTVLHQDWLNGKEYKCKVSNKALPAPIEKTISKAKGQPREPQVYTLPPSREEMTKNQVSLTCDVSGFYPSDIAVEWESDGQPENNYKTTPPVLDSDGSFFLYSKLTVDKSRWEQGDVFSCSVMHEALHNHYTQKSLSLSPGK

SEQ ID NO: 24212 - protein, 121 aa, synthetic construct
  REGION 1..121: note = Description of Artificial Sequence: Synthetic polypeptide
  REGION 1..121: note = VH of XENP020585
EVKLEESGGGLVQPGGSMKLSCAASGFTFSDAWMDWVRQSPEKGLEWVAEIRTKANNHATYYAESVKGRFTISRDDSKSSVYLQMNSLRAEDTGIYYCTRLANLDWYFDVWGAGTTVTVSS

SEQ ID NO: 24213 - protein, 5 aa, synthetic construct
  REGION 1..5: note = Description of Artificial Sequence: Synthetic peptide
  REGION 1..5: note = XENP020585 vhCDR1
DAWMD

SEQ ID NO: 24214 - protein, 19 aa, synthetic construct
  REGION 1..19: note = Description of Artificial Sequence: Synthetic peptide
  REGION 1..19: note = XENP020585 vhCDR2
EIRTKANNHATYYAESVKG

SEQ ID NO: 24215 - protein, 10 aa, synthetic construct
  REGION 1..10: note = Description of Artificial Sequence: Synthetic peptide
  REGION 1..10: note = XENP020585 vhCDR3
LANLDWYFDV

SEQ ID NO: 24216 - protein, 218 aa, synthetic construct; identical to SEQ ID NO: 22266
  REGION 1..218: note = Description of Artificial Sequence: Synthetic polypeptide
  REGION 1..218: note = XENP020585 7G8_H0.133_L0_IgG1_PVA_/S267K Light Chain

SEQ ID NO: 24217 - protein, 111 aa, synthetic construct; identical to SEQ ID NO: 22267
  REGION 1..111: note = Description of Artificial Sequence: Synthetic polypeptide
  REGION 1..111: note = VL of XENP020585

SEQ ID NO: 24218 - protein, 15 aa, synthetic construct
  REGION 1..15: note = Description of Artificial Sequence: Synthetic peptide
  REGION 1..15: note = XENP020585 vlCDR1
KASQSVDYDGDSYMN

SEQ ID NO: 24219 - protein, 7 aa, synthetic construct
  REGION 1..7: note = Description of Artificial Sequence: Synthetic peptide
  REGION 1..7: note = XENP020585 vlCDR2
AASNLES

SEQ ID NO: 24220 - protein, 9 aa, synthetic construct
  REGION 1..9: note = Description of Artificial Sequence: Synthetic peptide
  REGION 1..9: note = XENP020585 vlCDR3
QQSNEDPFT

SEQ ID NO: 24221 - protein, 450 aa, synthetic construct
  REGION 1..450: note = Description of Artificial Sequence: Synthetic polypeptide
  REGION 1..450: note = XENP020586 7G8_H0.134_L0_IgG1_PVA_/S267K Heavy Chain
EVKLEESGGGLVQPGGSMKLSCAASGFTFSDAWMDWVRQSPEKGLEWVAEIRTKANNHATYYAESVKGRFTISRDDSKSSVYLQMNSLRAEDTGIYYCTRLANYDWYFDVWGAGTTVTVSSASTKGPSVFPLAPSSKSTSGGTAALGCLVKDYFPEPVTVSWNSGALTSGVHTFPAVLQSSGLYSLSSVVTVPSSSLGTQTYICNVNHKPSDTKVDKKVEPKSCDKTHTCPPCPAPPVAGPSVFLFPPKPKDTLMISRTPEVTCVVVDVKHEDPEVKFNWYVDGVEVHNAKTKPREEEYNSTYRVVSVLTVLHQDWLNGKEYKCKVSNKALPAPIEKTISKAKGQPREPQVYTLPPSREEMTKNQVSLTCDVSGFYPSDIAVEWESDGQPENNYKTTPPVLDSDGSFFLYSKLTVDKSRWEQGDVFSCSVMHEALHNHYTQKSLSLSPGK

SEQ ID NO: 24222 - protein, 121 aa, synthetic construct
  REGION 1..121: note = Description of Artificial Sequence: Synthetic polypeptide
  REGION 1..121: note = VH of XENP020586
EVKLEESGGGLVQPGGSMKLSCAASGFTFSDAWMDWVRQSPEKGLEWVAEIRTKANNHATYYAESVKGRFTISRDDSKSSVYLQMNSLRAEDTGIYYCTRLANYDWYFDVWGAGTTVTVSS

SEQ ID NO: 24223 - protein, 5 aa, synthetic construct
  REGION 1..5: note = Description of Artificial Sequence: Synthetic peptide
  REGION 1..5: note = XENP020586 vhCDR1
DAWMD

SEQ ID NO: 24224 - protein, 19 aa, synthetic construct
  REGION 1..19: note = Description of Artificial Sequence: Synthetic peptide
  REGION 1..19: note = XENP020586 vhCDR2
EIRTKANNHATYYAESVKG

SEQ ID NO: 24225 - protein, 10 aa, synthetic construct
  REGION 1..10: note = Description of Artificial Sequence: Synthetic peptide
  REGION 1..10: note = XENP020586 vhCDR3
LANYDWYFDV

SEQ ID NO: 24226 - protein, 218 aa, synthetic construct; identical to SEQ ID NO: 22266
  REGION 1..218: note = Description of Artificial Sequence: Synthetic polypeptide
  REGION 1..218: note = XENP020586 7G8_H0.134_L0_IgG1_PVA_/S267K Light Chain

SEQ ID NO: 24227 - protein, 111 aa, synthetic construct; identical to SEQ ID NO: 22267
  REGION 1..111: note = Description of Artificial Sequence: Synthetic polypeptide
  REGION 1..111: note = VL of XENP020586

SEQ ID NO: 24228 - protein, 15 aa, synthetic construct
  REGION 1..15: note = Description of Artificial Sequence: Synthetic peptide
  REGION 1..15: note = XENP020586 vlCDR1
KASQSVDYDGDSYMN

SEQ ID NO: 24229 - protein, 7 aa, synthetic construct
  REGION 1..7: note = Description of Artificial Sequence: Synthetic peptide
  REGION 1..7: note = XENP020586 vlCDR2
AASNLES

SEQ ID NO: 24230 - protein, 9 aa, synthetic construct
  REGION 1..9: note = Description of Artificial Sequence: Synthetic peptide
  REGION 1..9: note = XENP020586 vlCDR3
QQSNEDPFT

SEQ ID NO: 24231 - protein, 450 aa, synthetic construct
  REGION 1..450: note = Description of Artificial Sequence: Synthetic polypeptide
  REGION 1..450: note = XENP020587 7G8_H0.135_L0_IgG1_PVA_/S267K Heavy Chain
EVKLEESGGGLVQPGGSMKLSCAASGFTFSDAWMDWVRQSPEKGLEWVAEIRTKANNHATYYAESVKGRFTISRDDSKSSVYLQMNSLRAEDTGIYYCTRLANIDWYFDVWGAGTTVTVSSASTKGPSVFPLAPSSKSTSGGTAALGCLVKDYFPEPVTVSWNSGALTSGVHTFPAVLQSSGLYSLSSVVTVPSSSLGTQTYICNVNHKPSDTKVDKKVEPKSCDKTHTCPPCPAPPVAGPSVFLFPPKPKDTLMISRTPEVTCVVVDVKHEDPEVKFNWYVDGVEVHNAKTKPREEEYNSTYRVVSVLTVLHQDWLNGKEYKCKVSNKALPAPIEKTISKAKGQPREPQVYTLPPSREEMTKNQVSLTCDVSGFYPSDIAVEWESDGQPENNYKTTPPVLDSDGSFFLYSKLTVDKSRWEQGDVFSCSVMHEALHNHYTQKSLSLSPGK

SEQ ID NO: 24232 - protein, 121 aa, synthetic construct
  REGION 1..121: note = Description of Artificial Sequence: Synthetic polypeptide
  REGION 1..121: note = VH of XENP020587
EVKLEESGGGLVQPGGSMKLSCAASGFTFSDAWMDWVRQSPEKGLEWVAEIRTKANNHATYYAESVKGRFTISRDDSKSSVYLQMNSLRAEDTGIYYCTRLANIDWYFDVWGAGTTVTVSS

SEQ ID NO: 24233 - protein, 5 aa, synthetic construct
  REGION 1..5: note = Description of Artificial Sequence: Synthetic peptide
  REGION 1..5: note = XENP020587 vhCDR1
DAWMD

SEQ ID NO: 24234 - protein, 19 aa, synthetic construct
  REGION 1..19: note = Description of Artificial Sequence: Synthetic peptide
  REGION 1..19: note = XENP020587 vhCDR2
EIRTKANNHATYYAESVKG

SEQ ID NO: 24235 - protein, 10 aa, synthetic construct
  REGION 1..10: note = Description of Artificial Sequence: Synthetic peptide
  REGION 1..10: note = XENP020587 vhCDR3
LANIDWYFDV

SEQ ID NO: 24236 - protein, 218 aa, synthetic construct; identical to SEQ ID NO: 22266
  REGION 1..218: note = Description of Artificial Sequence: Synthetic polypeptide
  REGION 1..218: note = XENP020587 7G8_H0.135_L0_IgG1_PVA_/S267K Light Chain

SEQ ID NO: 24237 - protein, 111 aa, synthetic construct; identical to SEQ ID NO: 22267
  REGION 1..111: note = Description of Artificial Sequence: Synthetic polypeptide
  REGION 1..111: note = VL of XENP020587

SEQ ID NO: 24238 - protein, 15 aa, synthetic construct
  REGION 1..15: note = Description of Artificial Sequence: Synthetic peptide
  REGION 1..15: note = XENP020587 vlCDR1
KASQSVDYDGDSYMN

SEQ ID NO: 24239 - protein, 7 aa, synthetic construct
  REGION 1..7: note = Description of Artificial Sequence: Synthetic peptide
  REGION 1..7: note = XENP020587 vlCDR2
AASNLES

SEQ ID NO: 24240 - protein, 9 aa, synthetic construct
  REGION 1..9: note = Description of Artificial Sequence: Synthetic peptide
  REGION 1..9: note = XENP020587 vlCDR3
QQSNEDPFT

SEQ ID NO: 24241 - protein, 450 aa, synthetic construct
  REGION 1..450: note = Description of Artificial Sequence: Synthetic polypeptide
  REGION 1..450: note = XENP020588 7G8_H0.136_L0_IgG1_PVA_/S267K Heavy Chain
EVKLEESGGGLVQPGGSMKLSCAASGFTFSDAWMDWVRQSPEKGLEWVAEIRTKANNHATYYAESVKGRFTISRDDSKSSVYLQMNSLRAEDTGIYYCTRLANHDWYFDVWGAGTTVTVSSASTKGPSVFPLAPSSKSTSGGTAALGCLVKDYFPEPVTVSWNSGALTSGVHTFPAVLQSSGLYSLSSVVTVPSSSLGTQTYICNVNHKPSDTKVDKKVEPKSCDKTHTCPPCPAPPVAGPSVFLFPPKPKDTLMISRTPEVTCVVVDVKHEDPEVKFNWYVDGVEVHNAKTKPREEEYNSTYRVVSVLTVLHQDWLNGKEYKCKVSNKALPAPIEKTISKAKGQPREPQVYTLPPSREEMTKNQVSLTCDVSGFYPSDIAVEWESDGQPENNYKTTPPVLDSDGSFFLYSKLTVDKSRWEQGDVFSCSVMHEALHNHYTQKSLSLSPGK

SEQ ID NO: 24242 - protein, 121 aa, synthetic construct
  REGION 1..121: note = Description of Artificial Sequence: Synthetic polypeptide
  REGION 1..121: note = VH of XENP020588
EVKLEESGGGLVQPGGSMKLSCAASGFTFSDAWMDWVRQSPEKGLEWVAEIRTKANNHATYYAESVKGRFTISRDDSKSSVYLQMNSLRAEDTGIYYCTRLANHDWYFDVWGAGTTVTVSS

SEQ ID NO: 24243 - protein, 5 aa, synthetic construct
  REGION 1..5: note = Description of Artificial Sequence: Synthetic peptide
  REGION 1..5: note = XENP020588 vhCDR1
DAWMD

SEQ ID NO: 24244 - protein, 19 aa, synthetic construct
  REGION 1..19: note = Description of Artificial Sequence: Synthetic peptide
  REGION 1..19: note = XENP020588 vhCDR2
EIRTKANNHATYYAESVKG

SEQ ID NO: 24245 - protein, 10 aa, synthetic construct
  REGION 1..10: note = Description of Artificial Sequence: Synthetic peptide
  REGION 1..10: note = XENP020588 vhCDR3
LANHDWYFDV

SEQ ID NO: 24246 - protein, 218 aa, synthetic construct; identical to SEQ ID NO: 22266
  REGION 1..218: note = Description of Artificial Sequence: Synthetic polypeptide
  REGION 1..218: note = XENP020588 7G8_H0.136_L0_IgG1_PVA_/S267K Light Chain

SEQ ID NO: 24247 - protein, 111 aa, synthetic construct; identical to SEQ ID NO: 22267
  REGION 1..111: note = Description of Artificial Sequence: Synthetic polypeptide
  REGION 1..111: note = VL of XENP020588

SEQ ID NO: 24248 - protein, 15 aa, synthetic construct
  REGION 1..15: note = Description of Artificial Sequence: Synthetic peptide
  REGION 1..15: note = XENP020588 vlCDR1
KASQSVDYDGDSYMN

SEQ ID NO: 24249 - protein, 7 aa, synthetic construct
  REGION 1..7: note = Description of Artificial Sequence: Synthetic peptide
  REGION 1..7: note = XENP020588 vlCDR2
AASNLES

SEQ ID NO: 24250 - protein, 9 aa, synthetic construct
  REGION 1..9: note = Description of Artificial Sequence: Synthetic peptide
  REGION 1..9: note = XENP020588 vlCDR3
QQSNEDPFT

SEQ ID NO: 24251 - protein, 450 aa, synthetic construct
  REGION 1..450: note = Description of Artificial Sequence: Synthetic polypeptide
  REGION 1..450: note = XENP020589 7G8_H0.137_L0_IgG1_PVA_/S267K Heavy Chain
EVKLEESGGGLVQPGGSMKLSCAASGFTFSDAWMDWVRQSPEKGLEWVAEIRTKANNHATYYAESVKGRFTISRDDSKSSVYLQMNSLRAEDTGIYYCTRLANQDWYFDVWGAGTTVTVSSASTKGPSVFPLAPSSKSTSGGTAALGCLVKDYFPEPVTVSWNSGALTSGVHTFPAVLQSSGLYSLSSVVTVPSSSLGTQTYICNVNHKPSDTKVDKKVEPKSCDKTHTCPPCPAPPVAGPSVFLFPPKPKDTLMISRTPEVTCVVVDVKHEDPEVKFNWYVDGVEVHNAKTKPREEEYNSTYRVVSVLTVLHQDWLNGKEYKCKVSNKALPAPIEKTISKAKGQPREPQVYTLPPSREEMTKNQVSLTCDVSGFYPSDIAVEWESDGQPENNYKTTPPVLDSDGSFFLYSKLTVDKSRWEQGDVFSCSVMHEALHNHYTQKSLSLSPGK

SEQ ID NO: 24252 - protein, 121 aa, synthetic construct
  REGION 1..121: note = Description of Artificial Sequence: Synthetic polypeptide
  REGION 1..121: note = VH of XENP020589
EVKLEESGGGLVQPGGSMKLSCAASGFTFSDAWMDWVRQSPEKGLEWVAEIRTKANNHATYYAESVKGRFTISRDDSKSSVYLQMNSLRAEDTGIYYCTRLANQDWYFDVWGAGTTVTVSS

SEQ ID NO: 24253 - protein, 5 aa, synthetic construct
  REGION 1..5: note = Description of Artificial Sequence: Synthetic peptide
  REGION 1..5: note = XENP020589 vhCDR1
DAWMD

SEQ ID NO: 24254 - protein, 19 aa, synthetic construct
  REGION 1..19: note = Description of Artificial Sequence: Synthetic peptide
  REGION 1..19: note = XENP020589 vhCDR2
EIRTKANNHATYYAESVKG

SEQ ID NO: 24255 - protein, 10 aa, synthetic construct
  REGION 1..10: note = Description of Artificial Sequence: Synthetic peptide
  REGION 1..10: note = XENP020589 vhCDR3
LANQDWYFDV

SEQ ID NO: 24256 - protein, 218 aa, synthetic construct; identical to SEQ ID NO: 22266
  REGION 1..218: note = Description of Artificial Sequence: Synthetic polypeptide
  REGION 1..218: note = XENP020589 7G8_H0.137_L0_IgG1_PVA_/S267K Light Chain

SEQ ID NO: 24257 - protein, 111 aa, synthetic construct; identical to SEQ ID NO: 22267
  REGION 1..111: note = Description of Artificial Sequence: Synthetic polypeptide
  REGION 1..111: note = VL of XENP020589

SEQ ID NO: 24258 - protein, 15 aa, synthetic construct
  REGION 1..15: note = Description of Artificial Sequence: Synthetic peptide
  REGION 1..15: note = XENP020589 vlCDR1
KASQSVDYDGDSYMN

SEQ ID NO: 24259 - protein, 7 aa, synthetic construct
  REGION 1..7: note = Description of Artificial Sequence: Synthetic peptide
  REGION 1..7: note = XENP020589 vlCDR2
AASNLES

SEQ ID NO: 24260 - protein, 9 aa, synthetic construct
  REGION 1..9: note = Description of Artificial Sequence: Synthetic peptide
  REGION 1..9: note = XENP020589 vlCDR3
QQSNEDPFT

SEQ ID NO: 24261 - protein, 450 aa, synthetic construct
  REGION 1..450: note = Description of Artificial Sequence: Synthetic polypeptide
  REGION 1..450: note = XENP020590 7G8_H0.138_L0_IgG1_PVA_/S267K Heavy Chain
EVKLEESGGGLVQPGGSMKLSCAASGFTFSDAWMDWVRQSPEKGLEWVAEIRTKANNHATYYAESVKGRFTISRDDSKSSVYLQMNSLRAEDTGIYYCTRLANSDWYFDVWGAGTTVTVSSASTKGPSVFPLAPSSKSTSGGTAALGCLVKDYFPEPVTVSWNSGALTSGVHTFPAVLQSSGLYSLSSVVTVPSSSLGTQTYICNVNHKPSDTKVDKKVEPKSCDKTHTCPPCPAPPVAGPSVFLFPPKPKDTLMISRTPEVTCVVVDVKHEDPEVKFNWYVDGVEVHNAKTKPREEEYNSTYRVVSVLTVLHQDWLNGKEYKCKVSNKALPAPIEKTISKAKGQPREPQVYTLPPSREEMTKNQVSLTCDVSGFYPSDIAVEWESDGQPENNYKTTPPVLDSDGSFFLYSKLTVDKSRWEQGDVFSCSVMHEALHNHYTQKSLSLSPGK

SEQ ID NO: 24262 - protein, 121 aa, synthetic construct
  REGION 1..121: note = Description of Artificial Sequence: Synthetic polypeptide
  REGION 1..121: note = VH of XENP020590
EVKLEESGGGLVQPGGSMKLSCAASGFTFSDAWMDWVRQSPEKGLEWVAEIRTKANNHATYYAESVKGRFTISRDDSKSSVYLQMNSLRAEDTGIYYCTRLANSDWYFDVWGAGTTVTVSS

SEQ ID NO: 24263 - protein, 5 aa, synthetic construct
  REGION 1..5: note = Description of Artificial Sequence: Synthetic peptide
  REGION 1..5: note = XENP020590 vhCDR1
DAWMD

SEQ ID NO: 24264 - protein, 19 aa, synthetic construct
  REGION 1..19: note = Description of Artificial Sequence: Synthetic peptide
  REGION 1..19: note = XENP020590 vhCDR2
EIRTKANNHATYYAESVKG

SEQ ID NO: 24265 - protein, 10 aa, synthetic construct
  REGION 1..10: note = Description of Artificial Sequence: Synthetic peptide
  REGION 1..10: note = XENP020590 vhCDR3
LANSDWYFDV

SEQ ID NO: 24266 - protein, 218 aa, synthetic construct; identical to SEQ ID NO: 22266
  REGION 1..218: note = Description of Artificial Sequence: Synthetic polypeptide
  REGION 1..218: note = XENP020590 7G8_H0.138_L0_IgG1_PVA_/S267K Light Chain

SEQ ID NO: 24267 - protein, 111 aa, synthetic construct; identical to SEQ ID NO: 22267
  REGION 1..111: note = Description of Artificial Sequence: Synthetic polypeptide
  REGION 1..111: note = VL of XENP020590

SEQ ID NO: 24268 - protein, 15 aa, synthetic construct
  REGION 1..15: note = Description of Artificial Sequence: Synthetic peptide
  REGION 1..15: note = XENP020590 vlCDR1
KASQSVDYDGDSYMN

SEQ ID NO: 24269 - protein, 7 aa, synthetic construct
  REGION 1..7: note = Description of Artificial Sequence: Synthetic peptide
  REGION 1..7: note = XENP020590 vlCDR2
AASNLES

SEQ ID NO: 24270 - protein, 9 aa, synthetic construct
  REGION 1..9: note = Description of Artificial Sequence: Synthetic peptide
  REGION 1..9: note = XENP020590 vlCDR3
QQSNEDPFT

SEQ ID NO: 24271 - protein, 450 aa, synthetic construct
  REGION 1..450: note = Description of Artificial Sequence: Synthetic polypeptide
  REGION 1..450: note = XENP020591 7G8_H0.139_L0_IgG1_PVA_/S267K Heavy Chain
EVKLEESGGGLVQPGGSMKLSCAASGFTFSDAWMDWVRQSPEKGLEWVAEIRTKANNHATYYAESVKGRFTISRDDSKSSVYLQMNSLRAEDTGIYYCTRLANDDWYFDVWGAGTTVTVSSASTKGPSVFPLAPSSKSTSGGTAALGCLVKDYFPEPVTVSWNSGALTSGVHTFPAVLQSSGLYSLSSVVTVPSSSLGTQTYICNVNHKPSDTKVDKKVEPKSCDKTHTCPPCPAPPVAGPSVFLFPPKPKDTLMISRTPEVTCVVVDVKHEDPEVKFNWYVDGVEVHNAKTKPREEEYNSTYRVVSVLTVLHQDWLNGKEYKCKVSNKALPAPIEKTISKAKGQPREPQVYTLPPSREEMTKNQVSLTCDVSGFYPSDIAVEWESDGQPENNYKTTPPVLDSDGSFFLYSKLTVDKSRWEQGDVFSCSVMHEALHNHYTQKSLSLSPGK

SEQ ID NO: 24272 - protein, 121 aa, synthetic construct
  REGION 1..121: note = Description of Artificial Sequence: Synthetic polypeptide
  REGION 1..121: note = VH of XENP020591
EVKLEESGGGLVQPGGSMKLSCAASGFTFSDAWMDWVRQSPEKGLEWVAEIRTKANNHATYYAESVKGRFTISRDDSKSSVYLQMNSLRAEDTGIYYCTRLANDDWYFDVWGAGTTVTVSS

SEQ ID NO: 24273 - protein, 5 aa, synthetic construct
  REGION 1..5: note = Description of Artificial Sequence: Synthetic peptide
  REGION 1..5: note = XENP020591 vhCDR1
DAWMD

SEQ ID NO: 24274 - protein, 19 aa, synthetic construct
  REGION 1..19: note = Description of Artificial Sequence: Synthetic peptide
  REGION 1..19: note = XENP020591 vhCDR2
EIRTKANNHATYYAESVKG

SEQ ID NO: 24275 - protein, 10 aa, synthetic construct
  REGION 1..10: note = Description of Artificial Sequence: Synthetic peptide
  REGION 1..10: note = XENP020591 vhCDR3
LANDDWYFDV

SEQ ID NO: 24276 - protein, 218 aa, synthetic construct; identical to SEQ ID NO: 22266
  REGION 1..218: note = Description of Artificial Sequence: Synthetic polypeptide
  REGION 1..218: note = XENP020591 7G8_H0.139_L0_IgG1_PVA_/S267K Light Chain

SEQ ID NO: 24277 - protein, 111 aa, synthetic construct; identical to SEQ ID NO: 22267
  REGION 1..111: note = Description of Artificial Sequence: Synthetic polypeptide
  REGION 1..111: note = VL of XENP020591

SEQ ID NO: 24278 - protein, 15 aa, synthetic construct
  REGION 1..15: note = Description of Artificial Sequence: Synthetic peptide
  REGION 1..15: note = XENP020591 vlCDR1
KASQSVDYDGDSYMN

SEQ ID NO: 24279 - protein, 7 aa, synthetic construct
  REGION 1..7: note = Description of Artificial Sequence: Synthetic peptide
  REGION 1..7: note = XENP020591 vlCDR2
AASNLES

SEQ ID NO: 24280 - protein, 9 aa, synthetic construct
  REGION 1..9: note = Description of Artificial Sequence: Synthetic peptide
  REGION 1..9: note = XENP020591 vlCDR3
QQSNEDPFT

SEQ ID NO: 24281 - protein, 450 aa, synthetic construct
  REGION 1..450: note = Description of Artificial Sequence: Synthetic polypeptide
  REGION 1..450: note = XENP020592 7G8_H0.140_L0_IgG1_PVA_/S267K Heavy Chain
EVKLEESGGGLVQPGGSMKLSCAASGFTFSDAWMDWVRQSPEKGLEWVAEIRTKANNHATYYAESVKGRFTISRDDSKSSVYLQMNSLRAEDTGIYYCTRLANRDWYFDVWGAGTTVTVSSASTKGPSVFPLAPSSKSTSGGTAALGCLVKDYFPEPVTVSWNSGALTSGVHTFPAVLQSSGLYSLSSVVTVPSSSLGTQTYICNVNHKPSDTKVDKKVEPKSCDKTHTCPPCPAPPVAGPSVFLFPPKPKDTLMISRTPEVTCVVVDVKHEDPEVKFNWYVDGVEVHNAKTKPREEEYNSTYRVVSVLTVLHQDWLNGKEYKCKVSNKALPAPIEKTISKAKGQPREPQVYTLPPSREEMTKNQVSLTCDVSGFYPSDIAVEWESDGQPENNYKTTPPVLDSDGSFFLYSKLTVDKSRWEQGDVFSCSVMHEALHNHYTQKSLSLSPGK

SEQ ID NO: 24282 - protein, 121 aa, synthetic construct
  REGION 1..121: note = Description of Artificial Sequence: Synthetic polypeptide
  REGION 1..121: note = VH of XENP020592
EVKLEESGGGLVQPGGSMKLSCAASGFTFSDAWMDWVRQSPEKGLEWVAEIRTKANNHATYYAESVKGRFTISRDDSKSSVYLQMNSLRAEDTGIYYCTRLANRDWYFDVWGAGTTVTVSS

SEQ ID NO: 24283 - protein, 5 aa, synthetic construct
  REGION 1..5: note = Description of Artificial Sequence: Synthetic peptide
  REGION 1..5: note = XENP020592 vhCDR1
DAWMD

SEQ ID NO: 24284 - protein, 19 aa, synthetic construct
  REGION 1..19: note = Description of Artificial Sequence: Synthetic peptide
  REGION 1..19: note = XENP020592 vhCDR2
EIRTKANNHATYYAESVKG

SEQ ID NO: 24285 - protein, 10 aa, synthetic construct
  REGION 1..10: note = Description of Artificial Sequence: Synthetic peptide
  REGION 1..10: note = XENP020592 vhCDR3
LANRDWYFDV

SEQ ID NO: 24286 - protein, 218 aa, synthetic construct; identical to SEQ ID NO: 22266
  REGION 1..218: note = Description of Artificial Sequence: Synthetic polypeptide
  REGION 1..218: note = XENP020592 7G8_H0.140_L0_IgG1_PVA_/S267K Light Chain

SEQ ID NO: 24287 - protein, 111 aa, synthetic construct; identical to SEQ ID NO: 22267
  REGION 1..111: note = Description of Artificial Sequence: Synthetic polypeptide
  REGION 1..111: note = VL of XENP020592

SEQ ID NO: 24288 - protein, 15 aa, synthetic construct
  REGION 1..15: note = Description of Artificial Sequence: Synthetic peptide
  REGION 1..15: note = XENP020592 vlCDR1
KASQSVDYDGDSYMN

SEQ ID NO: 24289 - protein, 7 aa, synthetic construct
  REGION 1..7: note = Description of Artificial Sequence: Synthetic peptide
  REGION 1..7: note = XENP020592 vlCDR2
AASNLES

SEQ ID NO: 24290 - protein, 9 aa, synthetic construct
  REGION 1..9: note = Description of Artificial Sequence: Synthetic peptide
  REGION 1..9: note = XENP020592 vlCDR3
QQSNEDPFT

SEQ ID NO: 24291 - protein, 450 aa, synthetic construct
  REGION 1..450: note = Description of Artificial Sequence: Synthetic polypeptide
  REGION 1..450: note = XENP020593 7G8_H0.141_L0_IgG1_PVA_/S267K Heavy Chain
EVKLEESGGGLVQPGGSMKLSCAASGFTFSDAWMDWVRQSPEKGLEWVAEIRTKANNHATYYAESVKGRFTISRDDSKSSVYLQMNSLRAEDTGIYYCTRLANWNWYFDVWGAGTTVTVSSASTKGPSVFPLAPSSKSTSGGTAALGCLVKDYFPEPVTVSWNSGALTSGVHTFPAVLQSSGLYSLSSVVTVPSSSLGTQTYICNVNHKPSDTKVDKKVEPKSCDKTHTCPPCPAPPVAGPSVFLFPPKPKDTLMISRTPEVTCVVVDVKHEDPEVKFNWYVDGVEVHNAKTKPREEEYNSTYRVVSVLTVLHQDWLNGKEYKCKVSNKALPAPIEKTISKAKGQPREPQVYTLPPSREEMTKNQVSLTCDVSGFYPSDIAVEWESDGQPENNYKTTPPVLDSDGSFFLYSKLTVDKSRWEQGDVFSCSVMHEALHNHYTQKSLSLSPGK

SEQ ID NO: 24292 - protein, 121 aa, synthetic construct
  REGION 1..121: note = Description of Artificial Sequence: Synthetic polypeptide
  REGION 1..121: note = VH of XENP020593
EVKLEESGGGLVQPGGSMKLSCAASGFTFSDAWMDWVRQSPEKGLEWVAEIRTKANNHATYYAESVKGRFTISRDDSKSSVYLQMNSLRAEDTGIYYCTRLANWNWYFDVWGAGTTVTVSS

SEQ ID NO: 24293 - protein, 5 aa, synthetic construct
  REGION 1..5: note = Description of Artificial Sequence: Synthetic peptide
  REGION 1..5: note = XENP020593 vhCDR1
DAWMD

SEQ ID NO: 24294 - protein, 19 aa, synthetic construct
  REGION 1..19: note = Description of Artificial Sequence: Synthetic peptide
  REGION 1..19: note = XENP020593 vhCDR2
EIRTKANNHATYYAESVKG

SEQ ID NO: 24295 - protein, 10 aa, synthetic construct
  REGION 1..10: note = Description of Artificial Sequence: Synthetic peptide
  REGION 1..10: note = XENP020593 vhCDR3
LANWNWYFDV

SEQ ID NO: 24296 - protein, 218 aa, synthetic construct; identical to SEQ ID NO: 22266
  REGION 1..218: note = Description of Artificial Sequence: Synthetic polypeptide
  REGION 1..218: note = XENP020593 7G8_H0.141_L0_IgG1_PVA_/S267K Light Chain

SEQ ID NO: 24297 - protein, 111 aa, synthetic construct; identical to SEQ ID NO: 22267
  REGION 1..111: note = Description of Artificial Sequence: Synthetic polypeptide
  REGION 1..111: note = VL of XENP020593

SEQ ID NO: 24298 - protein, 15 aa, synthetic construct
  REGION 1..15: note = Description of Artificial Sequence: Synthetic peptide
  REGION 1..15: note = XENP020593 vlCDR1
KASQSVDYDGDSYMN

SEQ ID NO: 24299 - protein, 7 aa, synthetic construct
  REGION 1..7: note = Description of Artificial Sequence: Synthetic peptide
  REGION 1..7: note = XENP020593 vlCDR2
AASNLES

SEQ ID NO: 24300 - protein, 9 aa, synthetic construct
  REGION 1..9: note = Description of Artificial Sequence: Synthetic peptide
  REGION 1..9: note = XENP020593 vlCDR3
QQSNEDPFT

SEQ ID NO: 24301 - protein, 450 aa, synthetic construct
  REGION 1..450: note = Description of Artificial Sequence: Synthetic polypeptide
  REGION 1..450: note = XENP020594 7G8_H0.142_L0_IgG1_PVA_/S267K Heavy Chain
EVKLEESGGGLVQPGGSMKLSCAASGFTFSDAWMDWVRQSPEKGLEWVAEIRTKANNHATYYAESVKGRFTISRDDSKSSVYLQMNSLRAEDTGIYYCTRLANWEWYFDVWGAGTTVTVSSASTKGPSVFPLAPSSKSTSGGTAALGCLVKDYFPEPVTVSWNSGALTSGVHTFPAVLQSSGLYSLSSVVTVPSSSLGTQTYICNVNHKPSDTKVDKKVEPKSCDKTHTCPPCPAPPVAGPSVFLFPPKPKDTLMISRTPEVTCVVVDVKHEDPEVKFNWYVDGVEVHNAKTKPREEEYNSTYRVVSVLTVLHQDWLNGKEYKCKVSNKALPAPIEKTISKAKGQPREPQVYTLPPSREEMTKNQVSLTCDVSGFYPSDIAVEWESDGQPENNYKTTPPVLDSDGSFFLYSKLTVDKSRWEQGDVFSCSVMHEALHNHYTQKSLSLSPGK

SEQ ID NO: 24302 - protein, 121 aa, synthetic construct
  REGION 1..121: note = Description of Artificial Sequence: Synthetic polypeptide
  REGION 1..121: note = VH of XENP020594
EVKLEESGGGLVQPGGSMKLSCAASGFTFSDAWMDWVRQSPEKGLEWVAEIRTKANNHATYYAESVKGRFTISRDDSKSSVYLQMNSLRAEDTGIYYCTRLANWEWYFDVWGAGTTVTVSS

SEQ ID NO: 24303 - protein, 5 aa, synthetic construct
  REGION 1..5: note = Description of Artificial Sequence: Synthetic peptide
  REGION 1..5: note = XENP020594 vhCDR1
DAWMD

SEQ ID NO: 24304 - protein, 19 aa, synthetic construct
  REGION 1..19: note = Description of Artificial Sequence: Synthetic peptide
  REGION 1..19: note = XENP020594 vhCDR2
EIRTKANNHATYYAESVKG

SEQ ID NO: 24305 - protein, 10 aa, synthetic construct
  REGION 1..10: note = Description of Artificial Sequence: Synthetic peptide
  REGION 1..10: note = XENP020594 vhCDR3
LANWEWYFDV

SEQ ID NO: 24306 - protein, 218 aa, synthetic construct; identical to SEQ ID NO: 22266
  REGION 1..218: note = Description of Artificial Sequence: Synthetic polypeptide
  REGION 1..218: note = XENP020594 7G8_H0.142_L0_IgG1_PVA_/S267K Light Chain

SEQ ID NO: 24307 - protein, 111 aa, synthetic construct; identical to SEQ ID NO: 22267
  REGION 1..111: note = Description of Artificial Sequence: Synthetic polypeptide
  REGION 1..111: note = VL of XENP020594

SEQ ID NO: 24308 - protein, 15 aa, synthetic construct
  REGION 1..15: note = Description of Artificial Sequence: Synthetic peptide
  REGION 1..15: note = XENP020594 vlCDR1
KASQSVDYDGDSYMN

SEQ ID NO: 24309 - protein, 7 aa, synthetic construct
  REGION 1..7: note = Description of Artificial Sequence: Synthetic peptide
  REGION 1..7: note = XENP020594 vlCDR2
AASNLES

SEQ ID NO: 24310 - protein, 9 aa, synthetic construct
  REGION 1..9: note = Description of Artificial Sequence: Synthetic peptide
  REGION 1..9: note = XENP020594 vlCDR3
QQSNEDPFT

SEQ ID NO: 24311 - protein, 450 aa, synthetic construct
  REGION 1..450: note = Description of Artificial Sequence: Synthetic polypeptide
  REGION 1..450: note = XENP020595 7G8_H0.143_L0_IgG1_PVA_/S267K Heavy Chain
EVKLEESGGGLVQPGGSMKLSCAASGFTFSDAWMDWVRQSPEKGLEWVAEIRTKANNHATYYAESVKGRFTISRDDSKSSVYLQMNSLRAEDTGIYYCTRLANWHWYFDVWGAGTTVTVSSASTKGPSVFPLAPSSKSTSGGTAALGCLVKDYFPEPVTVSWNSGALTSGVHTFPAVLQSSGLYSLSSVVTVPSSSLGTQTYICNVNHKPSDTKVDKKVEPKSCDKTHTCPPCPAPPVAGPSVFLFPPKPKDTLMISRTPEVTCVVVDVKHEDPEVKFNWYVDGVEVHNAKTKPREEEYNSTYRVVSVLTVLHQDWLNGKEYKCKVSNKALPAPIEKTISKAKGQPREPQVYTLPPSREEMTKNQVSLTCDVSGFYPSDIAVEWESDGQPENNYKTTPPVLDSDGSFFLYSKLTVDKSRWEQGDVFSCSVMHEALHNHYTQKSLSLSPGK

SEQ ID NO: 24312 - protein, 121 aa, synthetic construct
  REGION 1..121: note = Description of Artificial Sequence: Synthetic polypeptide
  REGION 1..121: note = VH of XENP020595
EVKLEESGGGLVQPGGSMKLSCAASGFTFSDAWMDWVRQSPEKGLEWVAEIRTKANNHATYYAESVKGRFTISRDDSKSSVYLQMNSLRAEDTGIYYCTRLANWHWYFDVWGAGTTVTVSS

SEQ ID NO: 24313 - protein, 5 aa, synthetic construct
  REGION 1..5: note = Description of Artificial Sequence: Synthetic peptide
  REGION 1..5: note = XENP020595 vhCDR1
DAWMD

SEQ ID NO: 24314 - protein, 19 aa, synthetic construct
  REGION 1..19: note = Description of Artificial Sequence: Synthetic peptide
  REGION 1..19: note = XENP020595 vhCDR2
EIRTKANNHATYYAESVKG

SEQ ID NO: 24315 - protein, 10 aa, synthetic construct
  REGION 1..10: note = Description of Artificial Sequence: Synthetic peptide
  REGION 1..10: note = XENP020595 vhCDR3
LANWHWYFDV

SEQ ID NO: 24316 - protein, 218 aa, synthetic construct; identical to SEQ ID NO: 22266
  REGION 1..218: note = Description of Artificial Sequence: Synthetic polypeptide
  REGION 1..218: note = XENP020595 7G8_H0.143_L0_IgG1_PVA_/S267K Light Chain

SEQ ID NO: 24317 - protein, 111 aa, synthetic construct; identical to SEQ ID NO: 22267
  REGION 1..111: note = Description of Artificial Sequence: Synthetic polypeptide
  REGION 1..111: note = VL of XENP020595

SEQ ID NO: 24318 - protein, 15 aa, synthetic construct
  REGION 1..15: note = Description of Artificial Sequence: Synthetic peptide
  REGION 1..15: note = XENP020595 vlCDR1
KASQSVDYDGDSYMN

SEQ ID NO: 24319 - protein, 7 aa, synthetic construct
  REGION 1..7: note = Description of Artificial Sequence: Synthetic peptide
  REGION 1..7: note = XENP020595 vlCDR2
AASNLES

SEQ ID NO: 24320 - protein, 9 aa, synthetic construct
  REGION 1..9: note = Description of Artificial Sequence: Synthetic peptide
  REGION 1..9: note = XENP020595 vlCDR3
QQSNEDPFT

SEQ ID NO: 24321 - protein, 450 aa, synthetic construct
  REGION 1..450: note = Description of Artificial Sequence: Synthetic polypeptide
  REGION 1..450: note = XENP020596 7G8_H0.144_L0_IgG1_PVA_/S267K Heavy Chain
EVKLEESGGGLVQPGGSMKLSCAASGFTFSDAWMDWVRQSPEKGLEWVAEIRTKANNHATYYAESVKGRFTISRDDSKSSVYLQMNSLRAEDTGIYYCTRLANWRWYFDVWGAGTTVTVSSASTKGPSVFPLAPSSKSTSGGTAALGCLVKDYFPEPVTVSWNSGALTSGVHTFPAVLQSSGLYSLSSVVTVPSSSLGTQTYICNVNHKPSDTKVDKKVEPKSCDKTHTCPPCPAPPVAGPSVFLFPPKPKDTLMISRTPEVTCVVVDVKHEDPEVKFNWYVDGVEVHNAKTKPREEEYNSTYRVVSVLTVLHQDWLNGKEYKCKVSNKALPAPIEKTISKAKGQPREPQVYTLPPSREEMTKNQVSLTCDVSGFYPSDIAVEWESDGQPENNYKTTPPVLDSDGSFFLYSKLTVDKSRWEQGDVFSCSVMHEALHNHYTQKSLSLSPGK

SEQ ID NO: 24322 - protein, 121 aa, synthetic construct
  REGION 1..121: note = Description of Artificial Sequence: Synthetic polypeptide
  REGION 1..121: note = VH of XENP020596
EVKLEESGGGLVQPGGSMKLSCAASGFTFSDAWMDWVRQSPEKGLEWVAEIRTKANNHATYYAESVKGRFTISRDDSKSSVYLQMNSLRAEDTGIYYCTRLANWRWYFDVWGAGTTVTVSS

SEQ ID NO: 24323 - protein, 5 aa, synthetic construct
  REGION 1..5: note = Description of Artificial Sequence: Synthetic peptide
  REGION 1..5: note = XENP020596 vhCDR1
DAWMD

SEQ ID NO: 24324 - protein, 19 aa, synthetic construct
  REGION 1..19: note = Description of Artificial Sequence: Synthetic peptide
  REGION 1..19: note = XENP020596 vhCDR2
EIRTKANNHATYYAESVKG

SEQ ID NO: 24325 - protein, 10 aa, synthetic construct
  REGION 1..10: note = Description of Artificial Sequence: Synthetic peptide
  REGION 1..10: note = XENP020596 vhCDR3
LANWRWYFDV

SEQ ID NO: 24326 - protein, 218 aa, synthetic construct; identical to SEQ ID NO: 22266
  REGION 1..218: note = Description of Artificial Sequence: Synthetic polypeptide
  REGION 1..218: note = XENP020596 7G8_H0.144_L0_IgG1_PVA_/S267K Light Chain

SEQ ID NO: 24327 - protein, 111 aa, synthetic construct; identical to SEQ ID NO: 22267
  REGION 1..111: note = Description of Artificial Sequence: Synthetic polypeptide
  REGION 1..111: note = VL of XENP020596

SEQ ID NO: 24328 - protein, 15 aa, synthetic construct
  REGION 1..15: note = Description of Artificial Sequence: Synthetic peptide
  REGION 1..15: note = XENP020596 vlCDR1
KASQSVDYDGDSYMN

SEQ ID NO: 24329 - protein, 7 aa, synthetic construct
  REGION 1..7: note = Description of Artificial Sequence: Synthetic peptide
  REGION 1..7: note = XENP020596 vlCDR2
AASNLES

SEQ ID NO: 24330 - protein, 9 aa, synthetic construct
  REGION 1..9: note = Description of Artificial Sequence: Synthetic peptide
  REGION 1..9: note = XENP020596 vlCDR3
QQSNEDPFT

SEQ ID NO: 24331 - protein, 450 aa, synthetic construct
  REGION 1..450: note = Description of Artificial Sequence: Synthetic polypeptide
  REGION 1..450: note = XENP020601 7G8_H0.145_L0_IgG1_PVA_/S267K Heavy Chain
EVKLEESGGGLVQPGGSMKLSCAASGFTFSDAWMDWVRQSPEKGLEWVAEIRTKANNHATYYAESVKGRFTISRDDSKSSVYLQMNSLRAEDTGIYYCTRLANWLWYFDVWGAGTTVTVSSASTKGPSVFPLAPSSKSTSGGTAALGCLVKDYFPEPVTVSWNSGALTSGVHTFPAVLQSSGLYSLSSVVTVPSSSLGTQTYICNVNHKPSDTKVDKKVEPKSCDKTHTCPPCPAPPVAGPSVFLFPPKPKDTLMISRTPEVTCVVVDVKHEDPEVKFNWYVDGVEVHNAKTKPREEEYNSTYRVVSVLTVLHQDWLNGKEYKCKVSNKALPAPIEKTISKAKGQPREPQVYTLPPSREEMTKNQVSLTCDVSGFYPSDIAVEWESDGQPENNYKTTPPVLDSDGSFFLYSKLTVDKSRWEQGDVFSCSVMHEALHNHYTQKSLSLSPGK

SEQ ID NO: 24332 - protein, 121 aa, synthetic construct
  REGION 1..121: note = Description of Artificial Sequence: Synthetic polypeptide
  REGION 1..121: note = VH of XENP020601
EVKLEESGGGLVQPGGSMKLSCAASGFTFSDAWMDWVRQSPEKGLEWVAEIRTKANNHATYYAESVKGRFTISRDDSKSSVYLQMNSLRAEDTGIYYCTRLANWLWYFDVWGAGTTVTVSS

SEQ ID NO: 24333 - protein, 5 aa, synthetic construct
  REGION 1..5: note = Description of Artificial Sequence: Synthetic peptide
  REGION 1..5: note = XENP020601 vhCDR1
DAWMD

SEQ ID NO: 24334 - protein, 19 aa, synthetic construct
  REGION 1..19: note = Description of Artificial Sequence: Synthetic peptide
  REGION 1..19: note = XENP020601 vhCDR2
EIRTKANNHATYYAESVKG

SEQ ID NO: 24335 - protein, 10 aa, synthetic construct
  REGION 1..10: note = Description of Artificial Sequence: Synthetic peptide
  REGION 1..10: note = XENP020601 vhCDR3
LANWLWYFDV

SEQ ID NO: 24336 - protein, 218 aa, synthetic construct; identical to SEQ ID NO: 22266
  REGION 1..218: note = Description of Artificial Sequence: Synthetic polypeptide
  REGION 1..218: note = XENP020601 7G8_H0.145_L0_IgG1_PVA_/S267K Light Chain

SEQ ID NO: 24337 - protein, 111 aa, synthetic construct; identical to SEQ ID NO: 22267
  REGION 1..111: note = Description of Artificial Sequence: Synthetic polypeptide
  REGION 1..111: note = VL of XENP020601

SEQ ID NO: 24338 - protein, 15 aa, synthetic construct
  REGION 1..15: note = Description of Artificial Sequence: Synthetic peptide
  REGION 1..15: note = XENP020601 vlCDR1
KASQSVDYDGDSYMN

SEQ ID NO: 24339 - protein, 7 aa, synthetic construct
  REGION 1..7: note = Description of Artificial Sequence: Synthetic peptide
  REGION 1..7: note = XENP020601 vlCDR2
AASNLES

SEQ ID NO: 24340 - protein, 9 aa, synthetic construct
  REGION 1..9: note = Description of Artificial Sequence: Synthetic peptide
  REGION 1..9: note = XENP020601 vlCDR3
QQSNEDPFT

SEQ ID NO: 24341 - protein, 450 aa, synthetic construct
  REGION 1..450: note = Description of Artificial Sequence: Synthetic polypeptide
  REGION 1..450: note = XENP020602 7G8_H0.146_L0_IgG1_PVA_/S267K Heavy Chain
EVKLEESGGGLVQPGGSMKLSCAASGFTFSDAWMDWVRQSPEKGLEWVAEIRTKANNHATYYAESVKGRFTISRDDSKSSVYLQMNSLRAEDTGIYYCTRLANWGWYFDVWGAGTTVTVSSASTKGPSVFPLAPSSKSTSGGTAALGCLVKDYFPEPVTVSWNSGALTSGVHTFPAVLQSSGLYSLSSVVTVPSSSLGTQTYICNVNHKPSDTKVDKKVEPKSCDKTHTCPPCPAPPVAGPSVFLFPPKPKDTLMISRTPEVTCVVVDVKHEDPEVKFNWYVDGVEVHNAKTKPREEEYNSTYRVVSVLTVLHQDWLNGKEYKCKVSNKALPAPIEKTISKAKGQPREPQVYTLPPSREEMTKNQVSLTCDVSGFYPSDIAVEWESDGQPENNYKTTPPVLDSDGSFFLYSKLTVDKSRWEQGDVFSCSVMHEALHNHYTQKSLSLSPGK

SEQ ID NO: 24342 - protein, 121 aa, synthetic construct
  REGION 1..121: note = Description of Artificial Sequence: Synthetic polypeptide
  REGION 1..121: note = VH of XENP020602
EVKLEESGGGLVQPGGSMKLSCAASGFTFSDAWMDWVRQSPEKGLEWVAEIRTKANNHATYYAESVKGRFTISRDDSKSSVYLQMNSLRAEDTGIYYCTRLANWGWYFDVWGAGTTVTVSS

SEQ ID NO: 24343 - protein, 5 aa, synthetic construct
  REGION 1..5: note = Description of Artificial Sequence: Synthetic peptide
  REGION 1..5: note = XENP020602 vhCDR1
DAWMD

SEQ ID NO: 24344 - protein, 19 aa, synthetic construct
  REGION 1..19: note = Description of Artificial Sequence: Synthetic peptide
  REGION 1..19: note = XENP020602 vhCDR2
EIRTKANNHATYYAESVKG

SEQ ID NO: 24345 - protein, 10 aa, synthetic construct
  REGION 1..10: note = Description of Artificial Sequence: Synthetic peptide
  REGION 1..10: note = XENP020602 vhCDR3
LANWGWYFDV

SEQ ID NO: 24346 - protein, 218 aa, synthetic construct; identical to SEQ ID NO: 22266
  REGION 1..218: note = Description of Artificial Sequence: Synthetic polypeptide
  REGION 1..218: note = XENP020602 7G8_H0.146_L0_IgG1_PVA_/S267K Light Chain

SEQ ID NO: 24347 - protein, 111 aa, synthetic construct; identical to SEQ ID NO: 22267
  REGION 1..111: note = Description of Artificial Sequence: Synthetic polypeptide
  REGION 1..111: note = VL of XENP020602

SEQ ID NO: 24348 - protein, 15 aa, synthetic construct
  REGION 1..15: note = Description of Artificial Sequence: Synthetic peptide
  REGION 1..15: note = XENP020602 vlCDR1
KASQSVDYDGDSYMN

SEQ ID NO: 24349 - protein, 7 aa, synthetic construct
  REGION 1..7: note = Description of Artificial Sequence: Synthetic peptide
  REGION 1..7: note = XENP020602 vlCDR2
AASNLES

SEQ ID NO: 24350 - protein, 9 aa, synthetic construct
  REGION 1..9: note = Description of Artificial Sequence: Synthetic peptide
  REGION 1..9: note = XENP020602 vlCDR3
QQSNEDPFT

SEQ ID NO: 24351 - protein, 450 aa, synthetic construct
  REGION 1..450: note = Description of Artificial Sequence: Synthetic polypeptide
  REGION 1..450: note = XENP020603 7G8_H0.147_L0_IgG1_PVA_/S267K Heavy Chain
EVKLEESGGGLVQPGGSMKLSCAASGFTFSDAWMDWVRQSPEKGLEWVAEIRTKANNHATYYAESVKGRFTISRDDSKSSVYLQMNSLRAEDTGIYYCTRLANWYWYFDVWGAGTTVTVSSASTKGPSVFPLAPSSKSTSGGTAALGCLVKDYFPEPVTVSWNSGALTSGVHTFPAVLQSSGLYSLSSVVTVPSSSLGTQTYICNVNHKPSDTKVDKKVEPKSCDKTHTCPPCPAPPVAGPSVFLFPPKPKDTLMISRTPEVTCVVVDVKHEDPEVKFNWYVDGVEVHNAKTKPREEEYNSTYRVVSVLTVLHQDWLNGKEYKCKVSNKALPAPIEKTISKAKGQPREPQVYTLPPSREEMTKNQVSLTCDVSGFYPSDIAVEWESDGQPENNYKTTPPVLDSDGSFFLYSKLTVDKSRWEQGDVFSCSVMHEALHNHYTQKSLSLSPGK

SEQ ID NO: 24352 - protein, 121 aa, synthetic construct
  REGION 1..121: note = Description of Artificial Sequence: Synthetic polypeptide
  REGION 1..121: note = VH of XENP020603
EVKLEESGGGLVQPGGSMKLSCAASGFTFSDAWMDWVRQSPEKGLEWVAEIRTKANNHATYYAESVKGRFTISRDDSKSSVYLQMNSLRAEDTGIYYCTRLANWYWYFDVWGAGTTVTVSS

SEQ ID NO: 24353 - protein, 5 aa, synthetic construct
  REGION 1..5: note = Description of Artificial Sequence: Synthetic peptide
  REGION 1..5: note = XENP020603 vhCDR1
DAWMD

SEQ ID NO: 24354 - protein, 19 aa, synthetic construct
  REGION 1..19: note = Description of Artificial Sequence: Synthetic peptide
  REGION 1..19: note = XENP020603 vhCDR2
EIRTKANNHATYYAESVKG

SEQ ID NO: 24355 - protein, 10 aa, synthetic construct
  REGION 1..10: note = Description of Artificial Sequence: Synthetic peptide
  REGION 1..10: note = XENP020603 vhCDR3
LANWYWYFDV

SEQ ID NO: 24356 - protein, 218 aa, synthetic construct; identical to SEQ ID NO: 22266
  REGION 1..218: note = Description of Artificial Sequence: Synthetic polypeptide
  REGION 1..218: note = XENP020603 7G8_H0.147_L0_IgG1_PVA_/S267K Light Chain

SEQ ID NO: 24357 - protein, 111 aa, synthetic construct; identical to SEQ ID NO: 22267
  REGION 1..111: note = Description of Artificial Sequence: Synthetic polypeptide
  REGION 1..111: note = VL of XENP020603

SEQ ID NO: 24358 - protein, 15 aa, synthetic construct
  REGION 1..15: note = Description of Artificial Sequence: Synthetic peptide
  REGION 1..15: note = XENP020603 vlCDR1
KASQSVDYDGDSYMN

SEQ ID NO: 24359 - protein, 7 aa, synthetic construct
  REGION 1..7: note = Description of Artificial Sequence: Synthetic peptide
  REGION 1..7: note = XENP020603 vlCDR2
AASNLES

SEQ ID NO: 24360 - protein, 9 aa, synthetic construct
  REGION 1..9: note = Description of Artificial Sequence: Synthetic peptide
  REGION 1..9: note = XENP020603 vlCDR3
QQSNEDPFT

SEQ ID NO: 24361 - protein, 450 aa, synthetic construct
  REGION 1..450: note = Description of Artificial Sequence: Synthetic polypeptide
  REGION 1..450: note = XENP020604 7G8_H0.148_L0_IgG1_PVA_/S267K Heavy Chain
EVKLEESGGGLVQPGGSMKLSCAASGFTFSDAWMDWVRQSPEKGLEWVAEIRTKANNHATYYAESVKGRFTISRDDSKSSVYLQMNSLRAEDTGIYYCTRLANWDYYFDVWGAGTTVTVSSASTKGPSVFPLAPSSKSTSGGTAALGCLVKDYFPEPVTVSWNSGALTSGVHTFPAVLQSSGLYSLSSVVTVPSSSLGTQTYICNVNHKPSDTKVDKKVEPKSCDKTHTCPPCPAPPVAGPSVFLFPPKPKDTLMISRTPEVTCVVVDVKHEDPEVKFNWYVDGVEVHNAKTKPREEEYNSTYRVVSVLTVLHQDWLNGKEYKCKVSNKALPAPIEKTISKAKGQPREPQVYTLPPSREEMTKNQVSLTCDVSGFYPSDIAVEWESDGQPENNYKTTPPVLDSDGSFFLYSKLTVDKSRWEQGDVFSCSVMHEALHNHYTQKSLSLSPGK

SEQ ID NO: 24362 - protein, 121 aa, synthetic construct
  REGION 1..121: note = Description of Artificial Sequence: Synthetic polypeptide
  REGION 1..121: note = VH of XENP020604
EVKLEESGGGLVQPGGSMKLSCAASGFTFSDAWMDWVRQSPEKGLEWVAEIRTKANNHATYYAESVKGRFTISRDDSKSSVYLQMNSLRAEDTGIYYCTRLANWDYYFDVWGAGTTVTVSS

SEQ ID NO: 24363 - protein, 5 aa, synthetic construct
  REGION 1..5: note = Description of Artificial Sequence: Synthetic peptide
  REGION 1..5: note = XENP020604 vhCDR1
DAWMD

SEQ ID NO: 24364 - protein, 19 aa, synthetic construct
  REGION 1..19: note = Description of Artificial Sequence: Synthetic peptide
  REGION 1..19: note = XENP020604 vhCDR2
EIRTKANNHATYYAESVKG

SEQ ID NO: 24365 - protein, 10 aa, synthetic construct
  REGION 1..10: note = Description of Artificial Sequence: Synthetic peptide
  REGION 1..10: note = XENP020604 vhCDR3
LANWDYYFDV

SEQ ID NO: 24366 - protein, 218 aa, synthetic construct; identical to SEQ ID NO: 22266
  REGION 1..218: note = Description of Artificial Sequence: Synthetic polypeptide
  REGION 1..218: note = XENP020604 7G8_H0.148_L0_IgG1_PVA_/S267K Light Chain

SEQ ID NO: 24367 - protein, 111 aa, synthetic construct; identical to SEQ ID NO: 22267
  REGION 1..111: note = Description of Artificial Sequence: Synthetic polypeptide
  REGION 1..111: note = VL of XENP020604

SEQ ID NO: 24368 - protein, 15 aa, synthetic construct
  REGION 1..15: note = Description of Artificial Sequence: Synthetic peptide
  REGION 1..15: note = XENP020604 vlCDR1
KASQSVDYDGDSYMN

SEQ ID NO: 24369 - protein, 7 aa, synthetic construct
  REGION 1..7: note = Description of Artificial Sequence: Synthetic peptide
  REGION 1..7: note = XENP020604 vlCDR2
AASNLES

SEQ ID NO: 24370 - protein, 9 aa, synthetic construct
  REGION 1..9: note = Description of Artificial Sequence: Synthetic peptide
  REGION 1..9: note = XENP020604 vlCDR3
QQSNEDPFT

SEQ ID NO: 24371 - protein, 450 aa, synthetic construct; identical to SEQ ID NO: 22261
  REGION 1..450: note = Description of Artificial Sequence: Synthetic polypeptide
  REGION 1..450: note = XENP020605 7G8_H0_L0.1_IgG1_PVA_/S267K Heavy Chain

SEQ ID NO: 24372 - protein, 121 aa, synthetic construct; identical to SEQ ID NO: 22262
  REGION 1..121: note = Description of Artificial Sequence: Synthetic polypeptide
  REGION 1..121: note = VH of XENP020605

SEQ ID NO: 24373 - protein, 5 aa, synthetic construct
  REGION 1..5: note = Description of Artificial Sequence: Synthetic peptide
  REGION 1..5: note = XENP020605 vhCDR1
DAWMD

SEQ ID NO: 24374 - protein, 19 aa, synthetic construct
  REGION 1..19: note = Description of Artificial Sequence: Synthetic peptide
  REGION 1..19: note = XENP020605 vhCDR2
EIRTKANNHATYYAESVKG

SEQ ID NO: 24375 - protein, 10 aa, synthetic construct
  REGION 1..10: note = Description of Artificial Sequence: Synthetic peptide
  REGION 1..10: note = XENP020605 vhCDR3
LANWDWYFDV

SEQ ID NO: 24376 - protein, 218 aa, synthetic construct
  REGION 1..218: note = Description of Artificial Sequence: Synthetic polypeptide
  REGION 1..218: note = XENP020605 7G8_H0_L0.1_IgG1_PVA_/S267K Light Chain
DTVLTQSPASLAVSLGQRATISCKASQSVNYDGDSYMNWYQQKPGQPPKLLIYAASNLESGIPARLSGSGSGTDFTLNIHPVEEEDAATYYCQQSNEDPFTFGSGTKLEVKRTVAAPSVFIFPPSDEQLKSGTASVVCLLNNFYPREAKVQWKVDNALQSGNSQESVTEQDSKDSTYSLSSTLTLSKADYEKHKVYACEVTHQGLSSPVTKSFNRGEC

SEQ ID NO: 24377 - protein, 111 aa, synthetic construct
  REGION 1..111: note = Description of Artificial Sequence: Synthetic polypeptide
  REGION 1..111: note = VL of XENP020605
DTVLTQSPASLAVSLGQRATISCKASQSVNYDGDSYMNWYQQKPGQPPKLLIYAASNLESGIPARLSGSGSGTDFTLNIHPVEEEDAATYYCQQSNEDPFTFGSGTKLEVK

SEQ ID NO: 24378 - protein, 15 aa, synthetic construct
  REGION 1..15: note = Description of Artificial Sequence: Synthetic peptide
  REGION 1..15: note = XENP020605 vlCDR1
KASQSVNYDGDSYMN

SEQ ID NO: 24379 - protein, 7 aa, synthetic construct
  REGION 1..7: note = Description of Artificial Sequence: Synthetic peptide
  REGION 1..7: note = XENP020605 vlCDR2
AASNLES

SEQ ID NO: 24380 - protein, 9 aa, synthetic construct
  REGION 1..9: note = Description of Artificial Sequence: Synthetic peptide
  REGION 1..9: note = XENP020605 vlCDR3
QQSNEDPFT

SEQ ID NO: 24381 - protein, 450 aa, synthetic construct; identical to SEQ ID NO: 22261
  REGION 1..450: note = Description of Artificial Sequence: Synthetic polypeptide
  REGION 1..450: note = XENP020606 7G8_H0_L0.2_IgG1_PVA_/S267K Heavy Chain

SEQ ID NO: 24382 - protein, 121 aa, synthetic construct; identical to SEQ ID NO: 22262
  REGION 1..121: note = Description of Artificial Sequence: Synthetic polypeptide
  REGION 1..121: note = VH of XENP020606

SEQ ID NO: 24383 - protein, 5 aa, synthetic construct
  REGION 1..5: note = Description of Artificial Sequence: Synthetic peptide
  REGION 1..5: note = XENP020606 vhCDR1
DAWMD

SEQ ID NO: 24384 - protein, 19 aa, synthetic construct
  REGION 1..19: note = Description of Artificial Sequence: Synthetic peptide
  REGION 1..19: note = XENP020606 vhCDR2
EIRTKANNHATYYAESVKG

SEQ ID NO: 24385 - protein, 10 aa, synthetic construct
  REGION 1..10: note = Description of Artificial Sequence: Synthetic peptide
  REGION 1..10: note = XENP020606 vhCDR3
LANWDWYFDV

SEQ ID NO: 24386 - protein, 218 aa, synthetic construct
  REGION 1..218: note = Description of Artificial Sequence: Synthetic polypeptide
  REGION 1..218: note = XENP020606 7G8_H0_L0.2_IgG1_PVA_/S267K Light Chain
DTVLTQSPASLAVSLGQRATISCKASQSVEYDGDSYMNWYQQKPGQPPKLLIYAASNLESGIPARLSGSGSGTDFTLNIHPVEEEDAATYYCQQSNEDPFTFGSGTKLEVKRTVAAPSVFIFPPSDEQLKSGTASVVCLLNNFYPREAKVQWKVDNALQSGNSQESVTEQDSKDSTYSLSSTLTLSKADYEKHKVYACEVTHQGLSSPVTKSFNRGEC

SEQ ID NO: 24387 - protein, 111 aa, synthetic construct
  REGION 1..111: note = Description of Artificial Sequence: Synthetic polypeptide
  REGION 1..111: note = VL of XENP020606
DTVLTQSPASLAVSLGQRATISCKASQSVEYDGDSYMNWYQQKPGQPPKLLIYAASNLESGIPARLSGSGSGTDFTLNIHPVEEEDAATYYCQQSNEDPFTFGSGTKLEVK

SEQ ID NO: 24388 - protein, 15 aa, synthetic construct
  REGION 1..15: note = Description of Artificial Sequence: Synthetic peptide
  REGION 1..15: note = XENP020606 vlCDR1
KASQSVEYDGDSYMN

SEQ ID NO: 24389 - protein, 7 aa, synthetic construct
  REGION 1..7: note = Description of Artificial Sequence: Synthetic peptide
  REGION 1..7: note = XENP020606 vlCDR2
AASNLES

SEQ ID NO: 24390 - protein, 9 aa, synthetic construct
  REGION 1..9: note = Description of Artificial Sequence: Synthetic peptide
  REGION 1..9: note = XENP020606 vlCDR3
QQSNEDPFT

SEQ ID NO: 24391 - protein, 450 aa, synthetic construct; identical to SEQ ID NO: 22261
  REGION 1..450: note = Description of Artificial Sequence: Synthetic polypeptide
  REGION 1..450: note = XENP020607 7G8_H0_L0.3_IgG1_PVA_/S267K Heavy Chain

SEQ ID NO: 24392 - protein, 121 aa, synthetic construct; identical to SEQ ID NO: 22262
  REGION 1..121: note = Description of Artificial Sequence: Synthetic polypeptide
  REGION 1..121: note = VH of XENP020607

SEQ ID NO: 24393 - protein, 5 aa, synthetic construct
  REGION 1..5: note = Description of Artificial Sequence: Synthetic peptide
  REGION 1..5: note = XENP020607 vhCDR1
DAWMD

SEQ ID NO: 24394 - protein, 19 aa, synthetic construct
  REGION 1..19: note = Description of Artificial Sequence: Synthetic peptide
  REGION 1..19: note = XENP020607 vhCDR2
EIRTKANNHATYYAESVKG

SEQ ID NO: 24395 - protein, 10 aa, synthetic construct
  REGION 1..10: note = Description of Artificial Sequence: Synthetic peptide
  REGION 1..10: note = XENP020607 vhCDR3
LANWDWYFDV

SEQ ID NO: 24396 - protein, 218 aa, synthetic construct
  REGION 1..218: note = Description of Artificial Sequence: Synthetic polypeptide
  REGION 1..218: note = XENP020607 7G8_H0_L0.3_IgG1_PVA_/S267K Light Chain
DTVLTQSPASLAVSLGQRATISCKASQSVHYDGDSYMNWYQQKPGQPPKLLIYAASNLESGIPARLSGSGSGTDFTLNIHPVEEEDAATYYCQQSNEDPFTFGSGTKLEVKRTVAAPSVFIFPPSDEQLKSGTASVVCLLNNFYPREAKVQWKVDNALQSGNSQESVTEQDSKDSTYSLSSTLTLSKADYEKHKVYACEVTHQGLSSPVTKSFNRGEC

SEQ ID NO: 24397 - protein, 111 aa, synthetic construct
  REGION 1..111: note = Description of Artificial Sequence: Synthetic polypeptide
  REGION 1..111: note = VL of XENP020607
DTVLTQSPASLAVSLGQRATISCKASQSVHYDGDSYMNWYQQKPGQPPKLLIYAASNLESGIPARLSGSGSGTDFTLNIHPVEEEDAATYYCQQSNEDPFTFGSGTKLEVK

SEQ ID NO: 24398 - protein, 15 aa, synthetic construct
  REGION 1..15: note = Description of Artificial Sequence: Synthetic peptide
  REGION 1..15: note = XENP020607 vlCDR1
KASQSVHYDGDSYMN

SEQ ID NO: 24399 - protein, 7 aa, synthetic construct
  REGION 1..7: note = Description of Artificial Sequence: Synthetic peptide
  REGION 1..7: note = XENP020607 vlCDR2
AASNLES

SEQ ID NO: 24400 - protein, 9 aa, synthetic construct
  REGION 1..9: note = Description of Artificial Sequence: Synthetic peptide
  REGION 1..9: note = XENP020607 vlCDR3
QQSNEDPFT

SEQ ID NO: 24401 - protein, 450 aa, synthetic construct; identical to SEQ ID NO: 22261
  REGION 1..450: note = Description of Artificial Sequence: Synthetic polypeptide
  REGION 1..450: note = XENP020608 7G8_H0_L0.4_IgG1_PVA_/S267K Heavy Chain

SEQ ID NO: 24402 - protein, 121 aa, synthetic construct; identical to SEQ ID NO: 22262
  REGION 1..121: note = Description of Artificial Sequence: Synthetic polypeptide
  REGION 1..121: note = VH of XENP020608

SEQ ID NO: 24403 - protein, 5 aa, synthetic construct
  REGION 1..5: note = Description of Artificial Sequence: Synthetic peptide
  REGION 1..5: note = XENP020608 vhCDR1
DAWMD

SEQ ID NO: 24404 - protein, 19 aa, synthetic construct
  REGION 1..19: note = Description of Artificial Sequence: Synthetic peptide
  REGION 1..19: note = XENP020608 vhCDR2
EIRTKANNHATYYAESVKG

SEQ ID NO: 24405 - protein, 10 aa, synthetic construct
  REGION 1..10: note = Description of Artificial Sequence: Synthetic peptide
  REGION 1..10: note = XENP020608 vhCDR3
LANWDWYFDV

SEQ ID NO: 24406 - protein, 218 aa, synthetic construct
  REGION 1..218: note = Description of Artificial Sequence: Synthetic polypeptide
  REGION 1..218: note = XENP020608 7G8_H0_L0.4_IgG1_PVA_/S267K Light Chain
DTVLTQSPASLAVSLGQRATISCKASQSVSYDGDSYMNWYQQKPGQPPKLLIYAASNLESGIPARLSGSGSGTDFTLNIHPVEEEDAATYYCQQSNEDPFTFGSGTKLEVKRTVAAPSVFIFPPSDEQLKSGTASVVCLLNNFYPREAKVQWKVDNALQSGNSQESVTEQDSKDSTYSLSSTLTLSKADYEKHKVYACEVTHQGLSSPVTKSFNRGEC

SEQ ID NO: 24407 - protein, 111 aa, synthetic construct
  REGION 1..111: note = Description of Artificial Sequence: Synthetic polypeptide
  REGION 1..111: note = VL of XENP020608
DTVLTQSPASLAVSLGQRATISCKASQSVSYDGDSYMNWYQQKPGQPPKLLIYAASNLESGIPARLSGSGSGTDFTLNIHPVEEEDAATYYCQQSNEDPFTFGSGTKLEVK

SEQ ID NO: 24408 - protein, 15 aa, synthetic construct
  REGION 1..15: note = Description of Artificial Sequence: Synthetic peptide
  REGION 1..15: note = XENP020608 vlCDR1
KASQSVSYDGDSYMN

SEQ ID NO: 24409 - protein, 7 aa, synthetic construct
  REGION 1..7: note = Description of Artificial Sequence: Synthetic peptide
  REGION 1..7: note = XENP020608 vlCDR2
AASNLES

SEQ ID NO: 24410 - protein, 9 aa, synthetic construct
  REGION 1..9: note = Description of Artificial Sequence: Synthetic peptide
  REGION 1..9: note = XENP020608 vlCDR3
QQSNEDPFT

SEQ ID NO: 24411 - protein, 450 aa, synthetic construct; identical to SEQ ID NO: 22261
  REGION 1..450: note = Description of Artificial Sequence: Synthetic polypeptide
  REGION 1..450: note = XENP020609 7G8_H0_L0.5_IgG1_PVA_/S267K Heavy Chain

SEQ ID NO: 24412 - protein, 121 aa, synthetic construct; identical to SEQ ID NO: 22262
  REGION 1..121: note = Description of Artificial Sequence: Synthetic polypeptide
  REGION 1..121: note = VH of XENP020609

SEQ ID NO: 24413 - protein, 5 aa, synthetic construct
  REGION 1..5: note = Description of Artificial Sequence: Synthetic peptide
  REGION 1..5: note = XENP020609 vhCDR1
DAWMD

SEQ ID NO: 24414 - protein, 19 aa, synthetic construct
  REGION 1..19: note = Description of Artificial Sequence: Synthetic peptide
  REGION 1..19: note = XENP020609 vhCDR2
EIRTKANNHATYYAESVKG

SEQ ID NO: 24415 - protein, 10 aa, synthetic construct
  REGION 1..10: note = Description of Artificial Sequence: Synthetic peptide
  REGION 1..10: note = XENP020609 vhCDR3
LANWDWYFDV

SEQ ID NO: 24416 - protein, 218 aa, synthetic construct
  REGION 1..218: note = Description of Artificial Sequence: Synthetic polypeptide
  REGION 1..218: note = XENP020609 7G8_H0_L0.5_IgG1_PVA_/S267K Light Chain
DTVLTQSPASLAVSLGQRATISCKASQSVRYDGDSYMNWYQQKPGQPPKLLIYAASNLESGIPARLSGSGSGTDFTLNIHPVEEEDAATYYCQQSNEDPFTFGSGTKLEVKRTVAAPSVFIFPPSDEQLKSGTASVVCLLNNFYPREAKVQWKVDNALQSGNSQESVTEQDSKDSTYSLSSTLTLSKADYEKHKVYACEVTHQGLSSPVTKSFNRGEC

SEQ ID NO: 24417 - protein, 111 aa, synthetic construct
  REGION 1..111: note = Description of Artificial Sequence: Synthetic polypeptide
  REGION 1..111: note = VL of XENP020609
DTVLTQSPASLAVSLGQRATISCKASQSVRYDGDSYMNWYQQKPGQPPKLLIYAASNLESGIPARLSGSGSGTDFTLNIHPVEEEDAATYYCQQSNEDPFTFGSGTKLEVK

SEQ ID NO: 24418 - protein, 15 aa, synthetic construct
  REGION 1..15: note = Description of Artificial Sequence: Synthetic peptide
  REGION 1..15: note = XENP020609 vlCDR1
KASQSVRYDGDSYMN

SEQ ID NO: 24419 - protein, 7 aa, synthetic construct
  REGION 1..7: note = Description of Artificial Sequence: Synthetic peptide
  REGION 1..7: note = XENP020609 vlCDR2
AASNLES

SEQ ID NO: 24420 - protein, 9 aa, synthetic construct
  REGION 1..9: note = Description of Artificial Sequence: Synthetic peptide
  REGION 1..9: note = XENP020609 vlCDR3
QQSNEDPFT

SEQ ID NO: 24421 - protein, 450 aa, synthetic construct; identical to SEQ ID NO: 22261
  REGION 1..450: note = Description of Artificial Sequence: Synthetic polypeptide
  REGION 1..450: note = XENP020610 7G8_H0_L0.6_IgG1_PVA_/S267K Heavy Chain

SEQ ID NO: 24422 - protein, 121 aa, synthetic construct; identical to SEQ ID NO: 22262
  REGION 1..121: note = Description of Artificial Sequence: Synthetic polypeptide
  REGION 1..121: note = VH of XENP020610

SEQ ID NO: 24423 - protein, 5 aa, synthetic construct
  REGION 1..5: note = Description of Artificial Sequence: Synthetic peptide
  REGION 1..5: note = XENP020610 vhCDR1
DAWMD

SEQ ID NO: 24424 - protein, 19 aa, synthetic construct
  REGION 1..19: note = Description of Artificial Sequence: Synthetic peptide
  REGION 1..19: note = XENP020610 vhCDR2
EIRTKANNHATYYAESVKG

SEQ ID NO: 24425 - protein, 10 aa, synthetic construct
  REGION 1..10: note = Description of Artificial Sequence: Synthetic peptide
  REGION 1..10: note = XENP020610 vhCDR3
LANWDWYFDV

SEQ ID NO: 24426 - protein, 218 aa, synthetic construct
  REGION 1..218: note = Description of Artificial Sequence: Synthetic polypeptide
  REGION 1..218: note = XENP020610 7G8_H0_L0.6_IgG1_PVA_/S267K Light Chain
DTVLTQSPASLAVSLGQRATISCKASQSVLYDGDSYMNWYQQKPGQPPKLLIYAASNLESGIPARLSGSGSGTDFTLNIHPVEEEDAATYYCQQSNEDPFTFGSGTKLEVKRTVAAPSVFIFPPSDEQLKSGTASVVCLLNNFYPREAKVQWKVDNALQSGNSQESVTEQDSKDSTYSLSSTLTLSKADYEKHKVYACEVTHQGLSSPVTKSFNRGEC

SEQ ID NO: 24427 - protein, 111 aa, synthetic construct
  REGION 1..111: note = Description of Artificial Sequence: Synthetic polypeptide
  REGION 1..111: note = VL of XENP020610
DTVLTQSPASLAVSLGQRATISCKASQSVLYDGDSYMNWYQQKPGQPPKLLIYAASNLESGIPARLSGSGSGTDFTLNIHPVEEEDAATYYCQQSNEDPFTFGSGTKLEVK

SEQ ID NO: 24428 - protein, 15 aa, synthetic construct
  REGION 1..15: note = Description of Artificial Sequence: Synthetic peptide
  REGION 1..15: note = XENP020610 vlCDR1
KASQSVLYDGDSYMN

SEQ ID NO: 24429 - protein, 7 aa, synthetic construct
  REGION 1..7: note = Description of Artificial Sequence: Synthetic peptide
  REGION 1..7: note = XENP020610 vlCDR2
AASNLES

SEQ ID NO: 24430 - protein, 9 aa, synthetic construct
  REGION 1..9: note = Description of Artificial Sequence: Synthetic peptide
  REGION 1..9: note = XENP020610 vlCDR3
QQSNEDPFT

SEQ ID NO: 24431 - protein, 450 aa, synthetic construct; identical to SEQ ID NO: 22261
  REGION 1..450: note = Description of Artificial Sequence: Synthetic polypeptide
  REGION 1..450: note = XENP020611 7G8_H0_L0.7_IgG1_PVA_/S267K Heavy Chain

SEQ ID NO: 24432 - protein, 121 aa, synthetic construct; identical to SEQ ID NO: 22262
  REGION 1..121: note = Description of Artificial Sequence: Synthetic polypeptide
  REGION 1..121: note = VH of XENP020611

SEQ ID NO: 24433 - protein, 5 aa, synthetic construct
  REGION 1..5: note = Description of Artificial Sequence: Synthetic peptide
  REGION 1..5: note = XENP020611 vhCDR1
DAWMD

SEQ ID NO: 24434 - protein, 19 aa, synthetic construct
  REGION 1..19: note = Description of Artificial Sequence: Synthetic peptide
  REGION 1..19: note = XENP020611 vhCDR2
EIRTKANNHATYYAESVKG

SEQ ID NO: 24435 - protein, 10 aa, synthetic construct
  REGION 1..10: note = Description of Artificial Sequence: Synthetic peptide
  REGION 1..10: note = XENP020611 vhCDR3
LANWDWYFDV

SEQ ID NO: 24436 - protein, 218 aa, synthetic construct
  REGION 1..218: note = Description of Artificial Sequence: Synthetic polypeptide
  REGION 1..218: note = XENP020611 7G8_H0_L0.7_IgG1_PVA_/S267K Light Chain
DTVLTQSPASLAVSLGQRATISCKASQSVTYDGDSYMNWYQQKPGQPPKLLIYAASNLESGIPARLSGSGSGTDFTLNIHPVEEEDAATYYCQQSNEDPFTFGSGTKLEVKRTVAAPSVFIFPPSDEQLKSGTASVVCLLNNFYPREAKVQWKVDNALQSGNSQESVTEQDSKDSTYSLSSTLTLSKADYEKHKVYACEVTHQGLSSPVTKSFNRGEC

SEQ ID NO: 24437 - protein, 111 aa, synthetic construct
  REGION 1..111: note = Description of Artificial Sequence: Synthetic polypeptide
  REGION 1..111: note = VL of XENP020611
DTVLTQSPASLAVSLGQRATISCKASQSVTYDGDSYMNWYQQKPGQPPKLLIYAASNLESGIPARLSGSGSGTDFTLNIHPVEEEDAATYYCQQSNEDPFTFGSGTKLEVK

SEQ ID NO: 24438 - protein, 15 aa, synthetic construct
  REGION 1..15: note = Description of Artificial Sequence: Synthetic peptide
  REGION 1..15: note = XENP020611 vlCDR1
KASQSVTYDGDSYMN

SEQ ID NO: 24439 - protein, 7 aa, synthetic construct
  REGION 1..7: note = Description of Artificial Sequence: Synthetic peptide
  REGION 1..7: note = XENP020611 vlCDR2
AASNLES

SEQ ID NO: 24440 - protein, 9 aa, synthetic construct
  REGION 1..9: note = Description of Artificial Sequence: Synthetic peptide
  REGION 1..9: note = XENP020611 vlCDR3
QQSNEDPFT

SEQ ID NO: 24441 - protein, 450 aa, synthetic construct; identical to SEQ ID NO: 22261
  REGION 1..450: note = Description of Artificial Sequence: Synthetic polypeptide
  REGION 1..450: note = XENP020612 7G8_H0_L0.8_IgG1_PVA_/S267K Heavy Chain

SEQ ID NO: 24442 - protein, 121 aa, synthetic construct; identical to SEQ ID NO: 22262
  REGION 1..121: note = Description of Artificial Sequence: Synthetic polypeptide
  REGION 1..121: note = VH of XENP020612

SEQ ID NO: 24443 - protein, 5 aa, synthetic construct
  REGION 1..5: note = Description of Artificial Sequence: Synthetic peptide
  REGION 1..5: note = XENP020612 vhCDR1
DAWMD

SEQ ID NO: 24444 - protein, 19 aa, synthetic construct
  REGION 1..19: note = Description of Artificial Sequence: Synthetic peptide
  REGION 1..19: note = XENP020612 vhCDR2
EIRTKANNHATYYAESVKG

SEQ ID NO: 24445 - protein, 10 aa, synthetic construct
  REGION 1..10: note = Description of Artificial Sequence: Synthetic peptide
  REGION 1..10: note = XENP020612 vhCDR3
LANWDWYFDV

SEQ ID NO: 24446 - protein, 218 aa, synthetic construct
  REGION 1..218: note = Description of Artificial Sequence: Synthetic polypeptide
  REGION 1..218: note = XENP020612 7G8_H0_L0.8_IgG1_PVA_/S267K Light Chain
DTVLTQSPASLAVSLGQRATISCKASQSVGYDGDSYMNWYQQKPGQPPKLLIYAASNLESGIPARLSGSGSGTDFTLNIHPVEEEDAATYYCQQSNEDPFTFGSGTKLEVKRTVAAPSVFIFPPSDEQLKSGTASVVCLLNNFYPREAKVQWKVDNALQSGNSQESVTEQDSKDSTYSLSSTLTLSKADYEKHKVYACEVTHQGLSSPVTKSFNRGEC

SEQ ID NO: 24447 - protein, 111 aa, synthetic construct
  REGION 1..111: note = Description of Artificial Sequence: Synthetic polypeptide
  REGION 1..111: note = VL of XENP020612
DTVLTQSPASLAVSLGQRATISCKASQSVGYDGDSYMNWYQQKPGQPPKLLIYAASNLESGIPARLSGSGSGTDFTLNIHPVEEEDAATYYCQQSNEDPFTFGSGTKLEVK

SEQ ID NO: 24448 - protein, 15 aa, synthetic construct
  REGION 1..15: note = Description of Artificial Sequence: Synthetic peptide
  REGION 1..15: note = XENP020612 vlCDR1
KASQSVGYDGDSYMN

SEQ ID NO: 24449 - protein, 7 aa, synthetic construct
  REGION 1..7: note = Description of Artificial Sequence: Synthetic peptide
  REGION 1..7: note = XENP020612 vlCDR2
AASNLES

SEQ ID NO: 24450 - protein, 9 aa, synthetic construct
  REGION 1..9: note = Description of Artificial Sequence: Synthetic peptide
  REGION 1..9: note = XENP020612 vlCDR3
QQSNEDPFT

SEQ ID NO: 24451 - protein, 450 aa, synthetic construct; identical to SEQ ID NO: 22261
  REGION 1..450: note = Description of Artificial Sequence: Synthetic polypeptide
  REGION 1..450: note = XENP020613 7G8_H0_L0.9_IgG1_PVA_/S267K Heavy Chain

SEQ ID NO: 24452 - protein, 121 aa, synthetic construct; identical to SEQ ID NO: 22262
  REGION 1..121: note = Description of Artificial Sequence: Synthetic polypeptide
  REGION 1..121: note = VH of XENP020613

SEQ ID NO: 24453 - protein, 5 aa, synthetic construct
  REGION 1..5: note = Description of Artificial Sequence: Synthetic peptide
  REGION 1..5: note = XENP020613 vhCDR1
DAWMD

SEQ ID NO: 24454 - protein, 19 aa, synthetic construct
  REGION 1..19: note = Description of Artificial Sequence: Synthetic peptide
  REGION 1..19: note = XENP020613 vhCDR2
EIRTKANNHATYYAESVKG

SEQ ID NO: 24455 - protein, 10 aa, synthetic construct
  REGION 1..10: note = Description of Artificial Sequence: Synthetic peptide
  REGION 1..10: note = XENP020613 vhCDR3
LANWDWYFDV

SEQ ID NO: 24456 - protein, 218 aa, synthetic construct
  REGION 1..218: note = Description of Artificial Sequence: Synthetic polypeptide
  REGION 1..218: note = XENP020613 7G8_H0_L0.9_IgG1_PVA_/S267K Light Chain
DTVLTQSPASLAVSLGQRATISCKASQSVYYDGDSYMNWYQQKPGQPPKLLIYAASNLESGIPARLSGSGSGTDFTLNIHPVEEEDAATYYCQQSNEDPFTFGSGTKLEVKRTVAAPSVFIFPPSDEQLKSGTASVVCLLNNFYPREAKVQWKVDNALQSGNSQESVTEQDSKDSTYSLSSTLTLSKADYEKHKVYACEVTHQGLSSPVTKSFNRGEC

SEQ ID NO: 24457 - protein, 111 aa, synthetic construct
  REGION 1..111: note = Description of Artificial Sequence: Synthetic polypeptide
  REGION 1..111: note = VL of XENP020613
DTVLTQSPASLAVSLGQRATISCKASQSVYYDGDSYMNWYQQKPGQPPKLLIYAASNLESGIPARLSGSGSGTDFTLNIHPVEEEDAATYYCQQSNEDPFTFGSGTKLEVK

SEQ ID NO: 24458 - protein, 15 aa, synthetic construct
  REGION 1..15: note = Description of Artificial Sequence: Synthetic peptide
  REGION 1..15: note = XENP020613 vlCDR1
KASQSVYYDGDSYMN

SEQ ID NO: 24459 - protein, 7 aa, synthetic construct
  REGION 1..7: note = Description of Artificial Sequence: Synthetic peptide
  REGION 1..7: note = XENP020613 vlCDR2
AASNLES

SEQ ID NO: 24460 - protein, 9 aa, synthetic construct
  REGION 1..9: note = Description of Artificial Sequence: Synthetic peptide
  REGION 1..9: note = XENP020613 vlCDR3
QQSNEDPFT

SEQ ID NO: 24461 - protein, 450 aa, synthetic construct; identical to SEQ ID NO: 22261
  REGION 1..450: note = Description of Artificial Sequence: Synthetic polypeptide
  REGION 1..450: note = XENP020614 7G8_H0_L0.10_IgG1_PVA_/S267K Heavy Chain

SEQ ID NO: 24462 - protein, 121 aa, synthetic construct; identical to SEQ ID NO: 22262
  REGION 1..121: note = Description of Artificial Sequence: Synthetic polypeptide
  REGION 1..121: note = VH of XENP020614

SEQ ID NO: 24463 - protein, 5 aa, synthetic construct
  REGION 1..5: note = Description of Artificial Sequence: Synthetic peptide
  REGION 1..5: note = XENP020614 vhCDR1
DAWMD

SEQ ID NO: 24464 - protein, 19 aa, synthetic construct
  REGION 1..19: note = Description of Artificial Sequence: Synthetic peptide
  REGION 1..19: note = XENP020614 vhCDR2
EIRTKANNHATYYAESVKG

SEQ ID NO: 24465 - protein, 10 aa, synthetic construct
  REGION 1..10: note = Description of Artificial Sequence: Synthetic peptide
  REGION 1..10: note = XENP020614 vhCDR3
LANWDWYFDV

SEQ ID NO: 24466 - protein, 218 aa, synthetic construct
  REGION 1..218: note = Description of Artificial Sequence: Synthetic polypeptide
  REGION 1..218: note = XENP020614 7G8_H0_L0.10_IgG1_PVA_/S267K Light Chain
DTVLTQSPASLAVSLGQRATISCKASQSVDFDGDSYMNWYQQKPGQPPKLLIYAASNLESGIPARLSGSGSGTDFTLNIHPVEEEDAATYYCQQSNEDPFTFGSGTKLEVKRTVAAPSVFIFPPSDEQLKSGTASVVCLLNNFYPREAKVQWKVDNALQSGNSQESVTEQDSKDSTYSLSSTLTLSKADYEKHKVYACEVTHQGLSSPVTKSFNRGEC

SEQ ID NO: 24467 - protein, 111 aa, synthetic construct
  REGION 1..111: note = Description of Artificial Sequence: Synthetic polypeptide
  REGION 1..111: note = VL of XENP020614
DTVLTQSPASLAVSLGQRATISCKASQSVDFDGDSYMNWYQQKPGQPPKLLIYAASNLESGIPARLSGSGSGTDFTLNIHPVEEEDAATYYCQQSNEDPFTFGSGTKLEVK

SEQ ID NO: 24468 - protein, 15 aa, synthetic construct
  REGION 1..15: note = Description of Artificial Sequence: Synthetic peptide
  REGION 1..15: note = XENP020614 vlCDR1
KASQSVDFDGDSYMN

SEQ ID NO: 24469 - protein, 7 aa, synthetic construct
  REGION 1..7: note = Description of Artificial Sequence: Synthetic peptide
  REGION 1..7: note = XENP020614 vlCDR2
AASNLES

SEQ ID NO: 24470 - protein, 9 aa, synthetic construct
  REGION 1..9: note = Description of Artificial Sequence: Synthetic peptide
  REGION 1..9: note = XENP020614 vlCDR3
QQSNEDPFT

SEQ ID NO: 24471 - protein, 450 aa, synthetic construct; identical to SEQ ID NO: 22261
  REGION 1..450: note = Description of Artificial Sequence: Synthetic polypeptide
  REGION 1..450: note = XENP020615 7G8_H0_L0.11_IgG1_PVA_/S267K Heavy Chain

SEQ ID NO: 24472 - protein, 121 aa, synthetic construct; identical to SEQ ID NO: 22262
  REGION 1..121: note = Description of Artificial Sequence: Synthetic polypeptide
  REGION 1..121: note = VH of XENP020615

SEQ ID NO: 24473 - protein, 5 aa, synthetic construct
  REGION 1..5: note = Description of Artificial Sequence: Synthetic peptide
  REGION 1..5: note = XENP020615 vhCDR1
DAWMD

SEQ ID NO: 24474 - protein, 19 aa, synthetic construct
  REGION 1..19: note = Description of Artificial Sequence: Synthetic peptide
  REGION 1..19: note = XENP020615 vhCDR2
EIRTKANNHATYYAESVKG

SEQ ID NO: 24475 - protein, 10 aa, synthetic construct
  REGION 1..10: note = Description of Artificial Sequence: Synthetic peptide
  REGION 1..10: note = XENP020615 vhCDR3
LANWDWYFDV

SEQ ID NO: 24476 - protein, 218 aa, synthetic construct
  REGION 1..218: note = Description of Artificial Sequence: Synthetic polypeptide
  REGION 1..218: note = XENP020615 7G8_H0_L0.11_IgG1_PVA_/S267K Light Chain
DTVLTQSPASLAVSLGQRATISCKASQSVDHDGDSYMNWYQQKPGQPPKLLIYAASNLESGIPARLSGSGSGTDFTLNIHPVEEEDAATYYCQQSNEDPFTFGSGTKLEVKRTVAAPSVFIFPPSDEQLKSGTASVVCLLNNFYPREAKVQWKVDNALQSGNSQESVTEQDSKDSTYSLSSTLTLSKADYEKHKVYACEVTHQGLSSPVTKSFNRGEC

SEQ ID NO: 24477 - protein, 111 aa, synthetic construct
  REGION 1..111: note = Description of Artificial Sequence: Synthetic polypeptide
  REGION 1..111: note = VL of XENP020615
DTVLTQSPASLAVSLGQRATISCKASQSVDHDGDSYMNWYQQKPGQPPKLLIYAASNLESGIPARLSGSGSGTDFTLNIHPVEEEDAATYYCQQSNEDPFTFGSGTKLEVK

SEQ ID NO: 24478 - protein, 15 aa, synthetic construct
  REGION 1..15: note = Description of Artificial Sequence: Synthetic peptide
  REGION 1..15: note = XENP020615 vlCDR1
KASQSVDHDGDSYMN

SEQ ID NO: 24479 - protein, 7 aa, synthetic construct
  REGION 1..7: note = Description of Artificial Sequence: Synthetic peptide
  REGION 1..7: note = XENP020615 vlCDR2
AASNLES

SEQ ID NO: 24480 - protein, 9 aa, synthetic construct
  REGION 1..9: note = Description of Artificial Sequence: Synthetic peptide
  REGION 1..9: note = XENP020615 vlCDR3
QQSNEDPFT

SEQ ID NO: 24481 - protein, 450 aa, synthetic construct; identical to SEQ ID NO: 22261
  REGION 1..450: note = Description of Artificial Sequence: Synthetic polypeptide
  REGION 1..450: note = XENP020616 7G8_H0_L0.12_IgG1_PVA_/S267K Heavy Chain

SEQ ID NO: 24482 - protein, 121 aa, synthetic construct; identical to SEQ ID NO: 22262
  REGION 1..121: note = Description of Artificial Sequence: Synthetic polypeptide
  REGION 1..121: note = VH of XENP020616

SEQ ID NO: 24483 - protein, 5 aa, synthetic construct
  REGION 1..5: note = Description of Artificial Sequence: Synthetic peptide
  REGION 1..5: note = XENP020616 vhCDR1
DAWMD

SEQ ID NO: 24484 - protein, 19 aa, synthetic construct
  REGION 1..19: note = Description of Artificial Sequence: Synthetic peptide
  REGION 1..19: note = XENP020616 vhCDR2
EIRTKANNHATYYAESVKG

SEQ ID NO: 24485 - protein, 10 aa, synthetic construct
  REGION 1..10: note = Description of Artificial Sequence: Synthetic peptide
  REGION 1..10: note = XENP020616 vhCDR3
LANWDWYFDV

SEQ ID NO: 24486 - protein, 218 aa, synthetic construct
  REGION 1..218: note = Description of Artificial Sequence: Synthetic polypeptide
  REGION 1..218: note = XENP020616 7G8_H0_L0.12_IgG1_PVA_/S267K Light Chain
DTVLTQSPASLAVSLGQRATISCKASQSVDLDGDSYMNWYQQKPGQPPKLLIYAASNLESGIPARLSGSGSGTDFTLNIHPVEEEDAATYYCQQSNEDPFTFGSGTKLEVKRTVAAPSVFIFPPSDEQLKSGTASVVCLLNNFYPREAKVQWKVDNALQSGNSQESVTEQDSKDSTYSLSSTLTLSKADYEKHKVYACEVTHQGLSSPVTKSFNRGEC

SEQ ID NO: 24487 - protein, 111 aa, synthetic construct
  REGION 1..111: note = Description of Artificial Sequence: Synthetic polypeptide
  REGION 1..111: note = VL of XENP020616
DTVLTQSPASLAVSLGQRATISCKASQSVDLDGDSYMNWYQQKPGQPPKLLIYAASNLESGIPARLSGSGSGTDFTLNIHPVEEEDAATYYCQQSNEDPFTFGSGTKLEVK

SEQ ID NO: 24488 - protein, 15 aa, synthetic construct
  REGION 1..15: note = Description of Artificial Sequence: Synthetic peptide
  REGION 1..15: note = XENP020616 vlCDR1
KASQSVDLDGDSYMN

SEQ ID NO: 24489 - protein, 7 aa, synthetic construct
  REGION 1..7: note = Description of Artificial Sequence: Synthetic peptide
  REGION 1..7: note = XENP020616 vlCDR2
AASNLES

SEQ ID NO: 24490 - protein, 9 aa, synthetic construct
  REGION 1..9: note = Description of Artificial Sequence: Synthetic peptide
  REGION 1..9: note = XENP020616 vlCDR3
QQSNEDPFT

SEQ ID NO: 24491 - protein, 450 aa, synthetic construct; identical to SEQ ID NO: 22261
  REGION 1..450: note = Description of Artificial Sequence: Synthetic polypeptide
  REGION 1..450: note = XENP020617 7G8_H0_L0.13_IgG1_PVA_/S267K Heavy Chain

SEQ ID NO: 24492 - protein, 121 aa, synthetic construct; identical to SEQ ID NO: 22262
  REGION 1..121: note = Description of Artificial Sequence: Synthetic polypeptide
  REGION 1..121: note = VH of XENP020617

SEQ ID NO: 24493 - protein, 5 aa, synthetic construct
  REGION 1..5: note = Description of Artificial Sequence: Synthetic peptide
  REGION 1..5: note = XENP020617 vhCDR1
DAWMD

SEQ ID NO: 24494 - protein, 19 aa, synthetic construct
  REGION 1..19: note = Description of Artificial Sequence: Synthetic peptide
  REGION 1..19: note = XENP020617 vhCDR2
EIRTKANNHATYYAESVKG

SEQ ID NO: 24495 - protein, 10 aa, synthetic construct
  REGION 1..10: note = Description of Artificial Sequence: Synthetic peptide
  REGION 1..10: note = XENP020617 vhCDR3
LANWDWYFDV

SEQ ID NO: 24496 - protein, 218 aa, synthetic construct
  REGION 1..218: note = Description of Artificial Sequence: Synthetic polypeptide
  REGION 1..218: note = XENP020617 7G8_H0_L0.13_IgG1_PVA_/S267K Light Chain
DTVLTQSPASLAVSLGQRATISCKASQSVDWDGDSYMNWYQQKPGQPPKLLIYAASNLESGIPARLSGSGSGTDFTLNIHPVEEEDAATYYCQQSNEDPFTFGSGTKLEVKRTVAAPSVFIFPPSDEQLKSGTASVVCLLNNFYPREAKVQWKVDNALQSGNSQESVTEQDSKDSTYSLSSTLTLSKADYEKHKVYACEVTHQGLSSPVTKSFNRGEC

SEQ ID NO: 24497 - protein, 111 aa, synthetic construct
  REGION 1..111: note = Description of Artificial Sequence: Synthetic polypeptide
  REGION 1..111: note = VL of XENP020617
DTVLTQSPASLAVSLGQRATISCKASQSVDWDGDSYMNWYQQKPGQPPKLLIYAASNLESGIPARLSGSGSGTDFTLNIHPVEEEDAATYYCQQSNEDPFTFGSGTKLEVK

SEQ ID NO: 24498 - protein, 15 aa, synthetic construct
  REGION 1..15: note = Description of Artificial Sequence: Synthetic peptide
  REGION 1..15: note = XENP020617 vlCDR1
KASQSVDWDGDSYMN

SEQ ID NO: 24499 - protein, 7 aa, synthetic construct
  REGION 1..7: note = Description of Artificial Sequence: Synthetic peptide
  REGION 1..7: note = XENP020617 vlCDR2
AASNLES

SEQ ID NO: 24500 - protein, 9 aa, synthetic construct
  REGION 1..9: note = Description of Artificial Sequence: Synthetic peptide
  REGION 1..9: note = XENP020617 vlCDR3
QQSNEDPFT

SEQ ID NO: 24501 - protein, 450 aa, synthetic construct; identical to SEQ ID NO: 22261
  REGION 1..450: note = Description of Artificial Sequence: Synthetic polypeptide
  REGION 1..450: note = XENP020618 7G8_H0_L0.14_IgG1_PVA_/S267K Heavy Chain

SEQ ID NO: 24502 - protein, 121 aa, synthetic construct; identical to SEQ ID NO: 22262
  REGION 1..121: note = Description of Artificial Sequence: Synthetic polypeptide
  REGION 1..121: note = VH of XENP020618

SEQ ID NO: 24503 - protein, 5 aa, synthetic construct
  REGION 1..5: note = Description of Artificial Sequence: Synthetic peptide
  REGION 1..5: note = XENP020618 vhCDR1
DAWMD

SEQ ID NO: 24504 - protein, 19 aa, synthetic construct
  REGION 1..19: note = Description of Artificial Sequence: Synthetic peptide
  REGION 1..19: note = XENP020618 vhCDR2
EIRTKANNHATYYAESVKG

SEQ ID NO: 24505 - protein, 10 aa, synthetic construct
  REGION 1..10: note = Description of Artificial Sequence: Synthetic peptide
  REGION 1..10: note = XENP020618 vhCDR3
LANWDWYFDV

SEQ ID NO: 24506 - protein, 218 aa, synthetic construct
  REGION 1..218: note = Description of Artificial Sequence: Synthetic polypeptide
  REGION 1..218: note = XENP020618 7G8_H0_L0.14_IgG1_PVA_/S267K Light Chain
DTVLTQSPASLAVSLGQRATISCKASQSVDVDGDSYMNWYQQKPGQPPKLLIYAASNLESGIPARLSGSGSGTDFTLNIHPVEEEDAATYYCQQSNEDPFTFGSGTKLEVKRTVAAPSVFIFPPSDEQLKSGTASVVCLLNNFYPREAKVQWKVDNALQSGNSQESVTEQDSKDSTYSLSSTLTLSKADYEKHKVYACEVTHQGLSSPVTKSFNRGEC

SEQ ID NO: 24507 - protein, 111 aa, synthetic construct
  REGION 1..111: note = Description of Artificial Sequence: Synthetic polypeptide
  REGION 1..111: note = VL of XENP020618
DTVLTQSPASLAVSLGQRATISCKASQSVDVDGDSYMNWYQQKPGQPPKLLIYAASNLESGIPARLSGSGSGTDFTLNIHPVEEEDAATYYCQQSNEDPFTFGSGTKLEVK

SEQ ID NO: 24508 - protein, 15 aa, synthetic construct
  REGION 1..15: note = Description of Artificial Sequence: Synthetic peptide
  REGION 1..15: note = XENP020618 vlCDR1
KASQSVDVDGDSYMN

SEQ ID NO: 24509 - protein, 7 aa, synthetic construct
  REGION 1..7: note = Description of Artificial Sequence: Synthetic peptide
  REGION 1..7: note = XENP020618 vlCDR2
AASNLES

SEQ ID NO: 24510 - protein, 9 aa, synthetic construct
  REGION 1..9: note = Description of Artificial Sequence: Synthetic peptide
  REGION 1..9: note = XENP020618 vlCDR3
QQSNEDPFT

SEQ ID NO: 24511 - protein, 450 aa, synthetic construct; identical to SEQ ID NO: 22261
  REGION 1..450: note = Description of Artificial Sequence: Synthetic polypeptide
  REGION 1..450: note = XENP020619 7G8_H0_L0.15_IgG1_PVA_/S267K Heavy Chain

SEQ ID NO: 24512 - protein, 121 aa, synthetic construct; identical to SEQ ID NO: 22262
  REGION 1..121: note = Description of Artificial Sequence: Synthetic polypeptide
  REGION 1..121: note = VH of XENP020619

SEQ ID NO: 24513 - protein, 5 aa, synthetic construct
  REGION 1..5: note = Description of Artificial Sequence: Synthetic peptide
  REGION 1..5: note = XENP020619 vhCDR1
DAWMD

SEQ ID NO: 24514 - protein, 19 aa, synthetic construct
  REGION 1..19: note = Description of Artificial Sequence: Synthetic peptide
  REGION 1..19: note = XENP020619 vhCDR2
EIRTKANNHATYYAESVKG

SEQ ID NO: 24515 - protein, 10 aa, synthetic construct
  REGION 1..10: note = Description of Artificial Sequence: Synthetic peptide
  REGION 1..10: note = XENP020619 vhCDR3
LANWDWYFDV

SEQ ID NO: 24516 - protein, 218 aa, synthetic construct
  REGION 1..218: note = Description of Artificial Sequence: Synthetic polypeptide
  REGION 1..218: note = XENP020619 7G8_H0_L0.15_IgG1_PVA_/S267K Light Chain
DTVLTQSPASLAVSLGQRATISCKASQSVDADGDSYMNWYQQKPGQPPKLLIYAASNLESGIPARLSGSGSGTDFTLNIHPVEEEDAATYYCQQSNEDPFTFGSGTKLEVKRTVAAPSVFIFPPSDEQLKSGTASVVCLLNNFYPREAKVQWKVDNALQSGNSQESVTEQDSKDSTYSLSSTLTLSKADYEKHKVYACEVTHQGLSSPVTKSFNRGEC

SEQ ID NO: 24517 - protein, 111 aa, synthetic construct
  REGION 1..111: note = Description of Artificial Sequence: Synthetic polypeptide
  REGION 1..111: note = VL of XENP020619
DTVLTQSPASLAVSLGQRATISCKASQSVDADGDSYMNWYQQKPGQPPKLLIYAASNLESGIPARLSGSGSGTDFTLNIHPVEEEDAATYYCQQSNEDPFTFGSGTKLEVK

SEQ ID NO: 24518 - protein, 15 aa, synthetic construct
  REGION 1..15: note = Description of Artificial Sequence: Synthetic peptide
  REGION 1..15: note = XENP020619 vlCDR1
KASQSVDADGDSYMN

SEQ ID NO: 24519 - protein, 7 aa, synthetic construct
  REGION 1..7: note = Description of Artificial Sequence: Synthetic peptide
  REGION 1..7: note = XENP020619 vlCDR2
AASNLES

SEQ ID NO: 24520 - protein, 9 aa, synthetic construct
  REGION 1..9: note = Description of Artificial Sequence: Synthetic peptide
  REGION 1..9: note = XENP020619 vlCDR3
QQSNEDPFT

SEQ ID NO: 24521 - protein, 450 aa, synthetic construct; identical to SEQ ID NO: 22261
  REGION 1..450: note = Description of Artificial Sequence: Synthetic polypeptide
  REGION 1..450: note = XENP020620 7G8_H0_L0.16_IgG1_PVA_/S267K Heavy Chain

SEQ ID NO: 24522 - protein, 121 aa, synthetic construct; identical to SEQ ID NO: 22262
  REGION 1..121: note = Description of Artificial Sequence: Synthetic polypeptide
  REGION 1..121: note = VH of XENP020620

SEQ ID NO: 24523 - protein, 5 aa, synthetic construct
  REGION 1..5: note = Description of Artificial Sequence: Synthetic peptide
  REGION 1..5: note = XENP020620 vhCDR1
DAWMD

SEQ ID NO: 24524 - protein, 19 aa, synthetic construct
  REGION 1..19: note = Description of Artificial Sequence: Synthetic peptide
  REGION 1..19: note = XENP020620 vhCDR2
EIRTKANNHATYYAESVKG

SEQ ID NO: 24525 - protein, 10 aa, synthetic construct
  REGION 1..10: note = Description of Artificial Sequence: Synthetic peptide
  REGION 1..10: note = XENP020620 vhCDR3
LANWDWYFDV

SEQ ID NO: 24526 - protein, 218 aa, synthetic construct
  REGION 1..218: note = Description of Artificial Sequence: Synthetic polypeptide
  REGION 1..218: note = XENP020620 7G8_H0_L0.16_IgG1_PVA_/S267K Light Chain
DTVLTQSPASLAVSLGQRATISCKASQSVDQDGDSYMNWYQQKPGQPPKLLIYAASNLESGIPARLSGSGSGTDFTLNIHPVEEEDAATYYCQQSNEDPFTFGSGTKLEVKRTVAAPSVFIFPPSDEQLKSGTASVVCLLNNFYPREAKVQWKVDNALQSGNSQESVTEQDSKDSTYSLSSTLTLSKADYEKHKVYACEVTHQGLSSPVTKSFNRGEC

SEQ ID NO: 24527 - protein, 111 aa, synthetic construct
  REGION 1..111: note = Description of Artificial Sequence: Synthetic polypeptide
  REGION 1..111: note = VL of XENP020620
DTVLTQSPASLAVSLGQRATISCKASQSVDQDGDSYMNWYQQKPGQPPKLLIYAASNLESGIPARLSGSGSGTDFTLNIHPVEEEDAATYYCQQSNEDPFTFGSGTKLEVK

SEQ ID NO: 24528 - protein, 15 aa, synthetic construct
  REGION 1..15: note = Description of Artificial Sequence: Synthetic peptide
  REGION 1..15: note = XENP020620 vlCDR1
KASQSVDQDGDSYMN

SEQ ID NO: 24529 - protein, 7 aa, synthetic construct
  REGION 1..7: note = Description of Artificial Sequence: Synthetic peptide
  REGION 1..7: note = XENP020620 vlCDR2
AASNLES

SEQ ID NO: 24530 - protein, 9 aa, synthetic construct
  REGION 1..9: note = Description of Artificial Sequence: Synthetic peptide
  REGION 1..9: note = XENP020620 vlCDR3
QQSNEDPFT

SEQ ID NO: 24531 - protein, 450 aa, synthetic construct; identical to SEQ ID NO: 22261
  REGION 1..450: note = Description of Artificial Sequence: Synthetic polypeptide
  REGION 1..450: note = XENP020621 7G8_H0_L0.17_IgG1_PVA_/S267K Heavy Chain

SEQ ID NO: 24532 - protein, 121 aa, synthetic construct; identical to SEQ ID NO: 22262
  REGION 1..121: note = Description of Artificial Sequence: Synthetic polypeptide
  REGION 1..121: note = VH of XENP020621

SEQ ID NO: 24533 - protein, 5 aa, synthetic construct
  REGION 1..5: note = Description of Artificial Sequence: Synthetic peptide
  REGION 1..5: note = XENP020621 vhCDR1
DAWMD

SEQ ID NO: 24534 - protein, 19 aa, synthetic construct
  REGION 1..19: note = Description of Artificial Sequence: Synthetic peptide
  REGION 1..19: note = XENP020621 vhCDR2
EIRTKANNHATYYAESVKG

SEQ ID NO: 24535 - protein, 10 aa, synthetic construct
  REGION 1..10: note = Description of Artificial Sequence: Synthetic peptide
  REGION 1..10: note = XENP020621 vhCDR3
LANWDWYFDV

SEQ ID NO: 24536 - protein, 218 aa, synthetic construct
  REGION 1..218: note = Description of Artificial Sequence: Synthetic polypeptide
  REGION 1..218: note = XENP020621 7G8_H0_L0.17_IgG1_PVA_/S267K Light Chain
DTVLTQSPASLAVSLGQRATISCKASQSVDDDGDSYMNWYQQKPGQPPKLLIYAASNLESGIPARLSGSGSGTDFTLNIHPVEEEDAATYYCQQSNEDPFTFGSGTKLEVKRTVAAPSVFIFPPSDEQLKSGTASVVCLLNNFYPREAKVQWKVDNALQSGNSQESVTEQDSKDSTYSLSSTLTLSKADYEKHKVYACEVTHQGLSSPVTKSFNRGEC

SEQ ID NO: 24537 - protein, 111 aa, synthetic construct
  REGION 1..111: note = Description of Artificial Sequence: Synthetic polypeptide
  REGION 1..111: note = VL of XENP020621
DTVLTQSPASLAVSLGQRATISCKASQSVDDDGDSYMNWYQQKPGQPPKLLIYAASNLESGIPARLSGSGSGTDFTLNIHPVEEEDAATYYCQQSNEDPFTFGSGTKLEVK

SEQ ID NO: 24538 - protein, 15 aa, synthetic construct
  REGION 1..15: note = Description of Artificial Sequence: Synthetic peptide
  REGION 1..15: note = XENP020621 vlCDR1
KASQSVDDDGDSYMN

SEQ ID NO: 24539 - protein, 7 aa, synthetic construct
  REGION 1..7: note = Description of Artificial Sequence: Synthetic peptide
  REGION 1..7: note = XENP020621 vlCDR2
AASNLES

SEQ ID NO: 24540 - protein, 9 aa, synthetic construct
  REGION 1..9: note = Description of Artificial Sequence: Synthetic peptide
  REGION 1..9: note = XENP020621 vlCDR3
QQSNEDPFT

SEQ ID NO: 24541 - protein, 450 aa, synthetic construct; identical to SEQ ID NO: 22261
  REGION 1..450: note = Description of Artificial Sequence: Synthetic polypeptide
  REGION 1..450: note = XENP020622 7G8_H0_L0.18_IgG1_PVA_/S267K Heavy Chain

SEQ ID NO: 24542 - protein, 121 aa, synthetic construct; identical to SEQ ID NO: 22262
  REGION 1..121: note = Description of Artificial Sequence: Synthetic polypeptide
  REGION 1..121: note = VH of XENP020622

SEQ ID NO: 24543 - protein, 5 aa, synthetic construct
  REGION 1..5: note = Description of Artificial Sequence: Synthetic peptide
  REGION 1..5: note = XENP020622 vhCDR1
DAWMD

SEQ ID NO: 24544 - protein, 19 aa, synthetic construct
  REGION 1..19: note = Description of Artificial Sequence: Synthetic peptide
  REGION 1..19: note = XENP020622 vhCDR2
EIRTKANNHATYYAESVKG

SEQ ID NO: 24545 - protein, 10 aa, synthetic construct
  REGION 1..10: note = Description of Artificial Sequence: Synthetic peptide
  REGION 1..10: note = XENP020622 vhCDR3
LANWDWYFDV

SEQ ID NO: 24546 - protein, 218 aa, synthetic construct
  REGION 1..218: note = Description of Artificial Sequence: Synthetic polypeptide
  REGION 1..218: note = XENP020622 7G8_H0_L0.18_IgG1_PVA_/S267K Light Chain
DTVLTQSPASLAVSLGQRATISCKASQSVDKDGDSYMNWYQQKPGQPPKLLIYAASNLESGIPARLSGSGSGTDFTLNIHPVEEEDAATYYCQQSNEDPFTFGSGTKLEVKRTVAAPSVFIFPPSDEQLKSGTASVVCLLNNFYPREAKVQWKVDNALQSGNSQESVTEQDSKDSTYSLSSTLTLSKADYEKHKVYACEVTHQGLSSPVTKSFNRGEC

SEQ ID NO: 24547 - protein, 111 aa, synthetic construct
  REGION 1..111: note = Description of Artificial Sequence: Synthetic polypeptide
  REGION 1..111: note = VL of XENP020622
DTVLTQSPASLAVSLGQRATISCKASQSVDKDGDSYMNWYQQKPGQPPKLLIYAASNLESGIPARLSGSGSGTDFTLNIHPVEEEDAATYYCQQSNEDPFTFGSGTKLEVK

SEQ ID NO: 24548 - protein, 15 aa, synthetic construct
  REGION 1..15: note = Description of Artificial Sequence: Synthetic peptide
  REGION 1..15: note = XENP020622 vlCDR1
KASQSVDKDGDSYMN

SEQ ID NO: 24549 - protein, 7 aa, synthetic construct
  REGION 1..7: note = Description of Artificial Sequence: Synthetic peptide
  REGION 1..7: note = XENP020622 vlCDR2
AASNLES

SEQ ID NO: 24550 - protein, 9 aa, synthetic construct
  REGION 1..9: note = Description of Artificial Sequence: Synthetic peptide
  REGION 1..9: note = XENP020622 vlCDR3
QQSNEDPFT

SEQ ID NO: 24551 - protein, 450 aa, synthetic construct; identical to SEQ ID NO: 22261
  REGION 1..450: note = Description of Artificial Sequence: Synthetic polypeptide
  REGION 1..450: note = XENP020623 7G8_H0_L0.19_IgG1_PVA_/S267K Heavy Chain

SEQ ID NO: 24552 - protein, 121 aa, synthetic construct; identical to SEQ ID NO: 22262
  REGION 1..121: note = Description of Artificial Sequence: Synthetic polypeptide
  REGION 1..121: note = VH of XENP020623

SEQ ID NO: 24553 - protein, 5 aa, synthetic construct
  REGION 1..5: note = Description of Artificial Sequence: Synthetic peptide
  REGION 1..5: note = XENP020623 vhCDR1
DAWMD

SEQ ID NO: 24554 - protein, 19 aa, synthetic construct
  REGION 1..19: note = Description of Artificial Sequence: Synthetic peptide
  REGION 1..19: note = XENP020623 vhCDR2
EIRTKANNHATYYAESVKG

SEQ ID NO: 24555 - protein, 10 aa, synthetic construct
  REGION 1..10: note = Description of Artificial Sequence: Synthetic peptide
  REGION 1..10: note = XENP020623 vhCDR3
LANWDWYFDV

SEQ ID NO: 24556 - protein, 218 aa, synthetic construct
  REGION 1..218: note = Description of Artificial Sequence: Synthetic polypeptide
  REGION 1..218: note = XENP020623 7G8_H0_L0.19_IgG1_PVA_/S267K Light Chain
DTVLTQSPASLAVSLGQRATISCKASQSVDNDGDSYMNWYQQKPGQPPKLLIYAASNLESGIPARLSGSGSGTDFTLNIHPVEEEDAATYYCQQSNEDPFTFGSGTKLEVKRTVAAPSVFIFPPSDEQLKSGTASVVCLLNNFYPREAKVQWKVDNALQSGNSQESVTEQDSKDSTYSLSSTLTLSKADYEKHKVYACEVTHQGLSSPVTKSFNRGEC

SEQ ID NO: 24557 - protein, 111 aa, synthetic construct
  REGION 1..111: note = Description of Artificial Sequence: Synthetic polypeptide
  REGION 1..111: note = VL of XENP020623
DTVLTQSPASLAVSLGQRATISCKASQSVDNDGDSYMNWYQQKPGQPPKLLIYAASNLESGIPARLSGSGSGTDFTLNIHPVEEEDAATYYCQQSNEDPFTFGSGTKLEVK

SEQ ID NO: 24558 - protein, 15 aa, synthetic construct
  REGION 1..15: note = Description of Artificial Sequence: Synthetic peptide
  REGION 1..15: note = XENP020623 vlCDR1
KASQSVDNDGDSYMN

SEQ ID NO: 24559 - protein, 7 aa, synthetic construct
  REGION 1..7: note = Description of Artificial Sequence: Synthetic peptide
  REGION 1..7: note = XENP020623 vlCDR2
AASNLES

SEQ ID NO: 24560 - protein, 9 aa, synthetic construct
  REGION 1..9: note = Description of Artificial Sequence: Synthetic peptide
  REGION 1..9: note = XENP020623 vlCDR3
QQSNEDPFT

SEQ ID NO: 24561 - protein, 450 aa, synthetic construct; identical to SEQ ID NO: 22261
  REGION 1..450: note = Description of Artificial Sequence: Synthetic polypeptide
  REGION 1..450: note = XENP020624 7G8_H0_L0.20_IgG1_PVA_/S267K Heavy Chain

SEQ ID NO: 24562 - protein, 121 aa, synthetic construct; identical to SEQ ID NO: 22262
  REGION 1..121: note = Description of Artificial Sequence: Synthetic polypeptide
  REGION 1..121: note = VH of XENP020624

SEQ ID NO: 24563 - protein, 5 aa, synthetic construct
  REGION 1..5: note = Description of Artificial Sequence: Synthetic peptide
  REGION 1..5: note = XENP020624 vhCDR1
DAWMD

SEQ ID NO: 24564 - protein, 19 aa, synthetic construct
  REGION 1..19: note = Description of Artificial Sequence: Synthetic peptide
  REGION 1..19: note = XENP020624 vhCDR2
EIRTKANNHATYYAESVKG

SEQ ID NO: 24565 - protein, 10 aa, synthetic construct
  REGION 1..10: note = Description of Artificial Sequence: Synthetic peptide
  REGION 1..10: note = XENP020624 vhCDR3
LANWDWYFDV

SEQ ID NO: 24566 - protein, 218 aa, synthetic construct
  REGION 1..218: note = Description of Artificial Sequence: Synthetic polypeptide
  REGION 1..218: note = XENP020624 7G8_H0_L0.20_IgG1_PVA_/S267K Light Chain
DTVLTQSPASLAVSLGQRATISCKASQSVDYNGDSYMNWYQQKPGQPPKLLIYAASNLESGIPARLSGSGSGTDFTLNIHPVEEEDAATYYCQQSNEDPFTFGSGTKLEVKRTVAAPSVFIFPPSDEQLKSGTASVVCLLNNFYPREAKVQWKVDNALQSGNSQESVTEQDSKDSTYSLSSTLTLSKADYEKHKVYACEVTHQGLSSPVTKSFNRGEC

SEQ ID NO: 24567 - protein, 111 aa, synthetic construct
  REGION 1..111: note = Description of Artificial Sequence: Synthetic polypeptide
  REGION 1..111: note = VL of XENP020624
DTVLTQSPASLAVSLGQRATISCKASQSVDYNGDSYMNWYQQKPGQPPKLLIYAASNLESGIPARLSGSGSGTDFTLNIHPVEEEDAATYYCQQSNEDPFTFGSGTKLEVK

SEQ ID NO: 24568 - protein, 15 aa, synthetic construct
  REGION 1..15: note = Description of Artificial Sequence: Synthetic peptide
  REGION 1..15: note = XENP020624 vlCDR1
KASQSVDYNGDSYMN

SEQ ID NO: 24569 - protein, 7 aa, synthetic construct
  REGION 1..7: note = Description of Artificial Sequence: Synthetic peptide
  REGION 1..7: note = XENP020624 vlCDR2
AASNLES

SEQ ID NO: 24570 - protein, 9 aa, synthetic construct
  REGION 1..9: note = Description of Artificial Sequence: Synthetic peptide
  REGION 1..9: note = XENP020624 vlCDR3
QQSNEDPFT

SEQ ID NO: 24571 - protein, 450 aa, synthetic construct; identical to SEQ ID NO: 22261
  REGION 1..450: note = Description of Artificial Sequence: Synthetic polypeptide
  REGION 1..450: note = XENP020625 7G8_H0_L0.21_IgG1_PVA_/S267K Heavy Chain

SEQ ID NO: 24572 - protein, 121 aa, synthetic construct; identical to SEQ ID NO: 22262
  REGION 1..121: note = Description of Artificial Sequence: Synthetic polypeptide
  REGION 1..121: note = VH of XENP020625

SEQ ID NO: 24573 - protein, 5 aa, synthetic construct
  REGION 1..5: note = Description of Artificial Sequence: Synthetic peptide
  REGION 1..5: note = XENP020625 vhCDR1
DAWMD

SEQ ID NO: 24574 - protein, 19 aa, synthetic construct
  REGION 1..19: note = Description of Artificial Sequence: Synthetic peptide
  REGION 1..19: note = XENP020625 vhCDR2
EIRTKANNHATYYAESVKG

SEQ ID NO: 24575 - protein, 10 aa, synthetic construct
  REGION 1..10: note = Description of Artificial Sequence: Synthetic peptide
  REGION 1..10: note = XENP020625 vhCDR3
LANWDWYFDV

SEQ ID NO: 24576 - protein, 218 aa, synthetic construct
  REGION 1..218: note = Description of Artificial Sequence: Synthetic polypeptide
  REGION 1..218: note = XENP020625 7G8_H0_L0.21_IgG1_PVA_/S267K Light Chain
DTVLTQSPASLAVSLGQRATISCKASQSVDYEGDSYMNWYQQKPGQPPKLLIYAASNLESGIPARLSGSGSGTDFTLNIHPVEEEDAATYYCQQSNEDPFTFGSGTKLEVKRTVAAPSVFIFPPSDEQLKSGTASVVCLLNNFYPREAKVQWKVDNALQSGNSQESVTEQDSKDSTYSLSSTLTLSKADYEKHKVYACEVTHQGLSSPVTKSFNRGEC

SEQ ID NO: 24577 - protein, 111 aa, synthetic construct
  REGION 1..111: note = Description of Artificial Sequence: Synthetic polypeptide
  REGION 1..111: note = VL of XENP020625
DTVLTQSPASLAVSLGQRATISCKASQSVDYEGDSYMNWYQQKPGQPPKLLIYAASNLESGIPARLSGSGSGTDFTLNIHPVEEEDAATYYCQQSNEDPFTFGSGTKLEVK

SEQ ID NO: 24578 - protein, 15 aa, synthetic construct
  REGION 1..15: note = Description of Artificial Sequence: Synthetic peptide
  REGION 1..15: note = XENP020625 vlCDR1
KASQSVDYEGDSYMN

SEQ ID NO: 24579 - protein, 7 aa, synthetic construct
  REGION 1..7: note = Description of Artificial Sequence: Synthetic peptide
  REGION 1..7: note = XENP020625 vlCDR2
AASNLES

SEQ ID NO: 24580 - protein, 9 aa, synthetic construct
  REGION 1..9: note = Description of Artificial Sequence: Synthetic peptide
  REGION 1..9: note = XENP020625 vlCDR3
QQSNEDPFT

SEQ ID NO: 24581 - protein, 450 aa, synthetic construct; identical to SEQ ID NO: 22261
  REGION 1..450: note = Description of Artificial Sequence: Synthetic polypeptide
  REGION 1..450: note = XENP020626 7G8_H0_L0.22_IgG1_PVA_/S267K Heavy Chain

SEQ ID NO: 24582 - protein, 121 aa, synthetic construct; identical to SEQ ID NO: 22262
  REGION 1..121: note = Description of Artificial Sequence: Synthetic polypeptide
  REGION 1..121: note = VH of XENP020626

SEQ ID NO: 24583 - protein, 5 aa, synthetic construct
  REGION 1..5: note = Description of Artificial Sequence: Synthetic peptide
  REGION 1..5: note = XENP020626 vhCDR1
DAWMD

SEQ ID NO: 24584 - protein, 19 aa, synthetic construct
  REGION 1..19: note = Description of Artificial Sequence: Synthetic peptide
  REGION 1..19: note = XENP020626 vhCDR2
EIRTKANNHATYYAESVKG

SEQ ID NO: 24585 - protein, 10 aa, synthetic construct
  REGION 1..10: note = Description of Artificial Sequence: Synthetic peptide
  REGION 1..10: note = XENP020626 vhCDR3
LANWDWYFDV

SEQ ID NO: 24586 - protein, 218 aa, synthetic construct
  REGION 1..218: note = Description of Artificial Sequence: Synthetic polypeptide
  REGION 1..218: note = XENP020626 7G8_H0_L0.22_IgG1_PVA_/S267K Light Chain
DTVLTQSPASLAVSLGQRATISCKASQSVDYHGDSYMNWYQQKPGQPPKLLIYAASNLESGIPARLSGSGSGTDFTLNIHPVEEEDAATYYCQQSNEDPFTFGSGTKLEVKRTVAAPSVFIFPPSDEQLKSGTASVVCLLNNFYPREAKVQWKVDNALQSGNSQESVTEQDSKDSTYSLSSTLTLSKADYEKHKVYACEVTHQGLSSPVTKSFNRGEC

SEQ ID NO: 24587 - protein, 111 aa, synthetic construct
  REGION 1..111: note = Description of Artificial Sequence: Synthetic polypeptide
  REGION 1..111: note = VL of XENP020626
DTVLTQSPASLAVSLGQRATISCKASQSVDYHGDSYMNWYQQKPGQPPKLLIYAASNLESGIPARLSGSGSGTDFTLNIHPVEEEDAATYYCQQSNEDPFTFGSGTKLEVK

SEQ ID NO: 24588 - protein, 15 aa, synthetic construct
  REGION 1..15: note = Description of Artificial Sequence: Synthetic peptide
  REGION 1..15: note = XENP020626 vlCDR1
KASQSVDYHGDSYMN

SEQ ID NO: 24589 - protein, 7 aa, synthetic construct
  REGION 1..7: note = Description of Artificial Sequence: Synthetic peptide
  REGION 1..7: note = XENP020626 vlCDR2
AASNLES

SEQ ID NO: 24590 - protein, 9 aa, synthetic construct
  REGION 1..9: note = Description of Artificial Sequence: Synthetic peptide
  REGION 1..9: note = XENP020626 vlCDR3
QQSNEDPFT

SEQ ID NO: 24591 - protein, 450 aa, synthetic construct; identical to SEQ ID NO: 22261
  REGION 1..450: note = Description of Artificial Sequence: Synthetic polypeptide
  REGION 1..450: note = XENP020627 7G8_H0_L0.23_IgG1_PVA_/S267K Heavy Chain

SEQ ID NO: 24592 - protein, 121 aa, synthetic construct; identical to SEQ ID NO: 22262
  REGION 1..121: note = Description of Artificial Sequence: Synthetic polypeptide
  REGION 1..121: note = VH of XENP020627

SEQ ID NO: 24593 - protein, 5 aa, synthetic construct
  REGION 1..5: note = Description of Artificial Sequence: Synthetic peptide
  REGION 1..5: note = XENP020627 vhCDR1
DAWMD

SEQ ID NO: 24594 - protein, 19 aa, synthetic construct
  REGION 1..19: note = Description of Artificial Sequence: Synthetic peptide
  REGION 1..19: note = XENP020627 vhCDR2
EIRTKANNHATYYAESVKG

SEQ ID NO: 24595 - protein, 10 aa, synthetic construct
  REGION 1..10: note = Description of Artificial Sequence: Synthetic peptide
  REGION 1..10: note = XENP020627 vhCDR3
LANWDWYFDV

SEQ ID NO: 24596 - protein, 218 aa, synthetic construct
  REGION 1..218: note = Description of Artificial Sequence: Synthetic polypeptide
  REGION 1..218: note = XENP020627 7G8_H0_L0.23_IgG1_PVA_/S267K Light Chain
DTVLTQSPASLAVSLGQRATISCKASQSVDYSGDSYMNWYQQKPGQPPKLLIYAASNLESGIPARLSGSGSGTDFTLNIHPVEEEDAATYYCQQSNEDPFTFGSGTKLEVKRTVAAPSVFIFPPSDEQLKSGTASVVCLLNNFYPREAKVQWKVDNALQSGNSQESVTEQDSKDSTYSLSSTLTLSKADYEKHKVYACEVTHQGLSSPVTKSFNRGEC

SEQ ID NO: 24597 - protein, 111 aa, synthetic construct
  REGION 1..111: note = Description of Artificial Sequence: Synthetic polypeptide
  REGION 1..111: note = VL of XENP020627
DTVLTQSPASLAVSLGQRATISCKASQSVDYSGDSYMNWYQQKPGQPPKLLIYAASNLESGIPARLSGSGSGTDFTLNIHPVEEEDAATYYCQQSNEDPFTFGSGTKLEVK

SEQ ID NO: 24598 - protein, 15 aa, synthetic construct
  REGION 1..15: note = Description of Artificial Sequence: Synthetic peptide
  REGION 1..15: note = XENP020627 vlCDR1
KASQSVDYSGDSYMN

SEQ ID NO: 24599 - protein, 7 aa, synthetic construct
  REGION 1..7: note = Description of Artificial Sequence: Synthetic peptide
  REGION 1..7: note = XENP020627 vlCDR2
AASNLES

SEQ ID NO: 24600 - protein, 9 aa, synthetic construct
  REGION 1..9: note = Description of Artificial Sequence: Synthetic peptide
  REGION 1..9: note = XENP020627 vlCDR3
QQSNEDPFT

SEQ ID NO: 24601 - protein, 450 aa, synthetic construct; identical to SEQ ID NO: 22261
  REGION 1..450: note = Description of Artificial Sequence: Synthetic polypeptide
  REGION 1..450: note = XENP020628 7G8_H0_L0.24_IgG1_PVA_/S267K Heavy Chain

SEQ ID NO: 24602 - protein, 121 aa, synthetic construct; identical to SEQ ID NO: 22262
  REGION 1..121: note = Description of Artificial Sequence: Synthetic polypeptide
  REGION 1..121: note = VH of XENP020628

SEQ ID NO: 24603 - protein, 5 aa, synthetic construct
  REGION 1..5: note = Description of Artificial Sequence: Synthetic peptide
  REGION 1..5: note = XENP020628 vhCDR1
DAWMD

SEQ ID NO: 24604 - protein, 19 aa, synthetic construct
  REGION 1..19: note = Description of Artificial Sequence: Synthetic peptide
  REGION 1..19: note = XENP020628 vhCDR2
EIRTKANNHATYYAESVKG

SEQ ID NO: 24605 - protein, 10 aa, synthetic construct
  REGION 1..10: note = Description of Artificial Sequence: Synthetic peptide
  REGION 1..10: note = XENP020628 vhCDR3
LANWDWYFDV

SEQ ID NO: 24606 - protein, 218 aa, synthetic construct
  REGION 1..218: note = Description of Artificial Sequence: Synthetic polypeptide
  REGION 1..218: note = XENP020628 7G8_H0_L0.24_IgG1_PVA_/S267K Light Chain
DTVLTQSPASLAVSLGQRATISCKASQSVDYRGDSYMNWYQQKPGQPPKLLIYAASNLESGIPARLSGSGSGTDFTLNIHPVEEEDAATYYCQQSNEDPFTFGSGTKLEVKRTVAAPSVFIFPPSDEQLKSGTASVVCLLNNFYPREAKVQWKVDNALQSGNSQESVTEQDSKDSTYSLSSTLTLSKADYEKHKVYACEVTHQGLSSPVTKSFNRGEC

SEQ ID NO: 24607 - protein, 111 aa, synthetic construct
  REGION 1..111: note = Description of Artificial Sequence: Synthetic polypeptide
  REGION 1..111: note = VL of XENP020628
DTVLTQSPASLAVSLGQRATISCKASQSVDYRGDSYMNWYQQKPGQPPKLLIYAASNLESGIPARLSGSGSGTDFTLNIHPVEEEDAATYYCQQSNEDPFTFGSGTKLEVK

SEQ ID NO: 24608 - protein, 15 aa, synthetic construct
  REGION 1..15: note = Description of Artificial Sequence: Synthetic peptide
  REGION 1..15: note = XENP020628 vlCDR1
KASQSVDYRGDSYMN

SEQ ID NO: 24609 - protein, 7 aa, synthetic construct
  REGION 1..7: note = Description of Artificial Sequence: Synthetic peptide
  REGION 1..7: note = XENP020628 vlCDR2
AASNLES

SEQ ID NO: 24610 - protein, 9 aa, synthetic construct
  REGION 1..9: note = Description of Artificial Sequence: Synthetic peptide
  REGION 1..9: note = XENP020628 vlCDR3
QQSNEDPFT

SEQ ID NO: 24611 - protein, 450 aa, synthetic construct; identical to SEQ ID NO: 22261
  REGION 1..450: note = Description of Artificial Sequence: Synthetic polypeptide
  REGION 1..450: note = XENP020629 7G8_H0_L0.25_IgG1_PVA_/S267K Heavy Chain

SEQ ID NO: 24612 - protein, 121 aa, synthetic construct; identical to SEQ ID NO: 22262
  REGION 1..121: note = Description of Artificial Sequence: Synthetic polypeptide
  REGION 1..121: note = VH of XENP020629

SEQ ID NO: 24613 - protein, 5 aa, synthetic construct
  REGION 1..5: note = Description of Artificial Sequence: Synthetic peptide
  REGION 1..5: note = XENP020629 vhCDR1
DAWMD

SEQ ID NO: 24614 - protein, 19 aa, synthetic construct
  REGION 1..19: note = Description of Artificial Sequence: Synthetic peptide
  REGION 1..19: note = XENP020629 vhCDR2
EIRTKANNHATYYAESVKG

SEQ ID NO: 24615 - protein, 10 aa, synthetic construct
  REGION 1..10: note = Description of Artificial Sequence: Synthetic peptide
  REGION 1..10: note = XENP020629 vhCDR3
LANWDWYFDV

SEQ ID NO: 24616 - protein, 218 aa, synthetic construct
  REGION 1..218: note = Description of Artificial Sequence: Synthetic polypeptide
  REGION 1..218: note = XENP020629 7G8_H0_L0.25_IgG1_PVA_/S267K Light Chain
DTVLTQSPASLAVSLGQRATISCKASQSVDYLGDSYMNWYQQKPGQPPKLLIYAASNLESGIPARLSGSGSGTDFTLNIHPVEEEDAATYYCQQSNEDPFTFGSGTKLEVKRTVAAPSVFIFPPSDEQLKSGTASVVCLLNNFYPREAKVQWKVDNALQSGNSQESVTEQDSKDSTYSLSSTLTLSKADYEKHKVYACEVTHQGLSSPVTKSFNRGEC

SEQ ID NO: 24617 - protein, 111 aa, synthetic construct
  REGION 1..111: note = Description of Artificial Sequence: Synthetic polypeptide
  REGION 1..111: note = VL of XENP020629
DTVLTQSPASLAVSLGQRATISCKASQSVDYLGDSYMNWYQQKPGQPPKLLIYAASNLESGIPARLSGSGSGTDFTLNIHPVEEEDAATYYCQQSNEDPFTFGSGTKLEVK

SEQ ID NO: 24618 - protein, 15 aa, synthetic construct
  REGION 1..15: note = Description of Artificial Sequence: Synthetic peptide
  REGION 1..15: note = XENP020629 vlCDR1
KASQSVDYLGDSYMN

SEQ ID NO: 24619 - protein, 7 aa, synthetic construct
  REGION 1..7: note = Description of Artificial Sequence: Synthetic peptide
  REGION 1..7: note = XENP020629 vlCDR2
AASNLES

SEQ ID NO: 24620 - protein, 9 aa, synthetic construct
  REGION 1..9: note = Description of Artificial Sequence: Synthetic peptide
  REGION 1..9: note = XENP020629 vlCDR3
QQSNEDPFT

SEQ ID NO: 24621 - protein, 450 aa, synthetic construct; identical to SEQ ID NO: 22261
  REGION 1..450: note = Description of Artificial Sequence: Synthetic polypeptide
  REGION 1..450: note = XENP020630 7G8_H0_L0.26_IgG1_PVA_/S267K Heavy Chain

SEQ ID NO: 24622 - protein, 121 aa, synthetic construct; identical to SEQ ID NO: 22262
  REGION 1..121: note = Description of Artificial Sequence: Synthetic polypeptide
  REGION 1..121: note = VH of XENP020630

SEQ ID NO: 24623 - protein, 5 aa, synthetic construct
  REGION 1..5: note = Description of Artificial Sequence: Synthetic peptide
  REGION 1..5: note = XENP020630 vhCDR1
DAWMD

SEQ ID NO: 24624 - protein, 19 aa, synthetic construct
  REGION 1..19: note = Description of Artificial Sequence: Synthetic peptide
  REGION 1..19: note = XENP020630 vhCDR2
EIRTKANNHATYYAESVKG

SEQ ID NO: 24625 - protein, 10 aa, synthetic construct
  REGION 1..10: note = Description of Artificial Sequence: Synthetic peptide
  REGION 1..10: note = XENP020630 vhCDR3
LANWDWYFDV

SEQ ID NO: 24626 - protein, 218 aa, synthetic construct
  REGION 1..218: note = Description of Artificial Sequence: Synthetic polypeptide
  REGION 1..218: note = XENP020630 7G8_H0_L0.26_IgG1_PVA_/S267K Light Chain
DTVLTQSPASLAVSLGQRATISCKASQSVDYTGDSYMNWYQQKPGQPPKLLIYAASNLESGIPARLSGSGSGTDFTLNIHPVEEEDAATYYCQQSNEDPFTFGSGTKLEVKRTVAAPSVFIFPPSDEQLKSGTASVVCLLNNFYPREAKVQWKVDNALQSGNSQESVTEQDSKDSTYSLSSTLTLSKADYEKHKVYACEVTHQGLSSPVTKSFNRGEC

SEQ ID NO: 24627 - protein, 111 aa, synthetic construct
  REGION 1..111: note = Description of Artificial Sequence: Synthetic polypeptide
  REGION 1..111: note = VL of XENP020630
DTVLTQSPASLAVSLGQRATISCKASQSVDYTGDSYMNWYQQKPGQPPKLLIYAASNLESGIPARLSGSGSGTDFTLNIHPVEEEDAATYYCQQSNEDPFTFGSGTKLEVK

SEQ ID NO: 24628 - protein, 15 aa, synthetic construct
  REGION 1..15: note = Description of Artificial Sequence: Synthetic peptide
  REGION 1..15: note = XENP020630 vlCDR1
KASQSVDYTGDSYMN

SEQ ID NO: 24629 - protein, 7 aa, synthetic construct
  REGION 1..7: note = Description of Artificial Sequence: Synthetic peptide
  REGION 1..7: note = XENP020630 vlCDR2
AASNLES

SEQ ID NO: 24630 - protein, 9 aa, synthetic construct
  REGION 1..9: note = Description of Artificial Sequence: Synthetic peptide
  REGION 1..9: note = XENP020630 vlCDR3
QQSNEDPFT

SEQ ID NO: 24631 - protein, 450 aa, synthetic construct; identical to SEQ ID NO: 22261
  REGION 1..450: note = Description of Artificial Sequence: Synthetic polypeptide
  REGION 1..450: note = XENP020631 7G8_H0_L0.27_IgG1_PVA_/S267K Heavy Chain

SEQ ID NO: 24632 - protein, 121 aa, synthetic construct; identical to SEQ ID NO: 22262
  REGION 1..121: note = Description of Artificial Sequence: Synthetic polypeptide
  REGION 1..121: note = VH of XENP020631

SEQ ID NO: 24633 - protein, 5 aa, synthetic construct
  REGION 1..5: note = Description of Artificial Sequence: Synthetic peptide
  REGION 1..5: note = XENP020631 vhCDR1
DAWMD

SEQ ID NO: 24634 - protein, 19 aa, synthetic construct
  REGION 1..19: note = Description of Artificial Sequence: Synthetic peptide
  REGION 1..19: note = XENP020631 vhCDR2
EIRTKANNHATYYAESVKG

SEQ ID NO: 24635 - protein, 10 aa, synthetic construct
  REGION 1..10: note = Description of Artificial Sequence: Synthetic peptide
  REGION 1..10: note = XENP020631 vhCDR3
LANWDWYFDV

SEQ ID NO: 24636 - protein, 218 aa, synthetic construct
  REGION 1..218: note = Description of Artificial Sequence: Synthetic polypeptide
  REGION 1..218: note = XENP020631 7G8_H0_L0.27_IgG1_PVA_/S267K Light Chain
DTVLTQSPASLAVSLGQRATISCKASQSVDYGGDSYMNWYQQKPGQPPKLLIYAASNLESGIPARLSGSGSGTDFTLNIHPVEEEDAATYYCQQSNEDPFTFGSGTKLEVKRTVAAPSVFIFPPSDEQLKSGTASVVCLLNNFYPREAKVQWKVDNALQSGNSQESVTEQDSKDSTYSLSSTLTLSKADYEKHKVYACEVTHQGLSSPVTKSFNRGEC

SEQ ID NO: 24637 - protein, 111 aa, synthetic construct
  REGION 1..111: note = Description of Artificial Sequence: Synthetic polypeptide
  REGION 1..111: note = VL of XENP020631
DTVLTQSPASLAVSLGQRATISCKASQSVDYGGDSYMNWYQQKPGQPPKLLIYAASNLESGIPARLSGSGSGTDFTLNIHPVEEEDAATYYCQQSNEDPFTFGSGTKLEVK

SEQ ID NO: 24638 - protein, 15 aa, synthetic construct
  REGION 1..15: note = Description of Artificial Sequence: Synthetic peptide
  REGION 1..15: note = XENP020631 vlCDR1
KASQSVDYGGDSYMN

SEQ ID NO: 24639 - protein, 7 aa, synthetic construct
  REGION 1..7: note = Description of Artificial Sequence: Synthetic peptide
  REGION 1..7: note = XENP020631 vlCDR2
AASNLES

SEQ ID NO: 24640 - protein, 9 aa, synthetic construct
  REGION 1..9: note = Description of Artificial Sequence: Synthetic peptide
  REGION 1..9: note = XENP020631 vlCDR3
QQSNEDPFT

SEQ ID NO: 24641 - protein, 450 aa, synthetic construct; identical to SEQ ID NO: 22261
  REGION 1..450: note = Description of Artificial Sequence: Synthetic polypeptide
  REGION 1..450: note = XENP020632 7G8_H0_L0.28_IgG1_PVA_/S267K Heavy Chain

SEQ ID NO: 24642 - protein, 121 aa, synthetic construct; identical to SEQ ID NO: 22262
  REGION 1..121: note = Description of Artificial Sequence: Synthetic polypeptide
  REGION 1..121: note = VH of XENP020632

SEQ ID NO: 24643 - protein, 5 aa, synthetic construct
  REGION 1..5: note = Description of Artificial Sequence: Synthetic peptide
  REGION 1..5: note = XENP020632 vhCDR1
DAWMD

SEQ ID NO: 24644 - protein, 19 aa, synthetic construct
  REGION 1..19: note = Description of Artificial Sequence: Synthetic peptide
  REGION 1..19: note = XENP020632 vhCDR2
EIRTKANNHATYYAESVKG

SEQ ID NO: 24645 - protein, 10 aa, synthetic construct
  REGION 1..10: note = Description of Artificial Sequence: Synthetic peptide
  REGION 1..10: note = XENP020632 vhCDR3
LANWDWYFDV

SEQ ID NO: 24646 - protein, 218 aa, synthetic construct
  REGION 1..218: note = Description of Artificial Sequence: Synthetic polypeptide
  REGION 1..218: note = XENP020632 7G8_H0_L0.28_IgG1_PVA_/S267K Light Chain
DTVLTQSPASLAVSLGQRATISCKASQSVDYYGDSYMNWYQQKPGQPPKLLIYAASNLESGIPARLSGSGSGTDFTLNIHPVEEEDAATYYCQQSNEDPFTFGSGTKLEVKRTVAAPSVFIFPPSDEQLKSGTASVVCLLNNFYPREAKVQWKVDNALQSGNSQESVTEQDSKDSTYSLSSTLTLSKADYEKHKVYACEVTHQGLSSPVTKSFNRGEC

SEQ ID NO: 24647 - protein, 111 aa, synthetic construct
  REGION 1..111: note = Description of Artificial Sequence: Synthetic polypeptide
  REGION 1..111: note = VL of XENP020632
DTVLTQSPASLAVSLGQRATISCKASQSVDYYGDSYMNWYQQKPGQPPKLLIYAASNLESGIPARLSGSGSGTDFTLNIHPVEEEDAATYYCQQSNEDPFTFGSGTKLEVK

SEQ ID NO: 24648 - protein, 15 aa, synthetic construct
  REGION 1..15: note = Description of Artificial Sequence: Synthetic peptide
  REGION 1..15: note = XENP020632 vlCDR1
KASQSVDYYGDSYMN

SEQ ID NO: 24649 - protein, 7 aa, synthetic construct
  REGION 1..7: note = Description of Artificial Sequence: Synthetic peptide
  REGION 1..7: note = XENP020632 vlCDR2
AASNLES

SEQ ID NO: 24650 - protein, 9 aa, synthetic construct
  REGION 1..9: note = Description of Artificial Sequence: Synthetic peptide
  REGION 1..9: note = XENP020632 vlCDR3
QQSNEDPFT

SEQ ID NO: 24651 - protein, 450 aa, synthetic construct; identical to SEQ ID NO: 22261
  REGION 1..450: note = Description of Artificial Sequence: Synthetic polypeptide
  REGION 1..450: note = XENP020633 7G8_H0_L0.29_IgG1_PVA_/S267K Heavy Chain

SEQ ID NO: 24652 - protein, 121 aa, synthetic construct; identical to SEQ ID NO: 22262
  REGION 1..121: note = Description of Artificial Sequence: Synthetic polypeptide
  REGION 1..121: note = VH of XENP020633

SEQ ID NO: 24653 - protein, 5 aa, synthetic construct
  REGION 1..5: note = Description of Artificial Sequence: Synthetic peptide
  REGION 1..5: note = XENP020633 vhCDR1
DAWMD

SEQ ID NO: 24654 - protein, 19 aa, synthetic construct
  REGION 1..19: note = Description of Artificial Sequence: Synthetic peptide
  REGION 1..19: note = XENP020633 vhCDR2
EIRTKANNHATYYAESVKG

SEQ ID NO: 24655 - protein, 10 aa, synthetic construct
  REGION 1..10: note = Description of Artificial Sequence: Synthetic peptide
  REGION 1..10: note = XENP020633 vhCDR3
LANWDWYFDV

SEQ ID NO: 24656 - protein, 218 aa, synthetic construct
  REGION 1..218: note = Description of Artificial Sequence: Synthetic polypeptide
  REGION 1..218: note = XENP020633 7G8_H0_L0.29_IgG1_PVA_/S267K Light Chain
DTVLTQSPASLAVSLGQRATISCKASQSVDYDADSYMNWYQQKPGQPPKLLIYAASNLESGIPARLSGSGSGTDFTLNIHPVEEEDAATYYCQQSNEDPFTFGSGTKLEVKRTVAAPSVFIFPPSDEQLKSGTASVVCLLNNFYPREAKVQWKVDNALQSGNSQESVTEQDSKDSTYSLSSTLTLSKADYEKHKVYACEVTHQGLSSPVTKSFNRGEC

SEQ ID NO: 24657 - protein, 111 aa, synthetic construct
  REGION 1..111: note = Description of Artificial Sequence: Synthetic polypeptide
  REGION 1..111: note = VL of XENP020633
DTVLTQSPASLAVSLGQRATISCKASQSVDYDADSYMNWYQQKPGQPPKLLIYAASNLESGIPARLSGSGSGTDFTLNIHPVEEEDAATYYCQQSNEDPFTFGSGTKLEVK

SEQ ID NO: 24658 - protein, 15 aa, synthetic construct
  REGION 1..15: note = Description of Artificial Sequence: Synthetic peptide
  REGION 1..15: note = XENP020633 vlCDR1
KASQSVDYDADSYMN

SEQ ID NO: 24659 - protein, 7 aa, synthetic construct
  REGION 1..7: note = Description of Artificial Sequence: Synthetic peptide
  REGION 1..7: note = XENP020633 vlCDR2
AASNLES

SEQ ID NO: 24660 - protein, 9 aa, synthetic construct
  REGION 1..9: note = Description of Artificial Sequence: Synthetic peptide
  REGION 1..9: note = XENP020633 vlCDR3
QQSNEDPFT

SEQ ID NO: 24661 - protein, 450 aa, synthetic construct; identical to SEQ ID NO: 22261
  REGION 1..450: note = Description of Artificial Sequence: Synthetic polypeptide
  REGION 1..450: note = XENP020634 7G8_H0_L0.30_IgG1_PVA_/S267K Heavy Chain

SEQ ID NO: 24662 - protein, 121 aa, synthetic construct; identical to SEQ ID NO: 22262
  REGION 1..121: note = Description of Artificial Sequence: Synthetic polypeptide
  REGION 1..121: note = VH of XENP020634

SEQ ID NO: 24663 - protein, 5 aa, synthetic construct
  REGION 1..5: note = Description of Artificial Sequence: Synthetic peptide
  REGION 1..5: note = XENP020634 vhCDR1
DAWMD

SEQ ID NO: 24664 - protein, 19 aa, synthetic construct
  REGION 1..19: note = Description of Artificial Sequence: Synthetic peptide
  REGION 1..19: note = XENP020634 vhCDR2
EIRTKANNHATYYAESVKG

SEQ ID NO: 24665 - protein, 10 aa, synthetic construct
  REGION 1..10: note = Description of Artificial Sequence: Synthetic peptide
  REGION 1..10: note = XENP020634 vhCDR3
LANWDWYFDV

SEQ ID NO: 24666 - protein, 218 aa, synthetic construct
  REGION 1..218: note = Description of Artificial Sequence: Synthetic polypeptide
  REGION 1..218: note = XENP020634 7G8_H0_L0.30_IgG1_PVA_/S267K Light Chain
DTVLTQSPASLAVSLGQRATISCKASQSVDYDSDSYMNWYQQKPGQPPKLLIYAASNLESGIPARLSGSGSGTDFTLNIHPVEEEDAATYYCQQSNEDPFTFGSGTKLEVKRTVAAPSVFIFPPSDEQLKSGTASVVCLLNNFYPREAKVQWKVDNALQSGNSQESVTEQDSKDSTYSLSSTLTLSKADYEKHKVYACEVTHQGLSSPVTKSFNRGEC

SEQ ID NO: 24667 - protein, 111 aa, synthetic construct
  REGION 1..111: note = Description of Artificial Sequence: Synthetic polypeptide
  REGION 1..111: note = VL of XENP020634
DTVLTQSPASLAVSLGQRATISCKASQSVDYDSDSYMNWYQQKPGQPPKLLIYAASNLESGIPARLSGSGSGTDFTLNIHPVEEEDAATYYCQQSNEDPFTFGSGTKLEVK

SEQ ID NO: 24668 - protein, 15 aa, synthetic construct
  REGION 1..15: note = Description of Artificial Sequence: Synthetic peptide
  REGION 1..15: note = XENP020634 vlCDR1
KASQSVDYDSDSYMN

SEQ ID NO: 24669 - protein, 7 aa, synthetic construct
  REGION 1..7: note = Description of Artificial Sequence: Synthetic peptide
  REGION 1..7: note = XENP020634 vlCDR2
AASNLES

SEQ ID NO: 24670 - protein, 9 aa, synthetic construct
  REGION 1..9: note = Description of Artificial Sequence: Synthetic peptide
  REGION 1..9: note = XENP020634 vlCDR3
QQSNEDPFT

SEQ ID NO: 24671 - protein, 450 aa, synthetic construct; identical to SEQ ID NO: 22261
  REGION 1..450: note = Description of Artificial Sequence: Synthetic polypeptide
  REGION 1..450: note = XENP020635 7G8_H0_L0.31_IgG1_PVA_/S267K Heavy Chain

SEQ ID NO: 24672 - protein, 121 aa, synthetic construct; identical to SEQ ID NO: 22262
  REGION 1..121: note = Description of Artificial Sequence: Synthetic polypeptide
  REGION 1..121: note = VH of XENP020635

SEQ ID NO: 24673 - protein, 5 aa, synthetic construct
  REGION 1..5: note = Description of Artificial Sequence: Synthetic peptide
  REGION 1..5: note = XENP020635 vhCDR1
DAWMD

SEQ ID NO: 24674 - protein, 19 aa, synthetic construct
  REGION 1..19: note = Description of Artificial Sequence: Synthetic peptide
  REGION 1..19: note = XENP020635 vhCDR2
EIRTKANNHATYYAESVKG

SEQ ID NO: 24675 - protein, 10 aa, synthetic construct
  REGION 1..10: note = Description of Artificial Sequence: Synthetic peptide
  REGION 1..10: note = XENP020635 vhCDR3
LANWDWYFDV

SEQ ID NO: 24676 - protein, 218 aa, synthetic construct
  REGION 1..218: note = Description of Artificial Sequence: Synthetic polypeptide
  REGION 1..218: note = XENP020635 7G8_H0_L0.31_IgG1_PVA_/S267K Light Chain
DTVLTQSPASLAVSLGQRATISCKASQSVDYDTDSYMNWYQQKPGQPPKLLIYAASNLESGIPARLSGSGSGTDFTLNIHPVEEEDAATYYCQQSNEDPFTFGSGTKLEVKRTVAAPSVFIFPPSDEQLKSGTASVVCLLNNFYPREAKVQWKVDNALQSGNSQESVTEQDSKDSTYSLSSTLTLSKADYEKHKVYACEVTHQGLSSPVTKSFNRGEC

SEQ ID NO: 24677 - protein, 111 aa, synthetic construct
  REGION 1..111: note = Description of Artificial Sequence: Synthetic polypeptide
  REGION 1..111: note = VL of XENP020635
DTVLTQSPASLAVSLGQRATISCKASQSVDYDTDSYMNWYQQKPGQPPKLLIYAASNLESGIPARLSGSGSGTDFTLNIHPVEEEDAATYYCQQSNEDPFTFGSGTKLEVK

SEQ ID NO: 24678 - protein, 15 aa, synthetic construct
  REGION 1..15: note = Description of Artificial Sequence: Synthetic peptide
  REGION 1..15: note = XENP020635 vlCDR1
KASQSVDYDTDSYMN

SEQ ID NO: 24679 - protein, 7 aa, synthetic construct
  REGION 1..7: note = Description of Artificial Sequence: Synthetic peptide
  REGION 1..7: note = XENP020635 vlCDR2
AASNLES

SEQ ID NO: 24680 - protein, 9 aa, synthetic construct
  REGION 1..9: note = Description of Artificial Sequence: Synthetic peptide
  REGION 1..9: note = XENP020635 vlCDR3
QQSNEDPFT

SEQ ID NO: 24681 - protein, 450 aa, synthetic construct; identical to SEQ ID NO: 22261
  REGION 1..450: note = Description of Artificial Sequence: Synthetic polypeptide
  REGION 1..450: note = XENP020636 7G8_H0_L0.32_IgG1_PVA_/S267K Heavy Chain

SEQ ID NO: 24682 - protein, 121 aa, synthetic construct; identical to SEQ ID NO: 22262
  REGION 1..121: note = Description of Artificial Sequence: Synthetic polypeptide
  REGION 1..121: note = VH of XENP020636

SEQ ID NO: 24683 - protein, 5 aa, synthetic construct
  REGION 1..5: note = Description of Artificial Sequence: Synthetic peptide
  REGION 1..5: note = XENP020636 vhCDR1
DAWMD

SEQ ID NO: 24684 - protein, 19 aa, synthetic construct
  REGION 1..19: note = Description of Artificial Sequence: Synthetic peptide
  REGION 1..19: note = XENP020636 vhCDR2
EIRTKANNHATYYAESVKG

SEQ ID NO: 24685 - protein, 10 aa, synthetic construct
  REGION 1..10: note = Description of Artificial Sequence: Synthetic peptide
  REGION 1..10: note = XENP020636 vhCDR3
LANWDWYFDV

SEQ ID NO: 24686 - protein, 218 aa, synthetic construct
  REGION 1..218: note = Description of Artificial Sequence: Synthetic polypeptide
  REGION 1..218: note = XENP020636 7G8_H0_L0.32_IgG1_PVA_/S267K Light Chain
DTVLTQSPASLAVSLGQRATISCKASQSVDYDQDSYMNWYQQKPGQPPKLLIYAASNLESGIPARLSGSGSGTDFTLNIHPVEEEDAATYYCQQSNEDPFTFGSGTKLEVKRTVAAPSVFIFPPSDEQLKSGTASVVCLLNNFYPREAKVQWKVDNALQSGNSQESVTEQDSKDSTYSLSSTLTLSKADYEKHKVYACEVTHQGLSSPVTKSFNRGEC

SEQ ID NO: 24687 - protein, 111 aa, synthetic construct
  REGION 1..111: note = Description of Artificial Sequence: Synthetic polypeptide
  REGION 1..111: note = VL of XENP020636
DTVLTQSPASLAVSLGQRATISCKASQSVDYDQDSYMNWYQQKPGQPPKLLIYAASNLESGIPARLSGSGSGTDFTLNIHPVEEEDAATYYCQQSNEDPFTFGSGTKLEVK

SEQ ID NO: 24688 - protein, 15 aa, synthetic construct
  REGION 1..15: note = Description of Artificial Sequence: Synthetic peptide
  REGION 1..15: note = XENP020636 vlCDR1
KASQSVDYDQDSYMN

SEQ ID NO: 24689 - protein, 7 aa, synthetic construct
  REGION 1..7: note = Description of Artificial Sequence: Synthetic peptide
  REGION 1..7: note = XENP020636 vlCDR2
AASNLES

SEQ ID NO: 24690 - protein, 9 aa, synthetic construct
  REGION 1..9: note = Description of Artificial Sequence: Synthetic peptide
  REGION 1..9: note = XENP020636 vlCDR3
QQSNEDPFT

SEQ ID NO: 24691 - protein, 450 aa, synthetic construct; identical to SEQ ID NO: 22261
  REGION 1..450: note = Description of Artificial Sequence: Synthetic polypeptide
  REGION 1..450: note = XENP020637 7G8_H0_L0.33_IgG1_PVA_/S267K Heavy Chain

SEQ ID NO: 24692 - protein, 121 aa, synthetic construct; identical to SEQ ID NO: 22262
  REGION 1..121: note = Description of Artificial Sequence: Synthetic polypeptide
  REGION 1..121: note = VH of XENP020637

SEQ ID NO: 24693 - protein, 5 aa, synthetic construct
  REGION 1..5: note = Description of Artificial Sequence: Synthetic peptide
  REGION 1..5: note = XENP020637 vhCDR1
DAWMD

SEQ ID NO: 24694 - protein, 19 aa, synthetic construct
  REGION 1..19: note = Description of Artificial Sequence: Synthetic peptide
  REGION 1..19: note = XENP020637 vhCDR2
EIRTKANNHATYYAESVKG

SEQ ID NO: 24695 - protein, 10 aa, synthetic construct
  REGION 1..10: note = Description of Artificial Sequence: Synthetic peptide
  REGION 1..10: note = XENP020637 vhCDR3
LANWDWYFDV

SEQ ID NO: 24696 - protein, 218 aa, synthetic construct
  REGION 1..218: note = Description of Artificial Sequence: Synthetic polypeptide
  REGION 1..218: note = XENP020637 7G8_H0_L0.33_IgG1_PVA_/S267K Light Chain
DTVLTQSPASLAVSLGQRATISCKASQSVDYDHDSYMNWYQQKPGQPPKLLIYAASNLESGIPARLSGSGSGTDFTLNIHPVEEEDAATYYCQQSNEDPFTFGSGTKLEVKRTVAAPSVFIFPPSDEQLKSGTASVVCLLNNFYPREAKVQWKVDNALQSGNSQESVTEQDSKDSTYSLSSTLTLSKADYEKHKVYACEVTHQGLSSPVTKSFNRGEC

SEQ ID NO: 24697 - protein, 111 aa, synthetic construct
  REGION 1..111: note = Description of Artificial Sequence: Synthetic polypeptide
  REGION 1..111: note = VL of XENP020637
DTVLTQSPASLAVSLGQRATISCKASQSVDYDHDSYMNWYQQKPGQPPKLLIYAASNLESGIPARLSGSGSGTDFTLNIHPVEEEDAATYYCQQSNEDPFTFGSGTKLEVK

SEQ ID NO: 24698 - protein, 15 aa, synthetic construct
  REGION 1..15: note = Description of Artificial Sequence: Synthetic peptide
  REGION 1..15: note = XENP020637 vlCDR1
KASQSVDYDHDSYMN

SEQ ID NO: 24699 - protein, 7 aa, synthetic construct
  REGION 1..7: note = Description of Artificial Sequence: Synthetic peptide
  REGION 1..7: note = XENP020637 vlCDR2
AASNLES

SEQ ID NO: 24700 - protein, 9 aa, synthetic construct
  REGION 1..9: note = Description of Artificial Sequence: Synthetic peptide
  REGION 1..9: note = XENP020637 vlCDR3
QQSNEDPFT

SEQ ID NO: 24701 - protein, 450 aa, synthetic construct; identical to SEQ ID NO: 22261
  REGION 1..450: note = Description of Artificial Sequence: Synthetic polypeptide
  REGION 1..450: note = XENP020638 7G8_H0_L0.34_IgG1_PVA_/S267K Heavy Chain

SEQ ID NO: 24702 - protein, 121 aa, synthetic construct; identical to SEQ ID NO: 22262
  REGION 1..121: note = Description of Artificial Sequence: Synthetic polypeptide
  REGION 1..121: note = VH of XENP020638

SEQ ID NO: 24703 - protein, 5 aa, synthetic construct
  REGION 1..5: note = Description of Artificial Sequence: Synthetic peptide
  REGION 1..5: note = XENP020638 vhCDR1
DAWMD

SEQ ID NO: 24704 - protein, 19 aa, synthetic construct
  REGION 1..19: note = Description of Artificial Sequence: Synthetic peptide
  REGION 1..19: note = XENP020638 vhCDR2
EIRTKANNHATYYAESVKG

SEQ ID NO: 24705 - protein, 10 aa, synthetic construct
  REGION 1..10: note = Description of Artificial Sequence: Synthetic peptide
  REGION 1..10: note = XENP020638 vhCDR3
LANWDWYFDV

SEQ ID NO: 24706 - protein, 218 aa, synthetic construct
  REGION 1..218: note = Description of Artificial Sequence: Synthetic polypeptide
  REGION 1..218: note = XENP020638 7G8_H0_L0.34_IgG1_PVA_/S267K Light Chain
DTVLTQSPASLAVSLGQRATISCKASQSVDYDDDSYMNWYQQKPGQPPKLLIYAASNLESGIPARLSGSGSGTDFTLNIHPVEEEDAATYYCQQSNEDPFTFGSGTKLEVKRTVAAPSVFIFPPSDEQLKSGTASVVCLLNNFYPREAKVQWKVDNALQSGNSQESVTEQDSKDSTYSLSSTLTLSKADYEKHKVYACEVTHQGLSSPVTKSFNRGEC

SEQ ID NO: 24707 - protein, 111 aa, synthetic construct
  REGION 1..111: note = Description of Artificial Sequence: Synthetic polypeptide
  REGION 1..111: note = VL of XENP020638
DTVLTQSPASLAVSLGQRATISCKASQSVDYDDDSYMNWYQQKPGQPPKLLIYAASNLESGIPARLSGSGSGTDFTLNIHPVEEEDAATYYCQQSNEDPFTFGSGTKLEVK

SEQ ID NO: 24708 - protein, 15 aa, synthetic construct
  REGION 1..15: note = Description of Artificial Sequence: Synthetic peptide
  REGION 1..15: note = XENP020638 vlCDR1
KASQSVDYDDDSYMN

SEQ ID NO: 24709 - protein, 7 aa, synthetic construct
  REGION 1..7: note = Description of Artificial Sequence: Synthetic peptide
  REGION 1..7: note = XENP020638 vlCDR2
AASNLES

SEQ ID NO: 24710 - protein, 9 aa, synthetic construct
  REGION 1..9: note = Description of Artificial Sequence: Synthetic peptide
  REGION 1..9: note = XENP020638 vlCDR3
QQSNEDPFT

SEQ ID NO: 24711 - protein, 450 aa, synthetic construct; identical to SEQ ID NO: 22261
  REGION 1..450: note = Description of Artificial Sequence: Synthetic polypeptide
  REGION 1..450: note = XENP020639 7G8_H0_L0.35_IgG1_PVA_/S267K Heavy Chain

SEQ ID NO: 24712 - protein, 121 aa, synthetic construct; identical to SEQ ID NO: 22262
  REGION 1..121: note = Description of Artificial Sequence: Synthetic polypeptide
  REGION 1..121: note = VH of XENP020639

SEQ ID NO: 24713 - protein, 5 aa, synthetic construct
  REGION 1..5: note = Description of Artificial Sequence: Synthetic peptide
  REGION 1..5: note = XENP020639 vhCDR1
DAWMD

SEQ ID NO: 24714 - protein, 19 aa, synthetic construct
  REGION 1..19: note = Description of Artificial Sequence: Synthetic peptide
  REGION 1..19: note = XENP020639 vhCDR2
EIRTKANNHATYYAESVKG

SEQ ID NO: 24715 - protein, 10 aa, synthetic construct
  REGION 1..10: note = Description of Artificial Sequence: Synthetic peptide
  REGION 1..10: note = XENP020639 vhCDR3
LANWDWYFDV

SEQ ID NO: 24716 - protein, 218 aa, synthetic construct
  REGION 1..218: note = Description of Artificial Sequence: Synthetic polypeptide
  REGION 1..218: note = XENP020639 7G8_H0_L0.35_IgG1_PVA_/S267K Light Chain
DTVLTQSPASLAVSLGQRATISCKASQSVDYDKDSYMNWYQQKPGQPPKLLIYAASNLESGIPARLSGSGSGTDFTLNIHPVEEEDAATYYCQQSNEDPFTFGSGTKLEVKRTVAAPSVFIFPPSDEQLKSGTASVVCLLNNFYPREAKVQWKVDNALQSGNSQESVTEQDSKDSTYSLSSTLTLSKADYEKHKVYACEVTHQGLSSPVTKSFNRGEC

SEQ ID NO: 24717 - protein, 111 aa, synthetic construct
  REGION 1..111: note = Description of Artificial Sequence: Synthetic polypeptide
  REGION 1..111: note = VL of XENP020639
DTVLTQSPASLAVSLGQRATISCKASQSVDYDKDSYMNWYQQKPGQPPKLLIYAASNLESGIPARLSGSGSGTDFTLNIHPVEEEDAATYYCQQSNEDPFTFGSGTKLEVK

SEQ ID NO: 24718 - protein, 15 aa, synthetic construct
  REGION 1..15: note = Description of Artificial Sequence: Synthetic peptide
  REGION 1..15: note = XENP020639 vlCDR1
KASQSVDYDKDSYMN

SEQ ID NO: 24719 - protein, 7 aa, synthetic construct
  REGION 1..7: note = Description of Artificial Sequence: Synthetic peptide
  REGION 1..7: note = XENP020639 vlCDR2
AASNLES

SEQ ID NO: 24720 - protein, 9 aa, synthetic construct
  REGION 1..9: note = Description of Artificial Sequence: Synthetic peptide
  REGION 1..9: note = XENP020639 vlCDR3
QQSNEDPFT

SEQ ID NO: 24721 - protein, 450 aa, synthetic construct; identical to SEQ ID NO: 22261
  REGION 1..450: note = Description of Artificial Sequence: Synthetic polypeptide
  REGION 1..450: note = XENP020640 7G8_H0_L0.36_IgG1_PVA_/S267K Heavy Chain

SEQ ID NO: 24722 - protein, 121 aa, synthetic construct; identical to SEQ ID NO: 22262
  REGION 1..121: note = Description of Artificial Sequence: Synthetic polypeptide
  REGION 1..121: note = VH of XENP020640

SEQ ID NO: 24723 - protein, 5 aa, synthetic construct
  REGION 1..5: note = Description of Artificial Sequence: Synthetic peptide
  REGION 1..5: note = XENP020640 vhCDR1
DAWMD

SEQ ID NO: 24724 - protein, 19 aa, synthetic construct
  REGION 1..19: note = Description of Artificial Sequence: Synthetic peptide
  REGION 1..19: note = XENP020640 vhCDR2
EIRTKANNHATYYAESVKG

SEQ ID NO: 24725 - protein, 10 aa, synthetic construct
  REGION 1..10: note = Description of Artificial Sequence: Synthetic peptide
  REGION 1..10: note = XENP020640 vhCDR3
LANWDWYFDV

SEQ ID NO: 24726 - protein, 218 aa, synthetic construct
  REGION 1..218: note = Description of Artificial Sequence: Synthetic polypeptide
  REGION 1..218: note = XENP020640 7G8_H0_L0.36_IgG1_PVA_/S267K Light Chain
DTVLTQSPASLAVSLGQRATISCKASQSVDYDLDSYMNWYQQKPGQPPKLLIYAASNLESGIPARLSGSGSGTDFTLNIHPVEEEDAATYYCQQSNEDPFTFGSGTKLEVKRTVAAPSVFIFPPSDEQLKSGTASVVCLLNNFYPREAKVQWKVDNALQSGNSQESVTEQDSKDSTYSLSSTLTLSKADYEKHKVYACEVTHQGLSSPVTKSFNRGEC

SEQ ID NO: 24727 - protein, 111 aa, synthetic construct
  REGION 1..111: note = Description of Artificial Sequence: Synthetic polypeptide
  REGION 1..111: note = VL of XENP020640
DTVLTQSPASLAVSLGQRATISCKASQSVDYDLDSYMNWYQQKPGQPPKLLIYAASNLESGIPARLSGSGSGTDFTLNIHPVEEEDAATYYCQQSNEDPFTFGSGTKLEVK

SEQ ID NO: 24728 - protein, 15 aa, synthetic construct
  REGION 1..15: note = Description of Artificial Sequence: Synthetic peptide
  REGION 1..15: note = XENP020640 vlCDR1
KASQSVDYDLDSYMN

SEQ ID NO: 24729 - protein, 7 aa, synthetic construct
  REGION 1..7: note = Description of Artificial Sequence: Synthetic peptide
  REGION 1..7: note = XENP020640 vlCDR2
AASNLES

SEQ ID NO: 24730 - protein, 9 aa, synthetic construct
  REGION 1..9: note = Description of Artificial Sequence: Synthetic peptide
  REGION 1..9: note = XENP020640 vlCDR3
QQSNEDPFT

SEQ ID NO: 24731 - protein, 450 aa, synthetic construct; identical to SEQ ID NO: 22261
  REGION 1..450: note = Description of Artificial Sequence: Synthetic polypeptide
  REGION 1..450: note = XENP020641 7G8_H0_L0.37_IgG1_PVA_/S267K Heavy Chain

SEQ ID NO: 24732 - protein, 121 aa, synthetic construct; identical to SEQ ID NO: 22262
  REGION 1..121: note = Description of Artificial Sequence: Synthetic polypeptide
  REGION 1..121: note = VH of XENP020641

SEQ ID NO: 24733 - protein, 5 aa, synthetic construct
  REGION 1..5: note = Description of Artificial Sequence: Synthetic peptide
  REGION 1..5: note = XENP020641 vhCDR1
DAWMD

SEQ ID NO: 24734 - protein, 19 aa, synthetic construct
  REGION 1..19: note = Description of Artificial Sequence: Synthetic peptide
  REGION 1..19: note = XENP020641 vhCDR2
EIRTKANNHATYYAESVKG

SEQ ID NO: 24735 - protein, 10 aa, synthetic construct
  REGION 1..10: note = Description of Artificial Sequence: Synthetic peptide
  REGION 1..10: note = XENP020641 vhCDR3
LANWDWYFDV

SEQ ID NO: 24736 - protein, 218 aa, synthetic construct
  REGION 1..218: note = Description of Artificial Sequence: Synthetic polypeptide
  REGION 1..218: note = XENP020641 7G8_H0_L0.37_IgG1_PVA_/S267K Light Chain
DTVLTQSPASLAVSLGQRATISCKASQSVDYDYDSYMNWYQQKPGQPPKLLIYAASNLESGIPARLSGSGSGTDFTLNIHPVEEEDAATYYCQQSNEDPFTFGSGTKLEVKRTVAAPSVFIFPPSDEQLKSGTASVVCLLNNFYPREAKVQWKVDNALQSGNSQESVTEQDSKDSTYSLSSTLTLSKADYEKHKVYACEVTHQGLSSPVTKSFNRGEC

SEQ ID NO: 24737 - protein, 111 aa, synthetic construct
  REGION 1..111: note = Description of Artificial Sequence: Synthetic polypeptide
  REGION 1..111: note = VL of XENP020641
DTVLTQSPASLAVSLGQRATISCKASQSVDYDYDSYMNWYQQKPGQPPKLLIYAASNLESGIPARLSGSGSGTDFTLNIHPVEEEDAATYYCQQSNEDPFTFGSGTKLEVK

SEQ ID NO: 24738 - protein, 15 aa, synthetic construct
  REGION 1..15: note = Description of Artificial Sequence: Synthetic peptide
  REGION 1..15: note = XENP020641 vlCDR1
KASQSVDYDYDSYMN

SEQ ID NO: 24739 - protein, 7 aa, synthetic construct
  REGION 1..7: note = Description of Artificial Sequence: Synthetic peptide
  REGION 1..7: note = XENP020641 vlCDR2
AASNLES

SEQ ID NO: 24740 - protein, 9 aa, synthetic construct
  REGION 1..9: note = Description of Artificial Sequence: Synthetic peptide
  REGION 1..9: note = XENP020641 vlCDR3
QQSNEDPFT

SEQ ID NO: 24741 - protein, 450 aa, synthetic construct; identical to SEQ ID NO: 22261
  REGION 1..450: note = Description of Artificial Sequence: Synthetic polypeptide
  REGION 1..450: note = XENP020642 7G8_H0_L0.38_IgG1_PVA_/S267K Heavy Chain

SEQ ID NO: 24742 - protein, 121 aa, synthetic construct; identical to SEQ ID NO: 22262
  REGION 1..121: note = Description of Artificial Sequence: Synthetic polypeptide
  REGION 1..121: note = VH of XENP020642

SEQ ID NO: 24743 - protein, 5 aa, synthetic construct
  REGION 1..5: note = Description of Artificial Sequence: Synthetic peptide
  REGION 1..5: note = XENP020642 vhCDR1
DAWMD

SEQ ID NO: 24744 - protein, 19 aa, synthetic construct
  REGION 1..19: note = Description of Artificial Sequence: Synthetic peptide
  REGION 1..19: note = XENP020642 vhCDR2
EIRTKANNHATYYAESVKG

SEQ ID NO: 24745 - protein, 10 aa, synthetic construct
  REGION 1..10: note = Description of Artificial Sequence: Synthetic peptide
  REGION 1..10: note = XENP020642 vhCDR3
LANWDWYFDV

SEQ ID NO: 24746 - protein, 218 aa, synthetic construct
  REGION 1..218: note = Description of Artificial Sequence: Synthetic polypeptide
  REGION 1..218: note = XENP020642 7G8_H0_L0.38_IgG1_PVA_/S267K Light Chain
DTVLTQSPASLAVSLGQRATISCKASQSVDYDGNSYMNWYQQKPGQPPKLLIYAASNLESGIPARLSGSGSGTDFTLNIHPVEEEDAATYYCQQSNEDPFTFGSGTKLEVKRTVAAPSVFIFPPSDEQLKSGTASVVCLLNNFYPREAKVQWKVDNALQSGNSQESVTEQDSKDSTYSLSSTLTLSKADYEKHKVYACEVTHQGLSSPVTKSFNRGEC

SEQ ID NO: 24747 - protein, 111 aa, synthetic construct
  REGION 1..111: note = Description of Artificial Sequence: Synthetic polypeptide
  REGION 1..111: note = VL of XENP020642
DTVLTQSPASLAVSLGQRATISCKASQSVDYDGNSYMNWYQQKPGQPPKLLIYAASNLESGIPARLSGSGSGTDFTLNIHPVEEEDAATYYCQQSNEDPFTFGSGTKLEVK

SEQ ID NO: 24748 - protein, 15 aa, synthetic construct
  REGION 1..15: note = Description of Artificial Sequence: Synthetic peptide
  REGION 1..15: note = XENP020642 vlCDR1
KASQSVDYDGNSYMN

SEQ ID NO: 24749 - protein, 7 aa, synthetic construct
  REGION 1..7: note = Description of Artificial Sequence: Synthetic peptide
  REGION 1..7: note = XENP020642 vlCDR2
AASNLES

SEQ ID NO: 24750 - protein, 9 aa, synthetic construct
  REGION 1..9: note = Description of Artificial Sequence: Synthetic peptide
  REGION 1..9: note = XENP020642 vlCDR3
QQSNEDPFT

SEQ ID NO: 24751 - protein, 450 aa, synthetic construct; identical to SEQ ID NO: 22261
  REGION 1..450: note = Description of Artificial Sequence: Synthetic polypeptide
  REGION 1..450: note = XENP020643 7G8_H0_L0.39_IgG1_PVA_/S267K Heavy Chain

SEQ ID NO: 24752 - protein, 121 aa, synthetic construct; identical to SEQ ID NO: 22262
  REGION 1..121: note = Description of Artificial Sequence: Synthetic polypeptide
  REGION 1..121: note = VH of XENP020643

SEQ ID NO: 24753 - protein, 5 aa, synthetic construct
  REGION 1..5: note = Description of Artificial Sequence: Synthetic peptide
  REGION 1..5: note = XENP020643 vhCDR1
DAWMD

SEQ ID NO: 24754 - protein, 19 aa, synthetic construct
  REGION 1..19: note = Description of Artificial Sequence: Synthetic peptide
  REGION 1..19: note = XENP020643 vhCDR2
EIRTKANNHATYYAESVKG

SEQ ID NO: 24755 - protein, 10 aa, synthetic construct
  REGION 1..10: note = Description of Artificial Sequence: Synthetic peptide
  REGION 1..10: note = XENP020643 vhCDR3
LANWDWYFDV

SEQ ID NO: 24756 - protein, 218 aa, synthetic construct
  REGION 1..218: note = Description of Artificial Sequence: Synthetic polypeptide
  REGION 1..218: note = XENP020643 7G8_H0_L0.39_IgG1_PVA_/S267K Light Chain
DTVLTQSPASLAVSLGQRATISCKASQSVDYDGESYMNWYQQKPGQPPKLLIYAASNLESGIPARLSGSGSGTDFTLNIHPVEEEDAATYYCQQSNEDPFTFGSGTKLEVKRTVAAPSVFIFPPSDEQLKSGTASVVCLLNNFYPREAKVQWKVDNALQSGNSQESVTEQDSKDSTYSLSSTLTLSKADYEKHKVYACEVTHQGLSSPVTKSFNRGEC

SEQ ID NO: 24757 - protein, 111 aa, synthetic construct
  REGION 1..111: note = Description of Artificial Sequence: Synthetic polypeptide
  REGION 1..111: note = VL of XENP020643
DTVLTQSPASLAVSLGQRATISCKASQSVDYDGESYMNWYQQKPGQPPKLLIYAASNLESGIPARLSGSGSGTDFTLNIHPVEEEDAATYYCQQSNEDPFTFGSGTKLEVK

SEQ ID NO: 24758 - protein, 15 aa, synthetic construct
  REGION 1..15: note = Description of Artificial Sequence: Synthetic peptide
  REGION 1..15: note = XENP020643 vlCDR1
KASQSVDYDGESYMN

SEQ ID NO: 24759 - protein, 7 aa, synthetic construct
  REGION 1..7: note = Description of Artificial Sequence: Synthetic peptide
  REGION 1..7: note = XENP020643 vlCDR2
AASNLES

SEQ ID NO: 24760 - protein, 9 aa, synthetic construct
  REGION 1..9: note = Description of Artificial Sequence: Synthetic peptide
  REGION 1..9: note = XENP020643 vlCDR3
QQSNEDPFT

SEQ ID NO: 24761 - protein, 450 aa, synthetic construct; identical to SEQ ID NO: 22261
  REGION 1..450: note = Description of Artificial Sequence: Synthetic polypeptide
  REGION 1..450: note = XENP020644 7G8_H0_L0.40_IgG1_PVA_/S267K Heavy Chain

SEQ ID NO: 24762 - protein, 121 aa, synthetic construct; identical to SEQ ID NO: 22262
  REGION 1..121: note = Description of Artificial Sequence: Synthetic polypeptide
  REGION 1..121: note = VH of XENP020644

SEQ ID NO: 24763 - protein, 5 aa, synthetic construct
  REGION 1..5: note = Description of Artificial Sequence: Synthetic peptide
  REGION 1..5: note = XENP020644 vhCDR1
DAWMD

SEQ ID NO: 24764 - protein, 19 aa, synthetic construct
  REGION 1..19: note = Description of Artificial Sequence: Synthetic peptide
  REGION 1..19: note = XENP020644 vhCDR2
EIRTKANNHATYYAESVKG

SEQ ID NO: 24765 - protein, 10 aa, synthetic construct
  REGION 1..10: note = Description of Artificial Sequence: Synthetic peptide
  REGION 1..10: note = XENP020644 vhCDR3
LANWDWYFDV

SEQ ID NO: 24766 - protein, 218 aa, synthetic construct
  REGION 1..218: note = Description of Artificial Sequence: Synthetic polypeptide
  REGION 1..218: note = XENP020644 7G8_H0_L0.40_IgG1_PVA_/S267K Light Chain
DTVLTQSPASLAVSLGQRATISCKASQSVDYDGHSYMNWYQQKPGQPPKLLIYAASNLESGIPARLSGSGSGTDFTLNIHPVEEEDAATYYCQQSNEDPFTFGSGTKLEVKRTVAAPSVFIFPPSDEQLKSGTASVVCLLNNFYPREAKVQWKVDNALQSGNSQESVTEQDSKDSTYSLSSTLTLSKADYEKHKVYACEVTHQGLSSPVTKSFNRGEC

SEQ ID NO: 24767 - protein, 111 aa, synthetic construct
  REGION 1..111: note = Description of Artificial Sequence: Synthetic polypeptide
  REGION 1..111: note = VL of XENP020644
DTVLTQSPASLAVSLGQRATISCKASQSVDYDGHSYMNWYQQKPGQPPKLLIYAASNLESGIPARLSGSGSGTDFTLNIHPVEEEDAATYYCQQSNEDPFTFGSGTKLEVK

SEQ ID NO: 24768 - protein, 15 aa, synthetic construct
  REGION 1..15: note = Description of Artificial Sequence: Synthetic peptide
  REGION 1..15: note = XENP020644 vlCDR1
KASQSVDYDGHSYMN

SEQ ID NO: 24769 - protein, 7 aa, synthetic construct
  REGION 1..7: note = Description of Artificial Sequence: Synthetic peptide
  REGION 1..7: note = XENP020644 vlCDR2
AASNLES

SEQ ID NO: 24770 - protein, 9 aa, synthetic construct
  REGION 1..9: note = Description of Artificial Sequence: Synthetic peptide
  REGION 1..9: note = XENP020644 vlCDR3
QQSNEDPFT

SEQ ID NO: 24771 - protein, 450 aa, synthetic construct; identical to SEQ ID NO: 22261
  REGION 1..450: note = Description of Artificial Sequence: Synthetic polypeptide
  REGION 1..450: note = XENP020645 7G8_H0_L0.41_IgG1_PVA_/S267K Heavy Chain

SEQ ID NO: 24772 - protein, 121 aa, synthetic construct; identical to SEQ ID NO: 22262
  REGION 1..121: note = Description of Artificial Sequence: Synthetic polypeptide
  REGION 1..121: note = VH of XENP020645

SEQ ID NO: 24773 - protein, 5 aa, synthetic construct
  REGION 1..5: note = Description of Artificial Sequence: Synthetic peptide
  REGION 1..5: note = XENP020645 vhCDR1
DAWMD

SEQ ID NO: 24774 - protein, 19 aa, synthetic construct
  REGION 1..19: note = Description of Artificial Sequence: Synthetic peptide
  REGION 1..19: note = XENP020645 vhCDR2
EIRTKANNHATYYAESVKG

SEQ ID NO: 24775 - protein, 10 aa, synthetic construct
  REGION 1..10: note = Description of Artificial Sequence: Synthetic peptide
  REGION 1..10: note = XENP020645 vhCDR3
LANWDWYFDV

SEQ ID NO: 24776 - protein, 218 aa, synthetic construct
  REGION 1..218: note = Description of Artificial Sequence: Synthetic polypeptide
  REGION 1..218: note = XENP020645 7G8_H0_L0.41_IgG1_PVA_/S267K Light Chain
DTVLTQSPASLAVSLGQRATISCKASQSVDYDGSSYMNWYQQKPGQPPKLLIYAASNLESGIPARLSGSGSGTDFTLNIHPVEEEDAATYYCQQSNEDPFTFGSGTKLEVKRTVAAPSVFIFPPSDEQLKSGTASVVCLLNNFYPREAKVQWKVDNALQSGNSQESVTEQDSKDSTYSLSSTLTLSKADYEKHKVYACEVTHQGLSSPVTKSFNRGEC

SEQ ID NO: 24777 - protein, 111 aa, synthetic construct
  REGION 1..111: note = Description of Artificial Sequence: Synthetic polypeptide
  REGION 1..111: note = VL of XENP020645
DTVLTQSPASLAVSLGQRATISCKASQSVDYDGSSYMNWYQQKPGQPPKLLIYAASNLESGIPARLSGSGSGTDFTLNIHPVEEEDAATYYCQQSNEDPFTFGSGTKLEVK

SEQ ID NO: 24778 - protein, 15 aa, synthetic construct
  REGION 1..15: note = Description of Artificial Sequence: Synthetic peptide
  REGION 1..15: note = XENP020645 vlCDR1
KASQSVDYDGSSYMN

SEQ ID NO: 24779 - protein, 7 aa, synthetic construct
  REGION 1..7: note = Description of Artificial Sequence: Synthetic peptide
  REGION 1..7: note = XENP020645 vlCDR2
AASNLES

SEQ ID NO: 24780 - protein, 9 aa, synthetic construct
  REGION 1..9: note = Description of Artificial Sequence: Synthetic peptide
  REGION 1..9: note = XENP020645 vlCDR3
QQSNEDPFT

SEQ ID NO: 24781 - protein, 450 aa, synthetic construct; identical to SEQ ID NO: 22261
  REGION 1..450: note = Description of Artificial Sequence: Synthetic polypeptide
  REGION 1..450: note = XENP020646 7G8_H0_L0.42_IgG1_PVA_/S267K Heavy Chain

SEQ ID NO: 24782 - protein, 121 aa, synthetic construct; identical to SEQ ID NO: 22262
  REGION 1..121: note = Description of Artificial Sequence: Synthetic polypeptide
  REGION 1..121: note = VH of XENP020646

SEQ ID NO: 24783 - protein, 5 aa, synthetic construct
  REGION 1..5: note = Description of Artificial Sequence: Synthetic peptide
  REGION 1..5: note = XENP020646 vhCDR1
DAWMD

SEQ ID NO: 24784 - protein, 19 aa, synthetic construct
  REGION 1..19: note = Description of Artificial Sequence: Synthetic peptide
  REGION 1..19: note = XENP020646 vhCDR2
EIRTKANNHATYYAESVKG

SEQ ID NO: 24785 - protein, 10 aa, synthetic construct
  REGION 1..10: note = Description of Artificial Sequence: Synthetic peptide
  REGION 1..10: note = XENP020646 vhCDR3
LANWDWYFDV

SEQ ID NO: 24786 - protein, 218 aa, synthetic construct
  REGION 1..218: note = Description of Artificial Sequence: Synthetic polypeptide
  REGION 1..218: note = XENP020646 7G8_H0_L0.42_IgG1_PVA_/S267K Light Chain
DTVLTQSPASLAVSLGQRATISCKASQSVDYDGRSYMNWYQQKPGQPPKLLIYAASNLESGIPARLSGSGSGTDFTLNIHPVEEEDAATYYCQQSNEDPFTFGSGTKLEVKRTVAAPSVFIFPPSDEQLKSGTASVVCLLNNFYPREAKVQWKVDNALQSGNSQESVTEQDSKDSTYSLSSTLTLSKADYEKHKVYACEVTHQGLSSPVTKSFNRGEC

SEQ ID NO: 24787 - protein, 111 aa, synthetic construct
  REGION 1..111: note = Description of Artificial Sequence: Synthetic polypeptide
  REGION 1..111: note = VL of XENP020646
DTVLTQSPASLAVSLGQRATISCKASQSVDYDGRSYMNWYQQKPGQPPKLLIYAASNLESGIPARLSGSGSGTDFTLNIHPVEEEDAATYYCQQSNEDPFTFGSGTKLEVK

SEQ ID NO: 24788 - protein, 15 aa, synthetic construct
  REGION 1..15: note = Description of Artificial Sequence: Synthetic peptide
  REGION 1..15: note = XENP020646 vlCDR1
KASQSVDYDGRSYMN

SEQ ID NO: 24789 - protein, 7 aa, synthetic construct
  REGION 1..7: note = Description of Artificial Sequence: Synthetic peptide
  REGION 1..7: note = XENP020646 vlCDR2
AASNLES

SEQ ID NO: 24790 - protein, 9 aa, synthetic construct
  REGION 1..9: note = Description of Artificial Sequence: Synthetic peptide
  REGION 1..9: note = XENP020646 vlCDR3
QQSNEDPFT

SEQ ID NO: 24791 - protein, 450 aa, synthetic construct; identical to SEQ ID NO: 22261
  REGION 1..450: note = Description of Artificial Sequence: Synthetic polypeptide
  REGION 1..450: note = XENP020647 7G8_H0_L0.43_IgG1_PVA_/S267K Heavy Chain

SEQ ID NO: 24792 - protein, 121 aa, synthetic construct; identical to SEQ ID NO: 22262
  REGION 1..121: note = Description of Artificial Sequence: Synthetic polypeptide
  REGION 1..121: note = VH of XENP020647

SEQ ID NO: 24793 - protein, 5 aa, synthetic construct
  REGION 1..5: note = Description of Artificial Sequence: Synthetic peptide
  REGION 1..5: note = XENP020647 vhCDR1
DAWMD

SEQ ID NO: 24794 - protein, 19 aa, synthetic construct
  REGION 1..19: note = Description of Artificial Sequence: Synthetic peptide
  REGION 1..19: note = XENP020647 vhCDR2
EIRTKANNHATYYAESVKG

SEQ ID NO: 24795 - protein, 10 aa, synthetic construct
  REGION 1..10: note = Description of Artificial Sequence: Synthetic peptide
  REGION 1..10: note = XENP020647 vhCDR3
LANWDWYFDV

SEQ ID NO: 24796 - protein, 218 aa, synthetic construct
  REGION 1..218: note = Description of Artificial Sequence: Synthetic polypeptide
  REGION 1..218: note = XENP020647 7G8_H0_L0.43_IgG1_PVA_/S267K Light Chain
DTVLTQSPASLAVSLGQRATISCKASQSVDYDGLSYMNWYQQKPGQPPKLLIYAASNLESGIPARLSGSGSGTDFTLNIHPVEEEDAATYYCQQSNEDPFTFGSGTKLEVKRTVAAPSVFIFPPSDEQLKSGTASVVCLLNNFYPREAKVQWKVDNALQSGNSQESVTEQDSKDSTYSLSSTLTLSKADYEKHKVYACEVTHQGLSSPVTKSFNRGEC

SEQ ID NO: 24797 - protein, 111 aa, synthetic construct
  REGION 1..111: note = Description of Artificial Sequence: Synthetic polypeptide
  REGION 1..111: note = VL of XENP020647
DTVLTQSPASLAVSLGQRATISCKASQSVDYDGLSYMNWYQQKPGQPPKLLIYAASNLESGIPARLSGSGSGTDFTLNIHPVEEEDAATYYCQQSNEDPFTFGSGTKLEVK

SEQ ID NO: 24798 - protein, 15 aa, synthetic construct
  REGION 1..15: note = Description of Artificial Sequence: Synthetic peptide
  REGION 1..15: note = XENP020647 vlCDR1
KASQSVDYDGLSYMN

SEQ ID NO: 24799 - protein, 7 aa, synthetic construct
  REGION 1..7: note = Description of Artificial Sequence: Synthetic peptide
  REGION 1..7: note = XENP020647 vlCDR2
AASNLES

SEQ ID NO: 24800 - protein, 9 aa, synthetic construct
  REGION 1..9: note = Description of Artificial Sequence: Synthetic peptide
  REGION 1..9: note = XENP020647 vlCDR3
QQSNEDPFT

SEQ ID NO: 24801 - protein, 450 aa, synthetic construct; identical to SEQ ID NO: 22261
  REGION 1..450: note = Description of Artificial Sequence: Synthetic polypeptide
  REGION 1..450: note = XENP020648 7G8_H0_L0.44_IgG1_PVA_/S267K Heavy Chain

SEQ ID NO: 24802 - protein, 121 aa, synthetic construct; identical to SEQ ID NO: 22262
  REGION 1..121: note = Description of Artificial Sequence: Synthetic polypeptide
  REGION 1..121: note = VH of XENP020648

SEQ ID NO: 24803 - protein, 5 aa, synthetic construct
  REGION 1..5: note = Description of Artificial Sequence: Synthetic peptide
  REGION 1..5: note = XENP020648 vhCDR1
DAWMD

SEQ ID NO: 24804 - protein, 19 aa, synthetic construct
  REGION 1..19: note = Description of Artificial Sequence: Synthetic peptide
  REGION 1..19: note = XENP020648 vhCDR2
EIRTKANNHATYYAESVKG

SEQ ID NO: 24805 - protein, 10 aa, synthetic construct
  REGION 1..10: note = Description of Artificial Sequence: Synthetic peptide
  REGION 1..10: note = XENP020648 vhCDR3
LANWDWYFDV

SEQ ID NO: 24806 - protein, 218 aa, synthetic construct
  REGION 1..218: note = Description of Artificial Sequence: Synthetic polypeptide
  REGION 1..218: note = XENP020648 7G8_H0_L0.44_IgG1_PVA_/S267K Light Chain
DTVLTQSPASLAVSLGQRATISCKASQSVDYDGTSYMNWYQQKPGQPPKLLIYAASNLESGIPARLSGSGSGTDFTLNIHPVEEEDAATYYCQQSNEDPFTFGSGTKLEVKRTVAAPSVFIFPPSDEQLKSGTASVVCLLNNFYPREAKVQWKVDNALQSGNSQESVTEQDSKDSTYSLSSTLTLSKADYEKHKVYACEVTHQGLSSPVTKSFNRGEC

SEQ ID NO: 24807 - protein, 111 aa, synthetic construct
  REGION 1..111: note = Description of Artificial Sequence: Synthetic polypeptide
  REGION 1..111: note = VL of XENP020648
DTVLTQSPASLAVSLGQRATISCKASQSVDYDGTSYMNWYQQKPGQPPKLLIYAASNLESGIPARLSGSGSGTDFTLNIHPVEEEDAATYYCQQSNEDPFTFGSGTKLEVK

SEQ ID NO: 24808 - protein, 15 aa, synthetic construct
  REGION 1..15: note = Description of Artificial Sequence: Synthetic peptide
  REGION 1..15: note = XENP020648 vlCDR1
KASQSVDYDGTSYMN

SEQ ID NO: 24809 - protein, 7 aa, synthetic construct
  REGION 1..7: note = Description of Artificial Sequence: Synthetic peptide
  REGION 1..7: note = XENP020648 vlCDR2
AASNLES

SEQ ID NO: 24810 - protein, 9 aa, synthetic construct
  REGION 1..9: note = Description of Artificial Sequence: Synthetic peptide
  REGION 1..9: note = XENP020648 vlCDR3
QQSNEDPFT

SEQ ID NO: 24811 - protein, 450 aa, synthetic construct; identical to SEQ ID NO: 22261
  REGION 1..450: note = Description of Artificial Sequence: Synthetic polypeptide
  REGION 1..450: note = XENP020649 7G8_H0_L0.45_IgG1_PVA_/S267K Heavy Chain

SEQ ID NO: 24812 - protein, 121 aa, synthetic construct; identical to SEQ ID NO: 22262
  REGION 1..121: note = Description of Artificial Sequence: Synthetic polypeptide
  REGION 1..121: note = VH of XENP020649

SEQ ID NO: 24813 - protein, 5 aa, synthetic construct
  REGION 1..5: note = Description of Artificial Sequence: Synthetic peptide
  REGION 1..5: note = XENP020649 vhCDR1
DAWMD

SEQ ID NO: 24814 - protein, 19 aa, synthetic construct
  REGION 1..19: note = Description of Artificial Sequence: Synthetic peptide
  REGION 1..19: note = XENP020649 vhCDR2
EIRTKANNHATYYAESVKG

SEQ ID NO: 24815 - protein, 10 aa, synthetic construct
  REGION 1..10: note = Description of Artificial Sequence: Synthetic peptide
  REGION 1..10: note = XENP020649 vhCDR3
LANWDWYFDV

SEQ ID NO: 24816 - protein, 218 aa, synthetic construct
  REGION 1..218: note = Description of Artificial Sequence: Synthetic polypeptide
  REGION 1..218: note = XENP020649 7G8_H0_L0.45_IgG1_PVA_/S267K Light Chain
DTVLTQSPASLAVSLGQRATISCKASQSVDYDGGSYMNWYQQKPGQPPKLLIYAASNLESGIPARLSGSGSGTDFTLNIHPVEEEDAATYYCQQSNEDPFTFGSGTKLEVKRTVAAPSVFIFPPSDEQLKSGTASVVCLLNNFYPREAKVQWKVDNALQSGNSQESVTEQDSKDSTYSLSSTLTLSKADYEKHKVYACEVTHQGLSSPVTKSFNRGEC

SEQ ID NO: 24817 - protein, 111 aa, synthetic construct
  REGION 1..111: note = Description of Artificial Sequence: Synthetic polypeptide
  REGION 1..111: note = VL of XENP020649
DTVLTQSPASLAVSLGQRATISCKASQSVDYDGGSYMNWYQQKPGQPPKLLIYAASNLESGIPARLSGSGSGTDFTLNIHPVEEEDAATYYCQQSNEDPFTFGSGTKLEVK

SEQ ID NO: 24818 - protein, 15 aa, synthetic construct
  REGION 1..15: note = Description of Artificial Sequence: Synthetic peptide
  REGION 1..15: note = XENP020649 vlCDR1
KASQSVDYDGGSYMN

SEQ ID NO: 24819 - protein, 7 aa, synthetic construct
  REGION 1..7: note = Description of Artificial Sequence: Synthetic peptide
  REGION 1..7: note = XENP020649 vlCDR2
AASNLES

SEQ ID NO: 24820 - protein, 9 aa, synthetic construct
  REGION 1..9: note = Description of Artificial Sequence: Synthetic peptide
  REGION 1..9: note = XENP020649 vlCDR3
QQSNEDPFT

SEQ ID NO: 24821 - protein, 450 aa, synthetic construct; identical to SEQ ID NO: 22261
  REGION 1..450: note = Description of Artificial Sequence: Synthetic polypeptide
  REGION 1..450: note = XENP020650 7G8_H0_L0.46_IgG1_PVA_/S267K Heavy Chain

SEQ ID NO: 24822 - protein, 121 aa, synthetic construct; identical to SEQ ID NO: 22262
  REGION 1..121: note = Description of Artificial Sequence: Synthetic polypeptide
  REGION 1..121: note = VH of XENP020650

SEQ ID NO: 24823 - protein, 5 aa, synthetic construct
  REGION 1..5: note = Description of Artificial Sequence: Synthetic peptide
  REGION 1..5: note = XENP020650 vhCDR1
DAWMD

SEQ ID NO: 24824 - protein, 19 aa, synthetic construct
  REGION 1..19: note = Description of Artificial Sequence: Synthetic peptide
  REGION 1..19: note = XENP020650 vhCDR2
EIRTKANNHATYYAESVKG

SEQ ID NO: 24825 - protein, 10 aa, synthetic construct
  REGION 1..10: note = Description of Artificial Sequence: Synthetic peptide
  REGION 1..10: note = XENP020650 vhCDR3
LANWDWYFDV

SEQ ID NO: 24826 - protein, 218 aa, synthetic construct
  REGION 1..218: note = Description of Artificial Sequence: Synthetic polypeptide
  REGION 1..218: note = XENP020650 7G8_H0_L0.46_IgG1_PVA_/S267K Light Chain
DTVLTQSPASLAVSLGQRATISCKASQSVDYDGYSYMNWYQQKPGQPPKLLIYAASNLESGIPARLSGSGSGTDFTLNIHPVEEEDAATYYCQQSNEDPFTFGSGTKLEVKRTVAAPSVFIFPPSDEQLKSGTASVVCLLNNFYPREAKVQWKVDNALQSGNSQESVTEQDSKDSTYSLSSTLTLSKADYEKHKVYACEVTHQGLSSPVTKSFNRGEC

SEQ ID NO: 24827 - protein, 111 aa, synthetic construct
  REGION 1..111: note = Description of Artificial Sequence: Synthetic polypeptide
  REGION 1..111: note = VL of XENP020650
DTVLTQSPASLAVSLGQRATISCKASQSVDYDGYSYMNWYQQKPGQPPKLLIYAASNLESGIPARLSGSGSGTDFTLNIHPVEEEDAATYYCQQSNEDPFTFGSGTKLEVK

SEQ ID NO: 24828 - protein, 15 aa, synthetic construct
  REGION 1..15: note = Description of Artificial Sequence: Synthetic peptide
  REGION 1..15: note = XENP020650 vlCDR1
KASQSVDYDGYSYMN

SEQ ID NO: 24829 - protein, 7 aa, synthetic construct
  REGION 1..7: note = Description of Artificial Sequence: Synthetic peptide
  REGION 1..7: note = XENP020650 vlCDR2
AASNLES

SEQ ID NO: 24830 - protein, 9 aa, synthetic construct
  REGION 1..9: note = Description of Artificial Sequence: Synthetic peptide
  REGION 1..9: note = XENP020650 vlCDR3
QQSNEDPFT

SEQ ID NO: 24831 - protein, 450 aa, synthetic construct; identical to SEQ ID NO: 22261
  REGION 1..450: note = Description of Artificial Sequence: Synthetic polypeptide
  REGION 1..450: note = XENP020651 7G8_H0_L0.47_IgG1_PVA_/S267K Heavy Chain

SEQ ID NO: 24832 - protein, 121 aa, synthetic construct; identical to SEQ ID NO: 22262
  REGION 1..121: note = Description of Artificial Sequence: Synthetic polypeptide
  REGION 1..121: note = VH of XENP020651

SEQ ID NO: 24833 - protein, 5 aa, synthetic construct
  REGION 1..5: note = Description of Artificial Sequence: Synthetic peptide
  REGION 1..5: note = XENP020651 vhCDR1
DAWMD

SEQ ID NO: 24834 - protein, 19 aa, synthetic construct
  REGION 1..19: note = Description of Artificial Sequence: Synthetic peptide
  REGION 1..19: note = XENP020651 vhCDR2
EIRTKANNHATYYAESVKG

SEQ ID NO: 24835 - protein, 10 aa, synthetic construct
  REGION 1..10: note = Description of Artificial Sequence: Synthetic peptide
  REGION 1..10: note = XENP020651 vhCDR3
LANWDWYFDV

SEQ ID NO: 24836 - protein, 218 aa, synthetic construct
  REGION 1..218: note = Description of Artificial Sequence: Synthetic polypeptide
  REGION 1..218: note = XENP020651 7G8_H0_L0.47_IgG1_PVA_/S267K Light Chain
DTVLTQSPASLAVSLGQRATISCKASQSVDYDGDSYMNWYQQKPGQPPKLLIKAASNLESGIPARLSGSGSGTDFTLNIHPVEEEDAATYYCQQSNEDPFTFGSGTKLEVKRTVAAPSVFIFPPSDEQLKSGTASVVCLLNNFYPREAKVQWKVDNALQSGNSQESVTEQDSKDSTYSLSSTLTLSKADYEKHKVYACEVTHQGLSSPVTKSFNRGEC

SEQ ID NO: 24837 - protein, 111 aa, synthetic construct
  REGION 1..111: note = Description of Artificial Sequence: Synthetic polypeptide
  REGION 1..111: note = VL of XENP020651
DTVLTQSPASLAVSLGQRATISCKASQSVDYDGDSYMNWYQQKPGQPPKLLIKAASNLESGIPARLSGSGSGTDFTLNIHPVEEEDAATYYCQQSNEDPFTFGSGTKLEVK

SEQ ID NO: 24838 - protein, 15 aa, synthetic construct
  REGION 1..15: note = Description of Artificial Sequence: Synthetic peptide
  REGION 1..15: note = XENP020651 vlCDR1
KASQSVDYDGDSYMN

SEQ ID NO: 24839 - protein, 7 aa, synthetic construct
  REGION 1..7: note = Description of Artificial Sequence: Synthetic peptide
  REGION 1..7: note = XENP020651 vlCDR2
AASNLES

SEQ ID NO: 24840 - protein, 9 aa, synthetic construct
  REGION 1..9: note = Description of Artificial Sequence: Synthetic peptide
  REGION 1..9: note = XENP020651 vlCDR3
QQSNEDPFT

SEQ ID NO: 24841 - protein, 450 aa, synthetic construct; identical to SEQ ID NO: 22261
  REGION 1..450: note = Description of Artificial Sequence: Synthetic polypeptide
  REGION 1..450: note = XENP020652 7G8_H0_L0.48_IgG1_PVA_/S267K Heavy Chain

SEQ ID NO: 24842 - protein, 121 aa, synthetic construct; identical to SEQ ID NO: 22262
  REGION 1..121: note = Description of Artificial Sequence: Synthetic polypeptide
  REGION 1..121: note = VH of XENP020652

SEQ ID NO: 24843 - protein, 5 aa, synthetic construct
  REGION 1..5: note = Description of Artificial Sequence: Synthetic peptide
  REGION 1..5: note = XENP020652 vhCDR1
DAWMD

SEQ ID NO: 24844 - protein, 19 aa, synthetic construct
  REGION 1..19: note = Description of Artificial Sequence: Synthetic peptide
  REGION 1..19: note = XENP020652 vhCDR2
EIRTKANNHATYYAESVKG

SEQ ID NO: 24845 - protein, 10 aa, synthetic construct
  REGION 1..10: note = Description of Artificial Sequence: Synthetic peptide
  REGION 1..10: note = XENP020652 vhCDR3
LANWDWYFDV

SEQ ID NO: 24846 - protein, 218 aa, synthetic construct
  REGION 1..218: note = Description of Artificial Sequence: Synthetic polypeptide
  REGION 1..218: note = XENP020652 7G8_H0_L0.48_IgG1_PVA_/S267K Light Chain
DTVLTQSPASLAVSLGQRATISCKASQSVDYDGDSYMNWYQQKPGQPPKLLIYSASNLESGIPARLSGSGSGTDFTLNIHPVEEEDAATYYCQQSNEDPFTFGSGTKLEVKRTVAAPSVFIFPPSDEQLKSGTASVVCLLNNFYPREAKVQWKVDNALQSGNSQESVTEQDSKDSTYSLSSTLTLSKADYEKHKVYACEVTHQGLSSPVTKSFNRGEC

SEQ ID NO: 24847 - protein, 111 aa, synthetic construct
  REGION 1..111: note = Description of Artificial Sequence: Synthetic polypeptide
  REGION 1..111: note = VL of XENP020652
DTVLTQSPASLAVSLGQRATISCKASQSVDYDGDSYMNWYQQKPGQPPKLLIYSASNLESGIPARLSGSGSGTDFTLNIHPVEEEDAATYYCQQSNEDPFTFGSGTKLEVK

SEQ ID NO: 24848 - protein, 15 aa, synthetic construct
  REGION 1..15: note = Description of Artificial Sequence: Synthetic peptide
  REGION 1..15: note = XENP020652 vlCDR1
KASQSVDYDGDSYMN

SEQ ID NO: 24849 - protein, 7 aa, synthetic construct
  REGION 1..7: note = Description of Artificial Sequence: Synthetic peptide
  REGION 1..7: note = XENP020652 vlCDR2
SASNLES

SEQ ID NO: 24850 - protein, 9 aa, synthetic construct
  REGION 1..9: note = Description of Artificial Sequence: Synthetic peptide
  REGION 1..9: note = XENP020652 vlCDR3
QQSNEDPFT

SEQ ID NO: 24851 - protein, 450 aa, synthetic construct; identical to SEQ ID NO: 22261
  REGION 1..450: note = Description of Artificial Sequence: Synthetic polypeptide
  REGION 1..450: note = XENP020653 7G8_H0_L0.49_IgG1_PVA_/S267K Heavy Chain

SEQ ID NO: 24852 - protein, 121 aa, synthetic construct; identical to SEQ ID NO: 22262
  REGION 1..121: note = Description of Artificial Sequence: Synthetic polypeptide
  REGION 1..121: note = VH of XENP020653

SEQ ID NO: 24853 - protein, 5 aa, synthetic construct
  REGION 1..5: note = Description of Artificial Sequence: Synthetic peptide
  REGION 1..5: note = XENP020653 vhCDR1
DAWMD

SEQ ID NO: 24854 - protein, 19 aa, synthetic construct
  REGION 1..19: note = Description of Artificial Sequence: Synthetic peptide
  REGION 1..19: note = XENP020653 vhCDR2
EIRTKANNHATYYAESVKG

SEQ ID NO: 24855 - protein, 10 aa, synthetic construct
  REGION 1..10: note = Description of Artificial Sequence: Synthetic peptide
  REGION 1..10: note = XENP020653 vhCDR3
LANWDWYFDV

SEQ ID NO: 24856 - protein, 218 aa, synthetic construct
  REGION 1..218: note = Description of Artificial Sequence: Synthetic polypeptide
  REGION 1..218: note = XENP020653 7G8_H0_L0.49_IgG1_PVA_/S267K Light Chain
DTVLTQSPASLAVSLGQRATISCKASQSVDYDGDSYMNWYQQKPGQPPKLLIYTASNLESGIPARLSGSGSGTDFTLNIHPVEEEDAATYYCQQSNEDPFTFGSGTKLEVKRTVAAPSVFIFPPSDEQLKSGTASVVCLLNNFYPREAKVQWKVDNALQSGNSQESVTEQDSKDSTYSLSSTLTLSKADYEKHKVYACEVTHQGLSSPVTKSFNRGEC

SEQ ID NO: 24857 - protein, 111 aa, synthetic construct
  REGION 1..111: note = Description of Artificial Sequence: Synthetic polypeptide
  REGION 1..111: note = VL of XENP020653
DTVLTQSPASLAVSLGQRATISCKASQSVDYDGDSYMNWYQQKPGQPPKLLIYTASNLESGIPARLSGSGSGTDFTLNIHPVEEEDAATYYCQQSNEDPFTFGSGTKLEVK

SEQ ID NO: 24858 - protein, 15 aa, synthetic construct
  REGION 1..15: note = Description of Artificial Sequence: Synthetic peptide
  REGION 1..15: note = XENP020653 vlCDR1
KASQSVDYDGDSYMN

SEQ ID NO: 24859 - protein, 7 aa, synthetic construct
  REGION 1..7: note = Description of Artificial Sequence: Synthetic peptide
  REGION 1..7: note = XENP020653 vlCDR2
TASNLES

SEQ ID NO: 24860 - protein, 9 aa, synthetic construct
  REGION 1..9: note = Description of Artificial Sequence: Synthetic peptide
  REGION 1..9: note = XENP020653 vlCDR3
QQSNEDPFT

SEQ ID NO: 24861 - protein, 450 aa, synthetic construct; identical to SEQ ID NO: 22261
  REGION 1..450: note = Description of Artificial Sequence: Synthetic polypeptide
  REGION 1..450: note = XENP020654 7G8_H0_L0.50_IgG1_PVA_/S267K Heavy Chain

SEQ ID NO: 24862 - protein, 121 aa, synthetic construct; identical to SEQ ID NO: 22262
  REGION 1..121: note = Description of Artificial Sequence: Synthetic polypeptide
  REGION 1..121: note = VH of XENP020654

SEQ ID NO: 24863 - protein, 5 aa, synthetic construct
  REGION 1..5: note = Description of Artificial Sequence: Synthetic peptide
  REGION 1..5: note = XENP020654 vhCDR1
DAWMD

SEQ ID NO: 24864 - protein, 19 aa, synthetic construct
  REGION 1..19: note = Description of Artificial Sequence: Synthetic peptide
  REGION 1..19: note = XENP020654 vhCDR2
EIRTKANNHATYYAESVKG

SEQ ID NO: 24865 - protein, 10 aa, synthetic construct
  REGION 1..10: note = Description of Artificial Sequence: Synthetic peptide
  REGION 1..10: note = XENP020654 vhCDR3
LANWDWYFDV

SEQ ID NO: 24866 - protein, 218 aa, synthetic construct
  REGION 1..218: note = Description of Artificial Sequence: Synthetic polypeptide
  REGION 1..218: note = XENP020654 7G8_H0_L0.50_IgG1_PVA_/S267K Light Chain
DTVLTQSPASLAVSLGQRATISCKASQSVDYDGDSYMNWYQQKPGQPPKLLIYGASNLESGIPARLSGSGSGTDFTLNIHPVEEEDAATYYCQQSNEDPFTFGSGTKLEVKRTVAAPSVFIFPPSDEQLKSGTASVVCLLNNFYPREAKVQWKVDNALQSGNSQESVTEQDSKDSTYSLSSTLTLSKADYEKHKVYACEVTHQGLSSPVTKSFNRGEC

SEQ ID NO: 24867 - protein, 111 aa, synthetic construct
  REGION 1..111: note = Description of Artificial Sequence: Synthetic polypeptide
  REGION 1..111: note = VL of XENP020654
DTVLTQSPASLAVSLGQRATISCKASQSVDYDGDSYMNWYQQKPGQPPKLLIYGASNLESGIPARLSGSGSGTDFTLNIHPVEEEDAATYYCQQSNEDPFTFGSGTKLEVK

SEQ ID NO: 24868 - protein, 15 aa, synthetic construct
  REGION 1..15: note = Description of Artificial Sequence: Synthetic peptide
  REGION 1..15: note = XENP020654 vlCDR1
KASQSVDYDGDSYMN

SEQ ID NO: 24869 - protein, 7 aa, synthetic construct
  REGION 1..7: note = Description of Artificial Sequence: Synthetic peptide
  REGION 1..7: note = XENP020654 vlCDR2
GASNLES

SEQ ID NO: 24870 - protein, 9 aa, synthetic construct
  REGION 1..9: note = Description of Artificial Sequence: Synthetic peptide
  REGION 1..9: note = XENP020654 vlCDR3
QQSNEDPFT

SEQ ID NO: 24871 - protein, 450 aa, synthetic construct; identical to SEQ ID NO: 22261
  REGION 1..450: note = Description of Artificial Sequence: Synthetic polypeptide
  REGION 1..450: note = XENP020655 7G8_H0_L0.51_IgG1_PVA_/S267K Heavy Chain

SEQ ID NO: 24872 - protein, 121 aa, synthetic construct; identical to SEQ ID NO: 22262
  REGION 1..121: note = Description of Artificial Sequence: Synthetic polypeptide
  REGION 1..121: note = VH of XENP020655

SEQ ID NO: 24873 - protein, 5 aa, synthetic construct
  REGION 1..5: note = Description of Artificial Sequence: Synthetic peptide
  REGION 1..5: note = XENP020655 vhCDR1
DAWMD

SEQ ID NO: 24874 - protein, 19 aa, synthetic construct
  REGION 1..19: note = Description of Artificial Sequence: Synthetic peptide
  REGION 1..19: note = XENP020655 vhCDR2
EIRTKANNHATYYAESVKG

SEQ ID NO: 24875 - protein, 10 aa, synthetic construct
  REGION 1..10: note = Description of Artificial Sequence: Synthetic peptide
  REGION 1..10: note = XENP020655 vhCDR3
LANWDWYFDV

SEQ ID NO: 24876 - protein, 218 aa, synthetic construct
  REGION 1..218: note = Description of Artificial Sequence: Synthetic polypeptide
  REGION 1..218: note = XENP020655 7G8_H0_L0.51_IgG1_PVA_/S267K Light Chain
DTVLTQSPASLAVSLGQRATISCKASQSVDYDGDSYMNWYQQKPGQPPKLLIYHASNLESGIPARLSGSGSGTDFTLNIHPVEEEDAATYYCQQSNEDPFTFGSGTKLEVKRTVAAPSVFIFPPSDEQLKSGTASVVCLLNNFYPREAKVQWKVDNALQSGNSQESVTEQDSKDSTYSLSSTLTLSKADYEKHKVYACEVTHQGLSSPVTKSFNRGEC

SEQ ID NO: 24877 - protein, 111 aa, synthetic construct
  REGION 1..111: note = Description of Artificial Sequence: Synthetic polypeptide
  REGION 1..111: note = VL of XENP020655
DTVLTQSPASLAVSLGQRATISCKASQSVDYDGDSYMNWYQQKPGQPPKLLIYHASNLESGIPARLSGSGSGTDFTLNIHPVEEEDAATYYCQQSNEDPFTFGSGTKLEVK

SEQ ID NO: 24878 - protein, 15 aa, synthetic construct
  REGION 1..15: note = Description of Artificial Sequence: Synthetic peptide
  REGION 1..15: note = XENP020655 vlCDR1
KASQSVDYDGDSYMN

SEQ ID NO: 24879 - protein, 7 aa, synthetic construct
  REGION 1..7: note = Description of Artificial Sequence: Synthetic peptide
  REGION 1..7: note = XENP020655 vlCDR2
HASNLES

SEQ ID NO: 24880 - protein, 9 aa, synthetic construct
  REGION 1..9: note = Description of Artificial Sequence: Synthetic peptide
  REGION 1..9: note = XENP020655 vlCDR3
QQSNEDPFT

SEQ ID NO: 24881 - protein, 450 aa, synthetic construct; identical to SEQ ID NO: 22261
  REGION 1..450: note = Description of Artificial Sequence: Synthetic polypeptide
  REGION 1..450: note = XENP020656 7G8_H0_L0.52_IgG1_PVA_/S267K Heavy Chain

SEQ ID NO: 24882 - protein, 121 aa, synthetic construct; identical to SEQ ID NO: 22262
  REGION 1..121: note = Description of Artificial Sequence: Synthetic polypeptide
  REGION 1..121: note = VH of XENP020656

SEQ ID NO: 24883 - protein, 5 aa, synthetic construct
  REGION 1..5: note = Description of Artificial Sequence: Synthetic peptide
  REGION 1..5: note = XENP020656 vhCDR1
DAWMD

SEQ ID NO: 24884 - protein, 19 aa, synthetic construct
  REGION 1..19: note = Description of Artificial Sequence: Synthetic peptide
  REGION 1..19: note = XENP020656 vhCDR2
EIRTKANNHATYYAESVKG

SEQ ID NO: 24885 - protein, 10 aa, synthetic construct
  REGION 1..10: note = Description of Artificial Sequence: Synthetic peptide
  REGION 1..10: note = XENP020656 vhCDR3
LANWDWYFDV

SEQ ID NO: 24886 - protein, 218 aa, synthetic construct
  REGION 1..218: note = Description of Artificial Sequence: Synthetic polypeptide
  REGION 1..218: note = XENP020656 7G8_H0_L0.52_IgG1_PVA_/S267K Light Chain
DTVLTQSPASLAVSLGQRATISCKASQSVDYDGDSYMNWYQQKPGQPPKLLIYQASNLESGIPARLSGSGSGTDFTLNIHPVEEEDAATYYCQQSNEDPFTFGSGTKLEVKRTVAAPSVFIFPPSDEQLKSGTASVVCLLNNFYPREAKVQWKVDNALQSGNSQESVTEQDSKDSTYSLSSTLTLSKADYEKHKVYACEVTHQGLSSPVTKSFNRGEC

SEQ ID NO: 24887 - protein, 111 aa, synthetic construct
  REGION 1..111: note = Description of Artificial Sequence: Synthetic polypeptide
  REGION 1..111: note = VL of XENP020656
DTVLTQSPASLAVSLGQRATISCKASQSVDYDGDSYMNWYQQKPGQPPKLLIYQASNLESGIPARLSGSGSGTDFTLNIHPVEEEDAATYYCQQSNEDPFTFGSGTKLEVK

SEQ ID NO: 24888 - protein, 15 aa, synthetic construct
  REGION 1..15: note = Description of Artificial Sequence: Synthetic peptide
  REGION 1..15: note = XENP020656 vlCDR1
KASQSVDYDGDSYMN

SEQ ID NO: 24889 - protein, 7 aa, synthetic construct
  REGION 1..7: note = Description of Artificial Sequence: Synthetic peptide
  REGION 1..7: note = XENP020656 vlCDR2
QASNLES

SEQ ID NO: 24890 - protein, 9 aa, synthetic construct
  REGION 1..9: note = Description of Artificial Sequence: Synthetic peptide
  REGION 1..9: note = XENP020656 vlCDR3
QQSNEDPFT

SEQ ID NO: 24891 - protein, 450 aa, synthetic construct; identical to SEQ ID NO: 22261
  REGION 1..450: note = Description of Artificial Sequence: Synthetic polypeptide
  REGION 1..450: note = XENP020657 7G8_H0_L0.53_IgG1_PVA_/S267K Heavy Chain

SEQ ID NO: 24892 - protein, 121 aa, synthetic construct; identical to SEQ ID NO: 22262
  REGION 1..121: note = Description of Artificial Sequence: Synthetic polypeptide
  REGION 1..121: note = VH of XENP020657

SEQ ID NO: 24893 - protein, 5 aa, synthetic construct
  REGION 1..5: note = Description of Artificial Sequence: Synthetic peptide
  REGION 1..5: note = XENP020657 vhCDR1
DAWMD

SEQ ID NO: 24894 - protein, 19 aa, synthetic construct
  REGION 1..19: note = Description of Artificial Sequence: Synthetic peptide
  REGION 1..19: note = XENP020657 vhCDR2
EIRTKANNHATYYAESVKG

SEQ ID NO: 24895 - protein, 10 aa, synthetic construct
  REGION 1..10: note = Description of Artificial Sequence: Synthetic peptide
  REGION 1..10: note = XENP020657 vhCDR3
LANWDWYFDV

SEQ ID NO: 24896 - protein, 218 aa, synthetic construct
  REGION 1..218: note = Description of Artificial Sequence: Synthetic polypeptide
  REGION 1..218: note = XENP020657 7G8_H0_L0.53_IgG1_PVA_/S267K Light Chain
DTVLTQSPASLAVSLGQRATISCKASQSVDYDGDSYMNWYQQKPGQPPKLLIYDASNLESGIPARLSGSGSGTDFTLNIHPVEEEDAATYYCQQSNEDPFTFGSGTKLEVKRTVAAPSVFIFPPSDEQLKSGTASVVCLLNNFYPREAKVQWKVDNALQSGNSQESVTEQDSKDSTYSLSSTLTLSKADYEKHKVYACEVTHQGLSSPVTKSFNRGEC

SEQ ID NO: 24897 - protein, 111 aa, synthetic construct
  REGION 1..111: note = Description of Artificial Sequence: Synthetic polypeptide
  REGION 1..111: note = VL of XENP020657
DTVLTQSPASLAVSLGQRATISCKASQSVDYDGDSYMNWYQQKPGQPPKLLIYDASNLESGIPARLSGSGSGTDFTLNIHPVEEEDAATYYCQQSNEDPFTFGSGTKLEVK

SEQ ID NO: 24898 - protein, 15 aa, synthetic construct
  REGION 1..15: note = Description of Artificial Sequence: Synthetic peptide
  REGION 1..15: note = XENP020657 vlCDR1
KASQSVDYDGDSYMN

SEQ ID NO: 24899 - protein, 7 aa, synthetic construct
  REGION 1..7: note = Description of Artificial Sequence: Synthetic peptide
  REGION 1..7: note = XENP020657 vlCDR2
DASNLES

SEQ ID NO: 24900 - protein, 9 aa, synthetic construct
  REGION 1..9: note = Description of Artificial Sequence: Synthetic peptide
  REGION 1..9: note = XENP020657 vlCDR3
QQSNEDPFT

SEQ ID NO: 24901 - protein, 450 aa, synthetic construct; identical to SEQ ID NO: 22261
  REGION 1..450: note = Description of Artificial Sequence: Synthetic polypeptide
  REGION 1..450: note = XENP020658 7G8_H0_L0.54_IgG1_PVA_/S267K Heavy Chain

SEQ ID NO: 24902 - protein, 121 aa, synthetic construct; identical to SEQ ID NO: 22262
  REGION 1..121: note = Description of Artificial Sequence: Synthetic polypeptide
  REGION 1..121: note = VH of XENP020658

SEQ ID NO: 24903 - protein, 5 aa, synthetic construct
  REGION 1..5: note = Description of Artificial Sequence: Synthetic peptide
  REGION 1..5: note = XENP020658 vhCDR1
DAWMD

SEQ ID NO: 24904 - protein, 19 aa, synthetic construct
  REGION 1..19: note = Description of Artificial Sequence: Synthetic peptide
  REGION 1..19: note = XENP020658 vhCDR2
EIRTKANNHATYYAESVKG

SEQ ID NO: 24905 - protein, 10 aa, synthetic construct
  REGION 1..10: note = Description of Artificial Sequence: Synthetic peptide
  REGION 1..10: note = XENP020658 vhCDR3
LANWDWYFDV

SEQ ID NO: 24906 - protein, 218 aa, synthetic construct
  REGION 1..218: note = Description of Artificial Sequence: Synthetic polypeptide
  REGION 1..218: note = XENP020658 7G8_H0_L0.54_IgG1_PVA_/S267K Light Chain
DTVLTQSPASLAVSLGQRATISCKASQSVDYDGDSYMNWYQQKPGQPPKLLIYLASNLESGIPARLSGSGSGTDFTLNIHPVEEEDAATYYCQQSNEDPFTFGSGTKLEVKRTVAAPSVFIFPPSDEQLKSGTASVVCLLNNFYPREAKVQWKVDNALQSGNSQESVTEQDSKDSTYSLSSTLTLSKADYEKHKVYACEVTHQGLSSPVTKSFNRGEC

SEQ ID NO: 24907 - protein, 111 aa, synthetic construct
  REGION 1..111: note = Description of Artificial Sequence: Synthetic polypeptide
  REGION 1..111: note = VL of XENP020658
DTVLTQSPASLAVSLGQRATISCKASQSVDYDGDSYMNWYQQKPGQPPKLLIYLASNLESGIPARLSGSGSGTDFTLNIHPVEEEDAATYYCQQSNEDPFTFGSGTKLEVK

SEQ ID NO: 24908 - protein, 15 aa, synthetic construct
  REGION 1..15: note = Description of Artificial Sequence: Synthetic peptide
  REGION 1..15: note = XENP020658 vlCDR1
KASQSVDYDGDSYMN

SEQ ID NO: 24909 - protein, 7 aa, synthetic construct
  REGION 1..7: note = Description of Artificial Sequence: Synthetic peptide
  REGION 1..7: note = XENP020658 vlCDR2
LASNLES

SEQ ID NO: 24910 - protein, 9 aa, synthetic construct
  REGION 1..9: note = Description of Artificial Sequence: Synthetic peptide
  REGION 1..9: note = XENP020658 vlCDR3
QQSNEDPFT

SEQ ID NO: 24911 - protein, 450 aa, synthetic construct; identical to SEQ ID NO: 22261
  REGION 1..450: note = Description of Artificial Sequence: Synthetic polypeptide
  REGION 1..450: note = XENP020659 7G8_H0_L0.55_IgG1_PVA_/S267K Heavy Chain

SEQ ID NO: 24912 - protein, 121 aa, synthetic construct; identical to SEQ ID NO: 22262
  REGION 1..121: note = Description of Artificial Sequence: Synthetic polypeptide
  REGION 1..121: note = VH of XENP020659

SEQ ID NO: 24913 - protein, 5 aa, synthetic construct
  REGION 1..5: note = Description of Artificial Sequence: Synthetic peptide
  REGION 1..5: note = XENP020659 vhCDR1
DAWMD

SEQ ID NO: 24914 - protein, 19 aa, synthetic construct
  REGION 1..19: note = Description of Artificial Sequence: Synthetic peptide
  REGION 1..19: note = XENP020659 vhCDR2
EIRTKANNHATYYAESVKG

SEQ ID NO: 24915 - protein, 10 aa, synthetic construct
  REGION 1..10: note = Description of Artificial Sequence: Synthetic peptide
  REGION 1..10: note = XENP020659 vhCDR3
LANWDWYFDV

SEQ ID NO: 24916 - protein, 218 aa, synthetic construct
  REGION 1..218: note = Description of Artificial Sequence: Synthetic polypeptide
  REGION 1..218: note = XENP020659 7G8_H0_L0.55_IgG1_PVA_/S267K Light Chain
DTVLTQSPASLAVSLGQRATISCKASQSVDYDGDSYMNWYQQKPGQPPKLLIYKASNLESGIPARLSGSGSGTDFTLNIHPVEEEDAATYYCQQSNEDPFTFGSGTKLEVKRTVAAPSVFIFPPSDEQLKSGTASVVCLLNNFYPREAKVQWKVDNALQSGNSQESVTEQDSKDSTYSLSSTLTLSKADYEKHKVYACEVTHQGLSSPVTKSFNRGEC

SEQ ID NO: 24917 - protein, 111 aa, synthetic construct
  REGION 1..111: note = Description of Artificial Sequence: Synthetic polypeptide
  REGION 1..111: note = VL of XENP020659
DTVLTQSPASLAVSLGQRATISCKASQSVDYDGDSYMNWYQQKPGQPPKLLIYKASNLESGIPARLSGSGSGTDFTLNIHPVEEEDAATYYCQQSNEDPFTFGSGTKLEVK

SEQ ID NO: 24918 - protein, 15 aa, synthetic construct
  REGION 1..15: note = Description of Artificial Sequence: Synthetic peptide
  REGION 1..15: note = XENP020659 vlCDR1
KASQSVDYDGDSYMN

SEQ ID NO: 24919 - protein, 7 aa, synthetic construct
  REGION 1..7: note = Description of Artificial Sequence: Synthetic peptide
  REGION 1..7: note = XENP020659 vlCDR2
KASNLES

SEQ ID NO: 24920 - protein, 9 aa, synthetic construct
  REGION 1..9: note = Description of Artificial Sequence: Synthetic peptide
  REGION 1..9: note = XENP020659 vlCDR3
QQSNEDPFT

SEQ ID NO: 24921 - protein, 450 aa, synthetic construct; identical to SEQ ID NO: 22261
  REGION 1..450: note = Description of Artificial Sequence: Synthetic polypeptide
  REGION 1..450: note = XENP020660 7G8_H0_L0.56_IgG1_PVA_/S267K Heavy Chain

SEQ ID NO: 24922 - protein, 121 aa, synthetic construct; identical to SEQ ID NO: 22262
  REGION 1..121: note = Description of Artificial Sequence: Synthetic polypeptide
  REGION 1..121: note = VH of XENP020660

SEQ ID NO: 24923 - protein, 5 aa, synthetic construct
  REGION 1..5: note = Description of Artificial Sequence: Synthetic peptide
  REGION 1..5: note = XENP020660 vhCDR1
DAWMD

SEQ ID NO: 24924 - protein, 19 aa, synthetic construct
  REGION 1..19: note = Description of Artificial Sequence: Synthetic peptide
  REGION 1..19: note = XENP020660 vhCDR2
EIRTKANNHATYYAESVKG

SEQ ID NO: 24925 - protein, 10 aa, synthetic construct
  REGION 1..10: note = Description of Artificial Sequence: Synthetic peptide
  REGION 1..10: note = XENP020660 vhCDR3
LANWDWYFDV

SEQ ID NO: 24926 - protein, 218 aa, synthetic construct
  REGION 1..218: note = Description of Artificial Sequence: Synthetic polypeptide
  REGION 1..218: note = XENP020660 7G8_H0_L0.56_IgG1_PVA_/S267K Light Chain
DTVLTQSPASLAVSLGQRATISCKASQSVDYDGDSYMNWYQQKPGQPPKLLIYYASNLESGIPARLSGSGSGTDFTLNIHPVEEEDAATYYCQQSNEDPFTFGSGTKLEVKRTVAAPSVFIFPPSDEQLKSGTASVVCLLNNFYPREAKVQWKVDNALQSGNSQESVTEQDSKDSTYSLSSTLTLSKADYEKHKVYACEVTHQGLSSPVTKSFNRGEC

SEQ ID NO: 24927 - protein, 111 aa, synthetic construct
  REGION 1..111: note = Description of Artificial Sequence: Synthetic polypeptide
  REGION 1..111: note = VL of XENP020660
DTVLTQSPASLAVSLGQRATISCKASQSVDYDGDSYMNWYQQKPGQPPKLLIYYASNLESGIPARLSGSGSGTDFTLNIHPVEEEDAATYYCQQSNEDPFTFGSGTKLEVK

SEQ ID NO: 24928 - protein, 15 aa, synthetic construct
  REGION 1..15: note = Description of Artificial Sequence: Synthetic peptide
  REGION 1..15: note = XENP020660 vlCDR1
KASQSVDYDGDSYMN

SEQ ID NO: 24929 - protein, 7 aa, synthetic construct
  REGION 1..7: note = Description of Artificial Sequence: Synthetic peptide
  REGION 1..7: note = XENP020660 vlCDR2
YASNLES

SEQ ID NO: 24930 - protein, 9 aa, synthetic construct
  REGION 1..9: note = Description of Artificial Sequence: Synthetic peptide
  REGION 1..9: note = XENP020660 vlCDR3
QQSNEDPFT

SEQ ID NO: 24931 - protein, 450 aa, synthetic construct; identical to SEQ ID NO: 22261
  REGION 1..450: note = Description of Artificial Sequence: Synthetic polypeptide
  REGION 1..450: note = XENP020661 7G8_H0_L0.57_IgG1_PVA_/S267K Heavy Chain

SEQ ID NO: 24932 - protein, 121 aa, synthetic construct; identical to SEQ ID NO: 22262
  REGION 1..121: note = Description of Artificial Sequence: Synthetic polypeptide
  REGION 1..121: note = VH of XENP020661

SEQ ID NO: 24933 - protein, 5 aa, synthetic construct
  REGION 1..5: note = Description of Artificial Sequence: Synthetic peptide
  REGION 1..5: note = XENP020661 vhCDR1
DAWMD

SEQ ID NO: 24934 - protein, 19 aa, synthetic construct
  REGION 1..19: note = Description of Artificial Sequence: Synthetic peptide
  REGION 1..19: note = XENP020661 vhCDR2
EIRTKANNHATYYAESVKG

SEQ ID NO: 24935 - protein, 10 aa, synthetic construct
  REGION 1..10: note = Description of Artificial Sequence: Synthetic peptide
  REGION 1..10: note = XENP020661 vhCDR3
LANWDWYFDV

SEQ ID NO: 24936 - protein, 218 aa, synthetic construct
  REGION 1..218: note = Description of Artificial Sequence: Synthetic polypeptide
  REGION 1..218: note = XENP020661 7G8_H0_L0.57_IgG1_PVA_/S267K Light Chain
DTVLTQSPASLAVSLGQRATISCKASQSVDYDGDSYMNWYQQKPGQPPKLLIYAASDLESGIPARLSGSGSGTDFTLNIHPVEEEDAATYYCQQSNEDPFTFGSGTKLEVKRTVAAPSVFIFPPSDEQLKSGTASVVCLLNNFYPREAKVQWKVDNALQSGNSQESVTEQDSKDSTYSLSSTLTLSKADYEKHKVYACEVTHQGLSSPVTKSFNRGEC

SEQ ID NO: 24937 - protein, 111 aa, synthetic construct
  REGION 1..111: note = Description of Artificial Sequence: Synthetic polypeptide
  REGION 1..111: note = VL of XENP020661
DTVLTQSPASLAVSLGQRATISCKASQSVDYDGDSYMNWYQQKPGQPPKLLIYAASDLESGIPARLSGSGSGTDFTLNIHPVEEEDAATYYCQQSNEDPFTFGSGTKLEVK

SEQ ID NO: 24938 - protein, 15 aa, synthetic construct
  REGION 1..15: note = Description of Artificial Sequence: Synthetic peptide
  REGION 1..15: note = XENP020661 vlCDR1
KASQSVDYDGDSYMN

SEQ ID NO: 24939 - protein, 7 aa, synthetic construct
  REGION 1..7: note = Description of Artificial Sequence: Synthetic peptide
  REGION 1..7: note = XENP020661 vlCDR2
AASDLES

SEQ ID NO: 24940 - protein, 9 aa, synthetic construct
  REGION 1..9: note = Description of Artificial Sequence: Synthetic peptide
  REGION 1..9: note = XENP020661 vlCDR3
QQSNEDPFT

SEQ ID NO: 24941 - protein, 450 aa, synthetic construct; identical to SEQ ID NO: 22261
  REGION 1..450: note = Description of Artificial Sequence: Synthetic polypeptide
  REGION 1..450: note = XENP020662 7G8_H0_L0.58_IgG1_PVA_/S267K Heavy Chain

SEQ ID NO: 24942 - protein, 121 aa, synthetic construct; identical to SEQ ID NO: 22262
  REGION 1..121: note = Description of Artificial Sequence: Synthetic polypeptide
  REGION 1..121: note = VH of XENP020662

SEQ ID NO: 24943 - protein, 5 aa, synthetic construct
  REGION 1..5: note = Description of Artificial Sequence: Synthetic peptide
  REGION 1..5: note = XENP020662 vhCDR1
DAWMD

SEQ ID NO: 24944 - protein, 19 aa, synthetic construct
  REGION 1..19: note = Description of Artificial Sequence: Synthetic peptide
  REGION 1..19: note = XENP020662 vhCDR2
EIRTKANNHATYYAESVKG

SEQ ID NO: 24945 - protein, 10 aa, synthetic construct
  REGION 1..10: note = Description of Artificial Sequence: Synthetic peptide
  REGION 1..10: note = XENP020662 vhCDR3
LANWDWYFDV

SEQ ID NO: 24946 - protein, 218 aa, synthetic construct
  REGION 1..218: note = Description of Artificial Sequence: Synthetic polypeptide
  REGION 1..218: note = XENP020662 7G8_H0_L0.58_IgG1_PVA_/S267K Light Chain
DTVLTQSPASLAVSLGQRATISCKASQSVDYDGDSYMNWYQQKPGQPPKLLIYAASHLESGIPARLSGSGSGTDFTLNIHPVEEEDAATYYCQQSNEDPFTFGSGTKLEVKRTVAAPSVFIFPPSDEQLKSGTASVVCLLNNFYPREAKVQWKVDNALQSGNSQESVTEQDSKDSTYSLSSTLTLSKADYEKHKVYACEVTHQGLSSPVTKSFNRGEC

SEQ ID NO: 24947 - protein, 111 aa, synthetic construct
  REGION 1..111: note = Description of Artificial Sequence: Synthetic polypeptide
  REGION 1..111: note = VL of XENP020662
DTVLTQSPASLAVSLGQRATISCKASQSVDYDGDSYMNWYQQKPGQPPKLLIYAASHLESGIPARLSGSGSGTDFTLNIHPVEEEDAATYYCQQSNEDPFTFGSGTKLEVK

SEQ ID NO: 24948 - protein, 15 aa, synthetic construct
  REGION 1..15: note = Description of Artificial Sequence: Synthetic peptide
  REGION 1..15: note = XENP020662 vlCDR1
KASQSVDYDGDSYMN

SEQ ID NO: 24949 - protein, 7 aa, synthetic construct
  REGION 1..7: note = Description of Artificial Sequence: Synthetic peptide
  REGION 1..7: note = XENP020662 vlCDR2
AASHLES

SEQ ID NO: 24950 - protein, 9 aa, synthetic construct
  REGION 1..9: note = Description of Artificial Sequence: Synthetic peptide
  REGION 1..9: note = XENP020662 vlCDR3
QQSNEDPFT

SEQ ID NO: 24951 - protein, 450 aa, synthetic construct; identical to SEQ ID NO: 22261
  REGION 1..450: note = Description of Artificial Sequence: Synthetic polypeptide
  REGION 1..450: note = XENP020663 7G8_H0_L0.59_IgG1_PVA_/S267K Heavy Chain

SEQ ID NO: 24952 - protein, 121 aa, synthetic construct; identical to SEQ ID NO: 22262
  REGION 1..121: note = Description of Artificial Sequence: Synthetic polypeptide
  REGION 1..121: note = VH of XENP020663

SEQ ID NO: 24953 - protein, 5 aa, synthetic construct
  REGION 1..5: note = Description of Artificial Sequence: Synthetic peptide
  REGION 1..5: note = XENP020663 vhCDR1
DAWMD

SEQ ID NO: 24954 - protein, 19 aa, synthetic construct
  REGION 1..19: note = Description of Artificial Sequence: Synthetic peptide
  REGION 1..19: note = XENP020663 vhCDR2
EIRTKANNHATYYAESVKG

SEQ ID NO: 24955 - protein, 10 aa, synthetic construct
  REGION 1..10: note = Description of Artificial Sequence: Synthetic peptide
  REGION 1..10: note = XENP020663 vhCDR3
LANWDWYFDV

SEQ ID NO: 24956 - protein, 218 aa, synthetic construct
  REGION 1..218: note = Description of Artificial Sequence: Synthetic polypeptide
  REGION 1..218: note = XENP020663 7G8_H0_L0.59_IgG1_PVA_/S267K Light Chain
DTVLTQSPASLAVSLGQRATISCKASQSVDYDGDSYMNWYQQKPGQPPKLLIYAASELESGIPARLSGSGSGTDFTLNIHPVEEEDAATYYCQQSNEDPFTFGSGTKLEVKRTVAAPSVFIFPPSDEQLKSGTASVVCLLNNFYPREAKVQWKVDNALQSGNSQESVTEQDSKDSTYSLSSTLTLSKADYEKHKVYACEVTHQGLSSPVTKSFNRGEC

SEQ ID NO: 24957 - protein, 111 aa, synthetic construct
  REGION 1..111: note = Description of Artificial Sequence: Synthetic polypeptide
  REGION 1..111: note = VL of XENP020663
DTVLTQSPASLAVSLGQRATISCKASQSVDYDGDSYMNWYQQKPGQPPKLLIYAASELESGIPARLSGSGSGTDFTLNIHPVEEEDAATYYCQQSNEDPFTFGSGTKLEVK

SEQ ID NO: 24958 - protein, 15 aa, synthetic construct
  REGION 1..15: note = Description of Artificial Sequence: Synthetic peptide
  REGION 1..15: note = XENP020663 vlCDR1
KASQSVDYDGDSYMN

SEQ ID NO: 24959 - protein, 7 aa, synthetic construct
  REGION 1..7: note = Description of Artificial Sequence: Synthetic peptide
  REGION 1..7: note = XENP020663 vlCDR2
AASELES

SEQ ID NO: 24960 - protein, 9 aa, synthetic construct
  REGION 1..9: note = Description of Artificial Sequence: Synthetic peptide
  REGION 1..9: note = XENP020663 vlCDR3
QQSNEDPFT

SEQ ID NO: 24961 - protein, 450 aa, synthetic construct; identical to SEQ ID NO: 22261
  REGION 1..450: note = Description of Artificial Sequence: Synthetic polypeptide
  REGION 1..450: note = XENP020664 7G8_H0_L0.60_IgG1_PVA_/S267K Heavy Chain

SEQ ID NO: 24962 - protein, 121 aa, synthetic construct; identical to SEQ ID NO: 22262
  REGION 1..121: note = Description of Artificial Sequence: Synthetic polypeptide
  REGION 1..121: note = VH of XENP020664

SEQ ID NO: 24963 - protein, 5 aa, synthetic construct
  REGION 1..5: note = Description of Artificial Sequence: Synthetic peptide
  REGION 1..5: note = XENP020664 vhCDR1
DAWMD

SEQ ID NO: 24964 - protein, 19 aa, synthetic construct
  REGION 1..19: note = Description of Artificial Sequence: Synthetic peptide
  REGION 1..19: note = XENP020664 vhCDR2
EIRTKANNHATYYAESVKG

SEQ ID NO: 24965 - protein, 10 aa, synthetic construct
  REGION 1..10: note = Description of Artificial Sequence: Synthetic peptide
  REGION 1..10: note = XENP020664 vhCDR3
LANWDWYFDV

SEQ ID NO: 24966 - protein, 218 aa, synthetic construct
  REGION 1..218: note = Description of Artificial Sequence: Synthetic polypeptide
  REGION 1..218: note = XENP020664 7G8_H0_L0.60_IgG1_PVA_/S267K Light Chain
DTVLTQSPASLAVSLGQRATISCKASQSVDYDGDSYMNWYQQKPGQPPKLLIYAASSLESGIPARLSGSGSGTDFTLNIHPVEEEDAATYYCQQSNEDPFTFGSGTKLEVKRTVAAPSVFIFPPSDEQLKSGTASVVCLLNNFYPREAKVQWKVDNALQSGNSQESVTEQDSKDSTYSLSSTLTLSKADYEKHKVYACEVTHQGLSSPVTKSFNRGEC

SEQ ID NO: 24967 - protein, 111 aa, synthetic construct
  REGION 1..111: note = Description of Artificial Sequence: Synthetic polypeptide
  REGION 1..111: note = VL of XENP020664
DTVLTQSPASLAVSLGQRATISCKASQSVDYDGDSYMNWYQQKPGQPPKLLIYAASSLESGIPARLSGSGSGTDFTLNIHPVEEEDAATYYCQQSNEDPFTFGSGTKLEVK

SEQ ID NO: 24968 - protein, 15 aa, synthetic construct
  REGION 1..15: note = Description of Artificial Sequence: Synthetic peptide
  REGION 1..15: note = XENP020664 vlCDR1
KASQSVDYDGDSYMN

SEQ ID NO: 24969 - protein, 7 aa, synthetic construct
  REGION 1..7: note = Description of Artificial Sequence: Synthetic peptide
  REGION 1..7: note = XENP020664 vlCDR2
AASSLES

SEQ ID NO: 24970 - protein, 9 aa, synthetic construct
  REGION 1..9: note = Description of Artificial Sequence: Synthetic peptide
  REGION 1..9: note = XENP020664 vlCDR3
QQSNEDPFT

SEQ ID NO: 24971 - protein, 450 aa, synthetic construct; identical to SEQ ID NO: 22261
  REGION 1..450: note = Description of Artificial Sequence: Synthetic polypeptide
  REGION 1..450: note = XENP020665 7G8_H0_L0.61_IgG1_PVA_/S267K Heavy Chain

SEQ ID NO: 24972 - protein, 121 aa, synthetic construct; identical to SEQ ID NO: 22262
  REGION 1..121: note = Description of Artificial Sequence: Synthetic polypeptide
  REGION 1..121: note = VH of XENP020665

SEQ ID NO: 24973 - protein, 5 aa, synthetic construct
  REGION 1..5: note = Description of Artificial Sequence: Synthetic peptide
  REGION 1..5: note = XENP020665 vhCDR1
DAWMD

SEQ ID NO: 24974 - protein, 19 aa, synthetic construct
  REGION 1..19: note = Description of Artificial Sequence: Synthetic peptide
  REGION 1..19: note = XENP020665 vhCDR2
EIRTKANNHATYYAESVKG

SEQ ID NO: 24975 - protein, 10 aa, synthetic construct
  REGION 1..10: note = Description of Artificial Sequence: Synthetic peptide
  REGION 1..10: note = XENP020665 vhCDR3
LANWDWYFDV

SEQ ID NO: 24976 - protein, 218 aa, synthetic construct
  REGION 1..218: note = Description of Artificial Sequence: Synthetic polypeptide
  REGION 1..218: note = XENP020665 7G8_H0_L0.61_IgG1_PVA_/S267K Light Chain
DTVLTQSPASLAVSLGQRATISCKASQSVDYDGDSYMNWYQQKPGQPPKLLIYAASRLESGIPARLSGSGSGTDFTLNIHPVEEEDAATYYCQQSNEDPFTFGSGTKLEVKRTVAAPSVFIFPPSDEQLKSGTASVVCLLNNFYPREAKVQWKVDNALQSGNSQESVTEQDSKDSTYSLSSTLTLSKADYEKHKVYACEVTHQGLSSPVTKSFNRGEC

SEQ ID NO: 24977 - protein, 111 aa, synthetic construct
  REGION 1..111: note = Description of Artificial Sequence: Synthetic polypeptide
  REGION 1..111: note = VL of XENP020665
DTVLTQSPASLAVSLGQRATISCKASQSVDYDGDSYMNWYQQKPGQPPKLLIYAASRLESGIPARLSGSGSGTDFTLNIHPVEEEDAATYYCQQSNEDPFTFGSGTKLEVK

SEQ ID NO: 24978 - protein, 15 aa, synthetic construct
  REGION 1..15: note = Description of Artificial Sequence: Synthetic peptide
  REGION 1..15: note = XENP020665 vlCDR1
KASQSVDYDGDSYMN

SEQ ID NO: 24979 - protein, 7 aa, synthetic construct
  REGION 1..7: note = Description of Artificial Sequence: Synthetic peptide
  REGION 1..7: note = XENP020665 vlCDR2
AASRLES

SEQ ID NO: 24980 - protein, 9 aa, synthetic construct
  REGION 1..9: note = Description of Artificial Sequence: Synthetic peptide
  REGION 1..9: note = XENP020665 vlCDR3
QQSNEDPFT

SEQ ID NO: 24981 - protein, 450 aa, synthetic construct; identical to SEQ ID NO: 22261
  REGION 1..450: note = Description of Artificial Sequence: Synthetic polypeptide
  REGION 1..450: note = XENP020666 7G8_H0_L0.62_IgG1_PVA_/S267K Heavy Chain

SEQ ID NO: 24982 - protein, 121 aa, synthetic construct; identical to SEQ ID NO: 22262
  REGION 1..121: note = Description of Artificial Sequence: Synthetic polypeptide
  REGION 1..121: note = VH of XENP020666

SEQ ID NO: 24983 - protein, 5 aa, synthetic construct
  REGION 1..5: note = Description of Artificial Sequence: Synthetic peptide
  REGION 1..5: note = XENP020666 vhCDR1
DAWMD

SEQ ID NO: 24984 - protein, 19 aa, synthetic construct
  REGION 1..19: note = Description of Artificial Sequence: Synthetic peptide
  REGION 1..19: note = XENP020666 vhCDR2
EIRTKANNHATYYAESVKG

SEQ ID NO: 24985 - protein, 10 aa, synthetic construct
  REGION 1..10: note = Description of Artificial Sequence: Synthetic peptide
  REGION 1..10: note = XENP020666 vhCDR3
LANWDWYFDV

SEQ ID NO: 24986 - protein, 218 aa, synthetic construct
  REGION 1..218: note = Description of Artificial Sequence: Synthetic polypeptide
  REGION 1..218: note = XENP020666 7G8_H0_L0.62_IgG1_PVA_/S267K Light Chain
DTVLTQSPASLAVSLGQRATISCKASQSVDYDGDSYMNWYQQKPGQPPKLLIYAASLLESGIPARLSGSGSGTDFTLNIHPVEEEDAATYYCQQSNEDPFTFGSGTKLEVKRTVAAPSVFIFPPSDEQLKSGTASVVCLLNNFYPREAKVQWKVDNALQSGNSQESVTEQDSKDSTYSLSSTLTLSKADYEKHKVYACEVTHQGLSSPVTKSFNRGEC

SEQ ID NO: 24987 - protein, 111 aa, synthetic construct
  REGION 1..111: note = Description of Artificial Sequence: Synthetic polypeptide
  REGION 1..111: note = VL of XENP020666
DTVLTQSPASLAVSLGQRATISCKASQSVDYDGDSYMNWYQQKPGQPPKLLIYAASLLESGIPARLSGSGSGTDFTLNIHPVEEEDAATYYCQQSNEDPFTFGSGTKLEVK

SEQ ID NO: 24988 - protein, 15 aa, synthetic construct
  REGION 1..15: note = Description of Artificial Sequence: Synthetic peptide
  REGION 1..15: note = XENP020666 vlCDR1
KASQSVDYDGDSYMN

SEQ ID NO: 24989 - protein, 7 aa, synthetic construct
  REGION 1..7: note = Description of Artificial Sequence: Synthetic peptide
  REGION 1..7: note = XENP020666 vlCDR2
AASLLES

SEQ ID NO: 24990 - protein, 9 aa, synthetic construct
  REGION 1..9: note = Description of Artificial Sequence: Synthetic peptide
  REGION 1..9: note = XENP020666 vlCDR3
QQSNEDPFT

SEQ ID NO: 24991 - protein, 450 aa, synthetic construct; identical to SEQ ID NO: 22261
  REGION 1..450: note = Description of Artificial Sequence: Synthetic polypeptide
  REGION 1..450: note = XENP020667 7G8_H0_L0.63_IgG1_PVA_/S267K Heavy Chain

SEQ ID NO: 24992 - protein, 121 aa, synthetic construct; identical to SEQ ID NO: 22262
  REGION 1..121: note = Description of Artificial Sequence: Synthetic polypeptide
  REGION 1..121: note = VH of XENP020667

SEQ ID NO: 24993 - protein, 5 aa, synthetic construct
  REGION 1..5: note = Description of Artificial Sequence: Synthetic peptide
  REGION 1..5: note = XENP020667 vhCDR1
DAWMD

SEQ ID NO: 24994 - protein, 19 aa, synthetic construct
  REGION 1..19: note = Description of Artificial Sequence: Synthetic peptide
  REGION 1..19: note = XENP020667 vhCDR2
EIRTKANNHATYYAESVKG

SEQ ID NO: 24995 - protein, 10 aa, synthetic construct
  REGION 1..10: note = Description of Artificial Sequence: Synthetic peptide
  REGION 1..10: note = XENP020667 vhCDR3
LANWDWYFDV

SEQ ID NO: 24996 - protein, 218 aa, synthetic construct
  REGION 1..218: note = Description of Artificial Sequence: Synthetic polypeptide
  REGION 1..218: note = XENP020667 7G8_H0_L0.63_IgG1_PVA_/S267K Light Chain
DTVLTQSPASLAVSLGQRATISCKASQSVDYDGDSYMNWYQQKPGQPPKLLIYAASTLESGIPARLSGSGSGTDFTLNIHPVEEEDAATYYCQQSNEDPFTFGSGTKLEVKRTVAAPSVFIFPPSDEQLKSGTASVVCLLNNFYPREAKVQWKVDNALQSGNSQESVTEQDSKDSTYSLSSTLTLSKADYEKHKVYACEVTHQGLSSPVTKSFNRGEC

SEQ ID NO: 24997 - protein, 111 aa, synthetic construct
  REGION 1..111: note = Description of Artificial Sequence: Synthetic polypeptide
  REGION 1..111: note = VL of XENP020667
DTVLTQSPASLAVSLGQRATISCKASQSVDYDGDSYMNWYQQKPGQPPKLLIYAASTLESGIPARLSGSGSGTDFTLNIHPVEEEDAATYYCQQSNEDPFTFGSGTKLEVK

SEQ ID NO: 24998 - protein, 15 aa, synthetic construct
  REGION 1..15: note = Description of Artificial Sequence: Synthetic peptide
  REGION 1..15: note = XENP020667 vlCDR1
KASQSVDYDGDSYMN

SEQ ID NO: 24999 - protein, 7 aa, synthetic construct
  REGION 1..7: note = Description of Artificial Sequence: Synthetic peptide
  REGION 1..7: note = XENP020667 vlCDR2
AASTLES

SEQ ID NO: 25000 - protein, 9 aa, synthetic construct
  REGION 1..9: note = Description of Artificial Sequence: Synthetic peptide
  REGION 1..9: note = XENP020667 vlCDR3
QQSNEDPFT

SEQ ID NO: 25001 - protein, 450 aa, synthetic construct; identical to SEQ ID NO: 22261
  REGION 1..450: note = Description of Artificial Sequence: Synthetic polypeptide
  REGION 1..450: note = XENP020668 7G8_H0_L0.64_IgG1_PVA_/S267K Heavy Chain

SEQ ID NO: 25002 - protein, 121 aa, synthetic construct; identical to SEQ ID NO: 22262
  REGION 1..121: note = Description of Artificial Sequence: Synthetic polypeptide
  REGION 1..121: note = VH of XENP020668

SEQ ID NO: 25003 - protein, 5 aa, synthetic construct
  REGION 1..5: note = Description of Artificial Sequence: Synthetic peptide
  REGION 1..5: note = XENP020668 vhCDR1
DAWMD

SEQ ID NO: 25004 - protein, 19 aa, synthetic construct
  REGION 1..19: note = Description of Artificial Sequence: Synthetic peptide
  REGION 1..19: note = XENP020668 vhCDR2
EIRTKANNHATYYAESVKG

SEQ ID NO: 25005 - protein, 10 aa, synthetic construct
  REGION 1..10: note = Description of Artificial Sequence: Synthetic peptide
  REGION 1..10: note = XENP020668 vhCDR3
LANWDWYFDV

SEQ ID NO: 25006 - protein, 218 aa, synthetic construct
  REGION 1..218: note = Description of Artificial Sequence: Synthetic polypeptide
  REGION 1..218: note = XENP020668 7G8_H0_L0.64_IgG1_PVA_/S267K Light Chain
DTVLTQSPASLAVSLGQRATISCKASQSVDYDGDSYMNWYQQKPGQPPKLLIYAASGLESGIPARLSGSGSGTDFTLNIHPVEEEDAATYYCQQSNEDPFTFGSGTKLEVKRTVAAPSVFIFPPSDEQLKSGTASVVCLLNNFYPREAKVQWKVDNALQSGNSQESVTEQDSKDSTYSLSSTLTLSKADYEKHKVYACEVTHQGLSSPVTKSFNRGEC

SEQ ID NO: 25007 - protein, 111 aa, synthetic construct
  REGION 1..111: note = Description of Artificial Sequence: Synthetic polypeptide
  REGION 1..111: note = VL of XENP020668
DTVLTQSPASLAVSLGQRATISCKASQSVDYDGDSYMNWYQQKPGQPPKLLIYAASGLESGIPARLSGSGSGTDFTLNIHPVEEEDAATYYCQQSNEDPFTFGSGTKLEVK

SEQ ID NO: 25008 - protein, 15 aa, synthetic construct
  REGION 1..15: note = Description of Artificial Sequence: Synthetic peptide
  REGION 1..15: note = XENP020668 vlCDR1
KASQSVDYDGDSYMN

SEQ ID NO: 25009 - protein, 7 aa, synthetic construct
  REGION 1..7: note = Description of Artificial Sequence: Synthetic peptide
  REGION 1..7: note = XENP020668 vlCDR2
AASGLES

SEQ ID NO: 25010 - protein, 9 aa, synthetic construct
  REGION 1..9: note = Description of Artificial Sequence: Synthetic peptide
  REGION 1..9: note = XENP020668 vlCDR3
QQSNEDPFT

SEQ ID NO: 25011 - protein, 450 aa, synthetic construct; identical to SEQ ID NO: 22261
  REGION 1..450: note = Description of Artificial Sequence: Synthetic polypeptide
  REGION 1..450: note = XENP020669 7G8_H0_L0.65_IgG1_PVA_/S267K Heavy Chain

SEQ ID NO: 25012 - protein, 121 aa, synthetic construct; identical to SEQ ID NO: 22262
  REGION 1..121: note = Description of Artificial Sequence: Synthetic polypeptide
  REGION 1..121: note = VH of XENP020669

SEQ ID NO: 25013 - protein, 5 aa, synthetic construct
  REGION 1..5: note = Description of Artificial Sequence: Synthetic peptide
  REGION 1..5: note = XENP020669 vhCDR1
DAWMD

SEQ ID NO: 25014 - protein, 19 aa, synthetic construct
  REGION 1..19: note = Description of Artificial Sequence: Synthetic peptide
  REGION 1..19: note = XENP020669 vhCDR2
EIRTKANNHATYYAESVKG

SEQ ID NO: 25015 - protein, 10 aa, synthetic construct
  REGION 1..10: note = Description of Artificial Sequence: Synthetic peptide
  REGION 1..10: note = XENP020669 vhCDR3
LANWDWYFDV

SEQ ID NO: 25016 - protein, 218 aa, synthetic construct
  REGION 1..218: note = Description of Artificial Sequence: Synthetic polypeptide
  REGION 1..218: note = XENP020669 7G8_H0_L0.65_IgG1_PVA_/S267K Light Chain
DTVLTQSPASLAVSLGQRATISCKASQSVDYDGDSYMNWYQQKPGQPPKLLIYAASYLESGIPARLSGSGSGTDFTLNIHPVEEEDAATYYCQQSNEDPFTFGSGTKLEVKRTVAAPSVFIFPPSDEQLKSGTASVVCLLNNFYPREAKVQWKVDNALQSGNSQESVTEQDSKDSTYSLSSTLTLSKADYEKHKVYACEVTHQGLSSPVTKSFNRGEC

SEQ ID NO: 25017 - protein, 111 aa, synthetic construct
  REGION 1..111: note = Description of Artificial Sequence: Synthetic polypeptide
  REGION 1..111: note = VL of XENP020669
DTVLTQSPASLAVSLGQRATISCKASQSVDYDGDSYMNWYQQKPGQPPKLLIYAASYLESGIPARLSGSGSGTDFTLNIHPVEEEDAATYYCQQSNEDPFTFGSGTKLEVK

SEQ ID NO: 25018 - protein, 15 aa, synthetic construct
  REGION 1..15: note = Description of Artificial Sequence: Synthetic peptide
  REGION 1..15: note = XENP020669 vlCDR1
KASQSVDYDGDSYMN

SEQ ID NO: 25019 - protein, 7 aa, synthetic construct
  REGION 1..7: note = Description of Artificial Sequence: Synthetic peptide
  REGION 1..7: note = XENP020669 vlCDR2
AASYLES

SEQ ID NO: 25020 - protein, 9 aa, synthetic construct
  REGION 1..9: note = Description of Artificial Sequence: Synthetic peptide
  REGION 1..9: note = XENP020669 vlCDR3
QQSNEDPFT

SEQ ID NO: 25021 - protein, 450 aa, synthetic construct; identical to SEQ ID NO: 22261
  REGION 1..450: note = Description of Artificial Sequence: Synthetic polypeptide
  REGION 1..450: note = XENP020670 7G8_H0_L0.66_IgG1_PVA_/S267K Heavy Chain

SEQ ID NO: 25022 - protein, 121 aa, synthetic construct; identical to SEQ ID NO: 22262
  REGION 1..121: note = Description of Artificial Sequence: Synthetic polypeptide
  REGION 1..121: note = VH of XENP020670

SEQ ID NO: 25023 - protein, 5 aa, synthetic construct
  REGION 1..5: note = Description of Artificial Sequence: Synthetic peptide
  REGION 1..5: note = XENP020670 vhCDR1
DAWMD

SEQ ID NO: 25024 - protein, 19 aa, synthetic construct
  REGION 1..19: note = Description of Artificial Sequence: Synthetic peptide
  REGION 1..19: note = XENP020670 vhCDR2
EIRTKANNHATYYAESVKG

SEQ ID NO: 25025 - protein, 10 aa, synthetic construct
  REGION 1..10: note = Description of Artificial Sequence: Synthetic peptide
  REGION 1..10: note = XENP020670 vhCDR3
LANWDWYFDV

SEQ ID NO: 25026 - protein, 218 aa, synthetic construct
  REGION 1..218: note = Description of Artificial Sequence: Synthetic polypeptide
  REGION 1..218: note = XENP020670 7G8_H0_L0.66_IgG1_PVA_/S267K Light Chain
DTVLTQSPASLAVSLGQRATISCKASQSVDYDGDSYMNWYQQKPGQPPKLLIYAASNLQSGIPARLSGSGSGTDFTLNIHPVEEEDAATYYCQQSNEDPFTFGSGTKLEVKRTVAAPSVFIFPPSDEQLKSGTASVVCLLNNFYPREAKVQWKVDNALQSGNSQESVTEQDSKDSTYSLSSTLTLSKADYEKHKVYACEVTHQGLSSPVTKSFNRGEC

SEQ ID NO: 25027 - protein, 111 aa, synthetic construct
  REGION 1..111: note = Description of Artificial Sequence: Synthetic polypeptide
  REGION 1..111: note = VL of XENP020670
DTVLTQSPASLAVSLGQRATISCKASQSVDYDGDSYMNWYQQKPGQPPKLLIYAASNLQSGIPARLSGSGSGTDFTLNIHPVEEEDAATYYCQQSNEDPFTFGSGTKLEVK

SEQ ID NO: 25028 - protein, 15 aa, synthetic construct
  REGION 1..15: note = Description of Artificial Sequence: Synthetic peptide
  REGION 1..15: note = XENP020670 vlCDR1
KASQSVDYDGDSYMN

SEQ ID NO: 25029 - protein, 7 aa, synthetic construct
  REGION 1..7: note = Description of Artificial Sequence: Synthetic peptide
  REGION 1..7: note = XENP020670 vlCDR2
AASNLQS

SEQ ID NO: 25030 - protein, 9 aa, synthetic construct
  REGION 1..9: note = Description of Artificial Sequence: Synthetic peptide
  REGION 1..9: note = XENP020670 vlCDR3
QQSNEDPFT

SEQ ID NO: 25031 - protein, 450 aa, synthetic construct; identical to SEQ ID NO: 22261
  REGION 1..450: note = Description of Artificial Sequence: Synthetic polypeptide
  REGION 1..450: note = XENP020671 7G8_H0_L0.67_IgG1_PVA_/S267K Heavy Chain

SEQ ID NO: 25032 - protein, 121 aa, synthetic construct; identical to SEQ ID NO: 22262
  REGION 1..121: note = Description of Artificial Sequence: Synthetic polypeptide
  REGION 1..121: note = VH of XENP020671

SEQ ID NO: 25033 - protein, 5 aa, synthetic construct
  REGION 1..5: note = Description of Artificial Sequence: Synthetic peptide
  REGION 1..5: note = XENP020671 vhCDR1
DAWMD

SEQ ID NO: 25034 - protein, 19 aa, synthetic construct
  REGION 1..19: note = Description of Artificial Sequence: Synthetic peptide
  REGION 1..19: note = XENP020671 vhCDR2
EIRTKANNHATYYAESVKG

SEQ ID NO: 25035 - protein, 10 aa, synthetic construct
  REGION 1..10: note = Description of Artificial Sequence: Synthetic peptide
  REGION 1..10: note = XENP020671 vhCDR3
LANWDWYFDV

SEQ ID NO: 25036 - protein, 218 aa, synthetic construct
  REGION 1..218: note = Description of Artificial Sequence: Synthetic polypeptide
  REGION 1..218: note = XENP020671 7G8_H0_L0.67_IgG1_PVA_/S267K Light Chain
DTVLTQSPASLAVSLGQRATISCKASQSVDYDGDSYMNWYQQKPGQPPKLLIYAASNLDSGIPARLSGSGSGTDFTLNIHPVEEEDAATYYCQQSNEDPFTFGSGTKLEVKRTVAAPSVFIFPPSDEQLKSGTASVVCLLNNFYPREAKVQWKVDNALQSGNSQESVTEQDSKDSTYSLSSTLTLSKADYEKHKVYACEVTHQGLSSPVTKSFNRGEC

SEQ ID NO: 25037 - protein, 111 aa, synthetic construct
  REGION 1..111: note = Description of Artificial Sequence: Synthetic polypeptide
  REGION 1..111: note = VL of XENP020671
DTVLTQSPASLAVSLGQRATISCKASQSVDYDGDSYMNWYQQKPGQPPKLLIYAASNLDSGIPARLSGSGSGTDFTLNIHPVEEEDAATYYCQQSNEDPFTFGSGTKLEVK

SEQ ID NO: 25038 - protein, 15 aa, synthetic construct
  REGION 1..15: note = Description of Artificial Sequence: Synthetic peptide
  REGION 1..15: note = XENP020671 vlCDR1
KASQSVDYDGDSYMN

SEQ ID NO: 25039 - protein, 7 aa, synthetic construct
  REGION 1..7: note = Description of Artificial Sequence: Synthetic peptide
  REGION 1..7: note = XENP020671 vlCDR2
AASNLDS

SEQ ID NO: 25040 - protein, 9 aa, synthetic construct
  REGION 1..9: note = Description of Artificial Sequence: Synthetic peptide
  REGION 1..9: note = XENP020671 vlCDR3
QQSNEDPFT

SEQ ID NO: 25041 - protein, 450 aa, synthetic construct; identical to SEQ ID NO: 22261
  REGION 1..450: note = Description of Artificial Sequence: Synthetic polypeptide
  REGION 1..450: note = XENP020672 7G8_H0_L0.68_IgG1_PVA_/S267K Heavy Chain

SEQ ID NO: 25042 - protein, 121 aa, synthetic construct; identical to SEQ ID NO: 22262
  REGION 1..121: note = Description of Artificial Sequence: Synthetic polypeptide
  REGION 1..121: note = VH of XENP020672

SEQ ID NO: 25043 - protein, 5 aa, synthetic construct
  REGION 1..5: note = Description of Artificial Sequence: Synthetic peptide
  REGION 1..5: note = XENP020672 vhCDR1
DAWMD

SEQ ID NO: 25044 - protein, 19 aa, synthetic construct
  REGION 1..19: note = Description of Artificial Sequence: Synthetic peptide
  REGION 1..19: note = XENP020672 vhCDR2
EIRTKANNHATYYAESVKG

SEQ ID NO: 25045 - protein, 10 aa, synthetic construct
  REGION 1..10: note = Description of Artificial Sequence: Synthetic peptide
  REGION 1..10: note = XENP020672 vhCDR3
LANWDWYFDV

SEQ ID NO: 25046 - protein, 218 aa, synthetic construct
  REGION 1..218: note = Description of Artificial Sequence: Synthetic polypeptide
  REGION 1..218: note = XENP020672 7G8_H0_L0.68_IgG1_PVA_/S267K Light Chain
DTVLTQSPASLAVSLGQRATISCKASQSVDYDGDSYMNWYQQKPGQPPKLLIYAASNLKSGIPARLSGSGSGTDFTLNIHPVEEEDAATYYCQQSNEDPFTFGSGTKLEVKRTVAAPSVFIFPPSDEQLKSGTASVVCLLNNFYPREAKVQWKVDNALQSGNSQESVTEQDSKDSTYSLSSTLTLSKADYEKHKVYACEVTHQGLSSPVTKSFNRGEC

SEQ ID NO: 25047 - protein, 111 aa, synthetic construct
  REGION 1..111: note = Description of Artificial Sequence: Synthetic polypeptide
  REGION 1..111: note = VL of XENP020672
DTVLTQSPASLAVSLGQRATISCKASQSVDYDGDSYMNWYQQKPGQPPKLLIYAASNLKSGIPARLSGSGSGTDFTLNIHPVEEEDAATYYCQQSNEDPFTFGSGTKLEVK

SEQ ID NO: 25048 - protein, 15 aa, synthetic construct
  REGION 1..15: note = Description of Artificial Sequence: Synthetic peptide
  REGION 1..15: note = XENP020672 vlCDR1
KASQSVDYDGDSYMN

SEQ ID NO: 25049 - protein, 7 aa, synthetic construct
  REGION 1..7: note = Description of Artificial Sequence: Synthetic peptide
  REGION 1..7: note = XENP020672 vlCDR2
AASNLKS

SEQ ID NO: 25050 - protein, 9 aa, synthetic construct
  REGION 1..9: note = Description of Artificial Sequence: Synthetic peptide
  REGION 1..9: note = XENP020672 vlCDR3
QQSNEDPFT

SEQ ID NO: 25051 - protein, 450 aa, synthetic construct; identical to SEQ ID NO: 22261
  REGION 1..450: note = Description of Artificial Sequence: Synthetic polypeptide
  REGION 1..450: note = XENP020673 7G8_H0_L0.69_IgG1_PVA_/S267K Heavy Chain

SEQ ID NO: 25052 - protein, 121 aa, synthetic construct; identical to SEQ ID NO: 22262
  REGION 1..121: note = Description of Artificial Sequence: Synthetic polypeptide
  REGION 1..121: note = VH of XENP020673

SEQ ID NO: 25053 - protein, 5 aa, synthetic construct
  REGION 1..5: note = Description of Artificial Sequence: Synthetic peptide
  REGION 1..5: note = XENP020673 vhCDR1
DAWMD

SEQ ID NO: 25054 - protein, 19 aa, synthetic construct
  REGION 1..19: note = Description of Artificial Sequence: Synthetic peptide
  REGION 1..19: note = XENP020673 vhCDR2
EIRTKANNHATYYAESVKG

SEQ ID NO: 25055 - protein, 10 aa, synthetic construct
  REGION 1..10: note = Description of Artificial Sequence: Synthetic peptide
  REGION 1..10: note = XENP020673 vhCDR3
LANWDWYFDV

SEQ ID NO: 25056 - protein, 218 aa, synthetic construct
  REGION 1..218: note = Description of Artificial Sequence: Synthetic polypeptide
  REGION 1..218: note = XENP020673 7G8_H0_L0.69_IgG1_PVA_/S267K Light Chain
DTVLTQSPASLAVSLGQRATISCKASQSVDYDGDSYMNWYQQKPGQPPKLLIYAASNLHSGIPARLSGSGSGTDFTLNIHPVEEEDAATYYCQQSNEDPFTFGSGTKLEVKRTVAAPSVFIFPPSDEQLKSGTASVVCLLNNFYPREAKVQWKVDNALQSGNSQESVTEQDSKDSTYSLSSTLTLSKADYEKHKVYACEVTHQGLSSPVTKSFNRGEC

SEQ ID NO: 25057 - protein, 111 aa, synthetic construct
  REGION 1..111: note = Description of Artificial Sequence: Synthetic polypeptide
  REGION 1..111: note = VL of XENP020673
DTVLTQSPASLAVSLGQRATISCKASQSVDYDGDSYMNWYQQKPGQPPKLLIYAASNLHSGIPARLSGSGSGTDFTLNIHPVEEEDAATYYCQQSNEDPFTFGSGTKLEVK

SEQ ID NO: 25058 - protein, 15 aa, synthetic construct
  REGION 1..15: note = Description of Artificial Sequence: Synthetic peptide
  REGION 1..15: note = XENP020673 vlCDR1
KASQSVDYDGDSYMN

SEQ ID NO: 25059 - protein, 7 aa, synthetic construct
  REGION 1..7: note = Description of Artificial Sequence: Synthetic peptide
  REGION 1..7: note = XENP020673 vlCDR2
AASNLHS

SEQ ID NO: 25060 - protein, 9 aa, synthetic construct
  REGION 1..9: note = Description of Artificial Sequence: Synthetic peptide
  REGION 1..9: note = XENP020673 vlCDR3
QQSNEDPFT

SEQ ID NO: 25061 - protein, 450 aa, synthetic construct; identical to SEQ ID NO: 22261
  REGION 1..450: note = Description of Artificial Sequence: Synthetic polypeptide
  REGION 1..450: note = XENP020674 7G8_H0_L0.70_IgG1_PVA_/S267K Heavy Chain

SEQ ID NO: 25062 - protein, 121 aa, synthetic construct; identical to SEQ ID NO: 22262
  REGION 1..121: note = Description of Artificial Sequence: Synthetic polypeptide
  REGION 1..121: note = VH of XENP020674

SEQ ID NO: 25063 - protein, 5 aa, synthetic construct
  REGION 1..5: note = Description of Artificial Sequence: Synthetic peptide
  REGION 1..5: note = XENP020674 vhCDR1
DAWMD

SEQ ID NO: 25064 - protein, 19 aa, synthetic construct
  REGION 1..19: note = Description of Artificial Sequence: Synthetic peptide
  REGION 1..19: note = XENP020674 vhCDR2
EIRTKANNHATYYAESVKG

SEQ ID NO: 25065 - protein, 10 aa, synthetic construct
  REGION 1..10: note = Description of Artificial Sequence: Synthetic peptide
  REGION 1..10: note = XENP020674 vhCDR3
LANWDWYFDV

SEQ ID NO: 25066 - protein, 218 aa, synthetic construct
  REGION 1..218: note = Description of Artificial Sequence: Synthetic polypeptide
  REGION 1..218: note = XENP020674 7G8_H0_L0.70_IgG1_PVA_/S267K Light Chain
DTVLTQSPASLAVSLGQRATISCKASQSVDYDGDSYMNWYQQKPGQPPKLLIYAASNLASGIPARLSGSGSGTDFTLNIHPVEEEDAATYYCQQSNEDPFTFGSGTKLEVKRTVAAPSVFIFPPSDEQLKSGTASVVCLLNNFYPREAKVQWKVDNALQSGNSQESVTEQDSKDSTYSLSSTLTLSKADYEKHKVYACEVTHQGLSSPVTKSFNRGEC

SEQ ID NO: 25067 - protein, 111 aa, synthetic construct
  REGION 1..111: note = Description of Artificial Sequence: Synthetic polypeptide
  REGION 1..111: note = VL of XENP020674
DTVLTQSPASLAVSLGQRATISCKASQSVDYDGDSYMNWYQQKPGQPPKLLIYAASNLASGIPARLSGSGSGTDFTLNIHPVEEEDAATYYCQQSNEDPFTFGSGTKLEVK

SEQ ID NO: 25068 - protein, 15 aa, synthetic construct
  REGION 1..15: note = Description of Artificial Sequence: Synthetic peptide
  REGION 1..15: note = XENP020674 vlCDR1
KASQSVDYDGDSYMN

SEQ ID NO: 25069 - protein, 7 aa, synthetic construct
  REGION 1..7: note = Description of Artificial Sequence: Synthetic peptide
  REGION 1..7: note = XENP020674 vlCDR2
AASNLAS

SEQ ID NO: 25070 - protein, 9 aa, synthetic construct
  REGION 1..9: note = Description of Artificial Sequence: Synthetic peptide
  REGION 1..9: note = XENP020674 vlCDR3
QQSNEDPFT

SEQ ID NO: 25071 - protein, 450 aa, synthetic construct; identical to SEQ ID NO: 22261
  REGION 1..450: note = Description of Artificial Sequence: Synthetic polypeptide
  REGION 1..450: note = XENP020675 7G8_H0_L0.71_IgG1_PVA_/S267K Heavy Chain

SEQ ID NO: 25072 - protein, 121 aa, synthetic construct; identical to SEQ ID NO: 22262
  REGION 1..121: note = Description of Artificial Sequence: Synthetic polypeptide
  REGION 1..121: note = VH of XENP020675

SEQ ID NO: 25073 - protein, 5 aa, synthetic construct
  REGION 1..5: note = Description of Artificial Sequence: Synthetic peptide
  REGION 1..5: note = XENP020675 vhCDR1
DAWMD

SEQ ID NO: 25074 - protein, 19 aa, synthetic construct
  REGION 1..19: note = Description of Artificial Sequence: Synthetic peptide
  REGION 1..19: note = XENP020675 vhCDR2
EIRTKANNHATYYAESVKG

SEQ ID NO: 25075 - protein, 10 aa, synthetic construct
  REGION 1..10: note = Description of Artificial Sequence: Synthetic peptide
  REGION 1..10: note = XENP020675 vhCDR3
LANWDWYFDV

SEQ ID NO: 25076 - protein, 218 aa, synthetic construct
  REGION 1..218: note = Description of Artificial Sequence: Synthetic polypeptide
  REGION 1..218: note = XENP020675 7G8_H0_L0.71_IgG1_PVA_/S267K Light Chain
DTVLTQSPASLAVSLGQRATISCKASQSVDYDGDSYMNWYQQKPGQPPKLLIYAASNLGSGIPARLSGSGSGTDFTLNIHPVEEEDAATYYCQQSNEDPFTFGSGTKLEVKRTVAAPSVFIFPPSDEQLKSGTASVVCLLNNFYPREAKVQWKVDNALQSGNSQESVTEQDSKDSTYSLSSTLTLSKADYEKHKVYACEVTHQGLSSPVTKSFNRGEC

SEQ ID NO: 25077 - protein, 111 aa, synthetic construct
  REGION 1..111: note = Description of Artificial Sequence: Synthetic polypeptide
  REGION 1..111: note = VL of XENP020675
DTVLTQSPASLAVSLGQRATISCKASQSVDYDGDSYMNWYQQKPGQPPKLLIYAASNLGSGIPARLSGSGSGTDFTLNIHPVEEEDAATYYCQQSNEDPFTFGSGTKLEVK

SEQ ID NO: 25078 - protein, 15 aa, synthetic construct
  REGION 1..15: note = Description of Artificial Sequence: Synthetic peptide
  REGION 1..15: note = XENP020675 vlCDR1
KASQSVDYDGDSYMN

SEQ ID NO: 25079 - protein, 7 aa, synthetic construct
  REGION 1..7: note = Description of Artificial Sequence: Synthetic peptide
  REGION 1..7: note = XENP020675 vlCDR2
AASNLGS

SEQ ID NO: 25080 - protein, 9 aa, synthetic construct
  REGION 1..9: note = Description of Artificial Sequence: Synthetic peptide
  REGION 1..9: note = XENP020675 vlCDR3
QQSNEDPFT

SEQ ID NO: 25081 - protein, 450 aa, synthetic construct; identical to SEQ ID NO: 22261
  REGION 1..450: note = Description of Artificial Sequence: Synthetic polypeptide
  REGION 1..450: note = XENP020676 7G8_H0_L0.72_IgG1_PVA_/S267K Heavy Chain

SEQ ID NO: 25082 - protein, 121 aa, synthetic construct; identical to SEQ ID NO: 22262
  REGION 1..121: note = Description of Artificial Sequence: Synthetic polypeptide
  REGION 1..121: note = VH of XENP020676

SEQ ID NO: 25083 - protein, 5 aa, synthetic construct
  REGION 1..5: note = Description of Artificial Sequence: Synthetic peptide
  REGION 1..5: note = XENP020676 vhCDR1
DAWMD

SEQ ID NO: 25084 - protein, 19 aa, synthetic construct
  REGION 1..19: note = Description of Artificial Sequence: Synthetic peptide
  REGION 1..19: note = XENP020676 vhCDR2
EIRTKANNHATYYAESVKG

SEQ ID NO: 25085 - protein, 10 aa, synthetic construct
  REGION 1..10: note = Description of Artificial Sequence: Synthetic peptide
  REGION 1..10: note = XENP020676 vhCDR3
LANWDWYFDV

SEQ ID NO: 25086 - protein, 218 aa, synthetic construct
  REGION 1..218: note = Description of Artificial Sequence: Synthetic polypeptide
  REGION 1..218: note = XENP020676 7G8_H0_L0.72_IgG1_PVA_/S267K Light Chain
DTVLTQSPASLAVSLGQRATISCKASQSVDYDGDSYMNWYQQKPGQPPKLLIYAASNLYSGIPARLSGSGSGTDFTLNIHPVEEEDAATYYCQQSNEDPFTFGSGTKLEVKRTVAAPSVFIFPPSDEQLKSGTASVVCLLNNFYPREAKVQWKVDNALQSGNSQESVTEQDSKDSTYSLSSTLTLSKADYEKHKVYACEVTHQGLSSPVTKSFNRGEC

SEQ ID NO: 25087 - protein, 111 aa, synthetic construct
  REGION 1..111: note = Description of Artificial Sequence: Synthetic polypeptide
  REGION 1..111: note = VL of XENP020676
DTVLTQSPASLAVSLGQRATISCKASQSVDYDGDSYMNWYQQKPGQPPKLLIYAASNLYSGIPARLSGSGSGTDFTLNIHPVEEEDAATYYCQQSNEDPFTFGSGTKLEVK

SEQ ID NO: 25088 - protein, 15 aa, synthetic construct
  REGION 1..15: note = Description of Artificial Sequence: Synthetic peptide
  REGION 1..15: note = XENP020676 vlCDR1
KASQSVDYDGDSYMN

SEQ ID NO: 25089 - protein, 7 aa, synthetic construct
  REGION 1..7: note = Description of Artificial Sequence: Synthetic peptide
  REGION 1..7: note = XENP020676 vlCDR2
AASNLYS

SEQ ID NO: 25090 - protein, 9 aa, synthetic construct
  REGION 1..9: note = Description of Artificial Sequence: Synthetic peptide
  REGION 1..9: note = XENP020676 vlCDR3
QQSNEDPFT

SEQ ID NO: 25091 - protein, 450 aa, synthetic construct; identical to SEQ ID NO: 22261
  REGION 1..450: note = Description of Artificial Sequence: Synthetic polypeptide
  REGION 1..450: note = XENP020677 7G8_H0_L0.73_IgG1_PVA_/S267K Heavy Chain

SEQ ID NO: 25092 - protein, 121 aa, synthetic construct; identical to SEQ ID NO: 22262
  REGION 1..121: note = Description of Artificial Sequence: Synthetic polypeptide
  REGION 1..121: note = VH of XENP020677

SEQ ID NO: 25093 - protein, 5 aa, synthetic construct
  REGION 1..5: note = Description of Artificial Sequence: Synthetic peptide
  REGION 1..5: note = XENP020677 vhCDR1
DAWMD

SEQ ID NO: 25094 - protein, 19 aa, synthetic construct
  REGION 1..19: note = Description of Artificial Sequence: Synthetic peptide
  REGION 1..19: note = XENP020677 vhCDR2
EIRTKANNHATYYAESVKG

SEQ ID NO: 25095 - protein, 10 aa, synthetic construct
  REGION 1..10: note = Description of Artificial Sequence: Synthetic peptide
  REGION 1..10: note = XENP020677 vhCDR3
LANWDWYFDV

SEQ ID NO: 25096 - protein, 218 aa, synthetic construct
  REGION 1..218: note = Description of Artificial Sequence: Synthetic polypeptide
  REGION 1..218: note = XENP020677 7G8_H0_L0.73_IgG1_PVA_/S267K Light Chain
DTVLTQSPASLAVSLGQRATISCKASQSVDYDGDSYMNWYQQKPGQPPKLLIYAASNLISGIPARLSGSGSGTDFTLNIHPVEEEDAATYYCQQSNEDPFTFGSGTKLEVKRTVAAPSVFIFPPSDEQLKSGTASVVCLLNNFYPREAKVQWKVDNALQSGNSQESVTEQDSKDSTYSLSSTLTLSKADYEKHKVYACEVTHQGLSSPVTKSFNRGEC

SEQ ID NO: 25097 - protein, 111 aa, synthetic construct
  REGION 1..111: note = Description of Artificial Sequence: Synthetic polypeptide
  REGION 1..111: note = VL of XENP020677
DTVLTQSPASLAVSLGQRATISCKASQSVDYDGDSYMNWYQQKPGQPPKLLIYAASNLISGIPARLSGSGSGTDFTLNIHPVEEEDAATYYCQQSNEDPFTFGSGTKLEVK

SEQ ID NO: 25098 - protein, 15 aa, synthetic construct
  REGION 1..15: note = Description of Artificial Sequence: Synthetic peptide
  REGION 1..15: note = XENP020677 vlCDR1
KASQSVDYDGDSYMN

SEQ ID NO: 25099 - protein, 7 aa, synthetic construct
  REGION 1..7: note = Description of Artificial Sequence: Synthetic peptide
  REGION 1..7: note = XENP020677 vlCDR2
AASNLIS

SEQ ID NO: 25100 - protein, 9 aa, synthetic construct
  REGION 1..9: note = Description of Artificial Sequence: Synthetic peptide
  REGION 1..9: note = XENP020677 vlCDR3
QQSNEDPFT

SEQ ID NO: 25101 - protein, 450 aa, synthetic construct; identical to SEQ ID NO: 22261
  REGION 1..450: note = Description of Artificial Sequence: Synthetic polypeptide
  REGION 1..450: note = XENP020678 7G8_H0_L0.74_IgG1_PVA_/S267K Heavy Chain

SEQ ID NO: 25102 - protein, 121 aa, synthetic construct; identical to SEQ ID NO: 22262
  REGION 1..121: note = Description of Artificial Sequence: Synthetic polypeptide
  REGION 1..121: note = VH of XENP020678

SEQ ID NO: 25103 - protein, 5 aa, synthetic construct
  REGION 1..5: note = Description of Artificial Sequence: Synthetic peptide
  REGION 1..5: note = XENP020678 vhCDR1
DAWMD

SEQ ID NO: 25104 - protein, 19 aa, synthetic construct
  REGION 1..19: note = Description of Artificial Sequence: Synthetic peptide
  REGION 1..19: note = XENP020678 vhCDR2
EIRTKANNHATYYAESVKG

SEQ ID NO: 25105 - protein, 10 aa, synthetic construct
  REGION 1..10: note = Description of Artificial Sequence: Synthetic peptide
  REGION 1..10: note = XENP020678 vhCDR3
LANWDWYFDV

SEQ ID NO: 25106 - protein, 218 aa, synthetic construct
  REGION 1..218: note = Description of Artificial Sequence: Synthetic polypeptide
  REGION 1..218: note = XENP020678 7G8_H0_L0.74_IgG1_PVA_/S267K Light Chain
DTVLTQSPASLAVSLGQRATISCKASQSVDYDGDSYMNWYQQKPGQPPKLLIYAASNLESGIPARLSGSGSGTDFTLNIHPVEEEDAATYYCQQTNEDPFTFGSGTKLEVKRTVAAPSVFIFPPSDEQLKSGTASVVCLLNNFYPREAKVQWKVDNALQSGNSQESVTEQDSKDSTYSLSSTLTLSKADYEKHKVYACEVTHQGLSSPVTKSFNRGEC

SEQ ID NO: 25107 - protein, 111 aa, synthetic construct
  REGION 1..111: note = Description of Artificial Sequence: Synthetic polypeptide
  REGION 1..111: note = VL of XENP020678
DTVLTQSPASLAVSLGQRATISCKASQSVDYDGDSYMNWYQQKPGQPPKLLIYAASNLESGIPARLSGSGSGTDFTLNIHPVEEEDAATYYCQQTNEDPFTFGSGTKLEVK

SEQ ID NO: 25108 - protein, 15 aa, synthetic construct
  REGION 1..15: note = Description of Artificial Sequence: Synthetic peptide
  REGION 1..15: note = XENP020678 vlCDR1
KASQSVDYDGDSYMN

SEQ ID NO: 25109 - protein, 7 aa, synthetic construct
  REGION 1..7: note = Description of Artificial Sequence: Synthetic peptide
  REGION 1..7: note = XENP020678 vlCDR2
AASNLES

SEQ ID NO: 25110 - protein, 9 aa, synthetic construct
  REGION 1..9: note = Description of Artificial Sequence: Synthetic peptide
  REGION 1..9: note = XENP020678 vlCDR3
QQTNEDPFT

SEQ ID NO: 25111 - protein, 450 aa, synthetic construct; identical to SEQ ID NO: 22261
  REGION 1..450: note = Description of Artificial Sequence: Synthetic polypeptide
  REGION 1..450: note = XENP020679 7G8_H0_L0.75_IgG1_PVA_/S267K Heavy Chain

SEQ ID NO: 25112 - protein, 121 aa, synthetic construct; identical to SEQ ID NO: 22262
  REGION 1..121: note = Description of Artificial Sequence: Synthetic polypeptide
  REGION 1..121: note = VH of XENP020679

SEQ ID NO: 25113 - protein, 5 aa, synthetic construct
  REGION 1..5: note = Description of Artificial Sequence: Synthetic peptide
  REGION 1..5: note = XENP020679 vhCDR1
DAWMD

SEQ ID NO: 25114 - protein, 19 aa, synthetic construct
  REGION 1..19: note = Description of Artificial Sequence: Synthetic peptide
  REGION 1..19: note = XENP020679 vhCDR2
EIRTKANNHATYYAESVKG

SEQ ID NO: 25115 - protein, 10 aa, synthetic construct
  REGION 1..10: note = Description of Artificial Sequence: Synthetic peptide
  REGION 1..10: note = XENP020679 vhCDR3
LANWDWYFDV

SEQ ID NO: 25116 - protein, 218 aa, synthetic construct
  REGION 1..218: note = Description of Artificial Sequence: Synthetic polypeptide
  REGION 1..218: note = XENP020679 7G8_H0_L0.75_IgG1_PVA_/S267K Light Chain
DTVLTQSPASLAVSLGQRATISCKASQSVDYDGDSYMNWYQQKPGQPPKLLIYAASNLESGIPARLSGSGSGTDFTLNIHPVEEEDAATYYCQQANEDPFTFGSGTKLEVKRTVAAPSVFIFPPSDEQLKSGTASVVCLLNNFYPREAKVQWKVDNALQSGNSQESVTEQDSKDSTYSLSSTLTLSKADYEKHKVYACEVTHQGLSSPVTKSFNRGEC

SEQ ID NO: 25117 - protein, 111 aa, synthetic construct
  REGION 1..111: note = Description of Artificial Sequence: Synthetic polypeptide
  REGION 1..111: note = VL of XENP020679
DTVLTQSPASLAVSLGQRATISCKASQSVDYDGDSYMNWYQQKPGQPPKLLIYAASNLESGIPARLSGSGSGTDFTLNIHPVEEEDAATYYCQQANEDPFTFGSGTKLEVK

SEQ ID NO: 25118 - protein, 15 aa, synthetic construct
  REGION 1..15: note = Description of Artificial Sequence: Synthetic peptide
  REGION 1..15: note = XENP020679 vlCDR1
KASQSVDYDGDSYMN

SEQ ID NO: 25119 - protein, 7 aa, synthetic construct
  REGION 1..7: note = Description of Artificial Sequence: Synthetic peptide
  REGION 1..7: note = XENP020679 vlCDR2
AASNLES

SEQ ID NO: 25120 - protein, 9 aa, synthetic construct
  REGION 1..9: note = Description of Artificial Sequence: Synthetic peptide
  REGION 1..9: note = XENP020679 vlCDR3
QQANEDPFT

SEQ ID NO: 25121 - protein, 450 aa, synthetic construct; identical to SEQ ID NO: 22261
  REGION 1..450: note = Description of Artificial Sequence: Synthetic polypeptide
  REGION 1..450: note = XENP020680 7G8_H0_L0.76_IgG1_PVA_/S267K Heavy Chain

SEQ ID NO: 25122 - protein, 121 aa, synthetic construct; identical to SEQ ID NO: 22262
  REGION 1..121: note = Description of Artificial Sequence: Synthetic polypeptide
  REGION 1..121: note = VH of XENP020680

SEQ ID NO: 25123 - protein, 5 aa, synthetic construct
  REGION 1..5: note = Description of Artificial Sequence: Synthetic peptide
  REGION 1..5: note = XENP020680 vhCDR1
DAWMD

SEQ ID NO: 25124 - protein, 19 aa, synthetic construct
  REGION 1..19: note = Description of Artificial Sequence: Synthetic peptide
  REGION 1..19: note = XENP020680 vhCDR2
EIRTKANNHATYYAESVKG

SEQ ID NO: 25125 - protein, 10 aa, synthetic construct
  REGION 1..10: note = Description of Artificial Sequence: Synthetic peptide
  REGION 1..10: note = XENP020680 vhCDR3
LANWDWYFDV

SEQ ID NO: 25126 - protein, 218 aa, synthetic construct
  REGION 1..218: note = Description of Artificial Sequence: Synthetic polypeptide
  REGION 1..218: note = XENP020680 7G8_H0_L0.76_IgG1_PVA_/S267K Light Chain
DTVLTQSPASLAVSLGQRATISCKASQSVDYDGDSYMNWYQQKPGQPPKLLIYAASNLESGIPARLSGSGSGTDFTLNIHPVEEEDAATYYCQQQNEDPFTFGSGTKLEVKRTVAAPSVFIFPPSDEQLKSGTASVVCLLNNFYPREAKVQWKVDNALQSGNSQESVTEQDSKDSTYSLSSTLTLSKADYEKHKVYACEVTHQGLSSPVTKSFNRGEC

SEQ ID NO: 25127 - protein, 111 aa, synthetic construct
  REGION 1..111: note = Description of Artificial Sequence: Synthetic polypeptide
  REGION 1..111: note = VL of XENP020680
DTVLTQSPASLAVSLGQRATISCKASQSVDYDGDSYMNWYQQKPGQPPKLLIYAASNLESGIPARLSGSGSGTDFTLNIHPVEEEDAATYYCQQQNEDPFTFGSGTKLEVK

SEQ ID NO: 25128 - protein, 15 aa, synthetic construct
  REGION 1..15: note = Description of Artificial Sequence: Synthetic peptide
  REGION 1..15: note = XENP020680 vlCDR1
KASQSVDYDGDSYMN

SEQ ID NO: 25129 - protein, 7 aa, synthetic construct
  REGION 1..7: note = Description of Artificial Sequence: Synthetic peptide
  REGION 1..7: note = XENP020680 vlCDR2
AASNLES

SEQ ID NO: 25130 - protein, 9 aa, synthetic construct
  REGION 1..9: note = Description of Artificial Sequence: Synthetic peptide
  REGION 1..9: note = XENP020680 vlCDR3
QQQNEDPFT

SEQ ID NO: 25131 - protein, 450 aa, synthetic construct; identical to SEQ ID NO: 22261
  REGION 1..450: note = Description of Artificial Sequence: Synthetic polypeptide
  REGION 1..450: note = XENP020681 7G8_H0_L0.77_IgG1_PVA_/S267K Heavy Chain

SEQ ID NO: 25132 - protein, 121 aa, synthetic construct; identical to SEQ ID NO: 22262
  REGION 1..121: note = Description of Artificial Sequence: Synthetic polypeptide
  REGION 1..121: note = VH of XENP020681

SEQ ID NO: 25133 - protein, 5 aa, synthetic construct
  REGION 1..5: note = Description of Artificial Sequence: Synthetic peptide
  REGION 1..5: note = XENP020681 vhCDR1
DAWMD

SEQ ID NO: 25134 - protein, 19 aa, synthetic construct
  REGION 1..19: note = Description of Artificial Sequence: Synthetic peptide
  REGION 1..19: note = XENP020681 vhCDR2
EIRTKANNHATYYAESVKG

SEQ ID NO: 25135 - protein, 10 aa, synthetic construct
  REGION 1..10: note = Description of Artificial Sequence: Synthetic peptide
  REGION 1..10: note = XENP020681 vhCDR3
LANWDWYFDV

SEQ ID NO: 25136 - protein, 218 aa, synthetic construct
  REGION 1..218: note = Description of Artificial Sequence: Synthetic polypeptide
  REGION 1..218: note = XENP020681 7G8_H0_L0.77_IgG1_PVA_/S267K Light Chain
DTVLTQSPASLAVSLGQRATISCKASQSVDYDGDSYMNWYQQKPGQPPKLLIYAASNLESGIPARLSGSGSGTDFTLNIHPVEEEDAATYYCQQGNEDPFTFGSGTKLEVKRTVAAPSVFIFPPSDEQLKSGTASVVCLLNNFYPREAKVQWKVDNALQSGNSQESVTEQDSKDSTYSLSSTLTLSKADYEKHKVYACEVTHQGLSSPVTKSFNRGEC

SEQ ID NO: 25137 - protein, 111 aa, synthetic construct
  REGION 1..111: note = Description of Artificial Sequence: Synthetic polypeptide
  REGION 1..111: note = VL of XENP020681
DTVLTQSPASLAVSLGQRATISCKASQSVDYDGDSYMNWYQQKPGQPPKLLIYAASNLESGIPARLSGSGSGTDFTLNIHPVEEEDAATYYCQQGNEDPFTFGSGTKLEVK

SEQ ID NO: 25138 - protein, 15 aa, synthetic construct
  REGION 1..15: note = Description of Artificial Sequence: Synthetic peptide
  REGION 1..15: note = XENP020681 vlCDR1
KASQSVDYDGDSYMN

SEQ ID NO: 25139 - protein, 7 aa, synthetic construct
  REGION 1..7: note = Description of Artificial Sequence: Synthetic peptide
  REGION 1..7: note = XENP020681 vlCDR2
AASNLES

SEQ ID NO: 25140 - protein, 9 aa, synthetic construct
  REGION 1..9: note = Description of Artificial Sequence: Synthetic peptide
  REGION 1..9: note = XENP020681 vlCDR3
QQGNEDPFT

SEQ ID NO: 25141 - protein, 450 aa, synthetic construct; identical to SEQ ID NO: 22261
  REGION 1..450: note = Description of Artificial Sequence: Synthetic polypeptide
  REGION 1..450: note = XENP020682 7G8_H0_L0.78_IgG1_PVA_/S267K Heavy Chain

SEQ ID NO: 25142 - protein, 121 aa, synthetic construct; identical to SEQ ID NO: 22262
  REGION 1..121: note = Description of Artificial Sequence: Synthetic polypeptide
  REGION 1..121: note = VH of XENP020682

SEQ ID NO: 25143 - protein, 5 aa, synthetic construct
  REGION 1..5: note = Description of Artificial Sequence: Synthetic peptide
  REGION 1..5: note = XENP020682 vhCDR1
DAWMD

SEQ ID NO: 25144 - protein, 19 aa, synthetic construct
  REGION 1..19: note = Description of Artificial Sequence: Synthetic peptide
  REGION 1..19: note = XENP020682 vhCDR2
EIRTKANNHATYYAESVKG

SEQ ID NO: 25145 - protein, 10 aa, synthetic construct
  REGION 1..10: note = Description of Artificial Sequence: Synthetic peptide
  REGION 1..10: note = XENP020682 vhCDR3
LANWDWYFDV

SEQ ID NO: 25146 - protein, 218 aa, synthetic construct
  REGION 1..218: note = Description of Artificial Sequence: Synthetic polypeptide
  REGION 1..218: note = XENP020682 7G8_H0_L0.78_IgG1_PVA_/S267K Light Chain
DTVLTQSPASLAVSLGQRATISCKASQSVDYDGDSYMNWYQQKPGQPPKLLIYAASNLESGIPARLSGSGSGTDFTLNIHPVEEEDAATYYCQQVNEDPFTFGSGTKLEVKRTVAAPSVFIFPPSDEQLKSGTASVVCLLNNFYPREAKVQWKVDNALQSGNSQESVTEQDSKDSTYSLSSTLTLSKADYEKHKVYACEVTHQGLSSPVTKSFNRGEC

SEQ ID NO: 25147 - protein, 111 aa, synthetic construct
  REGION 1..111: note = Description of Artificial Sequence: Synthetic polypeptide
  REGION 1..111: note = VL of XENP020682
DTVLTQSPASLAVSLGQRATISCKASQSVDYDGDSYMNWYQQKPGQPPKLLIYAASNLESGIPARLSGSGSGTDFTLNIHPVEEEDAATYYCQQVNEDPFTFGSGTKLEVK

SEQ ID NO: 25148 - protein, 15 aa, synthetic construct
  REGION 1..15: note = Description of Artificial Sequence: Synthetic peptide
  REGION 1..15: note = XENP020682 vlCDR1
KASQSVDYDGDSYMN

SEQ ID NO: 25149 - protein, 7 aa, synthetic construct
  REGION 1..7: note = Description of Artificial Sequence: Synthetic peptide
  REGION 1..7: note = XENP020682 vlCDR2
AASNLES

SEQ ID NO: 25150 - protein, 9 aa, synthetic construct
  REGION 1..9: note = Description of Artificial Sequence: Synthetic peptide
  REGION 1..9: note = XENP020682 vlCDR3
QQVNEDPFT

SEQ ID NO: 25151 - protein, 450 aa, synthetic construct; identical to SEQ ID NO: 22261
  REGION 1..450: note = Description of Artificial Sequence: Synthetic polypeptide
  REGION 1..450: note = XENP020683 7G8_H0_L0.79_IgG1_PVA_/S267K Heavy Chain

SEQ ID NO: 25152 - protein, 121 aa, synthetic construct; identical to SEQ ID NO: 22262
  REGION 1..121: note = Description of Artificial Sequence: Synthetic polypeptide
  REGION 1..121: note = VH of XENP020683

SEQ ID NO: 25153 - protein, 5 aa, synthetic construct
  REGION 1..5: note = Description of Artificial Sequence: Synthetic peptide
  REGION 1..5: note = XENP020683 vhCDR1
DAWMD

SEQ ID NO: 25154 - protein, 19 aa, synthetic construct
  REGION 1..19: note = Description of Artificial Sequence: Synthetic peptide
  REGION 1..19: note = XENP020683 vhCDR2
EIRTKANNHATYYAESVKG

SEQ ID NO: 25155 - protein, 10 aa, synthetic construct
  REGION 1..10: note = Description of Artificial Sequence: Synthetic peptide
  REGION 1..10: note = XENP020683 vhCDR3
LANWDWYFDV

SEQ ID NO: 25156 - protein, 218 aa, synthetic construct
  REGION 1..218: note = Description of Artificial Sequence: Synthetic polypeptide
  REGION 1..218: note = XENP020683 7G8_H0_L0.79_IgG1_PVA_/S267K Light Chain
DTVLTQSPASLAVSLGQRATISCKASQSVDYDGDSYMNWYQQKPGQPPKLLIYAASNLESGIPARLSGSGSGTDFTLNIHPVEEEDAATYYCQQHNEDPFTFGSGTKLEVKRTVAAPSVFIFPPSDEQLKSGTASVVCLLNNFYPREAKVQWKVDNALQSGNSQESVTEQDSKDSTYSLSSTLTLSKADYEKHKVYACEVTHQGLSSPVTKSFNRGEC

SEQ ID NO: 25157 - protein, 111 aa, synthetic construct
  REGION 1..111: note = Description of Artificial Sequence: Synthetic polypeptide
  REGION 1..111: note = VL of XENP020683
DTVLTQSPASLAVSLGQRATISCKASQSVDYDGDSYMNWYQQKPGQPPKLLIYAASNLESGIPARLSGSGSGTDFTLNIHPVEEEDAATYYCQQHNEDPFTFGSGTKLEVK

SEQ ID NO: 25158 - protein, 15 aa, synthetic construct
  REGION 1..15: note = Description of Artificial Sequence: Synthetic peptide
  REGION 1..15: note = XENP020683 vlCDR1
KASQSVDYDGDSYMN

SEQ ID NO: 25159 - protein, 7 aa, synthetic construct
  REGION 1..7: note = Description of Artificial Sequence: Synthetic peptide
  REGION 1..7: note = XENP020683 vlCDR2
AASNLES

SEQ ID NO: 25160 - protein, 9 aa, synthetic construct
  REGION 1..9: note = Description of Artificial Sequence: Synthetic peptide
  REGION 1..9: note = XENP020683 vlCDR3
QQHNEDPFT

SEQ ID NO: 25161 - protein, 450 aa, synthetic construct; identical to SEQ ID NO: 22261
  REGION 1..450: note = Description of Artificial Sequence: Synthetic polypeptide
  REGION 1..450: note = XENP020684 7G8_H0_L0.80_IgG1_PVA_/S267K Heavy Chain

SEQ ID NO: 25162 - protein, 121 aa, synthetic construct; identical to SEQ ID NO: 22262
  REGION 1..121: note = Description of Artificial Sequence: Synthetic polypeptide
  REGION 1..121: note = VH of XENP020684

SEQ ID NO: 25163 - protein, 5 aa, synthetic construct
  REGION 1..5: note = Description of Artificial Sequence: Synthetic peptide
  REGION 1..5: note = XENP020684 vhCDR1
DAWMD

SEQ ID NO: 25164 - protein, 19 aa, synthetic construct
  REGION 1..19: note = Description of Artificial Sequence: Synthetic peptide
  REGION 1..19: note = XENP020684 vhCDR2
EIRTKANNHATYYAESVKG

SEQ ID NO: 25165 - protein, 10 aa, synthetic construct
  REGION 1..10: note = Description of Artificial Sequence: Synthetic peptide
  REGION 1..10: note = XENP020684 vhCDR3
LANWDWYFDV

SEQ ID NO: 25166 - protein, 218 aa, synthetic construct
  REGION 1..218: note = Description of Artificial Sequence: Synthetic polypeptide
  REGION 1..218: note = XENP020684 7G8_H0_L0.80_IgG1_PVA_/S267K Light Chain
DTVLTQSPASLAVSLGQRATISCKASQSVDYDGDSYMNWYQQKPGQPPKLLIYAASNLESGIPARLSGSGSGTDFTLNIHPVEEEDAATYYCQQDNEDPFTFGSGTKLEVKRTVAAPSVFIFPPSDEQLKSGTASVVCLLNNFYPREAKVQWKVDNALQSGNSQESVTEQDSKDSTYSLSSTLTLSKADYEKHKVYACEVTHQGLSSPVTKSFNRGEC

SEQ ID NO: 25167 - protein, 111 aa, synthetic construct
  REGION 1..111: note = Description of Artificial Sequence: Synthetic polypeptide
  REGION 1..111: note = VL of XENP020684
DTVLTQSPASLAVSLGQRATISCKASQSVDYDGDSYMNWYQQKPGQPPKLLIYAASNLESGIPARLSGSGSGTDFTLNIHPVEEEDAATYYCQQDNEDPFTFGSGTKLEVK

SEQ ID NO: 25168 - protein, 15 aa, synthetic construct
  REGION 1..15: note = Description of Artificial Sequence: Synthetic peptide
  REGION 1..15: note = XENP020684 vlCDR1
KASQSVDYDGDSYMN

SEQ ID NO: 25169 - protein, 7 aa, synthetic construct
  REGION 1..7: note = Description of Artificial Sequence: Synthetic peptide
  REGION 1..7: note = XENP020684 vlCDR2
AASNLES

SEQ ID NO: 25170 - protein, 9 aa, synthetic construct
  REGION 1..9: note = Description of Artificial Sequence: Synthetic peptide
  REGION 1..9: note = XENP020684 vlCDR3
QQDNEDPFT

SEQ ID NO: 25171 - protein, 450 aa, synthetic construct; identical to SEQ ID NO: 22261
  REGION 1..450: note = Description of Artificial Sequence: Synthetic polypeptide
  REGION 1..450: note = XENP020685 7G8_H0_L0.81_IgG1_PVA_/S267K Heavy Chain

SEQ ID NO: 25172 - protein, 121 aa, synthetic construct; identical to SEQ ID NO: 22262
  REGION 1..121: note = Description of Artificial Sequence: Synthetic polypeptide
  REGION 1..121: note = VH of XENP020685

SEQ ID NO: 25173 - protein, 5 aa, synthetic construct
  REGION 1..5: note = Description of Artificial Sequence: Synthetic peptide
  REGION 1..5: note = XENP020685 vhCDR1
DAWMD

SEQ ID NO: 25174 - protein, 19 aa, synthetic construct
  REGION 1..19: note = Description of Artificial Sequence: Synthetic peptide
  REGION 1..19: note = XENP020685 vhCDR2
EIRTKANNHATYYAESVKG

SEQ ID NO: 25175 - protein, 10 aa, synthetic construct
  REGION 1..10: note = Description of Artificial Sequence: Synthetic peptide
  REGION 1..10: note = XENP020685 vhCDR3
LANWDWYFDV

SEQ ID NO: 25176 - protein, 218 aa, synthetic construct
  REGION 1..218: note = Description of Artificial Sequence: Synthetic polypeptide
  REGION 1..218: note = XENP020685 7G8_H0_L0.81_IgG1_PVA_/S267K Light Chain
DTVLTQSPASLAVSLGQRATISCKASQSVDYDGDSYMNWYQQKPGQPPKLLIYAASNLESGIPARLSGSGSGTDFTLNIHPVEEEDAATYYCQQKNEDPFTFGSGTKLEVKRTVAAPSVFIFPPSDEQLKSGTASVVCLLNNFYPREAKVQWKVDNALQSGNSQESVTEQDSKDSTYSLSSTLTLSKADYEKHKVYACEVTHQGLSSPVTKSFNRGEC

SEQ ID NO: 25177 - protein, 111 aa, synthetic construct
  REGION 1..111: note = Description of Artificial Sequence: Synthetic polypeptide
  REGION 1..111: note = VL of XENP020685
DTVLTQSPASLAVSLGQRATISCKASQSVDYDGDSYMNWYQQKPGQPPKLLIYAASNLESGIPARLSGSGSGTDFTLNIHPVEEEDAATYYCQQKNEDPFTFGSGTKLEVK

SEQ ID NO: 25178 - protein, 15 aa, synthetic construct
  REGION 1..15: note = Description of Artificial Sequence: Synthetic peptide
  REGION 1..15: note = XENP020685 vlCDR1
KASQSVDYDGDSYMN

SEQ ID NO: 25179 - protein, 7 aa, synthetic construct
  REGION 1..7: note = Description of Artificial Sequence: Synthetic peptide
  REGION 1..7: note = XENP020685 vlCDR2
AASNLES

SEQ ID NO: 25180 - protein, 9 aa, synthetic construct
  REGION 1..9: note = Description of Artificial Sequence: Synthetic peptide
  REGION 1..9: note = XENP020685 vlCDR3
QQKNEDPFT

SEQ ID NO: 25181 - protein, 450 aa, synthetic construct; identical to SEQ ID NO: 22261
  REGION 1..450: note = Description of Artificial Sequence: Synthetic polypeptide
  REGION 1..450: note = XENP020686 7G8_H0_L0.82_IgG1_PVA_/S267K Heavy Chain

SEQ ID NO: 25182 - protein, 121 aa, synthetic construct; identical to SEQ ID NO: 22262
  REGION 1..121: note = Description of Artificial Sequence: Synthetic polypeptide
  REGION 1..121: note = VH of XENP020686

SEQ ID NO: 25183 - protein, 5 aa, synthetic construct
  REGION 1..5: note = Description of Artificial Sequence: Synthetic peptide
  REGION 1..5: note = XENP020686 vhCDR1
DAWMD

SEQ ID NO: 25184 - protein, 19 aa, synthetic construct
  REGION 1..19: note = Description of Artificial Sequence: Synthetic peptide
  REGION 1..19: note = XENP020686 vhCDR2
EIRTKANNHATYYAESVKG

SEQ ID NO: 25185 - protein, 10 aa, synthetic construct
  REGION 1..10: note = Description of Artificial Sequence: Synthetic peptide
  REGION 1..10: note = XENP020686 vhCDR3
LANWDWYFDV

SEQ ID NO: 25186 - protein, 218 aa, synthetic construct
  REGION 1..218: note = Description of Artificial Sequence: Synthetic polypeptide
  REGION 1..218: note = XENP020686 7G8_H0_L0.82_IgG1_PVA_/S267K Light Chain
DTVLTQSPASLAVSLGQRATISCKASQSVDYDGDSYMNWYQQKPGQPPKLLIYAASNLESGIPARLSGSGSGTDFTLNIHPVEEEDAATYYCQQYNEDPFTFGSGTKLEVKRTVAAPSVFIFPPSDEQLKSGTASVVCLLNNFYPREAKVQWKVDNALQSGNSQESVTEQDSKDSTYSLSSTLTLSKADYEKHKVYACEVTHQGLSSPVTKSFNRGEC

SEQ ID NO: 25187 - protein, 111 aa, synthetic construct
  REGION 1..111: note = Description of Artificial Sequence: Synthetic polypeptide
  REGION 1..111: note = VL of XENP020686
DTVLTQSPASLAVSLGQRATISCKASQSVDYDGDSYMNWYQQKPGQPPKLLIYAASNLESGIPARLSGSGSGTDFTLNIHPVEEEDAATYYCQQYNEDPFTFGSGTKLEVK

SEQ ID NO: 25188 - protein, 15 aa, synthetic construct
  REGION 1..15: note = Description of Artificial Sequence: Synthetic peptide
  REGION 1..15: note = XENP020686 vlCDR1
KASQSVDYDGDSYMN

SEQ ID NO: 25189 - protein, 7 aa, synthetic construct
  REGION 1..7: note = Description of Artificial Sequence: Synthetic peptide
  REGION 1..7: note = XENP020686 vlCDR2
AASNLES

SEQ ID NO: 25190 - protein, 9 aa, synthetic construct
  REGION 1..9: note = Description of Artificial Sequence: Synthetic peptide
  REGION 1..9: note = XENP020686 vlCDR3
QQYNEDPFT

SEQ ID NO: 25191 - protein, 450 aa, synthetic construct; identical to SEQ ID NO: 22261
  REGION 1..450: note = Description of Artificial Sequence: Synthetic polypeptide
  REGION 1..450: note = XENP020687 7G8_H0_L0.83_IgG1_PVA_/S267K Heavy Chain

SEQ ID NO: 25192 - protein, 121 aa, synthetic construct; identical to SEQ ID NO: 22262
  REGION 1..121: note = Description of Artificial Sequence: Synthetic polypeptide
  REGION 1..121: note = VH of XENP020687

SEQ ID NO: 25193 - protein, 5 aa, synthetic construct
  REGION 1..5: note = Description of Artificial Sequence: Synthetic peptide
  REGION 1..5: note = XENP020687 vhCDR1
DAWMD

SEQ ID NO: 25194 - protein, 19 aa, synthetic construct
  REGION 1..19: note = Description of Artificial Sequence: Synthetic peptide
  REGION 1..19: note = XENP020687 vhCDR2
EIRTKANNHATYYAESVKG

SEQ ID NO: 25195 - protein, 10 aa, synthetic construct
  REGION 1..10: note = Description of Artificial Sequence: Synthetic peptide
  REGION 1..10: note = XENP020687 vhCDR3
LANWDWYFDV

SEQ ID NO: 25196 - protein, 218 aa, synthetic construct
  REGION 1..218: note = Description of Artificial Sequence: Synthetic polypeptide
  REGION 1..218: note = XENP020687 7G8_H0_L0.83_IgG1_PVA_/S267K Light Chain
DTVLTQSPASLAVSLGQRATISCKASQSVDYDGDSYMNWYQQKPGQPPKLLIYAASNLESGIPARLSGSGSGTDFTLNIHPVEEEDAATYYCQQSDEDPFTFGSGTKLEVKRTVAAPSVFIFPPSDEQLKSGTASVVCLLNNFYPREAKVQWKVDNALQSGNSQESVTEQDSKDSTYSLSSTLTLSKADYEKHKVYACEVTHQGLSSPVTKSFNRGEC

SEQ ID NO: 25197 - protein, 111 aa, synthetic construct
  REGION 1..111: note = Description of Artificial Sequence: Synthetic polypeptide
  REGION 1..111: note = VL of XENP020687
DTVLTQSPASLAVSLGQRATISCKASQSVDYDGDSYMNWYQQKPGQPPKLLIYAASNLESGIPARLSGSGSGTDFTLNIHPVEEEDAATYYCQQSDEDPFTFGSGTKLEVK

SEQ ID NO: 25198 - protein, 15 aa, synthetic construct
  REGION 1..15: note = Description of Artificial Sequence: Synthetic peptide
  REGION 1..15: note = XENP020687 vlCDR1
KASQSVDYDGDSYMN

SEQ ID NO: 25199 - protein, 7 aa, synthetic construct
  REGION 1..7: note = Description of Artificial Sequence: Synthetic peptide
  REGION 1..7: note = XENP020687 vlCDR2
AASNLES

SEQ ID NO: 25200 - protein, 9 aa, synthetic construct
  REGION 1..9: note = Description of Artificial Sequence: Synthetic peptide
  REGION 1..9: note = XENP020687 vlCDR3
QQSDEDPFT

SEQ ID NO: 25201 - protein, 450 aa, synthetic construct; identical to SEQ ID NO: 22261
  REGION 1..450: note = Description of Artificial Sequence: Synthetic polypeptide
  REGION 1..450: note = XENP020688 7G8_H0_L0.84_IgG1_PVA_/S267K Heavy Chain

SEQ ID NO: 25202 - protein, 121 aa, synthetic construct; identical to SEQ ID NO: 22262
  REGION 1..121: note = Description of Artificial Sequence: Synthetic polypeptide
  REGION 1..121: note = VH of XENP020688

SEQ ID NO: 25203 - protein, 5 aa, synthetic construct
  REGION 1..5: note = Description of Artificial Sequence: Synthetic peptide
  REGION 1..5: note = XENP020688 vhCDR1
DAWMD

SEQ ID NO: 25204 - protein, 19 aa, synthetic construct
  REGION 1..19: note = Description of Artificial Sequence: Synthetic peptide
  REGION 1..19: note = XENP020688 vhCDR2
EIRTKANNHATYYAESVKG

SEQ ID NO: 25205 - protein, 10 aa, synthetic construct
  REGION 1..10: note = Description of Artificial Sequence: Synthetic peptide
  REGION 1..10: note = XENP020688 vhCDR3
LANWDWYFDV

SEQ ID NO: 25206 - protein, 218 aa, synthetic construct
  REGION 1..218: note = Description of Artificial Sequence: Synthetic polypeptide
  REGION 1..218: note = XENP020688 7G8_H0_L0.84_IgG1_PVA_/S267K Light Chain
DTVLTQSPASLAVSLGQRATISCKASQSVDYDGDSYMNWYQQKPGQPPKLLIYAASNLESGIPARLSGSGSGTDFTLNIHPVEEEDAATYYCQQSHEDPFTFGSGTKLEVKRTVAAPSVFIFPPSDEQLKSGTASVVCLLNNFYPREAKVQWKVDNALQSGNSQESVTEQDSKDSTYSLSSTLTLSKADYEKHKVYACEVTHQGLSSPVTKSFNRGEC

SEQ ID NO: 25207 - protein, 111 aa, synthetic construct
  REGION 1..111: note = Description of Artificial Sequence: Synthetic polypeptide
  REGION 1..111: note = VL of XENP020688
DTVLTQSPASLAVSLGQRATISCKASQSVDYDGDSYMNWYQQKPGQPPKLLIYAASNLESGIPARLSGSGSGTDFTLNIHPVEEEDAATYYCQQSHEDPFTFGSGTKLEVK

SEQ ID NO: 25208 - protein, 15 aa, synthetic construct
  REGION 1..15: note = Description of Artificial Sequence: Synthetic peptide
  REGION 1..15: note = XENP020688 vlCDR1
KASQSVDYDGDSYMN

SEQ ID NO: 25209 - protein, 7 aa, synthetic construct
  REGION 1..7: note = Description of Artificial Sequence: Synthetic peptide
  REGION 1..7: note = XENP020688 vlCDR2
AASNLES

SEQ ID NO: 25210 - protein, 9 aa, synthetic construct
  REGION 1..9: note = Description of Artificial Sequence: Synthetic peptide
  REGION 1..9: note = XENP020688 vlCDR3
QQSHEDPFT

SEQ ID NO: 25211 - protein, 450 aa, synthetic construct; identical to SEQ ID NO: 22261
  REGION 1..450: note = Description of Artificial Sequence: Synthetic polypeptide
  REGION 1..450: note = XENP020689 7G8_H0_L0.85_IgG1_PVA_/S267K Heavy Chain

SEQ ID NO: 25212 - protein, 121 aa, synthetic construct; identical to SEQ ID NO: 22262
  REGION 1..121: note = Description of Artificial Sequence: Synthetic polypeptide
  REGION 1..121: note = VH of XENP020689

SEQ ID NO: 25213 - protein, 5 aa, synthetic construct
  REGION 1..5: note = Description of Artificial Sequence: Synthetic peptide
  REGION 1..5: note = XENP020689 vhCDR1
DAWMD

SEQ ID NO: 25214 - protein, 19 aa, synthetic construct
  REGION 1..19: note = Description of Artificial Sequence: Synthetic peptide
  REGION 1..19: note = XENP020689 vhCDR2
EIRTKANNHATYYAESVKG

SEQ ID NO: 25215 - protein, 10 aa, synthetic construct
  REGION 1..10: note = Description of Artificial Sequence: Synthetic peptide
  REGION 1..10: note = XENP020689 vhCDR3
LANWDWYFDV

SEQ ID NO: 25216 - protein, 218 aa, synthetic construct
  REGION 1..218: note = Description of Artificial Sequence: Synthetic polypeptide
  REGION 1..218: note = XENP020689 7G8_H0_L0.85_IgG1_PVA_/S267K Light Chain
DTVLTQSPASLAVSLGQRATISCKASQSVDYDGDSYMNWYQQKPGQPPKLLIYAASNLESGIPARLSGSGSGTDFTLNIHPVEEEDAATYYCQQSEEDPFTFGSGTKLEVKRTVAAPSVFIFPPSDEQLKSGTASVVCLLNNFYPREAKVQWKVDNALQSGNSQESVTEQDSKDSTYSLSSTLTLSKADYEKHKVYACEVTHQGLSSPVTKSFNRGEC

SEQ ID NO: 25217 - protein, 111 aa, synthetic construct
  REGION 1..111: note = Description of Artificial Sequence: Synthetic polypeptide
  REGION 1..111: note = VL of XENP020689
DTVLTQSPASLAVSLGQRATISCKASQSVDYDGDSYMNWYQQKPGQPPKLLIYAASNLESGIPARLSGSGSGTDFTLNIHPVEEEDAATYYCQQSEEDPFTFGSGTKLEVK

SEQ ID NO: 25218 - protein, 15 aa, synthetic construct
  REGION 1..15: note = Description of Artificial Sequence: Synthetic peptide
  REGION 1..15: note = XENP020689 vlCDR1
KASQSVDYDGDSYMN

SEQ ID NO: 25219 - protein, 7 aa, synthetic construct
  REGION 1..7: note = Description of Artificial Sequence: Synthetic peptide
  REGION 1..7: note = XENP020689 vlCDR2
AASNLES

SEQ ID NO: 25220 - protein, 9 aa, synthetic construct
  REGION 1..9: note = Description of Artificial Sequence: Synthetic peptide
  REGION 1..9: note = XENP020689 vlCDR3
QQSEEDPFT

SEQ ID NO: 25221 - protein, 450 aa, synthetic construct; identical to SEQ ID NO: 22261
  REGION 1..450: note = Description of Artificial Sequence: Synthetic polypeptide
  REGION 1..450: note = XENP020690 7G8_H0_L0.86_IgG1_PVA_/S267K Heavy Chain

SEQ ID NO: 25222 - protein, 121 aa, synthetic construct; identical to SEQ ID NO: 22262
  REGION 1..121: note = Description of Artificial Sequence: Synthetic polypeptide
  REGION 1..121: note = VH of XENP020690

SEQ ID NO: 25223 - protein, 5 aa, synthetic construct
  REGION 1..5: note = Description of Artificial Sequence: Synthetic peptide
  REGION 1..5: note = XENP020690 vhCDR1
DAWMD

SEQ ID NO: 25224 - protein, 19 aa, synthetic construct
  REGION 1..19: note = Description of Artificial Sequence: Synthetic peptide
  REGION 1..19: note = XENP020690 vhCDR2
EIRTKANNHATYYAESVKG

SEQ ID NO: 25225 - protein, 10 aa, synthetic construct
  REGION 1..10: note = Description of Artificial Sequence: Synthetic peptide
  REGION 1..10: note = XENP020690 vhCDR3
LANWDWYFDV

SEQ ID NO: 25226 - protein, 218 aa, synthetic construct
  REGION 1..218: note = Description of Artificial Sequence: Synthetic polypeptide
  REGION 1..218: note = XENP020690 7G8_H0_L0.86_IgG1_PVA_/S267K Light Chain
DTVLTQSPASLAVSLGQRATISCKASQSVDYDGDSYMNWYQQKPGQPPKLLIYAASNLESGIPARLSGSGSGTDFTLNIHPVEEEDAATYYCQQSSEDPFTFGSGTKLEVKRTVAAPSVFIFPPSDEQLKSGTASVVCLLNNFYPREAKVQWKVDNALQSGNSQESVTEQDSKDSTYSLSSTLTLSKADYEKHKVYACEVTHQGLSSPVTKSFNRGEC

SEQ ID NO: 25227 - protein, 111 aa, synthetic construct
  REGION 1..111: note = Description of Artificial Sequence: Synthetic polypeptide
  REGION 1..111: note = VL of XENP020690
DTVLTQSPASLAVSLGQRATISCKASQSVDYDGDSYMNWYQQKPGQPPKLLIYAASNLESGIPARLSGSGSGTDFTLNIHPVEEEDAATYYCQQSSEDPFTFGSGTKLEVK

SEQ ID NO: 25228 - protein, 15 aa, synthetic construct
  REGION 1..15: note = Description of Artificial Sequence: Synthetic peptide
  REGION 1..15: note = XENP020690 vlCDR1
KASQSVDYDGDSYMN

SEQ ID NO: 25229 - protein, 7 aa, synthetic construct
  REGION 1..7: note = Description of Artificial Sequence: Synthetic peptide
  REGION 1..7: note = XENP020690 vlCDR2
AASNLES

SEQ ID NO: 25230 - protein, 9 aa, synthetic construct
  REGION 1..9: note = Description of Artificial Sequence: Synthetic peptide
  REGION 1..9: note = XENP020690 vlCDR3
QQSSEDPFT

SEQ ID NO: 25231 - protein, 450 aa, synthetic construct; identical to SEQ ID NO: 22261
  REGION 1..450: note = Description of Artificial Sequence: Synthetic polypeptide
  REGION 1..450: note = XENP020691 7G8_H0_L0.87_IgG1_PVA_/S267K Heavy Chain

SEQ ID NO: 25232 - protein, 121 aa, synthetic construct; identical to SEQ ID NO: 22262
  REGION 1..121: note = Description of Artificial Sequence: Synthetic polypeptide
  REGION 1..121: note = VH of XENP020691

SEQ ID NO: 25233 - protein, 5 aa, synthetic construct
  REGION 1..5: note = Description of Artificial Sequence: Synthetic peptide
  REGION 1..5: note = XENP020691 vhCDR1
DAWMD

SEQ ID NO: 25234 - protein, 19 aa, synthetic construct
  REGION 1..19: note = Description of Artificial Sequence: Synthetic peptide
  REGION 1..19: note = XENP020691 vhCDR2
EIRTKANNHATYYAESVKG

SEQ ID NO: 25235 - protein, 10 aa, synthetic construct
  REGION 1..10: note = Description of Artificial Sequence: Synthetic peptide
  REGION 1..10: note = XENP020691 vhCDR3
LANWDWYFDV

SEQ ID NO: 25236 - protein, 218 aa, synthetic construct
  REGION 1..218: note = Description of Artificial Sequence: Synthetic polypeptide
  REGION 1..218: note = XENP020691 7G8_H0_L0.87_IgG1_PVA_/S267K Light Chain
DTVLTQSPASLAVSLGQRATISCKASQSVDYDGDSYMNWYQQKPGQPPKLLIYAASNLESGIPARLSGSGSGTDFTLNIHPVEEEDAATYYCQQSREDPFTFGSGTKLEVKRTVAAPSVFIFPPSDEQLKSGTASVVCLLNNFYPREAKVQWKVDNALQSGNSQESVTEQDSKDSTYSLSSTLTLSKADYEKHKVYACEVTHQGLSSPVTKSFNRGEC

SEQ ID NO: 25237 - protein, 111 aa, synthetic construct
  REGION 1..111: note = Description of Artificial Sequence: Synthetic polypeptide
  REGION 1..111: note = VL of XENP020691
DTVLTQSPASLAVSLGQRATISCKASQSVDYDGDSYMNWYQQKPGQPPKLLIYAASNLESGIPARLSGSGSGTDFTLNIHPVEEEDAATYYCQQSREDPFTFGSGTKLEVK

SEQ ID NO: 25238 - protein, 15 aa, synthetic construct
  REGION 1..15: note = Description of Artificial Sequence: Synthetic peptide
  REGION 1..15: note = XENP020691 vlCDR1
KASQSVDYDGDSYMN

SEQ ID NO: 25239 - protein, 7 aa, synthetic construct
  REGION 1..7: note = Description of Artificial Sequence: Synthetic peptide
  REGION 1..7: note = XENP020691 vlCDR2
AASNLES

SEQ ID NO: 25240 - protein, 9 aa, synthetic construct
  REGION 1..9: note = Description of Artificial Sequence: Synthetic peptide
  REGION 1..9: note = XENP020691 vlCDR3
QQSREDPFT

SEQ ID NO: 25241 - protein, 450 aa, synthetic construct; identical to SEQ ID NO: 22261
  REGION 1..450: note = Description of Artificial Sequence: Synthetic polypeptide
  REGION 1..450: note = XENP020692 7G8_H0_L0.88_IgG1_PVA_/S267K Heavy Chain

SEQ ID NO: 25242 - protein, 121 aa, synthetic construct; identical to SEQ ID NO: 22262
  REGION 1..121: note = Description of Artificial Sequence: Synthetic polypeptide
  REGION 1..121: note = VH of XENP020692

SEQ ID NO: 25243 - protein, 5 aa, synthetic construct
  REGION 1..5: note = Description of Artificial Sequence: Synthetic peptide
  REGION 1..5: note = XENP020692 vhCDR1
DAWMD

SEQ ID NO: 25244 - protein, 19 aa, synthetic construct
  REGION 1..19: note = Description of Artificial Sequence: Synthetic peptide
  REGION 1..19: note = XENP020692 vhCDR2
EIRTKANNHATYYAESVKG

SEQ ID NO: 25245 - protein, 10 aa, synthetic construct
  REGION 1..10: note = Description of Artificial Sequence: Synthetic peptide
  REGION 1..10: note = XENP020692 vhCDR3
LANWDWYFDV

SEQ ID NO: 25246 - protein, 218 aa, synthetic construct
  REGION 1..218: note = Description of Artificial Sequence: Synthetic polypeptide
  REGION 1..218: note = XENP020692 7G8_H0_L0.88_IgG1_PVA_/S267K Light Chain
DTVLTQSPASLAVSLGQRATISCKASQSVDYDGDSYMNWYQQKPGQPPKLLIYAASNLESGIPARLSGSGSGTDFTLNIHPVEEEDAATYYCQQSLEDPFTFGSGTKLEVKRTVAAPSVFIFPPSDEQLKSGTASVVCLLNNFYPREAKVQWKVDNALQSGNSQESVTEQDSKDSTYSLSSTLTLSKADYEKHKVYACEVTHQGLSSPVTKSFNRGEC

SEQ ID NO: 25247 - protein, 111 aa, synthetic construct
  REGION 1..111: note = Description of Artificial Sequence: Synthetic polypeptide
  REGION 1..111: note = VL of XENP020692
DTVLTQSPASLAVSLGQRATISCKASQSVDYDGDSYMNWYQQKPGQPPKLLIYAASNLESGIPARLSGSGSGTDFTLNIHPVEEEDAATYYCQQSLEDPFTFGSGTKLEVK

SEQ ID NO: 25248 - protein, 15 aa, synthetic construct
  REGION 1..15: note = Description of Artificial Sequence: Synthetic peptide
  REGION 1..15: note = XENP020692 vlCDR1
KASQSVDYDGDSYMN

SEQ ID NO: 25249 - protein, 7 aa, synthetic construct
  REGION 1..7: note = Description of Artificial Sequence: Synthetic peptide
  REGION 1..7: note = XENP020692 vlCDR2
AASNLES

SEQ ID NO: 25250 - protein, 9 aa, synthetic construct
  REGION 1..9: note = Description of Artificial Sequence: Synthetic peptide
  REGION 1..9: note = XENP020692 vlCDR3
QQSLEDPFT

SEQ ID NO: 25251 - protein, 450 aa, synthetic construct; identical to SEQ ID NO: 22261
  REGION 1..450: note = Description of Artificial Sequence: Synthetic polypeptide
  REGION 1..450: note = XENP020693 7G8_H0_L0.89_IgG1_PVA_/S267K Heavy Chain

SEQ ID NO: 25252 - protein, 121 aa, synthetic construct; identical to SEQ ID NO: 22262
  REGION 1..121: note = Description of Artificial Sequence: Synthetic polypeptide
  REGION 1..121: note = VH of XENP020693

SEQ ID NO: 25253 - protein, 5 aa, synthetic construct
  REGION 1..5: note = Description of Artificial Sequence: Synthetic peptide
  REGION 1..5: note = XENP020693 vhCDR1
DAWMD

SEQ ID NO: 25254 - protein, 19 aa, synthetic construct
  REGION 1..19: note = Description of Artificial Sequence: Synthetic peptide
  REGION 1..19: note = XENP020693 vhCDR2
EIRTKANNHATYYAESVKG

SEQ ID NO: 25255 - protein, 10 aa, synthetic construct
  REGION 1..10: note = Description of Artificial Sequence: Synthetic peptide
  REGION 1..10: note = XENP020693 vhCDR3
LANWDWYFDV

SEQ ID NO: 25256 - protein, 218 aa, synthetic construct
  REGION 1..218: note = Description of Artificial Sequence: Synthetic polypeptide
  REGION 1..218: note = XENP020693 7G8_H0_L0.89_IgG1_PVA_/S267K Light Chain
DTVLTQSPASLAVSLGQRATISCKASQSVDYDGDSYMNWYQQKPGQPPKLLIYAASNLESGIPARLSGSGSGTDFTLNIHPVEEEDAATYYCQQSTEDPFTFGSGTKLEVKRTVAAPSVFIFPPSDEQLKSGTASVVCLLNNFYPREAKVQWKVDNALQSGNSQESVTEQDSKDSTYSLSSTLTLSKADYEKHKVYACEVTHQGLSSPVTKSFNRGEC

SEQ ID NO: 25257 - protein, 111 aa, synthetic construct
  REGION 1..111: note = Description of Artificial Sequence: Synthetic polypeptide
  REGION 1..111: note = VL of XENP020693
DTVLTQSPASLAVSLGQRATISCKASQSVDYDGDSYMNWYQQKPGQPPKLLIYAASNLESGIPARLSGSGSGTDFTLNIHPVEEEDAATYYCQQSTEDPFTFGSGTKLEVK

SEQ ID NO: 25258 - protein, 15 aa, synthetic construct
  REGION 1..15: note = Description of Artificial Sequence: Synthetic peptide
  REGION 1..15: note = XENP020693 vlCDR1
KASQSVDYDGDSYMN

SEQ ID NO: 25259 - protein, 7 aa, synthetic construct
  REGION 1..7: note = Description of Artificial Sequence: Synthetic peptide
  REGION 1..7: note = XENP020693 vlCDR2
AASNLES

SEQ ID NO: 25260 - protein, 9 aa, synthetic construct
  REGION 1..9: note = Description of Artificial Sequence: Synthetic peptide
  REGION 1..9: note = XENP020693 vlCDR3
QQSTEDPFT

SEQ ID NO: 25261 - protein, 450 aa, synthetic construct; identical to SEQ ID NO: 22261
  REGION 1..450: note = Description of Artificial Sequence: Synthetic polypeptide
  REGION 1..450: note = XENP020694 7G8_H0_L0.90_IgG1_PVA_/S267K Heavy Chain

SEQ ID NO: 25262 - protein, 121 aa, synthetic construct; identical to SEQ ID NO: 22262
  REGION 1..121: note = Description of Artificial Sequence: Synthetic polypeptide
  REGION 1..121: note = VH of XENP020694

SEQ ID NO: 25263 - protein, 5 aa, synthetic construct
  REGION 1..5: note = Description of Artificial Sequence: Synthetic peptide
  REGION 1..5: note = XENP020694 vhCDR1
DAWMD

SEQ ID NO: 25264 - protein, 19 aa, synthetic construct
  REGION 1..19: note = Description of Artificial Sequence: Synthetic peptide
  REGION 1..19: note = XENP020694 vhCDR2
EIRTKANNHATYYAESVKG

SEQ ID NO: 25265 - protein, 10 aa, synthetic construct
  REGION 1..10: note = Description of Artificial Sequence: Synthetic peptide
  REGION 1..10: note = XENP020694 vhCDR3
LANWDWYFDV

SEQ ID NO: 25266 - protein, 218 aa, synthetic construct
  REGION 1..218: note = Description of Artificial Sequence: Synthetic polypeptide
  REGION 1..218: note = XENP020694 7G8_H0_L0.90_IgG1_PVA_/S267K Light Chain
DTVLTQSPASLAVSLGQRATISCKASQSVDYDGDSYMNWYQQKPGQPPKLLIYAASNLESGIPARLSGSGSGTDFTLNIHPVEEEDAATYYCQQSGEDPFTFGSGTKLEVKRTVAAPSVFIFPPSDEQLKSGTASVVCLLNNFYPREAKVQWKVDNALQSGNSQESVTEQDSKDSTYSLSSTLTLSKADYEKHKVYACEVTHQGLSSPVTKSFNRGEC

SEQ ID NO: 25267 - protein, 111 aa, synthetic construct
  REGION 1..111: note = Description of Artificial Sequence: Synthetic polypeptide
  REGION 1..111: note = VL of XENP020694
DTVLTQSPASLAVSLGQRATISCKASQSVDYDGDSYMNWYQQKPGQPPKLLIYAASNLESGIPARLSGSGSGTDFTLNIHPVEEEDAATYYCQQSGEDPFTFGSGTKLEVK

SEQ ID NO: 25268 - protein, 15 aa, synthetic construct
  REGION 1..15: note = Description of Artificial Sequence: Synthetic peptide
  REGION 1..15: note = XENP020694 vlCDR1
KASQSVDYDGDSYMN

SEQ ID NO: 25269 - protein, 7 aa, synthetic construct
  REGION 1..7: note = Description of Artificial Sequence: Synthetic peptide
  REGION 1..7: note = XENP020694 vlCDR2
AASNLES

SEQ ID NO: 25270 - protein, 9 aa, synthetic construct
  REGION 1..9: note = Description of Artificial Sequence: Synthetic peptide
  REGION 1..9: note = XENP020694 vlCDR3
QQSGEDPFT

SEQ ID NO: 25271 - protein, 450 aa, synthetic construct; identical to SEQ ID NO: 22261
  REGION 1..450: note = Description of Artificial Sequence: Synthetic polypeptide
  REGION 1..450: note = XENP020695 7G8_H0_L0.91_IgG1_PVA_/S267K Heavy Chain

SEQ ID NO: 25272 - protein, 121 aa, synthetic construct; identical to SEQ ID NO: 22262
  REGION 1..121: note = Description of Artificial Sequence: Synthetic polypeptide
  REGION 1..121: note = VH of XENP020695

SEQ ID NO: 25273 - protein, 5 aa, synthetic construct
  REGION 1..5: note = Description of Artificial Sequence: Synthetic peptide
  REGION 1..5: note = XENP020695 vhCDR1
DAWMD

SEQ ID NO: 25274 - protein, 19 aa, synthetic construct
  REGION 1..19: note = Description of Artificial Sequence: Synthetic peptide
  REGION 1..19: note = XENP020695 vhCDR2
EIRTKANNHATYYAESVKG

SEQ ID NO: 25275 - protein, 10 aa, synthetic construct
  REGION 1..10: note = Description of Artificial Sequence: Synthetic peptide
  REGION 1..10: note = XENP020695 vhCDR3
LANWDWYFDV

SEQ ID NO: 25276 - protein, 218 aa, synthetic construct
  REGION 1..218: note = Description of Artificial Sequence: Synthetic polypeptide
  REGION 1..218: note = XENP020695 7G8_H0_L0.91_IgG1_PVA_/S267K Light Chain
DTVLTQSPASLAVSLGQRATISCKASQSVDYDGDSYMNWYQQKPGQPPKLLIYAASNLESGIPARLSGSGSGTDFTLNIHPVEEEDAATYYCQQSYEDPFTFGSGTKLEVKRTVAAPSVFIFPPSDEQLKSGTASVVCLLNNFYPREAKVQWKVDNALQSGNSQESVTEQDSKDSTYSLSSTLTLSKADYEKHKVYACEVTHQGLSSPVTKSFNRGEC

SEQ ID NO: 25277 - protein, 111 aa, synthetic construct
  REGION 1..111: note = Description of Artificial Sequence: Synthetic polypeptide
  REGION 1..111: note = VL of XENP020695
DTVLTQSPASLAVSLGQRATISCKASQSVDYDGDSYMNWYQQKPGQPPKLLIYAASNLESGIPARLSGSGSGTDFTLNIHPVEEEDAATYYCQQSYEDPFTFGSGTKLEVK

SEQ ID NO: 25278 - protein, 15 aa, synthetic construct
  REGION 1..15: note = Description of Artificial Sequence: Synthetic peptide
  REGION 1..15: note = XENP020695 vlCDR1
KASQSVDYDGDSYMN

SEQ ID NO: 25279 - protein, 7 aa, synthetic construct
  REGION 1..7: note = Description of Artificial Sequence: Synthetic peptide
  REGION 1..7: note = XENP020695 vlCDR2
AASNLES

SEQ ID NO: 25280 - protein, 9 aa, synthetic construct
  REGION 1..9: note = Description of Artificial Sequence: Synthetic peptide
  REGION 1..9: note = XENP020695 vlCDR3
QQSYEDPFT

SEQ ID NO: 25281 - protein, 450 aa, synthetic construct; identical to SEQ ID NO: 22261
  REGION 1..450: note = Description of Artificial Sequence: Synthetic polypeptide
  REGION 1..450: note = XENP020696 7G8_H0_L0.92_IgG1_PVA_/S267K Heavy Chain

SEQ ID NO: 25282 - protein, 121 aa, synthetic construct; identical to SEQ ID NO: 22262
  REGION 1..121: note = Description of Artificial Sequence: Synthetic polypeptide
  REGION 1..121: note = VH of XENP020696

SEQ ID NO: 25283 - protein, 5 aa, synthetic construct
  REGION 1..5: note = Description of Artificial Sequence: Synthetic peptide
  REGION 1..5: note = XENP020696 vhCDR1
DAWMD

SEQ ID NO: 25284 - protein, 19 aa, synthetic construct
  REGION 1..19: note = Description of Artificial Sequence: Synthetic peptide
  REGION 1..19: note = XENP020696 vhCDR2
EIRTKANNHATYYAESVKG

SEQ ID NO: 25285 - protein, 10 aa, synthetic construct
  REGION 1..10: note = Description of Artificial Sequence: Synthetic peptide
  REGION 1..10: note = XENP020696 vhCDR3
LANWDWYFDV

SEQ ID NO: 25286 - protein, 218 aa, synthetic construct
  REGION 1..218: note = Description of Artificial Sequence: Synthetic polypeptide
  REGION 1..218: note = XENP020696 7G8_H0_L0.92_IgG1_PVA_/S267K Light Chain
DTVLTQSPASLAVSLGQRATISCKASQSVDYDGDSYMNWYQQKPGQPPKLLIYAASNLESGIPARLSGSGSGTDFTLNIHPVEEEDAATYYCQQSNQDPFTFGSGTKLEVKRTVAAPSVFIFPPSDEQLKSGTASVVCLLNNFYPREAKVQWKVDNALQSGNSQESVTEQDSKDSTYSLSSTLTLSKADYEKHKVYACEVTHQGLSSPVTKSFNRGEC

SEQ ID NO: 25287 - protein, 111 aa, synthetic construct
  REGION 1..111: note = Description of Artificial Sequence: Synthetic polypeptide
  REGION 1..111: note = VL of XENP020696
DTVLTQSPASLAVSLGQRATISCKASQSVDYDGDSYMNWYQQKPGQPPKLLIYAASNLESGIPARLSGSGSGTDFTLNIHPVEEEDAATYYCQQSNQDPFTFGSGTKLEVK

SEQ ID NO: 25288 - protein, 15 aa, synthetic construct
  REGION 1..15: note = Description of Artificial Sequence: Synthetic peptide
  REGION 1..15: note = XENP020696 vlCDR1
KASQSVDYDGDSYMN

SEQ ID NO: 25289 - protein, 7 aa, synthetic construct
  REGION 1..7: note = Description of Artificial Sequence: Synthetic peptide
  REGION 1..7: note = XENP020696 vlCDR2
AASNLES

SEQ ID NO: 25290 - protein, 9 aa, synthetic construct
  REGION 1..9: note = Description of Artificial Sequence: Synthetic peptide
  REGION 1..9: note = XENP020696 vlCDR3
QQSNQDPFT

SEQ ID NO: 25291 - protein, 450 aa, synthetic construct; identical to SEQ ID NO: 22261
  REGION 1..450: note = Description of Artificial Sequence: Synthetic polypeptide
  REGION 1..450: note = XENP020701 7G8_H0_L0.93_IgG1_PVA_/S267K Heavy Chain

SEQ ID NO: 25292 - protein, 121 aa, synthetic construct; identical to SEQ ID NO: 22262
  REGION 1..121: note = Description of Artificial Sequence: Synthetic polypeptide
  REGION 1..121: note = VH of XENP020701

SEQ ID NO: 25293 - protein, 5 aa, synthetic construct
  REGION 1..5: note = Description of Artificial Sequence: Synthetic peptide
  REGION 1..5: note = XENP020701 vhCDR1
DAWMD

SEQ ID NO: 25294 - protein, 19 aa, synthetic construct
  REGION 1..19: note = Description of Artificial Sequence: Synthetic peptide
  REGION 1..19: note = XENP020701 vhCDR2
EIRTKANNHATYYAESVKG

SEQ ID NO: 25295 - protein, 10 aa, synthetic construct
  REGION 1..10: note = Description of Artificial Sequence: Synthetic peptide
  REGION 1..10: note = XENP020701 vhCDR3
LANWDWYFDV

SEQ ID NO: 25296 - protein, 218 aa, synthetic construct
  REGION 1..218: note = Description of Artificial Sequence: Synthetic polypeptide
  REGION 1..218: note = XENP020701 7G8_H0_L0.93_IgG1_PVA_/S267K Light Chain
DTVLTQSPASLAVSLGQRATISCKASQSVDYDGDSYMNWYQQKPGQPPKLLIYAASNLESGIPARLSGSGSGTDFTLNIHPVEEEDAATYYCQQSNDDPFTFGSGTKLEVKRTVAAPSVFIFPPSDEQLKSGTASVVCLLNNFYPREAKVQWKVDNALQSGNSQESVTEQDSKDSTYSLSSTLTLSKADYEKHKVYACEVTHQGLSSPVTKSFNRGEC

SEQ ID NO: 25297 - protein, 111 aa, synthetic construct
  REGION 1..111: note = Description of Artificial Sequence: Synthetic polypeptide
  REGION 1..111: note = VL of XENP020701
DTVLTQSPASLAVSLGQRATISCKASQSVDYDGDSYMNWYQQKPGQPPKLLIYAASNLESGIPARLSGSGSGTDFTLNIHPVEEEDAATYYCQQSNDDPFTFGSGTKLEVK

SEQ ID NO: 25298 - protein, 15 aa, synthetic construct
  REGION 1..15: note = Description of Artificial Sequence: Synthetic peptide
  REGION 1..15: note = XENP020701 vlCDR1
KASQSVDYDGDSYMN

SEQ ID NO: 25299 - protein, 7 aa, synthetic construct
  REGION 1..7: note = Description of Artificial Sequence: Synthetic peptide
  REGION 1..7: note = XENP020701 vlCDR2
AASNLES

SEQ ID NO: 25300 - protein, 9 aa, synthetic construct
  REGION 1..9: note = Description of Artificial Sequence: Synthetic peptide
  REGION 1..9: note = XENP020701 vlCDR3
QQSNDDPFT

SEQ ID NO: 25301 - protein, 450 aa, synthetic construct; identical to SEQ ID NO: 22261
  REGION 1..450: note = Description of Artificial Sequence: Synthetic polypeptide
  REGION 1..450: note = XENP020702 7G8_H0_L0.94_IgG1_PVA_/S267K Heavy Chain

SEQ ID NO: 25302 - protein, 121 aa, synthetic construct; identical to SEQ ID NO: 22262
  REGION 1..121: note = Description of Artificial Sequence: Synthetic polypeptide
  REGION 1..121: note = VH of XENP020702

SEQ ID NO: 25303 - protein, 5 aa, synthetic construct
  REGION 1..5: note = Description of Artificial Sequence: Synthetic peptide
  REGION 1..5: note = XENP020702 vhCDR1
DAWMD

SEQ ID NO: 25304 - protein, 19 aa, synthetic construct
  REGION 1..19: note = Description of Artificial Sequence: Synthetic peptide
  REGION 1..19: note = XENP020702 vhCDR2
EIRTKANNHATYYAESVKG

SEQ ID NO: 25305 - protein, 10 aa, synthetic construct
  REGION 1..10: note = Description of Artificial Sequence: Synthetic peptide
  REGION 1..10: note = XENP020702 vhCDR3
LANWDWYFDV

SEQ ID NO: 25306 - protein, 218 aa, synthetic construct
  REGION 1..218: note = Description of Artificial Sequence: Synthetic polypeptide
  REGION 1..218: note = XENP020702 7G8_H0_L0.94_IgG1_PVA_/S267K Light Chain
DTVLTQSPASLAVSLGQRATISCKASQSVDYDGDSYMNWYQQKPGQPPKLLIYAASNLESGIPARLSGSGSGTDFTLNIHPVEEEDAATYYCQQSNKDPFTFGSGTKLEVKRTVAAPSVFIFPPSDEQLKSGTASVVCLLNNFYPREAKVQWKVDNALQSGNSQESVTEQDSKDSTYSLSSTLTLSKADYEKHKVYACEVTHQGLSSPVTKSFNRGEC

SEQ ID NO: 25307 - protein, 111 aa, synthetic construct
  REGION 1..111: note = Description of Artificial Sequence: Synthetic polypeptide
  REGION 1..111: note = VL of XENP020702
DTVLTQSPASLAVSLGQRATISCKASQSVDYDGDSYMNWYQQKPGQPPKLLIYAASNLESGIPARLSGSGSGTDFTLNIHPVEEEDAATYYCQQSNKDPFTFGSGTKLEVK

SEQ ID NO: 25308 - protein, 15 aa, synthetic construct
  REGION 1..15: note = Description of Artificial Sequence: Synthetic peptide
  REGION 1..15: note = XENP020702 vlCDR1
KASQSVDYDGDSYMN

SEQ ID NO: 25309 - protein, 7 aa, synthetic construct
  REGION 1..7: note = Description of Artificial Sequence: Synthetic peptide
  REGION 1..7: note = XENP020702 vlCDR2
AASNLES

SEQ ID NO: 25310 - protein, 9 aa, synthetic construct
  REGION 1..9: note = Description of Artificial Sequence: Synthetic peptide
  REGION 1..9: note = XENP020702 vlCDR3
QQSNKDPFT

SEQ ID NO: 25311 - protein, 450 aa, synthetic construct; identical to SEQ ID NO: 22261
  REGION 1..450: note = Description of Artificial Sequence: Synthetic polypeptide
  REGION 1..450: note = XENP020703 7G8_H0_L0.95_IgG1_PVA_/S267K Heavy Chain

SEQ ID NO: 25312 - protein, 121 aa, synthetic construct; identical to SEQ ID NO: 22262
  REGION 1..121: note = Description of Artificial Sequence: Synthetic polypeptide
  REGION 1..121: note = VH of XENP020703

SEQ ID NO: 25313 - protein, 5 aa, synthetic construct
  REGION 1..5: note = Description of Artificial Sequence: Synthetic peptide
  REGION 1..5: note = XENP020703 vhCDR1
DAWMD

SEQ ID NO: 25314 - protein, 19 aa, synthetic construct
  REGION 1..19: note = Description of Artificial Sequence: Synthetic peptide
  REGION 1..19: note = XENP020703 vhCDR2
EIRTKANNHATYYAESVKG

SEQ ID NO: 25315 - protein, 10 aa, synthetic construct
  REGION 1..10: note = Description of Artificial Sequence: Synthetic peptide
  REGION 1..10: note = XENP020703 vhCDR3
LANWDWYFDV

SEQ ID NO: 25316 - protein, 218 aa, synthetic construct
  REGION 1..218: note = Description of Artificial Sequence: Synthetic polypeptide
  REGION 1..218: note = XENP020703 7G8_H0_L0.95_IgG1_PVA_/S267K Light Chain
DTVLTQSPASLAVSLGQRATISCKASQSVDYDGDSYMNWYQQKPGQPPKLLIYAASNLESGIPARLSGSGSGTDFTLNIHPVEEEDAATYYCQQSNSDPFTFGSGTKLEVKRTVAAPSVFIFPPSDEQLKSGTASVVCLLNNFYPREAKVQWKVDNALQSGNSQESVTEQDSKDSTYSLSSTLTLSKADYEKHKVYACEVTHQGLSSPVTKSFNRGEC

SEQ ID NO: 25317 - protein, 111 aa, synthetic construct
  REGION 1..111: note = Description of Artificial Sequence: Synthetic polypeptide
  REGION 1..111: note = VL of XENP020703
DTVLTQSPASLAVSLGQRATISCKASQSVDYDGDSYMNWYQQKPGQPPKLLIYAASNLESGIPARLSGSGSGTDFTLNIHPVEEEDAATYYCQQSNSDPFTFGSGTKLEVK

SEQ ID NO: 25318 - protein, 15 aa, synthetic construct
  REGION 1..15: note = Description of Artificial Sequence: Synthetic peptide
  REGION 1..15: note = XENP020703 vlCDR1
KASQSVDYDGDSYMN

SEQ ID NO: 25319 - protein, 7 aa, synthetic construct
  REGION 1..7: note = Description of Artificial Sequence: Synthetic peptide
  REGION 1..7: note = XENP020703 vlCDR2
AASNLES

SEQ ID NO: 25320 - protein, 9 aa, synthetic construct
  REGION 1..9: note = Description of Artificial Sequence: Synthetic peptide
  REGION 1..9: note = XENP020703 vlCDR3
QQSNSDPFT

SEQ ID NO: 25321 - protein, 450 aa, synthetic construct; identical to SEQ ID NO: 22261
  REGION 1..450: note = Description of Artificial Sequence: Synthetic polypeptide
  REGION 1..450: note = XENP020704 7G8_H0_L0.96_IgG1_PVA_/S267K Heavy Chain

SEQ ID NO: 25322 - protein, 121 aa, synthetic construct; identical to SEQ ID NO: 22262
  REGION 1..121: note = Description of Artificial Sequence: Synthetic polypeptide
  REGION 1..121: note = VH of XENP020704

SEQ ID NO: 25323 - protein, 5 aa, synthetic construct
  REGION 1..5: note = Description of Artificial Sequence: Synthetic peptide
  REGION 1..5: note = XENP020704 vhCDR1
DAWMD

SEQ ID NO: 25324 - protein, 19 aa, synthetic construct
  REGION 1..19: note = Description of Artificial Sequence: Synthetic peptide
  REGION 1..19: note = XENP020704 vhCDR2
EIRTKANNHATYYAESVKG

SEQ ID NO: 25325 - protein, 10 aa, synthetic construct
  REGION 1..10: note = Description of Artificial Sequence: Synthetic peptide
  REGION 1..10: note = XENP020704 vhCDR3
LANWDWYFDV

SEQ ID NO: 25326 - protein, 218 aa, synthetic construct
  REGION 1..218: note = Description of Artificial Sequence: Synthetic polypeptide
  REGION 1..218: note = XENP020704 7G8_H0_L0.96_IgG1_PVA_/S267K Light Chain
DTVLTQSPASLAVSLGQRATISCKASQSVDYDGDSYMNWYQQKPGQPPKLLIYAASNLESGIPARLSGSGSGTDFTLNIHPVEEEDAATYYCQQSNHDPFTFGSGTKLEVKRTVAAPSVFIFPPSDEQLKSGTASVVCLLNNFYPREAKVQWKVDNALQSGNSQESVTEQDSKDSTYSLSSTLTLSKADYEKHKVYACEVTHQGLSSPVTKSFNRGEC

SEQ ID NO: 25327 - protein, 111 aa, synthetic construct
  REGION 1..111: note = Description of Artificial Sequence: Synthetic polypeptide
  REGION 1..111: note = VL of XENP020704
DTVLTQSPASLAVSLGQRATISCKASQSVDYDGDSYMNWYQQKPGQPPKLLIYAASNLESGIPARLSGSGSGTDFTLNIHPVEEEDAATYYCQQSNHDPFTFGSGTKLEVK

SEQ ID NO: 25328 - protein, 15 aa, synthetic construct
  REGION 1..15: note = Description of Artificial Sequence: Synthetic peptide
  REGION 1..15: note = XENP020704 vlCDR1
KASQSVDYDGDSYMN

SEQ ID NO: 25329 - protein, 7 aa, synthetic construct
  REGION 1..7: note = Description of Artificial Sequence: Synthetic peptide
  REGION 1..7: note = XENP020704 vlCDR2
AASNLES

SEQ ID NO: 25330 - protein, 9 aa, synthetic construct
  REGION 1..9: note = Description of Artificial Sequence: Synthetic peptide
  REGION 1..9: note = XENP020704 vlCDR3
QQSNHDPFT

SEQ ID NO: 25331 - protein, 450 aa, synthetic construct; identical to SEQ ID NO: 22261
  REGION 1..450: note = Description of Artificial Sequence: Synthetic polypeptide
  REGION 1..450: note = XENP020705 7G8_H0_L0.97_IgG1_PVA_/S267K Heavy Chain

SEQ ID NO: 25332 - protein, 121 aa, synthetic construct; identical to SEQ ID NO: 22262
  REGION 1..121: note = Description of Artificial Sequence: Synthetic polypeptide
  REGION 1..121: note = VH of XENP020705

SEQ ID NO: 25333 - protein, 5 aa, synthetic construct
  REGION 1..5: note = Description of Artificial Sequence: Synthetic peptide
  REGION 1..5: note = XENP020705 vhCDR1
DAWMD

SEQ ID NO: 25334 - protein, 19 aa, synthetic construct
  REGION 1..19: note = Description of Artificial Sequence: Synthetic peptide
  REGION 1..19: note = XENP020705 vhCDR2
EIRTKANNHATYYAESVKG

SEQ ID NO: 25335 - protein, 10 aa, synthetic construct
  REGION 1..10: note = Description of Artificial Sequence: Synthetic peptide
  REGION 1..10: note = XENP020705 vhCDR3
LANWDWYFDV

SEQ ID NO: 25336 - protein, 218 aa, synthetic construct
  REGION 1..218: note = Description of Artificial Sequence: Synthetic polypeptide
  REGION 1..218: note = XENP020705 7G8_H0_L0.97_IgG1_PVA_/S267K Light Chain
DTVLTQSPASLAVSLGQRATISCKASQSVDYDGDSYMNWYQQKPGQPPKLLIYAASNLESGIPARLSGSGSGTDFTLNIHPVEEEDAATYYCQQSNADPFTFGSGTKLEVKRTVAAPSVFIFPPSDEQLKSGTASVVCLLNNFYPREAKVQWKVDNALQSGNSQESVTEQDSKDSTYSLSSTLTLSKADYEKHKVYACEVTHQGLSSPVTKSFNRGEC

SEQ ID NO: 25337 - protein, 111 aa, synthetic construct
  REGION 1..111: note = Description of Artificial Sequence: Synthetic polypeptide
  REGION 1..111: note = VL of XENP020705
DTVLTQSPASLAVSLGQRATISCKASQSVDYDGDSYMNWYQQKPGQPPKLLIYAASNLESGIPARLSGSGSGTDFTLNIHPVEEEDAATYYCQQSNADPFTFGSGTKLEVK

SEQ ID NO: 25338 - protein, 15 aa, synthetic construct
  REGION 1..15: note = Description of Artificial Sequence: Synthetic peptide
  REGION 1..15: note = XENP020705 vlCDR1
KASQSVDYDGDSYMN

SEQ ID NO: 25339 - protein, 7 aa, synthetic construct
  REGION 1..7: note = Description of Artificial Sequence: Synthetic peptide
  REGION 1..7: note = XENP020705 vlCDR2
AASNLES

SEQ ID NO: 25340 - protein, 9 aa, synthetic construct
  REGION 1..9: note = Description of Artificial Sequence: Synthetic peptide
  REGION 1..9: note = XENP020705 vlCDR3
QQSNADPFT

SEQ ID NO: 25341 - protein, 450 aa, synthetic construct; identical to SEQ ID NO: 22261
  REGION 1..450: note = Description of Artificial Sequence: Synthetic polypeptide
  REGION 1..450: note = XENP020706 7G8_H0_L0.98_IgG1_PVA_/S267K Heavy Chain

SEQ ID NO: 25342 - protein, 121 aa, synthetic construct; identical to SEQ ID NO: 22262
  REGION 1..121: note = Description of Artificial Sequence: Synthetic polypeptide
  REGION 1..121: note = VH of XENP020706

SEQ ID NO: 25343 - protein, 5 aa, synthetic construct
  REGION 1..5: note = Description of Artificial Sequence: Synthetic peptide
  REGION 1..5: note = XENP020706 vhCDR1
DAWMD

SEQ ID NO: 25344 - protein, 19 aa, synthetic construct
  REGION 1..19: note = Description of Artificial Sequence: Synthetic peptide
  REGION 1..19: note = XENP020706 vhCDR2
EIRTKANNHATYYAESVKG

SEQ ID NO: 25345 - protein, 10 aa, synthetic construct
  REGION 1..10: note = Description of Artificial Sequence: Synthetic peptide
  REGION 1..10: note = XENP020706 vhCDR3
LANWDWYFDV

SEQ ID NO: 25346 - protein, 218 aa, synthetic construct
  REGION 1..218: note = Description of Artificial Sequence: Synthetic polypeptide
  REGION 1..218: note = XENP020706 7G8_H0_L0.98_IgG1_PVA_/S267K Light Chain
DTVLTQSPASLAVSLGQRATISCKASQSVDYDGDSYMNWYQQKPGQPPKLLIYAASNLESGIPARLSGSGSGTDFTLNIHPVEEEDAATYYCQQSNGDPFTFGSGTKLEVKRTVAAPSVFIFPPSDEQLKSGTASVVCLLNNFYPREAKVQWKVDNALQSGNSQESVTEQDSKDSTYSLSSTLTLSKADYEKHKVYACEVTHQGLSSPVTKSFNRGEC

SEQ ID NO: 25347 - protein, 111 aa, synthetic construct
  REGION 1..111: note = Description of Artificial Sequence: Synthetic polypeptide
  REGION 1..111: note = VL of XENP020706
DTVLTQSPASLAVSLGQRATISCKASQSVDYDGDSYMNWYQQKPGQPPKLLIYAASNLESGIPARLSGSGSGTDFTLNIHPVEEEDAATYYCQQSNGDPFTFGSGTKLEVK

SEQ ID NO: 25348 - protein, 15 aa, synthetic construct
  REGION 1..15: note = Description of Artificial Sequence: Synthetic peptide
  REGION 1..15: note = XENP020706 vlCDR1
KASQSVDYDGDSYMN

SEQ ID NO: 25349 - protein, 7 aa, synthetic construct
  REGION 1..7: note = Description of Artificial Sequence: Synthetic peptide
  REGION 1..7: note = XENP020706 vlCDR2
AASNLES

SEQ ID NO: 25350 - protein, 9 aa, synthetic construct
  REGION 1..9: note = Description of Artificial Sequence: Synthetic peptide
  REGION 1..9: note = XENP020706 vlCDR3
QQSNGDPFT

SEQ ID NO: 25351 - protein, 450 aa, synthetic construct; identical to SEQ ID NO: 22261
  REGION 1..450: note = Description of Artificial Sequence: Synthetic polypeptide
  REGION 1..450: note = XENP020707 7G8_H0_L0.99_IgG1_PVA_/S267K Heavy Chain

SEQ ID NO: 25352 - protein, 121 aa, synthetic construct; identical to SEQ ID NO: 22262
  REGION 1..121: note = Description of Artificial Sequence: Synthetic polypeptide
  REGION 1..121: note = VH of XENP020707

SEQ ID NO: 25353 - protein, 5 aa, synthetic construct
  REGION 1..5: note = Description of Artificial Sequence: Synthetic peptide
  REGION 1..5: note = XENP020707 vhCDR1
DAWMD

SEQ ID NO: 25354 - protein, 19 aa, synthetic construct
  REGION 1..19: note = Description of Artificial Sequence: Synthetic peptide
  REGION 1..19: note = XENP020707 vhCDR2
EIRTKANNHATYYAESVKG

SEQ ID NO: 25355 - protein, 10 aa, synthetic construct
  REGION 1..10: note = Description of Artificial Sequence: Synthetic peptide
  REGION 1..10: note = XENP020707 vhCDR3
LANWDWYFDV

SEQ ID NO: 25356 - protein, 218 aa, synthetic construct
  REGION 1..218: note = Description of Artificial Sequence: Synthetic polypeptide
  REGION 1..218: note = XENP020707 7G8_H0_L0.99_IgG1_PVA_/S267K Light Chain
DTVLTQSPASLAVSLGQRATISCKASQSVDYDGDSYMNWYQQKPGQPPKLLIYAASNLESGIPARLSGSGSGTDFTLNIHPVEEEDAATYYCQQSNYDPFTFGSGTKLEVKRTVAAPSVFIFPPSDEQLKSGTASVVCLLNNFYPREAKVQWKVDNALQSGNSQESVTEQDSKDSTYSLSSTLTLSKADYEKHKVYACEVTHQGLSSPVTKSFNRGEC

SEQ ID NO: 25357 - protein, 111 aa, synthetic construct
  REGION 1..111: note = Description of Artificial Sequence: Synthetic polypeptide
  REGION 1..111: note = VL of XENP020707
DTVLTQSPASLAVSLGQRATISCKASQSVDYDGDSYMNWYQQKPGQPPKLLIYAASNLESGIPARLSGSGSGTDFTLNIHPVEEEDAATYYCQQSNYDPFTFGSGTKLEVK

SEQ ID NO: 25358 - protein, 15 aa, synthetic construct
  REGION 1..15: note = Description of Artificial Sequence: Synthetic peptide
  REGION 1..15: note = XENP020707 vlCDR1
KASQSVDYDGDSYMN

SEQ ID NO: 25359 - protein, 7 aa, synthetic construct
  REGION 1..7: note = Description of Artificial Sequence: Synthetic peptide
  REGION 1..7: note = XENP020707 vlCDR2
AASNLES

SEQ ID NO: 25360 - protein, 9 aa, synthetic construct
  REGION 1..9: note = Description of Artificial Sequence: Synthetic peptide
  REGION 1..9: note = XENP020707 vlCDR3
QQSNYDPFT

SEQ ID NO: 25361 - protein, 450 aa, synthetic construct; identical to SEQ ID NO: 22261
  REGION 1..450: note = Description of Artificial Sequence: Synthetic polypeptide
  REGION 1..450: note = XENP020708 7G8_H0_L0.100_IgG1_PVA_/S267K Heavy Chain

SEQ ID NO: 25362 - protein, 121 aa, synthetic construct; identical to SEQ ID NO: 22262
  REGION 1..121: note = Description of Artificial Sequence: Synthetic polypeptide
  REGION 1..121: note = VH of XENP020708

SEQ ID NO: 25363 - protein, 5 aa, synthetic construct
  REGION 1..5: note = Description of Artificial Sequence: Synthetic peptide
  REGION 1..5: note = XENP020708 vhCDR1
DAWMD

SEQ ID NO: 25364 - protein, 19 aa, synthetic construct
  REGION 1..19: note = Description of Artificial Sequence: Synthetic peptide
  REGION 1..19: note = XENP020708 vhCDR2
EIRTKANNHATYYAESVKG

SEQ ID NO: 25365 - protein, 10 aa, synthetic construct
  REGION 1..10: note = Description of Artificial Sequence: Synthetic peptide
  REGION 1..10: note = XENP020708 vhCDR3
LANWDWYFDV

SEQ ID NO: 25366 - protein, 218 aa, synthetic construct
  REGION 1..218: note = Description of Artificial Sequence: Synthetic polypeptide
  REGION 1..218: note = XENP020708 7G8_H0_L0.100_IgG1_PVA_/S267K Light Chain
DTVLTQSPASLAVSLGQRATISCKASQSVDYDGDSYMNWYQQKPGQPPKLLIYAASNLESGIPARLSGSGSGTDFTLNIHPVEEEDAATYYCQQSNIDPFTFGSGTKLEVKRTVAAPSVFIFPPSDEQLKSGTASVVCLLNNFYPREAKVQWKVDNALQSGNSQESVTEQDSKDSTYSLSSTLTLSKADYEKHKVYACEVTHQGLSSPVTKSFNRGEC

SEQ ID NO: 25367 - protein, 111 aa, synthetic construct
  REGION 1..111: note = Description of Artificial Sequence: Synthetic polypeptide
  REGION 1..111: note = VL of XENP020708
DTVLTQSPASLAVSLGQRATISCKASQSVDYDGDSYMNWYQQKPGQPPKLLIYAASNLESGIPARLSGSGSGTDFTLNIHPVEEEDAATYYCQQSNIDPFTFGSGTKLEVK

SEQ ID NO: 25368 - protein, 15 aa, synthetic construct
  REGION 1..15: note = Description of Artificial Sequence: Synthetic peptide
  REGION 1..15: note = XENP020708 vlCDR1
KASQSVDYDGDSYMN

SEQ ID NO: 25369 - protein, 7 aa, synthetic construct
  REGION 1..7: note = Description of Artificial Sequence: Synthetic peptide
  REGION 1..7: note = XENP020708 vlCDR2
AASNLES

SEQ ID NO: 25370 - protein, 9 aa, synthetic construct
  REGION 1..9: note = Description of Artificial Sequence: Synthetic peptide
  REGION 1..9: note = XENP020708 vlCDR3
QQSNIDPFT

SEQ ID NO: 25371 - protein, 450 aa, synthetic construct; identical to SEQ ID NO: 22261
  REGION 1..450: note = Description of Artificial Sequence: Synthetic polypeptide
  REGION 1..450: note = XENP020709 7G8_H0_L0.101_IgG1_PVA_/S267K Heavy Chain

SEQ ID NO: 25372 - protein, 121 aa, synthetic construct; identical to SEQ ID NO: 22262
  REGION 1..121: note = Description of Artificial Sequence: Synthetic polypeptide
  REGION 1..121: note = VH of XENP020709

SEQ ID NO: 25373 - protein, 5 aa, synthetic construct
  REGION 1..5: note = Description of Artificial Sequence: Synthetic peptide
  REGION 1..5: note = XENP020709 vhCDR1
DAWMD

SEQ ID NO: 25374 - protein, 19 aa, synthetic construct
  REGION 1..19: note = Description of Artificial Sequence: Synthetic peptide
  REGION 1..19: note = XENP020709 vhCDR2
EIRTKANNHATYYAESVKG

SEQ ID NO: 25375 - protein, 10 aa, synthetic construct
  REGION 1..10: note = Description of Artificial Sequence: Synthetic peptide
  REGION 1..10: note = XENP020709 vhCDR3
LANWDWYFDV

SEQ ID NO: 25376 - protein, 218 aa, synthetic construct
  REGION 1..218: note = Description of Artificial Sequence: Synthetic polypeptide
  REGION 1..218: note = XENP020709 7G8_H0_L0.101_IgG1_PVA_/S267K Light Chain
DTVLTQSPASLAVSLGQRATISCKASQSVDYDGDSYMNWYQQKPGQPPKLLIYAASNLESGIPARLSGSGSGTDFTLNIHPVEEEDAATYYCQQSNENPFTFGSGTKLEVKRTVAAPSVFIFPPSDEQLKSGTASVVCLLNNFYPREAKVQWKVDNALQSGNSQESVTEQDSKDSTYSLSSTLTLSKADYEKHKVYACEVTHQGLSSPVTKSFNRGEC

SEQ ID NO: 25377 - protein, 111 aa, synthetic construct
  REGION 1..111: note = Description of Artificial Sequence: Synthetic polypeptide
  REGION 1..111: note = VL of XENP020709
DTVLTQSPASLAVSLGQRATISCKASQSVDYDGDSYMNWYQQKPGQPPKLLIYAASNLESGIPARLSGSGSGTDFTLNIHPVEEEDAATYYCQQSNENPFTFGSGTKLEVK

SEQ ID NO: 25378 - protein, 15 aa, synthetic construct
  REGION 1..15: note = Description of Artificial Sequence: Synthetic peptide
  REGION 1..15: note = XENP020709 vlCDR1
KASQSVDYDGDSYMN

SEQ ID NO: 25379 - protein, 7 aa, synthetic construct
  REGION 1..7: note = Description of Artificial Sequence: Synthetic peptide
  REGION 1..7: note = XENP020709 vlCDR2
AASNLES

SEQ ID NO: 25380 - protein, 9 aa, synthetic construct
  REGION 1..9: note = Description of Artificial Sequence: Synthetic peptide
  REGION 1..9: note = XENP020709 vlCDR3
QQSNENPFT

SEQ ID NO: 25381 - protein, 450 aa, synthetic construct; identical to SEQ ID NO: 22261
  REGION 1..450: note = Description of Artificial Sequence: Synthetic polypeptide
  REGION 1..450: note = XENP020710 7G8_H0_L0.102_IgG1_PVA_/S267K Heavy Chain

SEQ ID NO: 25382 - protein, 121 aa, synthetic construct; identical to SEQ ID NO: 22262
  REGION 1..121: note = Description of Artificial Sequence: Synthetic polypeptide
  REGION 1..121: note = VH of XENP020710

SEQ ID NO: 25383 - protein, 5 aa, synthetic construct
  REGION 1..5: note = Description of Artificial Sequence: Synthetic peptide
  REGION 1..5: note = XENP020710 vhCDR1
DAWMD

SEQ ID NO: 25384 - protein, 19 aa, synthetic construct
  REGION 1..19: note = Description of Artificial Sequence: Synthetic peptide
  REGION 1..19: note = XENP020710 vhCDR2
EIRTKANNHATYYAESVKG

SEQ ID NO: 25385 - protein, 10 aa, synthetic construct
  REGION 1..10: note = Description of Artificial Sequence: Synthetic peptide
  REGION 1..10: note = XENP020710 vhCDR3
LANWDWYFDV

SEQ ID NO: 25386 - protein, 218 aa, synthetic construct
  REGION 1..218: note = Description of Artificial Sequence: Synthetic polypeptide
  REGION 1..218: note = XENP020710 7G8_H0_L0.102_IgG1_PVA_/S267K Light Chain
DTVLTQSPASLAVSLGQRATISCKASQSVDYDGDSYMNWYQQKPGQPPKLLIYAASNLESGIPARLSGSGSGTDFTLNIHPVEEEDAATYYCQQSNEEPFTFGSGTKLEVKRTVAAPSVFIFPPSDEQLKSGTASVVCLLNNFYPREAKVQWKVDNALQSGNSQESVTEQDSKDSTYSLSSTLTLSKADYEKHKVYACEVTHQGLSSPVTKSFNRGEC

SEQ ID NO: 25387 - protein, 111 aa, synthetic construct
  REGION 1..111: note = Description of Artificial Sequence: Synthetic polypeptide
  REGION 1..111: note = VL of XENP020710
DTVLTQSPASLAVSLGQRATISCKASQSVDYDGDSYMNWYQQKPGQPPKLLIYAASNLESGIPARLSGSGSGTDFTLNIHPVEEEDAATYYCQQSNEEPFTFGSGTKLEVK

SEQ ID NO: 25388 - protein, 15 aa, synthetic construct
  REGION 1..15: note = Description of Artificial Sequence: Synthetic peptide
  REGION 1..15: note = XENP020710 vlCDR1
KASQSVDYDGDSYMN

SEQ ID NO: 25389 - protein, 7 aa, synthetic construct
  REGION 1..7: note = Description of Artificial Sequence: Synthetic peptide
  REGION 1..7: note = XENP020710 vlCDR2
AASNLES

SEQ ID NO: 25390 - protein, 9 aa, synthetic construct
  REGION 1..9: note = Description of Artificial Sequence: Synthetic peptide
  REGION 1..9: note = XENP020710 vlCDR3
QQSNEEPFT

SEQ ID NO: 25391 - protein, 450 aa, synthetic construct; identical to SEQ ID NO: 22261
  REGION 1..450: note = Description of Artificial Sequence: Synthetic polypeptide
  REGION 1..450: note = XENP020711 7G8_H0_L0.103_IgG1_PVA_/S267K Heavy Chain

SEQ ID NO: 25392 - protein, 121 aa, synthetic construct; identical to SEQ ID NO: 22262
  REGION 1..121: note = Description of Artificial Sequence: Synthetic polypeptide
  REGION 1..121: note = VH of XENP020711

SEQ ID NO: 25393 - protein, 5 aa, synthetic construct
  REGION 1..5: note = Description of Artificial Sequence: Synthetic peptide
  REGION 1..5: note = XENP020711 vhCDR1
DAWMD

SEQ ID NO: 25394 - protein, 19 aa, synthetic construct
  REGION 1..19: note = Description of Artificial Sequence: Synthetic peptide
  REGION 1..19: note = XENP020711 vhCDR2
EIRTKANNHATYYAESVKG

SEQ ID NO: 25395 - protein, 10 aa, synthetic construct
  REGION 1..10: note = Description of Artificial Sequence: Synthetic peptide
  REGION 1..10: note = XENP020711 vhCDR3
LANWDWYFDV

SEQ ID NO: 25396 - protein, 218 aa, synthetic construct
  REGION 1..218: note = Description of Artificial Sequence: Synthetic polypeptide
  REGION 1..218: note = XENP020711 7G8_H0_L0.103_IgG1_PVA_/S267K Light Chain
DTVLTQSPASLAVSLGQRATISCKASQSVDYDGDSYMNWYQQKPGQPPKLLIYAASNLESGIPARLSGSGSGTDFTLNIHPVEEEDAATYYCQQSNEHPFTFGSGTKLEVKRTVAAPSVFIFPPSDEQLKSGTASVVCLLNNFYPREAKVQWKVDNALQSGNSQESVTEQDSKDSTYSLSSTLTLSKADYEKHKVYACEVTHQGLSSPVTKSFNRGEC

SEQ ID NO: 25397 - protein, 111 aa, synthetic construct
  REGION 1..111: note = Description of Artificial Sequence: Synthetic polypeptide
  REGION 1..111: note = VL of XENP020711
DTVLTQSPASLAVSLGQRATISCKASQSVDYDGDSYMNWYQQKPGQPPKLLIYAASNLESGIPARLSGSGSGTDFTLNIHPVEEEDAATYYCQQSNEHPFTFGSGTKLEVK

SEQ ID NO: 25398 - protein, 15 aa, synthetic construct
  REGION 1..15: note = Description of Artificial Sequence: Synthetic peptide
  REGION 1..15: note = XENP020711 vlCDR1
KASQSVDYDGDSYMN

SEQ ID NO: 25399 - protein, 7 aa, synthetic construct
  REGION 1..7: note = Description of Artificial Sequence: Synthetic peptide
  REGION 1..7: note = XENP020711 vlCDR2
AASNLES

SEQ ID NO: 25400 - protein, 9 aa, synthetic construct
  REGION 1..9: note = Description of Artificial Sequence: Synthetic peptide
  REGION 1..9: note = XENP020711 vlCDR3
QQSNEHPFT

SEQ ID NO: 25401 - protein, 450 aa, synthetic construct; identical to SEQ ID NO: 22261
  REGION 1..450: note = Description of Artificial Sequence: Synthetic polypeptide
  REGION 1..450: note = XENP020712 7G8_H0_L0.104_IgG1_PVA_/S267K Heavy Chain

SEQ ID NO: 25402 - protein, 121 aa, synthetic construct; identical to SEQ ID NO: 22262
  REGION 1..121: note = Description of Artificial Sequence: Synthetic polypeptide
  REGION 1..121: note = VH of XENP020712

SEQ ID NO: 25403 - protein, 5 aa, synthetic construct
  REGION 1..5: note = Description of Artificial Sequence: Synthetic peptide
  REGION 1..5: note = XENP020712 vhCDR1
DAWMD

SEQ ID NO: 25404 - protein, 19 aa, synthetic construct
  REGION 1..19: note = Description of Artificial Sequence: Synthetic peptide
  REGION 1..19: note = XENP020712 vhCDR2
EIRTKANNHATYYAESVKG

SEQ ID NO: 25405 - protein, 10 aa, synthetic construct
  REGION 1..10: note = Description of Artificial Sequence: Synthetic peptide
  REGION 1..10: note = XENP020712 vhCDR3
LANWDWYFDV

SEQ ID NO: 25406 - protein, 218 aa, synthetic construct
  REGION 1..218: note = Description of Artificial Sequence: Synthetic polypeptide
  REGION 1..218: note = XENP020712 7G8_H0_L0.104_IgG1_PVA_/S267K Light Chain
DTVLTQSPASLAVSLGQRATISCKASQSVDYDGDSYMNWYQQKPGQPPKLLIYAASNLESGIPARLSGSGSGTDFTLNIHPVEEEDAATYYCQQSNERPFTFGSGTKLEVKRTVAAPSVFIFPPSDEQLKSGTASVVCLLNNFYPREAKVQWKVDNALQSGNSQESVTEQDSKDSTYSLSSTLTLSKADYEKHKVYACEVTHQGLSSPVTKSFNRGEC

SEQ ID NO: 25407 - protein, 111 aa, synthetic construct
  REGION 1..111: note = Description of Artificial Sequence: Synthetic polypeptide
  REGION 1..111: note = VL of XENP020712
DTVLTQSPASLAVSLGQRATISCKASQSVDYDGDSYMNWYQQKPGQPPKLLIYAASNLESGIPARLSGSGSGTDFTLNIHPVEEEDAATYYCQQSNERPFTFGSGTKLEVK

SEQ ID NO: 25408 - protein, 15 aa, synthetic construct
  REGION 1..15: note = Description of Artificial Sequence: Synthetic peptide
  REGION 1..15: note = XENP020712 vlCDR1
KASQSVDYDGDSYMN

SEQ ID NO: 25409 - protein, 7 aa, synthetic construct
  REGION 1..7: note = Description of Artificial Sequence: Synthetic peptide
  REGION 1..7: note = XENP020712 vlCDR2
AASNLES

SEQ ID NO: 25410 - protein, 9 aa, synthetic construct
  REGION 1..9: note = Description of Artificial Sequence: Synthetic peptide
  REGION 1..9: note = XENP020712 vlCDR3
QQSNERPFT

SEQ ID NO: 25411 - protein, 450 aa, synthetic construct; identical to SEQ ID NO: 22261
  REGION 1..450: note = Description of Artificial Sequence: Synthetic polypeptide
  REGION 1..450: note = XENP020713 7G8_H0_L0.105_IgG1_PVA_/S267K Heavy Chain

SEQ ID NO: 25412 - protein, 121 aa, synthetic construct; identical to SEQ ID NO: 22262
  REGION 1..121: note = Description of Artificial Sequence: Synthetic polypeptide
  REGION 1..121: note = VH of XENP020713

SEQ ID NO: 25413 - protein, 5 aa, synthetic construct
  REGION 1..5: note = Description of Artificial Sequence: Synthetic peptide
  REGION 1..5: note = XENP020713 vhCDR1
DAWMD

SEQ ID NO: 25414 - protein, 19 aa, synthetic construct
  REGION 1..19: note = Description of Artificial Sequence: Synthetic peptide
  REGION 1..19: note = XENP020713 vhCDR2
EIRTKANNHATYYAESVKG

SEQ ID NO: 25415 - protein, 10 aa, synthetic construct
  REGION 1..10: note = Description of Artificial Sequence: Synthetic peptide
  REGION 1..10: note = XENP020713 vhCDR3
LANWDWYFDV

SEQ ID NO: 25416 - protein, 218 aa, synthetic construct
  REGION 1..218: note = Description of Artificial Sequence: Synthetic polypeptide
  REGION 1..218: note = XENP020713 7G8_H0_L0.105_IgG1_PVA_/S267K Light Chain
DTVLTQSPASLAVSLGQRATISCKASQSVDYDGDSYMNWYQQKPGQPPKLLIYAASNLESGIPARLSGSGSGTDFTLNIHPVEEEDAATYYCQQSNELPFTFGSGTKLEVKRTVAAPSVFIFPPSDEQLKSGTASVVCLLNNFYPREAKVQWKVDNALQSGNSQESVTEQDSKDSTYSLSSTLTLSKADYEKHKVYACEVTHQGLSSPVTKSFNRGEC

SEQ ID NO: 25417 - protein, 111 aa, synthetic construct
  REGION 1..111: note = Description of Artificial Sequence: Synthetic polypeptide
  REGION 1..111: note = VL of XENP020713
DTVLTQSPASLAVSLGQRATISCKASQSVDYDGDSYMNWYQQKPGQPPKLLIYAASNLESGIPARLSGSGSGTDFTLNIHPVEEEDAATYYCQQSNELPFTFGSGTKLEVK

SEQ ID NO: 25418 - protein, 15 aa, synthetic construct
  REGION 1..15: note = Description of Artificial Sequence: Synthetic peptide
  REGION 1..15: note = XENP020713 vlCDR1
KASQSVDYDGDSYMN

SEQ ID NO: 25419 - protein, 7 aa, synthetic construct
  REGION 1..7: note = Description of Artificial Sequence: Synthetic peptide
  REGION 1..7: note = XENP020713 vlCDR2
AASNLES

SEQ ID NO: 25420 - protein, 9 aa, synthetic construct
  REGION 1..9: note = Description of Artificial Sequence: Synthetic peptide
  REGION 1..9: note = XENP020713 vlCDR3
QQSNELPFT

SEQ ID NO: 25421 - protein, 450 aa, synthetic construct; identical to SEQ ID NO: 22261
  REGION 1..450: note = Description of Artificial Sequence: Synthetic polypeptide
  REGION 1..450: note = XENP020714 7G8_H0_L0.106_IgG1_PVA_/S267K Heavy Chain

SEQ ID NO: 25422 - protein, 121 aa, synthetic construct; identical to SEQ ID NO: 22262
  REGION 1..121: note = Description of Artificial Sequence: Synthetic polypeptide
  REGION 1..121: note = VH of XENP020714

SEQ ID NO: 25423 - protein, 5 aa, synthetic construct
  REGION 1..5: note = Description of Artificial Sequence: Synthetic peptide
  REGION 1..5: note = XENP020714 vhCDR1
DAWMD

SEQ ID NO: 25424 - protein, 19 aa, synthetic construct
  REGION 1..19: note = Description of Artificial Sequence: Synthetic peptide
  REGION 1..19: note = XENP020714 vhCDR2
EIRTKANNHATYYAESVKG

SEQ ID NO: 25425 - protein, 10 aa, synthetic construct
  REGION 1..10: note = Description of Artificial Sequence: Synthetic peptide
  REGION 1..10: note = XENP020714 vhCDR3
LANWDWYFDV

SEQ ID NO: 25426 - protein, 218 aa, synthetic construct
  REGION 1..218: note = Description of Artificial Sequence: Synthetic polypeptide
  REGION 1..218: note = XENP020714 7G8_H0_L0.106_IgG1_PVA_/S267K Light Chain
DTVLTQSPASLAVSLGQRATISCKASQSVDYDGDSYMNWYQQKPGQPPKLLIYAASNLESGIPARLSGSGSGTDFTLNIHPVEEEDAATYYCQQSNEGPFTFGSGTKLEVKRTVAAPSVFIFPPSDEQLKSGTASVVCLLNNFYPREAKVQWKVDNALQSGNSQESVTEQDSKDSTYSLSSTLTLSKADYEKHKVYACEVTHQGLSSPVTKSFNRGEC

SEQ ID NO: 25427 - protein, 111 aa, synthetic construct
  REGION 1..111: note = Description of Artificial Sequence: Synthetic polypeptide
  REGION 1..111: note = VL of XENP020714
DTVLTQSPASLAVSLGQRATISCKASQSVDYDGDSYMNWYQQKPGQPPKLLIYAASNLESGIPARLSGSGSGTDFTLNIHPVEEEDAATYYCQQSNEGPFTFGSGTKLEVK

SEQ ID NO: 25428 - protein, 15 aa, synthetic construct
  REGION 1..15: note = Description of Artificial Sequence: Synthetic peptide
  REGION 1..15: note = XENP020714 vlCDR1
KASQSVDYDGDSYMN

SEQ ID NO: 25429 - protein, 7 aa, synthetic construct
  REGION 1..7: note = Description of Artificial Sequence: Synthetic peptide
  REGION 1..7: note = XENP020714 vlCDR2
AASNLES

SEQ ID NO: 25430 - protein, 9 aa, synthetic construct
  REGION 1..9: note = Description of Artificial Sequence: Synthetic peptide
  REGION 1..9: note = XENP020714 vlCDR3
QQSNEGPFT

SEQ ID NO: 25431 - protein, 450 aa, synthetic construct; identical to SEQ ID NO: 22261
  REGION 1..450: note = Description of Artificial Sequence: Synthetic polypeptide
  REGION 1..450: note = XENP020715 7G8_H0_L0.107_IgG1_PVA_/S267K Heavy Chain

SEQ ID NO: 25432 - protein, 121 aa, synthetic construct; identical to SEQ ID NO: 22262
  REGION 1..121: note = Description of Artificial Sequence: Synthetic polypeptide
  REGION 1..121: note = VH of XENP020715

SEQ ID NO: 25433 - protein, 5 aa, synthetic construct
  REGION 1..5: note = Description of Artificial Sequence: Synthetic peptide
  REGION 1..5: note = XENP020715 vhCDR1
DAWMD

SEQ ID NO: 25434 - protein, 19 aa, synthetic construct
  REGION 1..19: note = Description of Artificial Sequence: Synthetic peptide
  REGION 1..19: note = XENP020715 vhCDR2
EIRTKANNHATYYAESVKG

SEQ ID NO: 25435 - protein, 10 aa, synthetic construct
  REGION 1..10: note = Description of Artificial Sequence: Synthetic peptide
  REGION 1..10: note = XENP020715 vhCDR3
LANWDWYFDV

SEQ ID NO: 25436 - protein, 218 aa, synthetic construct
  REGION 1..218: note = Description of Artificial Sequence: Synthetic polypeptide
  REGION 1..218: note = XENP020715 7G8_H0_L0.107_IgG1_PVA_/S267K Light Chain
DTVLTQSPASLAVSLGQRATISCKASQSVDYDGDSYMNWYQQKPGQPPKLLIYAASNLESGIPARLSGSGSGTDFTLNIHPVEEEDAATYYCQQSNEYPFTFGSGTKLEVKRTVAAPSVFIFPPSDEQLKSGTASVVCLLNNFYPREAKVQWKVDNALQSGNSQESVTEQDSKDSTYSLSSTLTLSKADYEKHKVYACEVTHQGLSSPVTKSFNRGEC

SEQ ID NO: 25437 - protein, 111 aa, synthetic construct
  REGION 1..111: note = Description of Artificial Sequence: Synthetic polypeptide
  REGION 1..111: note = VL of XENP020715
DTVLTQSPASLAVSLGQRATISCKASQSVDYDGDSYMNWYQQKPGQPPKLLIYAASNLESGIPARLSGSGSGTDFTLNIHPVEEEDAATYYCQQSNEYPFTFGSGTKLEVK

SEQ ID NO: 25438 - protein, 15 aa, synthetic construct
  REGION 1..15: note = Description of Artificial Sequence: Synthetic peptide
  REGION 1..15: note = XENP020715 vlCDR1
KASQSVDYDGDSYMN

SEQ ID NO: 25439 - protein, 7 aa, synthetic construct
  REGION 1..7: note = Description of Artificial Sequence: Synthetic peptide
  REGION 1..7: note = XENP020715 vlCDR2
AASNLES

SEQ ID NO: 25440 - protein, 9 aa, synthetic construct
  REGION 1..9: note = Description of Artificial Sequence: Synthetic peptide
  REGION 1..9: note = XENP020715 vlCDR3
QQSNEYPFT

SEQ ID NO: 25441 - protein, 446 aa, synthetic construct
  REGION 1..446: note = Description of Artificial Sequence: Synthetic polypeptide
  REGION 1..446: note = XENP016275 mAb8213_H0L0_IgG1_PVA_/S267K Heavy Chain
QVQLVQSGAEVKKPGASVKVSCKASGYTFTSYWMHWVRQAPGQGLEWMGEINPSNGRTNYNEKFKTRVTITADTSTSTAYMELSSLRSEDTAVYYCARGYYLYFDYWGQGTLVTVSSASTKGPSVFPLAPSSKSTSGGTAALGCLVKDYFPEPVTVSWNSGALTSGVHTFPAVLQSSGLYSLSSVVTVPSSSLGTQTYICNVNHKPSNTKVDKKVEPKSCDKTHTCPPCPAPPVAGPSVFLFPPKPKDTLMISRTPEVTCVVVDVKHEDPEVKFNWYVDGVEVHNAKTKPREEQYNSTYRVVSVLTVLHQDWLNGKEYKCKVSNKALPAPIEKTISKAKGQPREPQVYTLPPSREEMTKNQVSLTCLVKGFYPSDIAVEWESNGQPENNYKTTPPVLDSDGSFFLYSKLTVDKSRWQQGNVFSCSVMHEALHNHYTQKSLSLSPGK

SEQ ID NO: 25442 - protein, 117 aa, synthetic construct; identical to SEQ ID NO: 4641
  REGION 1..117: note = Description of Artificial Sequence: Synthetic polypeptide
  REGION 1..117: note = VH of XENP016275

SEQ ID NO: 25443 - protein, 5 aa, synthetic construct
  REGION 1..5: note = Description of Artificial Sequence: Synthetic peptide
  REGION 1..5: note = XENP016275 vhCDR1
SYWMH

SEQ ID NO: 25444 - protein, 17 aa, synthetic construct
  REGION 1..17: note = Description of Artificial Sequence: Synthetic peptide
  REGION 1..17: note = XENP016275 vhCDR2
EINPSNGRTNYNEKFKT

SEQ ID NO: 25445 - protein, 8 aa, synthetic construct
  REGION 1..8: note = Description of Artificial Sequence: Synthetic peptide
  REGION 1..8: note = XENP016275 vhCDR3
GYYLYFDY

SEQ ID NO: 25446 - protein, 214 aa, synthetic construct
  REGION 1..214: note = Description of Artificial Sequence: Synthetic polypeptide
  REGION 1..214: note = XENP016275 mAb8213_H0L0_IgG1_PVA_/S267K Light Chain
DIQMTQSPSSLSASVGDRVTITCHASQGIRINIGWYQQKPGKAPKLLIYHGTNLEDGVPSRFSGSGSGTDFTLTISSLQPEDFATYYCVQYGQFPWTFGQGTKLEIKRTVAAPSVFIFPPSDEQLKSGTASVVCLLNNFYPREAKVQWKVDNALQSGNSQESVTEQDSKDSTYSLSSTLTLSKADYEKHKVYACEVTHQGLSSPVTKSFNRGEC

SEQ ID NO: 25447 - protein, 107 aa, synthetic construct; identical to SEQ ID NO: 4645
  REGION 1..107: note = Description of Artificial Sequence: Synthetic polypeptide
  REGION 1..107: note = VL of XENP016275

SEQ ID NO: 25448 - protein, 11 aa, synthetic construct
  REGION 1..11: note = Description of Artificial Sequence: Synthetic peptide
  REGION 1..11: note = XENP016275 vlCDR1
HASQGIRINIG

SEQ ID NO: 25449 - protein, 7 aa, synthetic construct
  REGION 1..7: note = Description of Artificial Sequence: Synthetic peptide
  REGION 1..7: note = XENP016275 vlCDR2
HGTNLED

SEQ ID NO: 25450 - protein, 9 aa, synthetic construct
  REGION 1..9: note = Description of Artificial Sequence: Synthetic peptide
  REGION 1..9: note = XENP016275 vlCDR3
VQYGQFPWT

SEQ ID NO: 25451 - protein, 447 aa, synthetic construct
  REGION 1..447: note = Description of Artificial Sequence: Synthetic polypeptide
  REGION 1..447: note = XENP017973 ABTIM3_H0L0_IgG1_PVA_/S267K Heavy Chain
QVQLQQPGAELVKPGASVKMSCKASGYTFTSYNMHWIKQTPGQGLEWIGDIYPGNGDTSYNQKFKGKATLTADKSSSTVYMQLSSLTSEDSAVYYCARVGGAFPMDYWGQGTSVTVSSASTKGPSVFPLAPSSKSTSGGTAALGCLVKDYFPEPVTVSWNSGALTSGVHTFPAVLQSSGLYSLSSVVTVPSSSLGTQTYICNVNHKPSNTKVDKKVEPKSCDKTHTCPPCPAPPVAGPSVFLFPPKPKDTLMISRTPEVTCVVVDVKHEDPEVKFNWYVDGVEVHNAKTKPREEQYNSTYRVVSVLTVLHQDWLNGKEYKCKVSNKALPAPIEKTISKAKGQPREPQVYTLPPSREEMTKNQVSLTCLVKGFYPSDIAVEWESNGQPENNYKTTPPVLDSDGSFFLYSKLTVDKSRWQQGNVFSCSVMHEALHNHYTQKSLSLSPGK

SEQ ID NO: 25452 - protein, 118 aa, synthetic construct
  REGION 1..118: note = Description of Artificial Sequence: Synthetic polypeptide
  REGION 1..118: note = VH of XENP017973
QVQLQQPGAELVKPGASVKMSCKASGYTFTSYNMHWIKQTPGQGLEWIGDIYPGNGDTSYNQKFKGKATLTADKSSSTVYMQLSSLTSEDSAVYYCARVGGAFPMDYWGQGTSVTVSS

SEQ ID NO: 25453 - protein, 5 aa, synthetic construct
  REGION 1..5: note = Description of Artificial Sequence: Synthetic peptide
  REGION 1..5: note = XENP017973 vhCDR1
SYNMH

SEQ ID NO: 25454 - protein, 17 aa, synthetic construct
  REGION 1..17: note = Description of Artificial Sequence: Synthetic peptide
  REGION 1..17: note = XENP017973 vhCDR2
DIYPGNGDTSYNQKFKG

SEQ ID NO: 25455 - protein, 9 aa, synthetic construct
  REGION 1..9: note = Description of Artificial Sequence: Synthetic peptide
  REGION 1..9: note = XENP017973 vhCDR3
VGGAFPMDY

SEQ ID NO: 25456 - protein, 218 aa, synthetic construct
  REGION 1..218: note = Description of Artificial Sequence: Synthetic polypeptide
  REGION 1..218: note = XENP017973 ABTIM3_H0L0_IgG1_PVA_/S267K Light Chain
DIVLTQSPASLAVSLGQRATISCRASESVEYYGTSLMQWYQQKPGQPPKLLIYAASNVESGVPARFSGSGSGTDFSLNIHPVEEDDIAIYFCQQSRKDPSTFGGGTKLEIKRTVAAPSVFIFPPSDEQLKSGTASVVCLLNNFYPREAKVQWKVDNALQSGNSQESVTEQDSKDSTYSLSSTLTLSKADYEKHKVYACEVTHQGLSSPVTKSFNRGEC

SEQ ID NO: 25457 - protein, 111 aa, synthetic construct
  REGION 1..111: note = Description of Artificial Sequence: Synthetic polypeptide
  REGION 1..111: note = VL of XENP017973
DIVLTQSPASLAVSLGQRATISCRASESVEYYGTSLMQWYQQKPGQPPKLLIYAASNVESGVPARFSGSGSGTDFSLNIHPVEEDDIAIYFCQQSRKDPSTFGGGTKLEIK

SEQ ID NO: 25458 - protein, 15 aa, synthetic construct
  REGION 1..15: note = Description of Artificial Sequence: Synthetic peptide
  REGION 1..15: note = XENP017973 vlCDR1
RASESVEYYGTSLMQ

SEQ ID NO: 25459 - protein, 7 aa, synthetic construct
  REGION 1..7: note = Description of Artificial Sequence: Synthetic peptide
  REGION 1..7: note = XENP017973 vlCDR2
AASNVES

SEQ ID NO: 25460 - protein, 9 aa, synthetic construct
  REGION 1..9: note = Description of Artificial Sequence: Synthetic peptide
  REGION 1..9: note = XENP017973 vlCDR3
QQSRKDPST

SEQ ID NO: 25461 - protein, 447 aa, synthetic construct
  REGION 1..447: note = Description of Artificial Sequence: Synthetic polypeptide
  REGION 1..447: note = XENP017975 ABTIM3-hum11_H0L0_IgG1_PVA_/S267K Heavy Chain
QVQLVQSGAEVKKPGSSVKVSCKASGYTFTSYNMHWVRQAPGQGLEWMGDIYPGNGDTSYNQKFKGRVTITADKSTSTVYMELSSLRSEDTAVYYCARVGGAFPMDYWGQGTTVTVSSASTKGPSVFPLAPSSKSTSGGTAALGCLVKDYFPEPVTVSWNSGALTSGVHTFPAVLQSSGLYSLSSVVTVPSSSLGTQTYICNVNHKPSNTKVDKKVEPKSCDKTHTCPPCPAPPVAGPSVFLFPPKPKDTLMISRTPEVTCVVVDVKHEDPEVKFNWYVDGVEVHNAKTKPREEQYNSTYRVVSVLTVLHQDWLNGKEYKCKVSNKALPAPIEKTISKAKGQPREPQVYTLPPSREEMTKNQVSLTCLVKGFYPSDIAVEWESNGQPENNYKTTPPVLDSDGSFFLYSKLTVDKSRWQQGNVFSCSVMHEALHNHYTQKSLSLSPGK

SEQ ID NO: 25462 - protein, 118 aa, synthetic construct; identical to SEQ ID NO: 4609
  REGION 1..118: note = Description of Artificial Sequence: Synthetic polypeptide
  REGION 1..118: note = VH of XENP017975

SEQ ID NO: 25463 - protein, 5 aa, synthetic construct
  REGION 1..5: note = Description of Artificial Sequence: Synthetic peptide
  REGION 1..5: note = XENP017975 vhCDR1
SYNMH

SEQ ID NO: 25464 - protein, 17 aa, synthetic construct
  REGION 1..17: note = Description of Artificial Sequence: Synthetic peptide
  REGION 1..17: note = XENP017975 vhCDR2
DIYPGNGDTSYNQKFKG

SEQ ID NO: 25465 - protein, 9 aa, synthetic construct
  REGION 1..9: note = Description of Artificial Sequence: Synthetic peptide
  REGION 1..9: note = XENP017975 vhCDR3
VGGAFPMDY

SEQ ID NO: 25466 - protein, 218 aa, synthetic construct
  REGION 1..218: note = Description of Artificial Sequence: Synthetic polypeptide
  REGION 1..218: note = XENP017975 ABTIM3-hum11_H0L0_IgG1_PVA_/S267K Light Chain
AIQLTQSPSSLSASVGDRVTITCRASESVEYYGTSLMQWYQQKPGKAPKLLIYAASNVESGVPSRFSGSGSGTDFTLTISSLQPEDFATYFCQQSRKDPSTFGGGTKVEIKRTVAAPSVFIFPPSDEQLKSGTASVVCLLNNFYPREAKVQWKVDNALQSGNSQESVTEQDSKDSTYSLSSTLTLSKADYEKHKVYACEVTHQGLSSPVTKSFNRGEC

SEQ ID NO: 25467 - protein, 111 aa, synthetic construct; identical to SEQ ID NO: 4613
  REGION 1..111: note = Description of Artificial Sequence: Synthetic polypeptide
  REGION 1..111: note = VL of XENP017975

SEQ ID NO: 25468 - protein, 15 aa, synthetic construct
  REGION 1..15: note = Description of Artificial Sequence: Synthetic peptide
  REGION 1..15: note = XENP017975 vlCDR1
RASESVEYYGTSLMQ

SEQ ID NO: 25469 - protein, 7 aa, synthetic construct
  REGION 1..7: note = Description of Artificial Sequence: Synthetic peptide
  REGION 1..7: note = XENP017975 vlCDR2
AASNVES

SEQ ID NO: 25470 - protein, 9 aa, synthetic construct
  REGION 1..9: note = Description of Artificial Sequence: Synthetic peptide
  REGION 1..9: note = XENP017975 vlCDR3
QQSRKDPST

SEQ ID NO: 25471 - protein, 446 aa, synthetic construct
  REGION 1..446: note = Description of Artificial Sequence: Synthetic polypeptide
  REGION 1..446: note = XENP020403 1B3_H0L0_IgG1_PVA_/S267K Heavy Chain
EVKLVESGGGLVKPGGSLTLSCAASEFTFSSYAMSWVRQTPEKRLEWVASISSGGRTYYPDSVKGRFTISRDNARNILYLQMSSLRSEDTAMYYCARGRGFDVMDYWGQGTSVTVSSASTKGPSVFPLAPSSKSTSGGTAALGCLVKDYFPEPVTVSWNSGALTSGVHTFPAVLQSSGLYSLSSVVTVPSSSLGTQTYICNVNHKPSNTKVDKKVEPKSCDKTHTCPPCPAPPVAGPSVFLFPPKPKDTLMISRTPEVTCVVVDVKHEDPEVKFNWYVDGVEVHNAKTKPREEQYNSTYRVVSVLTVLHQDWLNGKEYKCKVSNKALPAPIEKTISKAKGQPREPQVYTLPPSREEMTKNQVSLTCLVKGFYPSDIAVEWESNGQPENNYKTTPPVLDSDGSFFLYSKLTVDKSRWQQGNVFSCSVMHEALHNHYTQKSLSLSPGK

SEQ ID NO: 25472 - protein, 117 aa, synthetic construct
  REGION 1..117: note = Description of Artificial Sequence: Synthetic polypeptide
  REGION 1..117: note = VH of XENP020403
EVKLVESGGGLVKPGGSLTLSCAASEFTFSSYAMSWVRQTPEKRLEWVASISSGGRTYYPDSVKGRFTISRDNARNILYLQMSSLRSEDTAMYYCARGRGFDVMDYWGQGTSVTVSS

SEQ ID NO: 25473 - protein, 5 aa, synthetic construct
  REGION 1..5: note = Description of Artificial Sequence: Synthetic peptide
  REGION 1..5: note = XENP020403 vhCDR1
SYAMS

SEQ ID NO: 25474 - protein, 16 aa, synthetic construct
  REGION 1..16: note = Description of Artificial Sequence: Synthetic peptide
  REGION 1..16: note = XENP020403 vhCDR2
SISSGGRTYYPDSVKG

SEQ ID NO: 25475 - protein, 9 aa, synthetic construct
  REGION 1..9: note = Description of Artificial Sequence: Synthetic peptide
  REGION 1..9: note = XENP020403 vhCDR3
GRGFDVMDY

SEQ ID NO: 25476 - protein, 214 aa, synthetic construct
  REGION 1..214: note = Description of Artificial Sequence: Synthetic polypeptide
  REGION 1..214: note = XENP020403 1B3_H0L0_IgG1_PVA_/S267K Light Chain
DIQMTQTTSSLSASLGDRVTISCRASQDISNYLNWYQQKPDGTVKLLIYYTSRLHSGVPSRFSGSGSGTDYSLTISNLEQEDIATYFCQQGNTLPYTFGGGTKLEIKRTVAAPSVFIFPPSDEQLKSGTASVVCLLNNFYPREAKVQWKVDNALQSGNSQESVTEQDSKDSTYSLSSTLTLSKADYEKHKVYACEVTHQGLSSPVTKSFNRGEC

SEQ ID NO: 25477 - protein, 107 aa, synthetic construct
  REGION 1..107: note = Description of Artificial Sequence: Synthetic polypeptide
  REGION 1..107: note = VL of XENP020403
DIQMTQTTSSLSASLGDRVTISCRASQDISNYLNWYQQKPDGTVKLLIYYTSRLHSGVPSRFSGSGSGTDYSLTISNLEQEDIATYFCQQGNTLPYTFGGGTKLEIK

SEQ ID NO: 25478 - protein, 11 aa, synthetic construct
  REGION 1..11: note = Description of Artificial Sequence: Synthetic peptide
  REGION 1..11: note = XENP020403 vlCDR1
RASQDISNYLN

SEQ ID NO: 25479 - protein, 7 aa, synthetic construct
  REGION 1..7: note = Description of Artificial Sequence: Synthetic peptide
  REGION 1..7: note = XENP020403 vlCDR2
YTSRLHS

SEQ ID NO: 25480 - protein, 9 aa, synthetic construct
  REGION 1..9: note = Description of Artificial Sequence: Synthetic peptide
  REGION 1..9: note = XENP020403 vlCDR3
QQGNTLPYT

SEQ ID NO: 25481 - protein, 446 aa, synthetic construct
  REGION 1..446: note = Description of Artificial Sequence: Synthetic polypeptide
  REGION 1..446: note = XENP020404 1D12_H0L0_IgG1_PVA_/S267K Heavy Chain
QVQLQQSAADLARPGASVKLSCKASGYTFTSYTMHWVKQRPGQGLEWIGYLIPSSGYTDYNQRFKDKTTLTADKSSSTAYMQLSSLTSEDSAVYYCARGDSVYFDYWGQGTALTVSSASTKGPSVFPLAPSSKSTSGGTAALGCLVKDYFPEPVTVSWNSGALTSGVHTFPAVLQSSGLYSLSSVVTVPSSSLGTQTYICNVNHKPSNTKVDKKVEPKSCDKTHTCPPCPAPPVAGPSVFLFPPKPKDTLMISRTPEVTCVVVDVKHEDPEVKFNWYVDGVEVHNAKTKPREEQYNSTYRVVSVLTVLHQDWLNGKEYKCKVSNKALPAPIEKTISKAKGQPREPQVYTLPPSREEMTKNQVSLTCLVKGFYPSDIAVEWESNGQPENNYKTTPPVLDSDGSFFLYSKLTVDKSRWQQGNVFSCSVMHEALHNHYTQKSLSLSPGK

SEQ ID NO: 25482 - protein, 117 aa, synthetic construct
  REGION 1..117: note = Description of Artificial Sequence: Synthetic polypeptide
  REGION 1..117: note = VH of XENP020404
QVQLQQSAADLARPGASVKLSCKASGYTFTSYTMHWVKQRPGQGLEWIGYLIPSSGYTDYNQRFKDKTTLTADKSSSTAYMQLSSLTSEDSAVYYCARGDSVYFDYWGQGTALTVSS

SEQ ID NO: 25483 - protein, 5 aa, synthetic construct
  REGION 1..5: note = Description of Artificial Sequence: Synthetic peptide
  REGION 1..5: note = XENP020404 vhCDR1
SYTMH

SEQ ID NO: 25484 - protein, 17 aa, synthetic construct
  REGION 1..17: note = Description of Artificial Sequence: Synthetic peptide
  REGION 1..17: note = XENP020404 vhCDR2
YLIPSSGYTDYNQRFKD

SEQ ID NO: 25485 - protein, 8 aa, synthetic construct
  REGION 1..8: note = Description of Artificial Sequence: Synthetic peptide
  REGION 1..8: note = XENP020404 vhCDR3
GDSVYFDY

SEQ ID NO: 25486 - protein, 218 aa, synthetic construct
  REGION 1..218: note = Description of Artificial Sequence: Synthetic polypeptide
  REGION 1..218: note = XENP020404 1D12_H0L0_IgG1_PVA_/S267K Light Chain
DIVLTQSPASLAVSLGQRATISCRASESVEYYGTSLQQKYQQKPGQPPKLLIYAASNVESGVPARFSGSGSGTDFSLNIHPVEEDDIAQYFCQQSRKVPWTFGGGTKLEIKRTVAAPSVFIFPPSDEQLKSGTASVVCLLNNFYPREAKVQWKVDNALQSGNSQESVTEQDSKDSTYSLSSTLTLSKADYEKHKVYACEVTHQGLSSPVTKSFNRGEC

SEQ ID NO: 25487 - protein, 111 aa, synthetic construct
  REGION 1..111: note = Description of Artificial Sequence: Synthetic polypeptide
  REGION 1..111: note = VL of XENP020404
DIVLTQSPASLAVSLGQRATISCRASESVEYYGTSLQQKYQQKPGQPPKLLIYAASNVESGVPARFSGSGSGTDFSLNIHPVEEDDIAQYFCQQSRKVPWTFGGGTKLEIK

SEQ ID NO: 25488 - protein, 15 aa, synthetic construct
  REGION 1..15: note = Description of Artificial Sequence: Synthetic peptide
  REGION 1..15: note = XENP020404 vlCDR1
RASESVEYYGTSLQQ

SEQ ID NO: 25489 - protein, 7 aa, synthetic construct
  REGION 1..7: note = Description of Artificial Sequence: Synthetic peptide
  REGION 1..7: note = XENP020404 vlCDR2
AASNVES

SEQ ID NO: 25490 - protein, 9 aa, synthetic construct
  REGION 1..9: note = Description of Artificial Sequence: Synthetic peptide
  REGION 1..9: note = XENP020404 vlCDR3
QQSRKVPWT

SEQ ID NO: 25491 - protein, 446 aa, synthetic construct
  REGION 1..446: note = Description of Artificial Sequence: Synthetic polypeptide
  REGION 1..446: note = XENP020405 3H3_H0L0_IgG1_PVA_/S267K Heavy Chain
QVQLKESGPGLVAPSQSLSITCTVSGFSLNGYGVNWVRQPPGKGLEWLGYIIGDGSTDYNSALKSRLSISKDNSKSQVFLKMNSLQTDDTARYYCARSYYTSDEDYWGQGTLVTVSAASTKGPSVFPLAPSSKSTSGGTAALGCLVKDYFPEPVTVSWNSGALTSGVHTFPAVLQSSGLYSLSSVVTVPSSSLGTQTYICNVNHKPSNTKVDKKVEPKSCDKTHTCPPCPAPPVAGPSVFLFPPKPKDTLMISRTPEVTCVVVDVKHEDPEVKFNWYVDGVEVHNAKTKPREEQYNSTYRVVSVLTVLHQDWLNGKEYKCKVSNKALPAPIEKTISKAKGQPREPQVYTLPPSREEMTKNQVSLTCLVKGFYPSDIAVEWESNGQPENNYKTTPPVLDSDGSFFLYSKLTVDKSRWQQGNVFSCSVMHEALHNHYTQKSLSLSPGK

SEQ ID NO: 25492 - protein, 117 aa, synthetic construct
  REGION 1..117: note = Description of Artificial Sequence: Synthetic polypeptide
  REGION 1..117: note = VH of XENP020405
QVQLKESGPGLVAPSQSLSITCTVSGFSLNGYGVNWVRQPPGKGLEWLGYIIGDGSTDYNSALKSRLSISKDNSKSQVFLKMNSLQTDDTARYYCARSYYTSDEDYWGQGTLVTVSA

SEQ ID NO: 25493 - protein, 5 aa, synthetic construct
  REGION 1..5: note = Description of Artificial Sequence: Synthetic peptide
  REGION 1..5: note = XENP020405 vhCDR1
GYGVN

SEQ ID NO: 25494 - protein, 16 aa, synthetic construct
  REGION 1..16: note = Description of Artificial Sequence: Synthetic peptide
  REGION 1..16: note = XENP020405 vhCDR2
YIIGDGSTDYNSALKS

SEQ ID NO: 25495 - protein, 9 aa, synthetic construct
  REGION 1..9: note = Description of Artificial Sequence: Synthetic peptide
  REGION 1..9: note = XENP020405 vhCDR3
SYYTSDEDY

SEQ ID NO: 25496 - protein, 219 aa, synthetic construct
  REGION 1..219: note = Description of Artificial Sequence: Synthetic polypeptide
  REGION 1..219: note = XENP020405 3H3_H0L0_IgG1_PVA_/S267K Light Chain
DIVLSQSPSSLAVSAGEKVTISCKSSQSLLNSRTRKNYLAQYQQKPGQSPKLLIYSASTRESGVPDRFTGSGSGTDFTLTISSVLAEDLAVYYCKQSYSLRTFGGGTKLEIKRTVAAPSVFIFPPSDEQLKSGTASVVCLLNNFYPREAKVQWKVDNALQSGNSQESVTEQDSKDSTYSLSSTLTLSKADYEKHKVYACEVTHQGLSSPVTKSFNRGEC

SEQ ID NO: 25497 - protein, 112 aa, synthetic construct
  REGION 1..112: note = Description of Artificial Sequence: Synthetic polypeptide
  REGION 1..112: note = VL of XENP020405
DIVLSQSPSSLAVSAGEKVTISCKSSQSLLNSRTRKNYLAQYQQKPGQSPKLLIYSASTRESGVPDRFTGSGSGTDFTLTISSVLAEDLAVYYCKQSYSLRTFGGGTKLEIK

SEQ ID NO: 25498 - protein, 17 aa, synthetic construct
  REGION 1..17: note = Description of Artificial Sequence: Synthetic peptide
  REGION 1..17: note = XENP020405 vlCDR1
KSSQSLLNSRTRKNYLA

SEQ ID NO: 25499 - protein, 7 aa, synthetic construct
  REGION 1..7: note = Description of Artificial Sequence: Synthetic peptide
  REGION 1..7: note = XENP020405 vlCDR2
SASTRES

SEQ ID NO: 25500 - protein, 8 aa, synthetic construct
  REGION 1..8: note = Description of Artificial Sequence: Synthetic peptide
  REGION 1..8: note = XENP020405 vlCDR3
KQSYSLRT

SEQ ID NO: 25501 - protein, 446 aa, synthetic construct
  REGION 1..446: note = Description of Artificial Sequence: Synthetic polypeptide
  REGION 1..446: note = XENP020406 6D9_H0_1D12_L0_IgG1_PVA_/S267K Heavy Chain
QVQLKQSGPGLVQPSQSLSITCTVSGFSLTSYGVHWVRQSPGKGLEWLGVIISGGSTEYNAAFISRLSISKDNSKSQVFFKMNSLQADDTAIYYCARGGLLSPFDYWGQGTTLTVSSASTKGPSVFPLAPSSKSTSGGTAALGCLVKDYFPEPVTVSWNSGALTSGVHTFPAVLQSSGLYSLSSVVTVPSSSLGTQTYICNVNHKPSNTKVDKKVEPKSCDKTHTCPPCPAPPVAGPSVFLFPPKPKDTLMISRTPEVTCVVVDVKHEDPEVKFNWYVDGVEVHNAKTKPREEQYNSTYRVVSVLTVLHQDWLNGKEYKCKVSNKALPAPIEKTISKAKGQPREPQVYTLPPSREEMTKNQVSLTCLVKGFYPSDIAVEWESNGQPENNYKTTPPVLDSDGSFFLYSKLTVDKSRWQQGNVFSCSVMHEALHNHYTQKSLSLSPGK

SEQ ID NO: 25502 - protein, 117 aa, synthetic construct
  REGION 1..117: note = Description of Artificial Sequence: Synthetic polypeptide
  REGION 1..117: note = VH of XENP020406
QVQLKQSGPGLVQPSQSLSITCTVSGFSLTSYGVHWVRQSPGKGLEWLGVIISGGSTEYNAAFISRLSISKDNSKSQVFFKMNSLQADDTAIYYCARGGLLSPFDYWGQGTTLTVSS

SEQ ID NO: 25503 - protein, 5 aa, synthetic construct
  REGION 1..5: note = Description of Artificial Sequence: Synthetic peptide
  REGION 1..5: note = XENP020406 vhCDR1
SYGVH

SEQ ID NO: 25504 - protein, 16 aa, synthetic construct
  REGION 1..16: note = Description of Artificial Sequence: Synthetic peptide
  REGION 1..16: note = XENP020406 vhCDR2
VIISGGSTEYNAAFIS

SEQ ID NO: 25505 - protein, 9 aa, synthetic construct
  REGION 1..9: note = Description of Artificial Sequence: Synthetic peptide
  REGION 1..9: note = XENP020406 vhCDR3
GGLLSPFDY

SEQ ID NO: 25506 - protein, 218 aa, synthetic construct; identical to SEQ ID NO: 25486
  REGION 1..218: note = Description of Artificial Sequence: Synthetic polypeptide
  REGION 1..218: note = XENP020406 6D9_H0_1D12_L0_IgG1_PVA_/S267K Light Chain

SEQ ID NO: 25507 - protein, 111 aa, synthetic construct; identical to SEQ ID NO: 25487
  REGION 1..111: note = Description of Artificial Sequence: Synthetic polypeptide
  REGION 1..111: note = VL of XENP020406

SEQ ID NO: 25508 - protein, 15 aa, synthetic construct
  REGION 1..15: note = Description of Artificial Sequence: Synthetic peptide
  REGION 1..15: note = XENP020406 vlCDR1
RASESVEYYGTSLQQ

SEQ ID NO: 25509 - protein, 7 aa, synthetic construct
  REGION 1..7: note = Description of Artificial Sequence: Synthetic peptide
  REGION 1..7: note = XENP020406 vlCDR2
AASNVES

SEQ ID NO: 25510 - protein, 9 aa, synthetic construct
  REGION 1..9: note = Description of Artificial Sequence: Synthetic peptide
  REGION 1..9: note = XENP020406 vlCDR3
QQSRKVPWT

SEQ ID NO: 25511 - protein, 447 aa, synthetic construct; identical to SEQ ID NO: 3665
  REGION 1..447: note = Description of Artificial Sequence: Synthetic polypeptide
  REGION 1..447: note = XENP020407 7B11_H0L0_IgG1_PVA_/S267K Heavy Chain

SEQ ID NO: 25512 - protein, 118 aa, synthetic construct; identical to SEQ ID NO: 3666
  REGION 1..118: note = Description of Artificial Sequence: Synthetic polypeptide
  REGION 1..118: note = VH of XENP020407

SEQ ID NO: 25513 - protein, 5 aa, synthetic construct
  REGION 1..5: note = Description of Artificial Sequence: Synthetic peptide
  REGION 1..5: note = XENP020407 vhCDR1
SYAVN

SEQ ID NO: 25514 - protein, 16 aa, synthetic construct
  REGION 1..16: note = Description of Artificial Sequence: Synthetic peptide
  REGION 1..16: note = XENP020407 vhCDR2
VIWSGGSTDYNAAFIS

SEQ ID NO: 25515 - protein, 10 aa, synthetic construct
  REGION 1..10: note = Description of Artificial Sequence: Synthetic peptide
  REGION 1..10: note = XENP020407 vhCDR3
LYYRYDGFDY

SEQ ID NO: 25516 - protein, 214 aa, synthetic construct
  REGION 1..214: note = Description of Artificial Sequence: Synthetic polypeptide
  REGION 1..214: note = XENP020407 7B11_H0L0_IgG1_PVA_/S267K Light Chain
DIVLTQSQKFLSTSVGDRVSVTCKASQNVGTHVARYQQKPGQSPKALVYSASYRYSGVPDRFTGSGSGTDFTLTISNVQSEDLAEYFCQQYNSYPLTFGGGTKLEIKRTVAAPSVFIFPPSDEQLKSGTASVVCLLNNFYPREAKVQWKVDNALQSGNSQESVTEQDSKDSTYSLSSTLTLSKADYEKHKVYACEVTHQGLSSPVTKSFNRGEC

SEQ ID NO: 25517 - protein, 107 aa, synthetic construct
  REGION 1..107: note = Description of Artificial Sequence: Synthetic polypeptide
  REGION 1..107: note = VL of XENP020407
DIVLTQSQKFLSTSVGDRVSVTCKASQNVGTHVARYQQKPGQSPKALVYSASYRYSGVPDRFTGSGSGTDFTLTISNVQSEDLAEYFCQQYNSYPLTFGGGTKLEIK

SEQ ID NO: 25518 - protein, 11 aa, synthetic construct
  REGION 1..11: note = Description of Artificial Sequence: Synthetic peptide
  REGION 1..11: note = XENP020407 vlCDR1
KASQNVGTHVA

SEQ ID NO: 25519 - protein, 7 aa, synthetic construct
  REGION 1..7: note = Description of Artificial Sequence: Synthetic peptide
  REGION 1..7: note = XENP020407 vlCDR2
SASYRYS

SEQ ID NO: 25520 - protein, 9 aa, synthetic construct
  REGION 1..9: note = Description of Artificial Sequence: Synthetic peptide
  REGION 1..9: note = XENP020407 vlCDR3
QQYNSYPLT

SEQ ID NO: 25521 - protein, 447 aa, synthetic construct; identical to SEQ ID NO: 3675
  REGION 1..447: note = Description of Artificial Sequence: Synthetic polypeptide
  REGION 1..447: note = XENP020408 7B11var_H0L0_IgG1_PVA_/S267K Heavy Chain

SEQ ID NO: 25522 - protein, 118 aa, synthetic construct; identical to SEQ ID NO: 3676
  REGION 1..118: note = Description of Artificial Sequence: Synthetic polypeptide
  REGION 1..118: note = VH of XENP020408

SEQ ID NO: 25523 - protein, 5 aa, synthetic construct
  REGION 1..5: note = Description of Artificial Sequence: Synthetic peptide
  REGION 1..5: note = XENP020408 vhCDR1
SYAVN

SEQ ID NO: 25524 - protein, 16 aa, synthetic construct
  REGION 1..16: note = Description of Artificial Sequence: Synthetic peptide
  REGION 1..16: note = XENP020408 vhCDR2
VIWSGGSTDYNAAFIS

SEQ ID NO: 25525 - protein, 10 aa, synthetic construct
  REGION 1..10: note = Description of Artificial Sequence: Synthetic peptide
  REGION 1..10: note = XENP020408 vhCDR3
LYYRYDGFDY

SEQ ID NO: 25526 - protein, 214 aa, synthetic construct; identical to SEQ ID NO: 25516
  REGION 1..214: note = Description of Artificial Sequence: Synthetic polypeptide
  REGION 1..214: note = XENP020408 7B11var_H0L0_IgG1_PVA_/S267K Light Chain

SEQ ID NO: 25527 - protein, 107 aa, synthetic construct; identical to SEQ ID NO: 25517
  REGION 1..107: note = Description of Artificial Sequence: Synthetic polypeptide
  REGION 1..107: note = VL of XENP020408

SEQ ID NO: 25528 - protein, 11 aa, synthetic construct
  REGION 1..11: note = Description of Artificial Sequence: Synthetic peptide
  REGION 1..11: note = XENP020408 vlCDR1
KASQNVGTHVA

SEQ ID NO: 25529 - protein, 7 aa, synthetic construct
  REGION 1..7: note = Description of Artificial Sequence: Synthetic peptide
  REGION 1..7: note = XENP020408 vlCDR2
SASYRYS

SEQ ID NO: 25530 - protein, 9 aa, synthetic construct
  REGION 1..9: note = Description of Artificial Sequence: Synthetic peptide
  REGION 1..9: note = XENP020408 vlCDR3
QQYNSYPLT

SEQ ID NO: 25531 - protein, 446 aa, synthetic construct
  REGION 1..446: note = Description of Artificial Sequence: Synthetic polypeptide
  REGION 1..446: note = XENP020409 6C8_H0L0_IgG1_PVA_/S267K Heavy Chain
QVQLQQSGAELVRPGTSVKISCKAAGYTFTNYAIGWVKQRPGHGLEWIGDFYPGGGYTNYNEKFKGKATLTADTSSSTAYMQLSSLTSEDSAIYFCARGYYRVFDYWGQGTTLTVSSASTKGPSVFPLAPSSKSTSGGTAALGCLVKDYFPEPVTVSWNSGALTSGVHTFPAVLQSSGLYSLSSVVTVPSSSLGTQTYICNVNHKPSNTKVDKKVEPKSCDKTHTCPPCPAPPVAGPSVFLFPPKPKDTLMISRTPEVTCVVVDVKHEDPEVKFNWYVDGVEVHNAKTKPREEQYNSTYRVVSVLTVLHQDWLNGKEYKCKVSNKALPAPIEKTISKAKGQPREPQVYTLPPSREEMTKNQVSLTCLVKGFYPSDIAVEWESNGQPENNYKTTPPVLDSDGSFFLYSKLTVDKSRWQQGNVFSCSVMHEALHNHYTQKSLSLSPGK

SEQ ID NO: 25532 - protein, 117 aa, synthetic construct
  REGION 1..117: note = Description of Artificial Sequence: Synthetic polypeptide
  REGION 1..117: note = VH of XENP020409
QVQLQQSGAELVRPGTSVKISCKAAGYTFTNYAIGWVKQRPGHGLEWIGDFYPGGGYTNYNEKFKGKATLTADTSSSTAYMQLSSLTSEDSAIYFCARGYYRVFDYWGQGTTLTVSS

SEQ ID NO: 25533 - protein, 5 aa, synthetic construct
  REGION 1..5: note = Description of Artificial Sequence: Synthetic peptide
  REGION 1..5: note = XENP020409 vhCDR1
NYAIG

SEQ ID NO: 25534 - protein, 17 aa, synthetic construct
  REGION 1..17: note = Description of Artificial Sequence: Synthetic peptide
  REGION 1..17: note = XENP020409 vhCDR2
DFYPGGGYTNYNEKFKG

SEQ ID NO: 25535 - protein, 8 aa, synthetic construct
  REGION 1..8: note = Description of Artificial Sequence: Synthetic peptide
  REGION 1..8: note = XENP020409 vhCDR3
GYYRVFDY

SEQ ID NO: 25536 - protein, 214 aa, synthetic construct
  REGION 1..214: note = Description of Artificial Sequence: Synthetic polypeptide
  REGION 1..214: note = XENP020409 6C8_H0L0_IgG1_PVA_/S267K Light Chain
DIVLTQSQKFLSTSVGDRVSVTCKASQNVGSNVARCQQKPGQSPKALIYSASFRYSGVPDRFTGSGSGTDFTLTISNVQSEDLAEYFCQQYNSYPYTFGGGTKLEIKRTVAAPSVFIFPPSDEQLKSGTASVVCLLNNFYPREAKVQWKVDNALQSGNSQESVTEQDSKDSTYSLSSTLTLSKADYEKHKVYACEVTHQGLSSPVTKSFNRGEC

SEQ ID NO: 25537 - protein, 107 aa, synthetic construct
  REGION 1..107: note = Description of Artificial Sequence: Synthetic polypeptide
  REGION 1..107: note = VL of XENP020409
DIVLTQSQKFLSTSVGDRVSVTCKASQNVGSNVARCQQKPGQSPKALIYSASFRYSGVPDRFTGSGSGTDFTLTISNVQSEDLAEYFCQQYNSYPYTFGGGTKLEIK

SEQ ID NO: 25538 - protein, 11 aa, synthetic construct
  REGION 1..11: note = Description of Artificial Sequence: Synthetic peptide
  REGION 1..11: note = XENP020409 vlCDR1
KASQNVGSNVA

SEQ ID NO: 25539 - protein, 7 aa, synthetic construct
  REGION 1..7: note = Description of Artificial Sequence: Synthetic peptide
  REGION 1..7: note = XENP020409 vlCDR2
SASFRYS

SEQ ID NO: 25540 - protein, 9 aa, synthetic construct
  REGION 1..9: note = Description of Artificial Sequence: Synthetic peptide
  REGION 1..9: note = XENP020409 vlCDR3
QQYNSYPYT

SEQ ID NO: 25541 - protein, 446 aa, synthetic construct
  REGION 1..446: note = Description of Artificial Sequence: Synthetic polypeptide
  REGION 1..446: note = XENP020410 7C2_H0L0_IgG1_PVA_/S267K Heavy Chain
EVKVVESGGGLVKPGGSLKLSCAASGFTFSRYAISWVRQTPEKRLEWVASISSGGSTYYPDSVQGRFTISRDNARNILYLQMSSLRSEDTAMYYCARGDYEGYFDYWGQGTSLTVSSASTKGPSVFPLAPSSKSTSGGTAALGCLVKDYFPEPVTVSWNSGALTSGVHTFPAVLQSSGLYSLSSVVTVPSSSLGTQTYICNVNHKPSNTKVDKKVEPKSCDKTHTCPPCPAPPVAGPSVFLFPPKPKDTLMISRTPEVTCVVVDVKHEDPEVKFNWYVDGVEVHNAKTKPREEQYNSTYRVVSVLTVLHQDWLNGKEYKCKVSNKALPAPIEKTISKAKGQPREPQVYTLPPSREEMTKNQVSLTCLVKGFYPSDIAVEWESNGQPENNYKTTPPVLDSDGSFFLYSKLTVDKSRWQQGNVFSCSVMHEALHNHYTQKSLSLSPGK

SEQ ID NO: 25542 - protein, 117 aa, synthetic construct
  REGION 1..117: note = Description of Artificial Sequence: Synthetic polypeptide
  REGION 1..117: note = VH of XENP020410
EVKVVESGGGLVKPGGSLKLSCAASGFTFSRYAISWVRQTPEKRLEWVASISSGGSTYYPDSVQGRFTISRDNARNILYLQMSSLRSEDTAMYYCARGDYEGYFDYWGQGTSLTVSS

SEQ ID NO: 25543 - protein, 5 aa, synthetic construct
  REGION 1..5: note = Description of Artificial Sequence: Synthetic peptide
  REGION 1..5: note = XENP020410 vhCDR1
RYAIS

SEQ ID NO: 25544 - protein, 16 aa, synthetic construct
  REGION 1..16: note = Description of Artificial Sequence: Synthetic peptide
  REGION 1..16: note = XENP020410 vhCDR2
SISSGGSTYYPDSVQG

SEQ ID NO: 25545 - protein, 9 aa, synthetic construct
  REGION 1..9: note = Description of Artificial Sequence: Synthetic peptide
  REGION 1..9: note = XENP020410 vhCDR3
GDYEGYFDY

SEQ ID NO: 25546 - protein, 220 aa, synthetic construct
  REGION 1..220: note = Description of Artificial Sequence: Synthetic polypeptide
  REGION 1..220: note = XENP020410 7C2_H0L0_IgG1_PVA_/S267K Light Chain
DIVLTQSPSSLATSVGQKVTVSCKSSQSLLNSINQKNYLAGYQQKPGQSPKLLVYFASTRESGVPDRFIGSGSGTDFTLTISSVQAEDLADYFCQQHYSTPLTFGAGTKLELKRTVAAPSVFIFPPSDEQLKSGTASVVCLLNNFYPREAKVQWKVDNALQSGNSQESVTEQDSKDSTYSLSSTLTLSKADYEKHKVYACEVTHQGLSSPVTKSFNRGEC

SEQ ID NO: 25547 - protein, 113 aa, synthetic construct
  REGION 1..113: note = Description of Artificial Sequence: Synthetic polypeptide
  REGION 1..113: note = VL of XENP020410
DIVLTQSPSSLATSVGQKVTVSCKSSQSLLNSINQKNYLAGYQQKPGQSPKLLVYFASTRESGVPDRFIGSGSGTDFTLTISSVQAEDLADYFCQQHYSTPLTFGAGTKLELK

SEQ ID NO: 25548 - protein, 17 aa, synthetic construct
  REGION 1..17: note = Description of Artificial Sequence: Synthetic peptide
  REGION 1..17: note = XENP020410 vlCDR1
KSSQSLLNSINQKNYLA

SEQ ID NO: 25549 - protein, 7 aa, synthetic construct
  REGION 1..7: note = Description of Artificial Sequence: Synthetic peptide
  REGION 1..7: note = XENP020410 vlCDR2
FASTRES

SEQ ID NO: 25550 - protein, 9 aa, synthetic construct
  REGION 1..9: note = Description of Artificial Sequence: Synthetic peptide
  REGION 1..9: note = XENP020410 vlCDR3
QQHYSTPLT

SEQ ID NO: 25551 - protein, 442 aa, synthetic construct
  REGION 1..442: note = Description of Artificial Sequence: Synthetic polypeptide
  REGION 1..442: note = XENP020411 1D10_H0L0_IgG1_PVA_/S267K Heavy Chain
EVQLVESGGGLVKPGGSLKFSCAASGFAFSSFDISWVRQTPEKRLEWVAYISSDGASTFYPDTMKGRFTISRDNAKNTLYLQMSSLKSEDTAMYYCTRLGAYWGQGTLVTVSAASTKGPSVFPLAPSSKSTSGGTAALGCLVKDYFPEPVTVSWNSGALTSGVHTFPAVLQSSGLYSLSSVVTVPSSSLGTQTYICNVNHKPSNTKVDKKVEPKSCDKTHTCPPCPAPPVAGPSVFLFPPKPKDTLMISRTPEVTCVVVDVKHEDPEVKFNWYVDGVEVHNAKTKPREEQYNSTYRVVSVLTVLHQDWLNGKEYKCKVSNKALPAPIEKTISKAKGQPREPQVYTLPPSREEMTKNQVSLTCLVKGFYPSDIAVEWESNGQPENNYKTTPPVLDSDGSFFLYSKLTVDKSRWQQGNVFSCSVMHEALHNHYTQKSLSLSPGK

SEQ ID NO: 25552 - protein, 113 aa, synthetic construct
  REGION 1..113: note = Description of Artificial Sequence: Synthetic polypeptide
  REGION 1..113: note = VH of XENP020411
EVQLVESGGGLVKPGGSLKFSCAASGFAFSSFDISWVRQTPEKRLEWVAYISSDGASTFYPDTMKGRFTISRDNAKNTLYLQMSSLKSEDTAMYYCTRLGAYWGQGTLVTVSA

SEQ ID NO: 25553 - protein, 5 aa, synthetic construct
  REGION 1..5: note = Description of Artificial Sequence: Synthetic peptide
  REGION 1..5: note = XENP020411 vhCDR1
SFDIS

SEQ ID NO: 25554 - protein, 17 aa, synthetic construct
  REGION 1..17: note = Description of Artificial Sequence: Synthetic peptide
  REGION 1..17: note = XENP020411 vhCDR2
YISSDGASTFYPDTMKG

SEQ ID NO: 25555 - protein, 4 aa, synthetic construct
  REGION 1..4: note = Description of Artificial Sequence: Synthetic peptide
  REGION 1..4: note = XENP020411 vhCDR3
LGAY

SEQ ID NO: 25556 - protein, 219 aa, synthetic construct
  REGION 1..219: note = Description of Artificial Sequence: Synthetic polypeptide
  REGION 1..219: note = XENP020411 1D10_H0L0_IgG1_PVA_/S267K Light Chain
DVVLTQTPLTLSVTIGQPASISCKSSQSLLDSDGKTYLNWLLQRPGQSPKRLIYLVSKLDSGVPDRFTGSGSGTDFTLKISRVEAEDLGVYYCWQGTHFPYTFGGGTKLEIKRTVAAPSVFIFPPSDEQLKSGTASVVCLLNNFYPREAKVQWKVDNALQSGNSQESVTEQDSKDSTYSLSSTLTLSKADYEKHKVYACEVTHQGLSSPVTKSFNRGEC

SEQ ID NO: 25557 - protein, 112 aa, synthetic construct
  REGION 1..112: note = Description of Artificial Sequence: Synthetic polypeptide
  REGION 1..112: note = VL of XENP020411
DVVLTQTPLTLSVTIGQPASISCKSSQSLLDSDGKTYLNWLLQRPGQSPKRLIYLVSKLDSGVPDRFTGSGSGTDFTLKISRVEAEDLGVYYCWQGTHFPYTFGGGTKLEIK

SEQ ID NO: 25558 - protein, 16 aa, synthetic construct
  REGION 1..16: note = Description of Artificial Sequence: Synthetic peptide
  REGION 1..16: note = XENP020411 vlCDR1
KSSQSLLDSDGKTYLN

SEQ ID NO: 25559 - protein, 7 aa, synthetic construct
  REGION 1..7: note = Description of Artificial Sequence: Synthetic peptide
  REGION 1..7: note = XENP020411 vlCDR2
LVSKLDS

SEQ ID NO: 25560 - protein, 9 aa, synthetic construct
  REGION 1..9: note = Description of Artificial Sequence: Synthetic peptide
  REGION 1..9: note = XENP020411 vlCDR3
WQGTHFPYT

SEQ ID NO: 25561 - protein, 448 aa, synthetic construct
  REGION 1..448: note = Description of Artificial Sequence: Synthetic polypeptide
  REGION 1..448: note = XENP017883 4C7_H0L0_IgG1_PVA_/S267K Heavy Chain
QVQLQESGPGLVKPSETLSLTCTVHGGSINHYYWSWIRQPPGKGLEWIGYIYYSGSTKYNPSLKSRVSISVDTSKNQFSLKLTSVTAADTAVYYCAREWPYYYYEMDVWGQGTTVTVSSASTKGPSVFPLAPSSKSTSGGTAALGCLVKDYFPEPVTVSWNSGALTSGVHTFPAVLQSSGLYSLSSVVTVPSSSLGTQTYICNVNHKPSNTKVDKKVEPKSCDKTHTCPPCPAPPVAGPSVFLFPPKPKDTLMISRTPEVTCVVVDVKHEDPEVKFNWYVDGVEVHNAKTKPREEQYNSTYRVVSVLTVLHQDWLNGKEYKCKVSNKALPAPIEKTISKAKGQPREPQVYTLPPSREEMTKNQVSLTCLVKGFYPSDIAVEWESNGQPENNYKTTPPVLDSDGSFFLYSKLTVDKSRWQQGNVFSCSVMHEALHNHYTQKSLSLSPGK

SEQ ID NO: 25562 - protein, 119 aa, synthetic construct; identical to SEQ ID NO: 3721
  REGION 1..119: note = Description of Artificial Sequence: Synthetic polypeptide
  REGION 1..119: note = VH of XENP017883

SEQ ID NO: 25563 - protein, 5 aa, synthetic construct
  REGION 1..5: note = Description of Artificial Sequence: Synthetic peptide
  REGION 1..5: note = XENP017883 vhCDR1
HYYWS

SEQ ID NO: 25564 - protein, 16 aa, synthetic construct
  REGION 1..16: note = Description of Artificial Sequence: Synthetic peptide
  REGION 1..16: note = XENP017883 vhCDR2
YIYYSGSTKYNPSLKS

SEQ ID NO: 25565 - protein, 11 aa, synthetic construct
  REGION 1..11: note = Description of Artificial Sequence: Synthetic peptide
  REGION 1..11: note = XENP017883 vhCDR3
EWPYYYYEMDV

SEQ ID NO: 25566 - protein, 215 aa, synthetic construct
  REGION 1..215: note = Description of Artificial Sequence: Synthetic polypeptide
  REGION 1..215: note = XENP017883 4C7_H0L0_IgG1_PVA_/S267K Light Chain
EIVLTQSPGTLSLSPGERATLSCRASQSVSSSYLAWYQQKPGQAPRLLIYGASSRATGIPDRFSGSGSGTDFTLTISRLEPEDFAVYYCQQYGSSFRTFGQGTKVEIKRTVAAPSVFIFPPSDEQLKSGTASVVCLLNNFYPREAKVQWKVDNALQSGNSQESVTEQDSKDSTYSLSSTLTLSKADYEKHKVYACEVTHQGLSSPVTKSFNRGEC

SEQ ID NO: 25567 - protein, 108 aa, synthetic construct; identical to SEQ ID NO: 3725
  REGION 1..108: note = Description of Artificial Sequence: Synthetic polypeptide
  REGION 1..108: note = VL of XENP017883

SEQ ID NO: 25568 - protein, 12 aa, synthetic construct
  REGION 1..12: note = Description of Artificial Sequence: Synthetic peptide
  REGION 1..12: note = XENP017883 vlCDR1
RASQSVSSSYLA

SEQ ID NO: 25569 - protein, 7 aa, synthetic construct
  REGION 1..7: note = Description of Artificial Sequence: Synthetic peptide
  REGION 1..7: note = XENP017883 vlCDR2
GASSRAT

SEQ ID NO: 25570 - protein, 9 aa, synthetic construct
  REGION 1..9: note = Description of Artificial Sequence: Synthetic peptide
  REGION 1..9: note = XENP017883 vlCDR3
QQYGSSFRT

SEQ ID NO: 25571 - protein, 450 aa, synthetic construct
  REGION 1..450: note = Description of Artificial Sequence: Synthetic polypeptide
  REGION 1..450: note = XENP017884 8D5_H0L0_IgG1_PVA_/S267K Heavy Chain
EVQLVESGGGLVQPGGSLRLSCAASGFTISSYDMHWVRQATGKGLEWVSVIGPAGDTYYPGSVKGRFTISRENAKNSLYLQMNSLRAGDTAVYYCAREGMAAHNYYGMDVWGQGTTVTVSSASTKGPSVFPLAPSSKSTSGGTAALGCLVKDYFPEPVTVSWNSGALTSGVHTFPAVLQSSGLYSLSSVVTVPSSSLGTQTYICNVNHKPSNTKVDKKVEPKSCDKTHTCPPCPAPPVAGPSVFLFPPKPKDTLMISRTPEVTCVVVDVKHEDPEVKFNWYVDGVEVHNAKTKPREEQYNSTYRVVSVLTVLHQDWLNGKEYKCKVSNKALPAPIEKTISKAKGQPREPQVYTLPPSREEMTKNQVSLTCLVKGFYPSDIAVEWESNGQPENNYKTTPPVLDSDGSFFLYSKLTVDKSRWQQGNVFSCSVMHEALHNHYTQKSLSLSPGK

SEQ ID NO: 25572 - protein, 121 aa, synthetic construct; identical to SEQ ID NO: 3729
  REGION 1..121: note = Description of Artificial Sequence: Synthetic polypeptide
  REGION 1..121: note = VH of XENP017884

SEQ ID NO: 25573 - protein, 5 aa, synthetic construct
  REGION 1..5: note = Description of Artificial Sequence: Synthetic peptide
  REGION 1..5: note = XENP017884 vhCDR1
SYDMH

SEQ ID NO: 25574 - protein, 16 aa, synthetic construct
  REGION 1..16: note = Description of Artificial Sequence: Synthetic peptide
  REGION 1..16: note = XENP017884 vhCDR2
VIGPAGDTYYPGSVKG

SEQ ID NO: 25575 - protein, 13 aa, synthetic construct
  REGION 1..13: note = Description of Artificial Sequence: Synthetic peptide
  REGION 1..13: note = XENP017884 vhCDR3
EGMAAHNYYGMDV

SEQ ID NO: 25576 - protein, 215 aa, synthetic construct
  REGION 1..215: note = Description of Artificial Sequence: Synthetic polypeptide
  REGION 1..215: note = XENP017884 8D5_H0L0_IgG1_PVA_/S267K Light Chain
EIVLTQSPATLSLSPGERATLSCRASQSVSSYLAWYQQKPGQAPRLLIYDASNRATGIPARFSGSGSGTDFTLTISSLEPEDFAVYYCQQRSNWPPITFGQGTRLEIKRTVAAPSVFIFPPSDEQLKSGTASVVCLLNNFYPREAKVQWKVDNALQSGNSQESVTEQDSKDSTYSLSSTLTLSKADYEKHKVYACEVTHQGLSSPVTKSFNRGEC

SEQ ID NO: 25577 - protein, 108 aa, synthetic construct; identical to SEQ ID NO: 3733
  REGION 1..108: note = Description of Artificial Sequence: Synthetic polypeptide
  REGION 1..108: note = VL of XENP017884

SEQ ID NO: 25578 - protein, 11 aa, synthetic construct
  REGION 1..11: note = Description of Artificial Sequence: Synthetic peptide
  REGION 1..11: note = XENP017884 vlCDR1
RASQSVSSYLA

SEQ ID NO: 25579 - protein, 7 aa, synthetic construct
  REGION 1..7: note = Description of Artificial Sequence: Synthetic peptide
  REGION 1..7: note = XENP017884 vlCDR2
DASNRAT

SEQ ID NO: 25580 - protein, 10 aa, synthetic construct
  REGION 1..10: note = Description of Artificial Sequence: Synthetic peptide
  REGION 1..10: note = XENP017884 vlCDR3
QQRSNWPPIT

SEQ ID NO: 25581 - protein, 457 aa, synthetic construct
  REGION 1..457: note = Description of Artificial Sequence: Synthetic polypeptide
  REGION 1..457: note = XENP017885 E8D9_H0L0_IgG1_PVA_/S267K Heavy Chain
QITLKESGPTLVKPTQTLTLTCTFSGFSLSTSGVGVGWIRQPPGKALEWLALIYWDDDKRYSPSLKSRLTITKDTSKNQVVLTMTNMDPVDTATYYCAHTSITEVRGAIIYYYGMDVWGQGTTVTVSSASTKGPSVFPLAPSSKSTSGGTAALGCLVKDYFPEPVTVSWNSGALTSGVHTFPAVLQSSGLYSLSSVVTVPSSSLGTQTYICNVNHKPSNTKVDKKVEPKSCDKTHTCPPCPAPPVAGPSVFLFPPKPKDTLMISRTPEVTCVVVDVKHEDPEVKFNWYVDGVEVHNAKTKPREEQYNSTYRVVSVLTVLHQDWLNGKEYKCKVSNKALPAPIEKTISKAKGQPREPQVYTLPPSREEMTKNQVSLTCLVKGFYPSDIAVEWESNGQPENNYKTTPPVLDSDGSFFLYSKLTVDKSRWQQGNVFSCSVMHEALHNHYTQKSLSLSPGK

SEQ ID NO: 25582 - protein, 128 aa, synthetic construct
  REGION 1..128: note = Description of Artificial Sequence: Synthetic polypeptide
  REGION 1..128: note = VH of XENP017885
QITLKESGPTLVKPTQTLTLTCTFSGFSLSTSGVGVGWIRQPPGKALEWLALIYWDDDKRYSPSLKSRLTITKDTSKNQVVLTMTNMDPVDTATYYCAHTSITEVRGAIIYYYGMDVWGQGTTVTVSS

SEQ ID NO: 25583 - protein, 7 aa, synthetic construct
  REGION 1..7: note = Description of Artificial Sequence: Synthetic peptide
  REGION 1..7: note = XENP017885 vhCDR1
TSGVGVG

SEQ ID NO: 25584 - protein, 16 aa, synthetic construct
  REGION 1..16: note = Description of Artificial Sequence: Synthetic peptide
  REGION 1..16: note = XENP017885 vhCDR2
LIYWDDDKRYSPSLKS

SEQ ID NO: 25585 - protein, 18 aa, synthetic construct
  REGION 1..18: note = Description of Artificial Sequence: Synthetic peptide
  REGION 1..18: note = XENP017885 vhCDR3
TSITEVRGAIIYYYGMDV

SEQ ID NO: 25586 - protein, 214 aa, synthetic construct
  REGION 1..214: note = Description of Artificial Sequence: Synthetic polypeptide
  REGION 1..214: note = XENP017885 E8D9_H0L0_IgG1_PVA_/S267K Light Chain
EIVLTQSPGTLSLSPGERATLSCRASQSVSSSYLAWYQQKPGQAPRLLIYGASSRATGIPDRFSGSGSGTDFTLTISRLEPEDFAVYYCQQYGHSLTFGGGTKVEIKRTVAAPSVFIFPPSDEQLKSGTASVVCLLNNFYPREAKVQWKVDNALQSGNSQESVTEQDSKDSTYSLSSTLTLSKADYEKHKVYACEVTHQGLSSPVTKSFNRGEC

SEQ ID NO: 25587 - protein, 107 aa, synthetic construct
  REGION 1..107: note = Description of Artificial Sequence: Synthetic polypeptide
  REGION 1..107: note = VL of XENP017885
EIVLTQSPGTLSLSPGERATLSCRASQSVSSSYLAWYQQKPGQAPRLLIYGASSRATGIPDRFSGSGSGTDFTLTISRLEPEDFAVYYCQQYGHSLTFGGGTKVEIK

SEQ ID NO: 25588 - protein, 12 aa, synthetic construct
  REGION 1..12: note = Description of Artificial Sequence: Synthetic peptide
  REGION 1..12: note = XENP017885 vlCDR1
RASQSVSSSYLA

SEQ ID NO: 25589 - protein, 7 aa, synthetic construct
  REGION 1..7: note = Description of Artificial Sequence: Synthetic peptide
  REGION 1..7: note = XENP017885 vlCDR2
GASSRAT

SEQ ID NO: 25590 - protein, 8 aa, synthetic construct
  REGION 1..8: note = Description of Artificial Sequence: Synthetic peptide
  REGION 1..8: note = XENP017885 vlCDR3
QQYGHSLT

SEQ ID NO: 25591 - protein, 449 aa, synthetic construct
  REGION 1..449: note = Description of Artificial Sequence: Synthetic polypeptide
  REGION 1..449: note = XENP020267 3F6_H0L0_anti-BTLA_IgG1_PVA_/S267K Heavy Chain
EVQLQESGPSLVKPSQTLSLTCSVTGDSITSGYWNWIRKFPGNKLEYMGYLSYSGSTYYNPSLKSRISITRDTSKNQYYLQLNSVTTEDTATYYCARYFYGSYYEAMDYWGQGTSVTVSSASTKGPSVFPLAPSSKSTSGGTAALGCLVKDYFPEPVTVSWNSGALTSGVHTFPAVLQSSGLYSLSSVVTVPSSSLGTQTYICNVNHKPSNTKVDKKVEPKSCDKTHTCPPCPAPPVAGPSVFLFPPKPKDTLMISRTPEVTCVVVDVKHEDPEVKFNWYVDGVEVHNAKTKPREEQYNSTYRVVSVLTVLHQDWLNGKEYKCKVSNKALPAPIEKTISKAKGQPREPQVYTLPPSREEMTKNQVSLTCLVKGFYPSDIAVEWESNGQPENNYKTTPPVLDSDGSFFLYSKLTVDKSRWQQGNVFSCSVMHEALHNHYTQKSLSLSPGK

SEQ ID NO: 25592 - protein, 120 aa, synthetic construct
  REGION 1..120: note = Description of Artificial Sequence: Synthetic polypeptide
  REGION 1..120: note = VH of XENP020267
EVQLQESGPSLVKPSQTLSLTCSVTGDSITSGYWNWIRKFPGNKLEYMGYLSYSGSTYYNPSLKSRISITRDTSKNQYYLQLNSVTTEDTATYYCARYFYGSYYEAMDYWGQGTSVTVSS

SEQ ID NO: 25593 - protein, 5 aa, synthetic construct
  REGION 1..5: note = Description of Artificial Sequence: Synthetic peptide
  REGION 1..5: note = XENP020267 vhCDR1
SGYWN

SEQ ID NO: 25594 - protein, 16 aa, synthetic construct
  REGION 1..16: note = Description of Artificial Sequence: Synthetic peptide
  REGION 1..16: note = XENP020267 vhCDR2
YLSYSGSTYYNPSLKS

SEQ ID NO: 25595 - protein, 12 aa, synthetic construct
  REGION 1..12: note = Description of Artificial Sequence: Synthetic peptide
  REGION 1..12: note = XENP020267 vhCDR3
YFYGSYYEAMDY

SEQ ID NO: 25596 - protein, 214 aa, synthetic construct
  REGION 1..214: note = Description of Artificial Sequence: Synthetic polypeptide
  REGION 1..214: note = XENP020267 3F6_H0L0_anti-BTLA_IgG1_PVA_/S267K Light Chain
DVQITQSPSYLAASPGETISINCRASKSISKYLAWYQEKPGKTNKLLIYSGSTLQSGIPSRFSGSGSGTDFTLTISSLEPEDFAMYYCQQHNEYPWTFGGGTKLEIKRTVAAPSVFIFPPSDEQLKSGTASVVCLLNNFYPREAKVQWKVDNALQSGNSQESVTEQDSKDSTYSLSSTLTLSKADYEKHKVYACEVTHQGLSSPVTKSFNRGEC

SEQ ID NO: 25597 - protein, 107 aa, synthetic construct
  REGION 1..107: note = Description of Artificial Sequence: Synthetic polypeptide
  REGION 1..107: note = VL of XENP020267
DVQITQSPSYLAASPGETISINCRASKSISKYLAWYQEKPGKTNKLLIYSGSTLQSGIPSRFSGSGSGTDFTLTISSLEPEDFAMYYCQQHNEYPWTFGGGTKLEIK

SEQ ID NO: 25598 - protein, 11 aa, synthetic construct
  REGION 1..11: note = Description of Artificial Sequence: Synthetic peptide
  REGION 1..11: note = XENP020267 vlCDR1
RASKSISKYLA

SEQ ID NO: 25599 - protein, 7 aa, synthetic construct
  REGION 1..7: note = Description of Artificial Sequence: Synthetic peptide
  REGION 1..7: note = XENP020267 vlCDR2
SGSTLQS

SEQ ID NO: 25600 - protein, 9 aa, synthetic construct
  REGION 1..9: note = Description of Artificial Sequence: Synthetic peptide
  REGION 1..9: note = XENP020267 vlCDR3
QQHNEYPWT

SEQ ID NO: 25601 - protein, 448 aa, synthetic construct
  REGION 1..448: note = Description of Artificial Sequence: Synthetic polypeptide
  REGION 1..448: note = XENP020268 1A9_H0L0_anti-BTLA_IgG1_PVA_/S267K Heavy Chain
DVQLVESGGGLVQPGGSRKLSCAASGFTFSSFGMHWVRQAPEKGLEWVAYISSGISTIYYADTVKGRFTISRDNPKNTLFLQMTSLRSEDTAMYYCARDWLRGYAMDYWGQGTSVTVSSASTKGPSVFPLAPSSKSTSGGTAALGCLVKDYFPEPVTVSWNSGALTSGVHTFPAVLQSSGLYSLSSVVTVPSSSLGTQTYICNVNHKPSNTKVDKKVEPKSCDKTHTCPPCPAPPVAGPSVFLFPPKPKDTLMISRTPEVTCVVVDVKHEDPEVKFNWYVDGVEVHNAKTKPREEQYNSTYRVVSVLTVLHQDWLNGKEYKCKVSNKALPAPIEKTISKAKGQPREPQVYTLPPSREEMTKNQVSLTCLVKGFYPSDIAVEWESNGQPENNYKTTPPVLDSDGSFFLYSKLTVDKSRWQQGNVFSCSVMHEALHNHYTQKSLSLSPGK

SEQ ID NO: 25602 - protein, 119 aa, synthetic construct
  REGION 1..119: note = Description of Artificial Sequence: Synthetic polypeptide
  REGION 1..119: note = VH of XENP020268
DVQLVESGGGLVQPGGSRKLSCAASGFTFSSFGMHWVRQAPEKGLEWVAYISSGISTIYYADTVKGRFTISRDNPKNTLFLQMTSLRSEDTAMYYCARDWLRGYAMDYWGQGTSVTVSS

SEQ ID NO: 25603 - protein, 5 aa, synthetic construct
  REGION 1..5: note = Description of Artificial Sequence: Synthetic peptide
  REGION 1..5: note = XENP020268 vhCDR1
SFGMH

SEQ ID NO: 25604 - protein, 17 aa, synthetic construct
  REGION 1..17: note = Description of Artificial Sequence: Synthetic peptide
  REGION 1..17: note = XENP020268 vhCDR2
YISSGISTIYYADTVKG

SEQ ID NO: 25605 - protein, 10 aa, synthetic construct
  REGION 1..10: note = Description of Artificial Sequence: Synthetic peptide
  REGION 1..10: note = XENP020268 vhCDR3
DWLRGYAMDY

SEQ ID NO: 25606 - protein, 218 aa, synthetic construct
  REGION 1..218: note = Description of Artificial Sequence: Synthetic polypeptide
  REGION 1..218: note = XENP020268 1A9_H0L0_anti-BTLA_IgG1_PVA_/S267K Light Chain
DIVLTQSPASLAVSLGQRATISCKASQSIDYDGDSYMNWYQQKPGQPPKLLIYAASNLDFGIPARFSGSGSGTDFTLNIHPVEEEDAATYYCQQSNEDPWTFGGGTKLEIKRTVAAPSVFIFPPSDEQLKSGTASVVCLLNNFYPREAKVQWKVDNALQSGNSQESVTEQDSKDSTYSLSSTLTLSKADYEKHKVYACEVTHQGLSSPVTKSFNRGEC

SEQ ID NO: 25607 - protein, 111 aa, synthetic construct
  REGION 1..111: note = Description of Artificial Sequence: Synthetic polypeptide
  REGION 1..111: note = VL of XENP020268
DIVLTQSPASLAVSLGQRATISCKASQSIDYDGDSYMNWYQQKPGQPPKLLIYAASNLDFGIPARFSGSGSGTDFTLNIHPVEEEDAATYYCQQSNEDPWTFGGGTKLEIK

SEQ ID NO: 25608 - protein, 15 aa, synthetic construct
  REGION 1..15: note = Description of Artificial Sequence: Synthetic peptide
  REGION 1..15: note = XENP020268 vlCDR1
KASQSIDYDGDSYMN

SEQ ID NO: 25609 - protein, 7 aa, synthetic construct
  REGION 1..7: note = Description of Artificial Sequence: Synthetic peptide
  REGION 1..7: note = XENP020268 vlCDR2
AASNLDF

SEQ ID NO: 25610 - protein, 9 aa, synthetic construct
  REGION 1..9: note = Description of Artificial Sequence: Synthetic peptide
  REGION 1..9: note = XENP020268 vlCDR3
QQSNEDPWT

SEQ ID NO: 25611 - protein, 447 aa, synthetic construct
  REGION 1..447: note = Description of Artificial Sequence: Synthetic polypeptide
  REGION 1..447: note = XENP020269 9C6_H0L0_anti-BTLA_IgG1_PVA_/S267K Heavy Chain
QVQLKESGPGLVAPSQSLSITCTVSGFSLTGYGVNWVRQPPGKGLEWLGMIWIDGSTDYNSALKSRLSINKDNSKSQVFLKMNSLQTDDTARYYCARDRPDGRAMDYWGQGTSVTVSSASTKGPSVFPLAPSSKSTSGGTAALGCLVKDYFPEPVTVSWNSGALTSGVHTFPAVLQSSGLYSLSSVVTVPSSSLGTQTYICNVNHKPSNTKVDKKVEPKSCDKTHTCPPCPAPPVAGPSVFLFPPKPKDTLMISRTPEVTCVVVDVKHEDPEVKFNWYVDGVEVHNAKTKPREEQYNSTYRVVSVLTVLHQDWLNGKEYKCKVSNKALPAPIEKTISKAKGQPREPQVYTLPPSREEMTKNQVSLTCLVKGFYPSDIAVEWESNGQPENNYKTTPPVLDSDGSFFLYSKLTVDKSRWQQGNVFSCSVMHEALHNHYTQKSLSLSPGK

SEQ ID NO: 25612 - protein, 118 aa, synthetic construct
  REGION 1..118: note = Description of Artificial Sequence: Synthetic polypeptide
  REGION 1..118: note = VH of XENP020269
QVQLKESGPGLVAPSQSLSITCTVSGFSLTGYGVNWVRQPPGKGLEWLGMIWIDGSTDYNSALKSRLSINKDNSKSQVFLKMNSLQTDDTARYYCARDRPDGRAMDYWGQGTSVTVSS

SEQ ID NO: 25613 - protein, 5 aa, synthetic construct
  REGION 1..5: note = Description of Artificial Sequence: Synthetic peptide
  REGION 1..5: note = XENP020269 vhCDR1
GYGVN

SEQ ID NO: 25614 - protein, 16 aa, synthetic construct
  REGION 1..16: note = Description of Artificial Sequence: Synthetic peptide
  REGION 1..16: note = XENP020269 vhCDR2
MIWIDGSTDYNSALKS

SEQ ID NO: 25615 - protein, 10 aa, synthetic construct
  REGION 1..10: note = Description of Artificial Sequence: Synthetic peptide
  REGION 1..10: note = XENP020269 vhCDR3
DRPDGRAMDY

SEQ ID NO: 25616 - protein, 213 aa, synthetic construct
  REGION 1..213: note = Description of Artificial Sequence: Synthetic polypeptide
  REGION 1..213: note = XENP020269 9C6_H0L0_anti-BTLA_IgG1_PVA_/S267K Light Chain
SIVMTQTPKFLLVSAGDRVTITCKASQSVSNDVAWYQQKPGQSPKLLIYYASNRYTGVPDRFTGSGYGTDFTFTISTVQAEDLAVYFCQQDYSSPTFGGGTKLEIKRTVAAPSVFIFPPSDEQLKSGTASVVCLLNNFYPREAKVQWKVDNALQSGNSQESVTEQDSKDSTYSLSSTLTLSKADYEKHKVYACEVTHQGLSSPVTKSFNRGEC

SEQ ID NO: 25617 - protein, 106 aa, synthetic construct
  REGION 1..106: note = Description of Artificial Sequence: Synthetic polypeptide
  REGION 1..106: note = VL of XENP020269
SIVMTQTPKFLLVSAGDRVTITCKASQSVSNDVAWYQQKPGQSPKLLIYYASNRYTGVPDRFTGSGYGTDFTFTISTVQAEDLAVYFCQQDYSSPTFGGGTKLEIK

SEQ ID NO: 25618 - protein, 11 aa, synthetic construct
  REGION 1..11: note = Description of Artificial Sequence: Synthetic peptide
  REGION 1..11: note = XENP020269 vlCDR1
KASQSVSNDVA

SEQ ID NO: 25619 - protein, 7 aa, synthetic construct
  REGION 1..7: note = Description of Artificial Sequence: Synthetic peptide
  REGION 1..7: note = XENP020269 vlCDR2
YASNRYT

SEQ ID NO: 25620 - protein, 8 aa, synthetic construct
  REGION 1..8: note = Description of Artificial Sequence: Synthetic peptide
  REGION 1..8: note = XENP020269 vlCDR3
QQDYSSPT

SEQ ID NO: 25621 - protein, 447 aa, synthetic construct; identical to SEQ ID NO: 25611
  REGION 1..447: note = Description of Artificial Sequence: Synthetic polypeptide
  REGION 1..447: note = XENP020270 7H2_H0L0_anti-BTLA_IgG1_PVA_/S267K Heavy Chain

SEQ ID NO: 25622 - protein, 118 aa, synthetic construct; identical to SEQ ID NO: 25612
  REGION 1..118: note = Description of Artificial Sequence: Synthetic polypeptide
  REGION 1..118: note = VH of XENP020270

SEQ ID NO: 25623 - protein, 5 aa, synthetic construct
  REGION 1..5: note = Description of Artificial Sequence: Synthetic peptide
  REGION 1..5: note = XENP020270 vhCDR1
GYGVN

SEQ ID NO: 25624 - protein, 16 aa, synthetic construct
  REGION 1..16: note = Description of Artificial Sequence: Synthetic peptide
  REGION 1..16: note = XENP020270 vhCDR2
MIWIDGSTDYNSALKS

SEQ ID NO: 25625 - protein, 10 aa, synthetic construct
  REGION 1..10: note = Description of Artificial Sequence: Synthetic peptide
  REGION 1..10: note = XENP020270 vhCDR3
DRPDGRAMDY

SEQ ID NO: 25626 - protein, 213 aa, synthetic construct
  REGION 1..213: note = Description of Artificial Sequence: Synthetic polypeptide
  REGION 1..213: note = XENP020270 7H2_H0L0_anti-BTLA_IgG1_PVA_/S267K Light Chain
SIVMTQTPKFLLVSAGDRVTITCKASQSVSNDVAWYQQKPGQSPKLLIYYASNRYTGVPDRFTGSGYGTDFTFTISTVQAEDLAVYFCQQDYNSPTFGGGTKLEIKRTVAAPSVFIFPPSDEQLKSGTASVVCLLNNFYPREAKVQWKVDNALQSGNSQESVTEQDSKDSTYSLSSTLTLSKADYEKHKVYACEVTHQGLSSPVTKSFNRGEC

SEQ ID NO: 25627 - protein, 106 aa, synthetic construct
  REGION 1..106: note = Description of Artificial Sequence: Synthetic polypeptide
  REGION 1..106: note = VL of XENP020270
SIVMTQTPKFLLVSAGDRVTITCKASQSVSNDVAWYQQKPGQSPKLLIYYASNRYTGVPDRFTGSGYGTDFTFTISTVQAEDLAVYFCQQDYNSPTFGGGTKLEIK

SEQ ID NO: 25628 - protein, 11 aa, synthetic construct
  REGION 1..11: note = Description of Artificial Sequence: Synthetic peptide
  REGION 1..11: note = XENP020270 vlCDR1
KASQSVSNDVA

SEQ ID NO: 25629 - protein, 7 aa, synthetic construct
  REGION 1..7: note = Description of Artificial Sequence: Synthetic peptide
  REGION 1..7: note = XENP020270 vlCDR2
YASNRYT

SEQ ID NO: 25630 - protein, 8 aa, synthetic construct
  REGION 1..8: note = Description of Artificial Sequence: Synthetic peptide
  REGION 1..8: note = XENP020270 vlCDR3
QQDYNSPT

SEQ ID NO: 25631 - protein, 447 aa, synthetic construct
  REGION 1..447: note = Description of Artificial Sequence: Synthetic polypeptide
  REGION 1..447: note = XENP020271 6C3_H0L0_anti-BTLA_IgG1_PVA_/S267K Heavy Chain
EVQLQQSGAELVRSGASVKLSCTASGFNIKDYYMHWVKQRPEQGLEWIGWLDPENGDTVYVPKFQGKATMTADTSSNTAYLQLTSLTSEDSAVYYCNAGDYGSSFNYWGQGTTLTVSSASTKGPSVFPLAPSSKSTSGGTAALGCLVKDYFPEPVTVSWNSGALTSGVHTFPAVLQSSGLYSLSSVVTVPSSSLGTQTYICNVNHKPSNTKVDKKVEPKSCDKTHTCPPCPAPPVAGPSVFLFPPKPKDTLMISRTPEVTCVVVDVKHEDPEVKFNWYVDGVEVHNAKTKPREEQYNSTYRVVSVLTVLHQDWLNGKEYKCKVSNKALPAPIEKTISKAKGQPREPQVYTLPPSREEMTKNQVSLTCLVKGFYPSDIAVEWESNGQPENNYKTTPPVLDSDGSFFLYSKLTVDKSRWQQGNVFSCSVMHEALHNHYTQKSLSLSPGK

SEQ ID NO: 25632 - protein, 118 aa, synthetic construct
  REGION 1..118: note = Description of Artificial Sequence: Synthetic polypeptide
  REGION 1..118: note = VH of XENP020271
EVQLQQSGAELVRSGASVKLSCTASGFNIKDYYMHWVKQRPEQGLEWIGWLDPENGDTVYVPKFQGKATMTADTSSNTAYLQLTSLTSEDSAVYYCNAGDYGSSFNYWGQGTTLTVSS

SEQ ID NO: 25633 - protein, 5 aa, synthetic construct
  REGION 1..5: note = Description of Artificial Sequence: Synthetic peptide
  REGION 1..5: note = XENP020271 vhCDR1
DYYMH

SEQ ID NO: 25634 - protein, 17 aa, synthetic construct
  REGION 1..17: note = Description of Artificial Sequence: Synthetic peptide
  REGION 1..17: note = XENP020271 vhCDR2
WLDPENGDTVYVPKFQG

SEQ ID NO: 25635 - protein, 9 aa, synthetic construct
  REGION 1..9: note = Description of Artificial Sequence: Synthetic peptide
  REGION 1..9: note = XENP020271 vhCDR3
GDYGSSFNY

SEQ ID NO: 25636 - protein, 219 aa, synthetic construct
  REGION 1..219: note = Description of Artificial Sequence: Synthetic polypeptide
  REGION 1..219: note = XENP020271 6C3_H0L0_anti-BTLA_IgG1_PVA_/S267K Light Chain
DIVMSQSPSSLAVSVGEKVTMSCKSSQSLLYSGNQKNYLAWYQQRPGQSPKLLIYWASTRESGVPDRFTGSGSGTDFTLTISSVKTEDLAVYYCQQYYTYHTFGGGTKLEIKRTVAAPSVFIFPPSDEQLKSGTASVVCLLNNFYPREAKVQWKVDNALQSGNSQESVTEQDSKDSTYSLSSTLTLSKADYEKHKVYACEVTHQGLSSPVTKSFNRGEC

SEQ ID NO: 25637 - protein, 112 aa, synthetic construct
  REGION 1..112: note = Description of Artificial Sequence: Synthetic polypeptide
  REGION 1..112: note = VL of XENP020271
DIVMSQSPSSLAVSVGEKVTMSCKSSQSLLYSGNQKNYLAWYQQRPGQSPKLLIYWASTRESGVPDRFTGSGSGTDFTLTISSVKTEDLAVYYCQQYYTYHTFGGGTKLEIK

SEQ ID NO: 25638 - protein, 17 aa, synthetic construct
  REGION 1..17: note = Description of Artificial Sequence: Synthetic peptide
  REGION 1..17: note = XENP020271 vlCDR1
KSSQSLLYSGNQKNYLA

SEQ ID NO: 25639 - protein, 7 aa, synthetic construct
  REGION 1..7: note = Description of Artificial Sequence: Synthetic peptide
  REGION 1..7: note = XENP020271 vlCDR2
WASTRES

SEQ ID NO: 25640 - protein, 8 aa, synthetic construct
  REGION 1..8: note = Description of Artificial Sequence: Synthetic peptide
  REGION 1..8: note = XENP020271 vlCDR3
QQYYTYHT

SEQ ID NO: 25641 - protein, 449 aa, synthetic construct
  REGION 1..449: note = Description of Artificial Sequence: Synthetic polypeptide
  REGION 1..449: note = XENP020272 9C10_H0L0_anti-BTLA_IgG1_PVA_/S267K Heavy Chain
EVQLQESGPSLVKPSQTLSLTCSVTGDSITSGYWNWIRKFPGNKLEYMGYISYSGSTYYNPSLKSRISITRDTSKNQYYLQLNSVTTEDTATYYCARYYYGSYYEAMDYWGQGTSVTVSSASTKGPSVFPLAPSSKSTSGGTAALGCLVKDYFPEPVTVSWNSGALTSGVHTFPAVLQSSGLYSLSSVVTVPSSSLGTQTYICNVNHKPSNTKVDKKVEPKSCDKTHTCPPCPAPPVAGPSVFLFPPKPKDTLMISRTPEVTCVVVDVKHEDPEVKFNWYVDGVEVHNAKTKPREEQYNSTYRVVSVLTVLHQDWLNGKEYKCKVSNKALPAPIEKTISKAKGQPREPQVYTLPPSREEMTKNQVSLTCLVKGFYPSDIAVEWESNGQPENNYKTTPPVLDSDGSFFLYSKLTVDKSRWQQGNVFSCSVMHEALHNHYTQKSLSLSPGK

SEQ ID NO: 25642 - protein, 120 aa, synthetic construct
  REGION 1..120: note = Description of Artificial Sequence: Synthetic polypeptide
  REGION 1..120: note = VH of XENP020272
EVQLQESGPSLVKPSQTLSLTCSVTGDSITSGYWNWIRKFPGNKLEYMGYISYSGSTYYNPSLKSRISITRDTSKNQYYLQLNSVTTEDTATYYCARYYYGSYYEAMDYWGQGTSVTVSS

SEQ ID NO: 25643 - protein, 5 aa, synthetic construct
  REGION 1..5: note = Description of Artificial Sequence: Synthetic peptide
  REGION 1..5: note = XENP020272 vhCDR1
SGYWN

SEQ ID NO: 25644 - protein, 16 aa, synthetic construct
  REGION 1..16: note = Description of Artificial Sequence: Synthetic peptide
  REGION 1..16: note = XENP020272 vhCDR2
YISYSGSTYYNPSLKS

SEQ ID NO: 25645 - protein, 12 aa, synthetic construct
  REGION 1..12: note = Description of Artificial Sequence: Synthetic peptide
  REGION 1..12: note = XENP020272 vhCDR3
YYYGSYYEAMDY

SEQ ID NO: 25646 - protein, 214 aa, synthetic construct
  REGION 1..214: note = Description of Artificial Sequence: Synthetic polypeptide
  REGION 1..214: note = XENP020272 9C10_H0L0_anti-BTLA_IgG1_PVA_/S267K Light Chain
DVQITQSPSYLAASPGETITINCRASKSISKYLAWYQEKPGKTNKLLLYSGSTLQSGIPSRFSGSGSGTDFTLTISSLEPEDFAMYYCQQHNEYPWTFGGGTKLEIKRTVAAPSVFIFPPSDEQLKSGTASVVCLLNNFYPREAKVQWKVDNALQSGNSQESVTEQDSKDSTYSLSSTLTLSKADYEKHKVYACEVTHQGLSSPVTKSFNRGEC

SEQ ID NO: 25647 - protein, 107 aa, synthetic construct
  REGION 1..107: note = Description of Artificial Sequence: Synthetic polypeptide
  REGION 1..107: note = VL of XENP020272
DVQITQSPSYLAASPGETITINCRASKSISKYLAWYQEKPGKTNKLLLYSGSTLQSGIPSRFSGSGSGTDFTLTISSLEPEDFAMYYCQQHNEYPWTFGGGTKLEIK

SEQ ID NO: 25648 - protein, 11 aa, synthetic construct
  REGION 1..11: note = Description of Artificial Sequence: Synthetic peptide
  REGION 1..11: note = XENP020272 vlCDR1
RASKSISKYLA

SEQ ID NO: 25649 - protein, 7 aa, synthetic construct
  REGION 1..7: note = Description of Artificial Sequence: Synthetic peptide
  REGION 1..7: note = XENP020272 vlCDR2
SGSTLQS

SEQ ID NO: 25650 - protein, 9 aa, synthetic construct
  REGION 1..9: note = Description of Artificial Sequence: Synthetic peptide
  REGION 1..9: note = XENP020272 vlCDR3
QQHNEYPWT

SEQ ID NO: 25651 - protein, 443 aa, synthetic construct
  REGION 1..443: note = Description of Artificial Sequence: Synthetic polypeptide
  REGION 1..443: note = XENP020273 12E6_H0L0_anti-BTLA_IgG1_PVA_/S267K Heavy Chain
QVQLQQSGAELMKPGASVKISCKATGYTFSNYWIEWVKQRPGHGLEWIGEILPGSGGTNYNEKFKGKATFTADTSSNTAYMQLSGLTSEDSAVYYCASPRYDLWGQGTSVTASSASTKGPSVFPLAPSSKSTSGGTAALGCLVKDYFPEPVTVSWNSGALTSGVHTFPAVLQSSGLYSLSSVVTVPSSSLGTQTYICNVNHKPSNTKVDKKVEPKSCDKTHTCPPCPAPPVAGPSVFLFPPKPKDTLMISRTPEVTCVVVDVKHEDPEVKFNWYVDGVEVHNAKTKPREEQYNSTYRVVSVLTVLHQDWLNGKEYKCKVSNKALPAPIEKTISKAKGQPREPQVYTLPPSREEMTKNQVSLTCLVKGFYPSDIAVEWESNGQPENNYKTTPPVLDSDGSFFLYSKLTVDKSRWQQGNVFSCSVMHEALHNHYTQKSLSLSPGK

SEQ ID NO: 25652 - protein, 114 aa, synthetic construct
  REGION 1..114: note = Description of Artificial Sequence: Synthetic polypeptide
  REGION 1..114: note = VH of XENP020273
QVQLQQSGAELMKPGASVKISCKATGYTFSNYWIEWVKQRPGHGLEWIGEILPGSGGTNYNEKFKGKATFTADTSSNTAYMQLSGLTSEDSAVYYCASPRYDLWGQGTSVTASS

SEQ ID NO: 25653 - protein, 5 aa, synthetic construct
  REGION 1..5: note = Description of Artificial Sequence: Synthetic peptide
  REGION 1..5: note = XENP020273 vhCDR1
NYWIE

SEQ ID NO: 25654 - protein, 17 aa, synthetic construct
  REGION 1..17: note = Description of Artificial Sequence: Synthetic peptide
  REGION 1..17: note = XENP020273 vhCDR2
EILPGSGGTNYNEKFKG

SEQ ID NO: 25655 - protein, 5 aa, synthetic construct
  REGION 1..5: note = Description of Artificial Sequence: Synthetic peptide
  REGION 1..5: note = XENP020273 vhCDR3
PRYDL

SEQ ID NO: 25656 - protein, 219 aa, synthetic construct
  REGION 1..219: note = Description of Artificial Sequence: Synthetic polypeptide
  REGION 1..219: note = XENP020273 12E6_H0L0_anti-BTLA_IgG1_PVA_/S267K Light Chain
DVVMTQTPLTLSVTVGQPASISCKSSQSLLHSDGETYLNWFLQRPGQSPKRLIYLVSKRDSGVPDRFTGSGSGTDFTLKISRVEAEDLGVYYCWQGIHFPQTFGRGTKLEIKRTVAAPSVFIFPPSDEQLKSGTASVVCLLNNFYPREAKVQWKVDNALQSGNSQESVTEQDSKDSTYSLSSTLTLSKADYEKHKVYACEVTHQGLSSPVTKSFNRGEC

SEQ ID NO: 25657 - protein, 112 aa, synthetic construct
  REGION 1..112: note = Description of Artificial Sequence: Synthetic polypeptide
  REGION 1..112: note = VL of XENP020273
DVVMTQTPLTLSVTVGQPASISCKSSQSLLHSDGETYLNWFLQRPGQSPKRLIYLVSKRDSGVPDRFTGSGSGTDFTLKISRVEAEDLGVYYCWQGIHFPQTFGRGTKLEIK

SEQ ID NO: 25658 - protein, 16 aa, synthetic construct
  REGION 1..16: note = Description of Artificial Sequence: Synthetic peptide
  REGION 1..16: note = XENP020273 vlCDR1
KSSQSLLHSDGETYLN

SEQ ID NO: 25659 - protein, 7 aa, synthetic construct
  REGION 1..7: note = Description of Artificial Sequence: Synthetic peptide
  REGION 1..7: note = XENP020273 vlCDR2
LVSKRDS

SEQ ID NO: 25660 - protein, 9 aa, synthetic construct
  REGION 1..9: note = Description of Artificial Sequence: Synthetic peptide
  REGION 1..9: note = XENP020273 vlCDR3
WQGIHFPQT

SEQ ID NO: 25661 - protein, 442 aa, synthetic construct
  REGION 1..442: note = Description of Artificial Sequence: Synthetic polypeptide
  REGION 1..442: note = XENP020274 4C11A_H0L0_anti-BTLA_IgG1_PVA_/S267K Heavy Chain
QVQLQQSGAELVKPGASVKLSCKASGYTFTSYYMDWVKQRPGQGLEWIGEINPSNGDTKFNEKFKSKATLTVDKSSTTAYMQLSSLTSEDSAVYYCTRDYGYWGQGTTLTVSSASTKGPSVFPLAPSSKSTSGGTAALGCLVKDYFPEPVTVSWNSGALTSGVHTFPAVLQSSGLYSLSSVVTVPSSSLGTQTYICNVNHKPSNTKVDKKVEPKSCDKTHTCPPCPAPPVAGPSVFLFPPKPKDTLMISRTPEVTCVVVDVKHEDPEVKFNWYVDGVEVHNAKTKPREEQYNSTYRVVSVLTVLHQDWLNGKEYKCKVSNKALPAPIEKTISKAKGQPREPQVYTLPPSREEMTKNQVSLTCLVKGFYPSDIAVEWESNGQPENNYKTTPPVLDSDGSFFLYSKLTVDKSRWQQGNVFSCSVMHEALHNHYTQKSLSLSPGK

SEQ ID NO: 25662 - protein, 113 aa, synthetic construct
  REGION 1..113: note = Description of Artificial Sequence: Synthetic polypeptide
  REGION 1..113: note = VH of XENP020274
QVQLQQSGAELVKPGASVKLSCKASGYTFTSYYMDWVKQRPGQGLEWIGEINPSNGDTKFNEKFKSKATLTVDKSSTTAYMQLSSLTSEDSAVYYCTRDYGYWGQGTTLTVSS

SEQ ID NO: 25663 - protein, 5 aa, synthetic construct
  REGION 1..5: note = Description of Artificial Sequence: Synthetic peptide
  REGION 1..5: note = XENP020274 vhCDR1
SYYMD

SEQ ID NO: 25664 - protein, 17 aa, synthetic construct
  REGION 1..17: note = Description of Artificial Sequence: Synthetic peptide
  REGION 1..17: note = XENP020274 vhCDR2
EINPSNGDTKFNEKFKS

SEQ ID NO: 25665 - protein, 4 aa, synthetic construct
  REGION 1..4: note = Description of Artificial Sequence: Synthetic peptide
  REGION 1..4: note = XENP020274 vhCDR3
DYGY

SEQ ID NO: 25666 - protein, 214 aa, synthetic construct
  REGION 1..214: note = Description of Artificial Sequence: Synthetic polypeptide
  REGION 1..214: note = XENP020274 4C11A_H0L0_anti-BTLA_IgG1_PVA_/S267K Light Chain
DIVMTQSPATLSVTPGDRVSLSCRASQSISDYLHWYQQKSHESPRLLIKYASQSISGIPSRFSGSGSGSDFTLNINGVEPEDVGVYYCQNGHSFPPTFGGGTKLEIKRTVAAPSVFIFPPSDEQLKSGTASVVCLLNNFYPREAKVQWKVDNALQSGNSQESVTEQDSKDSTYSLSSTLTLSKADYEKHKVYACEVTHQGLSSPVTKSFNRGEC

SEQ ID NO: 25667 - protein, 107 aa, synthetic construct
  REGION 1..107: note = Description of Artificial Sequence: Synthetic polypeptide
  REGION 1..107: note = VL of XENP020274
DIVMTQSPATLSVTPGDRVSLSCRASQSISDYLHWYQQKSHESPRLLIKYASQSISGIPSRFSGSGSGSDFTLNINGVEPEDVGVYYCQNGHSFPPTFGGGTKLEIK

SEQ ID NO: 25668 - protein, 11 aa, synthetic construct
  REGION 1..11: note = Description of Artificial Sequence: Synthetic peptide
  REGION 1..11: note = XENP020274 vlCDR1
RASQSISDYLH

SEQ ID NO: 25669 - protein, 7 aa, synthetic construct
  REGION 1..7: note = Description of Artificial Sequence: Synthetic peptide
  REGION 1..7: note = XENP020274 vlCDR2
YASQSIS

SEQ ID NO: 25670 - protein, 9 aa, synthetic construct
  REGION 1..9: note = Description of Artificial Sequence: Synthetic peptide
  REGION 1..9: note = XENP020274 vlCDR3
QNGHSFPPT

SEQ ID NO: 25671 - protein, 442 aa, synthetic construct; identical to SEQ ID NO: 25661
  REGION 1..442: note = Description of Artificial Sequence: Synthetic polypeptide
  REGION 1..442: note = XENP020275 4C11B_H0L0_anti-BTLA_IgG1_PVA_/S267K Heavy Chain

SEQ ID NO: 25672 - protein, 113 aa, synthetic construct; identical to SEQ ID NO: 25662
  REGION 1..113: note = Description of Artificial Sequence: Synthetic polypeptide
  REGION 1..113: note = VH of XENP020275

SEQ ID NO: 25673 - protein, 5 aa, synthetic construct
  REGION 1..5: note = Description of Artificial Sequence: Synthetic peptide
  REGION 1..5: note = XENP020275 vhCDR1
SYYMD

SEQ ID NO: 25674 - protein, 17 aa, synthetic construct
  REGION 1..17: note = Description of Artificial Sequence: Synthetic peptide
  REGION 1..17: note = XENP020275 vhCDR2
EINPSNGDTKFNEKFKS

SEQ ID NO: 25675 - protein, 4 aa, synthetic construct
  REGION 1..4: note = Description of Artificial Sequence: Synthetic peptide
  REGION 1..4: note = XENP020275 vhCDR3
DYGY

SEQ ID NO: 25676 - protein, 213 aa, synthetic construct; identical to SEQ ID NO: 25616
  REGION 1..213: note = Description of Artificial Sequence: Synthetic polypeptide
  REGION 1..213: note = XENP020275 4C11B_H0L0_anti-BTLA_IgG1_PVA_/S267K Light Chain

SEQ ID NO: 25677 - protein, 106 aa, synthetic construct; identical to SEQ ID NO: 25617
  REGION 1..106: note = Description of Artificial Sequence: Synthetic polypeptide
  REGION 1..106: note = VL of XENP020275

SEQ ID NO: 25678 - protein, 11 aa, synthetic construct
  REGION 1..11: note = Description of Artificial Sequence: Synthetic peptide
  REGION 1..11: note = XENP020275 vlCDR1
KASQSVSNDVA

SEQ ID NO: 25679 - protein, 7 aa, synthetic construct
  REGION 1..7: note = Description of Artificial Sequence: Synthetic peptide
  REGION 1..7: note = XENP020275 vlCDR2
YASNRYT

SEQ ID NO: 25680 - protein, 8 aa, synthetic construct
  REGION 1..8: note = Description of Artificial Sequence: Synthetic peptide
  REGION 1..8: note = XENP020275 vlCDR3
QQDYSSPT

SEQ ID NO: 25681 - protein, 449 aa, synthetic construct
  REGION 1..449: note = Description of Artificial Sequence: Synthetic polypeptide
  REGION 1..449: note = XENP020276 7B10_H0L0_anti-BTLA_IgG1_PVA_/S267K Heavy Chain
QVTLKESGPGILQPSQTLSLTCSFSGFSLSTFGMGVNWIRQPSGKGLEWLAHIYWDDDKHYNPSLKSRLTISKDTSNNQVFLKITTVDTADTATYYCARYYRYDVPYIMDYWGQGTSVTVSSASTKGPSVFPLAPSSKSTSGGTAALGCLVKDYFPEPVTVSWNSGALTSGVHTFPAVLQSSGLYSLSSVVTVPSSSLGTQTYICNVNHKPSNTKVDKKVEPKSCDKTHTCPPCPAPPVAGPSVFLFPPKPKDTLMISRTPEVTCVVVDVKHEDPEVKFNWYVDGVEVHNAKTKPREEQYNSTYRVVSVLTVLHQDWLNGKEYKCKVSNKALPAPIEKTISKAKGQPREPQVYTLPPSREEMTKNQVSLTCLVKGFYPSDIAVEWESNGQPENNYKTTPPVLDSDGSFFLYSKLTVDKSRWQQGNVFSCSVMHEALHNHYTQKSLSLSP

SEQ ID NO: 25682 - protein, 122 aa, synthetic construct
  REGION 1..122: note = Description of Artificial Sequence: Synthetic polypeptide
  REGION 1..122: note = VH of XENP020276
QVTLKESGPGILQPSQTLSLTCSFSGFSLSTFGMGVNWIRQPSGKGLEWLAHIYWDDDKHYNPSLKSRLTISKDTSNNQVFLKITTVDTADTATYYCARYYRYDVPYIMDYWGQGTSVTVSS

SEQ ID NO: 25683 - protein, 7 aa, synthetic construct
  REGION 1..7: note = Description of Artificial Sequence: Synthetic peptide
  REGION 1..7: note = XENP020276 vhCDR1
TFGMGVN

SEQ ID NO: 25684 - protein, 16 aa, synthetic construct
  REGION 1..16: note = Description of Artificial Sequence: Synthetic peptide
  REGION 1..16: note = XENP020276 vhCDR2
HIYWDDDKHYNPSLKS

SEQ ID NO: 25685 - protein, 12 aa, synthetic construct
  REGION 1..12: note = Description of Artificial Sequence: Synthetic peptide
  REGION 1..12: note = XENP020276 vhCDR3
YYRYDVPYIMDY

SEQ ID NO: 25686 - protein, 219 aa, synthetic construct
  REGION 1..219: note = Description of Artificial Sequence: Synthetic polypeptide
  REGION 1..219: note = XENP020276 7B10_H0L0_anti-BTLA_IgG1_PVA_/S267K Light Chain
DIVMSQSPSSLAVSVGEKVTMSCKSSQSLLYSSNQKNYLAWYQQKPGQSPKLLIYWASTRESGVPDRFTGSGSGTDFTLTISSVKAEDLAVYYCHQYYSYYTFGGGTKLEIKRTVAAPSVFIFPPSDEQLKSGTASVVCLLNNFYPREAKVQWKVDNALQSGNSQESVTEQDSKDSTYSLSSTLTLSKADYEKHKVYACEVTHQGLSSPVTKSFNRGEC

SEQ ID NO: 25687 - protein, 112 aa, synthetic construct
  REGION 1..112: note = Description of Artificial Sequence: Synthetic polypeptide
  REGION 1..112: note = VL of XENP020276
DIVMSQSPSSLAVSVGEKVTMSCKSSQSLLYSSNQKNYLAWYQQKPGQSPKLLIYWASTRESGVPDRFTGSGSGTDFTLTISSVKAEDLAVYYCHQYYSYYTFGGGTKLEIK

SEQ ID NO: 25688 - protein, 17 aa, synthetic construct
  REGION 1..17: note = Description of Artificial Sequence: Synthetic peptide
  REGION 1..17: note = XENP020276 vlCDR1
KSSQSLLYSSNQKNYLA

SEQ ID NO: 25689 - protein, 7 aa, synthetic construct
  REGION 1..7: note = Description of Artificial Sequence: Synthetic peptide
  REGION 1..7: note = XENP020276 vlCDR2
WASTRES

SEQ ID NO: 25690 - protein, 8 aa, synthetic construct
  REGION 1..8: note = Description of Artificial Sequence: Synthetic peptide
  REGION 1..8: note = XENP020276 vlCDR3
HQYYSYYT

SEQ ID NO: 25691 - protein, 449 aa, synthetic construct
  REGION 1..449: note = Description of Artificial Sequence: Synthetic polypeptide
  REGION 1..449: note = XENP020277 8C1A_H0L0_anti-BTLA_IgG1_PVA_/S267K Heavy Chain
EVQLQESGPSLVKPSQTLSLTCSVTGDSVTSGYWNWIRKFPGNKLEYMGYINYSGSTYYNPSLKSRISITRDTSKNQYYLQLNSVTTEDTATYYCARSFIATVGYAMDYWGQGTSVTVSSASTKGPSVFPLAPSSKSTSGGTAALGCLVKDYFPEPVTVSWNSGALTSGVHTFPAVLQSSGLYSLSSVVTVPSSSLGTQTYICNVNHKPSNTKVDKKVEPKSCDKTHTCPPCPAPPVAGPSVFLFPPKPKDTLMISRTPEVTCVVVDVKHEDPEVKFNWYVDGVEVHNAKTKPREEQYNSTYRVVSVLTVLHQDWLNGKEYKCKVSNKALPAPIEKTISKAKGQPREPQVYTLPPSREEMTKNQVSLTCLVKGFYPSDIAVEWESNGQPENNYKTTPPVLDSDGSFFLYSKLTVDKSRWQQGNVFSCSVMHEALHNHYTQKSLSLSPGK

SEQ ID NO: 25692 - protein, 120 aa, synthetic construct
  REGION 1..120: note = Description of Artificial Sequence: Synthetic polypeptide
  REGION 1..120: note = VH of XENP020277
EVQLQESGPSLVKPSQTLSLTCSVTGDSVTSGYWNWIRKFPGNKLEYMGYINYSGSTYYNPSLKSRISITRDTSKNQYYLQLNSVTTEDTATYYCARSFIATVGYAMDYWGQGTSVTVSS

SEQ ID NO: 25693 - protein, 5 aa, synthetic construct
  REGION 1..5: note = Description of Artificial Sequence: Synthetic peptide
  REGION 1..5: note = XENP020277 vhCDR1
SGYWN

SEQ ID NO: 25694 - protein, 16 aa, synthetic construct
  REGION 1..16: note = Description of Artificial Sequence: Synthetic peptide
  REGION 1..16: note = XENP020277 vhCDR2
YINYSGSTYYNPSLKS

SEQ ID NO: 25695 - protein, 12 aa, synthetic construct
  REGION 1..12: note = Description of Artificial Sequence: Synthetic peptide
  REGION 1..12: note = XENP020277 vhCDR3
SFIATVGYAMDY

SEQ ID NO: 25696 - protein, 214 aa, synthetic construct
  REGION 1..214: note = Description of Artificial Sequence: Synthetic polypeptide
  REGION 1..214: note = XENP020277 8C1A_H0L0_anti-BTLA_IgG1_PVA_/S267K Light Chain
SIVMTQTPKFLLVSAGDRVTITCKASQSVNNDVSWYQQKPGQSPKLLIYSASNRYTGVPDRFTGSGYGTDFTFTISTVQAEDLAVYFCQQDYSSPWTFGGGTKLEIKRTVAAPSVFIFPPSDEQLKSGTASVVCLLNNFYPREAKVQWKVDNALQSGNSQESVTEQDSKDSTYSLSSTLTLSKADYEKHKVYACEVTHQGLSSPVTKSFNRGEC

SEQ ID NO: 25697 - protein, 107 aa, synthetic construct
  REGION 1..107: note = Description of Artificial Sequence: Synthetic polypeptide
  REGION 1..107: note = VL of XENP020277
SIVMTQTPKFLLVSAGDRVTITCKASQSVNNDVSWYQQKPGQSPKLLIYSASNRYTGVPDRFTGSGYGTDFTFTISTVQAEDLAVYFCQQDYSSPWTFGGGTKLEIK

SEQ ID NO: 25698 - protein, 11 aa, synthetic construct
  REGION 1..11: note = Description of Artificial Sequence: Synthetic peptide
  REGION 1..11: note = XENP020277 vlCDR1
KASQSVNNDVS

SEQ ID NO: 25699 - protein, 7 aa, synthetic construct
  REGION 1..7: note = Description of Artificial Sequence: Synthetic peptide
  REGION 1..7: note = XENP020277 vlCDR2
SASNRYT

SEQ ID NO: 25700 - protein, 9 aa, synthetic construct
  REGION 1..9: note = Description of Artificial Sequence: Synthetic peptide
  REGION 1..9: note = XENP020277 vlCDR3
QQDYSSPWT

SEQ ID NO: 25701 - protein, 441 aa, synthetic construct
  REGION 1..441: note = Description of Artificial Sequence: Synthetic polypeptide
  REGION 1..441: note = XENP020278 8C1B_H0L0_anti-BTLA_IgG1_PVA_/S267K Heavy Chain
QVQLQQPGAELVRPGASVRLSCKASGYTFTSYWIHWVKQRPGQGLEWIGNIYSSDSYTNYNQKFKDKATLTVDKSSSTAYIHLSSPTSEDSAVYYCTRVDYWGQGTTLTVSSASTKGPSVFPLAPSSKSTSGGTAALGCLVKDYFPEPVTVSWNSGALTSGVHTFPAVLQSSGLYSLSSVVTVPSSSLGTQTYICNVNHKPSNTKVDKKVEPKSCDKTHTCPPCPAPPVAGPSVFLFPPKPKDTLMISRTPEVTCVVVDVKHEDPEVKFNWYVDGVEVHNAKTKPREEQYNSTYRVVSVLTVLHQDWLNGKEYKCKVSNKALPAPIEKTISKAKGQPREPQVYTLPPSREEMTKNQVSLTCLVKGFYPSDIAVEWESNGQPENNYKTTPPVLDSDGSFFLYSKLTVDKSRWQQGNVFSCSVMHEALHNHYTQKSLSLSPGK

SEQ ID NO: 25702 - protein, 112 aa, synthetic construct
  REGION 1..112: note = Description of Artificial Sequence: Synthetic polypeptide
  REGION 1..112: note = VH of XENP020278
QVQLQQPGAELVRPGASVRLSCKASGYTFTSYWIHWVKQRPGQGLEWIGNIYSSDSYTNYNQKFKDKATLTVDKSSSTAYIHLSSPTSEDSAVYYCTRVDYWGQGTTLTVSS

SEQ ID NO: 25703 - protein, 5 aa, synthetic construct
  REGION 1..5: note = Description of Artificial Sequence: Synthetic peptide
  REGION 1..5: note = XENP020278 vhCDR1
SYWIH

SEQ ID NO: 25704 - protein, 17 aa, synthetic construct
  REGION 1..17: note = Description of Artificial Sequence: Synthetic peptide
  REGION 1..17: note = XENP020278 vhCDR2
NIYSSDSYTNYNQKFKD

SEQ ID NO: 25705 - skipped

SEQ ID NO: 25706 - protein, 214 aa, synthetic construct; identical to SEQ ID NO: 25696
  REGION 1..214: note = Description of Artificial Sequence: Synthetic polypeptide
  REGION 1..214: note = XENP020278 8C1B_H0L0_anti-BTLA_IgG1_PVA_/S267K Light Chain

SEQ ID NO: 25707 - protein, 107 aa, synthetic construct; identical to SEQ ID NO: 25697
  REGION 1..107: note = Description of Artificial Sequence: Synthetic polypeptide
  REGION 1..107: note = VL of XENP020278

SEQ ID NO: 25708 - protein, 11 aa, synthetic construct
  REGION 1..11: note = Description of Artificial Sequence: Synthetic peptide
  REGION 1..11: note = XENP020278 vlCDR1
KASQSVNNDVS

SEQ ID NO: 25709 - protein, 7 aa, synthetic construct
  REGION 1..7: note = Description of Artificial Sequence: Synthetic peptide
  REGION 1..7: note = XENP020278 vlCDR2
SASNRYT

SEQ ID NO: 25710 - protein, 9 aa, synthetic construct
  REGION 1..9: note = Description of Artificial Sequence: Synthetic peptide
  REGION 1..9: note = XENP020278 vlCDR3
QQDYSSPWT

SEQ ID NO: 25711 - protein, 447 aa, synthetic construct
  REGION 1..447: note = Description of Artificial Sequence: Synthetic polypeptide
  REGION 1..447: note = XENP020279 10B6_H0L0_anti-BTLA_IgG1_PVA_/S267K Heavy Chain
QVQLKESGPGLVAPSQSLSITCTVSGFSLTGYGVNWVRQPPGKGLEWLGMIWIDGSTDYNSALKSRLSISKDNSKSQVFLKMNSLQTDDTARYYCARDRPDGRAMDYWGQGTSVTVSSASTKGPSVFPLAPSSKSTSGGTAALGCLVKDYFPEPVTVSWNSGALTSGVHTFPAVLQSSGLYSLSSVVTVPSSSLGTQTYICNVNHKPSNTKVDKKVEPKSCDKTHTCPPCPAPPVAGPSVFLFPPKPKDTLMISRTPEVTCVVVDVKHEDPEVKFNWYVDGVEVHNAKTKPREEQYNSTYRVVSVLTVLHQDWLNGKEYKCKVSNKALPAPIEKTISKAKGQPREPQVYTLPPSREEMTKNQVSLTCLVKGFYPSDIAVEWESNGQPENNYKTTPPVLDSDGSFFLYSKLTVDKSRWQQGNVFSCSVMHEALHNHYTQKSLSLSPGK

SEQ ID NO: 25712 - protein, 118 aa, synthetic construct
  REGION 1..118: note = Description of Artificial Sequence: Synthetic polypeptide
  REGION 1..118: note = VH of XENP020279
QVQLKESGPGLVAPSQSLSITCTVSGFSLTGYGVNWVRQPPGKGLEWLGMIWIDGSTDYNSALKSRLSISKDNSKSQVFLKMNSLQTDDTARYYCARDRPDGRAMDYWGQGTSVTVSS

SEQ ID NO: 25713 - protein, 5 aa, synthetic construct
  REGION 1..5: note = Description of Artificial Sequence: Synthetic peptide
  REGION 1..5: note = XENP020279 vhCDR1
GYGVN

SEQ ID NO: 25714 - protein, 16 aa, synthetic construct
  REGION 1..16: note = Description of Artificial Sequence: Synthetic peptide
  REGION 1..16: note = XENP020279 vhCDR2
MIWIDGSTDYNSALKS

SEQ ID NO: 25715 - protein, 10 aa, synthetic construct
  REGION 1..10: note = Description of Artificial Sequence: Synthetic peptide
  REGION 1..10: note = XENP020279 vhCDR3
DRPDGRAMDY

SEQ ID NO: 25716 - protein, 213 aa, synthetic construct
  REGION 1..213: note = Description of Artificial Sequence: Synthetic polypeptide
  REGION 1..213: note = XENP020279 10B6_H0L0_anti-BTLA_IgG1_PVA_/S267K Light Chain
SIVMTQTPKFLLVSAGDRVTITCKASQTVSNDVTWYQQKPGQSPKLLIYYASNRYTGVPDRFTGSGYGTDFTFTISTVQAEDLAVYFCQQDYSSPTFGGGTKLEIKRTVAAPSVFIFPPSDEQLKSGTASVVCLLNNFYPREAKVQWKVDNALQSGNSQESVTEQDSKDSTYSLSSTLTLSKADYEKHKVYACEVTHQGLSSPVTKSFNRGEC

SEQ ID NO: 25717 - protein, 106 aa, synthetic construct
  REGION 1..106: note = Description of Artificial Sequence: Synthetic polypeptide
  REGION 1..106: note = VL of XENP020279
SIVMTQTPKFLLVSAGDRVTITCKASQTVSNDVTWYQQKPGQSPKLLIYYASNRYTGVPDRFTGSGYGTDFTFTISTVQAEDLAVYFCQQDYSSPTFGGGTKLEIK

SEQ ID NO: 25718 - protein, 11 aa, synthetic construct
  REGION 1..11: note = Description of Artificial Sequence: Synthetic peptide
  REGION 1..11: note = XENP020279 vlCDR1
KASQTVSNDVT

SEQ ID NO: 25719 - protein, 7 aa, synthetic construct
  REGION 1..7: note = Description of Artificial Sequence: Synthetic peptide
  REGION 1..7: note = XENP020279 vlCDR2
YASNRYT

SEQ ID NO: 25720 - protein, 8 aa, synthetic construct
  REGION 1..8: note = Description of Artificial Sequence: Synthetic peptide
  REGION 1..8: note = XENP020279 vlCDR3
QQDYSSPT

SEQ ID NO: 25721 - protein, 447 aa, synthetic construct; identical to SEQ ID NO: 25611
  REGION 1..447: note = Description of Artificial Sequence: Synthetic polypeptide
  REGION 1..447: note = XENP020744 9C6_H0L1_anti-BTLA_IgG1_PVA_/S267K Heavy Chain

SEQ ID NO: 25722 - protein, 118 aa, synthetic construct; identical to SEQ ID NO: 25612
  REGION 1..118: note = Description of Artificial Sequence: Synthetic polypeptide
  REGION 1..118: note = VH of XENP020744

SEQ ID NO: 25723 - protein, 5 aa, synthetic construct
  REGION 1..5: note = Description of Artificial Sequence: Synthetic peptide
  REGION 1..5: note = XENP020744 vhCDR1
GYGVN

SEQ ID NO: 25724 - protein, 16 aa, synthetic construct
  REGION 1..16: note = Description of Artificial Sequence: Synthetic peptide
  REGION 1..16: note = XENP020744 vhCDR2
MIWIDGSTDYNSALKS

SEQ ID NO: 25725 - protein, 10 aa, synthetic construct
  REGION 1..10: note = Description of Artificial Sequence: Synthetic peptide
  REGION 1..10: note = XENP020744 vhCDR3
DRPDGRAMDY

SEQ ID NO: 25726 - protein, 213 aa, synthetic construct; identical to SEQ ID NO: 3160
  REGION 1..213: note = Description of Artificial Sequence: Synthetic polypeptide
  REGION 1..213: note = XENP020744 9C6_H0L1_anti-BTLA_IgG1_PVA_/S267K Light Chain

SEQ ID NO: 25727 - protein, 106 aa, synthetic construct; identical to SEQ ID NO: 3161
  REGION 1..106: note = Description of Artificial Sequence: Synthetic polypeptide
  REGION 1..106: note = VL of XENP020744

SEQ ID NO: 25728 - protein, 11 aa, synthetic construct
  REGION 1..11: note = Description of Artificial Sequence: Synthetic peptide
  REGION 1..11: note = XENP020744 vlCDR1
KASQSVSNDVA

SEQ ID NO: 25729 - protein, 7 aa, synthetic construct
  REGION 1..7: note = Description of Artificial Sequence: Synthetic peptide
  REGION 1..7: note = XENP020744 vlCDR2
YASNRYT

SEQ ID NO: 25730 - protein, 8 aa, synthetic construct
  REGION 1..8: note = Description of Artificial Sequence: Synthetic peptide
  REGION 1..8: note = XENP020744 vlCDR3
QQDYSSPT

SEQ ID NO: 25731 - protein, 447 aa, synthetic construct; identical to SEQ ID NO: 25611
  REGION 1..447: note = Description of Artificial Sequence: Synthetic polypeptide
  REGION 1..447: note = XENP020745 9C6_H0L2_anti-BTLA_IgG1_PVA_/S267K Heavy Chain

SEQ ID NO: 25732 - protein, 118 aa, synthetic construct; identical to SEQ ID NO: 25612
  REGION 1..118: note = Description of Artificial Sequence: Synthetic polypeptide
  REGION 1..118: note = VH of XENP020745

SEQ ID NO: 25733 - protein, 5 aa, synthetic construct
  REGION 1..5: note = Description of Artificial Sequence: Synthetic peptide
  REGION 1..5: note = XENP020745 vhCDR1
GYGVN

SEQ ID NO: 25734 - protein, 16 aa, synthetic construct
  REGION 1..16: note = Description of Artificial Sequence: Synthetic peptide
  REGION 1..16: note = XENP020745 vhCDR2
MIWIDGSTDYNSALKS

SEQ ID NO: 25735 - protein, 10 aa, synthetic construct
  REGION 1..10: note = Description of Artificial Sequence: Synthetic peptide
  REGION 1..10: note = XENP020745 vhCDR3
DRPDGRAMDY

SEQ ID NO: 25736 - protein, 213 aa, synthetic construct
  REGION 1..213: note = Description of Artificial Sequence: Synthetic polypeptide
  REGION 1..213: note = XENP020745 9C6_H0L2_anti-BTLA_IgG1_PVA_/S267K Light Chain
SIVMTQSPLSLPVTPGEPASISCRASQSVSNDVAWYLQKPGQSPQLLIYYASNRYTGVPDRFTGSGYGTDFTLKISRVEAEDVGVYFCQQDYSSPTFGGGTKLEIKRTVAAPSVFIFPPSDEQLKSGTASVVCLLNNFYPREAKVQWKVDNALQSGNSQESVTEQDSKDSTYSLSSTLTLSKADYEKHKVYACEVTHQGLSSPVTKSFNRGEC

SEQ ID NO: 25737 - protein, 106 aa, synthetic construct
  REGION 1..106: note = Description of Artificial Sequence: Synthetic polypeptide
  REGION 1..106: note = VL of XENP020745
SIVMTQSPLSLPVTPGEPASISCRASQSVSNDVAWYLQKPGQSPQLLIYYASNRYTGVPDRFTGSGYGTDFTLKISRVEAEDVGVYFCQQDYSSPTFGGGTKLEIK

SEQ ID NO: 25738 - protein, 11 aa, synthetic construct
  REGION 1..11: note = Description of Artificial Sequence: Synthetic peptide
  REGION 1..11: note = XENP020745 vlCDR1
RASQSVSNDVA

SEQ ID NO: 25739 - protein, 7 aa, synthetic construct
  REGION 1..7: note = Description of Artificial Sequence: Synthetic peptide
  REGION 1..7: note = XENP020745 vlCDR2
YASNRYT

SEQ ID NO: 25740 - protein, 8 aa, synthetic construct
  REGION 1..8: note = Description of Artificial Sequence: Synthetic peptide
  REGION 1..8: note = XENP020745 vlCDR3
QQDYSSPT

SEQ ID NO: 25741 - protein, 447 aa, synthetic construct
  REGION 1..447: note = Description of Artificial Sequence: Synthetic polypeptide
  REGION 1..447: note = XENP020746 9C6_H1L0_anti-BTLA_IgG1_PVA_/S267K Heavy Chain
QVQLVQSGAEVKKPGASVKVSCKVSGFSLTGYGVNWVRQAPGQGLEWMGMIWIDGSTDYNSKFQGRVTMTKDNSKSTVYMELSSLRSEDTAVYYCARDRPDGRAMDYWGQGTMVTVSSASTKGPSVFPLAPSSKSTSGGTAALGCLVKDYFPEPVTVSWNSGALTSGVHTFPAVLQSSGLYSLSSVVTVPSSSLGTQTYICNVNHKPSNTKVDKKVEPKSCDKTHTCPPCPAPPVAGPSVFLFPPKPKDTLMISRTPEVTCVVVDVKHEDPEVKFNWYVDGVEVHNAKTKPREEQYNSTYRVVSVLTVLHQDWLNGKEYKCKVSNKALPAPIEKTISKAKGQPREPQVYTLPPSREEMTKNQVSLTCLVKGFYPSDIAVEWESNGQPENNYKTTPPVLDSDGSFFLYSKLTVDKSRWQQGNVFSCSVMHEALHNHYTQKSLSLSPGK

SEQ ID NO: 25742 - protein, 118 aa, synthetic construct
  REGION 1..118: note = Description of Artificial Sequence: Synthetic polypeptide
  REGION 1..118: note = VH of XENP020746
QVQLVQSGAEVKKPGASVKVSCKVSGFSLTGYGVNWVRQAPGQGLEWMGMIWIDGSTDYNSKFQGRVTMTKDNSKSTVYMELSSLRSEDTAVYYCARDRPDGRAMDYWGQGTMVTVSS

SEQ ID NO: 25743 - protein, 5 aa, synthetic construct
  REGION 1..5: note = Description of Artificial Sequence: Synthetic peptide
  REGION 1..5: note = XENP020746 vhCDR1
GYGVN

SEQ ID NO: 25744 - protein, 16 aa, synthetic construct
  REGION 1..16: note = Description of Artificial Sequence: Synthetic peptide
  REGION 1..16: note = XENP020746 vhCDR2
MIWIDGSTDYNSKFQG

SEQ ID NO: 25745 - protein, 10 aa, synthetic construct
  REGION 1..10: note = Description of Artificial Sequence: Synthetic peptide
  REGION 1..10: note = XENP020746 vhCDR3
DRPDGRAMDY

SEQ ID NO: 25746 - protein, 213 aa, synthetic construct; identical to SEQ ID NO: 25616
  REGION 1..213: note = Description of Artificial Sequence: Synthetic polypeptide
  REGION 1..213: note = XENP020746 9C6_H1L0_anti-BTLA_IgG1_PVA_/S267K Light Chain

SEQ ID NO: 25747 - protein, 106 aa, synthetic construct; identical to SEQ ID NO: 25617
  REGION 1..106: note = Description of Artificial Sequence: Synthetic polypeptide
  REGION 1..106: note = VL of XENP020746

SEQ ID NO: 25748 - protein, 11 aa, synthetic construct
  REGION 1..11: note = Description of Artificial Sequence: Synthetic peptide
  REGION 1..11: note = XENP020746 vlCDR1
KASQSVSNDVA

SEQ ID NO: 25749 - protein, 7 aa, synthetic construct
  REGION 1..7: note = Description of Artificial Sequence: Synthetic peptide
  REGION 1..7: note = XENP020746 vlCDR2
YASNRYT

SEQ ID NO: 25750 - protein, 8 aa, synthetic construct
  REGION 1..8: note = Description of Artificial Sequence: Synthetic peptide
  REGION 1..8: note = XENP020746 vlCDR3
QQDYSSPT

SEQ ID NO: 25751 - protein, 447 aa, synthetic construct; identical to SEQ ID NO: 25741
  REGION 1..447: note = Description of Artificial Sequence: Synthetic polypeptide
  REGION 1..447: note = XENP020747 9C6_H1L1_anti-BTLA_IgG1_PVA_/S267K Heavy Chain

SEQ ID NO: 25752 - protein, 118 aa, synthetic construct; identical to SEQ ID NO: 25742
  REGION 1..118: note = Description of Artificial Sequence: Synthetic polypeptide
  REGION 1..118: note = VH of XENP020747

SEQ ID NO: 25753 - protein, 5 aa, synthetic construct
  REGION 1..5: note = Description of Artificial Sequence: Synthetic peptide
  REGION 1..5: note = XENP020747 vhCDR1
GYGVN

SEQ ID NO: 25754 - protein, 16 aa, synthetic construct
  REGION 1..16: note = Description of Artificial Sequence: Synthetic peptide
  REGION 1..16: note = XENP020747 vhCDR2
MIWIDGSTDYNSKFQG

SEQ ID NO: 25755 - protein, 10 aa, synthetic construct
  REGION 1..10: note = Description of Artificial Sequence: Synthetic peptide
  REGION 1..10: note = XENP020747 vhCDR3
DRPDGRAMDY

SEQ ID NO: 25756 - protein, 213 aa, synthetic construct; identical to SEQ ID NO: 3160
  REGION 1..213: note = Description of Artificial Sequence: Synthetic polypeptide
  REGION 1..213: note = XENP020747 9C6_H1L1_anti-BTLA_IgG1_PVA_/S267K Light Chain

SEQ ID NO: 25757 - protein, 106 aa, synthetic construct; identical to SEQ ID NO: 3161
  REGION 1..106: note = Description of Artificial Sequence: Synthetic polypeptide
  REGION 1..106: note = VL of XENP020747

SEQ ID NO: 25758 - protein, 11 aa, synthetic construct
  REGION 1..11: note = Description of Artificial Sequence: Synthetic peptide
  REGION 1..11: note = XENP020747 vlCDR1
KASQSVSNDVA

SEQ ID NO: 25759 - protein, 7 aa, synthetic construct
  REGION 1..7: note = Description of Artificial Sequence: Synthetic peptide
  REGION 1..7: note = XENP020747 vlCDR2
YASNRYT

SEQ ID NO: 25760 - protein, 8 aa, synthetic construct
  REGION 1..8: note = Description of Artificial Sequence: Synthetic peptide
  REGION 1..8: note = XENP020747 vlCDR3
QQDYSSPT

SEQ ID NO: 25761 - protein, 447 aa, synthetic construct; identical to SEQ ID NO: 25741
  REGION 1..447: note = Description of Artificial Sequence: Synthetic polypeptide
  REGION 1..447: note = XENP020748 9C6_H1L2_anti-BTLA_IgG1_PVA_/S267K Heavy Chain

SEQ ID NO: 25762 - protein, 118 aa, synthetic construct; identical to SEQ ID NO: 25742
  REGION 1..118: note = Description of Artificial Sequence: Synthetic polypeptide
  REGION 1..118: note = VH of XENP020748

SEQ ID NO: 25763 - protein, 5 aa, synthetic construct
  REGION 1..5: note = Description of Artificial Sequence: Synthetic peptide
  REGION 1..5: note = XENP020748 vhCDR1
GYGVN

SEQ ID NO: 25764 - protein, 16 aa, synthetic construct
  REGION 1..16: note = Description of Artificial Sequence: Synthetic peptide
  REGION 1..16: note = XENP020748 vhCDR2
MIWIDGSTDYNSKFQG

SEQ ID NO: 25765 - protein, 10 aa, synthetic construct
  REGION 1..10: note = Description of Artificial Sequence: Synthetic peptide
  REGION 1..10: note = XENP020748 vhCDR3
DRPDGRAMDY

SEQ ID NO: 25766 - protein, 213 aa, synthetic construct; identical to SEQ ID NO: 25736
  REGION 1..213: note = Description of Artificial Sequence: Synthetic polypeptide
  REGION 1..213: note = XENP020748 9C6_H1L2_anti-BTLA_IgG1_PVA_/S267K Light Chain

SEQ ID NO: 25767 - protein, 106 aa, synthetic construct; identical to SEQ ID NO: 25737
  REGION 1..106: note = Description of Artificial Sequence: Synthetic polypeptide
  REGION 1..106: note = VL of XENP020748

SEQ ID NO: 25768 - protein, 11 aa, synthetic construct
  REGION 1..11: note = Description of Artificial Sequence: Synthetic peptide
  REGION 1..11: note = XENP020748 vlCDR1
RASQSVSNDVA

SEQ ID NO: 25769 - protein, 7 aa, synthetic construct
  REGION 1..7: note = Description of Artificial Sequence: Synthetic peptide
  REGION 1..7: note = XENP020748 vlCDR2
YASNRYT

SEQ ID NO: 25770 - protein, 8 aa, synthetic construct
  REGION 1..8: note = Description of Artificial Sequence: Synthetic peptide
  REGION 1..8: note = XENP020748 vlCDR3
QQDYSSPT

SEQ ID NO: 25771 - protein, 447 aa, synthetic construct
  REGION 1..447: note = Description of Artificial Sequence: Synthetic polypeptide
  REGION 1..447: note = XENP020749 9C6_H2L0_anti-BTLA_IgG1_PVA_/S267K Heavy Chain
EVQLVESGGGLVQPGGSLRLSCAVSGFSLTGYGVNWVRQAPGKGLEWVSMIWIDGSTDYNPSVKGRFTISKDNSKSTVYLQMNSLRAEDTAVYYCARDRPDGRAMDYWGQGTMVTVSSASTKGPSVFPLAPSSKSTSGGTAALGCLVKDYFPEPVTVSWNSGALTSGVHTFPAVLQSSGLYSLSSVVTVPSSSLGTQTYICNVNHKPSNTKVDKKVEPKSCDKTHTCPPCPAPPVAGPSVFLFPPKPKDTLMISRTPEVTCVVVDVKHEDPEVKFNWYVDGVEVHNAKTKPREEQYNSTYRVVSVLTVLHQDWLNGKEYKCKVSNKALPAPIEKTISKAKGQPREPQVYTLPPSREEMTKNQVSLTCLVKGFYPSDIAVEWESNGQPENNYKTTPPVLDSDGSFFLYSKLTVDKSRWQQGNVFSCSVMHEALHNHYTQKSLSLSPGK

SEQ ID NO: 25772 - protein, 118 aa, synthetic construct
  REGION 1..118: note = Description of Artificial Sequence: Synthetic polypeptide
  REGION 1..118: note = VH of XENP020749
EVQLVESGGGLVQPGGSLRLSCAVSGFSLTGYGVNWVRQAPGKGLEWVSMIWIDGSTDYNPSVKGRFTISKDNSKSTVYLQMNSLRAEDTAVYYCARDRPDGRAMDYWGQGTMVTVSS

SEQ ID NO: 25773 - protein, 5 aa, synthetic construct
  REGION 1..5: note = Description of Artificial Sequence: Synthetic peptide
  REGION 1..5: note = XENP020749 vhCDR1
GYGVN

SEQ ID NO: 25774 - protein, 16 aa, synthetic construct
  REGION 1..16: note = Description of Artificial Sequence: Synthetic peptide
  REGION 1..16: note = XENP020749 vhCDR2
MIWIDGSTDYNPSVKG

SEQ ID NO: 25775 - protein, 10 aa, synthetic construct
  REGION 1..10: note = Description of Artificial Sequence: Synthetic peptide
  REGION 1..10: note = XENP020749 vhCDR3
DRPDGRAMDY

SEQ ID NO: 25776 - protein, 213 aa, synthetic construct; identical to SEQ ID NO: 25616
  REGION 1..213: note = Description of Artificial Sequence: Synthetic polypeptide
  REGION 1..213: note = XENP020749 9C6_H2L0_anti-BTLA_IgG1_PVA_/S267K Light Chain

SEQ ID NO: 25777 - protein, 106 aa, synthetic construct; identical to SEQ ID NO: 25617
  REGION 1..106: note = Description of Artificial Sequence: Synthetic polypeptide
  REGION 1..106: note = VL of XENP020749

SEQ ID NO: 25778 - protein, 11 aa, synthetic construct
  REGION 1..11: note = Description of Artificial Sequence: Synthetic peptide
  REGION 1..11: note = XENP020749 vlCDR1
KASQSVSNDVA

SEQ ID NO: 25779 - protein, 7 aa, synthetic construct
  REGION 1..7: note = Description of Artificial Sequence: Synthetic peptide
  REGION 1..7: note = XENP020749 vlCDR2
YASNRYT

SEQ ID NO: 25780 - protein, 8 aa, synthetic construct
  REGION 1..8: note = Description of Artificial Sequence: Synthetic peptide
  REGION 1..8: note = XENP020749 vlCDR3
QQDYSSPT

SEQ ID NO: 25781 - protein, 447 aa, synthetic construct; identical to SEQ ID NO: 25771
  REGION 1..447: note = Description of Artificial Sequence: Synthetic polypeptide
  REGION 1..447: note = XENP020750 9C6_H2L1_anti-BTLA_IgG1_PVA_/S267K Heavy Chain

SEQ ID NO: 25782 - protein, 118 aa, synthetic construct; identical to SEQ ID NO: 25772
  REGION 1..118: note = Description of Artificial Sequence: Synthetic polypeptide
  REGION 1..118: note = VH of XENP020750

SEQ ID NO: 25783 - protein, 5 aa, synthetic construct
  REGION 1..5: note = Description of Artificial Sequence: Synthetic peptide
  REGION 1..5: note = XENP020750 vhCDR1
GYGVN

SEQ ID NO: 25784 - protein, 16 aa, synthetic construct
  REGION 1..16: note = Description of Artificial Sequence: Synthetic peptide
  REGION 1..16: note = XENP020750 vhCDR2
MIWIDGSTDYNPSVKG

SEQ ID NO: 25785 - protein, 10 aa, synthetic construct
  REGION 1..10: note = Description of Artificial Sequence: Synthetic peptide
  REGION 1..10: note = XENP020750 vhCDR3
DRPDGRAMDY

SEQ ID NO: 25786 - protein, 213 aa, synthetic construct; identical to SEQ ID NO: 3160
  REGION 1..213: note = Description of Artificial Sequence: Synthetic polypeptide
  REGION 1..213: note = XENP020750 9C6_H2L1_anti-BTLA_IgG1_PVA_/S267K Light Chain

SEQ ID NO: 25787 - protein, 106 aa, synthetic construct; identical to SEQ ID NO: 3161
  REGION 1..106: note = Description of Artificial Sequence: Synthetic polypeptide
  REGION 1..106: note = VL of XENP020750

SEQ ID NO: 25788 - protein, 11 aa, synthetic construct
  REGION 1..11: note = Description of Artificial Sequence: Synthetic peptide
  REGION 1..11: note = XENP020750 vlCDR1
KASQSVSNDVA

SEQ ID NO: 25789 - protein, 7 aa, synthetic construct
  REGION 1..7: note = Description of Artificial Sequence: Synthetic peptide
  REGION 1..7: note = XENP020750 vlCDR2
YASNRYT

SEQ ID NO: 25790 - protein, 8 aa, synthetic construct
  REGION 1..8: note = Description of Artificial Sequence: Synthetic peptide
  REGION 1..8: note = XENP020750 vlCDR3
QQDYSSPT

SEQ ID NO: 25791 - protein, 447 aa, synthetic construct; identical to SEQ ID NO: 25771
  REGION 1..447: note = Description of Artificial Sequence: Synthetic polypeptide
  REGION 1..447: note = XENP020751 9C6_H2L2_anti-BTLA_IgG1_PVA_/S267K Heavy Chain

SEQ ID NO: 25792 - protein, 118 aa, synthetic construct; identical to SEQ ID NO: 25772
  REGION 1..118: note = Description of Artificial Sequence: Synthetic polypeptide
  REGION 1..118: note = VH of XENP020751

SEQ ID NO: 25793 - protein, 5 aa, synthetic construct
  REGION 1..5: note = Description of Artificial Sequence: Synthetic peptide
  REGION 1..5: note = XENP020751 vhCDR1
GYGVN

SEQ ID NO: 25794 - protein, 16 aa, synthetic construct
  REGION 1..16: note = Description of Artificial Sequence: Synthetic peptide
  REGION 1..16: note = XENP020751 vhCDR2
MIWIDGSTDYNPSVKG

SEQ ID NO: 25795 - protein, 10 aa, synthetic construct
  REGION 1..10: note = Description of Artificial Sequence: Synthetic peptide
  REGION 1..10: note = XENP020751 vhCDR3
DRPDGRAMDY

SEQ ID NO: 25796 - protein, 213 aa, synthetic construct; identical to SEQ ID NO: 25736
  REGION 1..213: note = Description of Artificial Sequence: Synthetic polypeptide
  REGION 1..213: note = XENP020751 9C6_H2L2_anti-BTLA_IgG1_PVA_/S267K Light Chain

SEQ ID NO: 25797 - protein, 106 aa, synthetic construct; identical to SEQ ID NO: 25737
  REGION 1..106: note = Description of Artificial Sequence: Synthetic polypeptide
  REGION 1..106: note = VL of XENP020751

SEQ ID NO: 25798 - protein, 11 aa, synthetic construct
  REGION 1..11: note = Description of Artificial Sequence: Synthetic peptide
  REGION 1..11: note = XENP020751 vlCDR1
RASQSVSNDVA

SEQ ID NO: 25799 - protein, 7 aa, synthetic construct
  REGION 1..7: note = Description of Artificial Sequence: Synthetic peptide
  REGION 1..7: note = XENP020751 vlCDR2
YASNRYT

SEQ ID NO: 25800 - protein, 8 aa, synthetic construct
  REGION 1..8: note = Description of Artificial Sequence: Synthetic peptide
  REGION 1..8: note = XENP020751 vlCDR3
QQDYSSPT

SEQ ID NO: 25801 - protein, 447 aa, synthetic construct
  REGION 1..447: note = Description of Artificial Sequence: Synthetic polypeptide
  REGION 1..447: note = XENP020752 9C6_H3L0_anti-BTLA_IgG1_PVA_/S267K Heavy Chain
QVTLKESGPVLVKPTETLTLTCTVSGFSLTGYGVNWVRQPPGKGLEWLAMIWIDGSTDYNPSLKSRLTISKDNSKSQVVLTMTNMDPVDTATYYCARDRPDGRAMDYWGQGTMVTVSSASTKGPSVFPLAPSSKSTSGGTAALGCLVKDYFPEPVTVSWNSGALTSGVHTFPAVLQSSGLYSLSSVVTVPSSSLGTQTYICNVNHKPSNTKVDKKVEPKSCDKTHTCPPCPAPPVAGPSVFLFPPKPKDTLMISRTPEVTCVVVDVKHEDPEVKFNWYVDGVEVHNAKTKPREEQYNSTYRVVSVLTVLHQDWLNGKEYKCKVSNKALPAPIEKTISKAKGQPREPQVYTLPPSREEMTKNQVSLTCLVKGFYPSDIAVEWESNGQPENNYKTTPPVLDSDGSFFLYSKLTVDKSRWQQGNVFSCSVMHEALHNHYTQKSLSLSPGK

SEQ ID NO: 25802 - protein, 118 aa, synthetic construct
  REGION 1..118: note = Description of Artificial Sequence: Synthetic polypeptide
  REGION 1..118: note = VH of XENP020752
QVTLKESGPVLVKPTETLTLTCTVSGFSLTGYGVNWVRQPPGKGLEWLAMIWIDGSTDYNPSLKSRLTISKDNSKSQVVLTMTNMDPVDTATYYCARDRPDGRAMDYWGQGTMVTVSS

SEQ ID NO: 25803 - protein, 5 aa, synthetic construct
  REGION 1..5: note = Description of Artificial Sequence: Synthetic peptide
  REGION 1..5: note = XENP020752 vhCDR1
GYGVN

SEQ ID NO: 25804 - protein, 16 aa, synthetic construct
  REGION 1..16: note = Description of Artificial Sequence: Synthetic peptide
  REGION 1..16: note = XENP020752 vhCDR2
MIWIDGSTDYNPSLKS

SEQ ID NO: 25805 - protein, 10 aa, synthetic construct
  REGION 1..10: note = Description of Artificial Sequence: Synthetic peptide
  REGION 1..10: note = XENP020752 vhCDR3
DRPDGRAMDY

SEQ ID NO: 25806 - protein, 213 aa, synthetic construct; identical to SEQ ID NO: 25616
  REGION 1..213: note = Description of Artificial Sequence: Synthetic polypeptide
  REGION 1..213: note = XENP020752 9C6_H3L0_anti-BTLA_IgG1_PVA_/S267K Light Chain

SEQ ID NO: 25807 - protein, 106 aa, synthetic construct; identical to SEQ ID NO: 25617
  REGION 1..106: note = Description of Artificial Sequence: Synthetic polypeptide
  REGION 1..106: note = VL of XENP020752

SEQ ID NO: 25808 - protein, 11 aa, synthetic construct
  REGION 1..11: note = Description of Artificial Sequence: Synthetic peptide
  REGION 1..11: note = XENP020752 vlCDR1
KASQSVSNDVA

SEQ ID NO: 25809 - protein, 7 aa, synthetic construct
  REGION 1..7: note = Description of Artificial Sequence: Synthetic peptide
  REGION 1..7: note = XENP020752 vlCDR2
YASNRYT

SEQ ID NO: 25810 - protein, 8 aa, synthetic construct
  REGION 1..8: note = Description of Artificial Sequence: Synthetic peptide
  REGION 1..8: note = XENP020752 vlCDR3
QQDYSSPT

SEQ ID NO: 25811 - protein, 447 aa, synthetic construct; identical to SEQ ID NO: 25801
  REGION 1..447: note = Description of Artificial Sequence: Synthetic polypeptide
  REGION 1..447: note = XENP020753 9C6_H3L1_anti-BTLA_IgG1_PVA_/S267K Heavy Chain

SEQ ID NO: 25812 - protein, 118 aa, synthetic construct; identical to SEQ ID NO: 25802
  REGION 1..118: note = Description of Artificial Sequence: Synthetic polypeptide
  REGION 1..118: note = VH of XENP020753

SEQ ID NO: 25813 - protein, 5 aa, synthetic construct
  REGION 1..5: note = Description of Artificial Sequence: Synthetic peptide
  REGION 1..5: note = XENP020753 vhCDR1
GYGVN

SEQ ID NO: 25814 - protein, 16 aa, synthetic construct
  REGION 1..16: note = Description of Artificial Sequence: Synthetic peptide
  REGION 1..16: note = XENP020753 vhCDR2
MIWIDGSTDYNPSLKS

SEQ ID NO: 25815 - protein, 10 aa, synthetic construct
  REGION 1..10: note = Description of Artificial Sequence: Synthetic peptide
  REGION 1..10: note = XENP020753 vhCDR3
DRPDGRAMDY

SEQ ID NO: 25816 - protein, 213 aa, synthetic construct; identical to SEQ ID NO: 3160
  REGION 1..213: note = Description of Artificial Sequence: Synthetic polypeptide
  REGION 1..213: note = XENP020753 9C6_H3L1_anti-BTLA_IgG1_PVA_/S267K Light Chain

SEQ ID NO: 25817 - protein, 106 aa, synthetic construct; identical to SEQ ID NO: 3161
  REGION 1..106: note = Description of Artificial Sequence: Synthetic polypeptide
  REGION 1..106: note = VL of XENP020753

SEQ ID NO: 25818 - protein, 11 aa, synthetic construct
  REGION 1..11: note = Description of Artificial Sequence: Synthetic peptide
  REGION 1..11: note = XENP020753 vlCDR1
KASQSVSNDVA

SEQ ID NO: 25819 - protein, 7 aa, synthetic construct
  REGION 1..7: note = Description of Artificial Sequence: Synthetic peptide
  REGION 1..7: note = XENP020753 vlCDR2
YASNRYT

SEQ ID NO: 25820 - protein, 8 aa, synthetic construct
  REGION 1..8: note = Description of Artificial Sequence: Synthetic peptide
  REGION 1..8: note = XENP020753 vlCDR3
QQDYSSPT

SEQ ID NO: 25821 - protein, 447 aa, synthetic construct; identical to SEQ ID NO: 25801
  REGION 1..447: note = Description of Artificial Sequence: Synthetic polypeptide
  REGION 1..447: note = XENP020754 9C6_H3L2_anti-BTLA_IgG1_PVA_/S267K Heavy Chain

SEQ ID NO: 25822 - protein, 118 aa, synthetic construct; identical to SEQ ID NO: 25802
  REGION 1..118: note = Description of Artificial Sequence: Synthetic polypeptide
  REGION 1..118: note = VH of XENP020754

SEQ ID NO: 25823 - protein, 5 aa, synthetic construct
  REGION 1..5: note = Description of Artificial Sequence: Synthetic peptide
  REGION 1..5: note = XENP020754 vhCDR1
GYGVN

SEQ ID NO: 25824 - protein, 16 aa, synthetic construct
  REGION 1..16: note = Description of Artificial Sequence: Synthetic peptide
  REGION 1..16: note = XENP020754 vhCDR2
MIWIDGSTDYNPSLKS

SEQ ID NO: 25825 - protein, 10 aa, synthetic construct
  REGION 1..10: note = Description of Artificial Sequence: Synthetic peptide
  REGION 1..10: note = XENP020754 vhCDR3
DRPDGRAMDY

SEQ ID NO: 25826 - protein, 213 aa, synthetic construct; identical to SEQ ID NO: 25736
  REGION 1..213: note = Description of Artificial Sequence: Synthetic polypeptide
  REGION 1..213: note = XENP020754 9C6_H3L2_anti-BTLA_IgG1_PVA_/S267K Light Chain

SEQ ID NO: 25827 - protein, 106 aa, synthetic construct; identical to SEQ ID NO: 25737
  REGION 1..106: note = Description of Artificial Sequence: Synthetic polypeptide
  REGION 1..106: note = VL of XENP020754

SEQ ID NO: 25828 - protein, 11 aa, synthetic construct
  REGION 1..11: note = Description of Artificial Sequence: Synthetic peptide
  REGION 1..11: note = XENP020754 vlCDR1
RASQSVSNDVA

SEQ ID NO: 25829 - protein, 7 aa, synthetic construct
  REGION 1..7: note = Description of Artificial Sequence: Synthetic peptide
  REGION 1..7: note = XENP020754 vlCDR2
YASNRYT

SEQ ID NO: 25830 - protein, 8 aa, synthetic construct
  REGION 1..8: note = Description of Artificial Sequence: Synthetic peptide
  REGION 1..8: note = XENP020754 vlCDR3
QQDYSSPT

SEQ ID NO: 25831 - protein, 443 aa, synthetic construct; identical to SEQ ID NO: 25651
  REGION 1..443: note = Description of Artificial Sequence: Synthetic polypeptide
  REGION 1..443: note = XENP020758 12E6_H0L1_anti-BTLA_IgG1_PVA_/S267K Heavy Chain

SEQ ID NO: 25832 - protein, 5 aa, synthetic construct
  REGION 1..5: note = Description of Artificial Sequence: Synthetic peptide
  REGION 1..5: note = XENP020758 vhCDR1
NYWIE

SEQ ID NO: 25833 - protein, 17 aa, synthetic construct
  REGION 1..17: note = Description of Artificial Sequence: Synthetic peptide
  REGION 1..17: note = XENP020758 vhCDR2
EILPGSGGTNYNEKFKG

SEQ ID NO: 25834 - protein, 5 aa, synthetic construct
  REGION 1..5: note = Description of Artificial Sequence: Synthetic peptide
  REGION 1..5: note = XENP020758 vhCDR3
PRYDL

SEQ ID NO: 25835 - protein, 219 aa, synthetic construct
  REGION 1..219: note = Description of Artificial Sequence: Synthetic polypeptide
  REGION 1..219: note = XENP020758 12E6_H0L1_anti-BTLA_IgG1_PVA_/S267K Light Chain
DVVLTQSPLSLPVTLGQPASISCRSSQSLLHSDGETYLNYFQQRPGQSPRRLIYLVSKRDSGVPDRFTGSGSGTDFTLKISRVEAEDVGVYYCWQGIHFPQTFGRGTKLEIKRTVAAPSVFIFPPSDEQLKSGTASVVCLLNNFYPREAKVQWKVDNALQSGNSQESVTEQDSKDSTYSLSSTLTLSKADYEKHKVYACEVTHQGLSSPVTKSFNRGEC

SEQ ID NO: 25836 - protein, 112 aa, synthetic construct
  REGION 1..112: note = Description of Artificial Sequence: Synthetic polypeptide
  REGION 1..112: note = VL of XENP020758
DVVLTQSPLSLPVTLGQPASISCRSSQSLLHSDGETYLNYFQQRPGQSPRRLIYLVSKRDSGVPDRFTGSGSGTDFTLKISRVEAEDVGVYYCWQGIHFPQTFGRGTKLEIK

SEQ ID NO: 25837 - protein, 16 aa, synthetic construct
  REGION 1..16: note = Description of Artificial Sequence: Synthetic peptide
  REGION 1..16: note = XENP020758 vlCDR1
RSSQSLLHSDGETYLN

SEQ ID NO: 25838 - protein, 7 aa, synthetic construct
  REGION 1..7: note = Description of Artificial Sequence: Synthetic peptide
  REGION 1..7: note = XENP020758 vlCDR2
LVSKRDS

SEQ ID NO: 25839 - protein, 9 aa, synthetic construct
  REGION 1..9: note = Description of Artificial Sequence: Synthetic peptide
  REGION 1..9: note = XENP020758 vlCDR3
WQGIHFPQT

SEQ ID NO: 25840 - protein, 443 aa, synthetic construct
  REGION 1..443: note = Description of Artificial Sequence: Synthetic polypeptide
  REGION 1..443: note = XENP020759 12E6_H1L0_anti-BTLA_IgG1_PVA_/S267K Heavy Chain
QVQLVQSGAEVKKPGASVKVSCKASGYTFSNYGIEWVRQAPGQGLEWMGEILPGSGGTNYNEKFQGRVTMTADTSINTAYMELSRLRSDDTAVYYCASPRYDLWGQGTLVTVSSASTKGPSVFPLAPSSKSTSGGTAALGCLVKDYFPEPVTVSWNSGALTSGVHTFPAVLQSSGLYSLSSVVTVPSSSLGTQTYICNVNHKPSNTKVDKKVEPKSCDKTHTCPPCPAPPVAGPSVFLFPPKPKDTLMISRTPEVTCVVVDVKHEDPEVKFNWYVDGVEVHNAKTKPREEQYNSTYRVVSVLTVLHQDWLNGKEYKCKVSNKALPAPIEKTISKAKGQPREPQVYTLPPSREEMTKNQVSLTCLVKGFYPSDIAVEWESNGQPENNYKTTPPVLDSDGSFFLYSKLTVDKSRWQQGNVFSCSVMHEALHNHYTQKSLSLSPGK

SEQ ID NO: 25841 - protein, 114 aa, synthetic construct
  REGION 1..114: note = Description of Artificial Sequence: Synthetic polypeptide
  REGION 1..114: note = VH of XENP020759
QVQLVQSGAEVKKPGASVKVSCKASGYTFSNYGIEWVRQAPGQGLEWMGEILPGSGGTNYNEKFQGRVTMTADTSINTAYMELSRLRSDDTAVYYCASPRYDLWGQGTLVTVSS

SEQ ID NO: 25842 - protein, 5 aa, synthetic construct
  REGION 1..5: note = Description of Artificial Sequence: Synthetic peptide
  REGION 1..5: note = XENP020759 vhCDR1
NYGIE

SEQ ID NO: 25843 - protein, 17 aa, synthetic construct
  REGION 1..17: note = Description of Artificial Sequence: Synthetic peptide
  REGION 1..17: note = XENP020759 vhCDR2
EILPGSGGTNYNEKFQG

SEQ ID NO: 25844 - protein, 5 aa, synthetic construct
  REGION 1..5: note = Description of Artificial Sequence: Synthetic peptide
  REGION 1..5: note = XENP020759 vhCDR3
PRYDL

SEQ ID NO: 25845 - protein, 219 aa, synthetic construct; identical to SEQ ID NO: 25656
  REGION 1..219: note = Description of Artificial Sequence: Synthetic polypeptide
  REGION 1..219: note = XENP020759 12E6_H1L0_anti-BTLA_IgG1_PVA_/S267K Light Chain

SEQ ID NO: 25846 - protein, 112 aa, synthetic construct; identical to SEQ ID NO: 25657
  REGION 1..112: note = Description of Artificial Sequence: Synthetic polypeptide
  REGION 1..112: note = VL of XENP020759

SEQ ID NO: 25847 - protein, 16 aa, synthetic construct
  REGION 1..16: note = Description of Artificial Sequence: Synthetic peptide
  REGION 1..16: note = XENP020759 vlCDR1
KSSQSLLHSDGETYLN

SEQ ID NO: 25848 - protein, 7 aa, synthetic construct
  REGION 1..7: note = Description of Artificial Sequence: Synthetic peptide
  REGION 1..7: note = XENP020759 vlCDR2
LVSKRDS

SEQ ID NO: 25849 - protein, 9 aa, synthetic construct
  REGION 1..9: note = Description of Artificial Sequence: Synthetic peptide
  REGION 1..9: note = XENP020759 vlCDR3
WQGIHFPQT

SEQ ID NO: 25850 - protein, 443 aa, synthetic construct; identical to SEQ ID NO: 25840
  REGION 1..443: note = Description of Artificial Sequence: Synthetic polypeptide
  REGION 1..443: note = XENP020760 12E6_H1L1_anti-BTLA_IgG1_PVA_/S267K Heavy Chain

SEQ ID NO: 25851 - protein, 114 aa, synthetic construct; identical to SEQ ID NO: 25841
  REGION 1..114: note = Description of Artificial Sequence: Synthetic polypeptide
  REGION 1..114: note = VH of XENP020760

SEQ ID NO: 25852 - protein, 5 aa, synthetic construct
  REGION 1..5: note = Description of Artificial Sequence: Synthetic peptide
  REGION 1..5: note = XENP020760 vhCDR1
NYGIE

SEQ ID NO: 25853 - protein, 17 aa, synthetic construct
  REGION 1..17: note = Description of Artificial Sequence: Synthetic peptide
  REGION 1..17: note = XENP020760 vhCDR2
EILPGSGGTNYNEKFQG

SEQ ID NO: 25854 - protein, 5 aa, synthetic construct
  REGION 1..5: note = Description of Artificial Sequence: Synthetic peptide
  REGION 1..5: note = XENP020760 vhCDR3
PRYDL

SEQ ID NO: 25855 - protein, 219 aa, synthetic construct; identical to SEQ ID NO: 25835
  REGION 1..219: note = Description of Artificial Sequence: Synthetic polypeptide
  REGION 1..219: note = XENP020760 12E6_H1L1_anti-BTLA_IgG1_PVA_/S267K Light Chain

SEQ ID NO: 25856 - protein, 112 aa, synthetic construct; identical to SEQ ID NO: 25836
  REGION 1..112: note = Description of Artificial Sequence: Synthetic polypeptide
  REGION 1..112: note = VL of XENP020760

SEQ ID NO: 25857 - protein, 16 aa, synthetic construct
  REGION 1..16: note = Description of Artificial Sequence: Synthetic peptide
  REGION 1..16: note = XENP020760 vlCDR1
RSSQSLLHSDGETYLN

SEQ ID NO: 25858 - protein, 7 aa, synthetic construct
  REGION 1..7: note = Description of Artificial Sequence: Synthetic peptide
  REGION 1..7: note = XENP020760 vlCDR2
LVSKRDS

SEQ ID NO: 25859 - protein, 9 aa, synthetic construct
  REGION 1..9: note = Description of Artificial Sequence: Synthetic peptide
  REGION 1..9: note = XENP020760 vlCDR3
WQGIHFPQT

SEQ ID NO: 25860 - protein, 443 aa, synthetic construct
  REGION 1..443: note = Description of Artificial Sequence: Synthetic polypeptide
  REGION 1..443: note = XENP020761 12E6_H2L0_anti-BTLA_IgG1_PVA_/S267K Heavy Chain
EVQLLESGGGLVQPGGSLRLSCAASGYTFSNYGIEWVRQAPGKGLEWVSEILPGSGGTNYNPSVKGRFTISADTSKNTAYLQMNSLRAEDTAVYYCASPRYDLWGQGTLVTVSSASTKGPSVFPLAPSSKSTSGGTAALGCLVKDYFPEPVTVSWNSGALTSGVHTFPAVLQSSGLYSLSSVVTVPSSSLGTQTYICNVNHKPSNTKVDKKVEPKSCDKTHTCPPCPAPPVAGPSVFLFPPKPKDTLMISRTPEVTCVVVDVKHEDPEVKFNWYVDGVEVHNAKTKPREEQYNSTYRVVSVLTVLHQDWLNGKEYKCKVSNKALPAPIEKTISKAKGQPREPQVYTLPPSREEMTKNQVSLTCLVKGFYPSDIAVEWESNGQPENNYKTTPPVLDSDGSFFLYSKLTVDKSRWQQGNVFSCSVMHEALHNHYTQKSLSLSPGK

SEQ ID NO: 25861 - protein, 114 aa, synthetic construct
  REGION 1..114: note = Description of Artificial Sequence: Synthetic polypeptide
  REGION 1..114: note = VH of XENP020761
EVQLLESGGGLVQPGGSLRLSCAASGYTFSNYGIEWVRQAPGKGLEWVSEILPGSGGTNYNPSVKGRFTISADTSKNTAYLQMNSLRAEDTAVYYCASPRYDLWGQGTLVTVSS

SEQ ID NO: 25862 - protein, 5 aa, synthetic construct
  REGION 1..5: note = Description of Artificial Sequence: Synthetic peptide
  REGION 1..5: note = XENP020761 vhCDR1
NYGIE

SEQ ID NO: 25863 - protein, 17 aa, synthetic construct
  REGION 1..17: note = Description of Artificial Sequence: Synthetic peptide
  REGION 1..17: note = XENP020761 vhCDR2
EILPGSGGTNYNPSVKG

SEQ ID NO: 25864 - protein, 5 aa, synthetic construct
  REGION 1..5: note = Description of Artificial Sequence: Synthetic peptide
  REGION 1..5: note = XENP020761 vhCDR3
PRYDL

SEQ ID NO: 25865 - protein, 219 aa, synthetic construct; identical to SEQ ID NO: 25656
  REGION 1..219: note = Description of Artificial Sequence: Synthetic polypeptide
  REGION 1..219: note = XENP020761 12E6_H2L0_anti-BTLA_IgG1_PVA_/S267K Light Chain

SEQ ID NO: 25866 - protein, 112 aa, synthetic construct; identical to SEQ ID NO: 25657
  REGION 1..112: note = Description of Artificial Sequence: Synthetic polypeptide
  REGION 1..112: note = VL of XENP020761

SEQ ID NO: 25867 - protein, 16 aa, synthetic construct
  REGION 1..16: note = Description of Artificial Sequence: Synthetic peptide
  REGION 1..16: note = XENP020761 vlCDR1
KSSQSLLHSDGETYLN

SEQ ID NO: 25868 - protein, 7 aa, synthetic construct
  REGION 1..7: note = Description of Artificial Sequence: Synthetic peptide
  REGION 1..7: note = XENP020761 vlCDR2
LVSKRDS

SEQ ID NO: 25869 - protein, 9 aa, synthetic construct
  REGION 1..9: note = Description of Artificial Sequence: Synthetic peptide
  REGION 1..9: note = XENP020761 vlCDR3
WQGIHFPQT

SEQ ID NO: 25870 - protein, 443 aa, synthetic construct; identical to SEQ ID NO: 25860
  REGION 1..443: note = Description of Artificial Sequence: Synthetic polypeptide
  REGION 1..443: note = XENP020762 12E6_H2L1_anti-BTLA_IgG1_PVA_/S267K Heavy Chain

SEQ ID NO: 25871 - protein, 114 aa, synthetic construct; identical to SEQ ID NO: 25861
  REGION 1..114: note = Description of Artificial Sequence: Synthetic polypeptide
  REGION 1..114: note = VH of XENP020762

SEQ ID NO: 25872 - protein, 5 aa, synthetic construct
  REGION 1..5: note = Description of Artificial Sequence: Synthetic peptide
  REGION 1..5: note = XENP020762 vhCDR1
NYGIE

SEQ ID NO: 25873 - protein, 17 aa, synthetic construct
  REGION 1..17: note = Description of Artificial Sequence: Synthetic peptide
  REGION 1..17: note = XENP020762 vhCDR2
EILPGSGGTNYNPSVKG

SEQ ID NO: 25874 - protein, 5 aa, synthetic construct
  REGION 1..5: note = Description of Artificial Sequence: Synthetic peptide
  REGION 1..5: note = XENP020762 vhCDR3
PRYDL

SEQ ID NO: 25875 - protein, 219 aa, synthetic construct; identical to SEQ ID NO: 25835
  REGION 1..219: note = Description of Artificial Sequence: Synthetic polypeptide
  REGION 1..219: note = XENP020762 12E6_H2L1_anti-BTLA_IgG1_PVA_/S267K Light Chain

SEQ ID NO: 25876 - protein, 112 aa, synthetic construct; identical to SEQ ID NO: 25836
  REGION 1..112: note = Description of Artificial Sequence: Synthetic polypeptide
  REGION 1..112: note = VL of XENP020762

SEQ ID NO: 25877 - protein, 16 aa, synthetic construct
  REGION 1..16: note = Description of Artificial Sequence: Synthetic peptide
  REGION 1..16: note = XENP020762 vlCDR1
RSSQSLLHSDGETYLN

SEQ ID NO: 25878 - protein, 7 aa, synthetic construct
  REGION 1..7: note = Description of Artificial Sequence: Synthetic peptide
  REGION 1..7: note = XENP020762 vlCDR2
LVSKRDS

SEQ ID NO: 25879 - protein, 9 aa, synthetic construct
  REGION 1..9: note = Description of Artificial Sequence: Synthetic peptide
  REGION 1..9: note = XENP020762 vlCDR3
WQGIHFPQT

SEQ ID NO: 25880 - protein, 447 aa, synthetic construct
  REGION 1..447: note = Description of Artificial Sequence: Synthetic polypeptide
  REGION 1..447: note = XENP020872 9C6_H1.1_L1_anti-BTLA_IgG1_PVA_/S267K Heavy Chain
QVQLKESGAEVKKPGASVKVSCKVSGFSLTGYGVNWVRQAPGQGLEWMGMIWIDGSTDYNSKFQGRVTMTKDNSKSTVYMELSSLRSEDTAVYYCARDRPDGRAMDYWGQGTMVTVSSASTKGPSVFPLAPSSKSTSGGTAALGCLVKDYFPEPVTVSWNSGALTSGVHTFPAVLQSSGLYSLSSVVTVPSSSLGTQTYICNVNHKPSNTKVDKKVEPKSCDKTHTCPPCPAPPVAGPSVFLFPPKPKDTLMISRTPEVTCVVVDVKHEDPEVKFNWYVDGVEVHNAKTKPREEQYNSTYRVVSVLTVLHQDWLNGKEYKCKVSNKALPAPIEKTISKAKGQPREPQVYTLPPSREEMTKNQVSLTCLVKGFYPSDIAVEWESNGQPENNYKTTPPVLDSDGSFFLYSKLTVDKSRWQQGNVFSCSVMHEALHNHYTQKSLSLSPGK

SEQ ID NO: 25881 - protein, 118 aa, synthetic construct; identical to SEQ ID NO: 3146
  REGION 1..118: note = Description of Artificial Sequence: Synthetic polypeptide
  REGION 1..118: note = VH of XENP020872

SEQ ID NO: 25882 - protein, 5 aa, synthetic construct
  REGION 1..5: note = Description of Artificial Sequence: Synthetic peptide
  REGION 1..5: note = XENP020872 vhCDR1
GYGVN

SEQ ID NO: 25883 - protein, 16 aa, synthetic construct
  REGION 1..16: note = Description of Artificial Sequence: Synthetic peptide
  REGION 1..16: note = XENP020872 vhCDR2
MIWIDGSTDYNSKFQG

SEQ ID NO: 25884 - protein, 10 aa, synthetic construct
  REGION 1..10: note = Description of Artificial Sequence: Synthetic peptide
  REGION 1..10: note = XENP020872 vhCDR3
DRPDGRAMDY

SEQ ID NO: 25885 - protein, 213 aa, synthetic construct; identical to SEQ ID NO: 3160
  REGION 1..213: note = Description of Artificial Sequence: Synthetic polypeptide
  REGION 1..213: note = XENP020872 9C6_H1.1_L1_anti-BTLA_IgG1_PVA_/S267K Light Chain

SEQ ID NO: 25886 - protein, 106 aa, synthetic construct; identical to SEQ ID NO: 3161
  REGION 1..106: note = Description of Artificial Sequence: Synthetic polypeptide
  REGION 1..106: note = VL of XENP020872

SEQ ID NO: 25887 - protein, 11 aa, synthetic construct
  REGION 1..11: note = Description of Artificial Sequence: Synthetic peptide
  REGION 1..11: note = XENP020872 vlCDR1
KASQSVSNDVA

SEQ ID NO: 25888 - protein, 7 aa, synthetic construct
  REGION 1..7: note = Description of Artificial Sequence: Synthetic peptide
  REGION 1..7: note = XENP020872 vlCDR2
YASNRYT

SEQ ID NO: 25889 - protein, 8 aa, synthetic construct
  REGION 1..8: note = Description of Artificial Sequence: Synthetic peptide
  REGION 1..8: note = XENP020872 vlCDR3
QQDYSSPT

SEQ ID NO: 25890 - protein, 447 aa, synthetic construct
  REGION 1..447: note = Description of Artificial Sequence: Synthetic polypeptide
  REGION 1..447: note = XENP020873 9C6_H1.2_L1_anti-BTLA_IgG1_PVA_/S267K Heavy Chain
QVQLVQSGPGLVAPGASVKVSCKVSGFSLTGYGVNWVRQAPGQGLEWMGMIWIDGSTDYNSKFQGRVTMTKDNSKSTVYMELSSLRSEDTAVYYCARDRPDGRAMDYWGQGTMVTVSSASTKGPSVFPLAPSSKSTSGGTAALGCLVKDYFPEPVTVSWNSGALTSGVHTFPAVLQSSGLYSLSSVVTVPSSSLGTQTYICNVNHKPSNTKVDKKVEPKSCDKTHTCPPCPAPPVAGPSVFLFPPKPKDTLMISRTPEVTCVVVDVKHEDPEVKFNWYVDGVEVHNAKTKPREEQYNSTYRVVSVLTVLHQDWLNGKEYKCKVSNKALPAPIEKTISKAKGQPREPQVYTLPPSREEMTKNQVSLTCLVKGFYPSDIAVEWESNGQPENNYKTTPPVLDSDGSFFLYSKLTVDKSRWQQGNVFSCSVMHEALHNHYTQKSLSLSPGK

SEQ ID NO: 25891 - protein, 118 aa, synthetic construct
  REGION 1..118: note = Description of Artificial Sequence: Synthetic polypeptide
  REGION 1..118: note = VH of XENP020873
QVQLVQSGPGLVAPGASVKVSCKVSGFSLTGYGVNWVRQAPGQGLEWMGMIWIDGSTDYNSKFQGRVTMTKDNSKSTVYMELSSLRSEDTAVYYCARDRPDGRAMDYWGQGTMVTVSS

SEQ ID NO: 25892 - protein, 5 aa, synthetic construct
  REGION 1..5: note = Description of Artificial Sequence: Synthetic peptide
  REGION 1..5: note = XENP020873 vhCDR1
GYGVN

SEQ ID NO: 25893 - protein, 16 aa, synthetic construct
  REGION 1..16: note = Description of Artificial Sequence: Synthetic peptide
  REGION 1..16: note = XENP020873 vhCDR2
MIWIDGSTDYNSKFQG

SEQ ID NO: 25894 - protein, 10 aa, synthetic construct
  REGION 1..10: note = Description of Artificial Sequence: Synthetic peptide
  REGION 1..10: note = XENP020873 vhCDR3
DRPDGRAMDY

SEQ ID NO: 25895 - protein, 213 aa, synthetic construct; identical to SEQ ID NO: 3160
  REGION 1..213: note = Description of Artificial Sequence: Synthetic polypeptide
  REGION 1..213: note = XENP020873 9C6_H1.2_L1_anti-BTLA_IgG1_PVA_/S267K Light Chain

SEQ ID NO: 25896 - protein, 106 aa, synthetic construct; identical to SEQ ID NO: 3161
  REGION 1..106: note = Description of Artificial Sequence: Synthetic polypeptide
  REGION 1..106: note = VL of XENP020873

SEQ ID NO: 25897 - protein, 11 aa, synthetic construct
  REGION 1..11: note = Description of Artificial Sequence: Synthetic peptide
  REGION 1..11: note = XENP020873 vlCDR1
KASQSVSNDVA

SEQ ID NO: 25898 - protein, 7 aa, synthetic construct
  REGION 1..7: note = Description of Artificial Sequence: Synthetic peptide
  REGION 1..7: note = XENP020873 vlCDR2
YASNRYT

SEQ ID NO: 25899 - protein, 8 aa, synthetic construct
  REGION 1..8: note = Description of Artificial Sequence: Synthetic peptide
  REGION 1..8: note = XENP020873 vlCDR3
QQDYSSPT

SEQ ID NO: 25900 - protein, 447 aa, synthetic construct
  REGION 1..447: note = Description of Artificial Sequence: Synthetic polypeptide
  REGION 1..447: note = XENP020874 9C6_H1.3_L1_anti-BTLA_IgG1_PVA_/S267K Heavy Chain
QVQLVQSGAEVKKPSQSVKVSCKVSGFSLTGYGVNWVRQAPGQGLEWMGMIWIDGSTDYNSKFQGRVTMTKDNSKSTVYMELSSLRSEDTAVYYCARDRPDGRAMDYWGQGTMVTVSSASTKGPSVFPLAPSSKSTSGGTAALGCLVKDYFPEPVTVSWNSGALTSGVHTFPAVLQSSGLYSLSSVVTVPSSSLGTQTYICNVNHKPSNTKVDKKVEPKSCDKTHTCPPCPAPPVAGPSVFLFPPKPKDTLMISRTPEVTCVVVDVKHEDPEVKFNWYVDGVEVHNAKTKPREEQYNSTYRVVSVLTVLHQDWLNGKEYKCKVSNKALPAPIEKTISKAKGQPREPQVYTLPPSREEMTKNQVSLTCLVKGFYPSDIAVEWESNGQPENNYKTTPPVLDSDGSFFLYSKLTVDKSRWQQGNVFSCSVMHEALHNHYTQKSLSLSPGK

SEQ ID NO: 25901 - protein, 118 aa, synthetic construct
  REGION 1..118: note = Description of Artificial Sequence: Synthetic polypeptide
  REGION 1..118: note = VH of XENP020874
QVQLVQSGAEVKKPSQSVKVSCKVSGFSLTGYGVNWVRQAPGQGLEWMGMIWIDGSTDYNSKFQGRVTMTKDNSKSTVYMELSSLRSEDTAVYYCARDRPDGRAMDYWGQGTMVTVSS

SEQ ID NO: 25902 - protein, 5 aa, synthetic construct
  REGION 1..5: note = Description of Artificial Sequence: Synthetic peptide
  REGION 1..5: note = XENP020874 vhCDR1
GYGVN

SEQ ID NO: 25903 - protein, 16 aa, synthetic construct
  REGION 1..16: note = Description of Artificial Sequence: Synthetic peptide
  REGION 1..16: note = XENP020874 vhCDR2
MIWIDGSTDYNSKFQG

SEQ ID NO: 25904 - protein, 10 aa, synthetic construct
  REGION 1..10: note = Description of Artificial Sequence: Synthetic peptide
  REGION 1..10: note = XENP020874 vhCDR3
DRPDGRAMDY

SEQ ID NO: 25905 - protein, 213 aa, synthetic construct; identical to SEQ ID NO: 3160
  REGION 1..213: note = Description of Artificial Sequence: Synthetic polypeptide
  REGION 1..213: note = XENP020874 9C6_H1.3_L1_anti-BTLA_IgG1_PVA_/S267K Light Chain

SEQ ID NO: 25906 - protein, 106 aa, synthetic construct; identical to SEQ ID NO: 3161
  REGION 1..106: note = Description of Artificial Sequence: Synthetic polypeptide
  REGION 1..106: note = VL of XENP020874

SEQ ID NO: 25907 - protein, 11 aa, synthetic construct
  REGION 1..11: note = Description of Artificial Sequence: Synthetic peptide
  REGION 1..11: note = XENP020874 vlCDR1
KASQSVSNDVA

SEQ ID NO: 25908 - protein, 7 aa, synthetic construct
  REGION 1..7: note = Description of Artificial Sequence: Synthetic peptide
  REGION 1..7: note = XENP020874 vlCDR2
YASNRYT

SEQ ID NO: 25909 - protein, 8 aa, synthetic construct
  REGION 1..8: note = Description of Artificial Sequence: Synthetic peptide
  REGION 1..8: note = XENP020874 vlCDR3
QQDYSSPT

SEQ ID NO: 25910 - protein, 447 aa, synthetic construct
  REGION 1..447: note = Description of Artificial Sequence: Synthetic polypeptide
  REGION 1..447: note = XENP020875 9C6_H1.4_L1_anti-BTLA_IgG1_PVA_/S267K Heavy Chain
QVQLVQSGAEVKKPGASLSITCKVSGFSLTGYGVNWVRQAPGQGLEWMGMIWIDGSTDYNSKFQGRVTMTKDNSKSTVYMELSSLRSEDTAVYYCARDRPDGRAMDYWGQGTMVTVSSASTKGPSVFPLAPSSKSTSGGTAALGCLVKDYFPEPVTVSWNSGALTSGVHTFPAVLQSSGLYSLSSVVTVPSSSLGTQTYICNVNHKPSNTKVDKKVEPKSCDKTHTCPPCPAPPVAGPSVFLFPPKPKDTLMISRTPEVTCVVVDVKHEDPEVKFNWYVDGVEVHNAKTKPREEQYNSTYRVVSVLTVLHQDWLNGKEYKCKVSNKALPAPIEKTISKAKGQPREPQVYTLPPSREEMTKNQVSLTCLVKGFYPSDIAVEWESNGQPENNYKTTPPVLDSDGSFFLYSKLTVDKSRWQQGNVFSCSVMHEALHNHYTQKSLSLSPGK

SEQ ID NO: 25911 - protein, 118 aa, synthetic construct
  REGION 1..118: note = Description of Artificial Sequence: Synthetic polypeptide
  REGION 1..118: note = VH of XENP020875
QVQLVQSGAEVKKPGASLSITCKVSGFSLTGYGVNWVRQAPGQGLEWMGMIWIDGSTDYNSKFQGRVTMTKDNSKSTVYMELSSLRSEDTAVYYCARDRPDGRAMDYWGQGTMVTVSS

SEQ ID NO: 25912 - protein, 5 aa, synthetic construct
  REGION 1..5: note = Description of Artificial Sequence: Synthetic peptide
  REGION 1..5: note = XENP020875 vhCDR1
GYGVN

SEQ ID NO: 25913 - protein, 16 aa, synthetic construct
  REGION 1..16: note = Description of Artificial Sequence: Synthetic peptide
  REGION 1..16: note = XENP020875 vhCDR2
MIWIDGSTDYNSKFQG

SEQ ID NO: 25914 - protein, 10 aa, synthetic construct
  REGION 1..10: note = Description of Artificial Sequence: Synthetic peptide
  REGION 1..10: note = XENP020875 vhCDR3
DRPDGRAMDY

SEQ ID NO: 25915 - protein, 213 aa, synthetic construct; identical to SEQ ID NO: 3160
  REGION 1..213: note = Description of Artificial Sequence: Synthetic polypeptide
  REGION 1..213: note = XENP020875 9C6_H1.4_L1_anti-BTLA_IgG1_PVA_/S267K Light Chain

SEQ ID NO: 25916 - protein, 106 aa, synthetic construct; identical to SEQ ID NO: 3161
  REGION 1..106: note = Description of Artificial Sequence: Synthetic polypeptide
  REGION 1..106: note = VL of XENP020875

SEQ ID NO: 25917 - protein, 11 aa, synthetic construct
  REGION 1..11: note = Description of Artificial Sequence: Synthetic peptide
  REGION 1..11: note = XENP020875 vlCDR1
KASQSVSNDVA

SEQ ID NO: 25918 - protein, 7 aa, synthetic construct
  REGION 1..7: note = Description of Artificial Sequence: Synthetic peptide
  REGION 1..7: note = XENP020875 vlCDR2
YASNRYT

SEQ ID NO: 25919 - protein, 8 aa, synthetic construct
  REGION 1..8: note = Description of Artificial Sequence: Synthetic peptide
  REGION 1..8: note = XENP020875 vlCDR3
QQDYSSPT

SEQ ID NO: 25920 - protein, 447 aa, synthetic construct
  REGION 1..447: note = Description of Artificial Sequence: Synthetic polypeptide
  REGION 1..447: note = XENP020876 9C6_H1.5_L1_anti-BTLA_IgG1_PVA_/S267K Heavy Chain
QVQLVQSGAEVKKPGASVKVSCTVSGFSLTGYGVNWVRQAPGQGLEWMGMIWIDGSTDYNSKFQGRVTMTKDNSKSTVYMELSSLRSEDTAVYYCARDRPDGRAMDYWGQGTMVTVSSASTKGPSVFPLAPSSKSTSGGTAALGCLVKDYFPEPVTVSWNSGALTSGVHTFPAVLQSSGLYSLSSVVTVPSSSLGTQTYICNVNHKPSNTKVDKKVEPKSCDKTHTCPPCPAPPVAGPSVFLFPPKPKDTLMISRTPEVTCVVVDVKHEDPEVKFNWYVDGVEVHNAKTKPREEQYNSTYRVVSVLTVLHQDWLNGKEYKCKVSNKALPAPIEKTISKAKGQPREPQVYTLPPSREEMTKNQVSLTCLVKGFYPSDIAVEWESNGQPENNYKTTPPVLDSDGSFFLYSKLTVDKSRWQQGNVFSCSVMHEALHNHYTQKSLSLSPGK

SEQ ID NO: 25921 - protein, 118 aa, synthetic construct
  REGION 1..118: note = Description of Artificial Sequence: Synthetic polypeptide
  REGION 1..118: note = VH of XENP020876
QVQLVQSGAEVKKPGASVKVSCTVSGFSLTGYGVNWVRQAPGQGLEWMGMIWIDGSTDYNSKFQGRVTMTKDNSKSTVYMELSSLRSEDTAVYYCARDRPDGRAMDYWGQGTMVTVSS

SEQ ID NO: 25922 - protein, 5 aa, synthetic construct
  REGION 1..5: note = Description of Artificial Sequence: Synthetic peptide
  REGION 1..5: note = XENP020876 vhCDR1
GYGVN

SEQ ID NO: 25923 - protein, 16 aa, synthetic construct
  REGION 1..16: note = Description of Artificial Sequence: Synthetic peptide
  REGION 1..16: note = XENP020876 vhCDR2
MIWIDGSTDYNSKFQG

SEQ ID NO: 25924 - protein, 10 aa, synthetic construct
  REGION 1..10: note = Description of Artificial Sequence: Synthetic peptide
  REGION 1..10: note = XENP020876 vhCDR3
DRPDGRAMDY

SEQ ID NO: 25925 - protein, 213 aa, synthetic construct; identical to SEQ ID NO: 3160
  REGION 1..213: note = Description of Artificial Sequence: Synthetic polypeptide
  REGION 1..213: note = XENP020876 9C6_H1.5_L1_anti-BTLA_IgG1_PVA_/S267K Light Chain

SEQ ID NO: 25926 - protein, 106 aa, synthetic construct; identical to SEQ ID NO: 3161
  REGION 1..106: note = Description of Artificial Sequence: Synthetic polypeptide
  REGION 1..106: note = VL of XENP020876

SEQ ID NO: 25927 - protein, 11 aa, synthetic construct
  REGION 1..11: note = Description of Artificial Sequence: Synthetic peptide
  REGION 1..11: note = XENP020876 vlCDR1
KASQSVSNDVA

SEQ ID NO: 25928 - protein, 7 aa, synthetic construct
  REGION 1..7: note = Description of Artificial Sequence: Synthetic peptide
  REGION 1..7: note = XENP020876 vlCDR2
YASNRYT

SEQ ID NO: 25929 - protein, 8 aa, synthetic construct
  REGION 1..8: note = Description of Artificial Sequence: Synthetic peptide
  REGION 1..8: note = XENP020876 vlCDR3
QQDYSSPT

SEQ ID NO: 25930 - protein, 447 aa, synthetic construct
  REGION 1..447: note = Description of Artificial Sequence: Synthetic polypeptide
  REGION 1..447: note = XENP020877 9C6_H1.6_L1_anti-BTLA_IgG1_PVA_/S267K Heavy Chain
QVQLVQSGAEVKKPGASVKVSCKVSGFSLTGYGVNWVRQPPGKGLEWMGMIWIDGSTDYNSKFQGRVTMTKDNSKSTVYMELSSLRSEDTAVYYCARDRPDGRAMDYWGQGTMVTVSSASTKGPSVFPLAPSSKSTSGGTAALGCLVKDYFPEPVTVSWNSGALTSGVHTFPAVLQSSGLYSLSSVVTVPSSSLGTQTYICNVNHKPSNTKVDKKVEPKSCDKTHTCPPCPAPPVAGPSVFLFPPKPKDTLMISRTPEVTCVVVDVKHEDPEVKFNWYVDGVEVHNAKTKPREEQYNSTYRVVSVLTVLHQDWLNGKEYKCKVSNKALPAPIEKTISKAKGQPREPQVYTLPPSREEMTKNQVSLTCLVKGFYPSDIAVEWESNGQPENNYKTTPPVLDSDGSFFLYSKLTVDKSRWQQGNVFSCSVMHEALHNHYTQKSLSLSPGK

SEQ ID NO: 25931 - protein, 118 aa, synthetic construct
  REGION 1..118: note = Description of Artificial Sequence: Synthetic polypeptide
  REGION 1..118: note = VH of XENP020877
QVQLVQSGAEVKKPGASVKVSCKVSGFSLTGYGVNWVRQPPGKGLEWMGMIWIDGSTDYNSKFQGRVTMTKDNSKSTVYMELSSLRSEDTAVYYCARDRPDGRAMDYWGQGTMVTVSS

SEQ ID NO: 25932 - protein, 5 aa, synthetic construct
  REGION 1..5: note = Description of Artificial Sequence: Synthetic peptide
  REGION 1..5: note = XENP020877 vhCDR1
GYGVN

SEQ ID NO: 25933 - protein, 16 aa, synthetic construct
  REGION 1..16: note = Description of Artificial Sequence: Synthetic peptide
  REGION 1..16: note = XENP020877 vhCDR2
MIWIDGSTDYNSKFQG

SEQ ID NO: 25934 - protein, 10 aa, synthetic construct
  REGION 1..10: note = Description of Artificial Sequence: Synthetic peptide
  REGION 1..10: note = XENP020877 vhCDR3
DRPDGRAMDY

SEQ ID NO: 25935 - protein, 213 aa, synthetic construct; identical to SEQ ID NO: 3160
  REGION 1..213: note = Description of Artificial Sequence: Synthetic polypeptide
  REGION 1..213: note = XENP020877 9C6_H1.6_L1_anti-BTLA_IgG1_PVA_/S267K Light Chain

SEQ ID NO: 25936 - protein, 106 aa, synthetic construct; identical to SEQ ID NO: 3161
  REGION 1..106: note = Description of Artificial Sequence: Synthetic polypeptide
  REGION 1..106: note = VL of XENP020877

SEQ ID NO: 25937 - protein, 11 aa, synthetic construct
  REGION 1..11: note = Description of Artificial Sequence: Synthetic peptide
  REGION 1..11: note = XENP020877 vlCDR1
KASQSVSNDVA

SEQ ID NO: 25938 - protein, 7 aa, synthetic construct
  REGION 1..7: note = Description of Artificial Sequence: Synthetic peptide
  REGION 1..7: note = XENP020877 vlCDR2
YASNRYT

SEQ ID NO: 25939 - protein, 8 aa, synthetic construct
  REGION 1..8: note = Description of Artificial Sequence: Synthetic peptide
  REGION 1..8: note = XENP020877 vlCDR3
QQDYSSPT

SEQ ID NO: 25940 - protein, 447 aa, synthetic construct
  REGION 1..447: note = Description of Artificial Sequence: Synthetic polypeptide
  REGION 1..447: note = XENP020878 9C6_H1.7_L1_anti-BTLA_IgG1_PVA_/S267K Heavy Chain
QVQLVQSGAEVKKPGASVKVSCKVSGFSLTGYGVNWVRQAPGQGLEWLGMIWIDGSTDYNSKFQGRVTMTKDNSKSTVYMELSSLRSEDTAVYYCARDRPDGRAMDYWGQGTMVTVSSASTKGPSVFPLAPSSKSTSGGTAALGCLVKDYFPEPVTVSWNSGALTSGVHTFPAVLQSSGLYSLSSVVTVPSSSLGTQTYICNVNHKPSNTKVDKKVEPKSCDKTHTCPPCPAPPVAGPSVFLFPPKPKDTLMISRTPEVTCVVVDVKHEDPEVKFNWYVDGVEVHNAKTKPREEQYNSTYRVVSVLTVLHQDWLNGKEYKCKVSNKALPAPIEKTISKAKGQPREPQVYTLPPSREEMTKNQVSLTCLVKGFYPSDIAVEWESNGQPENNYKTTPPVLDSDGSFFLYSKLTVDKSRWQQGNVFSCSVMHEALHNHYTQKSLSLSPGK

SEQ ID NO: 25941 - protein, 118 aa, synthetic construct
  REGION 1..118: note = Description of Artificial Sequence: Synthetic polypeptide
  REGION 1..118: note = VH of XENP020878
QVQLVQSGAEVKKPGASVKVSCKVSGFSLTGYGVNWVRQAPGQGLEWLGMIWIDGSTDYNSKFQGRVTMTKDNSKSTVYMELSSLRSEDTAVYYCARDRPDGRAMDYWGQGTMVTVSS

SEQ ID NO: 25942 - protein, 5 aa, synthetic construct
  REGION 1..5: note = Description of Artificial Sequence: Synthetic peptide
  REGION 1..5: note = XENP020878 vhCDR1
GYGVN

SEQ ID NO: 25943 - protein, 16 aa, synthetic construct
  REGION 1..16: note = Description of Artificial Sequence: Synthetic peptide
  REGION 1..16: note = XENP020878 vhCDR2
MIWIDGSTDYNSKFQG

SEQ ID NO: 25944 - protein, 10 aa, synthetic construct
  REGION 1..10: note = Description of Artificial Sequence: Synthetic peptide
  REGION 1..10: note = XENP020878 vhCDR3
DRPDGRAMDY

SEQ ID NO: 25945 - protein, 213 aa, synthetic construct; identical to SEQ ID NO: 3160
  REGION 1..213: note = Description of Artificial Sequence: Synthetic polypeptide
  REGION 1..213: note = XENP020878 9C6_H1.7_L1_anti-BTLA_IgG1_PVA_/S267K Light Chain

SEQ ID NO: 25946 - protein, 106 aa, synthetic construct; identical to SEQ ID NO: 3161
  REGION 1..106: note = Description of Artificial Sequence: Synthetic polypeptide
  REGION 1..106: note = VL of XENP020878

SEQ ID NO: 25947 - protein, 11 aa, synthetic construct
  REGION 1..11: note = Description of Artificial Sequence: Synthetic peptide
  REGION 1..11: note = XENP020878 vlCDR1
KASQSVSNDVA

SEQ ID NO: 25948 - protein, 7 aa, synthetic construct
  REGION 1..7: note = Description of Artificial Sequence: Synthetic peptide
  REGION 1..7: note = XENP020878 vlCDR2
YASNRYT

SEQ ID NO: 25949 - protein, 8 aa, synthetic construct
  REGION 1..8: note = Description of Artificial Sequence: Synthetic peptide
  REGION 1..8: note = XENP020878 vlCDR3
QQDYSSPT

SEQ ID NO: 25950 - protein, 447 aa, synthetic construct
  REGION 1..447: note = Description of Artificial Sequence: Synthetic polypeptide
  REGION 1..447: note = XENP020879 9C6_H1.8_L1_anti-BTLA_IgG1_PVA_/S267K Heavy Chain
QVQLVQSGAEVKKPGASVKVSCKVSGFSLTGYGVNWVRQAPGQGLEWMGMIWIDGSTDYNSAFQGRVTMTKDNSKSTVYMELSSLRSEDTAVYYCARDRPDGRAMDYWGQGTMVTVSSASTKGPSVFPLAPSSKSTSGGTAALGCLVKDYFPEPVTVSWNSGALTSGVHTFPAVLQSSGLYSLSSVVTVPSSSLGTQTYICNVNHKPSNTKVDKKVEPKSCDKTHTCPPCPAPPVAGPSVFLFPPKPKDTLMISRTPEVTCVVVDVKHEDPEVKFNWYVDGVEVHNAKTKPREEQYNSTYRVVSVLTVLHQDWLNGKEYKCKVSNKALPAPIEKTISKAKGQPREPQVYTLPPSREEMTKNQVSLTCLVKGFYPSDIAVEWESNGQPENNYKTTPPVLDSDGSFFLYSKLTVDKSRWQQGNVFSCSVMHEALHNHYTQKSLSLSPGK

SEQ ID NO: 25951 - protein, 118 aa, synthetic construct
  REGION 1..118: note = Description of Artificial Sequence: Synthetic polypeptide
  REGION 1..118: note = VH of XENP020879
QVQLVQSGAEVKKPGASVKVSCKVSGFSLTGYGVNWVRQAPGQGLEWMGMIWIDGSTDYNSAFQGRVTMTKDNSKSTVYMELSSLRSEDTAVYYCARDRPDGRAMDYWGQGTMVTVSS

SEQ ID NO: 25952 - protein, 5 aa, synthetic construct
  REGION 1..5: note = Description of Artificial Sequence: Synthetic peptide
  REGION 1..5: note = XENP020879 vhCDR1
GYGVN

SEQ ID NO: 25953 - protein, 16 aa, synthetic construct
  REGION 1..16: note = Description of Artificial Sequence: Synthetic peptide
  REGION 1..16: note = XENP020879 vhCDR2
MIWIDGSTDYNSAFQG

SEQ ID NO: 25954 - protein, 10 aa, synthetic construct
  REGION 1..10: note = Description of Artificial Sequence: Synthetic peptide
  REGION 1..10: note = XENP020879 vhCDR3
DRPDGRAMDY

SEQ ID NO: 25955 - protein, 213 aa, synthetic construct; identical to SEQ ID NO: 3160
  REGION 1..213: note = Description of Artificial Sequence: Synthetic polypeptide
  REGION 1..213: note = XENP020879 9C6_H1.8_L1_anti-BTLA_IgG1_PVA_/S267K Light Chain

SEQ ID NO: 25956 - protein, 106 aa, synthetic construct; identical to SEQ ID NO: 3161
  REGION 1..106: note = Description of Artificial Sequence: Synthetic polypeptide
  REGION 1..106: note = VL of XENP020879

SEQ ID NO: 25957 - protein, 11 aa, synthetic construct
  REGION 1..11: note = Description of Artificial Sequence: Synthetic peptide
  REGION 1..11: note = XENP020879 vlCDR1
KASQSVSNDVA

SEQ ID NO: 25958 - protein, 7 aa, synthetic construct
  REGION 1..7: note = Description of Artificial Sequence: Synthetic peptide
  REGION 1..7: note = XENP020879 vlCDR2
YASNRYT

SEQ ID NO: 25959 - protein, 8 aa, synthetic construct
  REGION 1..8: note = Description of Artificial Sequence: Synthetic peptide
  REGION 1..8: note = XENP020879 vlCDR3
QQDYSSPT

SEQ ID NO: 25960 - protein, 447 aa, synthetic construct
  REGION 1..447: note = Description of Artificial Sequence: Synthetic polypeptide
  REGION 1..447: note = XENP020880 9C6_H1.9_L1_anti-BTLA_IgG1_PVA_/S267K Heavy Chain
QVQLVQSGAEVKKPGASVKVSCKVSGFSLTGYGVNWVRQAPGQGLEWMGMIWIDGSTDYNSALKSRVTMTKDNSKSTVYMELSSLRSEDTAVYYCARDRPDGRAMDYWGQGTMVTVSSASTKGPSVFPLAPSSKSTSGGTAALGCLVKDYFPEPVTVSWNSGALTSGVHTFPAVLQSSGLYSLSSVVTVPSSSLGTQTYICNVNHKPSNTKVDKKVEPKSCDKTHTCPPCPAPPVAGPSVFLFPPKPKDTLMISRTPEVTCVVVDVKHEDPEVKFNWYVDGVEVHNAKTKPREEQYNSTYRVVSVLTVLHQDWLNGKEYKCKVSNKALPAPIEKTISKAKGQPREPQVYTLPPSREEMTKNQVSLTCLVKGFYPSDIAVEWESNGQPENNYKTTPPVLDSDGSFFLYSKLTVDKSRWQQGNVFSCSVMHEALHNHYTQKSLSLSPGK

SEQ ID NO: 25961 - protein, 118 aa, synthetic construct
  REGION 1..118: note = Description of Artificial Sequence: Synthetic polypeptide
  REGION 1..118: note = VH of XENP020880
QVQLVQSGAEVKKPGASVKVSCKVSGFSLTGYGVNWVRQAPGQGLEWMGMIWIDGSTDYNSALKSRVTMTKDNSKSTVYMELSSLRSEDTAVYYCARDRPDGRAMDYWGQGTMVTVSS

SEQ ID NO: 25962 - protein, 5 aa, synthetic construct
  REGION 1..5: note = Description of Artificial Sequence: Synthetic peptide
  REGION 1..5: note = XENP020880 vhCDR1
GYGVN

SEQ ID NO: 25963 - protein, 16 aa, synthetic construct
  REGION 1..16: note = Description of Artificial Sequence: Synthetic peptide
  REGION 1..16: note = XENP020880 vhCDR2
MIWIDGSTDYNSALKS

SEQ ID NO: 25964 - protein, 10 aa, synthetic construct
  REGION 1..10: note = Description of Artificial Sequence: Synthetic peptide
  REGION 1..10: note = XENP020880 vhCDR3
DRPDGRAMDY

SEQ ID NO: 25965 - protein, 213 aa, synthetic construct; identical to SEQ ID NO: 3160
  REGION 1..213: note = Description of Artificial Sequence: Synthetic polypeptide
  REGION 1..213: note = XENP020880 9C6_H1.9_L1_anti-BTLA_IgG1_PVA_/S267K Light Chain

SEQ ID NO: 25966 - protein, 106 aa, synthetic construct; identical to SEQ ID NO: 3161
  REGION 1..106: note = Description of Artificial Sequence: Synthetic polypeptide
  REGION 1..106: note = VL of XENP020880

SEQ ID NO: 25967 - protein, 11 aa, synthetic construct
  REGION 1..11: note = Description of Artificial Sequence: Synthetic peptide
  REGION 1..11: note = XENP020880 vlCDR1
KASQSVSNDVA

SEQ ID NO: 25968 - protein, 7 aa, synthetic construct
  REGION 1..7: note = Description of Artificial Sequence: Synthetic peptide
  REGION 1..7: note = XENP020880 vlCDR2
YASNRYT

SEQ ID NO: 25969 - protein, 8 aa, synthetic construct
  REGION 1..8: note = Description of Artificial Sequence: Synthetic peptide
  REGION 1..8: note = XENP020880 vlCDR3
QQDYSSPT

SEQ ID NO: 25970 - protein, 447 aa, synthetic construct
  REGION 1..447: note = Description of Artificial Sequence: Synthetic polypeptide
  REGION 1..447: note = XENP020881 9C6_H1.10_L1_anti-BTLA_IgG1_PVA_/S267K Heavy Chain
QVQLVQSGAEVKKPGASVKVSCKVSGFSLTGYGVNWVRQAPGQGLEWMGMIWIDGSTDYNSKFKGRVTMTKDNSKSTVYMELSSLRSEDTAVYYCARDRPDGRAMDYWGQGTMVTVSSASTKGPSVFPLAPSSKSTSGGTAALGCLVKDYFPEPVTVSWNSGALTSGVHTFPAVLQSSGLYSLSSVVTVPSSSLGTQTYICNVNHKPSNTKVDKKVEPKSCDKTHTCPPCPAPPVAGPSVFLFPPKPKDTLMISRTPEVTCVVVDVKHEDPEVKFNWYVDGVEVHNAKTKPREEQYNSTYRVVSVLTVLHQDWLNGKEYKCKVSNKALPAPIEKTISKAKGQPREPQVYTLPPSREEMTKNQVSLTCLVKGFYPSDIAVEWESNGQPENNYKTTPPVLDSDGSFFLYSKLTVDKSRWQQGNVFSCSVMHEALHNHYTQKSLSLSPGK

SEQ ID NO: 25971 - protein, 118 aa, synthetic construct
  REGION 1..118: note = Description of Artificial Sequence: Synthetic polypeptide
  REGION 1..118: note = VH of XENP020881
QVQLVQSGAEVKKPGASVKVSCKVSGFSLTGYGVNWVRQAPGQGLEWMGMIWIDGSTDYNSKFKGRVTMTKDNSKSTVYMELSSLRSEDTAVYYCARDRPDGRAMDYWGQGTMVTVSS

SEQ ID NO: 25972 - protein, 5 aa, synthetic construct
  REGION 1..5: note = Description of Artificial Sequence: Synthetic peptide
  REGION 1..5: note = XENP020881 vhCDR1
GYGVN

SEQ ID NO: 25973 - protein, 16 aa, synthetic construct
  REGION 1..16: note = Description of Artificial Sequence: Synthetic peptide
  REGION 1..16: note = XENP020881 vhCDR2
MIWIDGSTDYNSKFKG

SEQ ID NO: 25974 - protein, 10 aa, synthetic construct
  REGION 1..10: note = Description of Artificial Sequence: Synthetic peptide
  REGION 1..10: note = XENP020881 vhCDR3
DRPDGRAMDY

SEQ ID NO: 25975 - protein, 213 aa, synthetic construct; identical to SEQ ID NO: 3160
  REGION 1..213: note = Description of Artificial Sequence: Synthetic polypeptide
  REGION 1..213: note = XENP020881 9C6_H1.10_L1_anti-BTLA_IgG1_PVA_/S267K Light Chain

SEQ ID NO: 25976 - protein, 106 aa, synthetic construct; identical to SEQ ID NO: 3161
  REGION 1..106: note = Description of Artificial Sequence: Synthetic polypeptide
  REGION 1..106: note = VL of XENP020881

SEQ ID NO: 25977 - protein, 11 aa, synthetic construct
  REGION 1..11: note = Description of Artificial Sequence: Synthetic peptide
  REGION 1..11: note = XENP020881 vlCDR1
KASQSVSNDVA

SEQ ID NO: 25978 - protein, 7 aa, synthetic construct
  REGION 1..7: note = Description of Artificial Sequence: Synthetic peptide
  REGION 1..7: note = XENP020881 vlCDR2
YASNRYT

SEQ ID NO: 25979 - protein, 8 aa, synthetic construct
  REGION 1..8: note = Description of Artificial Sequence: Synthetic peptide
  REGION 1..8: note = XENP020881 vlCDR3
QQDYSSPT

SEQ ID NO: 25980 - protein, 447 aa, synthetic construct
  REGION 1..447: note = Description of Artificial Sequence: Synthetic polypeptide
  REGION 1..447: note = XENP020882 9C6_H1.11_L1_anti-BTLA_IgG1_PVA_/S267K Heavy Chain
QVQLVQSGAEVKKPGASVKVSCKVSGFSLTGYGVNWVRQAPGQGLEWMGMIWIDGSTDYNSKFQGRLSINKDNSKSTVYMELSSLRSEDTAVYYCARDRPDGRAMDYWGQGTMVTVSSASTKGPSVFPLAPSSKSTSGGTAALGCLVKDYFPEPVTVSWNSGALTSGVHTFPAVLQSSGLYSLSSVVTVPSSSLGTQTYICNVNHKPSNTKVDKKVEPKSCDKTHTCPPCPAPPVAGPSVFLFPPKPKDTLMISRTPEVTCVVVDVKHEDPEVKFNWYVDGVEVHNAKTKPREEQYNSTYRVVSVLTVLHQDWLNGKEYKCKVSNKALPAPIEKTISKAKGQPREPQVYTLPPSREEMTKNQVSLTCLVKGFYPSDIAVEWESNGQPENNYKTTPPVLDSDGSFFLYSKLTVDKSRWQQGNVFSCSVMHEALHNHYTQKSLSLSPGK

SEQ ID NO: 25981 - protein, 118 aa, synthetic construct
  REGION 1..118: note = Description of Artificial Sequence: Synthetic polypeptide
  REGION 1..118: note = VH of XENP020882
QVQLVQSGAEVKKPGASVKVSCKVSGFSLTGYGVNWVRQAPGQGLEWMGMIWIDGSTDYNSKFQGRLSINKDNSKSTVYMELSSLRSEDTAVYYCARDRPDGRAMDYWGQGTMVTVSS

SEQ ID NO: 25982 - protein, 5 aa, synthetic construct
  REGION 1..5: note = Description of Artificial Sequence: Synthetic peptide
  REGION 1..5: note = XENP020882 vhCDR1
GYGVN

SEQ ID NO: 25983 - protein, 16 aa, synthetic construct
  REGION 1..16: note = Description of Artificial Sequence: Synthetic peptide
  REGION 1..16: note = XENP020882 vhCDR2
MIWIDGSTDYNSKFQG

SEQ ID NO: 25984 - protein, 10 aa, synthetic construct
  REGION 1..10: note = Description of Artificial Sequence: Synthetic peptide
  REGION 1..10: note = XENP020882 vhCDR3
DRPDGRAMDY

SEQ ID NO: 25985 - protein, 213 aa, synthetic construct; identical to SEQ ID NO: 3160
  REGION 1..213: note = Description of Artificial Sequence: Synthetic polypeptide
  REGION 1..213: note = XENP020882 9C6_H1.11_L1_anti-BTLA_IgG1_PVA_/S267K Light Chain

SEQ ID NO: 25986 - protein, 106 aa, synthetic construct; identical to SEQ ID NO: 3161
  REGION 1..106: note = Description of Artificial Sequence: Synthetic polypeptide
  REGION 1..106: note = VL of XENP020882

SEQ ID NO: 25987 - protein, 11 aa, synthetic construct
  REGION 1..11: note = Description of Artificial Sequence: Synthetic peptide
  REGION 1..11: note = XENP020882 vlCDR1
KASQSVSNDVA

SEQ ID NO: 25988 - protein, 7 aa, synthetic construct
  REGION 1..7: note = Description of Artificial Sequence: Synthetic peptide
  REGION 1..7: note = XENP020882 vlCDR2
YASNRYT

SEQ ID NO: 25989 - protein, 8 aa, synthetic construct
  REGION 1..8: note = Description of Artificial Sequence: Synthetic peptide
  REGION 1..8: note = XENP020882 vlCDR3
QQDYSSPT

SEQ ID NO: 25990 - protein, 447 aa, synthetic construct
  REGION 1..447: note = Description of Artificial Sequence: Synthetic polypeptide
  REGION 1..447: note = XENP020883 9C6_H1.12_L1_anti-BTLA_IgG1_PVA_/S267K Heavy Chain
QVQLVQSGAEVKKPGASVKVSCKVSGFSLTGYGVNWVRQAPGQGLEWMGMIWIDGSTDYNSKFQGRVTMTKDNSKSQVYMELSSLRSEDTAVYYCARDRPDGRAMDYWGQGTMVTVSSASTKGPSVFPLAPSSKSTSGGTAALGCLVKDYFPEPVTVSWNSGALTSGVHTFPAVLQSSGLYSLSSVVTVPSSSLGTQTYICNVNHKPSNTKVDKKVEPKSCDKTHTCPPCPAPPVAGPSVFLFPPKPKDTLMISRTPEVTCVVVDVKHEDPEVKFNWYVDGVEVHNAKTKPREEQYNSTYRVVSVLTVLHQDWLNGKEYKCKVSNKALPAPIEKTISKAKGQPREPQVYTLPPSREEMTKNQVSLTCLVKGFYPSDIAVEWESNGQPENNYKTTPPVLDSDGSFFLYSKLTVDKSRWQQGNVFSCSVMHEALHNHYTQKSLSLSPGK

SEQ ID NO: 25991 - protein, 118 aa, synthetic construct
  REGION 1..118: note = Description of Artificial Sequence: Synthetic polypeptide
  REGION 1..118: note = VH of XENP020883
QVQLVQSGAEVKKPGASVKVSCKVSGFSLTGYGVNWVRQAPGQGLEWMGMIWIDGSTDYNSKFQGRVTMTKDNSKSQVYMELSSLRSEDTAVYYCARDRPDGRAMDYWGQGTMVTVSS

SEQ ID NO: 25992 - protein, 5 aa, synthetic construct
  REGION 1..5: note = Description of Artificial Sequence: Synthetic peptide
  REGION 1..5: note = XENP020883 vhCDR1
GYGVN

SEQ ID NO: 25993 - protein, 16 aa, synthetic construct
  REGION 1..16: note = Description of Artificial Sequence: Synthetic peptide
  REGION 1..16: note = XENP020883 vhCDR2
MIWIDGSTDYNSKFQG

SEQ ID NO: 25994 - protein, 10 aa, synthetic construct
  REGION 1..10: note = Description of Artificial Sequence: Synthetic peptide
  REGION 1..10: note = XENP020883 vhCDR3
DRPDGRAMDY

SEQ ID NO: 25995 - protein, 213 aa, synthetic construct; identical to SEQ ID NO: 3160
  REGION 1..213: note = Description of Artificial Sequence: Synthetic polypeptide
  REGION 1..213: note = XENP020883 9C6_H1.12_L1_anti-BTLA_IgG1_PVA_/S267K Light Chain

SEQ ID NO: 25996 - protein, 106 aa, synthetic construct; identical to SEQ ID NO: 3161
  REGION 1..106: note = Description of Artificial Sequence: Synthetic polypeptide
  REGION 1..106: note = VL of XENP020883

SEQ ID NO: 25997 - protein, 11 aa, synthetic construct
  REGION 1..11: note = Description of Artificial Sequence: Synthetic peptide
  REGION 1..11: note = XENP020883 vlCDR1
KASQSVSNDVA

SEQ ID NO: 25998 - protein, 7 aa, synthetic construct
  REGION 1..7: note = Description of Artificial Sequence: Synthetic peptide
  REGION 1..7: note = XENP020883 vlCDR2
YASNRYT

SEQ ID NO: 25999 - protein, 8 aa, synthetic construct
  REGION 1..8: note = Description of Artificial Sequence: Synthetic peptide
  REGION 1..8: note = XENP020883 vlCDR3
QQDYSSPT

SEQ ID NO: 26000 - protein, 447 aa, synthetic construct
  REGION 1..447: note = Description of Artificial Sequence: Synthetic polypeptide
  REGION 1..447: note = XENP020884 9C6_H1.13_L1_anti-BTLA_IgG1_PVA_/S267K Heavy Chain
QVQLVQSGAEVKKPGASVKVSCKVSGFSLTGYGVNWVRQAPGQGLEWMGMIWIDGSTDYNSKFQGRVTMTKDNSKSTVFLKMNSLRSEDTAVYYCARDRPDGRAMDYWGQGTMVTVSSASTKGPSVFPLAPSSKSTSGGTAALGCLVKDYFPEPVTVSWNSGALTSGVHTFPAVLQSSGLYSLSSVVTVPSSSLGTQTYICNVNHKPSNTKVDKKVEPKSCDKTHTCPPCPAPPVAGPSVFLFPPKPKDTLMISRTPEVTCVVVDVKHEDPEVKFNWYVDGVEVHNAKTKPREEQYNSTYRVVSVLTVLHQDWLNGKEYKCKVSNKALPAPIEKTISKAKGQPREPQVYTLPPSREEMTKNQVSLTCLVKGFYPSDIAVEWESNGQPENNYKTTPPVLDSDGSFFLYSKLTVDKSRWQQGNVFSCSVMHEALHNHYTQKSLSLSPGK

SEQ ID NO: 26001 - protein, 118 aa, synthetic construct
  REGION 1..118: note = Description of Artificial Sequence: Synthetic polypeptide
  REGION 1..118: note = VH of XENP020884
QVQLVQSGAEVKKPGASVKVSCKVSGFSLTGYGVNWVRQAPGQGLEWMGMIWIDGSTDYNSKFQGRVTMTKDNSKSTVFLKMNSLRSEDTAVYYCARDRPDGRAMDYWGQGTMVTVSS

SEQ ID NO: 26002 - protein, 5 aa, synthetic construct
  REGION 1..5: note = Description of Artificial Sequence: Synthetic peptide
  REGION 1..5: note = XENP020884 vhCDR1
GYGVN

SEQ ID NO: 26003 - protein, 16 aa, synthetic construct
  REGION 1..16: note = Description of Artificial Sequence: Synthetic peptide
  REGION 1..16: note = XENP020884 vhCDR2
MIWIDGSTDYNSKFQG

SEQ ID NO: 26004 - protein, 10 aa, synthetic construct
  REGION 1..10: note = Description of Artificial Sequence: Synthetic peptide
  REGION 1..10: note = XENP020884 vhCDR3
DRPDGRAMDY

SEQ ID NO: 26005 - protein, 213 aa, synthetic construct; identical to SEQ ID NO: 3160
  REGION 1..213: note = Description of Artificial Sequence: Synthetic polypeptide
  REGION 1..213: note = XENP020884 9C6_H1.13_L1_anti-BTLA_IgG1_PVA_/S267K Light Chain

SEQ ID NO: 26006 - protein, 106 aa, synthetic construct; identical to SEQ ID NO: 3161
  REGION 1..106: note = Description of Artificial Sequence: Synthetic polypeptide
  REGION 1..106: note = VL of XENP020884

SEQ ID NO: 26007 - protein, 11 aa, synthetic construct
  REGION 1..11: note = Description of Artificial Sequence: Synthetic peptide
  REGION 1..11: note = XENP020884 vlCDR1
KASQSVSNDVA

SEQ ID NO: 26008 - protein, 7 aa, synthetic construct
  REGION 1..7: note = Description of Artificial Sequence: Synthetic peptide
  REGION 1..7: note = XENP020884 vlCDR2
YASNRYT

SEQ ID NO: 26009 - protein, 8 aa, synthetic construct
  REGION 1..8: note = Description of Artificial Sequence: Synthetic peptide
  REGION 1..8: note = XENP020884 vlCDR3
QQDYSSPT

SEQ ID NO: 26010 - protein, 447 aa, synthetic construct
  REGION 1..447: note = Description of Artificial Sequence: Synthetic polypeptide
  REGION 1..447: note = XENP020885 9C6_H1.14_L1_anti-BTLA_IgG1_PVA_/S267K Heavy Chain
QVQLVQSGAEVKKPGASVKVSCKVSGFSLTGYGVNWVRQAPGQGLEWMGMIWIDGSTDYNSKFQGRVTMTKDNSKSTVYMELSSLQTDDTAVYYCARDRPDGRAMDYWGQGTMVTVSSASTKGPSVFPLAPSSKSTSGGTAALGCLVKDYFPEPVTVSWNSGALTSGVHTFPAVLQSSGLYSLSSVVTVPSSSLGTQTYICNVNHKPSNTKVDKKVEPKSCDKTHTCPPCPAPPVAGPSVFLFPPKPKDTLMISRTPEVTCVVVDVKHEDPEVKFNWYVDGVEVHNAKTKPREEQYNSTYRVVSVLTVLHQDWLNGKEYKCKVSNKALPAPIEKTISKAKGQPREPQVYTLPPSREEMTKNQVSLTCLVKGFYPSDIAVEWESNGQPENNYKTTPPVLDSDGSFFLYSKLTVDKSRWQQGNVFSCSVMHEALHNHYTQKSLSLSPGK

SEQ ID NO: 26011 - protein, 118 aa, synthetic construct
  REGION 1..118: note = Description of Artificial Sequence: Synthetic polypeptide
  REGION 1..118: note = VH of XENP020885
QVQLVQSGAEVKKPGASVKVSCKVSGFSLTGYGVNWVRQAPGQGLEWMGMIWIDGSTDYNSKFQGRVTMTKDNSKSTVYMELSSLQTDDTAVYYCARDRPDGRAMDYWGQGTMVTVSS

SEQ ID NO: 26012 - protein, 5 aa, synthetic construct
  REGION 1..5: note = Description of Artificial Sequence: Synthetic peptide
  REGION 1..5: note = XENP020885 vhCDR1
GYGVN

SEQ ID NO: 26013 - protein, 16 aa, synthetic construct
  REGION 1..16: note = Description of Artificial Sequence: Synthetic peptide
  REGION 1..16: note = XENP020885 vhCDR2
MIWIDGSTDYNSKFQG

SEQ ID NO: 26014 - protein, 10 aa, synthetic construct
  REGION 1..10: note = Description of Artificial Sequence: Synthetic peptide
  REGION 1..10: note = XENP020885 vhCDR3
DRPDGRAMDY

SEQ ID NO: 26015 - protein, 213 aa, synthetic construct; identical to SEQ ID NO: 3160
  REGION 1..213: note = Description of Artificial Sequence: Synthetic polypeptide
  REGION 1..213: note = XENP020885 9C6_H1.14_L1_anti-BTLA_IgG1_PVA_/S267K Light Chain

SEQ ID NO: 26016 - protein, 106 aa, synthetic construct; identical to SEQ ID NO: 3161
  REGION 1..106: note = Description of Artificial Sequence: Synthetic polypeptide
  REGION 1..106: note = VL of XENP020885

SEQ ID NO: 26017 - protein, 11 aa, synthetic construct
  REGION 1..11: note = Description of Artificial Sequence: Synthetic peptide
  REGION 1..11: note = XENP020885 vlCDR1
KASQSVSNDVA

SEQ ID NO: 26018 - protein, 7 aa, synthetic construct
  REGION 1..7: note = Description of Artificial Sequence: Synthetic peptide
  REGION 1..7: note = XENP020885 vlCDR2
YASNRYT

SEQ ID NO: 26019 - protein, 8 aa, synthetic construct
  REGION 1..8: note = Description of Artificial Sequence: Synthetic peptide
  REGION 1..8: note = XENP020885 vlCDR3
QQDYSSPT

SEQ ID NO: 26020 - protein, 447 aa, synthetic construct
  REGION 1..447: note = Description of Artificial Sequence: Synthetic polypeptide
  REGION 1..447: note = XENP020886 9C6_H1.15_L1_anti-BTLA_IgG1_PVA_/S267K Heavy Chain
QVQLVQSGAEVKKPGASVKVSCKVSGFSLTGYGVNWVRQAPGQGLEWMGMIWIDGSTDYNSKFQGRVTMTKDNSKSTVYMELSSLRSEDTARYYCARDRPDGRAMDYWGQGTMVTVSSASTKGPSVFPLAPSSKSTSGGTAALGCLVKDYFPEPVTVSWNSGALTSGVHTFPAVLQSSGLYSLSSVVTVPSSSLGTQTYICNVNHKPSNTKVDKKVEPKSCDKTHTCPPCPAPPVAGPSVFLFPPKPKDTLMISRTPEVTCVVVDVKHEDPEVKFNWYVDGVEVHNAKTKPREEQYNSTYRVVSVLTVLHQDWLNGKEYKCKVSNKALPAPIEKTISKAKGQPREPQVYTLPPSREEMTKNQVSLTCLVKGFYPSDIAVEWESNGQPENNYKTTPPVLDSDGSFFLYSKLTVDKSRWQQGNVFSCSVMHEALHNHYTQKSLSLSPGK

SEQ ID NO: 26021 - protein, 118 aa, synthetic construct
  REGION 1..118: note = Description of Artificial Sequence: Synthetic polypeptide
  REGION 1..118: note = VH of XENP020886
QVQLVQSGAEVKKPGASVKVSCKVSGFSLTGYGVNWVRQAPGQGLEWMGMIWIDGSTDYNSKFQGRVTMTKDNSKSTVYMELSSLRSEDTARYYCARDRPDGRAMDYWGQGTMVTVSS

SEQ ID NO: 26022 - protein, 5 aa, synthetic construct
  REGION 1..5: note = Description of Artificial Sequence: Synthetic peptide
  REGION 1..5: note = XENP020886 vhCDR1
GYGVN

SEQ ID NO: 26023 - protein, 16 aa, synthetic construct
  REGION 1..16: note = Description of Artificial Sequence: Synthetic peptide
  REGION 1..16: note = XENP020886 vhCDR2
MIWIDGSTDYNSKFQG

SEQ ID NO: 26024 - protein, 10 aa, synthetic construct
  REGION 1..10: note = Description of Artificial Sequence: Synthetic peptide
  REGION 1..10: note = XENP020886 vhCDR3
DRPDGRAMDY

SEQ ID NO: 26025 - protein, 213 aa, synthetic construct; identical to SEQ ID NO: 3160
  REGION 1..213: note = Description of Artificial Sequence: Synthetic polypeptide
  REGION 1..213: note = XENP020886 9C6_H1.15_L1_anti-BTLA_IgG1_PVA_/S267K Light Chain

SEQ ID NO: 26026 - protein, 106 aa, synthetic construct; identical to SEQ ID NO: 3161
  REGION 1..106: note = Description of Artificial Sequence: Synthetic polypeptide
  REGION 1..106: note = VL of XENP020886

SEQ ID NO: 26027 - protein, 11 aa, synthetic construct
  REGION 1..11: note = Description of Artificial Sequence: Synthetic peptide
  REGION 1..11: note = XENP020886 vlCDR1
KASQSVSNDVA

SEQ ID NO: 26028 - protein, 7 aa, synthetic construct
  REGION 1..7: note = Description of Artificial Sequence: Synthetic peptide
  REGION 1..7: note = XENP020886 vlCDR2
YASNRYT

SEQ ID NO: 26029 - protein, 8 aa, synthetic construct
  REGION 1..8: note = Description of Artificial Sequence: Synthetic peptide
  REGION 1..8: note = XENP020886 vlCDR3
QQDYSSPT

SEQ ID NO: 26030 - protein, 447 aa, synthetic construct
  REGION 1..447: note = Description of Artificial Sequence: Synthetic polypeptide
  REGION 1..447: note = XENP020887 9C6_H1.16_L1_anti-BTLA_IgG1_PVA_/S267K Heavy Chain
QVQLVQSGAEVKKPGASVKVSCKVSGFSLTGYGVNWVRQAPGQGLEWMGMIWIDGSTDYNSKFQGRVTMTKDNSKSTVYMELSSLRSEDTAVYYCARDRPDGRAMDYWGQGTSVTVSSASTKGPSVFPLAPSSKSTSGGTAALGCLVKDYFPEPVTVSWNSGALTSGVHTFPAVLQSSGLYSLSSVVTVPSSSLGTQTYICNVNHKPSNTKVDKKVEPKSCDKTHTCPPCPAPPVAGPSVFLFPPKPKDTLMISRTPEVTCVVVDVKHEDPEVKFNWYVDGVEVHNAKTKPREEQYNSTYRVVSVLTVLHQDWLNGKEYKCKVSNKALPAPIEKTISKAKGQPREPQVYTLPPSREEMTKNQVSLTCLVKGFYPSDIAVEWESNGQPENNYKTTPPVLDSDGSFFLYSKLTVDKSRWQQGNVFSCSVMHEALHNHYTQKSLSLSPGK

SEQ ID NO: 26031 - protein, 118 aa, synthetic construct
  REGION 1..118: note = Description of Artificial Sequence: Synthetic polypeptide
  REGION 1..118: note = VH of XENP020887
QVQLVQSGAEVKKPGASVKVSCKVSGFSLTGYGVNWVRQAPGQGLEWMGMIWIDGSTDYNSKFQGRVTMTKDNSKSTVYMELSSLRSEDTAVYYCARDRPDGRAMDYWGQGTSVTVSS

SEQ ID NO: 26032 - protein, 5 aa, synthetic construct
  REGION 1..5: note = Description of Artificial Sequence: Synthetic peptide
  REGION 1..5: note = XENP020887 vhCDR1
GYGVN

SEQ ID NO: 26033 - protein, 16 aa, synthetic construct
  REGION 1..16: note = Description of Artificial Sequence: Synthetic peptide
  REGION 1..16: note = XENP020887 vhCDR2
MIWIDGSTDYNSKFQG

SEQ ID NO: 26034 - protein, 10 aa, synthetic construct
  REGION 1..10: note = Description of Artificial Sequence: Synthetic peptide
  REGION 1..10: note = XENP020887 vhCDR3
DRPDGRAMDY

SEQ ID NO: 26035 - protein, 213 aa, synthetic construct; identical to SEQ ID NO: 3160
  REGION 1..213: note = Description of Artificial Sequence: Synthetic polypeptide
  REGION 1..213: note = XENP020887 9C6_H1.16_L1_anti-BTLA_IgG1_PVA_/S267K Light Chain

SEQ ID NO: 26036 - protein, 106 aa, synthetic construct; identical to SEQ ID NO: 3161
  REGION 1..106: note = Description of Artificial Sequence: Synthetic polypeptide
  REGION 1..106: note = VL of XENP020887

SEQ ID NO: 26037 - protein, 11 aa, synthetic construct
  REGION 1..11: note = Description of Artificial Sequence: Synthetic peptide
  REGION 1..11: note = XENP020887 vlCDR1
KASQSVSNDVA

SEQ ID NO: 26038 - protein, 7 aa, synthetic construct
  REGION 1..7: note = Description of Artificial Sequence: Synthetic peptide
  REGION 1..7: note = XENP020887 vlCDR2
YASNRYT

SEQ ID NO: 26039 - protein, 8 aa, synthetic construct
  REGION 1..8: note = Description of Artificial Sequence: Synthetic peptide
  REGION 1..8: note = XENP020887 vlCDR3
QQDYSSPT

SEQ ID NO: 26040 - protein, 447 aa, synthetic construct; identical to SEQ ID NO: 25741
  REGION 1..447: note = Description of Artificial Sequence: Synthetic polypeptide
  REGION 1..447: note = XENP020888 9C6_H1_L1.1_anti-BTLA_IgG1_PVA_/S267K Heavy Chain

SEQ ID NO: 26041 - protein, 118 aa, synthetic construct; identical to SEQ ID NO: 25742
  REGION 1..118: note = Description of Artificial Sequence: Synthetic polypeptide
  REGION 1..118: note = VH of XENP020888

SEQ ID NO: 26042 - protein, 5 aa, synthetic construct
  REGION 1..5: note = Description of Artificial Sequence: Synthetic peptide
  REGION 1..5: note = XENP020888 vhCDR1
GYGVN

SEQ ID NO: 26043 - protein, 16 aa, synthetic construct
  REGION 1..16: note = Description of Artificial Sequence: Synthetic peptide
  REGION 1..16: note = XENP020888 vhCDR2
MIWIDGSTDYNSKFQG

SEQ ID NO: 26044 - protein, 10 aa, synthetic construct
  REGION 1..10: note = Description of Artificial Sequence: Synthetic peptide
  REGION 1..10: note = XENP020888 vhCDR3
DRPDGRAMDY

SEQ ID NO: 26045 - protein, 213 aa, synthetic construct
  REGION 1..213: note = Description of Artificial Sequence: Synthetic polypeptide
  REGION 1..213: note = XENP020888 9C6_H1_L1.1_anti-BTLA_IgG1_PVA_/S267K Light Chain
SIVMTQTPDSLAVSLGERATINCKASQSVSNDVAWYQQKPGQSPKLLIYYASNRYTGVPDRFTGSGYGTDFTLTISSLQAEDVAVYFCQQDYSSPTFGGGTKLEIKRTVAAPSVFIFPPSDEQLKSGTASVVCLLNNFYPREAKVQWKVDNALQSGNSQESVTEQDSKDSTYSLSSTLTLSKADYEKHKVYACEVTHQGLSSPVTKSFNRGEC

SEQ ID NO: 26046 - protein, 106 aa, synthetic construct
  REGION 1..106: note = Description of Artificial Sequence: Synthetic polypeptide
  REGION 1..106: note = VL of XENP020888
SIVMTQTPDSLAVSLGERATINCKASQSVSNDVAWYQQKPGQSPKLLIYYASNRYTGVPDRFTGSGYGTDFTLTISSLQAEDVAVYFCQQDYSSPTFGGGTKLEIK

SEQ ID NO: 26047 - protein, 11 aa, synthetic construct
  REGION 1..11: note = Description of Artificial Sequence: Synthetic peptide
  REGION 1..11: note = XENP020888 vlCDR1
KASQSVSNDVA

SEQ ID NO: 26048 - protein, 7 aa, synthetic construct
  REGION 1..7: note = Description of Artificial Sequence: Synthetic peptide
  REGION 1..7: note = XENP020888 vlCDR2
YASNRYT

SEQ ID NO: 26049 - protein, 8 aa, synthetic construct
  REGION 1..8: note = Description of Artificial Sequence: Synthetic peptide
  REGION 1..8: note = XENP020888 vlCDR3
QQDYSSPT

SEQ ID NO: 26050 - protein, 447 aa, synthetic construct; identical to SEQ ID NO: 25741
  REGION 1..447: note = Description of Artificial Sequence: Synthetic polypeptide
  REGION 1..447: note = XENP020889 9C6_H1_L1.2_anti-BTLA_IgG1_PVA_/S267K Heavy Chain

SEQ ID NO: 26051 - protein, 118 aa, synthetic construct; identical to SEQ ID NO: 25742
  REGION 1..118: note = Description of Artificial Sequence: Synthetic polypeptide
  REGION 1..118: note = VH of XENP020889

SEQ ID NO: 26052 - protein, 5 aa, synthetic construct
  REGION 1..5: note = Description of Artificial Sequence: Synthetic peptide
  REGION 1..5: note = XENP020889 vhCDR1
GYGVN

SEQ ID NO: 26053 - protein, 16 aa, synthetic construct
  REGION 1..16: note = Description of Artificial Sequence: Synthetic peptide
  REGION 1..16: note = XENP020889 vhCDR2
MIWIDGSTDYNSKFQG

SEQ ID NO: 26054 - protein, 10 aa, synthetic construct
  REGION 1..10: note = Description of Artificial Sequence: Synthetic peptide
  REGION 1..10: note = XENP020889 vhCDR3
DRPDGRAMDY

SEQ ID NO: 26055 - protein, 213 aa, synthetic construct
  REGION 1..213: note = Description of Artificial Sequence: Synthetic polypeptide
  REGION 1..213: note = XENP020889 9C6_H1_L1.2_anti-BTLA_IgG1_PVA_/S267K Light Chain
SIVMTQTPKFLLVSLGERATINCKASQSVSNDVAWYQQKPGQSPKLLIYYASNRYTGVPDRFTGSGYGTDFTLTISSLQAEDVAVYFCQQDYSSPTFGGGTKLEIKRTVAAPSVFIFPPSDEQLKSGTASVVCLLNNFYPREAKVQWKVDNALQSGNSQESVTEQDSKDSTYSLSSTLTLSKADYEKHKVYACEVTHQGLSSPVTKSFNRGEC

SEQ ID NO: 26056 - protein, 106 aa, synthetic construct
  REGION 1..106: note = Description of Artificial Sequence: Synthetic polypeptide
  REGION 1..106: note = VL of XENP020889
SIVMTQTPKFLLVSLGERATINCKASQSVSNDVAWYQQKPGQSPKLLIYYASNRYTGVPDRFTGSGYGTDFTLTISSLQAEDVAVYFCQQDYSSPTFGGGTKLEIK

SEQ ID NO: 26057 - protein, 11 aa, synthetic construct
  REGION 1..11: note = Description of Artificial Sequence: Synthetic peptide
  REGION 1..11: note = XENP020889 vlCDR1
KASQSVSNDVA

SEQ ID NO: 26058 - protein, 7 aa, synthetic construct
  REGION 1..7: note = Description of Artificial Sequence: Synthetic peptide
  REGION 1..7: note = XENP020889 vlCDR2
YASNRYT

SEQ ID NO: 26059 - protein, 8 aa, synthetic construct
  REGION 1..8: note = Description of Artificial Sequence: Synthetic peptide
  REGION 1..8: note = XENP020889 vlCDR3
QQDYSSPT

SEQ ID NO: 26060 - protein, 447 aa, synthetic construct; identical to SEQ ID NO: 25741
  REGION 1..447: note = Description of Artificial Sequence: Synthetic polypeptide
  REGION 1..447: note = XENP020890 9C6_H1_L1.3_anti-BTLA_IgG1_PVA_/S267K Heavy Chain

SEQ ID NO: 26061 - protein, 118 aa, synthetic construct; identical to SEQ ID NO: 25742
  REGION 1..118: note = Description of Artificial Sequence: Synthetic polypeptide
  REGION 1..118: note = VH of XENP020890

SEQ ID NO: 26062 - protein, 5 aa, synthetic construct
  REGION 1..5: note = Description of Artificial Sequence: Synthetic peptide
  REGION 1..5: note = XENP020890 vhCDR1
GYGVN

SEQ ID NO: 26063 - protein, 16 aa, synthetic construct
  REGION 1..16: note = Description of Artificial Sequence: Synthetic peptide
  REGION 1..16: note = XENP020890 vhCDR2
MIWIDGSTDYNSKFQG

SEQ ID NO: 26064 - protein, 10 aa, synthetic construct
  REGION 1..10: note = Description of Artificial Sequence: Synthetic peptide
  REGION 1..10: note = XENP020890 vhCDR3
DRPDGRAMDY

SEQ ID NO: 26065 - protein, 213 aa, synthetic construct
  REGION 1..213: note = Description of Artificial Sequence: Synthetic polypeptide
  REGION 1..213: note = XENP020890 9C6_H1_L1.3_anti-BTLA_IgG1_PVA_/S267K Light Chain
SIVMTQSPDSLAVSAGDRVTINCKASQSVSNDVAWYQQKPGQSPKLLIYYASNRYTGVPDRFTGSGYGTDFTLTISSLQAEDVAVYFCQQDYSSPTFGGGTKLEIKRTVAAPSVFIFPPSDEQLKSGTASVVCLLNNFYPREAKVQWKVDNALQSGNSQESVTEQDSKDSTYSLSSTLTLSKADYEKHKVYACEVTHQGLSSPVTKSFNRGEC

SEQ ID NO: 26066 - protein, 106 aa, synthetic construct
  REGION 1..106: note = Description of Artificial Sequence: Synthetic polypeptide
  REGION 1..106: note = VL of XENP020890
SIVMTQSPDSLAVSAGDRVTINCKASQSVSNDVAWYQQKPGQSPKLLIYYASNRYTGVPDRFTGSGYGTDFTLTISSLQAEDVAVYFCQQDYSSPTFGGGTKLEIK

SEQ ID NO: 26067 - protein, 11 aa, synthetic construct
  REGION 1..11: note = Description of Artificial Sequence: Synthetic peptide
  REGION 1..11: note = XENP020890 vlCDR1
KASQSVSNDVA

SEQ ID NO: 26068 - protein, 7 aa, synthetic construct
  REGION 1..7: note = Description of Artificial Sequence: Synthetic peptide
  REGION 1..7: note = XENP020890 vlCDR2
YASNRYT

SEQ ID NO: 26069 - protein, 8 aa, synthetic construct
  REGION 1..8: note = Description of Artificial Sequence: Synthetic peptide
  REGION 1..8: note = XENP020890 vlCDR3
QQDYSSPT

SEQ ID NO: 26070 - protein, 447 aa, synthetic construct; identical to SEQ ID NO: 25741
  REGION 1..447: note = Description of Artificial Sequence: Synthetic polypeptide
  REGION 1..447: note = XENP020891 9C6_H1_L1.4_anti-BTLA_IgG1_PVA_/S267K Heavy Chain

SEQ ID NO: 26071 - protein, 118 aa, synthetic construct; identical to SEQ ID NO: 25742
  REGION 1..118: note = Description of Artificial Sequence: Synthetic polypeptide
  REGION 1..118: note = VH of XENP020891

SEQ ID NO: 26072 - protein, 5 aa, synthetic construct
  REGION 1..5: note = Description of Artificial Sequence: Synthetic peptide
  REGION 1..5: note = XENP020891 vhCDR1
GYGVN

SEQ ID NO: 26073 - protein, 16 aa, synthetic construct
  REGION 1..16: note = Description of Artificial Sequence: Synthetic peptide
  REGION 1..16: note = XENP020891 vhCDR2
MIWIDGSTDYNSKFQG

SEQ ID NO: 26074 - protein, 10 aa, synthetic construct
  REGION 1..10: note = Description of Artificial Sequence: Synthetic peptide
  REGION 1..10: note = XENP020891 vhCDR3
DRPDGRAMDY

SEQ ID NO: 26075 - protein, 213 aa, synthetic construct
  REGION 1..213: note = Description of Artificial Sequence: Synthetic polypeptide
  REGION 1..213: note = XENP020891 9C6_H1_L1.4_anti-BTLA_IgG1_PVA_/S267K Light Chain
SIVMTQSPDSLAVSLGERATITCKASQSVSNDVAWYQQKPGQSPKLLIYYASNRYTGVPDRFTGSGYGTDFTLTISSLQAEDVAVYFCQQDYSSPTFGGGTKLEIKRTVAAPSVFIFPPSDEQLKSGTASVVCLLNNFYPREAKVQWKVDNALQSGNSQESVTEQDSKDSTYSLSSTLTLSKADYEKHKVYACEVTHQGLSSPVTKSFNRGEC

SEQ ID NO: 26076 - protein, 106 aa, synthetic construct
  REGION 1..106: note = Description of Artificial Sequence: Synthetic polypeptide
  REGION 1..106: note = VL of XENP020891
SIVMTQSPDSLAVSLGERATITCKASQSVSNDVAWYQQKPGQSPKLLIYYASNRYTGVPDRFTGSGYGTDFTLTISSLQAEDVAVYFCQQDYSSPTFGGGTKLEIK

SEQ ID NO: 26077 - protein, 11 aa, synthetic construct
  REGION 1..11: note = Description of Artificial Sequence: Synthetic peptide
  REGION 1..11: note = XENP020891 vlCDR1
KASQSVSNDVA

SEQ ID NO: 26078 - protein, 7 aa, synthetic construct
  REGION 1..7: note = Description of Artificial Sequence: Synthetic peptide
  REGION 1..7: note = XENP020891 vlCDR2
YASNRYT

SEQ ID NO: 26079 - protein, 8 aa, synthetic construct
  REGION 1..8: note = Description of Artificial Sequence: Synthetic peptide
  REGION 1..8: note = XENP020891 vlCDR3
QQDYSSPT

SEQ ID NO: 26080 - protein, 447 aa, synthetic construct; identical to SEQ ID NO: 25741
  REGION 1..447: note = Description of Artificial Sequence: Synthetic polypeptide
  REGION 1..447: note = XENP020892 9C6_H1_L1.5_anti-BTLA_IgG1_PVA_/S267K Heavy Chain

SEQ ID NO: 26081 - protein, 118 aa, synthetic construct; identical to SEQ ID NO: 25742
  REGION 1..118: note = Description of Artificial Sequence: Synthetic polypeptide
  REGION 1..118: note = VH of XENP020892

SEQ ID NO: 26082 - protein, 5 aa, synthetic construct
  REGION 1..5: note = Description of Artificial Sequence: Synthetic peptide
  REGION 1..5: note = XENP020892 vhCDR1
GYGVN

SEQ ID NO: 26083 - protein, 16 aa, synthetic construct
  REGION 1..16: note = Description of Artificial Sequence: Synthetic peptide
  REGION 1..16: note = XENP020892 vhCDR2
MIWIDGSTDYNSKFQG

SEQ ID NO: 26084 - protein, 10 aa, synthetic construct
  REGION 1..10: note = Description of Artificial Sequence: Synthetic peptide
  REGION 1..10: note = XENP020892 vhCDR3
DRPDGRAMDY

SEQ ID NO: 26085 - protein, 213 aa, synthetic construct
  REGION 1..213: note = Description of Artificial Sequence: Synthetic polypeptide
  REGION 1..213: note = XENP020892 9C6_H1_L1.5_anti-BTLA_IgG1_PVA_/S267K Light Chain
SIVMTQSPDSLAVSLGERATINCKASQSVSNDVAWYQQKPGQSPKLLIYYASNRYTGVPDRFTGSGYGTDFTFTISSLQAEDVAVYFCQQDYSSPTFGGGTKLEIKRTVAAPSVFIFPPSDEQLKSGTASVVCLLNNFYPREAKVQWKVDNALQSGNSQESVTEQDSKDSTYSLSSTLTLSKADYEKHKVYACEVTHQGLSSPVTKSFNRGEC

SEQ ID NO: 26086 - protein, 106 aa, synthetic construct
  REGION 1..106: note = Description of Artificial Sequence: Synthetic polypeptide
  REGION 1..106: note = VL of XENP020892
SIVMTQSPDSLAVSLGERATINCKASQSVSNDVAWYQQKPGQSPKLLIYYASNRYTGVPDRFTGSGYGTDFTFTISSLQAEDVAVYFCQQDYSSPTFGGGTKLEIK

SEQ ID NO: 26087 - protein, 11 aa, synthetic construct
  REGION 1..11: note = Description of Artificial Sequence: Synthetic peptide
  REGION 1..11: note = XENP020892 vlCDR1
KASQSVSNDVA

SEQ ID NO: 26088 - protein, 7 aa, synthetic construct
  REGION 1..7: note = Description of Artificial Sequence: Synthetic peptide
  REGION 1..7: note = XENP020892 vlCDR2
YASNRYT

SEQ ID NO: 26089 - protein, 8 aa, synthetic construct
  REGION 1..8: note = Description of Artificial Sequence: Synthetic peptide
  REGION 1..8: note = XENP020892 vlCDR3
QQDYSSPT

SEQ ID NO: 26090 - protein, 447 aa, synthetic construct; identical to SEQ ID NO: 25741
  REGION 1..447: note = Description of Artificial Sequence: Synthetic polypeptide
  REGION 1..447: note = XENP020893 9C6_H1_L1.6_anti-BTLA_IgG1_PVA_/S267K Heavy Chain

SEQ ID NO: 26091 - protein, 118 aa, synthetic construct; identical to SEQ ID NO: 25742
  REGION 1..118: note = Description of Artificial Sequence: Synthetic polypeptide
  REGION 1..118: note = VH of XENP020893

SEQ ID NO: 26092 - protein, 5 aa, synthetic construct
  REGION 1..5: note = Description of Artificial Sequence: Synthetic peptide
  REGION 1..5: note = XENP020893 vhCDR1
GYGVN

SEQ ID NO: 26093 - protein, 16 aa, synthetic construct
  REGION 1..16: note = Description of Artificial Sequence: Synthetic peptide
  REGION 1..16: note = XENP020893 vhCDR2
MIWIDGSTDYNSKFQG

SEQ ID NO: 26094 - protein, 10 aa, synthetic construct
  REGION 1..10: note = Description of Artificial Sequence: Synthetic peptide
  REGION 1..10: note = XENP020893 vhCDR3
DRPDGRAMDY

SEQ ID NO: 26095 - protein, 213 aa, synthetic construct
  REGION 1..213: note = Description of Artificial Sequence: Synthetic polypeptide
  REGION 1..213: note = XENP020893 9C6_H1_L1.6_anti-BTLA_IgG1_PVA_/S267K Light Chain
SIVMTQSPDSLAVSLGERATINCKASQSVSNDVAWYQQKPGQSPKLLIYYASNRYTGVPDRFTGSGYGTDFTLTISTVQAEDVAVYFCQQDYSSPTFGGGTKLEIKRTVAAPSVFIFPPSDEQLKSGTASVVCLLNNFYPREAKVQWKVDNALQSGNSQESVTEQDSKDSTYSLSSTLTLSKADYEKHKVYACEVTHQGLSSPVTKSFNRGEC

SEQ ID NO: 26096 - protein, 106 aa, synthetic construct
  REGION 1..106: note = Description of Artificial Sequence: Synthetic polypeptide
  REGION 1..106: note = VL of XENP020893
SIVMTQSPDSLAVSLGERATINCKASQSVSNDVAWYQQKPGQSPKLLIYYASNRYTGVPDRFTGSGYGTDFTLTISTVQAEDVAVYFCQQDYSSPTFGGGTKLEIK

SEQ ID NO: 26097 - protein, 11 aa, synthetic construct
  REGION 1..11: note = Description of Artificial Sequence: Synthetic peptide
  REGION 1..11: note = XENP020893 vlCDR1
KASQSVSNDVA

SEQ ID NO: 26098 - protein, 7 aa, synthetic construct
  REGION 1..7: note = Description of Artificial Sequence: Synthetic peptide
  REGION 1..7: note = XENP020893 vlCDR2
YASNRYT

SEQ ID NO: 26099 - protein, 8 aa, synthetic construct
  REGION 1..8: note = Description of Artificial Sequence: Synthetic peptide
  REGION 1..8: note = XENP020893 vlCDR3
QQDYSSPT

SEQ ID NO: 26100 - protein, 447 aa, synthetic construct; identical to SEQ ID NO: 25741
  REGION 1..447: note = Description of Artificial Sequence: Synthetic polypeptide
  REGION 1..447: note = XENP020894 9C6_H1_L1.7_anti-BTLA_IgG1_PVA_/S267K Heavy Chain

SEQ ID NO: 26101 - protein, 118 aa, synthetic construct; identical to SEQ ID NO: 25742
  REGION 1..118: note = Description of Artificial Sequence: Synthetic polypeptide
  REGION 1..118: note = VH of XENP020894

SEQ ID NO: 26102 - protein, 5 aa, synthetic construct
  REGION 1..5: note = Description of Artificial Sequence: Synthetic peptide
  REGION 1..5: note = XENP020894 vhCDR1
GYGVN

SEQ ID NO: 26103 - protein, 16 aa, synthetic construct
  REGION 1..16: note = Description of Artificial Sequence: Synthetic peptide
  REGION 1..16: note = XENP020894 vhCDR2
MIWIDGSTDYNSKFQG

SEQ ID NO: 26104 - protein, 10 aa, synthetic construct
  REGION 1..10: note = Description of Artificial Sequence: Synthetic peptide
  REGION 1..10: note = XENP020894 vhCDR3
DRPDGRAMDY

SEQ ID NO: 26105 - protein, 213 aa, synthetic construct
  REGION 1..213: note = Description of Artificial Sequence: Synthetic polypeptide
  REGION 1..213: note = XENP020894 9C6_H1_L1.7_anti-BTLA_IgG1_PVA_/S267K Light Chain
SIVMTQSPDSLAVSLGERATINCKASQSVSNDVAWYQQKPGQSPKLLIYYASNRYTGVPDRFTGSGYGTDFTLTISSLQAEDLAVYFCQQDYSSPTFGGGTKLEIKRTVAAPSVFIFPPSDEQLKSGTASVVCLLNNFYPREAKVQWKVDNALQSGNSQESVTEQDSKDSTYSLSSTLTLSKADYEKHKVYACEVTHQGLSSPVTKSFNRGEC

SEQ ID NO: 26106 - protein, 106 aa, synthetic construct
  REGION 1..106: note = Description of Artificial Sequence: Synthetic polypeptide
  REGION 1..106: note = VL of XENP020894
SIVMTQSPDSLAVSLGERATINCKASQSVSNDVAWYQQKPGQSPKLLIYYASNRYTGVPDRFTGSGYGTDFTLTISSLQAEDLAVYFCQQDYSSPTFGGGTKLEIK

SEQ ID NO: 26107 - protein, 11 aa, synthetic construct
  REGION 1..11: note = Description of Artificial Sequence: Synthetic peptide
  REGION 1..11: note = XENP020894 vlCDR1
KASQSVSNDVA

SEQ ID NO: 26108 - protein, 7 aa, synthetic construct
  REGION 1..7: note = Description of Artificial Sequence: Synthetic peptide
  REGION 1..7: note = XENP020894 vlCDR2
YASNRYT

SEQ ID NO: 26109 - protein, 8 aa, synthetic construct
  REGION 1..8: note = Description of Artificial Sequence: Synthetic peptide
  REGION 1..8: note = XENP020894 vlCDR3
QQDYSSPT

SEQ ID NO: 26110 - protein, 449 aa, synthetic construct
  REGION 1..449: note = Description of Artificial Sequence: Synthetic polypeptide
  REGION 1..449: note = XENP021208 3F6_H1L0_anti-BTLA_IgG1_PVA_/S267K Heavy Chain
QVQLQESGPGLVKPSQTLSLTCTVSGDSITSGYWNWIRKPPGKKLEYIGYLSYSGSTYYNPSLKSRVTISRDTSKNQYSLKLSSVTAADTAVYYCARYFYGSYYEAMDYWGQGTTVTVSSASTKGPSVFPLAPSSKSTSGGTAALGCLVKDYFPEPVTVSWNSGALTSGVHTFPAVLQSSGLYSLSSVVTVPSSSLGTQTYICNVNHKPSNTKVDKKVEPKSCDKTHTCPPCPAPPVAGPSVFLFPPKPKDTLMISRTPEVTCVVVDVKHEDPEVKFNWYVDGVEVHNAKTKPREEQYNSTYRVVSVLTVLHQDWLNGKEYKCKVSNKALPAPIEKTISKAKGQPREPQVYTLPPSREEMTKNQVSLTCLVKGFYPSDIAVEWESNGQPENNYKTTPPVLDSDGSFFLYSKLTVDKSRWQQGNVFSCSVMHEALHNHYTQKSLSLSPGK

SEQ ID NO: 26111 - protein, 120 aa, synthetic construct
  REGION 1..120: note = Description of Artificial Sequence: Synthetic polypeptide
  REGION 1..120: note = VH of XENP021208
QVQLQESGPGLVKPSQTLSLTCTVSGDSITSGYWNWIRKPPGKKLEYIGYLSYSGSTYYNPSLKSRVTISRDTSKNQYSLKLSSVTAADTAVYYCARYFYGSYYEAMDYWGQGTTVTVSS

SEQ ID NO: 26112 - protein, 5 aa, synthetic construct
  REGION 1..5: note = Description of Artificial Sequence: Synthetic peptide
  REGION 1..5: note = XENP021208 vhCDR1
SGYWN

SEQ ID NO: 26113 - protein, 16 aa, synthetic construct
  REGION 1..16: note = Description of Artificial Sequence: Synthetic peptide
  REGION 1..16: note = XENP021208 vhCDR2
YLSYSGSTYYNPSLKS

SEQ ID NO: 26114 - protein, 12 aa, synthetic construct
  REGION 1..12: note = Description of Artificial Sequence: Synthetic peptide
  REGION 1..12: note = XENP021208 vhCDR3
YFYGSYYEAMDY

SEQ ID NO: 26115 - protein, 214 aa, synthetic construct; identical to SEQ ID NO: 25596
  REGION 1..214: note = Description of Artificial Sequence: Synthetic polypeptide
  REGION 1..214: note = XENP021208 3F6_H1L0_anti-BTLA_IgG1_PVA_/S267K Light Chain

SEQ ID NO: 26116 - protein, 107 aa, synthetic construct; identical to SEQ ID NO: 25597
  REGION 1..107: note = Description of Artificial Sequence: Synthetic polypeptide
  REGION 1..107: note = VL of XENP021208

SEQ ID NO: 26117 - protein, 11 aa, synthetic construct
  REGION 1..11: note = Description of Artificial Sequence: Synthetic peptide
  REGION 1..11: note = XENP021208 vlCDR1
RASKSISKYLA

SEQ ID NO: 26118 - protein, 7 aa, synthetic construct
  REGION 1..7: note = Description of Artificial Sequence: Synthetic peptide
  REGION 1..7: note = XENP021208 vlCDR2
SGSTLQS

SEQ ID NO: 26119 - protein, 9 aa, synthetic construct
  REGION 1..9: note = Description of Artificial Sequence: Synthetic peptide
  REGION 1..9: note = XENP021208 vlCDR3
QQHNEYPWT

SEQ ID NO: 26120 - protein, 449 aa, synthetic construct; identical to SEQ ID NO: 26110
  REGION 1..449: note = Description of Artificial Sequence: Synthetic polypeptide
  REGION 1..449: note = XENP021209 3F6_H1L1_anti-BTLA_IgG1_PVA_/S267K Heavy Chain

SEQ ID NO: 26121 - protein, 120 aa, synthetic construct; identical to SEQ ID NO: 26111
  REGION 1..120: note = Description of Artificial Sequence: Synthetic polypeptide
  REGION 1..120: note = VH of XENP021209

SEQ ID NO: 26122 - protein, 5 aa, synthetic construct
  REGION 1..5: note = Description of Artificial Sequence: Synthetic peptide
  REGION 1..5: note = XENP021209 vhCDR1
SGYWN

SEQ ID NO: 26123 - protein, 16 aa, synthetic construct
  REGION 1..16: note = Description of Artificial Sequence: Synthetic peptide
  REGION 1..16: note = XENP021209 vhCDR2
YLSYSGSTYYNPSLKS

SEQ ID NO: 26124 - protein, 12 aa, synthetic construct
  REGION 1..12: note = Description of Artificial Sequence: Synthetic peptide
  REGION 1..12: note = XENP021209 vhCDR3
YFYGSYYEAMDY

SEQ ID NO: 26125 - protein, 214 aa, synthetic construct
  REGION 1..214: note = Description of Artificial Sequence: Synthetic polypeptide
  REGION 1..214: note = XENP021209 3F6_H1L1_anti-BTLA_IgG1_PVA_/S267K Light Chain
DVQITQSPSFLSASVGDRVTITCRASKSISKYLAWYQEKPGKTNKLLIYSGSTLQSGIPSRFSGSGSGTEFTLTISSLQPEDFATYYCQQHNEYPWTFGGGTKVEIKRTVAAPSVFIFPPSDEQLKSGTASVVCLLNNFYPREAKVQWKVDNALQSGNSQESVTEQDSKDSTYSLSSTLTLSKADYEKHKVYACEVTHQGLSSPVTKSFNRGEC

SEQ ID NO: 26126 - protein, 107 aa, synthetic construct
  REGION 1..107: note = Description of Artificial Sequence: Synthetic polypeptide
  REGION 1..107: note = VL of XENP021209
DVQITQSPSFLSASVGDRVTITCRASKSISKYLAWYQEKPGKTNKLLIYSGSTLQSGIPSRFSGSGSGTEFTLTISSLQPEDFATYYCQQHNEYPWTFGGGTKVEIK

SEQ ID NO: 26127 - protein, 11 aa, synthetic construct
  REGION 1..11: note = Description of Artificial Sequence: Synthetic peptide
  REGION 1..11: note = XENP021209 vlCDR1
RASKSISKYLA

SEQ ID NO: 26128 - protein, 7 aa, synthetic construct
  REGION 1..7: note = Description of Artificial Sequence: Synthetic peptide
  REGION 1..7: note = XENP021209 vlCDR2
SGSTLQS

SEQ ID NO: 26129 - protein, 9 aa, synthetic construct
  REGION 1..9: note = Description of Artificial Sequence: Synthetic peptide
  REGION 1..9: note = XENP021209 vlCDR3
QQHNEYPWT

SEQ ID NO: 26130 - protein, 448 aa, synthetic construct; identical to SEQ ID NO: 25601
  REGION 1..448: note = Description of Artificial Sequence: Synthetic polypeptide
  REGION 1..448: note = XENP021210 1A9_H0L1_anti-BTLA_IgG1_PVA_/S267K Heavy Chain

SEQ ID NO: 26131 - protein, 119 aa, synthetic construct; identical to SEQ ID NO: 25602
  REGION 1..119: note = Description of Artificial Sequence: Synthetic polypeptide
  REGION 1..119: note = VH of XENP021210

SEQ ID NO: 26132 - protein, 5 aa, synthetic construct
  REGION 1..5: note = Description of Artificial Sequence: Synthetic peptide
  REGION 1..5: note = XENP021210 vhCDR1
SFGMH

SEQ ID NO: 26133 - protein, 17 aa, synthetic construct
  REGION 1..17: note = Description of Artificial Sequence: Synthetic peptide
  REGION 1..17: note = XENP021210 vhCDR2
YISSGISTIYYADTVKG

SEQ ID NO: 26134 - protein, 10 aa, synthetic construct
  REGION 1..10: note = Description of Artificial Sequence: Synthetic peptide
  REGION 1..10: note = XENP021210 vhCDR3
DWLRGYAMDY

SEQ ID NO: 26135 - protein, 218 aa, synthetic construct
  REGION 1..218: note = Description of Artificial Sequence: Synthetic polypeptide
  REGION 1..218: note = XENP021210 1A9_H0L1_anti-BTLA_IgG1_PVA_/S267K Light Chain
DIVLTQSPSSLSASVGDRVTITCRASQSIDYDGDSYMNWYQQKPGKPPKLLIYAASNLDFGIPARFSGSGSGTDFTLTISSLQPEDFATYYCQQSNEDPWTFGGGTKVEIKRTVAAPSVFIFPPSDEQLKSGTASVVCLLNNFYPREAKVQWKVDNALQSGNSQESVTEQDSKDSTYSLSSTLTLSKADYEKHKVYACEVTHQGLSSPVTKSFNRGEC

SEQ ID NO: 26136 - protein, 111 aa, synthetic construct
  REGION 1..111: note = Description of Artificial Sequence: Synthetic polypeptide
  REGION 1..111: note = VL of XENP021210
DIVLTQSPSSLSASVGDRVTITCRASQSIDYDGDSYMNWYQQKPGKPPKLLIYAASNLDFGIPARFSGSGSGTDFTLTISSLQPEDFATYYCQQSNEDPWTFGGGTKVEIK

SEQ ID NO: 26137 - protein, 15 aa, synthetic construct
  REGION 1..15: note = Description of Artificial Sequence: Synthetic peptide
  REGION 1..15: note = XENP021210 vlCDR1
RASQSIDYDGDSYMN

SEQ ID NO: 26138 - protein, 7 aa, synthetic construct
  REGION 1..7: note = Description of Artificial Sequence: Synthetic peptide
  REGION 1..7: note = XENP021210 vlCDR2
AASNLDF

SEQ ID NO: 26139 - protein, 9 aa, synthetic construct
  REGION 1..9: note = Description of Artificial Sequence: Synthetic peptide
  REGION 1..9: note = XENP021210 vlCDR3
QQSNEDPWT

SEQ ID NO: 26140 - protein, 448 aa, synthetic construct
  REGION 1..448: note = Description of Artificial Sequence: Synthetic polypeptide
  REGION 1..448: note = XENP021211 1A9_H1L0_anti-BTLA_IgG1_PVA_/S267K Heavy Chain
EVQLVESGGGLVQPGGSLRLSCAASGFTFSSFGMHWVRQAPGKGLEWVSYISSGISTIYYADSVKGRFTISRDNSKNTLYLQMNSLRAEDTAVYYCARDWLRGYAMDYWGQGTTVTVSSASTKGPSVFPLAPSSKSTSGGTAALGCLVKDYFPEPVTVSWNSGALTSGVHTFPAVLQSSGLYSLSSVVTVPSSSLGTQTYICNVNHKPSNTKVDKKVEPKSCDKTHTCPPCPAPPVAGPSVFLFPPKPKDTLMISRTPEVTCVVVDVKHEDPEVKFNWYVDGVEVHNAKTKPREEQYNSTYRVVSVLTVLHQDWLNGKEYKCKVSNKALPAPIEKTISKAKGQPREPQVYTLPPSREEMTKNQVSLTCLVKGFYPSDIAVEWESNGQPENNYKTTPPVLDSDGSFFLYSKLTVDKSRWQQGNVFSCSVMHEALHNHYTQKSLSLSPGK

SEQ ID NO: 26141 - protein, 119 aa, synthetic construct
  REGION 1..119: note = Description of Artificial Sequence: Synthetic polypeptide
  REGION 1..119: note = VH of XENP021211
EVQLVESGGGLVQPGGSLRLSCAASGFTFSSFGMHWVRQAPGKGLEWVSYISSGISTIYYADSVKGRFTISRDNSKNTLYLQMNSLRAEDTAVYYCARDWLRGYAMDYWGQGTTVTVSS

SEQ ID NO: 26142 - protein, 5 aa, synthetic construct
  REGION 1..5: note = Description of Artificial Sequence: Synthetic peptide
  REGION 1..5: note = XENP021211 vhCDR1
SFGMH

SEQ ID NO: 26143 - protein, 17 aa, synthetic construct
  REGION 1..17: note = Description of Artificial Sequence: Synthetic peptide
  REGION 1..17: note = XENP021211 vhCDR2
YISSGISTIYYADSVKG

SEQ ID NO: 26144 - protein, 10 aa, synthetic construct
  REGION 1..10: note = Description of Artificial Sequence: Synthetic peptide
  REGION 1..10: note = XENP021211 vhCDR3
DWLRGYAMDY

SEQ ID NO: 26145 - protein, 218 aa, synthetic construct; identical to SEQ ID NO: 25606
  REGION 1..218: note = Description of Artificial Sequence: Synthetic polypeptide
  REGION 1..218: note = XENP021211 1A9_H1L0_anti-BTLA_IgG1_PVA_/S267K Light Chain

SEQ ID NO: 26146 - protein, 111 aa, synthetic construct; identical to SEQ ID NO: 25607
  REGION 1..111: note = Description of Artificial Sequence: Synthetic polypeptide
  REGION 1..111: note = VL of XENP021211

SEQ ID NO: 26147 - protein, 15 aa, synthetic construct
  REGION 1..15: note = Description of Artificial Sequence: Synthetic peptide
  REGION 1..15: note = XENP021211 vlCDR1
KASQSIDYDGDSYMN

SEQ ID NO: 26148 - protein, 7 aa, synthetic construct
  REGION 1..7: note = Description of Artificial Sequence: Synthetic peptide
  REGION 1..7: note = XENP021211 vlCDR2
AASNLDF

SEQ ID NO: 26149 - protein, 9 aa, synthetic construct
  REGION 1..9: note = Description of Artificial Sequence: Synthetic peptide
  REGION 1..9: note = XENP021211 vlCDR3
QQSNEDPWT

SEQ ID NO: 26150 - protein, 448 aa, synthetic construct; identical to SEQ ID NO: 26140
  REGION 1..448: note = Description of Artificial Sequence: Synthetic polypeptide
  REGION 1..448: note = XENP021212 1A9_H1L1_anti-BTLA_IgG1_PVA_/S267K Heavy Chain

SEQ ID NO: 26151 - protein, 119 aa, synthetic construct; identical to SEQ ID NO: 26141
  REGION 1..119: note = Description of Artificial Sequence: Synthetic polypeptide
  REGION 1..119: note = VH of XENP021212

SEQ ID NO: 26152 - protein, 5 aa, synthetic construct
  REGION 1..5: note = Description of Artificial Sequence: Synthetic peptide
  REGION 1..5: note = XENP021212 vhCDR1
SFGMH

SEQ ID NO: 26153 - protein, 17 aa, synthetic construct
  REGION 1..17: note = Description of Artificial Sequence: Synthetic peptide
  REGION 1..17: note = XENP021212 vhCDR2
YISSGISTIYYADSVKG

SEQ ID NO: 26154 - protein, 10 aa, synthetic construct
  REGION 1..10: note = Description of Artificial Sequence: Synthetic peptide
  REGION 1..10: note = XENP021212 vhCDR3
DWLRGYAMDY

SEQ ID NO: 26155 - protein, 218 aa, synthetic construct; identical to SEQ ID NO: 26135
  REGION 1..218: note = Description of Artificial Sequence: Synthetic polypeptide
  REGION 1..218: note = XENP021212 1A9_H1L1_anti-BTLA_IgG1_PVA_/S267K Light Chain

SEQ ID NO: 26156 - protein, 111 aa, synthetic construct; identical to SEQ ID NO: 26136
  REGION 1..111: note = Description of Artificial Sequence: Synthetic polypeptide
  REGION 1..111: note = VL of XENP021212

SEQ ID NO: 26157 - protein, 15 aa, synthetic construct
  REGION 1..15: note = Description of Artificial Sequence: Synthetic peptide
  REGION 1..15: note = XENP021212 vlCDR1
RASQSIDYDGDSYMN

SEQ ID NO: 26158 - protein, 7 aa, synthetic construct
  REGION 1..7: note = Description of Artificial Sequence: Synthetic peptide
  REGION 1..7: note = XENP021212 vlCDR2
AASNLDF

SEQ ID NO: 26159 - protein, 9 aa, synthetic construct
  REGION 1..9: note = Description of Artificial Sequence: Synthetic peptide
  REGION 1..9: note = XENP021212 vlCDR3
QQSNEDPWT

SEQ ID NO: 26160 - protein, 448 aa, synthetic construct; identical to SEQ ID NO: 26140
  REGION 1..448: note = Description of Artificial Sequence: Synthetic polypeptide
  REGION 1..448: note = XENP021213 1A9_H1L2_anti-BTLA_IgG1_PVA_/S267K Heavy Chain

SEQ ID NO: 26161 - protein, 119 aa, synthetic construct; identical to SEQ ID NO: 26141
  REGION 1..119: note = Description of Artificial Sequence: Synthetic polypeptide
  REGION 1..119: note = VH of XENP021213

SEQ ID NO: 26162 - protein, 5 aa, synthetic construct
  REGION 1..5: note = Description of Artificial Sequence: Synthetic peptide
  REGION 1..5: note = XENP021213 vhCDR1
SFGMH

SEQ ID NO: 26163 - protein, 17 aa, synthetic construct
  REGION 1..17: note = Description of Artificial Sequence: Synthetic peptide
  REGION 1..17: note = XENP021213 vhCDR2
YISSGISTIYYADSVKG

SEQ ID NO: 26164 - protein, 10 aa, synthetic construct
  REGION 1..10: note = Description of Artificial Sequence: Synthetic peptide
  REGION 1..10: note = XENP021213 vhCDR3
DWLRGYAMDY

SEQ ID NO: 26165 - protein, 218 aa, synthetic construct
  REGION 1..218: note = Description of Artificial Sequence: Synthetic polypeptide
  REGION 1..218: note = XENP021213 1A9_H1L2_anti-BTLA_IgG1_PVA_/S267K Light Chain
DIVLTQSPATLSVSPGERATLSCRASQSIDYDGDSYMNWYQQKPGQPPRLLIYAASNLDFGIPARFSGSGSGTEFTLTISSLQSEDFAVYYCQQSNEDPWTFGGGTKVEIKRTVAAPSVFIFPPSDEQLKSGTASVVCLLNNFYPREAKVQWKVDNALQSGNSQESVTEQDSKDSTYSLSSTLTLSKADYEKHKVYACEVTHQGLSSPVTKSFNRGEC

SEQ ID NO: 26166 - protein, 111 aa, synthetic construct
  REGION 1..111: note = Description of Artificial Sequence: Synthetic polypeptide
  REGION 1..111: note = VL of XENP021213
DIVLTQSPATLSVSPGERATLSCRASQSIDYDGDSYMNWYQQKPGQPPRLLIYAASNLDFGIPARFSGSGSGTEFTLTISSLQSEDFAVYYCQQSNEDPWTFGGGTKVEIK

SEQ ID NO: 26167 - protein, 15 aa, synthetic construct
  REGION 1..15: note = Description of Artificial Sequence: Synthetic peptide
  REGION 1..15: note = XENP021213 vlCDR1
RASQSIDYDGDSYMN

SEQ ID NO: 26168 - protein, 7 aa, synthetic construct
  REGION 1..7: note = Description of Artificial Sequence: Synthetic peptide
  REGION 1..7: note = XENP021213 vlCDR2
AASNLDF

SEQ ID NO: 26169 - protein, 9 aa, synthetic construct
  REGION 1..9: note = Description of Artificial Sequence: Synthetic peptide
  REGION 1..9: note = XENP021213 vlCDR3
QQSNEDPWT

SEQ ID NO: 26170 - protein, 448 aa, synthetic construct
  REGION 1..448: note = Description of Artificial Sequence: Synthetic polypeptide
  REGION 1..448: note = XENP021214 1A9_H2L1_anti-BTLA_IgG1_PVA_/S267K Heavy Chain
QVQLVQSGAEVKKPGASVKVSCKASGFTFSSFGMHWVRQAPGQGLEWMGYISSGISTIYYADKFQGRVTMTRDNSKNTLYMELSSLRSEDTAVYYCARDWLRGYAMDYWGQGTTVTVSSASTKGPSVFPLAPSSKSTSGGTAALGCLVKDYFPEPVTVSWNSGALTSGVHTFPAVLQSSGLYSLSSVVTVPSSSLGTQTYICNVNHKPSNTKVDKKVEPKSCDKTHTCPPCPAPPVAGPSVFLFPPKPKDTLMISRTPEVTCVVVDVKHEDPEVKFNWYVDGVEVHNAKTKPREEQYNSTYRVVSVLTVLHQDWLNGKEYKCKVSNKALPAPIEKTISKAKGQPREPQVYTLPPSREEMTKNQVSLTCLVKGFYPSDIAVEWESNGQPENNYKTTPPVLDSDGSFFLYSKLTVDKSRWQQGNVFSCSVMHEALHNHYTQKSLSLSPGK

SEQ ID NO: 26171 - protein, 119 aa, synthetic construct
  REGION 1..119: note = Description of Artificial Sequence: Synthetic polypeptide
  REGION 1..119: note = VH of XENP021214
QVQLVQSGAEVKKPGASVKVSCKASGFTFSSFGMHWVRQAPGQGLEWMGYISSGISTIYYADKFQGRVTMTRDNSKNTLYMELSSLRSEDTAVYYCARDWLRGYAMDYWGQGTTVTVSS

SEQ ID NO: 26172 - protein, 5 aa, synthetic construct
  REGION 1..5: note = Description of Artificial Sequence: Synthetic peptide
  REGION 1..5: note = XENP021214 vhCDR1
SFGMH

SEQ ID NO: 26173 - protein, 17 aa, synthetic construct
  REGION 1..17: note = Description of Artificial Sequence: Synthetic peptide
  REGION 1..17: note = XENP021214 vhCDR2
YISSGISTIYYADKFQG

SEQ ID NO: 26174 - protein, 10 aa, synthetic construct
  REGION 1..10: note = Description of Artificial Sequence: Synthetic peptide
  REGION 1..10: note = XENP021214 vhCDR3
DWLRGYAMDY

SEQ ID NO: 26175 - protein, 218 aa, synthetic construct; identical to SEQ ID NO: 26135
  REGION 1..218: note = Description of Artificial Sequence: Synthetic polypeptide
  REGION 1..218: note = XENP021214 1A9_H2L1_anti-BTLA_IgG1_PVA_/S267K Light Chain

SEQ ID NO: 26176 - protein, 111 aa, synthetic construct; identical to SEQ ID NO: 26136
  REGION 1..111: note = Description of Artificial Sequence: Synthetic polypeptide
  REGION 1..111: note = VL of XENP021214

SEQ ID NO: 26177 - protein, 15 aa, synthetic construct
  REGION 1..15: note = Description of Artificial Sequence: Synthetic peptide
  REGION 1..15: note = XENP021214 vlCDR1
RASQSIDYDGDSYMN

SEQ ID NO: 26178 - protein, 7 aa, synthetic construct
  REGION 1..7: note = Description of Artificial Sequence: Synthetic peptide
  REGION 1..7: note = XENP021214 vlCDR2
AASNLDF

SEQ ID NO: 26179 - protein, 9 aa, synthetic construct
  REGION 1..9: note = Description of Artificial Sequence: Synthetic peptide
  REGION 1..9: note = XENP021214 vlCDR3
QQSNEDPWT

SEQ ID NO: 26180 - protein, 448 aa, synthetic construct
  REGION 1..448: note = Description of Artificial Sequence: Synthetic polypeptide
  REGION 1..448: note = XENP019351 10A7_H0L0_IgG1_PVA_/S267K Heavy Chain
EVQLVESGGGLTQPGKSLKLSCEASGFTFSSFTMHWVRQSPGKGLEWVAFIRSGSGIVFYADAVRGRFTISRDNAKNLLFLQMNDLKSEDTAMYYCARRPLGHNTFDSWGQGTLVTVSSASTKGPSVFPLAPSSKSTSGGTAALGCLVKDYFPEPVTVSWNSGALTSGVHTFPAVLQSSGLYSLSSVVTVPSSSLGTQTYICNVNHKPSNTKVDKKVEPKSCDKTHTCPPCPAPPVAGPSVFLFPPKPKDTLMISRTPEVTCVVVDVKHEDPEVKFNWYVDGVEVHNAKTKPREEQYNSTYRVVSVLTVLHQDWLNGKEYKCKVSNKALPAPIEKTISKAKGQPREPQVYTLPPSREEMTKNQVSLTCLVKGFYPSDIAVEWESNGQPENNYKTTPPVLDSDGSFFLYSKLTVDKSRWQQGNVFSCSVMHEALHNHYTQKSLSLSPGK

SEQ ID NO: 26181 - protein, 119 aa, synthetic construct; identical to SEQ ID NO: 4433
  REGION 1..119: note = Description of Artificial Sequence: Synthetic polypeptide
  REGION 1..119: note = VH of XENP019351

SEQ ID NO: 26182 - protein, 5 aa, synthetic construct
  REGION 1..5: note = Description of Artificial Sequence: Synthetic peptide
  REGION 1..5: note = XENP019351 vhCDR1
SFTMH

SEQ ID NO: 26183 - protein, 17 aa, synthetic construct
  REGION 1..17: note = Description of Artificial Sequence: Synthetic peptide
  REGION 1..17: note = XENP019351 vhCDR2
FIRSGSGIVFYADAVRG

SEQ ID NO: 26184 - protein, 10 aa, synthetic construct
  REGION 1..10: note = Description of Artificial Sequence: Synthetic peptide
  REGION 1..10: note = XENP019351 vhCDR3
RPLGHNTFDS

SEQ ID NO: 26185 - protein, 220 aa, synthetic construct
  REGION 1..220: note = Description of Artificial Sequence: Synthetic polypeptide
  REGION 1..220: note = XENP019351 10A7_H0L0_IgG1_PVA_/S267K Light Chain
DIVMTQSPSSLAVSPGEKVTMTCKSSQSLYYSGVKENLLAWYQQKPGQSPKLLIYYASIRFTGVPDRFTGSGSGTDYTLTITSVQAEDMGQYFCQQGINNPLTFGDGTKLEIKRTVAAPSVFIFPPSDEQLKSGTASVVCLLNNFYPREAKVQWKVDNALQSGNSQESVTEQDSKDSTYSLSSTLTLSKADYEKHKVYACEVTHQGLSSPVTKSFNRGEC

SEQ ID NO: 26186 - protein, 113 aa, synthetic construct; identical to SEQ ID NO: 4437
  REGION 1..113: note = Description of Artificial Sequence: Synthetic polypeptide
  REGION 1..113: note = VL of XENP019351

SEQ ID NO: 26187 - protein, 17 aa, synthetic construct
  REGION 1..17: note = Description of Artificial Sequence: Synthetic peptide
  REGION 1..17: note = XENP019351 vlCDR1
KSSQSLYYSGVKENLLA

SEQ ID NO: 26188 - protein, 7 aa, synthetic construct
  REGION 1..7: note = Description of Artificial Sequence: Synthetic peptide
  REGION 1..7: note = XENP019351 vlCDR2
YASIRFT

SEQ ID NO: 26189 - protein, 9 aa, synthetic construct
  REGION 1..9: note = Description of Artificial Sequence: Synthetic peptide
  REGION 1..9: note = XENP019351 vlCDR3
QQGINNPLT

SEQ ID NO: 26190 - protein, 448 aa, synthetic construct
  REGION 1..448: note = Description of Artificial Sequence: Synthetic polypeptide
  REGION 1..448: note = XENP019352 1F4_H0L0_IgG1_PVA_/S267K Heavy Chain
EVQLQQSGPELVKPGTSMKISCKASGYSFTGHLMNWVKQSHGKNLEWIGLIIPYNGGTSYNQKFKGKATLTVDKSSSTAYMELLSLTSDDSAVYFCSRGLRGFYAMDYWGQGTSVTVSSASTKGPSVFPLAPSSKSTSGGTAALGCLVKDYFPEPVTVSWNSGALTSGVHTFPAVLQSSGLYSLSSVVTVPSSSLGTQTYICNVNHKPSNTKVDKKVEPKSCDKTHTCPPCPAPPVAGPSVFLFPPKPKDTLMISRTPEVTCVVVDVKHEDPEVKFNWYVDGVEVHNAKTKPREEQYNSTYRVVSVLTVLHQDWLNGKEYKCKVSNKALPAPIEKTISKAKGQPREPQVYTLPPSREEMTKNQVSLTCLVKGFYPSDIAVEWESNGQPENNYKTTPPVLDSDGSFFLYSKLTVDKSRWQQGNVFSCSVMHEALHNHYTQKSLSLSPGK

SEQ ID NO: 26191 - protein, 119 aa, synthetic construct; identical to SEQ ID NO: 4441
  REGION 1..119: note = Description of Artificial Sequence: Synthetic polypeptide
  REGION 1..119: note = VH of XENP019352

SEQ ID NO: 26192 - protein, 5 aa, synthetic construct
  REGION 1..5: note = Description of Artificial Sequence: Synthetic peptide
  REGION 1..5: note = XENP019352 vhCDR1
GHLMN

SEQ ID NO: 26193 - protein, 17 aa, synthetic construct
  REGION 1..17: note = Description of Artificial Sequence: Synthetic peptide
  REGION 1..17: note = XENP019352 vhCDR2
LIIPYNGGTSYNQKFKG

SEQ ID NO: 26194 - protein, 10 aa, synthetic construct
  REGION 1..10: note = Description of Artificial Sequence: Synthetic peptide
  REGION 1..10: note = XENP019352 vhCDR3
GLRGFYAMDY

SEQ ID NO: 26195 - protein, 219 aa, synthetic construct
  REGION 1..219: note = Description of Artificial Sequence: Synthetic polypeptide
  REGION 1..219: note = XENP019352 1F4_H0L0_IgG1_PVA_/S267K Light Chain
DVVLTQTPLSLSVSFGDQVSISCRSSQSLVNSYGNTFLSWYLHKPGQSPQLLIFGISNRFSGVPDRFSGSGSGTDFTLKISTIKPEDLGMYYCLQGTHQPPTFGPGTKLEVKRTVAAPSVFIFPPSDEQLKSGTASVVCLLNNFYPREAKVQWKVDNALQSGNSQESVTEQDSKDSTYSLSSTLTLSKADYEKHKVYACEVTHQGLSSPVTKSFNRGEC

SEQ ID NO: 26196 - protein, 112 aa, synthetic construct; identical to SEQ ID NO: 4445
  REGION 1..112: note = Description of Artificial Sequence: Synthetic polypeptide
  REGION 1..112: note = VL of XENP019352

SEQ ID NO: 26197 - protein, 16 aa, synthetic construct
  REGION 1..16: note = Description of Artificial Sequence: Synthetic peptide
  REGION 1..16: note = XENP019352 vlCDR1
RSSQSLVNSYGNTFLS

SEQ ID NO: 26198 - protein, 7 aa, synthetic construct
  REGION 1..7: note = Description of Artificial Sequence: Synthetic peptide
  REGION 1..7: note = XENP019352 vlCDR2
GISNRFS

SEQ ID NO: 26199 - protein, 9 aa, synthetic construct
  REGION 1..9: note = Description of Artificial Sequence: Synthetic peptide
  REGION 1..9: note = XENP019352 vlCDR3
LQGTHQPPT

SEQ ID NO: 26200 - protein, 15 aa, synthetic construct
  REGION 1..15: note = Description of Artificial Sequence: Synthetic peptide
GGGGSGGGGSGGGGS

SEQ ID NO: 26201 - protein, 18 aa, synthetic construct
  REGION 1..18: note = Description of Artificial Sequence: Synthetic peptide
GSTSGSGKPGSGEGSTKG

SEQ ID NO: 26202 - protein, 14 aa, synthetic construct
  REGION 1..14: note = Description of Artificial Sequence: Synthetic peptide
IRPRAIGGSKPRVA

SEQ ID NO: 26203 - protein, 15 aa, synthetic construct
  REGION 1..15: note = Description of Artificial Sequence: Synthetic peptide
GKGGSGKGGSGKGGS

SEQ ID NO: 26204 - protein, 15 aa, synthetic construct
  REGION 1..15: note = Description of Artificial Sequence: Synthetic peptide
GGKGSGGKGSGGKGS

SEQ ID NO: 26205 - protein, 15 aa, synthetic construct
  REGION 1..15: note = Description of Artificial Sequence: Synthetic peptide
GGGKSGGGKSGGGKS

SEQ ID NO: 26206 - protein, 15 aa, synthetic construct
  REGION 1..15: note = Description of Artificial Sequence: Synthetic peptide
GKGKSGKGKSGKGKS

SEQ ID NO: 26207 - protein, 15 aa, synthetic construct
  REGION 1..15: note = Description of Artificial Sequence: Synthetic peptide
GGGKSGGKGSGKGGS

SEQ ID NO: 26208 - protein, 15 aa, synthetic construct
  REGION 1..15: note = Description of Artificial Sequence: Synthetic peptide
GKPGSGKPGSGKPGS

SEQ ID NO: 26209 - protein, 20 aa, synthetic construct
  REGION 1..20: note = Description of Artificial Sequence: Synthetic peptide
GKPGSGKPGSGKPGSGKPGS

SEQ ID NO: 26210 - protein, 20 aa, synthetic construct
  REGION 1..20: note = Description of Artificial Sequence: Synthetic peptide
GKGKSGKGKSGKGKSGKGKS

SEQ ID NO: 26211 - protein, 20 aa, synthetic construct
  REGION 1..20: note = Description of Artificial Sequence: Synthetic peptide
GGGGSGGGGSGGGGSGGGGS

SEQ ID NO: 26212 - protein, 14 aa, synthetic construct
  REGION 1..14: note = Description of Artificial Sequence: Synthetic peptide
STAGDTHLGGEDFD

SEQ ID NO: 26213 - protein, 15 aa, synthetic construct
  REGION 1..15: note = Description of Artificial Sequence: Synthetic peptide
GEGGSGEGGSGEGGS

SEQ ID NO: 26214 - protein, 15 aa, synthetic construct
  REGION 1..15: note = Description of Artificial Sequence: Synthetic peptide
GGEGSGGEGSGGEGS

SEQ ID NO: 26215 - protein, 15 aa, synthetic construct
  REGION 1..15: note = Description of Artificial Sequence: Synthetic peptide
GGGESGGGESGGGES

SEQ ID NO: 26216 - protein, 15 aa, synthetic construct
  REGION 1..15: note = Description of Artificial Sequence: Synthetic peptide
GEGESGEGESGEGES

SEQ ID NO: 26217 - protein, 15 aa, synthetic construct
  REGION 1..15: note = Description of Artificial Sequence: Synthetic peptide
GGGESGGEGSGEGGS

SEQ ID NO: 26218 - protein, 20 aa, synthetic construct
  REGION 1..20: note = Description of Artificial Sequence: Synthetic peptide
GEGESGEGESGEGESGEGES

SEQ ID NO: 26219 - protein, 15 aa, synthetic construct
  REGION 1..15: note = Description of Artificial Sequence: Synthetic peptide
GGGGSGGGGSGGGGS

SEQ ID NO: 26220 - protein, 20 aa, synthetic construct
  REGION 1..20: note = Description of Artificial Sequence: Synthetic peptide
GGGGSGGGGSGGGGSGGGGS

SEQ ID NO: 26221 - protein, 18 aa, synthetic construct
  REGION 1..18: note = Description of Artificial Sequence: Synthetic peptide
GSTSGSGKPGSGEGSTKG

SEQ ID NO: 26222 - protein, 19 aa, synthetic construct
  REGION 1..19: note = Description of Artificial Sequence: Synthetic peptide
PRGASKSGSASQTGSAPGS

SEQ ID NO: 26223 - protein, 19 aa, synthetic construct
  REGION 1..19: note = Description of Artificial Sequence: Synthetic peptide
GTAAAGAGAAGGAAAGAAG

SEQ ID NO: 26224 - protein, 19 aa, synthetic construct
  REGION 1..19: note = Description of Artificial Sequence: Synthetic peptide
GTSGSSGSGSGGSGSGGGG

SEQ ID NO: 26225 - protein, 20 aa, synthetic construct
  REGION 1..20: note = Description of Artificial Sequence: Synthetic peptide
GKPGSGKPGSGKPGSGKPGS

SEQ ID NO: 26226 - protein, 288 aa, Homo sapiens
MQIPQAPWPVVWAVLQLGWRPGWFLDSPDRPWNPPTFSPALLVVTEGDNATFTCSFSNTSESFVLNWYRMSPSNQTDKLAAFPEDRSQPGQDCRFRVTQLPNGRDFHMSVVRARRNDSGTYLCGAISLAPKAQIKESLRAELRVTERRAEVPTAHPSPSPRPAGQFQTLVVGVVGGLLGSLVLLVWVLAVICSRAARGTIGARRTGQPLKEDPSAVPVFSVDYGELDFQWREKTPEPPVPCVPEQTEYATIVFPSGMGTSSPARRGSADGPRSAQPLRPEDGHCSWPL

SEQ ID NO: 26227 - protein, 150 aa, Homo sapiens [sequence omitted]

SEQ ID NO: 26228 - protein, 288 aa, Macaca fascicularis
MQIPQAPWPVVWAVLQLGWRPGWFLESPDRPWNAPTFSPALLLVTEGDNATFTCSFSNASESFVLNWYRMSPSNQTDKLAAFPEDRSQPGQDCRFRVTRLPNGRDFHMSVVRARRNDSGTYLCGAISLAPKAQIKESLRAELRVTERRAEVPTAHPSPSPRPAGQFQALVVGVVGGLLGSLVLLVWVLAVICSRAAQGTIEARRTGQPLKEDPSAVPVFSVDYGELDFQWREKTPEPPAPCVPEQTEYATIVFPSGLGTSSPARRGSADGPRSPRPLRPEDGHCSWPL

SEQ ID NO: 26229 - protein, 150 aa, Macaca fascicularis
PGWFLESPDRPWNAPTFSPALLLVTEGDNATFTCSFSNASESFVLNWYRMSPSNQTDKLAAFPEDRSQPGQDCRFRVTRLPNGRDFHMSVVRARRNDSGTYLCGAISLAPKAQIKESLRAELRVTERRAEVPTAHPSPSPRPAGQFQALV

SEQ ID NO: 26230 - protein, 223 aa, Homo sapiens
MACLGFQRHKAQLNLATRTWPCTLLFFLLFIPVFCKAMHVAQPAVVLASSRGIASFVCEYASPGKATEVRVTVLRQADSQVTEVCAATYMMGNELTFLDDSICTGTSSGNQVNLTIQGLRAMDTGLYICKVELMYPPPYYLGIGNGTQIYVIDPEPCPDSDFLLWILAAVSSGLFFYSFLLTAVSLSKMLKKRSPLTTGVYVKMPPTEPECEKQFQPYFIPIN

SEQ ID NO: 26231 - protein, 126 aa, Homo sapiens [sequence omitted]

SEQ ID NO: 26232 - protein, 223 aa, Macaca fascicularis
MACLGFQRHKARLNLATRTRPYTLLFSLLFIPVFSKAMHVAQPAVVLANSRGIASFVCEYASPGKATEVRVTVLRQADSQVTEVCAATYMMGNELTFLDDSICTGTSSGNQVNLTIQGLRAMDTGLYICKVELMYPPPYYMGIGNGTQIYVIDPEPCPDSDFLLWILAAVSSGLFFYSFLLTAVSLSKMLKKRSPLTTGVYVKMPPTEPECEKQFQPYFIPIN

SEQ ID NO: 26233 - protein, 126 aa, Macaca fascicularis
KAMHVAQPAVVLANSRGIASFVCEYASPGKATEVRVTVLRQADSQVTEVCAATYMMGNELTFLDDSICTGTSSGNQVNLTIQGLRAMDTGLYICKVELMYPPPYYMGIGNGTQIYVIDPEPCPDSD

SEQ ID NO: 26234 - protein, 525 aa, Homo sapiens
MWEAQFLGLLFLQPLWVAPVKPLQPGAEVPVVWAQEGAPAQLPCSPTIPLQDLSLLRRAGVTWQHQPDSGPPAAAPGHPLAPGPHPAAPSSWGPRPRRYTVLSVGPGGLRSGRLPLQPRVQLDERGRQRGDFSLWLRPARRADAGEYRAAVHLRDRALSCRLRLRLGQASMTASPPGSLRASDWVILNCSFSRPDRPASVHWFRNRGQGRVPVRESPHHHLAESFLFLPQVSPMDSGPWGCILTYRDGFNVSIMYNLTVLGLEPPTPLTVYAGAGSRVGLPCRLPAGVGTRSFLTAKWTPPGGGPDLLVTGDNGDFTLRLEDVSQAQAGTYTCHIHLQEQQLNATVTLAIITVTPKSFGSPGSLGKLLCEVTPVSGQERFVWSSLDTPSQRSFSGPWLEAQEAQLLSQPWQCQLYQGERLLGAAVYFTELSSPGAQRSGRAPGALPAGHLLLFLILGVLSLLLLVTGAFGFHLWRRQWRPRRFSALEQGIHPPQAQSKIEELEQEPEPEPEPEPEPEPEPEPEQL

SEQ ID NO: 26235 - protein, 422 aa, Homo sapiens
VPVVWAQEGAPAQLPCSPTIPLQDLSLLRRAGVTWQHQPDSGPPAAAPGHPLAPGPHPAAPSSWGPRPRRYTVLSVGPGGLRSGRLPLQPRVQLDERGRQRGDFSLWLRPARRADAGEYRAAVHLRDRALSCRLRLRLGQASMTASPPGSLRASDWVILNCSFSRPDRPASVHWFRNRGQGRVPVRESPHHHLAESFLFLPQVSPMDSGPWGCILTYRDGFNVSIMYNLTVLGLEPPTPLTVYAGAGSRVGLPCRLPAGVGTRSFLTAKWTPPGGGPDLLVTGDNGDFTLRLEDVSQAQAGTYTCHIHLQEQQLNATVTLAIITVTPKSFGSPGSLGKLLCEVTPVSGQERFVWSSLDTPSQRSFSGPWLEAQEAQLLSQPWQCQLYQGERLLGAAVYFTELSSPGAQRSGRAPGALPAGHL

SEQ ID NO: 26236 - protein, 533 aa, Macaca fascicularis
  MOD_RES 74: note = Any amino acid
MWEAQFLGLLFLQPLWVAPVKPPQPGAEISVVWAQEGAPAQLPCSPTIPLQDLSLLRRAGVTWQHQPDSGPPAXAPGHPPVPGHRPAAPYSWGPRPRRYTVLSVGPGGLRSGRLPLQPRVQLDERGRQRGDFSLWLRPARRADAGEYRATVHLRDRALSCRLRLRVGQASMTASPPGSLRTSDWVILNCSFSRPDRPASVHWFRSRGQGRVPVQGSPHHHLAESFLFLPHVGPMDSGLWGCILTYRDGFNVSIMYNLTVLGLEPATPLTVYAGAGSRVELPCRLPPAVGTQSFLTAKWAPPGGGPDLLVAGDNGDFTLRLEDVSQAQAGTYICHIRLQGQQLNATVTLAIITVTPKSFGSPGSLGKLLCEVTPASGQEHFVWSPLNTPSQRSFSGPWLEAQEAQLLSQPWQCQLHQGERLLGAAVYFTELSSPGAQRSGRAPGALRAGHLPLFLILGVLFLLLLVTGAFGFHLWRRQWRPRRFSALEQGIHPPQAQSKIEELEQEPELEPEPELERELGPEPEPGPEPEPEQL

SEQ ID NO: 26237 - protein, 422 aa, Macaca fascicularis
  MOD_RES 46: note = Any amino acid
ISVVWAQEGAPAQLPCSPTIPLQDLSLLRRAGVTWQHQPDSGPPAXAPGHPPVPGHRPAAPYSWGPRPRRYTVLSVGPGGLRSGRLPLQPRVQLDERGRQRGDFSLWLRPARRADAGEYRATVHLRDRALSCRLRLRVGQASMTASPPGSLRTSDWVILNCSFSRPDRPASVHWFRSRGQGRVPVQGSPHHHLAESFLFLPHVGPMDSGLWGCILTYRDGFNVSIMYNLTVLGLEPATPLTVYAGAGSRVELPCRLPPAVGTQSFLTAKWAPPGGGPDLLVAGDNGDFTLRLEDVSQAQAGTYICHIRLQGQQLNATVTLAIITVTPKSFGSPGSLGKLLCEVTPASGQEHFVWSPLNTPSQRSFSGPWLEAQEAQLLSQPWQCQLHQGERLLGAAVYFTELSSPGAQRSGRAPGALRAGHL

SEQ ID NO: 26238 - protein, 300 aa, Homo sapiens
MFSHLPFDCVLLLLLLLLTRSSEVEYRAEVGQNAYLPCFYTPAAPGNLVPVCWGKGACPVFECGNVVLRTDERDVNYWTSRYWLNGDFRKGDVSLTIENVTLADSGIYCCRIQIPGIMNDEKFNLKLVIKPAKVTPAPTRQRDFTAAFPRMLTTRGHGPAETQTLGSLPDINLTQISTLANELRDSRLANDLRDSGATIRIGIYIGAGICAGLALALIFGALIFKWYSHSKEKIQNLSLISLANLPPSGLANAVAEGIRSEENIYTIEENVYEVEEPNEYYCYVSSRQQPSQPLGCRFAM

SEQ ID NO: 26239 - protein, 181 aa, Homo sapiens
SEVEYRAEVGQNAYLPCFYTPAAPGNLVPVCWGKGACPVFECGNVVLRTDERDVNYWTSRYWLNGDFRKGDVSLTIENVTLADSGIYCCRIQIPGIMNDEKFNLKLVIKPAKVTPAPTRQRDFTAAFPRMLTTRGHGPAETQTLGSLPDINLTQISTLANELRDSRLANDLRDSGATIRIG

SEQ ID NO: 26240 - protein, 302 aa, Macaca fascicularis
MFSHLPFDCVLLLLLLLLTRSSEVEYIAEVGQNAYLPCSYTPAPPGNLVPVCWGKGACPVFDCSNVVLRTDNRDVNDRTSGRYWLKGDFHKGDVSLTIENVTLADSGVYCCRIQIPGIMNDEKHNVKLVVIKPAKVTPAPTLQRDLTSAFPRMLTTGEHGPAETQTPGSLPDVNLTVSNFFCELQIFTLTNELRDSGATIRTAIYIAAGISAGLALALIFGALIFKWYSHSKEKTQNLSLISLANIPPSGLANAVAEGIRSEENIYTIEEDVYEVEEPNEYYCYVSSGQQPSQPLGCRVAMP

SEQ ID NO: 26241 - protein, 182 aa, Macaca fascicularis
SEVEYIAEVGQNAYLPCSYTPAPPGNLVPVCWGKGACPVFDCSNVVLRTDNRDVNDRTSGRYWLKGDFHKGDVSLTIENVTLADSGVYCCRIQIPGIMNDEKHNVKLVVIKPAKVTPAPTLQRDLTSAFPRMLTTGEHGPAETQTPGSLPDVNLTVSNFFCELQIFTLTNELRDSGATIRTA

SEQ ID NO: 26242 - protein, 290 aa, Homo sapiens
MRIFAVFIFMTYWHLLNAFTVTVPKDLYVVEYGSNMTIECKFPVEKQLDLAALIVYWEMEDKNIIQFVHGEEDLKVQHSSYRQRARLLKDQLSLGNAALQITDVKLQDAGVYRCMISYGGADYKRITVKVNAPYNKINQRILVVDPVTSEHELTCQAEGYPKAEVIWTSSDHQVLSGKTTTTNSKREEKLFNVTSTLRINTTTNEIFYCTFRRLDPEENHTAELVIPELPLAHPPNERTHLVILGAILLCLGVALTFIFRLRKGRMMDVKKCGIQDTNSKKQSDTHLEET

SEQ ID NO: 26243 - protein, 220 aa, Homo sapiens
FTVTVPKDLYVVEYGSNMTIECKFPVEKQLDLAALIVYWEMEDKNIIQFVHGEEDLKVQHSSYRQRARLLKDQLSLGNAALQITDVKLQDAGVYRCMISYGGADYKRITVKVNAPYNKINQRILVVDPVTSEHELTCQAEGYPKAEVIWTSSDHQVLSGKTTTTNSKREEKLFNVTSTLRINTTTNEIFYCTFRRLDPEENHTAELVIPELPLAHPPNER

SEQ ID NO: 26244 - protein, 290 aa, Macaca fascicularis
MRIFAVFIFTIYWHLLNAFTVTVPKDLYVVEYGSNMTIECKFPVEKQLDLTSLIVYWEMEDKNIIQFVHGEEDLKVQHSNYRQRAQLLKDQLSLGNAALRITDVKLQDAGVYRCMISYGGADYKRITVKVNAPYNKINQRILVVDPVTSEHELTCQAEGYPKAEVIWTSSDHQVLSGKTTTTNSKREEKLLNVTSTLRINTTANEIFYCIFRRLDPEENHTAELVIPELPLALPPNERTHLVILGAIFLLLGVALTFIFYLRKGRMMDMKKCGIRVTNSKKQRDTQLEET

SEQ ID NO: 26245 - protein, 220 aa, Macaca fascicularis
FTVTVPKDLYVVEYGSNMTIECKFPVEKQLDLTSLIVYWEMEDKNIIQFVHGEEDLKVQHSNYRQRAQLLKDQLSLGNAALRITDVKLQDAGVYRCMISYGGADYKRITVKVNAPYNKINQRILVVDPVTSEHELTCQAEGYPKAEVIWTSSDHQVLSGKTTTTNSKREEKLLNVTSTLRINTTANEIFYCIFRRLDPEENHTAELVIPELPLALPPNER

SEQ ID NO: 26246 - protein, 199 aa, Homo sapiens
MKSGLWYFFLFCLRIKVLTGEINGSANYEMFIFHNGGVQILCKYPDIVQQFKMQLLKGGQILCDLTKTKGSGNTVSIKSLKFCHSQLSNNSVSFFLYNLDHSHANYYFCNLSIFDPPPFKVTLTGGYLHIYESQLCCQLKFWLPIGCAAFVVVCILGCILICWLTKKKYSSSVHDPNGEYMFMRAVNTAKKSRLTDVTL

SEQ ID NO: 26247 - protein, 120 aa, Homo sapiens
EINGSANYEMFIFHNGGVQILCKYPDIVQQFKMQLLKGGQILCDLTKTKGSGNTVSIKSLKFCHSQLSNNSVSFFLYNLDHSHANYYFCNLSIFDPPPFKVTLTGGYLHIYESQLCCQLK

SEQ ID NO: 26248 - protein, 199 aa, Macaca fascicularis
MKSGLWYFFLFCLHMKVLTGEINGSANYEMFIFHNGGVQILCKYPDIVQQFKMQLLKGGQILCDLTKTKGSGNTVSIKSLKFCHSQLSNNSVSFFLYNLDRSHANYYFCNLSIFDPPPFKVTLTGGYLHIYESQLCCQLKFWLPIGCATFVVVCIFGCILICWLTKKKYSSTVHDPNGEYMFMRAVNTAKKSRLTDVTV

SEQ ID NO: 26249 - protein, 120 aa, Macaca fascicularis
EINGSANYEMFIFHNGGVQILCKYPDIVQQFKMQLLKGGQILCDLTKTKGSGNTVSIKSLKFCHSQLSNNSVSFFLYNLDRSHANYYFCNLSIFDPPPFKVTLTGGYLHIYESQLCCQLK

SEQ ID NO: 26250 - protein, 241 aa, Homo sapiens
MAQHGAMGAFRALCGLALLCALSLGQRPTGGPGCGPGRLLLGTGTDARCCRVHTTRCCRDYPGEECCSEWDCMCVQPEFHCGDPCCTTCRHHPCPPGQGVQSQGKFSFGFQCIDCASGTFSGGHEGHCKPWTDCTQFGFLTVFPGNKTHNAVCVPGSPPAEPLGWLTVVLLAVAACVLLLTSAQLGLHIWQLRSQCMWPRETQLLLEVPPSTEDARSCQFPEEERGERSAEEKGRLGDLWV

SEQ ID NO: 26251 - protein, 137 aa, Homo sapiens
QRPTGGPGCGPGRLLLGTGTDARCCRVHTTRCCRDYPGEECCSEWDCMCVQPEFHCGDPCCTTCRHHPCPPGQGVQSQGKFSFGFQCIDCASGTFSGGHEGHCKPWTDCTQFGFLTVFPGNKTHNAVCVPGSPPAEP

SEQ ID NO: 26252 - protein, 235 aa, Macaca fascicularis
MCACGTLCCLALLCAASLGQRPTGGPGCGPGRLLLGTGKDARCCRVHPTRCCRDYQSEECCSEWDCVCVQPEFHCGNPCCTTCQHHPCPSGQGVQPQGKFSFGFRCVDCALGTFSRGHDGHCKPWTDCTQFGFLTVFPGNKTHNAVCVPGSPPAEPPGWLTIVLLAVAACVLLLTSAQLGLHIWQLGSQPTGPRETQLLLEVPPSTEDASSCQFPEEERGERLAEEKGRLGDLWV

SEQ ID NO: 26253 - protein, 137 aa, Macaca fascicularis
QRPTGGPGCGPGRLLLGTGKDARCCRVHPTRCCRDYQSEECCSEWDCVCVQPEFHCGNPCCTTCQHHPCPSGQGVQPQGKFSFGFRCVDCALGTFSRGHDGHCKPWTDCTQFGFLTVFPGNKTHNAVCVPGSPPAEP

SEQ ID NO: 26254 - protein, 277 aa, Homo sapiens
MCVGARRLGRGPCAALLLLGLGLSTVTGLHCVGDTYPSNDRCCHECRPGNGMVSRCSRSQNTVCRPCGPGFYNDVVSSKPCKPCTWCNLRSGSERKQLCTATQDTVCRCRAGTQPLDSYKPGVDCAPCPPGHFSPGDNQACKPWTNCTLAGKHTLQPASNSSDAICEDRDPPATQPQETQGPPARPITVQPTEAWPRTSQGPSTRPVEVPGGRAVAAILGLGLVLGLLGPLAILLALYLLRRDQRLPPDAHKPPGGGSFRTPIQEEQADAHSTLAKI

SEQ ID NO: 26255 - protein, 186 aa, Homo sapiens [sequence omitted]

SEQ ID NO: 26256 - protein, 277 aa, Macaca fascicularis
MCVGARRLGRGPCAALLLLGLGLSTTAKLHCVGDTYPSNDRCCQECRPGNGMVSRCNRSQNTVCRPCGPGFYNDVVSAKPCKACTWCNLRSGSERKQPCTATQDTVCRCRAGTQPLDSYKPGVDCAPCPPGHFSPGDNQACKPWTNCTLAGKHTLQPASNSSDAICEDRDPPPTQPQETQGPPARPTTVQPTEAWPRTSQRPSTRPVEVPRGPAVAAILGLGLALGLLGPLAMLLALLLLRRDQRLPPDAPKAPGGGSFRTPIQEEQADAHSALAKI

SEQ ID NO: 26257 - protein, 186 aa, Macaca fascicularis
LHCVGDTYPSNDRCCQECRPGNGMVSRCNRSQNTVCRPCGPGFYNDVVSAKPCKACTWCNLRSGSERKQPCTATQDTVCRCRAGTQPLDSYKPGVDCAPCPPGHFSPGDNQACKPWTNCTLAGKHTLQPASNSSDAICEDRDPPPTQPQETQGPPARPTTVQPTEAWPRTSQRPSTRPVEVPRGPA

SEQ ID NO: 26258 - protein, 255 aa, Homo sapiens
MGNSCYNIVATLLLVLNFERTRSLQDPCSNCPAGTFCDNNRNQICSPCPPNSFSSAGGQRTCDICRQCKGVFRTRKECSSTSNAECDCTPGFHCLGAGCSMCEQDCKQGQELTKKGCKDCCFGTFNDQKRGICRPWTNCSLDGKSVLVNGTKERDVVCGPSPADLSPGASSVTPPAPAREPGHSPQIISFFLALTSTALLFLLFFLTLRFSVVKRGRKKLLYIFKQPFMRPVQTTQEEDGCSCRFPEEEEGGCEL

SEQ ID NO: 26259 - protein, 163 aa, Homo sapiens
LQDPCSNCPAGTFCDNNRNQICSPCPPNSFSSAGGQRTCDICRQCKGVFRTRKECSSTSNAECDCTPGFHCLGAGCSMCEQDCKQGQELTKKGCKDCCFGTFNDQKRGICRPWTNCSLDGKSVLVNGTKERDVVCGPSPADLSPGASSVTPPAPAREPGHSPQ

SEQ ID NO: 26260 - protein, 254 aa, Macaca fascicularis
MGNSCYNIVATLLLVLNFERTRSLQDLCSNCPAGTFCDNNRSQICSPCPPNSFSSAGGQRTCDICRQCKGVFKTRKECSSTSNAECDCISGYHCLGAECSMCEQDCKQGQELTKKGCKDCCFGTFNDQKRGICRPWTNCSLDGKSVLVNGTKERDVVCGPSPADLSPGASSATPPAPAREPGHSPQIIFFLALTSTVVLFLLFFLVLRFSVVKRSRKKLLYIFKQPFMRPVQTTQEEDGCSCRFPEEEEGGCEL

SEQ ID NO: 26261 - protein, 163 aa, Macaca fascicularis
LQDLCSNCPAGTFCDNNRSQICSPCPPNSFSSAGGQRTCDICRQCKGVFKTRKECSSTSNAECDCISGYHCLGAECSMCEQDCKQGQELTKKGCKDCCFGTFNDQKRGICRPWTNCSLDGKSVLVNGTKERDVVCGPSPADLSPGASSATPPAPAREPGHSPQ

SEQ ID NO: 26262 - protein, 450 aa, synthetic construct
  REGION 1..450: note = Description of Artificial Sequence: Synthetic polypeptide
  REGION 1..450: note = XENP014410 20H4.9[4-1BB]_H0L0_IgG1_PVA_/S267K Heavy Chain
QVQLQQWGAGLLKPSETLSLTCAVYGGSFSGYYWSWIRQSPEKGLEWIGEINHGGYVTYNPSLESRVTISVDTSKNQFSLKLSSVTAADTAVYYCARDYGPGNYDWYFDLWGRGTLVTVSSASTKGPSVFPLAPSSKSTSGGTAALGCLVKDYFPEPVTVSWNSGALTSGVHTFPAVLQSSGLYSLSSVVTVPSSSLGTQTYICNVNHKPSNTKVDKKVEPKSCDKTHTCPPCPAPPVAGPSVFLFPPKPKDTLMISRTPEVTCVVVDVKHEDPEVKFNWYVDGVEVHNAKTKPREEQYNSTYRVVSVLTVLHQDWLNGKEYKCKVSNKALPAPIEKTISKAKGQPREPQVYTLPPSREEMTKNQVSLTCLVKGFYPSDIAVEWESNGQPENNYKTTPPVLDSDGSFFLYSKLTVDKSRWQQGNVFSCSVMHEALHNHYTQKSLSLSPGK

SEQ ID NO: 26263 - protein, 121 aa, synthetic construct [sequence omitted]

SEQ ID NO: 26264 - protein, 5 aa, synthetic construct
  REGION 1..5: note = Description of Artificial Sequence: Synthetic peptide
  REGION 1..5: note = XENP014410 vhCDR1
GYYWS

SEQ ID NO: 26265 - protein, 16 aa, synthetic construct
  REGION 1..16: note = Description of Artificial Sequence: Synthetic peptide
  REGION 1..16: note = XENP014410 vhCDR2
EINHGGYVTYNPSLES

SEQ ID NO: 26266 - protein, 13 aa, synthetic construct
  REGION 1..13: note = Description of Artificial Sequence: Synthetic peptide
  REGION 1..13: note = XENP014410 vhCDR3
DYGPGNYDWYFDL

SEQ ID NO: 26267 - protein, 216 aa, synthetic construct
  REGION 1..216: note = Description of Artificial Sequence: Synthetic polypeptide
  REGION 1..216: note = XENP014410 20H4.9[4-1BB]_H0L0_IgG1_PVA_/S267K Light Chain
EIVLTQSPATLSLSPGERATLSCRASQSVSSYLAWYQQKPGQAPRLLIYDASNRATGIPARFSGSGSGTDFTLTISSLEPEDFAVYYCQQRSNWPPALTFGGGTKVEIKRTVAAPSVFIFPPSDEQLKSGTASVVCLLNNFYPREAKVQWKVDNALQSGNSQESVTEQDSKDSTYSLSSTLTLSKADYEKHKVYACEVTHQGLSSPVTKSFNRGEC

SEQ ID NO: 26268 - protein, 109 aa, synthetic construct [sequence omitted]

SEQ ID NO: 26269 - protein, 11 aa, synthetic construct
  REGION 1..11: note = Description of Artificial Sequence: Synthetic peptide
  REGION 1..11: note = XENP014410 vlCDR1
RASQSVSSYLA

SEQ ID NO: 26270 - protein, 7 aa, synthetic construct
  REGION 1..7: note = Description of Artificial Sequence: Synthetic peptide
  REGION 1..7: note = XENP014410 vlCDR2
DASNRAT

SEQ ID NO: 26271 - protein, 11 aa, synthetic construct
  REGION 1..11: note = Description of Artificial Sequence: Synthetic peptide
  REGION 1..11: note = XENP014410 vlCDR3
QQRSNWPPALT

SEQ ID NO: 26272 - protein, 447 aa, synthetic construct
  REGION 1..447: note = Description of Artificial Sequence: Synthetic polypeptide
  REGION 1..447: note = XENP016437 11D4[OX40]_H0L0_IgG1_PVA_/S267K Heavy Chain
EVQLVESGGGLVQPGGSLRLSCAASGFTFSSYSMNWVRQAPGKGLEWVSYISSSSSTIDYADSVKGRFTISRDNAKNSLYLQMNSLRDEDTAVYYCARESGWYLFDYWGQGTLVTVSSASTKGPSVFPLAPSSKSTSGGTAALGCLVKDYFPEPVTVSWNSGALTSGVHTFPAVLQSSGLYSLSSVVTVPSSSLGTQTYICNVNHKPSNTKVDKKVEPKSCDKTHTCPPCPAPPVAGPSVFLFPPKPKDTLMISRTPEVTCVVVDVKHEDPEVKFNWYVDGVEVHNAKTKPREEQYNSTYRVVSVLTVLHQDWLNGKEYKCKVSNKALPAPIEKTISKAKGQPREPQVYTLPPSREEMTKNQVSLTCLVKGFYPSDIAVEWESNGQPENNYKTTPPVLDSDGSFFLYSKLTVDKSRWQQGNVFSCSVMHEALHNHYTQKSLSLSPGK

SEQ ID NO: 26273 - protein, 118 aa, synthetic construct
  REGION 1..118: note = Description of Artificial Sequence: Synthetic polypeptide
  REGION 1..118: note = VH of XENP016437
EVQLVESGGGLVQPGGSLRLSCAASGFTFSSYSMNWVRQAPGKGLEWVSYISSSSSTIDYADSVKGRFTISRDNAKNSLYLQMNSLRDEDTAVYYCARESGWYLFDYWGQGTLVTVSS

SEQ ID NO: 26274 - protein, 5 aa, synthetic construct
  REGION 1..5: note = Description of Artificial Sequence: Synthetic peptide
  REGION 1..5: note = XENP016437 vhCDR1
SYSMN

SEQ ID NO: 26275 - protein, 17 aa, synthetic construct
  REGION 1..17: note = Description of Artificial Sequence: Synthetic peptide
  REGION 1..17: note = XENP016437 vhCDR2
YISSSSSTIDYADSVKG

SEQ ID NO: 26276 - protein, 9 aa, synthetic construct
  REGION 1..9: note = Description of Artificial Sequence: Synthetic peptide
  REGION 1..9: note = XENP016437 vhCDR3
ESGWYLFDY

SEQ ID NO: 26277 - protein, 214 aa, synthetic construct
  REGION 1..214: note = Description of Artificial Sequence: Synthetic polypeptide
  REGION 1..214: note = XENP016437 11D4[OX40]_H0L0_IgG1_PVA_/S267K Light Chain
DIQMTQSPSSLSASVGDRVTITCRASQGISSWLAWYQQKPEKAPKSLIYAASSLQSGVPSRFSGSGSGTDFTLTISSLQPEDFATYYCQQYNSYPPTFGGGTKVEIKRTVAAPSVFIFPPSDEQLKSGTASVVCLLNNFYPREAKVQWKVDNALQSGNSQESVTEQDSKDSTYSLSSTLTLSKADYEKHKVYACEVTHQGLSSPVTKSFNRGEC

SEQ ID NO: 26278 - protein, 107 aa, synthetic construct
  REGION 1..107: note = Description of Artificial Sequence: Synthetic polypeptide
  REGION 1..107: note = VL of XENP016437
DIQMTQSPSSLSASVGDRVTITCRASQGISSWLAWYQQKPEKAPKSLIYAASSLQSGVPSRFSGSGSGTDFTLTISSLQPEDFATYYCQQYNSYPPTFGGGTKVEIK

SEQ ID NO: 26279 - protein, 11 aa, synthetic construct
  REGION 1..11: note = Description of Artificial Sequence: Synthetic peptide
  REGION 1..11: note = XENP016437 vlCDR1
RASQGISSWLA

SEQ ID NO: 26280 - protein, 7 aa, synthetic construct
  REGION 1..7: note = Description of Artificial Sequence: Synthetic peptide
  REGION 1..7: note = XENP016437 vlCDR2
AASSLQS

SEQ ID NO: 26281 - protein, 9 aa, synthetic construct
  REGION 1..9: note = Description of Artificial Sequence: Synthetic peptide
  REGION 1..9: note = XENP016437 vlCDR3
QQYNSYPPT

SEQ ID NO: 26282 - protein, 451 aa, synthetic construct
  REGION 1..451: note = Description of Artificial Sequence: Synthetic polypeptide
  REGION 1..451: note = XENP016438 1D8[GITR]_H0L0_IgG1_PVA_/S267K Heavy Chain
QVTLKESGPGILKPSQTLSLTCSFSGFSLSTSGMGVGWIRQPSGKGLEWLAHIWWDDDKYYSPSLKSQLTISKDTSRNQVFLKITSLDTADTATYYCVRSYYYGSSGAMDYWGQGTSVTVSSASTKGPSVFPLAPSSKSTSGGTAALGCLVKDYFPEPVTVSWNSGALTSGVHTFPAVLQSSGLYSLSSVVTVPSSSLGTQTYICNVNHKPSNTKVDKKVEPKSCDKTHTCPPCPAPPVAGPSVFLFPPKPKDTLMISRTPEVTCVVVDVKHEDPEVKFNWYVDGVEVHNAKTKPREEQYNSTYRVVSVLTVLHQDWLNGKEYKCKVSNKALPAPIEKTISKAKGQPREPQVYTLPPSREEMTKNQVSLTCLVKGFYPSDIAVEWESNGQPENNYKTTPPVLDSDGSFFLYSKLTVDKSRWQQGNVFSCSVMHEALHNHYTQKSLSLSPGK

SEQ ID NO: 26283 - protein, 122 aa, synthetic construct
  REGION 1..122: note = Description of Artificial Sequence: Synthetic polypeptide
  REGION 1..122: note = VH of XENP016438
QVTLKESGPGILKPSQTLSLTCSFSGFSLSTSGMGVGWIRQPSGKGLEWLAHIWWDDDKYYSPSLKSQLTISKDTSRNQVFLKITSLDTADTATYYCVRSYYYGSSGAMDYWGQGTSVTVSS

SEQ ID NO: 26284 - protein, 7 aa, synthetic construct
  REGION 1..7: note = Description of Artificial Sequence: Synthetic peptide
  REGION 1..7: note = XENP016438 vhCDR1
TSGMGVG

SEQ ID NO: 26285 - protein, 16 aa, synthetic construct
  REGION 1..16: note = Description of Artificial Sequence: Synthetic peptide
  REGION 1..16: note = XENP016438 vhCDR2
HIWWDDDKYYSPSLKS

SEQ ID NO: 26286 - protein, 12 aa, synthetic construct
  REGION 1..12: note = Description of Artificial Sequence: Synthetic peptide
  REGION 1..12: note = XENP016438 vhCDR3
SYYYGSSGAMDY

SEQ ID NO: 26287 - protein, 219 aa, synthetic construct
  REGION 1..219: note = Description of Artificial Sequence: Synthetic polypeptide
  REGION 1..219: note = XENP016438 1D8[GITR]_H0L0_IgG1_PVA_/S267K Light Chain
DIVMTQTPLSLPVSLGDQASISCRSSQSLVHSDGNTYLHWYLQKPGQSPKLLIYKVSKRFSGVPDRFSGSGSGTDFTLKISRVEAEDLGVYFCSQSTHVPPTFGGGTKLEIKRTVAAPSVFIFPPSDEQLKSGTASVVCLLNNFYPREAKVQWKVDNALQSGNSQESVTEQDSKDSTYSLSSTLTLSKADYEKHKVYACEVTHQGLSSPVTKSFNRGEC

SEQ ID NO: 26288 - protein, 112 aa, synthetic construct
  REGION 1..112: note = Description of Artificial Sequence: Synthetic polypeptide
  REGION 1..112: note = VL of XENP016438
DIVMTQTPLSLPVSLGDQASISCRSSQSLVHSDGNTYLHWYLQKPGQSPKLLIYKVSKRFSGVPDRFSGSGSGTDFTLKISRVEAEDLGVYFCSQSTHVPPTFGGGTKLEIK

SEQ ID NO: 26289 - protein, 16 aa, synthetic construct
  REGION 1..16: note = Description of Artificial Sequence: Synthetic peptide
  REGION 1..16: note = XENP016438 vlCDR1
RSSQSLVHSDGNTYLH

SEQ ID NO: 26290 - protein, 7 aa, synthetic construct
  REGION 1..7: note = Description of Artificial Sequence: Synthetic peptide
  REGION 1..7: note = XENP016438 vlCDR2
KVSKRFS

SEQ ID NO: 26291 - protein, 9 aa, synthetic construct
  REGION 1..9: note = Description of Artificial Sequence: Synthetic peptide
  REGION 1..9: note = XENP016438 vlCDR3
SQSTHVPPT

SEQ ID NO: 26292 - protein, 454 aa, synthetic construct
  REGION 1..454: note = Description of Artificial Sequence: Synthetic polypeptide
  REGION 1..454: note = XENP016435 [anti-ICOS]_H0L0_IgG1_PVA_/S267K Heavy Chain
QVQLVQSGAEVKKPGASVKVSCKASGYTFTGYYMHWVRQAPGQGLEWMGWINPHSGGTNYAQKFQGRVTMTRDTSISTAYMELSRLRSDDTAVYYCARTYYYDSSGYYHDAFDIWGQGTMVTVSSASTKGPSVFPLAPSSKSTSGGTAALGCLVKDYFPEPVTVSWNSGALTSGVHTFPAVLQSSGLYSLSSVVTVPSSSLGTQTYICNVNHKPSNTKVDKKVEPKSCDKTHTCPPCPAPPVAGPSVFLFPPKPKDTLMISRTPEVTCVVVDVKHEDPEVKFNWYVDGVEVHNAKTKPREEQYNSTYRVVSVLTVLHQDWLNGKEYKCKVSNKALPAPIEKTISKAKGQPREPQVYTLPPSREEMTKNQVSLTCLVKGFYPSDIAVEWESNGQPENNYKTTPPVLDSDGSFFLYSKLTVDKSRWQQGNVFSCSVMHEALHNHYTQKSLSLSPGK

SEQ ID NO: 26293 - protein, 125 aa, synthetic construct
  REGION 1..125: note = Description of Artificial Sequence: Synthetic polypeptide
  REGION 1..125: note = VH of XENP016435
QVQLVQSGAEVKKPGASVKVSCKASGYTFTGYYMHWVRQAPGQGLEWMGWINPHSGGTNYAQKFQGRVTMTRDTSISTAYMELSRLRSDDTAVYYCARTYYYDSSGYYHDAFDIWGQGTMVTVSS

SEQ ID NO: 26294 - protein, 5 aa, synthetic construct
  REGION 1..5: note = Description of Artificial Sequence: Synthetic peptide
  REGION 1..5: note = XENP016435 vhCDR1
GYYMH

SEQ ID NO: 26295 - protein, 17 aa, synthetic construct
  REGION 1..17: note = Description of Artificial Sequence: Synthetic peptide
  REGION 1..17: note = XENP016435 vhCDR2
WINPHSGGTNYAQKFQG

SEQ ID NO: 26296 - protein, 16 aa, synthetic construct
  REGION 1..16: note = Description of Artificial Sequence: Synthetic peptide
  REGION 1..16: note = XENP016435 vhCDR3
TYYYDSSGYYHDAFDI

SEQ ID NO: 26297 - protein, 214 aa, synthetic construct
  REGION 1..214: note = Description of Artificial Sequence: Synthetic polypeptide
  REGION 1..214: note = XENP016435 [anti-ICOS]_H0L0_IgG1_PVA_/S267K Light Chain
DIQMTQSPSSVSASVGDRVTITCRASQGISRLLAWYQQKPGKAPKLLIYVASSLQSGVPSRFSGSGSGTDFTLTISSLQPEDFATYYCQQANSFPWTFGQGTKVEIKRTVAAPSVFIFPPSDEQLKSGTASVVCLLNNFYPREAKVQWKVDNALQSGNSQESVTEQDSKDSTYSLSSTLTLSKADYEKHKVYACEVTHQGLSSPVTKSFNRGEC

SEQ ID NO: 26298 - protein, 107 aa, synthetic construct
  REGION 1..107: note = Description of Artificial Sequence: Synthetic polypeptide
  REGION 1..107: note = VL of XENP016435
DIQMTQSPSSVSASVGDRVTITCRASQGISRLLAWYQQKPGKAPKLLIYVASSLQSGVPSRFSGSGSGTDFTLTISSLQPEDFATYYCQQANSFPWTFGQGTKVEIK

SEQ ID NO: 26299 - protein, 11 aa, synthetic construct
  REGION 1..11: note = Description of Artificial Sequence: Synthetic peptide
  REGION 1..11: note = XENP016435 vlCDR1
RASQGISRLLA

SEQ ID NO: 26300 - protein, 7 aa, synthetic construct
  REGION 1..7: note = Description of Artificial Sequence: Synthetic peptide
  REGION 1..7: note = XENP016435 vlCDR2
VASSLQS

SEQ ID NO: 26301 - protein, 9 aa, synthetic construct
  REGION 1..9: note = Description of Artificial Sequence: Synthetic peptide
  REGION 1..9: note = XENP016435 vlCDR3
QQANSFPWT

SEQ ID NO: 26302 - protein, 452 aa, synthetic construct
  REGION 1..452: note = Description of Artificial Sequence: Synthetic polypeptide
  REGION 1..452: note = XENP021820 GSK_314.8[ICOS]_H0L0_IgG1_PVA_/S267K Heavy Chain
QVQLQQPGTELMKPGASVKLSCKASGYTFTTYWMHWVKQRPGQGLEWIGEIDPSDSYVNYNQNFKGKATLTVDKSSSTAYIQLSSLTSEDSAVYFCARSPDYYGTSLAWFDYWGQGTLVTVSTASTKGPSVFPLAPSSKSTSGGTAALGCLVKDYFPEPVTVSWNSGALTSGVHTFPAVLQSSGLYSLSSVVTVPSSSLGTQTYICNVNHKPSNTKVDKKVEPKSCDKTHTCPPCPAPPVAGPSVFLFPPKPKDTLMISRTPEVTCVVVDVKHEDPEVKFNWYVDGVEVHNAKTKPREEQYNSTYRVVSVLTVLHQDWLNGKEYKCKVSNKALPAPIEKTISKAKGQPREPQVYTLPPSREEMTKNQVSLTCLVKGFYPSDIAVEWESNGQPENNYKTTPPVLDSDGSFFLYSKLTVDKSRWQQGNVFSCSVMHEALHNHYTQKSLSLSPGK

SEQ ID NO: 26303 - protein, 123 aa, synthetic construct
  REGION 1..123: note = Description of Artificial Sequence: Synthetic polypeptide
  REGION 1..123: note = VH of XENP021820
QVQLQQPGTELMKPGASVKLSCKASGYTFTTYWMHWVKQRPGQGLEWIGEIDPSDSYVNYNQNFKGKATLTVDKSSSTAYIQLSSLTSEDSAVYFCARSPDYYGTSLAWFDYWGQGTLVTVST

SEQ ID NO: 26304 - protein, 5 aa, synthetic construct
  REGION 1..5: note = Description of Artificial Sequence: Synthetic peptide
  REGION 1..5: note = XENP021820 vhCDR1
TYWMH

SEQ ID NO: 26305 - protein, 17 aa, synthetic construct
  REGION 1..17: note = Description of Artificial Sequence: Synthetic peptide
  REGION 1..17: note = XENP021820 vhCDR2
EIDPSDSYVNYNQNFKG

SEQ ID NO: 26306 - protein, 14 aa, synthetic construct
  REGION 1..14: note = Description of Artificial Sequence: Synthetic peptide
  REGION 1..14: note = XENP021820 vhCDR3
SPDYYGTSLAWFDY

SEQ ID NO: 26307 - protein, 219 aa, synthetic construct
  REGION 1..219: note = Description of Artificial Sequence: Synthetic polypeptide
  REGION 1..219: note = XENP021820 GSK_314.8[ICOS]_H0L0_IgG1_PVA_/S267K Light Chain
DIVMTQAAPSVPVTPGESVSISCRSSKSPLHSNGNIYLYWFLQRPGQSPQLLIYRMSNLASGVPDRFSGSGSGTTFTLKISRVEAEDVGVYYCMQHLEYPYTFGGGTKLEIKRTVAAPSVFIFPPSDEQLKSGTASVVCLLNNFYPREAKVQWKVDNALQSGNSQESVTEQDSKDSTYSLSSTLTLSKADYEKHKVYACEVTHQGLSSPVTKSFNRGEC

SEQ ID NO: 26308 - protein, 112 aa, synthetic construct
  REGION 1..112: note = Description of Artificial Sequence: Synthetic polypeptide
  REGION 1..112: note = VL of XENP021820
DIVMTQAAPSVPVTPGESVSISCRSSKSPLHSNGNIYLYWFLQRPGQSPQLLIYRMSNLASGVPDRFSGSGSGTTFTLKISRVEAEDVGVYYCMQHLEYPYTFGGGTKLEIK

SEQ ID NO: 26309 - protein, 16 aa, synthetic construct
  REGION 1..16: note = Description of Artificial Sequence: Synthetic peptide
  REGION 1..16: note = XENP021820 vlCDR1
RSSKSPLHSNGNIYLY

SEQ ID NO: 26310 - protein, 7 aa, synthetic construct
  REGION 1..7: note = Description of Artificial Sequence: Synthetic peptide
  REGION 1..7: note = XENP021820 vlCDR2
RMSNLAS

SEQ ID NO: 26311 - protein, 9 aa, synthetic construct
  REGION 1..9: note = Description of Artificial Sequence: Synthetic peptide
  REGION 1..9: note = XENP021820 vlCDR3
MQHLEYPYT

SEQ ID NO: 26312 - protein, 453 aa, synthetic construct
  REGION 1..453: note = Description of Artificial Sequence: Synthetic polypeptide
  REGION 1..453: note = XENP021821 GSK_88.2[ICOS]_H0L0_IgG1_PVA_/S267K Heavy Chain
QVQLQQPGAELVRPGASVKLSCKASGYSFTSYWINWVKQRPGQGLEWIGNIYPSDSYTNYNQMFKDKATLTVDKSSNTAYMQLTSPTSEDSAVYYCTRWNLSYYFDNNYYLDYWGQGTTLTVSSASTKGPSVFPLAPSSKSTSGGTAALGCLVKDYFPEPVTVSWNSGALTSGVHTFPAVLQSSGLYSLSSVVTVPSSSLGTQTYICNVNHKPSNTKVDKKVEPKSCDKTHTCPPCPAPPVAGPSVFLFPPKPKDTLMISRTPEVTCVVVDVKHEDPEVKFNWYVDGVEVHNAKTKPREEQYNSTYRVVSVLTVLHQDWLNGKEYKCKVSNKALPAPIEKTISKAKGQPREPQVYTLPPSREEMTKNQVSLTCLVKGFYPSDIAVEWESNGQPENNYKTTPPVLDSDGSFFLYSKLTVDKSRWQQGNVFSCSVMHEALHNHYTQKSLSLSPGK

SEQ ID NO: 26313 - protein, 124 aa, synthetic construct
  REGION 1..124: note = Description of Artificial Sequence: Synthetic polypeptide
  REGION 1..124: note = VH of XENP021821
QVQLQQPGAELVRPGASVKLSCKASGYSFTSYWINWVKQRPGQGLEWIGNIYPSDSYTNYNQMFKDKATLTVDKSSNTAYMQLTSPTSEDSAVYYCTRWNLSYYFDNNYYLDYWGQGTTLTVSS

SEQ ID NO: 26314 - protein, 5 aa, synthetic construct
  REGION 1..5: note = Description of Artificial Sequence: Synthetic peptide
  REGION 1..5: note = XENP021821 vhCDR1
SYWIN

SEQ ID NO: 26315 - protein, 17 aa, synthetic construct
  REGION 1..17: note = Description of Artificial Sequence: Synthetic peptide
  REGION 1..17: note = XENP021821 vhCDR2
NIYPSDSYTNYNQMFKD

SEQ ID NO: 26316 - protein, 15 aa, synthetic construct
  REGION 1..15: note = Description of Artificial Sequence: Synthetic peptide
  REGION 1..15: note = XENP021821 vhCDR3
WNLSYYFDNNYYLDY

SEQ ID NO: 26317 - protein, 219 aa, synthetic construct
  REGION 1..219: note = Description of Artificial Sequence: Synthetic polypeptide
  REGION 1..219: note = XENP021821 GSK_88.2[ICOS]_H0L0_IgG1_PVA_/S267K Light Chain
DIVMTQAAPSVPVTPGESVSISCRSSKSLLHSNGNTYLYWFLQRPGQSPQLLIYRMSNLASGVPDRFSGSGSGTAFTLRISRVEAEDVGVYYCMQHLEYPWTFGGGTKLEIKRTVAAPSVFIFPPSDEQLKSGTASVVCLLNNFYPREAKVQWKVDNALQSGNSQESVTEQDSKDSTYSLSSTLTLSKADYEKHKVYACEVTHQGLSSPVTKSFNRGEC

SEQ ID NO: 26318 - protein, 112 aa, synthetic construct
  REGION 1..112: note = Description of Artificial Sequence: Synthetic polypeptide
  REGION 1..112: note = VL of XENP021821
DIVMTQAAPSVPVTPGESVSISCRSSKSLLHSNGNTYLYWFLQRPGQSPQLLIYRMSNLASGVPDRFSGSGSGTAFTLRISRVEAEDVGVYYCMQHLEYPWTFGGGTKLEIK

SEQ ID NO: 26319 - protein, 16 aa, synthetic construct
  REGION 1..16: note = Description of Artificial Sequence: Synthetic peptide
  REGION 1..16: note = XENP021821 vlCDR1
RSSKSLLHSNGNTYLY

SEQ ID NO: 26320 - protein, 7 aa, synthetic construct
  REGION 1..7: note = Description of Artificial Sequence: Synthetic peptide
  REGION 1..7: note = XENP021821 vlCDR2
RMSNLAS

SEQ ID NO: 26321 - protein, 9 aa, synthetic construct
  REGION 1..9: note = Description of Artificial Sequence: Synthetic peptide
  REGION 1..9: note = XENP021821 vlCDR3
MQHLEYPWT

SEQ ID NO: 26322 - protein, 454 aa, synthetic construct
  REGION 1..454: note = Description of Artificial Sequence: Synthetic polypeptide
  REGION 1..454: note = XENP021822 jMab-138[ICOS]_H0L0_IgG1_PVA_/S267K Heavy Chain
EVQLVESGGGLVQPGGSLRLSCAASGFTFSSYDMHWVRQATGKGLEWVSAIGTAGDTYYPGSVKGRFTISRENAKNSLYLQMNSLRAGDTAVYYCVRDNRKVTHEHYYYYGMDVWGQGTTVTVSSASTKGPSVFPLAPSSKSTSGGTAALGCLVKDYFPEPVTVSWNSGALTSGVHTFPAVLQSSGLYSLSSVVTVPSSSLGTQTYICNVNHKPSNTKVDKKVEPKSCDKTHTCPPCPAPPVAGPSVFLFPPKPKDTLMISRTPEVTCVVVDVKHEDPEVKFNWYVDGVEVHNAKTKPREEQYNSTYRVVSVLTVLHQDWLNGKEYKCKVSNKALPAPIEKTISKAKGQPREPQVYTLPPSREEMTKNQVSLTCLVKGFYPSDIAVEWESNGQPENNYKTTPPVLDSDGSFFLYSKLTVDKSRWQQGNVFSCSVMHEALHNHYTQKSLSLSPGK

SEQ ID NO: 26323 - protein, 125 aa, synthetic construct
  REGION 1..125: note = Description of Artificial Sequence: Synthetic polypeptide
  REGION 1..125: note = VH of XENP021822
EVQLVESGGGLVQPGGSLRLSCAASGFTFSSYDMHWVRQATGKGLEWVSAIGTAGDTYYPGSVKGRFTISRENAKNSLYLQMNSLRAGDTAVYYCVRDNRKVTHEHYYYYGMDVWGQGTTVTVSS

SEQ ID NO: 26324 - protein, 5 aa, synthetic construct
  REGION 1..5: note = Description of Artificial Sequence: Synthetic peptide
  REGION 1..5: note = XENP021822 vhCDR1
SYDMH

SEQ ID NO: 26325 - protein, 16 aa, synthetic construct
  REGION 1..16: note = Description of Artificial Sequence: Synthetic peptide
  REGION 1..16: note = XENP021822 vhCDR2
AIGTAGDTYYPGSVKG

SEQ ID NO: 26326 - protein, 17 aa, synthetic construct
  REGION 1..17: note = Description of Artificial Sequence: Synthetic peptide
  REGION 1..17: note = XENP021822 vhCDR3
DNRKVTHEHYYYYGMDV

SEQ ID NO: 26327 - protein, 216 aa, synthetic construct
  REGION 1..216: note = Description of Artificial Sequence: Synthetic polypeptide
  REGION 1..216: note = XENP021822 jMab-138[ICOS]_H0L0_IgG1_PVA_/S267K Light Chain
EIVLTQSPGTLSLSPGERATLSCRASQNIRSSYLAWYQQKPGQAPGLLIYGASSRATGIPDRFSGSGSGTDFTLTISRLEPEDFAVYYCQQFGSSPMCSFGQGTKLEIKRTVAAPSVFIFPPSDEQLKSGTASVVCLLNNFYPREAKVQWKVDNALQSGNSQESVTEQDSKDSTYSLSSTLTLSKADYEKHKVYACEVTHQGLSSPVTKSFNRGEC

SEQ ID NO: 26328 - protein, 109 aa, synthetic construct
  REGION 1..109: note = Description of Artificial Sequence: Synthetic polypeptide
  REGION 1..109: note = VL of XENP021822
EIVLTQSPGTLSLSPGERATLSCRASQNIRSSYLAWYQQKPGQAPGLLIYGASSRATGIPDRFSGSGSGTDFTLTISRLEPEDFAVYYCQQFGSSPMCSFGQGTKLEIK

SEQ ID NO: 26329 - protein, 12 aa, synthetic construct
  REGION 1..12: note = Description of Artificial Sequence: Synthetic peptide
  REGION 1..12: note = XENP021822 vlCDR1
RASQNIRSSYLA

SEQ ID NO: 26330 - protein, 7 aa, synthetic construct
  REGION 1..7: note = Description of Artificial Sequence: Synthetic peptide
  REGION 1..7: note = XENP021822 vlCDR2
GASSRAT

SEQ ID NO: 26331 - protein, 10 aa, synthetic construct
  REGION 1..10: note = Description of Artificial Sequence: Synthetic peptide
  REGION 1..10: note = XENP021822 vlCDR3
QQFGSSPMCS

SEQ ID NO: 26332 - protein, 454 aa, synthetic construct
  REGION 1..454: note = Description of Artificial Sequence: Synthetic polypeptide
  REGION 1..454: note = XENP021823 jMab-139[ICOS]_H0L0_IgG1_PVA_/S267K Heavy Chain
EVQLVESGGGLVQPGGSLRLSCAASGFTFSSYDMHWVRQATGKGLEWVSAIGTAGDTYYPGSVKGRFTISRENAKNSLYLQMNSLRAGDTAVYYCVRDKRTVTHEHYYYYGMDVWGQGTTVTVSSASTKGPSVFPLAPSSKSTSGGTAALGCLVKDYFPEPVTVSWNSGALTSGVHTFPAVLQSSGLYSLSSVVTVPSSSLGTQTYICNVNHKPSNTKVDKKVEPKSCDKTHTCPPCPAPPVAGPSVFLFPPKPKDTLMISRTPEVTCVVVDVKHEDPEVKFNWYVDGVEVHNAKTKPREEQYNSTYRVVSVLTVLHQDWLNGKEYKCKVSNKALPAPIEKTISKAKGQPREPQVYTLPPSREEMTKNQVSLTCLVKGFYPSDIAVEWESNGQPENNYKTTPPVLDSDGSFFLYSKLTVDKSRWQQGNVFSCSVMHEALHNHYTQKSLSLSPGK

SEQ ID NO: 26333 - protein, 125 aa, synthetic construct
  REGION 1..125: note = Description of Artificial Sequence: Synthetic polypeptide
  REGION 1..125: note = VH of XENP021823
EVQLVESGGGLVQPGGSLRLSCAASGFTFSSYDMHWVRQATGKGLEWVSAIGTAGDTYYPGSVKGRFTISRENAKNSLYLQMNSLRAGDTAVYYCVRDKRTVTHEHYYYYGMDVWGQGTTVTVSS

SEQ ID NO: 26334 - protein, 5 aa, synthetic construct
  REGION 1..5: note = Description of Artificial Sequence: Synthetic peptide
  REGION 1..5: note = XENP021823 vhCDR1
SYDMH

SEQ ID NO: 26335 - protein, 16 aa, synthetic construct
  REGION 1..16: note = Description of Artificial Sequence: Synthetic peptide
  REGION 1..16: note = XENP021823 vhCDR2
AIGTAGDTYYPGSVKG

SEQ ID NO: 26336 - protein, 17 aa, synthetic construct
  REGION 1..17: note = Description of Artificial Sequence: Synthetic peptide
  REGION 1..17: note = XENP021823 vhCDR3
DKRTVTHEHYYYYGMDV

SEQ ID NO: 26337 - protein, 216 aa, synthetic construct
  REGION 1..216: note = Description of Artificial Sequence: Synthetic polypeptide
  REGION 1..216: note = XENP021823 jMab-139[ICOS]_H0L0_IgG1_PVA_/S267K Light Chain
EIVLTQSPGTLSLSPGERATLSCRASQSISSSSLAWYQQKPGQAPGLLIFGASSRATGIPDRFSGSGSGTDFTLTISRLEPEDFAVYYCQQFGSSPMCSFGQGTKLEIKRTVAAPSVFIFPPSDEQLKSGTASVVCLLNNFYPREAKVQWKVDNALQSGNSQESVTEQDSKDSTYSLSSTLTLSKADYEKHKVYACEVTHQGLSSPVTKSFNRGEC

SEQ ID NO: 26338 - protein, 109 aa, synthetic construct
  REGION 1..109: note = Description of Artificial Sequence: Synthetic polypeptide
  REGION 1..109: note = VL of XENP021823
EIVLTQSPGTLSLSPGERATLSCRASQSISSSSLAWYQQKPGQAPGLLIFGASSRATGIPDRFSGSGSGTDFTLTISRLEPEDFAVYYCQQFGSSPMCSFGQGTKLEIK

SEQ ID NO: 26339 - protein, 12 aa, synthetic construct
  REGION 1..12: note = Description of Artificial Sequence: Synthetic peptide
  REGION 1..12: note = XENP021823 vlCDR1
RASQSISSSSLA

SEQ ID NO: 26340 - protein, 7 aa, synthetic construct
  REGION 1..7: note = Description of Artificial Sequence: Synthetic peptide
  REGION 1..7: note = XENP021823 vlCDR2
GASSRAT

SEQ ID NO: 26341 - protein, 10 aa, synthetic construct
  REGION 1..10: note = Description of Artificial Sequence: Synthetic peptide
  REGION 1..10: note = XENP021823 vlCDR3
QQFGSSPMCS

SEQ ID NO: 26342 - protein, 450 aa, synthetic construct
  REGION 1..450: note = Description of Artificial Sequence: Synthetic polypeptide
  REGION 1..450: note = XENP022346 WO2016059602_GSK[ICOS]_H0L0_IgG1_PVA_/S267K Heavy Chain
QVQLVQSGAEVKKPGSSVKVSCKASGYTFTDYAMHWVRQAPGQGLEWMGLISIYSDHTNYNQKFQGRVTITADKSTSTAYMELSSLRSEDTAVYYCGRNNYGNYGWYFDVWGQGTTVTVSSASTKGPSVFPLAPSSKSTSGGTAALGCLVKDYFPEPVTVSWNSGALTSGVHTFPAVLQSSGLYSLSSVVTVPSSSLGTQTYICNVNHKPSNTKVDKKVEPKSCDKTHTCPPCPAPPVAGPSVFLFPPKPKDTLMISRTPEVTCVVVDVKHEDPEVKFNWYVDGVEVHNAKTKPREEQYNSTYRVVSVLTVLHQDWLNGKEYKCKVSNKALPAPIEKTISKAKGQPREPQVYTLPPSREEMTKNQVSLTCLVKGFYPSDIAVEWESNGQPENNYKTTPPVLDSDGSFFLYSKLTVDKSRWQQGNVFSCSVMHEALHNHYTQKSLSLSPGK

SEQ ID NO: 26343 - protein, 121 aa, synthetic construct
  REGION 1..121: note = Description of Artificial Sequence: Synthetic polypeptide
  REGION 1..121: note = VH of XENP022346
QVQLVQSGAEVKKPGSSVKVSCKASGYTFTDYAMHWVRQAPGQGLEWMGLISIYSDHTNYNQKFQGRVTITADKSTSTAYMELSSLRSEDTAVYYCGRNNYGNYGWYFDVWGQGTTVTVSS

SEQ ID NO: 26344 - protein, 5 aa, synthetic construct
  REGION 1..5: note = Description of Artificial Sequence: Synthetic peptide
  REGION 1..5: note = XENP022346 vhCDR1
DYAMH

SEQ ID NO: 26345 - protein, 17 aa, synthetic construct
  REGION 1..17: note = Description of Artificial Sequence: Synthetic peptide
  REGION 1..17: note = XENP022346 vhCDR2
LISIYSDHTNYNQKFQG

SEQ ID NO: 26346 - protein, 12 aa, synthetic construct
  REGION 1..12: note = Description of Artificial Sequence: Synthetic peptide
  REGION 1..12: note = XENP022346 vhCDR3
NNYGNYGWYFDV

SEQ ID NO: 26347 - protein, 213 aa, synthetic construct
  REGION 1..213: note = Description of Artificial Sequence: Synthetic polypeptide
  REGION 1..213: note = XENP022346 WO2016059602_GSK[ICOS]_H0L0_IgG1_PVA_/S267K Light Chain
EIVLTQSPATLSLSPGERATLSCSASSSVSYMHWYQQKPGQAPRLLIYDTSKLASGIPARFSGSGSGTDYTLTISSLEPEDFAVYYCFQGSGYPYTFGQGTKLEIKRTVAAPSVFIFPPSDEQLKSGTASVVCLLNNFYPREAKVQWKVDNALQSGNSQESVTEQDSKDSTYSLSSTLTLSKADYEKHKVYACEVTHQGLSSPVTKSFNRGEC

SEQ ID NO: 26348 - protein, 106 aa, synthetic construct
  REGION 1..106: note = Description of Artificial Sequence: Synthetic polypeptide
  REGION 1..106: note = VL of XENP022346
EIVLTQSPATLSLSPGERATLSCSASSSVSYMHWYQQKPGQAPRLLIYDTSKLASGIPARFSGSGSGTDYTLTISSLEPEDFAVYYCFQGSGYPYTFGQGTKLEIK

SEQ ID NO: 26349 - protein, 10 aa, synthetic construct
  REGION 1..10: note = Description of Artificial Sequence: Synthetic peptide
  REGION 1..10: note = XENP022346 vlCDR1
SASSSVSYMH

SEQ ID NO: 26350 - protein, 7 aa, synthetic construct
  REGION 1..7: note = Description of Artificial Sequence: Synthetic peptide
  REGION 1..7: note = XENP022346 vlCDR2
DTSKLAS

SEQ ID NO: 26351 - protein, 9 aa, synthetic construct
  REGION 1..9: note = Description of Artificial Sequence: Synthetic peptide
  REGION 1..9: note = XENP022346 vlCDR3
FQGSGYPYT

SEQ ID NO: 26352 - protein, 446 aa, synthetic construct
  REGION 1..446: note = Description of Artificial Sequence: Synthetic polypeptide
  REGION 1..446: note = XENP023057 Jounce_37A10S713[ICOS]_H0L0_IgG1_PVA_/S267K Heavy Chain
EVQLVESGGGLVQPGGSLRLSCAASGFTFSDYWMDWVRQAPGKGLVWVSNIDEDGSITEYSPFVKGRFTISRDNAKNTLYLQMNSLRAEDTAVYYCTRWGRFGFDSWGQGTLVTVSSASTKGPSVFPLAPSSKSTSGGTAALGCLVKDYFPEPVTVSWNSGALTSGVHTFPAVLQSSGLYSLSSVVTVPSSSLGTQTYICNVNHKPSNTKVDKKVEPKSCDKTHTCPPCPAPPVAGPSVFLFPPKPKDTLMISRTPEVTCVVVDVKHEDPEVKFNWYVDGVEVHNAKTKPREEQYNSTYRVVSVLTVLHQDWLNGKEYKCKVSNKALPAPIEKTISKAKGQPREPQVYTLPPSREEMTKNQVSLTCLVKGFYPSDIAVEWESNGQPENNYKTTPPVLDSDGSFFLYSKLTVDKSRWQQGNVFSCSVMHEALHNHYTQKSLSLSPGK

SEQ ID NO: 26353 - protein, 117 aa, synthetic construct
  REGION 1..117: note = Description of Artificial Sequence: Synthetic polypeptide
  REGION 1..117: note = VH of XENP023057
EVQLVESGGGLVQPGGSLRLSCAASGFTFSDYWMDWVRQAPGKGLVWVSNIDEDGSITEYSPFVKGRFTISRDNAKNTLYLQMNSLRAEDTAVYYCTRWGRFGFDSWGQGTLVTVSS

SEQ ID NO: 26354 - protein, 5 aa, synthetic construct
  REGION 1..5: note = Description of Artificial Sequence: Synthetic peptide
  REGION 1..5: note = XENP023057 vhCDR1
DYWMD

SEQ ID NO: 26355 - protein, 17 aa, synthetic construct
  REGION 1..17: note = Description of Artificial Sequence: Synthetic peptide
  REGION 1..17: note = XENP023057 vhCDR2
NIDEDGSITEYSPFVKG

SEQ ID NO: 26356 - protein, 8 aa, synthetic construct
  REGION 1..8: note = Description of Artificial Sequence: Synthetic peptide
  REGION 1..8: note = XENP023057 vhCDR3
WGRFGFDS

SEQ ID NO: 26357 - protein, 218 aa, synthetic construct
  REGION 1..218: note = Description of Artificial Sequence: Synthetic polypeptide
  REGION 1..218: note = XENP023057 Jounce_37A10S713[ICOS]_H0L0_IgG1_PVA_/S267K Light Chain
DIVMTQSPDSLAVSLGERATINCKSSQSLLSGSFNYLTWYQQKPGQPPKLLIFYASTRHTGVPDRFSGSGSGTDFTLTISSLQAEDVAVYYCHHHYNAPPTFGPGTKVDIKRTVAAPSVFIFPPSDEQLKSGTASVVCLLNNFYPREAKVQWKVDNALQSGNSQESVTEQDSKDSTYSLSSTLTLSKADYEKHKVYACEVTHQGLSSPVTKSFNRGEC

SEQ ID NO: 26358 - protein, 111 aa, synthetic construct
  REGION 1..111: note = Description of Artificial Sequence: Synthetic polypeptide
  REGION 1..111: note = VL of XENP023057
DIVMTQSPDSLAVSLGERATINCKSSQSLLSGSFNYLTWYQQKPGQPPKLLIFYASTRHTGVPDRFSGSGSGTDFTLTISSLQAEDVAVYYCHHHYNAPPTFGPGTKVDIK

SEQ ID NO: 26359 - protein, 15 aa, synthetic construct
  REGION 1..15: note = Description of Artificial Sequence: Synthetic peptide
  REGION 1..15: note = XENP023057 vlCDR1
KSSQSLLSGSFNYLT

SEQ ID NO: 26360 - protein, 7 aa, synthetic construct
  REGION 1..7: note = Description of Artificial Sequence: Synthetic peptide
  REGION 1..7: note = XENP023057 vlCDR2
YASTRHT

SEQ ID NO: 26361 - protein, 9 aa, synthetic construct
  REGION 1..9: note = Description of Artificial Sequence: Synthetic peptide
  REGION 1..9: note = XENP023057 vlCDR3
HHHYNAPPT

SEQ ID NO: 26362 - protein, 454 aa, synthetic construct
  REGION 1..454: note = Description of Artificial Sequence: Synthetic polypeptide
  REGION 1..454: note = XENP022730 [ICOS]_H0L0_Fab-1G6_L1.194_H1.279 Fab-Fc Heavy Chain
QVQLVQSGAEVKKPGASVKVSCKASGYTFTGYYMHWVRQAPGQGLEWMGWINPHSGGTNYAQKFQGRVTMTRDTSISTAYMELSRLRSDDTAVYYCARTYYYDSSGYYHDAFDIWGQGTMVTVSSASTKGPSVFPLAPSSKSTSGGTAALGCLVKDYFPEPVTVSWNSGALTSGVHTFPAVLQSSGLYSLSSVVTVPSSSLGTQTYICNVNHKPSDTKVDKKVEPKSCDKTHTCPPCPAPPVAGPSVFLFPPKPKDTLMISRTPEVTCVVVDVKHEDPEVKFNWYVDGVEVHNAKTKPREEEYNSTYRVVSVLTVLHQDWLNGKEYKCKVSNKALPAPIEKTISKAKGQPREPQVYTLPPSREEMTKNQVSLTCDVSGFYPSDIAVEWESDGQPENNYKTTPPVLDSDGSFFLYSKLTVDKSRWEQGDVFSCSVLHEALHSHYTQKSLSLSPGK

SEQ ID NO: 26363 - protein, 125 aa, synthetic construct; identical to SEQ ID NO: 26293
  REGION 1..125: note = Description of Artificial Sequence: Synthetic polypeptide
  REGION 1..125: note = VH of XENP022730

SEQ ID NO: 26364 - protein, 5 aa, synthetic construct
  REGION 1..5: note = Description of Artificial Sequence: Synthetic peptide
  REGION 1..5: note = XENP022730 vhCDR1
GYYMH

SEQ ID NO: 26365 - protein, 17 aa, synthetic construct
  REGION 1..17: note = Description of Artificial Sequence: Synthetic peptide
  REGION 1..17: note = XENP022730 vhCDR2
WINPHSGGTNYAQKFQG

SEQ ID NO: 26366 - protein, 16 aa, synthetic construct
  REGION 1..16: note = Description of Artificial Sequence: Synthetic peptide
  REGION 1..16: note = XENP022730 vhCDR3
TYYYDSSGYYHDAFDI

SEQ ID NO: 26367 - protein, 480 aa, synthetic construct; identical to SEQ ID NO: 2930
  REGION 1..480: note = Description of Artificial Sequence: Synthetic polypeptide
  REGION 1..480: note = XENP022730 [ICOS]_H0L0_Fab-1G6_L1.194_H1.279 scFv-Fc Heavy Chain

SEQ ID NO: 26368 - protein, 107 aa, synthetic construct; identical to SEQ ID NO: 2871
  REGION 1..107: note = Description of Artificial Sequence: Synthetic polypeptide
  REGION 1..107: note = VH of XENP022730

SEQ ID NO: 26369 - protein, 122 aa, synthetic construct; identical to SEQ ID NO: 2872
  REGION 1..122: note = Description of Artificial Sequence: Synthetic polypeptide
  REGION 1..122: note = VL of XENP022730

SEQ ID NO: 26370 - protein, 231 aa, synthetic construct; identical to SEQ ID NO: 2409
  REGION 1..231: note = Description of Artificial Sequence: Synthetic polypeptide
  REGION 1..231: note = Fc chain of XENP022730

SEQ ID NO: 26371 - protein, 11 aa, synthetic construct
  REGION 1..11: note = Description of Artificial Sequence: Synthetic peptide
  REGION 1..11: note = XENP022730 vhCDR1
RASQSVGNDVA

SEQ ID NO: 26372 - protein, 7 aa, synthetic construct
  REGION 1..7: note = Description of Artificial Sequence: Synthetic peptide
  REGION 1..7: note = XENP022730 vhCDR2
YASHRYT

SEQ ID NO: 26373 - protein, 9 aa, synthetic construct
  REGION 1..9: note = Description of Artificial Sequence: Synthetic peptide
  REGION 1..9: note = XENP022730 vhCDR3
QQDFSSPRT

SEQ ID NO: 26374 - protein, 5 aa, synthetic construct
  REGION 1..5: note = Description of Artificial Sequence: Synthetic peptide
  REGION 1..5: note = XENP022730 vlCDR1
NYWMN

SEQ ID NO: 26375 - protein, 19 aa, synthetic construct
  REGION 1..19: note = Description of Artificial Sequence: Synthetic peptide
  REGION 1..19: note = XENP022730 vlCDR2
EIRLYSNNYATHYAESVKG

SEQ ID NO: 26376 - protein, 11 aa, synthetic construct
  REGION 1..11: note = Description of Artificial Sequence: Synthetic peptide
  REGION 1..11: note = XENP022730 vlCDR3
YYGNYGGYFDV

SEQ ID NO: 26377 - protein, 214 aa, synthetic construct; identical to SEQ ID NO: 26297
  REGION 1..214: note = Description of Artificial Sequence: Synthetic polypeptide
  REGION 1..214: note = XENP022730 [ICOS]_H0L0_Fab-1G6_L1.194_H1.279 Light Chain

SEQ ID NO: 26378 - protein, 107 aa, synthetic construct; identical to SEQ ID NO: 26298
  REGION 1..107: note = Description of Artificial Sequence: Synthetic polypeptide
  REGION 1..107: note = VL of XENP022730

SEQ ID NO: 26379 - protein, 11 aa, synthetic construct
  REGION 1..11: note = Description of Artificial Sequence: Synthetic peptide
  REGION 1..11: note = XENP022730 vlCDR1
RASQGISRLLA

SEQ ID NO: 26380 - protein, 7 aa, synthetic construct
  REGION 1..7: note = Description of Artificial Sequence: Synthetic peptide
  REGION 1..7: note = XENP022730 vlCDR2
VASSLQS

SEQ ID NO: 26381 - protein, 9 aa, synthetic construct
  REGION 1..9: note = Description of Artificial Sequence: Synthetic peptide
  REGION 1..9: note = XENP022730 vlCDR3
QQANSFPWT

SEQ ID NO: 26382 - protein, 447 aa, synthetic construct
  REGION 1..447: note = Description of Artificial Sequence: Synthetic polypeptide
  REGION 1..447: note = XENP023377 11D4[OX40]_H0L0_Fab-1G6_L1.194_H1.279_scFv Fab-Fc Heavy Chain
EVQLVESGGGLVQPGGSLRLSCAASGFTFSSYSMNWVRQAPGKGLEWVSYISSSSSTIDYADSVKGRFTISRDNAKNSLYLQMNSLRDEDTAVYYCARESGWYLFDYWGQGTLVTVSSASTKGPSVFPLAPSSKSTSGGTAALGCLVKDYFPEPVTVSWNSGALTSGVHTFPAVLQSSGLYSLSSVVTVPSSSLGTQTYICNVNHKPSDTKVDKKVEPKSCDKTHTCPPCPAPPVAGPSVFLFPPKPKDTLMISRTPEVTCVVVDVKHEDPEVKFNWYVDGVEVHNAKTKPREEEYNSTYRVVSVLTVLHQDWLNGKEYKCKVSNKALPAPIEKTISKAKGQPREPQVYTLPPSREEMTKNQVSLTCDVSGFYPSDIAVEWESDGQPENNYKTTPPVLDSDGSFFLYSKLTVDKSRWEQGDVFSCSVMHEALHNHYTQKSLSLSPGK

SEQ ID NO: 26383 - protein, 118 aa, synthetic construct; identical to SEQ ID NO: 26273
  REGION 1..118: note = Description of Artificial Sequence: Synthetic polypeptide
  REGION 1..118: note = VH of XENP023377

SEQ ID NO: 26384 - protein, 5 aa, synthetic construct
  REGION 1..5: note = Description of Artificial Sequence: Synthetic peptide
  REGION 1..5: note = XENP023377 vhCDR1
SYSMN

SEQ ID NO: 26385 - protein, 11 aa, synthetic construct
  REGION 1..11: note = Description of Artificial Sequence: Synthetic peptide
  REGION 1..11: note = XENP023377 vhCDR2
YISSSSSTIDY

SEQ ID NO: 26386 - protein, 9 aa, synthetic construct
  REGION 1..9: note = Description of Artificial Sequence: Synthetic peptide
  REGION 1..9: note = XENP023377 vhCDR3
ESGWYLFDY

SEQ ID NO: 26387 - protein, 480 aa, synthetic construct; identical to SEQ ID NO: 2870
  REGION 1..480: note = Description of Artificial Sequence: Synthetic polypeptide
  REGION 1..480: note = XENP023377 11D4[OX40]_H0L0_Fab-1G6_L1.194_H1.279_scFv scFv-Fc Heavy Chain

SEQ ID NO: 26388 - protein, 107 aa, synthetic construct; identical to SEQ ID NO: 2871
  REGION 1..107: note = Description of Artificial Sequence: Synthetic polypeptide
  REGION 1..107: note = VH of XENP023377

SEQ ID NO: 26389 - protein, 122 aa, synthetic construct; identical to SEQ ID NO: 2872
  REGION 1..122: note = Description of Artificial Sequence: Synthetic polypeptide
  REGION 1..122: note = VL of XENP023377

SEQ ID NO: 26390 - protein, 231 aa, synthetic construct; identical to SEQ ID NO: 2397
  REGION 1..231: note = Description of Artificial Sequence: Synthetic polypeptide
  REGION 1..231: note = Fc chain of XENP023377

SEQ ID NO: 26391 - protein, 11 aa, synthetic construct
  REGION 1..11: note = Description of Artificial Sequence: Synthetic peptide
  REGION 1..11: note = XENP023377 vhCDR1
RASQSVGNDVA

SEQ ID NO: 26392 - protein, 7 aa, synthetic construct
  REGION 1..7: note = Description of Artificial Sequence: Synthetic peptide
  REGION 1..7: note = XENP023377 vhCDR2
YASHRYT

SEQ ID NO: 26393 - protein, 9 aa, synthetic construct
  REGION 1..9: note = Description of Artificial Sequence: Synthetic peptide
  REGION 1..9: note = XENP023377 vhCDR3
QQDFSSPRT

SEQ ID NO: 26394 - protein, 5 aa, synthetic construct
  REGION 1..5: note = Description of Artificial Sequence: Synthetic peptide
  REGION 1..5: note = XENP023377 vlCDR1
NYWMN

SEQ ID NO: 26395 - protein, 19 aa, synthetic construct
  REGION 1..19: note = Description of Artificial Sequence: Synthetic peptide
  REGION 1..19: note = XENP023377 vlCDR2
EIRLYSNNYATHYAESVKG

SEQ ID NO: 26396 - protein, 11 aa, synthetic construct
  REGION 1..11: note = Description of Artificial Sequence: Synthetic peptide
  REGION 1..11: note = XENP023377 vlCDR3
YYGNYGGYFDV

SEQ ID NO: 26397 - protein, 214 aa, synthetic construct; identical to SEQ ID NO: 26277
  REGION 1..214: note = Description of Artificial Sequence: Synthetic polypeptide
  REGION 1..214: note = XENP023377 11D4[OX40]_H0L0_Fab-1G6_L1.194_H1.279_scFv Light Chain

SEQ ID NO: 26398 - protein, 107 aa, synthetic construct; identical to SEQ ID NO: 26278
  REGION 1..107: note = Description of Artificial Sequence: Synthetic polypeptide
  REGION 1..107: note = VL of XENP023377

SEQ ID NO: 26399 - protein, 11 aa, synthetic construct
  REGION 1..11: note = Description of Artificial Sequence: Synthetic peptide
  REGION 1..11: note = XENP023377 vlCDR1
RASQGISSWLA

SEQ ID NO: 26400 - protein, 7 aa, synthetic construct
  REGION 1..7: note = Description of Artificial Sequence: Synthetic peptide
  REGION 1..7: note = XENP023377 vlCDR2
AASSLQS

SEQ ID NO: 26401 - protein, 9 aa, synthetic construct
  REGION 1..9: note = Description of Artificial Sequence: Synthetic peptide
  REGION 1..9: note = XENP023377 vlCDR3
QQYNSYPPT

SEQ ID NO: 26402 - protein, 451 aa, synthetic construct
  REGION 1..451: note = Description of Artificial Sequence: Synthetic polypeptide
  REGION 1..451: note = XENP023378 1D8[GITR]_H0L0_Fab-1G6_L1.194_H1.279_scFv Fab-Fc Heavy Chain
QVTLKESGPGILKPSQTLSLTCSFSGFSLSTSGMGVGWIRQPSGKGLEWLAHIWWDDDKYYSPSLKSQLTISKDTSRNQVFLKITSLDTADTATYYCVRSYYYGSSGAMDYWGQGTSVTVSSASTKGPSVFPLAPSSKSTSGGTAALGCLVKDYFPEPVTVSWNSGALTSGVHTFPAVLQSSGLYSLSSVVTVPSSSLGTQTYICNVNHKPSDTKVDKKVEPKSCDKTHTCPPCPAPPVAGPSVFLFPPKPKDTLMISRTPEVTCVVVDVKHEDPEVKFNWYVDGVEVHNAKTKPREEEYNSTYRVVSVLTVLHQDWLNGKEYKCKVSNKALPAPIEKTISKAKGQPREPQVYTLPPSREEMTKNQVSLTCDVSGFYPSDIAVEWESDGQPENNYKTTPPVLDSDGSFFLYSKLTVDKSRWEQGDVFSCSVMHEALHNHYTQKSLSLSPGK

SEQ ID NO: 26403 - protein, 122 aa, synthetic construct; identical to SEQ ID NO: 26283
  REGION 1..122: note = Description of Artificial Sequence: Synthetic polypeptide
  REGION 1..122: note = VH of XENP023378

SEQ ID NO: 26404 - protein, 7 aa, synthetic construct
  REGION 1..7: note = Description of Artificial Sequence: Synthetic peptide
  REGION 1..7: note = XENP023378 vhCDR1
TSGMGVG

SEQ ID NO: 26405 - protein, 9 aa, synthetic construct
  REGION 1..9: note = Description of Artificial Sequence: Synthetic peptide
  REGION 1..9: note = XENP023378 vhCDR2
HIWWDDDKY

SEQ ID NO: 26406 - protein, 12 aa, synthetic construct
  REGION 1..12: note = Description of Artificial Sequence: Synthetic peptide
  REGION 1..12: note = XENP023378 vhCDR3
SYYYGSSGAMDY

SEQ ID NO: 26407 - protein, 480 aa, synthetic construct; identical to SEQ ID NO: 2870
  REGION 1..480: note = Description of Artificial Sequence: Synthetic polypeptide
  REGION 1..480: note = XENP023378 1D8[GITR]_H0L0_Fab-1G6_L1.194_H1.279_scFv scFv-Fc Heavy Chain

SEQ ID NO: 26408 - protein, 107 aa, synthetic construct; identical to SEQ ID NO: 2871
  REGION 1..107: note = Description of Artificial Sequence: Synthetic polypeptide
  REGION 1..107: note = VH of XENP023378

SEQ ID NO: 26409 - protein, 122 aa, synthetic construct; identical to SEQ ID NO: 2872
  REGION 1..122: note = Description of Artificial Sequence: Synthetic polypeptide
  REGION 1..122: note = VL of XENP023378

SEQ ID NO: 26410 - protein, 231 aa, synthetic construct; identical to SEQ ID NO: 2397
  REGION 1..231: note = Description of Artificial Sequence: Synthetic polypeptide
  REGION 1..231: note = Fc chain of XENP023378

SEQ ID NO: 26411 - protein, 11 aa, synthetic construct
  REGION 1..11: note = Description of Artificial Sequence: Synthetic peptide
  REGION 1..11: note = XENP023378 vhCDR1
RASQSVGNDVA

SEQ ID NO: 26412 - protein, 7 aa, synthetic construct
  REGION 1..7: note = Description of Artificial Sequence: Synthetic peptide
  REGION 1..7: note = XENP023378 vhCDR2
YASHRYT

SEQ ID NO: 26413 - protein, 9 aa, synthetic construct
  REGION 1..9: note = Description of Artificial Sequence: Synthetic peptide
  REGION 1..9: note = XENP023378 vhCDR3
QQDFSSPRT

SEQ ID NO: 26414 - protein, 5 aa, synthetic construct
  REGION 1..5: note = Description of Artificial Sequence: Synthetic peptide
  REGION 1..5: note = XENP023378 vlCDR1
NYWMN

SEQ ID NO: 26415 - protein, 19 aa, synthetic construct
  REGION 1..19: note = Description of Artificial Sequence: Synthetic peptide
  REGION 1..19: note = XENP023378 vlCDR2
EIRLYSNNYATHYAESVKG

SEQ ID NO: 26416 - protein, 11 aa, synthetic construct
  REGION 1..11: note = Description of Artificial Sequence: Synthetic peptide
  REGION 1..11: note = XENP023378 vlCDR3
YYGNYGGYFDV

SEQ ID NO: 26417 - protein, 219 aa, synthetic construct; identical to SEQ ID NO: 26287
  REGION 1..219: note = Description of Artificial Sequence: Synthetic polypeptide
  REGION 1..219: note = XENP023378 1D8[GITR]_H0L0_Fab-1G6_L1.194_H1.279_scFv Light Chain

SEQ ID NO: 26418 - protein, 112 aa, synthetic construct; identical to SEQ ID NO: 26288
  REGION 1..112: note = Description of Artificial Sequence: Synthetic polypeptide
  REGION 1..112: note = VL of XENP023378

SEQ ID NO: 26419 - protein, 16 aa, synthetic construct
  REGION 1..16: note = Description of Artificial Sequence: Synthetic peptide
  REGION 1..16: note = XENP023378 vlCDR1
RSSQSLVHSDGNTYLH

SEQ ID NO: 26420 - protein, 6 aa, synthetic construct
  REGION 1..6: note = Description of Artificial Sequence: Synthetic peptide
  REGION 1..6: note = XENP023378 vlCDR2
KVSKRF

SEQ ID NO: 26421 - protein, 9 aa, synthetic construct
  REGION 1..9: note = Description of Artificial Sequence: Synthetic peptide
  REGION 1..9: note = XENP023378 vlCDR3
SQSTHVPPT

SEQ ID NO: 26422 - protein, 450 aa, synthetic construct
  REGION 1..450: note = Description of Artificial Sequence: Synthetic polypeptide
  REGION 1..450: note = XENP023379 20H4.9[4-1BB]_H0L0_Fab-1G6_L1.194_H1.279_scFv Fab-Fc Heavy Chain
QVQLQQWGAGLLKPSETLSLTCAVYGGSFSGYYWSWIRQSPEKGLEWIGEINHGGYVTYNPSLESRVTISVDTSKNQFSLKLSSVTAADTAVYYCARDYGPGNYDWYFDLWGRGTLVTVSSASTKGPSVFPLAPSSKSTSGGTAALGCLVKDYFPEPVTVSWNSGALTSGVHTFPAVLQSSGLYSLSSVVTVPSSSLGTQTYICNVNHKPSDTKVDKKVEPKSCDKTHTCPPCPAPPVAGPSVFLFPPKPKDTLMISRTPEVTCVVVDVKHEDPEVKFNWYVDGVEVHNAKTKPREEEYNSTYRVVSVLTVLHQDWLNGKEYKCKVSNKALPAPIEKTISKAKGQPREPQVYTLPPSREEMTKNQVSLTCDVSGFYPSDIAVEWESDGQPENNYKTTPPVLDSDGSFFLYSKLTVDKSRWEQGDVFSCSVMHEALHNHYTQKSLSLSPGK

SEQ ID NO: 26423 - protein, 121 aa, synthetic construct [sequence omitted]

SEQ ID NO: 26424 - protein, 5 aa, synthetic construct
  REGION 1..5: note = Description of Artificial Sequence: Synthetic peptide
  REGION 1..5: note = XENP023379 vhCDR1
GYYWS

SEQ ID NO: 26425 - protein, 11 aa, synthetic construct
  REGION 1..11: note = Description of Artificial Sequence: Synthetic peptide
  REGION 1..11: note = XENP023379 vhCDR2
EINHGGYVTYN

SEQ ID NO: 26426 - protein, 13 aa, synthetic construct
  REGION 1..13: note = Description of Artificial Sequence: Synthetic peptide
  REGION 1..13: note = XENP023379 vhCDR3
DYGPGNYDWYFDL

SEQ ID NO: 26427 - protein, 480 aa, synthetic construct; identical to SEQ ID NO: 2870
  REGION 1..480: note = Description of Artificial Sequence: Synthetic polypeptide
  REGION 1..480: note = XENP023379 20H4.9[4-1BB]_H0L0_Fab-1G6_L1.194_H1.279_scFv scFv-Fc Heavy Chain

SEQ ID NO: 26428 - protein, 107 aa, synthetic construct; identical to SEQ ID NO: 2871
  REGION 1..107: note = Description of Artificial Sequence: Synthetic polypeptide
  REGION 1..107: note = VH of XENP023379

SEQ ID NO: 26429 - protein, 122 aa, synthetic construct; identical to SEQ ID NO: 2872
  REGION 1..122: note = Description of Artificial Sequence: Synthetic polypeptide
  REGION 1..122: note = VL of XENP023379

SEQ ID NO: 26430 - protein, 231 aa, synthetic construct; identical to SEQ ID NO: 2397
  REGION 1..231: note = Description of Artificial Sequence: Synthetic polypeptide
  REGION 1..231: note = Fc chain of XENP023379

SEQ ID NO: 26431 - protein, 11 aa, synthetic construct
  REGION 1..11: note = Description of Artificial Sequence: Synthetic peptide
  REGION 1..11: note = XENP023379 vhCDR1
RASQSVGNDVA

SEQ ID NO: 26432 - protein, 7 aa, synthetic construct
  REGION 1..7: note = Description of Artificial Sequence: Synthetic peptide
  REGION 1..7: note = XENP023379 vhCDR2
YASHRYT

SEQ ID NO: 26433 - protein, 9 aa, synthetic construct
  REGION 1..9: note = Description of Artificial Sequence: Synthetic peptide
  REGION 1..9: note = XENP023379 vhCDR3
QQDFSSPRT

SEQ ID NO: 26434 - protein, 5 aa, synthetic construct
  REGION 1..5: note = Description of Artificial Sequence: Synthetic peptide
  REGION 1..5: note = XENP023379 vlCDR1
NYWMN

SEQ ID NO: 26435 - protein, 19 aa, synthetic construct
  REGION 1..19: note = Description of Artificial Sequence: Synthetic peptide
  REGION 1..19: note = XENP023379 vlCDR2
EIRLYSNNYATHYAESVKG

SEQ ID NO: 26436 - protein, 11 aa, synthetic construct
  REGION 1..11: note = Description of Artificial Sequence: Synthetic peptide
  REGION 1..11: note = XENP023379 vlCDR3
YYGNYGGYFDV

SEQ ID NO: 26437 - protein, 216 aa, synthetic construct; identical to SEQ ID NO: 26267
  REGION 1..216: note = Description of Artificial Sequence: Synthetic polypeptide
  REGION 1..216: note = XENP023379 20H4.9[4-1BB]_H0L0_Fab-1G6_L1.194_H1.279_scFv Light Chain

SEQ ID NO: 26438 - protein, 109 aa, synthetic construct [sequence omitted]

SEQ ID NO: 26439 - protein, 11 aa, synthetic construct
  REGION 1..11: note = Description of Artificial Sequence: Synthetic peptide
  REGION 1..11: note = XENP023379 vlCDR1
RASQSVSSYLA

SEQ ID NO: 26440 - protein, 7 aa, synthetic construct
  REGION 1..7: note = Description of Artificial Sequence: Synthetic peptide
  REGION 1..7: note = XENP023379 vlCDR2
DASNRAT

SEQ ID NO: 26441 - protein, 11 aa, synthetic construct
  REGION 1..11: note = Description of Artificial Sequence: Synthetic peptide
  REGION 1..11: note = XENP023379 vlCDR3
QQRSNWPPALT

SEQ ID NO: 26442 - protein, 454 aa, synthetic construct
  REGION 1..454: note = Description of Artificial Sequence: Synthetic polypeptide
  REGION 1..454: note = XENP020896 [ICOS]_H0L0_Fab-1G6_L1.194_H1.279 Fab-Fc Heavy Chain
QVQLVQSGAEVKKPGASVKVSCKASGYTFTGYYMHWVRQAPGQGLEWMGWINPHSGGTNYAQKFQGRVTMTRDTSISTAYMELSRLRSDDTAVYYCARTYYYDSSGYYHDAFDIWGQGTMVTVSSASTKGPSVFPLAPSSKSTSGGTAALGCLVKDYFPEPVTVSWNSGALTSGVHTFPAVLQSSGLYSLSSVVTVPSSSLGTQTYICNVNHKPSDTKVDKKVEPKSCDKTHTCPPCPAPPVAGPSVFLFPPKPKDTLMISRTPEVTCVVVDVKHEDPEVKFNWYVDGVEVHNAKTKPREEEYNSTYRVVSVLTVLHQDWLNGKEYKCKVSNKALPAPIEKTISKAKGQPREPQVYTLPPSREEMTKNQVSLTCDVSGFYPSDIAVEWESDGQPENNYKTTPPVLDSDGSFFLYSKLTVDKSRWEQGDVFSCSVMHEALHNHYTQKSLSLSPGK

SEQ ID NO: 26443 - protein, 125 aa, synthetic construct; identical to SEQ ID NO: 26293
  REGION 1..125: note = Description of Artificial Sequence: Synthetic polypeptide
  REGION 1..125: note = VH of XENP020896

SEQ ID NO: 26444 - protein, 5 aa, synthetic construct
  REGION 1..5: note = Description of Artificial Sequence: Synthetic peptide
  REGION 1..5: note = XENP020896 vhCDR1
GYYMH

SEQ ID NO: 26445 - protein, 17 aa, synthetic construct
  REGION 1..17: note = Description of Artificial Sequence: Synthetic peptide
  REGION 1..17: note = XENP020896 vhCDR2
WINPHSGGTNYAQKFQG

SEQ ID NO: 26446 - protein, 16 aa, synthetic construct
  REGION 1..16: note = Description of Artificial Sequence: Synthetic peptide
  REGION 1..16: note = XENP020896 vhCDR3
TYYYDSSGYYHDAFDI

SEQ ID NO: 26447 - protein, 480 aa, synthetic construct; identical to SEQ ID NO: 2870
  REGION 1..480: note = Description of Artificial Sequence: Synthetic polypeptide
  REGION 1..480: note = XENP020896 [ICOS]_H0L0_Fab-1G6_L1.194_H1.279 scFv-Fc Heavy Chain

SEQ ID NO: 26448 - protein, 107 aa, synthetic construct; identical to SEQ ID NO: 2871
  REGION 1..107: note = Description of Artificial Sequence: Synthetic polypeptide
  REGION 1..107: note = VH of XENP020896

SEQ ID NO: 26449 - protein, 122 aa, synthetic construct; identical to SEQ ID NO: 2872
  REGION 1..122: note = Description of Artificial Sequence: Synthetic polypeptide
  REGION 1..122: note = VL of XENP020896

SEQ ID NO: 26450 - protein, 231 aa, synthetic construct; identical to SEQ ID NO: 2397
  REGION 1..231: note = Description of Artificial Sequence: Synthetic polypeptide
  REGION 1..231: note = Fc chain of XENP020896

SEQ ID NO: 26451 - protein, 11 aa, synthetic construct
  REGION 1..11: note = Description of Artificial Sequence: Synthetic peptide
  REGION 1..11: note = XENP020896 vhCDR1
RASQSVGNDVA

SEQ ID NO: 26452 - protein, 7 aa, synthetic construct
  REGION 1..7: note = Description of Artificial Sequence: Synthetic peptide
  REGION 1..7: note = XENP020896 vhCDR2
YASHRYT

SEQ ID NO: 26453 - protein, 9 aa, synthetic construct
  REGION 1..9: note = Description of Artificial Sequence: Synthetic peptide
  REGION 1..9: note = XENP020896 vhCDR3
QQDFSSPRT

SEQ ID NO: 26454 - protein, 5 aa, synthetic construct
  REGION 1..5: note = Description of Artificial Sequence: Synthetic peptide
  REGION 1..5: note = XENP020896 vlCDR1
NYWMN

SEQ ID NO: 26455 - protein, 19 aa, synthetic construct
  REGION 1..19: note = Description of Artificial Sequence: Synthetic peptide
  REGION 1..19: note = XENP020896 vlCDR2
EIRLYSNNYATHYAESVKG

SEQ ID NO: 26456 - protein, 11 aa, synthetic construct
  REGION 1..11: note = Description of Artificial Sequence: Synthetic peptide
  REGION 1..11: note = XENP020896 vlCDR3
YYGNYGGYFDV

SEQ ID NO: 26457 - protein, 214 aa, synthetic construct; identical to SEQ ID NO: 26297
  REGION 1..214: note = Description of Artificial Sequence: Synthetic polypeptide
  REGION 1..214: note = XENP020896 [ICOS]_H0L0_Fab-1G6_L1.194_H1.279 Light Chain

SEQ ID NO: 26458 - protein, 107 aa, synthetic construct; identical to SEQ ID NO: 26298
  REGION 1..107: note = Description of Artificial Sequence: Synthetic polypeptide
  REGION 1..107: note = VL of XENP020896

SEQ ID NO: 26459 - protein, 11 aa, synthetic construct
  REGION 1..11: note = Description of Artificial Sequence: Synthetic peptide
  REGION 1..11: note = XENP020896 vlCDR1
RASQGISRLLA

SEQ ID NO: 26460 - protein, 7 aa, synthetic construct
  REGION 1..7: note = Description of Artificial Sequence: Synthetic peptide
  REGION 1..7: note = XENP020896 vlCDR2
VASSLQS

SEQ ID NO: 26461 - protein, 9 aa, synthetic construct
  REGION 1..9: note = Description of Artificial Sequence: Synthetic peptide
  REGION 1..9: note = XENP020896 vlCDR3
QQANSFPWT

SEQ ID NO: 26462 - protein, 454 aa, synthetic construct; identical to SEQ ID NO: 26442
  REGION 1..454: note = Description of Artificial Sequence: Synthetic polypeptide
  REGION 1..454: note = XENP022433 [ICOS]_H0_L0.7_Fab-1G6_L1.194_H1.279 Fab-Fc Heavy Chain

SEQ ID NO: 26463 - protein, 125 aa, synthetic construct; identical to SEQ ID NO: 26293
  REGION 1..125: note = Description of Artificial Sequence: Synthetic polypeptide
  REGION 1..125: note = VH of XENP022433

SEQ ID NO: 26464 - protein, 5 aa, synthetic construct
  REGION 1..5: note = Description of Artificial Sequence: Synthetic peptide
  REGION 1..5: note = XENP022433 vhCDR1
GYYMH

SEQ ID NO: 26465 - protein, 17 aa, synthetic construct
  REGION 1..17: note = Description of Artificial Sequence: Synthetic peptide
  REGION 1..17: note = XENP022433 vhCDR2
WINPHSGGTNYAQKFQG

SEQ ID NO: 26466 - protein, 16 aa, synthetic construct
  REGION 1..16: note = Description of Artificial Sequence: Synthetic peptide
  REGION 1..16: note = XENP022433 vhCDR3
TYYYDSSGYYHDAFDI

SEQ ID NO: 26467 - protein, 480 aa, synthetic construct; identical to SEQ ID NO: 2870
  REGION 1..480: note = Description of Artificial Sequence: Synthetic polypeptide
  REGION 1..480: note = XENP022433 [ICOS]_H0_L0.7_Fab-1G6_L1.194_H1.279 scFv-Fc Heavy Chain

SEQ ID NO: 26468 - protein, 107 aa, synthetic construct; identical to SEQ ID NO: 2871
  REGION 1..107: note = Description of Artificial Sequence: Synthetic polypeptide
  REGION 1..107: note = VH of XENP022433

SEQ ID NO: 26469 - protein, 122 aa, synthetic construct; identical to SEQ ID NO: 2872
  REGION 1..122: note = Description of Artificial Sequence: Synthetic polypeptide
  REGION 1..122: note = VL of XENP022433

SEQ ID NO: 26470 - protein, 231 aa, synthetic construct; identical to SEQ ID NO: 2397
  REGION 1..231: note = Description of Artificial Sequence: Synthetic polypeptide
  REGION 1..231: note = Fc chain of XENP022433

SEQ ID NO: 26471 - protein, 11 aa, synthetic construct
  REGION 1..11: note = Description of Artificial Sequence: Synthetic peptide
  REGION 1..11: note = XENP022433 vhCDR1
RASQSVGNDVA

SEQ ID NO: 26472 - protein, 7 aa, synthetic construct
  REGION 1..7: note = Description of Artificial Sequence: Synthetic peptide
  REGION 1..7: note = XENP022433 vhCDR2
YASHRYT

SEQ ID NO: 26473 - protein, 9 aa, synthetic construct
  REGION 1..9: note = Description of Artificial Sequence: Synthetic peptide
  REGION 1..9: note = XENP022433 vhCDR3
QQDFSSPRT

SEQ ID NO: 26474 - protein, 5 aa, synthetic construct
  REGION 1..5: note = Description of Artificial Sequence: Synthetic peptide
  REGION 1..5: note = XENP022433 vlCDR1
NYWMN

SEQ ID NO: 26475 - protein, 19 aa, synthetic construct
  REGION 1..19: note = Description of Artificial Sequence: Synthetic peptide
  REGION 1..19: note = XENP022433 vlCDR2
EIRLYSNNYATHYAESVKG

SEQ ID NO: 26476 - protein, 11 aa, synthetic construct
  REGION 1..11: note = Description of Artificial Sequence: Synthetic peptide
  REGION 1..11: note = XENP022433 vlCDR3
YYGNYGGYFDV

SEQ ID NO: 26477 - protein, 214 aa, synthetic construct
  REGION 1..214: note = Description of Artificial Sequence: Synthetic polypeptide
  REGION 1..214: note = XENP022433 [ICOS]_H0_L0.7_Fab-1G6_L1.194_H1.279 Light Chain
DIQMTQSPSSVSASVGDRVTITCRASQGISSYLAWYQQKPGKAPKLLIYVASSLQSGVPSRFSGSGSGTDFTLTISSLQPEDFATYYCQQANSFPWTFGQGTKVEIKRTVAAPSVFIFPPSDEQLKSGTASVVCLLNNFYPREAKVQWKVDNALQSGNSQESVTEQDSKDSTYSLSSTLTLSKADYEKHKVYACEVTHQGLSSPVTKSFNRGEC

SEQ ID NO: 26478 - protein, 107 aa, synthetic construct
  REGION 1..107: note = Description of Artificial Sequence: Synthetic polypeptide
  REGION 1..107: note = VL of XENP022433
DIQMTQSPSSVSASVGDRVTITCRASQGISSYLAWYQQKPGKAPKLLIYVASSLQSGVPSRFSGSGSGTDFTLTISSLQPEDFATYYCQQANSFPWTFGQGTKVEIK

SEQ ID NO: 26479 - protein, 11 aa, synthetic construct
  REGION 1..11: note = Description of Artificial Sequence: Synthetic peptide
  REGION 1..11: note = XENP022433 vlCDR1
RASQGISSYLA

SEQ ID NO: 26480 - protein, 7 aa, synthetic construct
  REGION 1..7: note = Description of Artificial Sequence: Synthetic peptide
  REGION 1..7: note = XENP022433 vlCDR2
VASSLQS

SEQ ID NO: 26481 - protein, 9 aa, synthetic construct
  REGION 1..9: note = Description of Artificial Sequence: Synthetic peptide
  REGION 1..9: note = XENP022433 vlCDR3
QQANSFPWT

SEQ ID NO: 26482 - protein, 454 aa, synthetic construct; identical to SEQ ID NO: 26442
  REGION 1..454: note = Description of Artificial Sequence: Synthetic polypeptide
  REGION 1..454: note = XENP022744 [ICOS]_H0_L0.34_Fab-1G6_L1.194_H1.279 Fab-Fc Heavy Chain

SEQ ID NO: 26483 - protein, 125 aa, synthetic construct; identical to SEQ ID NO: 26293
  REGION 1..125: note = Description of Artificial Sequence: Synthetic polypeptide
  REGION 1..125: note = VH of XENP022744

SEQ ID NO: 26484 - protein, 5 aa, synthetic construct
  REGION 1..5: note = Description of Artificial Sequence: Synthetic peptide
  REGION 1..5: note = XENP022744 vhCDR1
GYYMH

SEQ ID NO: 26485 - protein, 17 aa, synthetic construct
  REGION 1..17: note = Description of Artificial Sequence: Synthetic peptide
  REGION 1..17: note = XENP022744 vhCDR2
WINPHSGGTNYAQKFQG

SEQ ID NO: 26486 - protein, 16 aa, synthetic construct
  REGION 1..16: note = Description of Artificial Sequence: Synthetic peptide
  REGION 1..16: note = XENP022744 vhCDR3
TYYYDSSGYYHDAFDI

SEQ ID NO: 26487 - protein, 480 aa, synthetic construct; identical to SEQ ID NO: 2870
  REGION 1..480: note = Description of Artificial Sequence: Synthetic polypeptide
  REGION 1..480: note = XENP022744 [ICOS]_H0_L0.34_Fab-1G6_L1.194_H1.279 scFv-Fc Heavy Chain

SEQ ID NO: 26488 - protein, 107 aa, synthetic construct; identical to SEQ ID NO: 2871
  REGION 1..107: note = Description of Artificial Sequence: Synthetic polypeptide
  REGION 1..107: note = VH of XENP022744

SEQ ID NO: 26489 - protein, 122 aa, synthetic construct; identical to SEQ ID NO: 2872
  REGION 1..122: note = Description of Artificial Sequence: Synthetic polypeptide
  REGION 1..122: note = VL of XENP022744

SEQ ID NO: 26490 - protein, 231 aa, synthetic construct; identical to SEQ ID NO: 2397
  REGION 1..231: note = Description of Artificial Sequence: Synthetic polypeptide
  REGION 1..231: note = Fc chain of XENP022744

SEQ ID NO: 26491 - protein, 11 aa, synthetic construct
  REGION 1..11: note = Description of Artificial Sequence: Synthetic peptide
  REGION 1..11: note = XENP022744 vhCDR1
RASQSVGNDVA

SEQ ID NO: 26492 - protein, 7 aa, synthetic construct
  REGION 1..7: note = Description of Artificial Sequence: Synthetic peptide
  REGION 1..7: note = XENP022744 vhCDR2
YASHRYT

SEQ ID NO: 26493 - protein, 9 aa, synthetic construct
  REGION 1..9: note = Description of Artificial Sequence: Synthetic peptide
  REGION 1..9: note = XENP022744 vhCDR3
QQDFSSPRT

SEQ ID NO: 26494 - protein, 5 aa, synthetic construct
  REGION 1..5: note = Description of Artificial Sequence: Synthetic peptide
  REGION 1..5: note = XENP022744 vlCDR1
NYWMN

SEQ ID NO: 26495 - protein, 19 aa, synthetic construct
  REGION 1..19: note = Description of Artificial Sequence: Synthetic peptide
  REGION 1..19: note = XENP022744 vlCDR2
EIRLYSNNYATHYAESVKG

SEQ ID NO: 26496 - protein, 11 aa, synthetic construct
  REGION 1..11: note = Description of Artificial Sequence: Synthetic peptide
  REGION 1..11: note = XENP022744 vlCDR3
YYGNYGGYFDV

SEQ ID NO: 26497 - protein, 214 aa, synthetic construct
  REGION 1..214: note = Description of Artificial Sequence: Synthetic polypeptide
  REGION 1..214: note = XENP022744 [ICOS]_H0_L0.34_Fab-1G6_L1.194_H1.279 Light Chain
DIQMTQSPSSVSASVGDRVTITCQASQDISRLLAWYQQKPGKAPKLLIYVASSLQSGVPSRFSGSGSGTDFTLTISSLQPEDFATYYCQQAESFPWTFGQGTKVEIKRTVAAPSVFIFPPSDEQLKSGTASVVCLLNNFYPREAKVQWKVDNALQSGNSQESVTEQDSKDSTYSLSSTLTLSKADYEKHKVYACEVTHQGLSSPVTKSFNRGEC

SEQ ID NO: 26498 - protein, 107 aa, synthetic construct
  REGION 1..107: note = Description of Artificial Sequence: Synthetic polypeptide
  REGION 1..107: note = VL of XENP022744
DIQMTQSPSSVSASVGDRVTITCQASQDISRLLAWYQQKPGKAPKLLIYVASSLQSGVPSRFSGSGSGTDFTLTISSLQPEDFATYYCQQAESFPWTFGQGTKVEIK

SEQ ID NO: 26499 - protein, 11 aa, synthetic construct
  REGION 1..11: note = Description of Artificial Sequence: Synthetic peptide
  REGION 1..11: note = XENP022744 vlCDR1
QASQDISRLLA

SEQ ID NO: 26500 - protein, 7 aa, synthetic construct
  REGION 1..7: note = Description of Artificial Sequence: Synthetic peptide
  REGION 1..7: note = XENP022744 vlCDR2
VASSLQS

SEQ ID NO: 26501 - protein, 9 aa, synthetic construct
  REGION 1..9: note = Description of Artificial Sequence: Synthetic peptide
  REGION 1..9: note = XENP022744 vlCDR3
QQAESFPWT

SEQ ID NO: 26502 - protein, 454 aa, synthetic construct; identical to SEQ ID NO: 26442
  REGION 1..454: note = Description of Artificial Sequence: Synthetic polypeptide
  REGION 1..454: note = XENP022746 [ICOS]_H0_L0.36_Fab-1G6_L1.194_H1.279 Fab-Fc Heavy Chain

SEQ ID NO: 26503 - protein, 125 aa, synthetic construct; identical to SEQ ID NO: 26293
  REGION 1..125: note = Description of Artificial Sequence: Synthetic polypeptide
  REGION 1..125: note = VH of XENP022746

SEQ ID NO: 26504 - protein, 5 aa, synthetic construct
  REGION 1..5: note = Description of Artificial Sequence: Synthetic peptide
  REGION 1..5: note = XENP022746 vhCDR1
GYYMH

SEQ ID NO: 26505 - protein, 17 aa, synthetic construct
  REGION 1..17: note = Description of Artificial Sequence: Synthetic peptide
  REGION 1..17: note = XENP022746 vhCDR2
WINPHSGGTNYAQKFQG

SEQ ID NO: 26506 - protein, 16 aa, synthetic construct
  REGION 1..16: note = Description of Artificial Sequence: Synthetic peptide
  REGION 1..16: note = XENP022746 vhCDR3
TYYYDSSGYYHDAFDI

SEQ ID NO: 26507 - protein, 480 aa, synthetic construct; identical to SEQ ID NO: 2870
  REGION 1..480: note = Description of Artificial Sequence: Synthetic polypeptide
  REGION 1..480: note = XENP022746 [ICOS]_H0_L0.36_Fab-1G6_L1.194_H1.279 scFv-Fc Heavy Chain

SEQ ID NO: 26508 - protein, 107 aa, synthetic construct; identical to SEQ ID NO: 2871
  REGION 1..107: note = Description of Artificial Sequence: Synthetic polypeptide
  REGION 1..107: note = VH of XENP022746

SEQ ID NO: 26509 - protein, 122 aa, synthetic construct; identical to SEQ ID NO: 2872
  REGION 1..122: note = Description of Artificial Sequence: Synthetic polypeptide
  REGION 1..122: note = VL of XENP022746

SEQ ID NO: 26510 - protein, 231 aa, synthetic construct; identical to SEQ ID NO: 2397
  REGION 1..231: note = Description of Artificial Sequence: Synthetic polypeptide
  REGION 1..231: note = Fc chain of XENP022746

SEQ ID NO: 26511 - protein, 11 aa, synthetic construct
  REGION 1..11: note = Description of Artificial Sequence: Synthetic peptide
  REGION 1..11: note = XENP022746 vhCDR1
RASQSVGNDVA

SEQ ID NO: 26512 - protein, 7 aa, synthetic construct
  REGION 1..7: note = Description of Artificial Sequence: Synthetic peptide
  REGION 1..7: note = XENP022746 vhCDR2
YASHRYT

SEQ ID NO: 26513 - protein, 9 aa, synthetic construct
  REGION 1..9: note = Description of Artificial Sequence: Synthetic peptide
  REGION 1..9: note = XENP022746 vhCDR3
QQDFSSPRT

SEQ ID NO: 26514 - protein, 5 aa, synthetic construct
  REGION 1..5: note = Description of Artificial Sequence: Synthetic peptide
  REGION 1..5: note = XENP022746 vlCDR1
NYWMN

SEQ ID NO: 26515 - protein, 19 aa, synthetic construct
  REGION 1..19: note = Description of Artificial Sequence: Synthetic peptide
  REGION 1..19: note = XENP022746 vlCDR2
EIRLYSNNYATHYAESVKG

SEQ ID NO: 26516 - protein, 11 aa, synthetic construct
  REGION 1..11: note = Description of Artificial Sequence: Synthetic peptide
  REGION 1..11: note = XENP022746 vlCDR3
YYGNYGGYFDV

SEQ ID NO: 26517 - protein, 214 aa, synthetic construct
  REGION 1..214: note = Description of Artificial Sequence: Synthetic polypeptide
  REGION 1..214: note = XENP022746 [ICOS]_H0_L0.36_Fab-1G6_L1.194_H1.279 Light Chain
DIQMTQSPSSVSASVGDRVTITCQASQDISSLLAWYQQKPGKAPKLLIYVASSLQSGVPSRFSGSGSGTDFTLTISSLQPEDFATYYCQQAESFPWTFGQGTKVEIKRTVAAPSVFIFPPSDEQLKSGTASVVCLLNNFYPREAKVQWKVDNALQSGNSQESVTEQDSKDSTYSLSSTLTLSKADYEKHKVYACEVTHQGLSSPVTKSFNRGEC

SEQ ID NO: 26518 - protein, 107 aa, synthetic construct
  REGION 1..107: note = Description of Artificial Sequence: Synthetic polypeptide
  REGION 1..107: note = VL of XENP022746
DIQMTQSPSSVSASVGDRVTITCQASQDISSLLAWYQQKPGKAPKLLIYVASSLQSGVPSRFSGSGSGTDFTLTISSLQPEDFATYYCQQAESFPWTFGQGTKVEIK

SEQ ID NO: 26519 - protein, 11 aa, synthetic construct
  REGION 1..11: note = Description of Artificial Sequence: Synthetic peptide
  REGION 1..11: note = XENP022746 vlCDR1
QASQDISSLLA

SEQ ID NO: 26520 - protein, 7 aa, synthetic construct
  REGION 1..7: note = Description of Artificial Sequence: Synthetic peptide
  REGION 1..7: note = XENP022746 vlCDR2
VASSLQS

SEQ ID NO: 26521 - protein, 9 aa, synthetic construct
  REGION 1..9: note = Description of Artificial Sequence: Synthetic peptide
  REGION 1..9: note = XENP022746 vlCDR3
QQAESFPWT

SEQ ID NO: 26522 - protein, 454 aa, synthetic construct; identical to SEQ ID NO: 26442
  REGION 1..454: note = Description of Artificial Sequence: Synthetic polypeptide
  REGION 1..454: note = XENP022747 [ICOS]_H0_L0.37_Fab-1G6_L1.194_H1.279 Fab-Fc Heavy Chain

SEQ ID NO: 26523 - protein, 125 aa, synthetic construct; identical to SEQ ID NO: 26293
  REGION 1..125: note = Description of Artificial Sequence: Synthetic polypeptide
  REGION 1..125: note = VH of XENP022747

SEQ ID NO: 26524 - protein, 5 aa, synthetic construct
  REGION 1..5: note = Description of Artificial Sequence: Synthetic peptide
  REGION 1..5: note = XENP022747 vhCDR1
GYYMH

SEQ ID NO: 26525 - protein, 17 aa, synthetic construct
  REGION 1..17: note = Description of Artificial Sequence: Synthetic peptide
  REGION 1..17: note = XENP022747 vhCDR2
WINPHSGGTNYAQKFQG

SEQ ID NO: 26526 - protein, 16 aa, synthetic construct
  REGION 1..16: note = Description of Artificial Sequence: Synthetic peptide
  REGION 1..16: note = XENP022747 vhCDR3
TYYYDSSGYYHDAFDI

SEQ ID NO: 26527 - protein, 480 aa, synthetic construct; identical to SEQ ID NO: 2870
  REGION 1..480: note = Description of Artificial Sequence: Synthetic polypeptide
  REGION 1..480: note = XENP022747 [ICOS]_H0_L0.37_Fab-1G6_L1.194_H1.279 scFv-Fc Heavy Chain

SEQ ID NO: 26528 - protein, 107 aa, synthetic construct; identical to SEQ ID NO: 2871
  REGION 1..107: note = Description of Artificial Sequence: Synthetic polypeptide
  REGION 1..107: note = VH of XENP022747

SEQ ID NO: 26529 - protein, 122 aa, synthetic construct; identical to SEQ ID NO: 2872
  REGION 1..122: note = Description of Artificial Sequence: Synthetic polypeptide
  REGION 1..122: note = VL of XENP022747

SEQ ID NO: 26530 - protein, 231 aa, synthetic construct; identical to SEQ ID NO: 2397
  REGION 1..231: note = Description of Artificial Sequence: Synthetic polypeptide
  REGION 1..231: note = Fc chain of XENP022747

SEQ ID NO: 26531 - protein, 11 aa, synthetic construct
  REGION 1..11: note = Description of Artificial Sequence: Synthetic peptide
  REGION 1..11: note = XENP022747 vhCDR1
RASQSVGNDVA

SEQ ID NO: 26532 - protein, 7 aa, synthetic construct
  REGION 1..7: note = Description of Artificial Sequence: Synthetic peptide
  REGION 1..7: note = XENP022747 vhCDR2
YASHRYT

SEQ ID NO: 26533 - protein, 9 aa, synthetic construct
  REGION 1..9: note = Description of Artificial Sequence: Synthetic peptide
  REGION 1..9: note = XENP022747 vhCDR3
QQDFSSPRT

SEQ ID NO: 26534 - protein, 5 aa, synthetic construct
  REGION 1..5: note = Description of Artificial Sequence: Synthetic peptide
  REGION 1..5: note = XENP022747 vlCDR1
NYWMN

SEQ ID NO: 26535 - protein, 19 aa, synthetic construct
  REGION 1..19: note = Description of Artificial Sequence: Synthetic peptide
  REGION 1..19: note = XENP022747 vlCDR2
EIRLYSNNYATHYAESVKG

SEQ ID NO: 26536 - protein, 11 aa, synthetic construct
  REGION 1..11: note = Description of Artificial Sequence: Synthetic peptide
  REGION 1..11: note = XENP022747 vlCDR3
YYGNYGGYFDV

SEQ ID NO: 26537 - protein, 214 aa, synthetic construct
  REGION 1..214: note = Description of Artificial Sequence: Synthetic polypeptide
  REGION 1..214: note = XENP022747 [ICOS]_H0_L0.37_Fab-1G6_L1.194_H1.279 Light Chain
DIQMTQSPSSVSASVGDRVTITCQASQDISRLLAWYQQKPGKAPKLLIYAASSLQSGVPSRFSGSGSGTDFTLTISSLQPEDFATYYCQQAESFPWTFGQGTKVEIKRTVAAPSVFIFPPSDEQLKSGTASVVCLLNNFYPREAKVQWKVDNALQSGNSQESVTEQDSKDSTYSLSSTLTLSKADYEKHKVYACEVTHQGLSSPVTKSFNRGEC

SEQ ID NO: 26538 - protein, 107 aa, synthetic construct
  REGION 1..107: note = Description of Artificial Sequence: Synthetic polypeptide
  REGION 1..107: note = VL of XENP022747
DIQMTQSPSSVSASVGDRVTITCQASQDISRLLAWYQQKPGKAPKLLIYAASSLQSGVPSRFSGSGSGTDFTLTISSLQPEDFATYYCQQAESFPWTFGQGTKVEIK

SEQ ID NO: 26539 - protein, 11 aa, synthetic construct
  REGION 1..11: note = Description of Artificial Sequence: Synthetic peptide
  REGION 1..11: note = XENP022747 vlCDR1
QASQDISRLLA

SEQ ID NO: 26540 - protein, 7 aa, synthetic construct
  REGION 1..7: note = Description of Artificial Sequence: Synthetic peptide
  REGION 1..7: note = XENP022747 vlCDR2
AASSLQS

SEQ ID NO: 26541 - protein, 9 aa, synthetic construct
  REGION 1..9: note = Description of Artificial Sequence: Synthetic peptide
  REGION 1..9: note = XENP022747 vlCDR3
QQAESFPWT

SEQ ID NO: 26542 - protein, 454 aa, synthetic construct; identical to SEQ ID NO: 26442
  REGION 1..454: note = Description of Artificial Sequence: Synthetic polypeptide
  REGION 1..454: note = XENP022748 [ICOS]_H0_L0.38_Fab-1G6_L1.194_H1.279 Fab-Fc Heavy Chain

SEQ ID NO: 26543 - protein, 125 aa, synthetic construct; identical to SEQ ID NO: 26293
  REGION 1..125: note = Description of Artificial Sequence: Synthetic polypeptide
  REGION 1..125: note = VH of XENP022748

SEQ ID NO: 26544 - protein, 5 aa, synthetic construct
  REGION 1..5: note = Description of Artificial Sequence: Synthetic peptide
  REGION 1..5: note = XENP022748 vhCDR1
GYYMH

SEQ ID NO: 26545 - protein, 17 aa, synthetic construct
  REGION 1..17: note = Description of Artificial Sequence: Synthetic peptide
  REGION 1..17: note = XENP022748 vhCDR2
WINPHSGGTNYAQKFQG

SEQ ID NO: 26546 - protein, 16 aa, synthetic construct
  REGION 1..16: note = Description of Artificial Sequence: Synthetic peptide
  REGION 1..16: note = XENP022748 vhCDR3
TYYYDSSGYYHDAFDI

SEQ ID NO: 26547 - protein, 480 aa, synthetic construct; identical to SEQ ID NO: 2870
  REGION 1..480: note = Description of Artificial Sequence: Synthetic polypeptide
  REGION 1..480: note = XENP022748 [ICOS]_H0_L0.38_Fab-1G6_L1.194_H1.279 scFv-Fc Heavy Chain

SEQ ID NO: 26548 - protein, 107 aa, synthetic construct; identical to SEQ ID NO: 2871
  REGION 1..107: note = Description of Artificial Sequence: Synthetic polypeptide
  REGION 1..107: note = VH of XENP022748

SEQ ID NO: 26549 - protein, 122 aa, synthetic construct; identical to SEQ ID NO: 2872
  REGION 1..122: note = Description of Artificial Sequence: Synthetic polypeptide
  REGION 1..122: note = VL of XENP022748

SEQ ID NO: 26550 - protein, 231 aa, synthetic construct; identical to SEQ ID NO: 2397
  REGION 1..231: note = Description of Artificial Sequence: Synthetic polypeptide
  REGION 1..231: note = Fc chain of XENP022748

SEQ ID NO: 26551 - protein, 11 aa, synthetic construct
  REGION 1..11: note = Description of Artificial Sequence: Synthetic peptide
  REGION 1..11: note = XENP022748 vhCDR1
RASQSVGNDVA

SEQ ID NO: 26552 - protein, 7 aa, synthetic construct
  REGION 1..7: note = Description of Artificial Sequence: Synthetic peptide
  REGION 1..7: note = XENP022748 vhCDR2
YASHRYT

SEQ ID NO: 26553 - protein, 9 aa, synthetic construct
  REGION 1..9: note = Description of Artificial Sequence: Synthetic peptide
  REGION 1..9: note = XENP022748 vhCDR3
QQDFSSPRT

SEQ ID NO: 26554 - protein, 5 aa, synthetic construct
  REGION 1..5: note = Description of Artificial Sequence: Synthetic peptide
  REGION 1..5: note = XENP022748 vlCDR1
NYWMN

SEQ ID NO: 26555 - protein, 19 aa, synthetic construct
  REGION 1..19: note = Description of Artificial Sequence: Synthetic peptide
  REGION 1..19: note = XENP022748 vlCDR2
EIRLYSNNYATHYAESVKG

SEQ ID NO: 26556 - protein, 11 aa, synthetic construct
  REGION 1..11: note = Description of Artificial Sequence: Synthetic peptide
  REGION 1..11: note = XENP022748 vlCDR3
YYGNYGGYFDV

SEQ ID NO: 26557 - protein, 214 aa, synthetic construct
  REGION 1..214: note = Description of Artificial Sequence: Synthetic polypeptide
  REGION 1..214: note = XENP022748 [ICOS]_H0_L0.38_Fab-1G6_L1.194_H1.279 Light Chain
DIQMTQSPSSVSASVGDRVTITCQASQDISSLLAWYQQKPGKAPKLLIYAASSLQSGVPSRFSGSGSGTDFTLTISSLQPEDFATYYCQQAESFPWTFGQGTKVEIKRTVAAPSVFIFPPSDEQLKSGTASVVCLLNNFYPREAKVQWKVDNALQSGNSQESVTEQDSKDSTYSLSSTLTLSKADYEKHKVYACEVTHQGLSSPVTKSFNRGEC

SEQ ID NO: 26558 - protein, 107 aa, synthetic construct
  REGION 1..107: note = Description of Artificial Sequence: Synthetic polypeptide
  REGION 1..107: note = VL of XENP022748
DIQMTQSPSSVSASVGDRVTITCQASQDISSLLAWYQQKPGKAPKLLIYAASSLQSGVPSRFSGSGSGTDFTLTISSLQPEDFATYYCQQAESFPWTFGQGTKVEIK

SEQ ID NO: 26559 - protein, 11 aa, synthetic construct
  REGION 1..11: note = Description of Artificial Sequence: Synthetic peptide
  REGION 1..11: note = XENP022748 vlCDR1
QASQDISSLLA

SEQ ID NO: 26560 - protein, 7 aa, synthetic construct
  REGION 1..7: note = Description of Artificial Sequence: Synthetic peptide
  REGION 1..7: note = XENP022748 vlCDR2
AASSLQS

SEQ ID NO: 26561 - protein, 9 aa, synthetic construct
  REGION 1..9: note = Description of Artificial Sequence: Synthetic peptide
  REGION 1..9: note = XENP022748 vlCDR3
QQAESFPWT

SEQ ID NO: 26562 - protein, 454 aa, synthetic construct
  REGION 1..454: note = Description of Artificial Sequence: Synthetic polypeptide
  REGION 1..454: note = XENP023092 [ICOS]_H0.66_L0_Fab-1G6_L1.194_H1.279 Fab-Fc Heavy Chain
QVQLVQSGAEVKKPGASVKVSCKASGYTFTGYYMHWVRQAPGQGLEWMGWINPHSGETIYAQKFQGRVTMTRDTSISTAYMELSSLRSEDTAVYYCARTYYYDTSGYYHDAFDVWGQGTMVTVSSASTKGPSVFPLAPSSKSTSGGTAALGCLVKDYFPEPVTVSWNSGALTSGVHTFPAVLQSSGLYSLSSVVTVPSSSLGTQTYICNVNHKPSDTKVDKKVEPKSCDKTHTCPPCPAPPVAGPSVFLFPPKPKDTLMISRTPEVTCVVVDVKHEDPEVKFNWYVDGVEVHNAKTKPREEEYNSTYRVVSVLTVLHQDWLNGKEYKCKVSNKALPAPIEKTISKAKGQPREPQVYTLPPSREEMTKNQVSLTCDVSGFYPSDIAVEWESDGQPENNYKTTPPVLDSDGSFFLYSKLTVDKSRWEQGDVFSCSVMHEALHNHYTQKSLSLSPGK

SEQ ID NO: 26563 - protein, 125 aa, synthetic construct
  REGION 1..125: note = Description of Artificial Sequence: Synthetic polypeptide
  REGION 1..125: note = VH of XENP023092
QVQLVQSGAEVKKPGASVKVSCKASGYTFTGYYMHWVRQAPGQGLEWMGWINPHSGETIYAQKFQGRVTMTRDTSISTAYMELSSLRSEDTAVYYCARTYYYDTSGYYHDAFDVWGQGTMVTVSS

SEQ ID NO: 26564 - protein, 5 aa, synthetic construct
  REGION 1..5: note = Description of Artificial Sequence: Synthetic peptide
  REGION 1..5: note = XENP023092 vhCDR1
GYYMH

SEQ ID NO: 26565 - protein, 17 aa, synthetic construct
  REGION 1..17: note = Description of Artificial Sequence: Synthetic peptide
  REGION 1..17: note = XENP023092 vhCDR2
WINPHSGETIYAQKFQG

SEQ ID NO: 26566 - protein, 16 aa, synthetic construct
  REGION 1..16: note = Description of Artificial Sequence: Synthetic peptide
  REGION 1..16: note = XENP023092 vhCDR3
TYYYDTSGYYHDAFDV

SEQ ID NO: 26567 - protein, 480 aa, synthetic construct; identical to SEQ ID NO: 2870
  REGION 1..480: note = Description of Artificial Sequence: Synthetic polypeptide
  REGION 1..480: note = XENP023092 [ICOS]_H0.66_L0_Fab-1G6_L1.194_H1.279 scFv-Fc Heavy Chain

SEQ ID NO: 26568 - protein, 107 aa, synthetic construct; identical to SEQ ID NO: 2871
  REGION 1..107: note = Description of Artificial Sequence: Synthetic polypeptide
  REGION 1..107: note = VH of XENP023092

SEQ ID NO: 26569 - protein, 122 aa, synthetic construct; identical to SEQ ID NO: 2872
  REGION 1..122: note = Description of Artificial Sequence: Synthetic polypeptide
  REGION 1..122: note = VL of XENP023092

SEQ ID NO: 26570 - protein, 231 aa, synthetic construct; identical to SEQ ID NO: 2397
  REGION 1..231: note = Description of Artificial Sequence: Synthetic polypeptide
  REGION 1..231: note = Fc chain of XENP023092

SEQ ID NO: 26571 - protein, 11 aa, synthetic construct
  REGION 1..11: note = Description of Artificial Sequence: Synthetic peptide
  REGION 1..11: note = XENP023092 vhCDR1
RASQSVGNDVA

SEQ ID NO: 26572 - protein, 7 aa, synthetic construct
  REGION 1..7: note = Description of Artificial Sequence: Synthetic peptide
  REGION 1..7: note = XENP023092 vhCDR2
YASHRYT

SEQ ID NO: 26573 - protein, 9 aa, synthetic construct
  REGION 1..9: note = Description of Artificial Sequence: Synthetic peptide
  REGION 1..9: note = XENP023092 vhCDR3
QQDFSSPRT

SEQ ID NO: 26574 - protein, 5 aa, synthetic construct
  REGION 1..5: note = Description of Artificial Sequence: Synthetic peptide
  REGION 1..5: note = XENP023092 vlCDR1
NYWMN

SEQ ID NO: 26575 - protein, 19 aa, synthetic construct
  REGION 1..19: note = Description of Artificial Sequence: Synthetic peptide
  REGION 1..19: note = XENP023092 vlCDR2
EIRLYSNNYATHYAESVKG

SEQ ID NO: 26576 - protein, 11 aa, synthetic construct
  REGION 1..11: note = Description of Artificial Sequence: Synthetic peptide
  REGION 1..11: note = XENP023092 vlCDR3
YYGNYGGYFDV

SEQ ID NO: 26577 - protein, 214 aa, synthetic construct; identical to SEQ ID NO: 26297
  REGION 1..214: note = Description of Artificial Sequence: Synthetic polypeptide
  REGION 1..214: note = XENP023092 [ICOS]_H0.66_L0_Fab-1G6_L1.194_H1.279 Light Chain

SEQ ID NO: 26578 - protein, 107 aa, synthetic construct; identical to SEQ ID NO: 26298
  REGION 1..107: note = Description of Artificial Sequence: Synthetic polypeptide
  REGION 1..107: note = VL of XENP023092

SEQ ID NO: 26579 - protein, 11 aa, synthetic construct
  REGION 1..11: note = Description of Artificial Sequence: Synthetic peptide
  REGION 1..11: note = XENP023092 vlCDR1
RASQGISRLLA

SEQ ID NO: 26580 - protein, 7 aa, synthetic construct
  REGION 1..7: note = Description of Artificial Sequence: Synthetic peptide
  REGION 1..7: note = XENP023092 vlCDR2
VASSLQS

SEQ ID NO: 26581 - protein, 9 aa, synthetic construct
  REGION 1..9: note = Description of Artificial Sequence: Synthetic peptide
  REGION 1..9: note = XENP023092 vlCDR3
QQANSFPWT

SEQ ID NO: 26582 - protein, 454 aa, synthetic construct; identical to SEQ ID NO: 26562
  REGION 1..454: note = Description of Artificial Sequence: Synthetic polypeptide
  REGION 1..454: note = XENP023410 [ICOS]_H0.66_L0.34_Fab-1G6_L1.194_H1.279 Fab-Fc Heavy Chain

SEQ ID NO: 26583 - protein, 125 aa, synthetic construct; identical to SEQ ID NO: 26563
  REGION 1..125: note = Description of Artificial Sequence: Synthetic polypeptide
  REGION 1..125: note = VH of XENP023410

SEQ ID NO: 26584 - protein, 5 aa, synthetic construct
  REGION 1..5: note = Description of Artificial Sequence: Synthetic peptide
  REGION 1..5: note = XENP023410 vhCDR1
GYYMH

SEQ ID NO: 26585 - protein, 17 aa, synthetic construct
  REGION 1..17: note = Description of Artificial Sequence: Synthetic peptide
  REGION 1..17: note = XENP023410 vhCDR2
WINPHSGETIYAQKFQG

SEQ ID NO: 26586 - protein, 16 aa, synthetic construct
  REGION 1..16: note = Description of Artificial Sequence: Synthetic peptide
  REGION 1..16: note = XENP023410 vhCDR3
TYYYDTSGYYHDAFDV

SEQ ID NO: 26587 - protein, 480 aa, synthetic construct; identical to SEQ ID NO: 2870
  REGION 1..480: note = Description of Artificial Sequence: Synthetic polypeptide
  REGION 1..480: note = XENP023410 [ICOS]_H0.66_L0.34_Fab-1G6_L1.194_H1.279 scFv-Fc Heavy Chain

SEQ ID NO: 26588 - protein, 107 aa, synthetic construct; identical to SEQ ID NO: 2871
  REGION 1..107: note = Description of Artificial Sequence: Synthetic polypeptide
  REGION 1..107: note = VH of XENP023410

SEQ ID NO: 26589 - protein, 122 aa, synthetic construct; identical to SEQ ID NO: 2872
  REGION 1..122: note = Description of Artificial Sequence: Synthetic polypeptide
  REGION 1..122: note = VL of XENP023410

SEQ ID NO: 26590 - protein, 231 aa, synthetic construct; identical to SEQ ID NO: 2397
  REGION 1..231: note = Description of Artificial Sequence: Synthetic polypeptide
  REGION 1..231: note = Fc chain of XENP023410

SEQ ID NO: 26591 - protein, 11 aa, synthetic construct
  REGION 1..11: note = Description of Artificial Sequence: Synthetic peptide
  REGION 1..11: note = XENP023410 vhCDR1
RASQSVGNDVA

SEQ ID NO: 26592 - protein, 7 aa, synthetic construct
  REGION 1..7: note = Description of Artificial Sequence: Synthetic peptide
  REGION 1..7: note = XENP023410 vhCDR2
YASHRYT

SEQ ID NO: 26593 - protein, 9 aa, synthetic construct
  REGION 1..9: note = Description of Artificial Sequence: Synthetic peptide
  REGION 1..9: note = XENP023410 vhCDR3
QQDFSSPRT

SEQ ID NO: 26594 - protein, 5 aa, synthetic construct
  REGION 1..5: note = Description of Artificial Sequence: Synthetic peptide
  REGION 1..5: note = XENP023410 vlCDR1
NYWMN

SEQ ID NO: 26595 - protein, 19 aa, synthetic construct
  REGION 1..19: note = Description of Artificial Sequence: Synthetic peptide
  REGION 1..19: note = XENP023410 vlCDR2
EIRLYSNNYATHYAESVKG

SEQ ID NO: 26596 - protein, 11 aa, synthetic construct
  REGION 1..11: note = Description of Artificial Sequence: Synthetic peptide
  REGION 1..11: note = XENP023410 vlCDR3
YYGNYGGYFDV

SEQ ID NO: 26597 - protein, 214 aa, synthetic construct; identical to SEQ ID NO: 26497
  REGION 1..214: note = Description of Artificial Sequence: Synthetic polypeptide
  REGION 1..214: note = XENP023410 [ICOS]_H0.66_L0.34_Fab-1G6_L1.194_H1.279 Light Chain

SEQ ID NO: 26598 - protein, 107 aa, synthetic construct; identical to SEQ ID NO: 26498
  REGION 1..107: note = Description of Artificial Sequence: Synthetic polypeptide
  REGION 1..107: note = VL of XENP023410

SEQ ID NO: 26599 - protein, 11 aa, synthetic construct
  REGION 1..11: note = Description of Artificial Sequence: Synthetic peptide
  REGION 1..11: note = XENP023410 vlCDR1
QASQDISRLLA

SEQ ID NO: 26600 - protein, 7 aa, synthetic construct
  REGION 1..7: note = Description of Artificial Sequence: Synthetic peptide
  REGION 1..7: note = XENP023410 vlCDR2
VASSLQS

SEQ ID NO: 26601 - protein, 9 aa, synthetic construct
  REGION 1..9: note = Description of Artificial Sequence: Synthetic peptide
  REGION 1..9: note = XENP023410 vlCDR3
QQAESFPWT

SEQ ID NO: 26602 - protein, 454 aa, synthetic construct; identical to SEQ ID NO: 26362
  REGION 1..454: note = Description of Artificial Sequence: Synthetic polypeptide
  REGION 1..454: note = XENP022730 [ICOS]_H0L0_Fab-1G6_L1.194_H1.279 Fab-Fc Heavy Chain

SEQ ID NO: 26603 - protein, 125 aa, synthetic construct; identical to SEQ ID NO: 26293
  REGION 1..125: note = Description of Artificial Sequence: Synthetic polypeptide
  REGION 1..125: note = VH of XENP022730

SEQ ID NO: 26604 - protein, 5 aa, synthetic construct
  REGION 1..5: note = Description of Artificial Sequence: Synthetic peptide
  REGION 1..5: note = XENP022730 vhCDR1
GYYMH

SEQ ID NO: 26605 - protein, 17 aa, synthetic construct
  REGION 1..17: note = Description of Artificial Sequence: Synthetic peptide
  REGION 1..17: note = XENP022730 vhCDR2
WINPHSGGTNYAQKFQG

SEQ ID NO: 26606 - protein, 16 aa, synthetic construct
  REGION 1..16: note = Description of Artificial Sequence: Synthetic peptide
  REGION 1..16: note = XENP022730 vhCDR3
TYYYDSSGYYHDAFDI

SEQ ID NO: 26607 - protein, 480 aa, synthetic construct; identical to SEQ ID NO: 2930
  REGION 1..480: note = Description of Artificial Sequence: Synthetic polypeptide
  REGION 1..480: note = XENP022730 [ICOS]_H0L0_Fab-1G6_L1.194_H1.279 scFv-Fc Heavy Chain

SEQ ID NO: 26608 - protein, 107 aa, synthetic construct; identical to SEQ ID NO: 2871
  REGION 1..107: note = Description of Artificial Sequence: Synthetic polypeptide
  REGION 1..107: note = VH of XENP022730

SEQ ID NO: 26609 - protein, 122 aa, synthetic construct; identical to SEQ ID NO: 2872
  REGION 1..122: note = Description of Artificial Sequence: Synthetic polypeptide
  REGION 1..122: note = VL of XENP022730

SEQ ID NO: 26610 - protein, 231 aa, synthetic construct; identical to SEQ ID NO: 2409
  REGION 1..231: note = Description of Artificial Sequence: Synthetic polypeptide
  REGION 1..231: note = Fc chain of XENP022730

SEQ ID NO: 26611 - protein, 11 aa, synthetic construct
  REGION 1..11: note = Description of Artificial Sequence: Synthetic peptide
  REGION 1..11: note = XENP022730 vhCDR1
RASQSVGNDVA

SEQ ID NO: 26612 - protein, 7 aa, synthetic construct
  REGION 1..7: note = Description of Artificial Sequence: Synthetic peptide
  REGION 1..7: note = XENP022730 vhCDR2
YASHRYT

SEQ ID NO: 26613 - protein, 9 aa, synthetic construct
  REGION 1..9: note = Description of Artificial Sequence: Synthetic peptide
  REGION 1..9: note = XENP022730 vhCDR3
QQDFSSPRT

SEQ ID NO: 26614 - protein, 5 aa, synthetic construct
  REGION 1..5: note = Description of Artificial Sequence: Synthetic peptide
  REGION 1..5: note = XENP022730 vlCDR1
NYWMN

SEQ ID NO: 26615 - protein, 19 aa, synthetic construct
  REGION 1..19: note = Description of Artificial Sequence: Synthetic peptide
  REGION 1..19: note = XENP022730 vlCDR2
EIRLYSNNYATHYAESVKG

SEQ ID NO: 26616 - protein, 11 aa, synthetic construct
  REGION 1..11: note = Description of Artificial Sequence: Synthetic peptide
  REGION 1..11: note = XENP022730 vlCDR3
YYGNYGGYFDV

SEQ ID NO: 26617 - protein, 214 aa, synthetic construct; identical to SEQ ID NO: 26297
  REGION 1..214: note = Description of Artificial Sequence: Synthetic polypeptide
  REGION 1..214: note = XENP022730 [ICOS]_H0L0_Fab-1G6_L1.194_H1.279 Light Chain

SEQ ID NO: 26618 - protein, 107 aa, synthetic construct; identical to SEQ ID NO: 26298
  REGION 1..107: note = Description of Artificial Sequence: Synthetic polypeptide
  REGION 1..107: note = VL of XENP022730

SEQ ID NO: 26619 - protein, 11 aa, synthetic construct
  REGION 1..11: note = Description of Artificial Sequence: Synthetic peptide
  REGION 1..11: note = XENP022730 vlCDR1
RASQGISRLLA

SEQ ID NO: 26620 - protein, 7 aa, synthetic construct
  REGION 1..7: note = Description of Artificial Sequence: Synthetic peptide
  REGION 1..7: note = XENP022730 vlCDR2
VASSLQS

SEQ ID NO: 26621 - protein, 9 aa, synthetic construct
  REGION 1..9: note = Description of Artificial Sequence: Synthetic peptide
  REGION 1..9: note = XENP022730 vlCDR3
QQANSFPWT

SEQ ID NO: 26622 - protein, 454 aa, synthetic construct; identical to SEQ ID NO: 26362
  REGION 1..454: note = Description of Artificial Sequence: Synthetic polypeptide
  REGION 1..454: note = XENP022974 [ICOS]_H0_L0.34_Fab-1G6_L1.194_H1.279 Fab-Fc Heavy Chain

SEQ ID NO: 26623 - protein, 125 aa, synthetic construct; identical to SEQ ID NO: 26293
  REGION 1..125: note = Description of Artificial Sequence: Synthetic polypeptide
  REGION 1..125: note = VH of XENP022974

SEQ ID NO: 26624 - protein, 5 aa, synthetic construct
  REGION 1..5: note = Description of Artificial Sequence: Synthetic peptide
  REGION 1..5: note = XENP022974 vhCDR1
GYYMH

SEQ ID NO: 26625 - protein, 17 aa, synthetic construct
  REGION 1..17: note = Description of Artificial Sequence: Synthetic peptide
  REGION 1..17: note = XENP022974 vhCDR2
WINPHSGGTNYAQKFQG

SEQ ID NO: 26626 - protein, 16 aa, synthetic construct
  REGION 1..16: note = Description of Artificial Sequence: Synthetic peptide
  REGION 1..16: note = XENP022974 vhCDR3
TYYYDSSGYYHDAFDI

SEQ ID NO: 26627 - protein, 480 aa, synthetic construct; identical to SEQ ID NO: 2930
  REGION 1..480: note = Description of Artificial Sequence: Synthetic polypeptide
  REGION 1..480: note = XENP022974 [ICOS]_H0_L0.34_Fab-1G6_L1.194_H1.279 scFv-Fc Heavy Chain

SEQ ID NO: 26628 - protein, 107 aa, synthetic construct; identical to SEQ ID NO: 2871
  REGION 1..107: note = Description of Artificial Sequence: Synthetic polypeptide
  REGION 1..107: note = VH of XENP022974

SEQ ID NO: 26629 - protein, 122 aa, synthetic construct; identical to SEQ ID NO: 2872
  REGION 1..122: note = Description of Artificial Sequence: Synthetic polypeptide
  REGION 1..122: note = VL of XENP022974

SEQ ID NO: 26630 - protein, 231 aa, synthetic construct; identical to SEQ ID NO: 2409
  REGION 1..231: note = Description of Artificial Sequence: Synthetic polypeptide
  REGION 1..231: note = Fc chain of XENP022974

SEQ ID NO: 26631 - protein, 11 aa, synthetic construct
  REGION 1..11: note = Description of Artificial Sequence: Synthetic peptide
  REGION 1..11: note = XENP022974 vhCDR1
RASQSVGNDVA

SEQ ID NO: 26632 - protein, 7 aa, synthetic construct
  REGION 1..7: note = Description of Artificial Sequence: Synthetic peptide
  REGION 1..7: note = XENP022974 vhCDR2
YASHRYT

SEQ ID NO: 26633 - protein, 9 aa, synthetic construct
  REGION 1..9: note = Description of Artificial Sequence: Synthetic peptide
  REGION 1..9: note = XENP022974 vhCDR3
QQDFSSPRT

SEQ ID NO: 26634 - protein, 5 aa, synthetic construct
  REGION 1..5: note = Description of Artificial Sequence: Synthetic peptide
  REGION 1..5: note = XENP022974 vlCDR1
NYWMN

SEQ ID NO: 26635 - protein, 19 aa, synthetic construct
  REGION 1..19: note = Description of Artificial Sequence: Synthetic peptide
  REGION 1..19: note = XENP022974 vlCDR2
EIRLYSNNYATHYAESVKG

SEQ ID NO: 26636 - protein, 11 aa, synthetic construct
  REGION 1..11: note = Description of Artificial Sequence: Synthetic peptide
  REGION 1..11: note = XENP022974 vlCDR3
YYGNYGGYFDV

SEQ ID NO: 26637 - protein, 214 aa, synthetic construct; identical to SEQ ID NO: 26497
  REGION 1..214: note = Description of Artificial Sequence: Synthetic polypeptide
  REGION 1..214: note = XENP022974 [ICOS]_H0_L0.34_Fab-1G6_L1.194_H1.279 Light Chain

SEQ ID NO: 26638 - protein, 107 aa, synthetic construct; identical to SEQ ID NO: 26498
  REGION 1..107: note = Description of Artificial Sequence: Synthetic polypeptide
  REGION 1..107: note = VL of XENP022974

SEQ ID NO: 26639 - protein, 11 aa, synthetic construct
  REGION 1..11: note = Description of Artificial Sequence: Synthetic peptide
  REGION 1..11: note = XENP022974 vlCDR1
QASQDISRLLA

SEQ ID NO: 26640 - protein, 7 aa, synthetic construct
  REGION 1..7: note = Description of Artificial Sequence: Synthetic peptide
  REGION 1..7: note = XENP022974 vlCDR2
VASSLQS

SEQ ID NO: 26641 - protein, 9 aa, synthetic construct
  REGION 1..9: note = Description of Artificial Sequence: Synthetic peptide
  REGION 1..9: note = XENP022974 vlCDR3
QQAESFPWT

SEQ ID NO: 26642 - protein, 454 aa, synthetic construct
  REGION 1..454: note = Description of Artificial Sequence: Synthetic polypeptide
  REGION 1..454: note = XENP023104 [ICOS]_H0.66_L0_Fab-1G6_L1.194_H1.279 Fab-Fc Heavy Chain
QVQLVQSGAEVKKPGASVKVSCKASGYTFTGYYMHWVRQAPGQGLEWMGWINPHSGETIYAQKFQGRVTMTRDTSISTAYMELSSLRSEDTAVYYCARTYYYDTSGYYHDAFDVWGQGTMVTVSSASTKGPSVFPLAPSSKSTSGGTAALGCLVKDYFPEPVTVSWNSGALTSGVHTFPAVLQSSGLYSLSSVVTVPSSSLGTQTYICNVNHKPSDTKVDKKVEPKSCDKTHTCPPCPAPPVAGPSVFLFPPKPKDTLMISRTPEVTCVVVDVKHEDPEVKFNWYVDGVEVHNAKTKPREEEYNSTYRVVSVLTVLHQDWLNGKEYKCKVSNKALPAPIEKTISKAKGQPREPQVYTLPPSREEMTKNQVSLTCDVSGFYPSDIAVEWESDGQPENNYKTTPPVLDSDGSFFLYSKLTVDKSRWEQGDVFSCSVLHEALHSHYTQKSLSLSPGK

SEQ ID NO: 26643 - protein, 125 aa, synthetic construct; identical to SEQ ID NO: 26563
  REGION 1..125: note = Description of Artificial Sequence: Synthetic polypeptide
  REGION 1..125: note = VH of XENP023104

SEQ ID NO: 26644 - protein, 5 aa, synthetic construct
  REGION 1..5: note = Description of Artificial Sequence: Synthetic peptide
  REGION 1..5: note = XENP023104 vhCDR1
GYYMH

SEQ ID NO: 26645 - protein, 17 aa, synthetic construct
  REGION 1..17: note = Description of Artificial Sequence: Synthetic peptide
  REGION 1..17: note = XENP023104 vhCDR2
WINPHSGETIYAQKFQG

SEQ ID NO: 26646 - protein, 16 aa, synthetic construct
  REGION 1..16: note = Description of Artificial Sequence: Synthetic peptide
  REGION 1..16: note = XENP023104 vhCDR3
TYYYDTSGYYHDAFDV

SEQ ID NO: 26647 - protein, 480 aa, synthetic construct; identical to SEQ ID NO: 2930
  REGION 1..480: note = Description of Artificial Sequence: Synthetic polypeptide
  REGION 1..480: note = XENP023104 [ICOS]_H0.66_L0_Fab-1G6_L1.194_H1.279 scFv-Fc Heavy Chain

SEQ ID NO: 26648 - protein, 107 aa, synthetic construct; identical to SEQ ID NO: 2871
  REGION 1..107: note = Description of Artificial Sequence: Synthetic polypeptide
  REGION 1..107: note = VH of XENP023104

SEQ ID NO: 26649 - protein, 122 aa, synthetic construct; identical to SEQ ID NO: 2872
  REGION 1..122: note = Description of Artificial Sequence: Synthetic polypeptide
  REGION 1..122: note = VL of XENP023104

SEQ ID NO: 26650 - protein, 231 aa, synthetic construct; identical to SEQ ID NO: 2409
  REGION 1..231: note = Description of Artificial Sequence: Synthetic polypeptide
  REGION 1..231: note = Fc chain of XENP023104

SEQ ID NO: 26651 - protein, 11 aa, synthetic construct
  REGION 1..11: note = Description of Artificial Sequence: Synthetic peptide
  REGION 1..11: note = XENP023104 vhCDR1
RASQSVGNDVA

SEQ ID NO: 26652 - protein, 7 aa, synthetic construct
  REGION 1..7: note = Description of Artificial Sequence: Synthetic peptide
  REGION 1..7: note = XENP023104 vhCDR2
YASHRYT

SEQ ID NO: 26653 - protein, 9 aa, synthetic construct
  REGION 1..9: note = Description of Artificial Sequence: Synthetic peptide
  REGION 1..9: note = XENP023104 vhCDR3
QQDFSSPRT

SEQ ID NO: 26654 - protein, 5 aa, synthetic construct
  REGION 1..5: note = Description of Artificial Sequence: Synthetic peptide
  REGION 1..5: note = XENP023104 vlCDR1
NYWMN

SEQ ID NO: 26655 - protein, 19 aa, synthetic construct
  REGION 1..19: note = Description of Artificial Sequence: Synthetic peptide
  REGION 1..19: note = XENP023104 vlCDR2
EIRLYSNNYATHYAESVKG

SEQ ID NO: 26656 - protein, 11 aa, synthetic construct
  REGION 1..11: note = Description of Artificial Sequence: Synthetic peptide
  REGION 1..11: note = XENP023104 vlCDR3
YYGNYGGYFDV

SEQ ID NO: 26657 - protein, 214 aa, synthetic construct; identical to SEQ ID NO: 26297
  REGION 1..214: note = Description of Artificial Sequence: Synthetic polypeptide
  REGION 1..214: note = XENP023104 [ICOS]_H0.66_L0_Fab-1G6_L1.194_H1.279 Light Chain

SEQ ID NO: 26658 - protein, 107 aa, synthetic construct; identical to SEQ ID NO: 26298
  REGION 1..107: note = Description of Artificial Sequence: Synthetic polypeptide
  REGION 1..107: note = VL of XENP023104

SEQ ID NO: 26659 - protein, 11 aa, synthetic construct
  REGION 1..11: note = Description of Artificial Sequence: Synthetic peptide
  REGION 1..11: note = XENP023104 vlCDR1
RASQGISRLLA

SEQ ID NO: 26660 - protein, 7 aa, synthetic construct
  REGION 1..7: note = Description of Artificial Sequence: Synthetic peptide
  REGION 1..7: note = XENP023104 vlCDR2
VASSLQS

SEQ ID NO: 26661 - protein, 9 aa, synthetic construct
  REGION 1..9: note = Description of Artificial Sequence: Synthetic peptide
  REGION 1..9: note = XENP023104 vlCDR3
QQANSFPWT

SEQ ID NO: 26662 - protein, 454 aa, synthetic construct; identical to SEQ ID NO: 26642
  REGION 1..454: note = Description of Artificial Sequence: Synthetic polypeptide
  REGION 1..454: note = XENP023411 [ICOS]_H0.66_L0.34_Fab-1G6_L1.194_H1.279 Fab-Fc Heavy Chain

SEQ ID NO: 26663 - protein, 125 aa, synthetic construct; identical to SEQ ID NO: 26563
  REGION 1..125: note = Description of Artificial Sequence: Synthetic polypeptide
  REGION 1..125: note = VH of XENP023411

SEQ ID NO: 26664 - protein, 5 aa, synthetic construct
  REGION 1..5: note = Description of Artificial Sequence: Synthetic peptide
  REGION 1..5: note = XENP023411 vhCDR1
GYYMH

SEQ ID NO: 26665 - protein, 17 aa, synthetic construct
  REGION 1..17: note = Description of Artificial Sequence: Synthetic peptide
  REGION 1..17: note = XENP023411 vhCDR2
WINPHSGETIYAQKFQG

SEQ ID NO: 26666 - protein, 16 aa, synthetic construct
  REGION 1..16: note = Description of Artificial Sequence: Synthetic peptide
  REGION 1..16: note = XENP023411 vhCDR3
TYYYDTSGYYHDAFDV

SEQ ID NO: 26667 - protein, 480 aa, synthetic construct; identical to SEQ ID NO: 2930
  REGION 1..480: note = Description of Artificial Sequence: Synthetic polypeptide
  REGION 1..480: note = XENP023411 [ICOS]_H0.66_L0.34_Fab-1G6_L1.194_H1.279 scFv-Fc Heavy Chain

SEQ ID NO: 26668 - protein, 107 aa, synthetic construct; identical to SEQ ID NO: 2871
  REGION 1..107: note = Description of Artificial Sequence: Synthetic polypeptide
  REGION 1..107: note = VH of XENP023411

SEQ ID NO: 26669 - protein, 122 aa, synthetic construct; identical to SEQ ID NO: 2872
  REGION 1..122: note = Description of Artificial Sequence: Synthetic polypeptide
  REGION 1..122: note = VL of XENP023411

SEQ ID NO: 26670 - protein, 231 aa, synthetic construct; identical to SEQ ID NO: 2409
  REGION 1..231: note = Description of Artificial Sequence: Synthetic polypeptide
  REGION 1..231: note = Fc chain of XENP023411

SEQ ID NO: 26671 - protein, 11 aa, synthetic construct
  REGION 1..11: note = Description of Artificial Sequence: Synthetic peptide
  REGION 1..11: note = XENP023411 vhCDR1
RASQSVGNDVA

SEQ ID NO: 26672 - protein, 7 aa, synthetic construct
  REGION 1..7: note = Description of Artificial Sequence: Synthetic peptide
  REGION 1..7: note = XENP023411 vhCDR2
YASHRYT

SEQ ID NO: 26673 - protein, 9 aa, synthetic construct
  REGION 1..9: note = Description of Artificial Sequence: Synthetic peptide
  REGION 1..9: note = XENP023411 vhCDR3
QQDFSSPRT

SEQ ID NO: 26674 - protein, 5 aa, synthetic construct
  REGION 1..5: note = Description of Artificial Sequence: Synthetic peptide
  REGION 1..5: note = XENP023411 vlCDR1
NYWMN

SEQ ID NO: 26675 - protein, 19 aa, synthetic construct
  REGION 1..19: note = Description of Artificial Sequence: Synthetic peptide
  REGION 1..19: note = XENP023411 vlCDR2
EIRLYSNNYATHYAESVKG

SEQ ID NO: 26676 - protein, 11 aa, synthetic construct
  REGION 1..11: note = Description of Artificial Sequence: Synthetic peptide
  REGION 1..11: note = XENP023411 vlCDR3
YYGNYGGYFDV

SEQ ID NO: 26677 - protein, 214 aa, synthetic construct; identical to SEQ ID NO: 26497
  REGION 1..214: note = Description of Artificial Sequence: Synthetic polypeptide
  REGION 1..214: note = XENP023411 [ICOS]_H0.66_L0.34_Fab-1G6_L1.194_H1.279 Light Chain

SEQ ID NO: 26678 - protein, 107 aa, synthetic construct; identical to SEQ ID NO: 26498
  REGION 1..107: note = Description of Artificial Sequence: Synthetic polypeptide
  REGION 1..107: note = VL of XENP023411

SEQ ID NO: 26679 - protein, 11 aa, synthetic construct
  REGION 1..11: note = Description of Artificial Sequence: Synthetic peptide
  REGION 1..11: note = XENP023411 vlCDR1
QASQDISRLLA

SEQ ID NO: 26680 - protein, 7 aa, synthetic construct
  REGION 1..7: note = Description of Artificial Sequence: Synthetic peptide
  REGION 1..7: note = XENP023411 vlCDR2
VASSLQS

SEQ ID NO: 26681 - protein, 9 aa, synthetic construct
  REGION 1..9: note = Description of Artificial Sequence: Synthetic peptide
  REGION 1..9: note = XENP023411 vlCDR3
QQAESFPWT

SEQ ID NO: 26682 - protein, 452 aa, synthetic construct
  REGION 1..452: note = Description of Artificial Sequence: Synthetic polypeptide
  REGION 1..452: note = XENP021828 GSK_314.8[ICOS]_H0L0_Fab-1G6_L1.194_H1.279_scFv Fab-Fc Heavy Chain
QVQLQQPGTELMKPGASVKLSCKASGYTFTTYWMHWVKQRPGQGLEWIGEIDPSDSYVNYNQNFKGKATLTVDKSSSTAYIQLSSLTSEDSAVYFCARSPDYYGTSLAWFDYWGQGTLVTVSTASTKGPSVFPLAPSSKSTSGGTAALGCLVKDYFPEPVTVSWNSGALTSGVHTFPAVLQSSGLYSLSSVVTVPSSSLGTQTYICNVNHKPSDTKVDKKVEPKSCDKTHTCPPCPAPPVAGPSVFLFPPKPKDTLMISRTPEVTCVVVDVKHEDPEVKFNWYVDGVEVHNAKTKPREEEYNSTYRVVSVLTVLHQDWLNGKEYKCKVSNKALPAPIEKTISKAKGQPREPQVYTLPPSREEMTKNQVSLTCDVSGFYPSDIAVEWESDGQPENNYKTTPPVLDSDGSFFLYSKLTVDKSRWEQGDVFSCSVMHEALHNHYTQKSLSLSPGK

SEQ ID NO: 26683 - protein, 123 aa, synthetic construct; identical to SEQ ID NO: 26303
  REGION 1..123: note = Description of Artificial Sequence: Synthetic polypeptide
  REGION 1..123: note = VH of XENP021828

SEQ ID NO: 26684 - protein, 5 aa, synthetic construct
  REGION 1..5: note = Description of Artificial Sequence: Synthetic peptide
  REGION 1..5: note = XENP021828 vhCDR1
TYWMH

SEQ ID NO: 26685 - protein, 17 aa, synthetic construct
  REGION 1..17: note = Description of Artificial Sequence: Synthetic peptide
  REGION 1..17: note = XENP021828 vhCDR2
EIDPSDSYVNYNQNFKG

SEQ ID NO: 26686 - protein, 14 aa, synthetic construct
  REGION 1..14: note = Description of Artificial Sequence: Synthetic peptide
  REGION 1..14: note = XENP021828 vhCDR3
SPDYYGTSLAWFDY

SEQ ID NO: 26687 - protein, 480 aa, synthetic construct; identical to SEQ ID NO: 2870
  REGION 1..480: note = Description of Artificial Sequence: Synthetic polypeptide
  REGION 1..480: note = XENP021828 GSK_314.8[ICOS]_H0L0_Fab-1G6_L1.194_H1.279_scFv scFv-Fc Heavy Chain

SEQ ID NO: 26688 - protein, 107 aa, synthetic construct; identical to SEQ ID NO: 2871
  REGION 1..107: note = Description of Artificial Sequence: Synthetic polypeptide
  REGION 1..107: note = VH of XENP021828

SEQ ID NO: 26689 - protein, 122 aa, synthetic construct; identical to SEQ ID NO: 2872
  REGION 1..122: note = Description of Artificial Sequence: Synthetic polypeptide
  REGION 1..122: note = VL of XENP021828

SEQ ID NO: 26690 - protein, 231 aa, synthetic construct; identical to SEQ ID NO: 2397
  REGION 1..231: note = Description of Artificial Sequence: Synthetic polypeptide
  REGION 1..231: note = Fc chain of XENP021828

SEQ ID NO: 26691 - protein, 11 aa, synthetic construct
  REGION 1..11: note = Description of Artificial Sequence: Synthetic peptide
  REGION 1..11: note = XENP021828 vhCDR1
RASQSVGNDVA

SEQ ID NO: 26692 - protein, 7 aa, synthetic construct
  REGION 1..7: note = Description of Artificial Sequence: Synthetic peptide
  REGION 1..7: note = XENP021828 vhCDR2
YASHRYT

SEQ ID NO: 26693 - protein, 9 aa, synthetic construct
  REGION 1..9: note = Description of Artificial Sequence: Synthetic peptide
  REGION 1..9: note = XENP021828 vhCDR3
QQDFSSPRT

SEQ ID NO: 26694 - protein, 5 aa, synthetic construct
  REGION 1..5: note = Description of Artificial Sequence: Synthetic peptide
  REGION 1..5: note = XENP021828 vlCDR1
NYWMN

SEQ ID NO: 26695 - protein, 19 aa, synthetic construct
  REGION 1..19: note = Description of Artificial Sequence: Synthetic peptide
  REGION 1..19: note = XENP021828 vlCDR2
EIRLYSNNYATHYAESVKG

SEQ ID NO: 26696 - protein, 11 aa, synthetic construct
  REGION 1..11: note = Description of Artificial Sequence: Synthetic peptide
  REGION 1..11: note = XENP021828 vlCDR3
YYGNYGGYFDV

SEQ ID NO: 26697 - protein, 219 aa, synthetic construct; identical to SEQ ID NO: 26307
  REGION 1..219: note = Description of Artificial Sequence: Synthetic polypeptide
  REGION 1..219: note = XENP021828 GSK_314.8[ICOS]_H0L0_Fab-1G6_L1.194_H1.279_scFv Light Chain

SEQ ID NO: 26698 - protein, 112 aa, synthetic construct; identical to SEQ ID NO: 26308
  REGION 1..112: note = Description of Artificial Sequence: Synthetic polypeptide
  REGION 1..112: note = VL of XENP021828

SEQ ID NO: 26699 - protein, 16 aa, synthetic construct
  REGION 1..16: note = Description of Artificial Sequence: Synthetic peptide
  REGION 1..16: note = XENP021828 vlCDR1
RSSKSPLHSNGNIYLY

SEQ ID NO: 26700 - protein, 7 aa, synthetic construct
  REGION 1..7: note = Description of Artificial Sequence: Synthetic peptide
  REGION 1..7: note = XENP021828 vlCDR2
RMSNLAS

SEQ ID NO: 26701 - protein, 9 aa, synthetic construct
  REGION 1..9: note = Description of Artificial Sequence: Synthetic peptide
  REGION 1..9: note = XENP021828 vlCDR3
MQHLEYPYT

SEQ ID NO: 26702 - protein, 453 aa, synthetic construct
  REGION 1..453: note = Description of Artificial Sequence: Synthetic polypeptide
  REGION 1..453: note = XENP021829 GSK_88.2[ICOS]_H0L0_Fab-1G6_L1.194_H1.279_scFv Fab-Fc Heavy Chain
QVQLQQPGAELVRPGASVKLSCKASGYSFTSYWINWVKQRPGQGLEWIGNIYPSDSYTNYNQMFKDKATLTVDKSSNTAYMQLTSPTSEDSAVYYCTRWNLSYYFDNNYYLDYWGQGTTLTVSSASTKGPSVFPLAPSSKSTSGGTAALGCLVKDYFPEPVTVSWNSGALTSGVHTFPAVLQSSGLYSLSSVVTVPSSSLGTQTYICNVNHKPSDTKVDKKVEPKSCDKTHTCPPCPAPPVAGPSVFLFPPKPKDTLMISRTPEVTCVVVDVKHEDPEVKFNWYVDGVEVHNAKTKPREEEYNSTYRVVSVLTVLHQDWLNGKEYKCKVSNKALPAPIEKTISKAKGQPREPQVYTLPPSREEMTKNQVSLTCDVSGFYPSDIAVEWESDGQPENNYKTTPPVLDSDGSFFLYSKLTVDKSRWEQGDVFSCSVMHEALHNHYTQKSLSLSPGK

SEQ ID NO: 26703 - protein, 124 aa, synthetic construct; identical to SEQ ID NO: 26313
  REGION 1..124: note = Description of Artificial Sequence: Synthetic polypeptide
  REGION 1..124: note = VH of XENP021829

SEQ ID NO: 26704 - protein, 5 aa, synthetic construct
  REGION 1..5: note = Description of Artificial Sequence: Synthetic peptide
  REGION 1..5: note = XENP021829 vhCDR1
SYWIN

SEQ ID NO: 26705 - protein, 17 aa, synthetic construct
  REGION 1..17: note = Description of Artificial Sequence: Synthetic peptide
  REGION 1..17: note = XENP021829 vhCDR2
NIYPSDSYTNYNQMFKD

SEQ ID NO: 26706 - protein, 15 aa, synthetic construct
  REGION 1..15: note = Description of Artificial Sequence: Synthetic peptide
  REGION 1..15: note = XENP021829 vhCDR3
WNLSYYFDNNYYLDY

SEQ ID NO: 26707 - protein, 480 aa, synthetic construct; identical to SEQ ID NO: 2870
  REGION 1..480: note = Description of Artificial Sequence: Synthetic polypeptide
  REGION 1..480: note = XENP021829 GSK_88.2[ICOS]_H0L0_Fab-1G6_L1.194_H1.279_scFv scFv-Fc Heavy Chain

SEQ ID NO: 26708 - protein, 107 aa, synthetic construct; identical to SEQ ID NO: 2871
  REGION 1..107: note = Description of Artificial Sequence: Synthetic polypeptide
  REGION 1..107: note = VH of XENP021829

SEQ ID NO: 26709 - protein, 122 aa, synthetic construct; identical to SEQ ID NO: 2872
  REGION 1..122: note = Description of Artificial Sequence: Synthetic polypeptide
  REGION 1..122: note = VL of XENP021829

SEQ ID NO: 26710 - protein, 231 aa, synthetic construct; identical to SEQ ID NO: 2397
  REGION 1..231: note = Description of Artificial Sequence: Synthetic polypeptide
  REGION 1..231: note = Fc chain of XENP021829

SEQ ID NO: 26711 - protein, 11 aa, synthetic construct
  REGION 1..11: note = Description of Artificial Sequence: Synthetic peptide
  REGION 1..11: note = XENP021829 vhCDR1
RASQSVGNDVA

SEQ ID NO: 26712 - protein, 7 aa, synthetic construct
  REGION 1..7: note = Description of Artificial Sequence: Synthetic peptide
  REGION 1..7: note = XENP021829 vhCDR2
YASHRYT

SEQ ID NO: 26713 - protein, 9 aa, synthetic construct
  REGION 1..9: note = Description of Artificial Sequence: Synthetic peptide
  REGION 1..9: note = XENP021829 vhCDR3
QQDFSSPRT

SEQ ID NO: 26714 - protein, 5 aa, synthetic construct
  REGION 1..5: note = Description of Artificial Sequence: Synthetic peptide
  REGION 1..5: note = XENP021829 vlCDR1
NYWMN

SEQ ID NO: 26715 - protein, 19 aa, synthetic construct
  REGION 1..19: note = Description of Artificial Sequence: Synthetic peptide
  REGION 1..19: note = XENP021829 vlCDR2
EIRLYSNNYATHYAESVKG

SEQ ID NO: 26716 - protein, 11 aa, synthetic construct
  REGION 1..11: note = Description of Artificial Sequence: Synthetic peptide
  REGION 1..11: note = XENP021829 vlCDR3
YYGNYGGYFDV

SEQ ID NO: 26717 - protein, 219 aa, synthetic construct; identical to SEQ ID NO: 26317
  REGION 1..219: note = Description of Artificial Sequence: Synthetic polypeptide
  REGION 1..219: note = XENP021829 GSK_88.2[ICOS]_H0L0_Fab-1G6_L1.194_H1.279_scFv Light Chain

SEQ ID NO: 26718 - protein, 112 aa, synthetic construct; identical to SEQ ID NO: 26318
  REGION 1..112: note = Description of Artificial Sequence: Synthetic polypeptide
  REGION 1..112: note = VL of XENP021829

SEQ ID NO: 26719 - protein, 16 aa, synthetic construct
  REGION 1..16: note = Description of Artificial Sequence: Synthetic peptide
  REGION 1..16: note = XENP021829 vlCDR1
RSSKSLLHSNGNTYLY

SEQ ID NO: 26720 - protein, 7 aa, synthetic construct
  REGION 1..7: note = Description of Artificial Sequence: Synthetic peptide
  REGION 1..7: note = XENP021829 vlCDR2
RMSNLAS

SEQ ID NO: 26721 - protein, 9 aa, synthetic construct
  REGION 1..9: note = Description of Artificial Sequence: Synthetic peptide
  REGION 1..9: note = XENP021829 vlCDR3
MQHLEYPWT

SEQ ID NO: 26722 - protein, 454 aa, synthetic construct
  REGION 1..454: note = Description of Artificial Sequence: Synthetic polypeptide
  REGION 1..454: note = XENP021830 jMab-138[ICOS]_H0L0_Fab-1G6_L1.194_H1.279_scFv Fab-Fc Heavy Chain
EVQLVESGGGLVQPGGSLRLSCAASGFTFSSYDMHWVRQATGKGLEWVSAIGTAGDTYYPGSVKGRFTISRENAKNSLYLQMNSLRAGDTAVYYCVRDNRKVTHEHYYYYGMDVWGQGTTVTVSSASTKGPSVFPLAPSSKSTSGGTAALGCLVKDYFPEPVTVSWNSGALTSGVHTFPAVLQSSGLYSLSSVVTVPSSSLGTQTYICNVNHKPSDTKVDKKVEPKSCDKTHTCPPCPAPPVAGPSVFLFPPKPKDTLMISRTPEVTCVVVDVKHEDPEVKFNWYVDGVEVHNAKTKPREEEYNSTYRVVSVLTVLHQDWLNGKEYKCKVSNKALPAPIEKTISKAKGQPREPQVYTLPPSREEMTKNQVSLTCDVSGFYPSDIAVEWESDGQPENNYKTTPPVLDSDGSFFLYSKLTVDKSRWEQGDVFSCSVMHEALHNHYTQKSLSLSPGK

SEQ ID NO: 26723 - protein, 125 aa, synthetic construct; identical to SEQ ID NO: 26323
  REGION 1..125: note = Description of Artificial Sequence: Synthetic polypeptide
  REGION 1..125: note = VH of XENP021830

SEQ ID NO: 26724 - protein, 5 aa, synthetic construct
  REGION 1..5: note = Description of Artificial Sequence: Synthetic peptide
  REGION 1..5: note = XENP021830 vhCDR1
SYDMH

SEQ ID NO: 26725 - protein, 16 aa, synthetic construct
  REGION 1..16: note = Description of Artificial Sequence: Synthetic peptide
  REGION 1..16: note = XENP021830 vhCDR2
AIGTAGDTYYPGSVKG

SEQ ID NO: 26726 - protein, 17 aa, synthetic construct
  REGION 1..17: note = Description of Artificial Sequence: Synthetic peptide
  REGION 1..17: note = XENP021830 vhCDR3
DNRKVTHEHYYYYGMDV

SEQ ID NO: 26727 - protein, 480 aa, synthetic construct; identical to SEQ ID NO: 2870
  REGION 1..480: note = Description of Artificial Sequence: Synthetic polypeptide
  REGION 1..480: note = XENP021830 jMab-138[ICOS]_H0L0_Fab-1G6_L1.194_H1.279_scFv scFv-Fc Heavy Chain

SEQ ID NO: 26728 - protein, 107 aa, synthetic construct; identical to SEQ ID NO: 2871
  REGION 1..107: note = Description of Artificial Sequence: Synthetic polypeptide
  REGION 1..107: note = VH of XENP021830

SEQ ID NO: 26729 - protein, 122 aa, synthetic construct; identical to SEQ ID NO: 2872
  REGION 1..122: note = Description of Artificial Sequence: Synthetic polypeptide
  REGION 1..122: note = VL of XENP021830

SEQ ID NO: 26730 - protein, 231 aa, synthetic construct; identical to SEQ ID NO: 2397
  REGION 1..231: note = Description of Artificial Sequence: Synthetic polypeptide
  REGION 1..231: note = Fc chain of XENP021830

SEQ ID NO: 26731 - protein, 11 aa, synthetic construct
  REGION 1..11: note = Description of Artificial Sequence: Synthetic peptide
  REGION 1..11: note = XENP021830 vhCDR1
RASQSVGNDVA

SEQ ID NO: 26732 - protein, 7 aa, synthetic construct
  REGION 1..7: note = Description of Artificial Sequence: Synthetic peptide
  REGION 1..7: note = XENP021830 vhCDR2
YASHRYT

SEQ ID NO: 26733 - protein, 9 aa, synthetic construct
  REGION 1..9: note = Description of Artificial Sequence: Synthetic peptide
  REGION 1..9: note = XENP021830 vhCDR3
QQDFSSPRT

SEQ ID NO: 26734 - protein, 5 aa, synthetic construct
  REGION 1..5: note = Description of Artificial Sequence: Synthetic peptide
  REGION 1..5: note = XENP021830 vlCDR1
NYWMN

SEQ ID NO: 26735 - protein, 19 aa, synthetic construct
  REGION 1..19: note = Description of Artificial Sequence: Synthetic peptide
  REGION 1..19: note = XENP021830 vlCDR2
EIRLYSNNYATHYAESVKG

SEQ ID NO: 26736 - protein, 11 aa, synthetic construct
  REGION 1..11: note = Description of Artificial Sequence: Synthetic peptide
  REGION 1..11: note = XENP021830 vlCDR3
YYGNYGGYFDV

SEQ ID NO: 26737 - protein, 216 aa, synthetic construct; identical to SEQ ID NO: 26327
  REGION 1..216: note = Description of Artificial Sequence: Synthetic polypeptide
  REGION 1..216: note = XENP021830 jMab-138[ICOS]_H0L0_Fab-1G6_L1.194_H1.279_scFv Light Chain

SEQ ID NO: 26738 - protein, 109 aa, synthetic construct; identical to SEQ ID NO: 26328
  REGION 1..109: note = Description of Artificial Sequence: Synthetic polypeptide
  REGION 1..109: note = VL of XENP021830

SEQ ID NO: 26739 - protein, 12 aa, synthetic construct
  REGION 1..12: note = Description of Artificial Sequence: Synthetic peptide
  REGION 1..12: note = XENP021830 vlCDR1
RASQNIRSSYLA

SEQ ID NO: 26740 - protein, 7 aa, synthetic construct
  REGION 1..7: note = Description of Artificial Sequence: Synthetic peptide
  REGION 1..7: note = XENP021830 vlCDR2
GASSRAT

SEQ ID NO: 26741 - protein, 10 aa, synthetic construct
  REGION 1..10: note = Description of Artificial Sequence: Synthetic peptide
  REGION 1..10: note = XENP021830 vlCDR3
QQFGSSPMCS

SEQ ID NO: 26742 - protein, 454 aa, synthetic construct
  REGION 1..454: note = Description of Artificial Sequence: Synthetic polypeptide
  REGION 1..454: note = XENP021831 jMab-139[ICOS]_H0L0_Fab-1G6_L1.194_H1.279_scFv Fab-Fc Heavy Chain
EVQLVESGGGLVQPGGSLRLSCAASGFTFSSYDMHWVRQATGKGLEWVSAIGTAGDTYYPGSVKGRFTISRENAKNSLYLQMNSLRAGDTAVYYCVRDKRTVTHEHYYYYGMDVWGQGTTVTVSSASTKGPSVFPLAPSSKSTSGGTAALGCLVKDYFPEPVTVSWNSGALTSGVHTFPAVLQSSGLYSLSSVVTVPSSSLGTQTYICNVNHKPSDTKVDKKVEPKSCDKTHTCPPCPAPPVAGPSVFLFPPKPKDTLMISRTPEVTCVVVDVKHEDPEVKFNWYVDGVEVHNAKTKPREEEYNSTYRVVSVLTVLHQDWLNGKEYKCKVSNKALPAPIEKTISKAKGQPREPQVYTLPPSREEMTKNQVSLTCDVSGFYPSDIAVEWESDGQPENNYKTTPPVLDSDGSFFLYSKLTVDKSRWEQGDVFSCSVMHEALHNHYTQKSLSLSPGK

SEQ ID NO: 26743 - protein, 125 aa, synthetic construct; identical to SEQ ID NO: 26333
  REGION 1..125: note = Description of Artificial Sequence: Synthetic polypeptide
  REGION 1..125: note = VH of XENP021831

SEQ ID NO: 26744 - protein, 5 aa, synthetic construct
  REGION 1..5: note = Description of Artificial Sequence: Synthetic peptide
  REGION 1..5: note = XENP021831 vhCDR1
SYDMH

SEQ ID NO: 26745 - protein, 16 aa, synthetic construct
  REGION 1..16: note = Description of Artificial Sequence: Synthetic peptide
  REGION 1..16: note = XENP021831 vhCDR2
AIGTAGDTYYPGSVKG

SEQ ID NO: 26746 - protein, 17 aa, synthetic construct
  REGION 1..17: note = Description of Artificial Sequence: Synthetic peptide
  REGION 1..17: note = XENP021831 vhCDR3
DKRTVTHEHYYYYGMDV

SEQ ID NO: 26747 - protein, 480 aa, synthetic construct; identical to SEQ ID NO: 2870
  REGION 1..480: note = Description of Artificial Sequence: Synthetic polypeptide
  REGION 1..480: note = XENP021831 jMab-139[ICOS]_H0L0_Fab-1G6_L1.194_H1.279_scFv scFv-Fc Heavy Chain

SEQ ID NO: 26748 - protein, 107 aa, synthetic construct; identical to SEQ ID NO: 2871
  REGION 1..107: note = Description of Artificial Sequence: Synthetic polypeptide
  REGION 1..107: note = VH of XENP021831

SEQ ID NO: 26749 - protein, 122 aa, synthetic construct; identical to SEQ ID NO: 2872
  REGION 1..122: note = Description of Artificial Sequence: Synthetic polypeptide
  REGION 1..122: note = VL of XENP021831

SEQ ID NO: 26750 - protein, 231 aa, synthetic construct; identical to SEQ ID NO: 2397
  REGION 1..231: note = Description of Artificial Sequence: Synthetic polypeptide
  REGION 1..231: note = Fc chain of XENP021831

SEQ ID NO: 26751 - protein, 11 aa, synthetic construct
  REGION 1..11: note = Description of Artificial Sequence: Synthetic peptide
  REGION 1..11: note = XENP021831 vhCDR1
RASQSVGNDVA

SEQ ID NO: 26752 - protein, 7 aa, synthetic construct
  REGION 1..7: note = Description of Artificial Sequence: Synthetic peptide
  REGION 1..7: note = XENP021831 vhCDR2
YASHRYT

SEQ ID NO: 26753 - protein, 9 aa, synthetic construct
  REGION 1..9: note = Description of Artificial Sequence: Synthetic peptide
  REGION 1..9: note = XENP021831 vhCDR3
QQDFSSPRT

SEQ ID NO: 26754 - protein, 5 aa, synthetic construct
  REGION 1..5: note = Description of Artificial Sequence: Synthetic peptide
  REGION 1..5: note = XENP021831 vlCDR1
NYWMN

SEQ ID NO: 26755 - protein, 19 aa, synthetic construct
  REGION 1..19: note = Description of Artificial Sequence: Synthetic peptide
  REGION 1..19: note = XENP021831 vlCDR2
EIRLYSNNYATHYAESVKG

SEQ ID NO: 26756 - protein, 11 aa, synthetic construct
  REGION 1..11: note = Description of Artificial Sequence: Synthetic peptide
  REGION 1..11: note = XENP021831 vlCDR3
YYGNYGGYFDV

SEQ ID NO: 26757 - protein, 216 aa, synthetic construct; identical to SEQ ID NO: 26337
  REGION 1..216: note = Description of Artificial Sequence: Synthetic polypeptide
  REGION 1..216: note = XENP021831 jMab-139[ICOS]_H0L0_Fab-1G6_L1.194_H1.279_scFv Light Chain

SEQ ID NO: 26758 - protein, 109 aa, synthetic construct; identical to SEQ ID NO: 26338
  REGION 1..109: note = Description of Artificial Sequence: Synthetic polypeptide
  REGION 1..109: note = VL of XENP021831

SEQ ID NO: 26759 - protein, 12 aa, synthetic construct
  REGION 1..12: note = Description of Artificial Sequence: Synthetic peptide
  REGION 1..12: note = XENP021831 vlCDR1
RASQSISSSSLA

SEQ ID NO: 26760 - protein, 7 aa, synthetic construct
  REGION 1..7: note = Description of Artificial Sequence: Synthetic peptide
  REGION 1..7: note = XENP021831 vlCDR2
GASSRAT

SEQ ID NO: 26761 - protein, 10 aa, synthetic construct
  REGION 1..10: note = Description of Artificial Sequence: Synthetic peptide
  REGION 1..10: note = XENP021831 vlCDR3
QQFGSSPMCS

SEQ ID NO: 26762 - protein, 450 aa, synthetic construct
  REGION 1..450: note = Description of Artificial Sequence: Synthetic polypeptide
  REGION 1..450: note = XENP022348 WO2016059602_GSK_H0L0_Fab-1G6_L1.194_H1.279_scFv Fab-Fc Heavy Chain
QVQLVQSGAEVKKPGSSVKVSCKASGYTFTDYAMHWVRQAPGQGLEWMGLISIYSDHTNYNQKFQGRVTITADKSTSTAYMELSSLRSEDTAVYYCGRNNYGNYGWYFDVWGQGTTVTVSSASTKGPSVFPLAPSSKSTSGGTAALGCLVKDYFPEPVTVSWNSGALTSGVHTFPAVLQSSGLYSLSSVVTVPSSSLGTQTYICNVNHKPSDTKVDKKVEPKSCDKTHTCPPCPAPPVAGPSVFLFPPKPKDTLMISRTPEVTCVVVDVKHEDPEVKFNWYVDGVEVHNAKTKPREEEYNSTYRVVSVLTVLHQDWLNGKEYKCKVSNKALPAPIEKTISKAKGQPREPQVYTLPPSREEMTKNQVSLTCDVSGFYPSDIAVEWESDGQPENNYKTTPPVLDSDGSFFLYSKLTVDKSRWEQGDVFSCSVMHEALHNHYTQKSLSLSPGK

SEQ ID NO: 26763 - protein, 121 aa, synthetic construct; identical to SEQ ID NO: 26343
  REGION 1..121: note = Description of Artificial Sequence: Synthetic polypeptide
  REGION 1..121: note = VH of XENP022348

SEQ ID NO: 26764 - protein, 5 aa, synthetic construct
  REGION 1..5: note = Description of Artificial Sequence: Synthetic peptide
  REGION 1..5: note = XENP022348 vhCDR1
DYAMH

SEQ ID NO: 26765 - protein, 17 aa, synthetic construct
  REGION 1..17: note = Description of Artificial Sequence: Synthetic peptide
  REGION 1..17: note = XENP022348 vhCDR2
LISIYSDHTNYNQKFQG

SEQ ID NO: 26766 - protein, 12 aa, synthetic construct
  REGION 1..12: note = Description of Artificial Sequence: Synthetic peptide
  REGION 1..12: note = XENP022348 vhCDR3
NNYGNYGWYFDV

SEQ ID NO: 26767 - protein, 480 aa, synthetic construct; identical to SEQ ID NO: 2870
  REGION 1..480: note = Description of Artificial Sequence: Synthetic polypeptide
  REGION 1..480: note = XENP022348 WO2016059602_GSK_H0L0_Fab-1G6_L1.194_H1.279_scFv scFv-Fc Heavy Chain

SEQ ID NO: 26768 - protein, 107 aa, synthetic construct; identical to SEQ ID NO: 2871
  REGION 1..107: note = Description of Artificial Sequence: Synthetic polypeptide
  REGION 1..107: note = VH of XENP022348

SEQ ID NO: 26769 - protein, 122 aa, synthetic construct; identical to SEQ ID NO: 2872
  REGION 1..122: note = Description of Artificial Sequence: Synthetic polypeptide
  REGION 1..122: note = VL of XENP022348

SEQ ID NO: 26770 - protein, 231 aa, synthetic construct; identical to SEQ ID NO: 2397
  REGION 1..231: note = Description of Artificial Sequence: Synthetic polypeptide
  REGION 1..231: note = Fc chain of XENP022348

SEQ ID NO: 26771 - protein, 11 aa, synthetic construct
  REGION 1..11: note = Description of Artificial Sequence: Synthetic peptide
  REGION 1..11: note = XENP022348 vhCDR1
RASQSVGNDVA

SEQ ID NO: 26772 - protein, 7 aa, synthetic construct
  REGION 1..7: note = Description of Artificial Sequence: Synthetic peptide
  REGION 1..7: note = XENP022348 vhCDR2
YASHRYT

SEQ ID NO: 26773 - protein, 9 aa, synthetic construct
  REGION 1..9: note = Description of Artificial Sequence: Synthetic peptide
  REGION 1..9: note = XENP022348 vhCDR3
QQDFSSPRT

SEQ ID NO: 26774 - protein, 5 aa, synthetic construct
  REGION 1..5: note = Description of Artificial Sequence: Synthetic peptide
  REGION 1..5: note = XENP022348 vlCDR1
NYWMN

SEQ ID NO: 26775 - protein, 19 aa, synthetic construct
  REGION 1..19: note = Description of Artificial Sequence: Synthetic peptide
  REGION 1..19: note = XENP022348 vlCDR2
EIRLYSNNYATHYAESVKG

SEQ ID NO: 26776 - protein, 11 aa, synthetic construct
  REGION 1..11: note = Description of Artificial Sequence: Synthetic peptide
  REGION 1..11: note = XENP022348 vlCDR3
YYGNYGGYFDV

SEQ ID NO: 26777 - protein, 213 aa, synthetic construct; identical to SEQ ID NO: 26347
  REGION 1..213: note = Description of Artificial Sequence: Synthetic polypeptide
  REGION 1..213: note = XENP022348 WO2016059602_GSK_H0L0_Fab-1G6_L1.194_H1.279_scFv Light Chain

SEQ ID NO: 26778 - protein, 106 aa, synthetic construct; identical to SEQ ID NO: 26348
  REGION 1..106: note = Description of Artificial Sequence: Synthetic polypeptide
  REGION 1..106: note = VL of XENP022348

SEQ ID NO: 26779 - protein, 10 aa, synthetic construct
  REGION 1..10: note = Description of Artificial Sequence: Synthetic peptide
  REGION 1..10: note = XENP022348 vlCDR1
SASSSVSYMH

SEQ ID NO: 26780 - protein, 7 aa, synthetic construct
  REGION 1..7: note = Description of Artificial Sequence: Synthetic peptide
  REGION 1..7: note = XENP022348 vlCDR2
DTSKLAS

SEQ ID NO: 26781 - protein, 9 aa, synthetic construct
  REGION 1..9: note = Description of Artificial Sequence: Synthetic peptide
  REGION 1..9: note = XENP022348 vlCDR3
FQGSGYPYT

SEQ ID NO: 26782 - protein, 446 aa, synthetic construct
  REGION 1..446: note = Description of Artificial Sequence: Synthetic polypeptide
  REGION 1..446: note = XENP023059 Jounce_37A10S713[ICOS]_H0L0_Fab-1G6_[PD-1]_L1.194 _H1.279_scFv Fab-Fc Heavy Chain
EVQLVESGGGLVQPGGSLRLSCAASGFTFSDYWMDWVRQAPGKGLVWVSNIDEDGSITEYSPFVKGRFTISRDNAKNTLYLQMNSLRAEDTAVYYCTRWGRFGFDSWGQGTLVTVSSASTKGPSVFPLAPSSKSTSGGTAALGCLVKDYFPEPVTVSWNSGALTSGVHTFPAVLQSSGLYSLSSVVTVPSSSLGTQTYICNVNHKPSDTKVDKKVEPKSCDKTHTCPPCPAPPVAGPSVFLFPPKPKDTLMISRTPEVTCVVVDVKHEDPEVKFNWYVDGVEVHNAKTKPREEEYNSTYRVVSVLTVLHQDWLNGKEYKCKVSNKALPAPIEKTISKAKGQPREPQVYTLPPSREEMTKNQVSLTCDVSGFYPSDIAVEWESDGQPENNYKTTPPVLDSDGSFFLYSKLTVDKSRWEQGDVFSCSVMHEALHNHYTQKSLSLSPGK

SEQ ID NO: 26783 - protein, 117 aa, synthetic construct; identical to SEQ ID NO: 26353
  REGION 1..117: note = Description of Artificial Sequence: Synthetic polypeptide
  REGION 1..117: note = VH of XENP023059

SEQ ID NO: 26784 - protein, 5 aa, synthetic construct
  REGION 1..5: note = Description of Artificial Sequence: Synthetic peptide
  REGION 1..5: note = XENP023059 vhCDR1
DYWMD

SEQ ID NO: 26785 - protein, 17 aa, synthetic construct
  REGION 1..17: note = Description of Artificial Sequence: Synthetic peptide
  REGION 1..17: note = XENP023059 vhCDR2
NIDEDGSITEYSPFVKG

SEQ ID NO: 26786 - protein, 8 aa, synthetic construct
  REGION 1..8: note = Description of Artificial Sequence: Synthetic peptide
  REGION 1..8: note = XENP023059 vhCDR3
WGRFGFDS

SEQ ID NO: 26787 - protein, 480 aa, synthetic construct; identical to SEQ ID NO: 2870
  REGION 1..480: note = Description of Artificial Sequence: Synthetic polypeptide
  REGION 1..480: note = XENP023059 Jounce_37A10S713[ICOS]_H0L0_Fab-1G6_[PD-1]_L1.194 _H1.279_scFv scFv-Fc Heavy Chain

SEQ ID NO: 26788 - protein, 107 aa, synthetic construct; identical to SEQ ID NO: 2871
  REGION 1..107: note = Description of Artificial Sequence: Synthetic polypeptide
  REGION 1..107: note = VH of XENP023059

SEQ ID NO: 26789 - protein, 122 aa, synthetic construct; identical to SEQ ID NO: 2872
  REGION 1..122: note = Description of Artificial Sequence: Synthetic polypeptide
  REGION 1..122: note = VL of XENP023059

SEQ ID NO: 26790 - protein, 231 aa, synthetic construct; identical to SEQ ID NO: 2397
  REGION 1..231: note = Description of Artificial Sequence: Synthetic polypeptide
  REGION 1..231: note = Fc chain of XENP023059

SEQ ID NO: 26791 - protein, 11 aa, synthetic construct
  REGION 1..11: note = Description of Artificial Sequence: Synthetic peptide
  REGION 1..11: note = XENP023059 vhCDR1
RASQSVGNDVA

SEQ ID NO: 26792 - protein, 7 aa, synthetic construct
  REGION 1..7: note = Description of Artificial Sequence: Synthetic peptide
  REGION 1..7: note = XENP023059 vhCDR2
YASHRYT

SEQ ID NO: 26793 - protein, 9 aa, synthetic construct
  REGION 1..9: note = Description of Artificial Sequence: Synthetic peptide
  REGION 1..9: note = XENP023059 vhCDR3
QQDFSSPRT

SEQ ID NO: 26794 - protein, 5 aa, synthetic construct
  REGION 1..5: note = Description of Artificial Sequence: Synthetic peptide
  REGION 1..5: note = XENP023059 vlCDR1
NYWMN

SEQ ID NO: 26795 - protein, 19 aa, synthetic construct
  REGION 1..19: note = Description of Artificial Sequence: Synthetic peptide
  REGION 1..19: note = XENP023059 vlCDR2
EIRLYSNNYATHYAESVKG

SEQ ID NO: 26796 - protein, 11 aa, synthetic construct
  REGION 1..11: note = Description of Artificial Sequence: Synthetic peptide
  REGION 1..11: note = XENP023059 vlCDR3
YYGNYGGYFDV

SEQ ID NO: 26797 - protein, 218 aa, synthetic construct; identical to SEQ ID NO: 26357
  REGION 1..218: note = Description of Artificial Sequence: Synthetic polypeptide
  REGION 1..218: note = XENP023059 Jounce_37A10S713[ICOS]_H0L0_Fab-1G6_[PD-1]_L1.194 _H1.279_scFv Light Chain

SEQ ID NO: 26798 - protein, 111 aa, synthetic construct; identical to SEQ ID NO: 26358
  REGION 1..111: note = Description of Artificial Sequence: Synthetic polypeptide
  REGION 1..111: note = VL of XENP023059

SEQ ID NO: 26799 - protein, 15 aa, synthetic construct
  REGION 1..15: note = Description of Artificial Sequence: Synthetic peptide
  REGION 1..15: note = XENP023059 vlCDR1
KSSQSLLSGSFNYLT

SEQ ID NO: 26800 - protein, 7 aa, synthetic construct
  REGION 1..7: note = Description of Artificial Sequence: Synthetic peptide
  REGION 1..7: note = XENP023059 vlCDR2
YASTRHT

SEQ ID NO: 26801 - protein, 9 aa, synthetic construct
  REGION 1..9: note = Description of Artificial Sequence: Synthetic peptide
  REGION 1..9: note = XENP023059 vlCDR3
HHHYNAPPT

SEQ ID NO: 26802 - protein, 442 aa, synthetic construct
  REGION 1..442: note = Description of Artificial Sequence: Synthetic polypeptide
  REGION 1..442: note = XENP018920 nivolumab[PD-1]_H0L0_Fab-[anti-ICOS]_H0L0 _scFv Fab-Fc Heavy Chain
QVQLVESGGGVVQPGRSLRLDCKASGITFSNSGMHWVRQAPGKGLEWVAVIWYDGSKRYYADSVKGRFTISRDNSKNTLFLQMNSLRAEDTAVYYCATNDDYWGQGTLVTVSSASTKGPSVFPLAPSSKSTSGGTAALGCLVKDYFPEPVTVSWNSGALTSGVHTFPAVLQSSGLYSLSSVVTVPSSSLGTQTYICNVNHKPSDTKVDKKVEPKSCDKTHTCPPCPAPPVAGPSVFLFPPKPKDTLMISRTPEVTCVVVDVKHEDPEVKFNWYVDGVEVHNAKTKPREEEYNSTYRVVSVLTVLHQDWLNGKEYKCKVSNKALPAPIEKTISKAKGQPREPQVYTLPPSREEMTKNQVSLTCDVSGFYPSDIAVEWESDGQPENNYKTTPPVLDSDGSFFLYSKLTVDKSRWEQGDVFSCSVMHEALHNHYTQKSLSLSPGK

SEQ ID NO: 26803 - protein, 113 aa, synthetic construct [sequence omitted]

SEQ ID NO: 26804 - protein, 5 aa, synthetic construct
  REGION 1..5: note = Description of Artificial Sequence: Synthetic peptide
  REGION 1..5: note = XENP018920 vhCDR1
NSGMH

SEQ ID NO: 26805 - protein, 17 aa, synthetic construct
  REGION 1..17: note = Description of Artificial Sequence: Synthetic peptide
  REGION 1..17: note = XENP018920 vhCDR2
VIWYDGSKRYYADSVKG

SEQ ID NO: 26806 - protein, 4 aa, synthetic construct
  REGION 1..4: note = Description of Artificial Sequence: Synthetic peptide
  REGION 1..4: note = XENP018920 vhCDR3
NDDY

SEQ ID NO: 26807 - protein, 471 aa, synthetic construct
  REGION 1..471: note = Description of Artificial Sequence: Synthetic polypeptide
  REGION 1..471: note = XENP018920 nivolumab[PD-1]_H0L0_Fab-[anti-ICOS]_H0L0 _scFv scFv-Fc Heavy Chain
QVQLVESGGGVVQPGRSLRLSCKASGITFSNSGMHWVRQAPGKGLEWVAVIWYDGSKRYYADSVKGRFTISRDNSKNTLFLQMNSLRAEDTAVYYCATNDDYWGQGTLVTVSSGKPGSGKPGSGKPGSGKPGSEIVLTQSPATLSLSPGERATLSCRASQSVSSYLAWYQQKPGQAPRLLIYDASNRATGIPARFSGSGSGTDFTLTISSLEPEDFAVYYCQQSSNWPRTFGQGTKVEIKEPKSSDKTHTCPPCPAPPVAGPSVFLFPPKPKDTLMISRTPEVTCVVVDVKHEDPEVKFNWYVDGVEVHNAKTKPREEQYNSTYRVVSVLTVLHQDWLNGKEYKCKVSNKALPAPIEKTISKAKGQPREPQVYTLPPSREQMTKNQVKLTCLVKGFYPSDIAVEWESNGQPENNYKTTPPVLDSDGSFFLYSKLTVDKSRWQQGNVFSCSVMHEALHNHYTQKSLSLSPGK

SEQ ID NO: 26808 - protein, 113 aa, synthetic construct; identical to SEQ ID NO: 10886
  REGION 1..113: note = Description of Artificial Sequence: Synthetic polypeptide
  REGION 1..113: note = VH of XENP018920

SEQ ID NO: 26809 - protein, 107 aa, synthetic construct [sequence omitted]

SEQ ID NO: 26810 - protein, 231 aa, synthetic construct; identical to SEQ ID NO: 2397
  REGION 1..231: note = Description of Artificial Sequence: Synthetic polypeptide
  REGION 1..231: note = Fc chain of XENP018920

SEQ ID NO: 26811 - protein, 5 aa, synthetic construct
  REGION 1..5: note = Description of Artificial Sequence: Synthetic peptide
  REGION 1..5: note = XENP018920 vhCDR1
NSGMH

SEQ ID NO: 26812 - protein, 17 aa, synthetic construct
  REGION 1..17: note = Description of Artificial Sequence: Synthetic peptide
  REGION 1..17: note = XENP018920 vhCDR2
VIWYDGSKRYYADSVKG

SEQ ID NO: 26813 - protein, 4 aa, synthetic construct
  REGION 1..4: note = Description of Artificial Sequence: Synthetic peptide
  REGION 1..4: note = XENP018920 vhCDR3
NDDY

SEQ ID NO: 26814 - protein, 11 aa, synthetic construct
  REGION 1..11: note = Description of Artificial Sequence: Synthetic peptide
  REGION 1..11: note = XENP018920 vlCDR1
RASQSVSSYLA

SEQ ID NO: 26815 - protein, 7 aa, synthetic construct
  REGION 1..7: note = Description of Artificial Sequence: Synthetic peptide
  REGION 1..7: note = XENP018920 vlCDR2
DASNRAT

SEQ ID NO: 26816 - protein, 9 aa, synthetic construct
  REGION 1..9: note = Description of Artificial Sequence: Synthetic peptide
  REGION 1..9: note = XENP018920 vlCDR3
QQSSNWPRT

SEQ ID NO: 26817 - protein, 214 aa, synthetic construct; identical to SEQ ID NO: 16146
  REGION 1..214: note = Description of Artificial Sequence: Synthetic polypeptide
  REGION 1..214: note = XENP018920 nivolumab[PD-1]_H0L0_Fab-[anti-ICOS]_H0L0 _scFv Light Chain

SEQ ID NO: 26818 - protein, 107 aa, synthetic construct [sequence omitted]

SEQ ID NO: 26819 - protein, 11 aa, synthetic construct
  REGION 1..11: note = Description of Artificial Sequence: Synthetic peptide
  REGION 1..11: note = XENP018920 vlCDR1
RASQSVSSYLA

SEQ ID NO: 26820 - protein, 7 aa, synthetic construct
  REGION 1..7: note = Description of Artificial Sequence: Synthetic peptide
  REGION 1..7: note = XENP018920 vlCDR2
DASNRAT

SEQ ID NO: 26821 - protein, 9 aa, synthetic construct
  REGION 1..9: note = Description of Artificial Sequence: Synthetic peptide
  REGION 1..9: note = XENP018920 vlCDR3
QQSSNWPRT

SEQ ID NO: 26822 - protein, 456 aa, synthetic construct
  REGION 1..456: note = Description of Artificial Sequence: Synthetic polypeptide
  REGION 1..456: note = XENP024130 LOPD180[PD-1]_H1L1_Fab-[anti-ICOS]_H0L0 _scFv Fab-Fc Heavy Chain
QVQLQESGPGLVKPSQTLSLTCTVSGGSISSGAYYWSWIRQHPGKGLEWIGYIYYNGNTYYNPSLRSRVTISVDTSKNQFSLKLSSVTAADTAVYYCVRASDYVWGGYHYFDAFDLWGRGTLVTVSSASTKGPSVFPLAPSSKSTSGGTAALGCLVKDYFPEPVTVSWNSGALTSGVHTFPAVLQSSGLYSLSSVVTVPSSSLGTQTYICNVNHKPSDTKVDKKVEPKSCDKTHTCPPCPAPPVAGPSVFLFPPKPKDTLMISRTPEVTCVVVDVKHEDPEVKFNWYVDGVEVHNAKTKPREEEYNSTYRVVSVLTVLHQDWLNGKEYKCKVSNKALPAPIEKTISKAKGQPREPQVYTLPPSREEMTKNQVSLTCDVSGFYPSDIAVEWESDGQPENNYKTTPPVLDSDGSFFLYSKLTVDKSRWEQGDVFSCSVMHEALHNHYTQKSLSLSPGK

SEQ ID NO: 26823 - protein, 127 aa, synthetic construct
  REGION 1..127: note = Description of Artificial Sequence: Synthetic polypeptide
  REGION 1..127: note = VH of XENP024130
QVQLQESGPGLVKPSQTLSLTCTVSGGSISSGAYYWSWIRQHPGKGLEWIGYIYYNGNTYYNPSLRSRVTISVDTSKNQFSLKLSSVTAADTAVYYCVRASDYVWGGYHYFDAFDLWGRGTLVTVSS

SEQ ID NO: 26824 - protein, 7 aa, synthetic construct
  REGION 1..7: note = Description of Artificial Sequence: Synthetic peptide
  REGION 1..7: note = XENP024130 vhCDR1
SGAYYWS

SEQ ID NO: 26825 - protein, 16 aa, synthetic construct
  REGION 1..16: note = Description of Artificial Sequence: Synthetic peptide
  REGION 1..16: note = XENP024130 vhCDR2
YIYYNGNTYYNPSLRS

SEQ ID NO: 26826 - protein, 17 aa, synthetic construct
  REGION 1..17: note = Description of Artificial Sequence: Synthetic peptide
  REGION 1..17: note = XENP024130 vhCDR3
ASDYVWGGYHYFDAFDL

SEQ ID NO: 26827 - protein, 483 aa, synthetic construct
  REGION 1..483: note = Description of Artificial Sequence: Synthetic polypeptide
  REGION 1..483: note = XENP024130 LOPD180[PD-1]_H1L1_Fab-[anti-ICOS]_H0L0 _scFv scFv-Fc Heavy Chain
QVQLVQSGAEVKKPGASVKVSCKASGYTFTGYYMHWVRQAPGQGLEWMGWINPHSGGTNYAQKFQGRVTMTRDTSISTAYMELSRLRSDDTAVYYCARTYYYDSSGYYHDAFDIWGQGTMVTVSSGKPGSGKPGSGKPGSGKPGSDIQMTQSPSSVSASVGDRVTITCRASQGISRLLAWYQQKPGKAPKLLIYVASSLQSGVPSRFSGSGSGTDFTLTISSLQPEDFATYYCQQANSFPWTFGQGTKVEIKEPKSSDKTHTCPPCPAPPVAGPSVFLFPPKPKDTLMISRTPEVTCVVVDVKHEDPEVKFNWYVDGVEVHNAKTKPREEQYNSTYRVVSVLTVLHQDWLNGKEYKCKVSNKALPAPIEKTISKAKGQPREPQVYTLPPSREQMTKNQVKLTCLVKGFYPSDIAVEWESNGQPENNYKTTPPVLDSDGSFFLYSKLTVDKSRWQQGNVFSCSVMHEALHNHYTQKSLSLSPGK

SEQ ID NO: 26828 - protein, 125 aa, synthetic construct; identical to SEQ ID NO: 26293
  REGION 1..125: note = Description of Artificial Sequence: Synthetic polypeptide
  REGION 1..125: note = VH of XENP024130

SEQ ID NO: 26829 - protein, 107 aa, synthetic construct; identical to SEQ ID NO: 26298
  REGION 1..107: note = Description of Artificial Sequence: Synthetic polypeptide
  REGION 1..107: note = VL of XENP024130

SEQ ID NO: 26830 - protein, 231 aa, synthetic construct; identical to SEQ ID NO: 2397
  REGION 1..231: note = Description of Artificial Sequence: Synthetic polypeptide
  REGION 1..231: note = Fc chain of XENP024130

SEQ ID NO: 26831 - protein, 5 aa, synthetic construct
  REGION 1..5: note = Description of Artificial Sequence: Synthetic peptide
  REGION 1..5: note = XENP024130 vhCDR1
GYYMH

SEQ ID NO: 26832 - protein, 17 aa, synthetic construct
  REGION 1..17: note = Description of Artificial Sequence: Synthetic peptide
  REGION 1..17: note = XENP024130 vhCDR2
WINPHSGGTNYAQKFQG

SEQ ID NO: 26833 - protein, 16 aa, synthetic construct
  REGION 1..16: note = Description of Artificial Sequence: Synthetic peptide
  REGION 1..16: note = XENP024130 vhCDR3
TYYYDSSGYYHDAFDI

SEQ ID NO: 26834 - protein, 11 aa, synthetic construct
  REGION 1..11: note = Description of Artificial Sequence: Synthetic peptide
  REGION 1..11: note = XENP024130 vlCDR1
RASQGISRLLA

SEQ ID NO: 26835 - protein, 7 aa, synthetic construct
  REGION 1..7: note = Description of Artificial Sequence: Synthetic peptide
  REGION 1..7: note = XENP024130 vlCDR2
VASSLQS

SEQ ID NO: 26836 - protein, 9 aa, synthetic construct
  REGION 1..9: note = Description of Artificial Sequence: Synthetic peptide
  REGION 1..9: note = XENP024130 vlCDR3
QQANSFPWT

SEQ ID NO: 26837 - protein, 216 aa, synthetic construct
  REGION 1..216: note = Description of Artificial Sequence: Synthetic polypeptide
  REGION 1..216: note = XENP024130 LOPD180[PD-1]_H1L1_Fab-[anti-ICOS]_H0L0 _scFv Light Chain
QSVLTQPPSASGTPGQRVTISCSGSNSNIGSNSVNWYQQLPGTAPKLLIYGNNQRPSGVPDRFSGSKSGTSASLAISGLQSEDEADYYCAAWDDSLNGPVFGGGTKVTVLGQPKAAPSVTLFPPSSEELQANKATLVCLISDFYPGAVTVAWKADSSPVKAGVETTTPSKQSNNKYAASSYLSLTPEQWKSHRSYSCQVTHEGSTVEKTVAPTECS

SEQ ID NO: 26838 - protein, 110 aa, synthetic construct
  REGION 1..110: note = Description of Artificial Sequence: Synthetic polypeptide
  REGION 1..110: note = VL of XENP024130
QSVLTQPPSASGTPGQRVTISCSGSNSNIGSNSVNWYQQLPGTAPKLLIYGNNQRPSGVPDRFSGSKSGTSASLAISGLQSEDEADYYCAAWDDSLNGPVFGGGTKVTVL

SEQ ID NO: 26839 - protein, 13 aa, synthetic construct
  REGION 1..13: note = Description of Artificial Sequence: Synthetic peptide
  REGION 1..13: note = XENP024130 vlCDR1
SGSNSNIGSNSVN

SEQ ID NO: 26840 - protein, 7 aa, synthetic construct
  REGION 1..7: note = Description of Artificial Sequence: Synthetic peptide
  REGION 1..7: note = XENP024130 vlCDR2
GNNQRPS

SEQ ID NO: 26841 - protein, 11 aa, synthetic construct
  REGION 1..11: note = Description of Artificial Sequence: Synthetic peptide
  REGION 1..11: note = XENP024130 vlCDR3
AAWDDSLNGPV

SEQ ID NO: 26842 - protein, 454 aa, synthetic construct; identical to SEQ ID NO: 26442
  REGION 1..454: note = Description of Artificial Sequence: Synthetic polypeptide
  REGION 1..454: note = XENP023406 [anti-ICOS]_H0L0_Fab-[anti-ICOS]_H0L0 _Fab_1G6_L1.194_H1.279_scFv Fab-Fc Heavy Chain

SEQ ID NO: 26843 - protein, 125 aa, synthetic construct; identical to SEQ ID NO: 26293
  REGION 1..125: note = Description of Artificial Sequence: Synthetic polypeptide
  REGION 1..125: note = VH of XENP023406

SEQ ID NO: 26844 - protein, 5 aa, synthetic construct
  REGION 1..5: note = Description of Artificial Sequence: Synthetic peptide
  REGION 1..5: note = XENP023406 vhCDR1
GYYMH

SEQ ID NO: 26845 - protein, 17 aa, synthetic construct
  REGION 1..17: note = Description of Artificial Sequence: Synthetic peptide
  REGION 1..17: note = XENP023406 vhCDR2
WINPHSGGTNYAQKFQG

SEQ ID NO: 26846 - protein, 16 aa, synthetic construct
  REGION 1..16: note = Description of Artificial Sequence: Synthetic peptide
  REGION 1..16: note = XENP023406 vhCDR3
TYYYDSSGYYHDAFDI

SEQ ID NO: 26847 - protein, 722 aa, synthetic construct
  REGION 1..722: note = Description of Artificial Sequence: Synthetic polypeptide
  REGION 1..722: note = XENP023406 [anti-ICOS]_H0L0_Fab-[anti-ICOS]_H0L0 _Fab_1G6_L1.194_H1.279_scFv Fab-scFv-Fc Heavy Chain
QVQLVQSGAEVKKPGASVKVSCKASGYTFTGYYMHWVRQAPGQGLEWMGWINPHSGGTNYAQKFQGRVTMTRDTSISTAYMELSRLRSDDTAVYYCARTYYYDSSGYYHDAFDIWGQGTMVTVSSASTKGPSVFPLAPSSKSTSGGTAALGCLVKDYFPEPVTVSWNSGALTSGVHTFPAVLQSSGLYSLSSVVTVPSSSLGTQTYICNVNHKPSNTKVDKKVEPKSCGKPGSGKPGSEIVLTQSPATLSASPGERVTLTCRASQSVGNDVAWYQQKPGQAPRLLINYASHRYTGVPDRFTGSGYGTEFTLTISSVQSEDFGVYYCQQDFSSPRTFGGGTKVEIKGKPGSGKPGSGKPGSGKPGSEVQLVESGGGLVKPGGSLRLSCVASGFTFSNYWMNWVRQAPGKGLEWVAEIRLYSNNYATHYAESVKGRFTISRDDSKSTLYLQMNNLKTEDTGVYYCTRYYGNYGGYFDVWGRGTLVTVSSGGGGSGGGGSKTHTCPPCPAPPVAGPSVFLFPPKPKDTLMISRTPEVTCVVVDVKHEDPEVKFNWYVDGVEVHNAKTKPREEQYNSTYRVVSVLTVLHQDWLNGKEYKCKVSNKALPAPIEKTISKAKGQPREPQVYTLPPSREQMTKNQVKLTCLVKGFYPSDIAVEWESNGQPENNYKTTPPVLDSDGSFFLYSKLTVDKSRWQQGNVFSCSVMHEALHNHYTQKSLSLSPGK

SEQ ID NO: 26848 - protein, 125 aa, synthetic construct; identical to SEQ ID NO: 26293
  REGION 1..125: note = Description of Artificial Sequence: Synthetic polypeptide
  REGION 1..125: note = VH of XENP023406

SEQ ID NO: 26849 - protein, 113 aa, synthetic construct
  REGION 1..113: note = Description of Artificial Sequence: Synthetic polypeptide
  REGION 1..113: note = Fc chain of XENP023406
ASTKGPSVFPLAPSSKSTSGGTAALGCLVKDYFPEPVTVSWNSGALTSGVHTFPAVLQSSGLYSLSSVVTVPSSSLGTQTYICNVNHKPSNTKVDKKVEPKSCGKPGSGKPGS

SEQ ID NO: 26850 - protein, 107 aa, synthetic construct; identical to SEQ ID NO: 2871
  REGION 1..107: note = Description of Artificial Sequence: Synthetic polypeptide
  REGION 1..107: note = VL of XENP023406

SEQ ID NO: 26851 - protein, 225 aa, synthetic construct
  REGION 1..225: note = Description of Artificial Sequence: Synthetic polypeptide
  REGION 1..225: note = Fc chain of XENP023406
KTHTCPPCPAPPVAGPSVFLFPPKPKDTLMISRTPEVTCVVVDVKHEDPEVKFNWYVDGVEVHNAKTKPREEQYNSTYRVVSVLTVLHQDWLNGKEYKCKVSNKALPAPIEKTISKAKGQPREPQVYTLPPSREQMTKNQVKLTCLVKGFYPSDIAVEWESNGQPENNYKTTPPVLDSDGSFFLYSKLTVDKSRWQQGNVFSCSVMHEALHNHYTQKSLSLSPGK

SEQ ID NO: 26852 - protein, 5 aa, synthetic construct
  REGION 1..5: note = Description of Artificial Sequence: Synthetic peptide
  REGION 1..5: note = XENP023406 vhCDR1
GYYMH

SEQ ID NO: 26853 - protein, 17 aa, synthetic construct
  REGION 1..17: note = Description of Artificial Sequence: Synthetic peptide
  REGION 1..17: note = XENP023406 vhCDR2
WINPHSGGTNYAQKFQG

SEQ ID NO: 26854 - protein, 16 aa, synthetic construct
  REGION 1..16: note = Description of Artificial Sequence: Synthetic peptide
  REGION 1..16: note = XENP023406 vhCDR3
TYYYDSSGYYHDAFDI

SEQ ID NO: 26855 - protein, 11 aa, synthetic construct
  REGION 1..11: note = Description of Artificial Sequence: Synthetic peptide
  REGION 1..11: note = XENP023406 vlCDR1
RASQSVGNDVA

SEQ ID NO: 26856 - protein, 7 aa, synthetic construct
  REGION 1..7: note = Description of Artificial Sequence: Synthetic peptide
  REGION 1..7: note = XENP023406 vlCDR2
YASHRYT

SEQ ID NO: 26857 - protein, 9 aa, synthetic construct
  REGION 1..9: note = Description of Artificial Sequence: Synthetic peptide
  REGION 1..9: note = XENP023406 vlCDR3
QQDFSSPRT

SEQ ID NO: 26858 - protein, 214 aa, synthetic construct; identical to SEQ ID NO: 26297
  REGION 1..214: note = Description of Artificial Sequence: Synthetic polypeptide
  REGION 1..214: note = XENP023406 [anti-ICOS]_H0L0_Fab-[anti-ICOS]_H0L0 _Fab_1G6_L1.194_H1.279_scFv Light Chain

SEQ ID NO: 26859 - protein, 107 aa, synthetic construct; identical to SEQ ID NO: 26298
  REGION 1..107: note = Description of Artificial Sequence: Synthetic polypeptide
  REGION 1..107: note = VL of XENP023406

SEQ ID NO: 26860 - protein, 11 aa, synthetic construct
  REGION 1..11: note = Description of Artificial Sequence: Synthetic peptide
  REGION 1..11: note = XENP023406 vlCDR1
RASQGISRLLA

SEQ ID NO: 26861 - protein, 7 aa, synthetic construct
  REGION 1..7: note = Description of Artificial Sequence: Synthetic peptide
  REGION 1..7: note = XENP023406 vlCDR2
VASSLQS

SEQ ID NO: 26862 - protein, 9 aa, synthetic construct
  REGION 1..9: note = Description of Artificial Sequence: Synthetic peptide
  REGION 1..9: note = XENP023406 vlCDR3
QQANSFPWT

SEQ ID NO: 26863 - protein, 455 aa, synthetic construct
  REGION 1..455: note = Description of Artificial Sequence: Synthetic polypeptide
  REGION 1..455: note = XENP023407 [anti-ICOS]_H0L0_Fab-[anti-ICOS]_H0L0 _Fab_1G6_L1.194_H1.279_scFv Fab-Fc Heavy Chain
QVQLVQSGAEVKKPGASVKVSCKASGYTFTGYYMHWVRQAPGQGLEWMGWINPHSGGTNYAQKFQGRVTMTRDTSISTAYMELSRLRSDDTAVYYCARTYYYDSSGYYHDAFDIWGQGTMVTVSSASTKGPSVFPLAPSSKSTSGGTAALGCLVKDYFPEPVTVSWNSGALTSGVHTFPAVLQSSGLYSLSSVVTVPSSSLGTQTYICNVNHKPSDTKVDKKVEPKSCDKTHTCPPCPAPELLGGPSVFLFPPKPKDTLMISRTPEVTCVVVDVEHEDPEVKFNWYVDGVEVHNAKTKPREEEYNSTYRVVSVLTVLHQDWLNGKEYKCKVSNKAFPAPIEKTISKAKGQPREPQVYTLPPSREEMTKNQVSLTCDVSGFYPSDIAVEWESDGQPENNYKTTPPVLDSDGSFFLYSKLTVDKSRWEQGDVFSCSVMHEALHNHYTQKSLSLSPGK

SEQ ID NO: 26864 - protein, 125 aa, synthetic construct; identical to SEQ ID NO: 26293
  REGION 1..125: note = Description of Artificial Sequence: Synthetic polypeptide
  REGION 1..125: note = VH of XENP023407

SEQ ID NO: 26865 - protein, 5 aa, synthetic construct
  REGION 1..5: note = Description of Artificial Sequence: Synthetic peptide
  REGION 1..5: note = XENP023407 vhCDR1
GYYMH

SEQ ID NO: 26866 - protein, 17 aa, synthetic construct
  REGION 1..17: note = Description of Artificial Sequence: Synthetic peptide
  REGION 1..17: note = XENP023407 vhCDR2
WINPHSGGTNYAQKFQG

SEQ ID NO: 26867 - protein, 16 aa, synthetic construct
  REGION 1..16: note = Description of Artificial Sequence: Synthetic peptide
  REGION 1..16: note = XENP023407 vhCDR3
TYYYDSSGYYHDAFDI

SEQ ID NO: 26868 - protein, 723 aa, synthetic construct
  REGION 1..723: note = Description of Artificial Sequence: Synthetic polypeptide
  REGION 1..723: note = XENP023407 [anti-ICOS]_H0L0_Fab-[anti-ICOS]_H0L0 _Fab_1G6_L1.194_H1.279_scFv Fab-scFv-Fc Heavy Chain
QVQLVQSGAEVKKPGASVKVSCKASGYTFTGYYMHWVRQAPGQGLEWMGWINPHSGGTNYAQKFQGRVTMTRDTSISTAYMELSRLRSDDTAVYYCARTYYYDSSGYYHDAFDIWGQGTMVTVSSASTKGPSVFPLAPSSKSTSGGTAALGCLVKDYFPEPVTVSWNSGALTSGVHTFPAVLQSSGLYSLSSVVTVPSSSLGTQTYICNVNHKPSNTKVDKKVEPKSCGKPGSGKPGSEIVLTQSPATLSASPGERVTLTCRASQSVGNDVAWYQQKPGQAPRLLINYASHRYTGVPDRFTGSGYGTEFTLTISSVQSEDFGVYYCQQDFSSPRTFGGGTKVEIKGKPGSGKPGSGKPGSGKPGSEVQLVESGGGLVKPGGSLRLSCVASGFTFSNYWMNWVRQAPGKGLEWVAEIRLYSNNYATHYAESVKGRFTISRDDSKSTLYLQMNNLKTEDTGVYYCTRYYGNYGGYFDVWGRGTLVTVSSGGGGSGGGGSKTHTCPPCPAPELLGGPSVFLFPPKPKDTLMISRTPEVTCVVVDVEHEDPEVKFNWYVDGVEVHNAKTKPREEQYNSTYRVVSVLTVLHQDWLNGKEYKCKVSNKAFPAPIEKTISKAKGQPREPQVYTLPPSREQMTKNQVKLTCLVKGFYPSDIAVEWESNGQPENNYKTTPPVLDSDGSFFLYSKLTVDKSRWQQGNVFSCSVMHEALHNHYTQKSLSLSPGK

SEQ ID NO: 26869 - protein, 125 aa, synthetic construct; identical to SEQ ID NO: 26293
  REGION 1..125: note = Description of Artificial Sequence: Synthetic polypeptide
  REGION 1..125: note = VH of XENP023407

SEQ ID NO: 26870 - protein, 113 aa, synthetic construct; identical to SEQ ID NO: 26849
  REGION 1..113: note = Description of Artificial Sequence: Synthetic polypeptide
  REGION 1..113: note = Fc chain of XENP023407

SEQ ID NO: 26871 - protein, 107 aa, synthetic construct; identical to SEQ ID NO: 2871
  REGION 1..107: note = Description of Artificial Sequence: Synthetic polypeptide
  REGION 1..107: note = VL of XENP023407

SEQ ID NO: 26872 - protein, 226 aa, synthetic construct
  REGION 1..226: note = Description of Artificial Sequence: Synthetic polypeptide
  REGION 1..226: note = Fc chain of XENP023407
KTHTCPPCPAPELLGGPSVFLFPPKPKDTLMISRTPEVTCVVVDVEHEDPEVKFNWYVDGVEVHNAKTKPREEQYNSTYRVVSVLTVLHQDWLNGKEYKCKVSNKAFPAPIEKTISKAKGQPREPQVYTLPPSREQMTKNQVKLTCLVKGFYPSDIAVEWESNGQPENNYKTTPPVLDSDGSFFLYSKLTVDKSRWQQGNVFSCSVMHEALHNHYTQKSLSLSPGK

SEQ ID NO: 26873 - protein, 5 aa, synthetic construct
  REGION 1..5: note = Description of Artificial Sequence: Synthetic peptide
  REGION 1..5: note = XENP023407 vhCDR1
GYYMH

SEQ ID NO: 26874 - protein, 17 aa, synthetic construct
  REGION 1..17: note = Description of Artificial Sequence: Synthetic peptide
  REGION 1..17: note = XENP023407 vhCDR2
WINPHSGGTNYAQKFQG

SEQ ID NO: 26875 - protein, 16 aa, synthetic construct
  REGION 1..16: note = Description of Artificial Sequence: Synthetic peptide
  REGION 1..16: note = XENP023407 vhCDR3
TYYYDSSGYYHDAFDI

SEQ ID NO: 26876 - protein, 11 aa, synthetic construct
  REGION 1..11: note = Description of Artificial Sequence: Synthetic peptide
  REGION 1..11: note = XENP023407 vlCDR1
RASQSVGNDVA

SEQ ID NO: 26877 - protein, 7 aa, synthetic construct
  REGION 1..7: note = Description of Artificial Sequence: Synthetic peptide
  REGION 1..7: note = XENP023407 vlCDR2
YASHRYT

SEQ ID NO: 26878 - protein, 9 aa, synthetic construct
  REGION 1..9: note = Description of Artificial Sequence: Synthetic peptide
  REGION 1..9: note = XENP023407 vlCDR3
QQDFSSPRT

SEQ ID NO: 26879 - protein, 214 aa, synthetic construct; identical to SEQ ID NO: 26297
  REGION 1..214: note = Description of Artificial Sequence: Synthetic polypeptide
  REGION 1..214: note = XENP023407 [anti-ICOS]_H0L0_Fab-[anti-ICOS]_H0L0 _Fab_1G6_L1.194_H1.279_scFv Light Chain

SEQ ID NO: 26880 - protein, 107 aa, synthetic construct; identical to SEQ ID NO: 26298
  REGION 1..107: note = Description of Artificial Sequence: Synthetic polypeptide
  REGION 1..107: note = VL of XENP023407

SEQ ID NO: 26881 - protein, 11 aa, synthetic construct
  REGION 1..11: note = Description of Artificial Sequence: Synthetic peptide
  REGION 1..11: note = XENP023407 vlCDR1
RASQGISRLLA

SEQ ID NO: 26882 - protein, 7 aa, synthetic construct
  REGION 1..7: note = Description of Artificial Sequence: Synthetic peptide
  REGION 1..7: note = XENP023407 vlCDR2
VASSLQS

SEQ ID NO: 26883 - protein, 9 aa, synthetic construct
  REGION 1..9: note = Description of Artificial Sequence: Synthetic peptide
  REGION 1..9: note = XENP023407 vlCDR3
QQANSFPWT

SEQ ID NO: 26884 - protein, 451 aa, synthetic construct
  REGION 1..451: note = Description of Artificial Sequence: Synthetic polypeptide
  REGION 1..451: note = XENP024128 1G6_L1.194_H1.279_Fab-1G6_L1.194_H1.279 _Fab_[anti-ICOS]_H0L0_scFv Fab-Fc Heavy Chain
EVQLVESGGGLVKPGGSLRLSCVASGFTFSNYWMNWVRQAPGKGLEWVAEIRLYSNNYATHYAESVKGRFTISRDDSKSTLYLQMNNLKTEDTGVYYCTRYYGNYGGYFDVWGRGTLVTVSSASTKGPSVFPLAPSSKSTSGGTAALGCLVKDYFPEPVTVSWNSGALTSGVHTFPAVLQSSGLYSLSSVVTVPSSSLGTQTYICNVNHKPSDTKVDKKVEPKSCDKTHTCPPCPAPPVAGPSVFLFPPKPKDTLMISRTPEVTCVVVDVKHEDPEVKFNWYVDGVEVHNAKTKPREEEYNSTYRVVSVLTVLHQDWLNGKEYKCKVSNKALPAPIEKTISKAKGQPREPQVYTLPPSREEMTKNQVSLTCDVSGFYPSDIAVEWESDGQPENNYKTTPPVLDSDGSFFLYSKLTVDKSRWEQGDVFSCSVMHEALHNHYTQKSLSLSPGK

SEQ ID NO: 26885 - protein, 122 aa, synthetic construct; identical to SEQ ID NO: 2872
  REGION 1..122: note = Description of Artificial Sequence: Synthetic polypeptide
  REGION 1..122: note = VH of XENP024128

SEQ ID NO: 26886 - protein, 5 aa, synthetic construct
  REGION 1..5: note = Description of Artificial Sequence: Synthetic peptide
  REGION 1..5: note = XENP024128 vhCDR1
NYWMN

SEQ ID NO: 26887 - protein, 19 aa, synthetic construct
  REGION 1..19: note = Description of Artificial Sequence: Synthetic peptide
  REGION 1..19: note = XENP024128 vhCDR2
EIRLYSNNYATHYAESVKG

SEQ ID NO: 26888 - protein, 11 aa, synthetic construct
  REGION 1..11: note = Description of Artificial Sequence: Synthetic peptide
  REGION 1..11: note = XENP024128 vhCDR3
YYGNYGGYFDV

SEQ ID NO: 26889 - protein, 722 aa, synthetic construct
  REGION 1..722: note = Description of Artificial Sequence: Synthetic polypeptide
  REGION 1..722: note = XENP024128 1G6_L1.194_H1.279_Fab-1G6_L1.194_H1.279_Fab_[anti-ICOS] _H0L0_scFv Fab-scFv-Fc Heavy Chain
EVQLVESGGGLVKPGGSLRLSCVASGFTFSNYWMNWVRQAPGKGLEWVAEIRLYSNNYATHYAESVKGRFTISRDDSKSTLYLQMNNLKTEDTGVYYCTRYYGNYGGYFDVWGRGTLVTVSSASTKGPSVFPLAPSSKSTSGGTAALGCLVKDYFPEPVTVSWNSGALTSGVHTFPAVLQSSGLYSLSSVVTVPSSSLGTQTYICNVNHKPSNTKVDKKVEPKSCGKPGSGKPGSQVQLVQSGAEVKKPGASVKVSCKASGYTFTGYYMHWVRQAPGQGLEWMGWINPHSGGTNYAQKFQGRVTMTRDTSISTAYMELSRLRSDDTAVYYCARTYYYDSSGYYHDAFDIWGQGTMVTVSSGKPGSGKPGSGKPGSGKPGSDIQMTQSPSSVSASVGDRVTITCRASQGISRLLAWYQQKPGKAPKLLIYVASSLQSGVPSRFSGSGSGTDFTLTISSLQPEDFATYYCQQANSFPWTFGQGTKVEIKGGGGSGGGGSKTHTCPPCPAPPVAGPSVFLFPPKPKDTLMISRTPEVTCVVVDVKHEDPEVKFNWYVDGVEVHNAKTKPREEQYNSTYRVVSVLTVLHQDWLNGKEYKCKVSNKALPAPIEKTISKAKGQPREPQVYTLPPSREQMTKNQVKLTCLVKGFYPSDIAVEWESNGQPENNYKTTPPVLDSDGSFFLYSKLTVDKSRWQQGNVFSCSVMHEALHNHYTQKSLSLSPGK

SEQ ID NO: 26890 - protein, 122 aa, synthetic construct; identical to SEQ ID NO: 2872
  REGION 1..122: note = Description of Artificial Sequence: Synthetic polypeptide
  REGION 1..122: note = VH of XENP024128

SEQ ID NO: 26891 - protein, 113 aa, synthetic construct; identical to SEQ ID NO: 26849
  REGION 1..113: note = Description of Artificial Sequence: Synthetic polypeptide
  REGION 1..113: note = Fc chain of XENP024128

SEQ ID NO: 26892 - protein, 125 aa, synthetic construct; identical to SEQ ID NO: 26293
  REGION 1..125: note = Description of Artificial Sequence: Synthetic polypeptide
  REGION 1..125: note = VL of XENP024128

SEQ ID NO: 26893 - protein, 225 aa, synthetic construct; identical to SEQ ID NO: 26851
  REGION 1..225: note = Description of Artificial Sequence: Synthetic polypeptide
  REGION 1..225: note = Fc chain of XENP024128

SEQ ID NO: 26894 - protein, 5 aa, synthetic construct
  REGION 1..5: note = Description of Artificial Sequence: Synthetic peptide
  REGION 1..5: note = XENP024128 vhCDR1
NYWMN

SEQ ID NO: 26895 - protein, 19 aa, synthetic construct
  REGION 1..19: note = Description of Artificial Sequence: Synthetic peptide
  REGION 1..19: note = XENP024128 vhCDR2
EIRLYSNNYATHYAESVKG

SEQ ID NO: 26896 - protein, 11 aa, synthetic construct
  REGION 1..11: note = Description of Artificial Sequence: Synthetic peptide
  REGION 1..11: note = XENP024128 vhCDR3
YYGNYGGYFDV

SEQ ID NO: 26897 - protein, 5 aa, synthetic construct
  REGION 1..5: note = Description of Artificial Sequence: Synthetic peptide
  REGION 1..5: note = XENP024128 vlCDR1
GYYMH

SEQ ID NO: 26898 - protein, 17 aa, synthetic construct
  REGION 1..17: note = Description of Artificial Sequence: Synthetic peptide
  REGION 1..17: note = XENP024128 vlCDR2
WINPHSGGTNYAQKFQG

SEQ ID NO: 26899 - protein, 16 aa, synthetic construct
  REGION 1..16: note = Description of Artificial Sequence: Synthetic peptide
  REGION 1..16: note = XENP024128 vlCDR3
TYYYDSSGYYHDAFDI

SEQ ID NO: 26900 - protein, 214 aa, synthetic construct; identical to SEQ ID NO: 21486
  REGION 1..214: note = Description of Artificial Sequence: Synthetic polypeptide
  REGION 1..214: note = XENP024128 1G6_L1.194_H1.279_Fab-1G6_L1.194_H1.279_Fab_[anti-ICOS] _H0L0_scFv Light Chain

SEQ ID NO: 26901 - protein, 107 aa, synthetic construct; identical to SEQ ID NO: 2871
  REGION 1..107: note = Description of Artificial Sequence: Synthetic polypeptide
  REGION 1..107: note = VL of XENP024128

SEQ ID NO: 26902 - protein, 11 aa, synthetic construct
  REGION 1..11: note = Description of Artificial Sequence: Synthetic peptide
  REGION 1..11: note = XENP024128 vlCDR1
RASQSVGNDVA

SEQ ID NO: 26903 - protein, 7 aa, synthetic construct
  REGION 1..7: note = Description of Artificial Sequence: Synthetic peptide
  REGION 1..7: note = XENP024128 vlCDR2
YASHRYT

SEQ ID NO: 26904 - protein, 9 aa, synthetic construct
  REGION 1..9: note = Description of Artificial Sequence: Synthetic peptide
  REGION 1..9: note = XENP024128 vlCDR3
QQDFSSPRT

SEQ ID NO: 26905 - protein, 722 aa, synthetic construct
  REGION 1..722: note = Description of Artificial Sequence: Synthetic polypeptide
  REGION 1..722: note = XENP024123 1G6_H1.279_L1.194_Fab_(G4S)2_[anti-ICOS]_H0L0_scFv20 _Fc_IgG1 Heavy Chain
EVQLVESGGGLVKPGGSLRLSCVASGFTFSNYWMNWVRQAPGKGLEWVAEIRLYSNNYATHYAESVKGRFTISRDDSKSTLYLQMNNLKTEDTGVYYCTRYYGNYGGYFDVWGRGTLVTVSSASTKGPSVFPLAPSSKSTSGGTAALGCLVKDYFPEPVTVSWNSGALTSGVHTFPAVLQSSGLYSLSSVVTVPSSSLGTQTYICNVNHKPSNTKVDKKVEPKSCGGGGSGGGGSQVQLVQSGAEVKKPGASVKVSCKASGYTFTGYYMHWVRQAPGQGLEWMGWINPHSGGTNYAQKFQGRVTMTRDTSISTAYMELSRLRSDDTAVYYCARTYYYDSSGYYHDAFDIWGQGTMVTVSSGGGGSGGGGSGGGGSGGGGSDIQMTQSPSSVSASVGDRVTITCRASQGISRLLAWYQQKPGKAPKLLIYVASSLQSGVPSRFSGSGSGTDFTLTISSLQPEDFATYYCQQANSFPWTFGQGTKVEIKGGGGSGGGGSKTHTCPPCPAPPVAGPSVFLFPPKPKDTLMISRTPEVTCVVVDVKHEDPEVKFNWYVDGVEVHNAKTKPREEQYNSTYRVVSVLTVLHQDWLNGKEYKCKVSNKALPAPIEKTISKAKGQPREPQVYTLPPSREEMTKNQVSLTCLVKGFYPSDIAVEWESNGQPENNYKTTPPVLDSDGSFFLYSKLTVDKSRWQQGNVFSCSVMHEALHNHYTQKSLSLSPGK

SEQ ID NO: 26906 - protein, 122 aa, synthetic construct; identical to SEQ ID NO: 2872
  REGION 1..122: note = Description of Artificial Sequence: Synthetic polypeptide
  REGION 1..122: note = VH of XENP024123

SEQ ID NO: 26907 - protein, 113 aa, synthetic construct
  REGION 1..113: note = Description of Artificial Sequence: Synthetic polypeptide
  REGION 1..113: note = Fc chain of XENP024123
ASTKGPSVFPLAPSSKSTSGGTAALGCLVKDYFPEPVTVSWNSGALTSGVHTFPAVLQSSGLYSLSSVVTVPSSSLGTQTYICNVNHKPSNTKVDKKVEPKSCGGGGSGGGGS

SEQ ID NO: 26908 - protein, 125 aa, synthetic construct; identical to SEQ ID NO: 26293
  REGION 1..125: note = Description of Artificial Sequence: Synthetic polypeptide
  REGION 1..125: note = VL of XENP024123

SEQ ID NO: 26909 - protein, 225 aa, synthetic construct
  REGION 1..225: note = Description of Artificial Sequence: Synthetic polypeptide
  REGION 1..225: note = Fc chain of XENP024123
KTHTCPPCPAPPVAGPSVFLFPPKPKDTLMISRTPEVTCVVVDVKHEDPEVKFNWYVDGVEVHNAKTKPREEQYNSTYRVVSVLTVLHQDWLNGKEYKCKVSNKALPAPIEKTISKAKGQPREPQVYTLPPSREEMTKNQVSLTCLVKGFYPSDIAVEWESNGQPENNYKTTPPVLDSDGSFFLYSKLTVDKSRWQQGNVFSCSVMHEALHNHYTQKSLSLSPGK

SEQ ID NO: 26910 - protein, 5 aa, synthetic construct
  REGION 1..5: note = Description of Artificial Sequence: Synthetic peptide
  REGION 1..5: note = XENP024123 vhCDR1
NYWMN

SEQ ID NO: 26911 - protein, 19 aa, synthetic construct
  REGION 1..19: note = Description of Artificial Sequence: Synthetic peptide
  REGION 1..19: note = XENP024123 vhCDR2
EIRLYSNNYATHYAESVKG

SEQ ID NO: 26912 - protein, 11 aa, synthetic construct
  REGION 1..11: note = Description of Artificial Sequence: Synthetic peptide
  REGION 1..11: note = XENP024123 vhCDR3
YYGNYGGYFDV

SEQ ID NO: 26913 - protein, 5 aa, synthetic construct
  REGION 1..5: note = Description of Artificial Sequence: Synthetic peptide
  REGION 1..5: note = XENP024123 vlCDR1
GYYMH

SEQ ID NO: 26914 - protein, 17 aa, synthetic construct
  REGION 1..17: note = Description of Artificial Sequence: Synthetic peptide
  REGION 1..17: note = XENP024123 vlCDR2
WINPHSGGTNYAQKFQG

SEQ ID NO: 26915 - protein, 16 aa, synthetic construct
  REGION 1..16: note = Description of Artificial Sequence: Synthetic peptide
  REGION 1..16: note = XENP024123 vlCDR3
TYYYDSSGYYHDAFDI

SEQ ID NO: 26916 - protein, 214 aa, synthetic construct; identical to SEQ ID NO: 21486
  REGION 1..214: note = Description of Artificial Sequence: Synthetic polypeptide
  REGION 1..214: note = XENP024123 1G6_H1.279_L1.194_Fab_(G4S)2_[anti-ICOS]_H0L0 _scFv20_Fc_IgG1 Light Chain

SEQ ID NO: 26917 - protein, 107 aa, synthetic construct; identical to SEQ ID NO: 2871
  REGION 1..107: note = Description of Artificial Sequence: Synthetic polypeptide
  REGION 1..107: note = VL of XENP024123

SEQ ID NO: 26918 - protein, 11 aa, synthetic construct
  REGION 1..11: note = Description of Artificial Sequence: Synthetic peptide
  REGION 1..11: note = XENP024123 vlCDR1
RASQSVGNDVA

SEQ ID NO: 26919 - protein, 7 aa, synthetic construct
  REGION 1..7: note = Description of Artificial Sequence: Synthetic peptide
  REGION 1..7: note = XENP024123 vlCDR2
YASHRYT

SEQ ID NO: 26920 - protein, 9 aa, synthetic construct
  REGION 1..9: note = Description of Artificial Sequence: Synthetic peptide
  REGION 1..9: note = XENP024123 vlCDR3
QQDFSSPRT

SEQ ID NO: 26921 - protein, 727 aa, synthetic construct
  REGION 1..727: note = Description of Artificial Sequence: Synthetic polypeptide
  REGION 1..727: note = XENP024125 LOPD180[PD-1]_H1L1_Fab_(G4S)2_[anti-ICOS]_H0L0 _scFv20_Fc_IgG1 Heavy Chain
QVQLQESGPGLVKPSQTLSLTCTVSGGSISSGAYYWSWIRQHPGKGLEWIGYIYYNGNTYYNPSLRSRVTISVDTSKNQFSLKLSSVTAADTAVYYCVRASDYVWGGYHYFDAFDLWGRGTLVTVSSASTKGPSVFPLAPSSKSTSGGTAALGCLVKDYFPEPVTVSWNSGALTSGVHTFPAVLQSSGLYSLSSVVTVPSSSLGTQTYICNVNHKPSNTKVDKKVEPKSCGGGGSGGGGSQVQLVQSGAEVKKPGASVKVSCKASGYTFTGYYMHWVRQAPGQGLEWMGWINPHSGGTNYAQKFQGRVTMTRDTSISTAYMELSRLRSDDTAVYYCARTYYYDSSGYYHDAFDIWGQGTMVTVSSGGGGSGGGGSGGGGSGGGGSDIQMTQSPSSVSASVGDRVTITCRASQGISRLLAWYQQKPGKAPKLLIYVASSLQSGVPSRFSGSGSGTDFTLTISSLQPEDFATYYCQQANSFPWTFGQGTKVEIKGGGGSGGGGSKTHTCPPCPAPPVAGPSVFLFPPKPKDTLMISRTPEVTCVVVDVKHEDPEVKFNWYVDGVEVHNAKTKPREEQYNSTYRVVSVLTVLHQDWLNGKEYKCKVSNKALPAPIEKTISKAKGQPREPQVYTLPPSREEMTKNQVSLTCLVKGFYPSDIAVEWESNGQPENNYKTTPPVLDSDGSFFLYSKLTVDKSRWQQGNVFSCSVMHEALHNHYTQKSLSLSPGK

SEQ ID NO: 26922 - protein, 127 aa, synthetic construct; identical to SEQ ID NO: 26823
  REGION 1..127: note = Description of Artificial Sequence: Synthetic polypeptide
  REGION 1..127: note = VH of XENP024125

SEQ ID NO: 26923 - protein, 113 aa, synthetic construct; identical to SEQ ID NO: 26907
  REGION 1..113: note = Description of Artificial Sequence: Synthetic polypeptide
  REGION 1..113: note = Fc chain of XENP024125

SEQ ID NO: 26924 - protein, 125 aa, synthetic construct; identical to SEQ ID NO: 26293
  REGION 1..125: note = Description of Artificial Sequence: Synthetic polypeptide
  REGION 1..125: note = VL of XENP024125

SEQ ID NO: 26925 - protein, 225 aa, synthetic construct; identical to SEQ ID NO: 26909
  REGION 1..225: note = Description of Artificial Sequence: Synthetic polypeptide
  REGION 1..225: note = Fc chain of XENP024125

SEQ ID NO: 26926 - protein, 7 aa, synthetic construct
  REGION 1..7: note = Description of Artificial Sequence: Synthetic peptide
  REGION 1..7: note = XENP024125 vhCDR1
SGAYYWS

SEQ ID NO: 26927 - protein, 16 aa, synthetic construct
  REGION 1..16: note = Description of Artificial Sequence: Synthetic peptide
  REGION 1..16: note = XENP024125 vhCDR2
YIYYNGNTYYNPSLRS

SEQ ID NO: 26928 - protein, 17 aa, synthetic construct
  REGION 1..17: note = Description of Artificial Sequence: Synthetic peptide
  REGION 1..17: note = XENP024125 vhCDR3
ASDYVWGGYHYFDAFDL

SEQ ID NO: 26929 - protein, 5 aa, synthetic construct
  REGION 1..5: note = Description of Artificial Sequence: Synthetic peptide
  REGION 1..5: note = XENP024125 vlCDR1
GYYMH

SEQ ID NO: 26930 - protein, 17 aa, synthetic construct
  REGION 1..17: note = Description of Artificial Sequence: Synthetic peptide
  REGION 1..17: note = XENP024125 vlCDR2
WINPHSGGTNYAQKFQG

SEQ ID NO: 26931 - protein, 16 aa, synthetic construct
  REGION 1..16: note = Description of Artificial Sequence: Synthetic peptide
  REGION 1..16: note = XENP024125 vlCDR3
TYYYDSSGYYHDAFDI

SEQ ID NO: 26932 - protein, 216 aa, synthetic construct; identical to SEQ ID NO: 26837
  REGION 1..216: note = Description of Artificial Sequence: Synthetic polypeptide
  REGION 1..216: note = XENP024125 LOPD180[PD-1]_H1L1_Fab_(G4S)2_[anti-ICOS]_H0L0 _scFv20_Fc_IgG1 Light Chain

SEQ ID NO: 26933 - protein, 110 aa, synthetic construct; identical to SEQ ID NO: 26838
  REGION 1..110: note = Description of Artificial Sequence: Synthetic polypeptide
  REGION 1..110: note = VL of XENP024125

SEQ ID NO: 26934 - protein, 13 aa, synthetic construct
  REGION 1..13: note = Description of Artificial Sequence: Synthetic peptide
  REGION 1..13: note = XENP024125 vlCDR1
SGSNSNIGSNSVN

SEQ ID NO: 26935 - protein, 7 aa, synthetic construct
  REGION 1..7: note = Description of Artificial Sequence: Synthetic peptide
  REGION 1..7: note = XENP024125 vlCDR2
GNNQRPS

SEQ ID NO: 26936 - protein, 11 aa, synthetic construct
  REGION 1..11: note = Description of Artificial Sequence: Synthetic peptide
  REGION 1..11: note = XENP024125 vlCDR3
AAWDDSLNGPV

SEQ ID NO: 26937 - protein, 451 aa, synthetic construct; identical to SEQ ID NO: 26884
  REGION 1..451: note = Description of Artificial Sequence: Synthetic polypeptide
  REGION 1..451: note = XENP024134 1G6_H1.279_L1.194_Fab-[anti-ICOS]_H0L0 _Fab-IgG1 Heavy Chain 1

SEQ ID NO: 26938 - protein, 122 aa, synthetic construct; identical to SEQ ID NO: 2872
  REGION 1..122: note = Description of Artificial Sequence: Synthetic polypeptide
  REGION 1..122: note = VH of XENP024134

SEQ ID NO: 26939 - protein, 5 aa, synthetic construct
  REGION 1..5: note = Description of Artificial Sequence: Synthetic peptide
  REGION 1..5: note = XENP024134 vhCDR1
NYWMN

SEQ ID NO: 26940 - protein, 19 aa, synthetic construct
  REGION 1..19: note = Description of Artificial Sequence: Synthetic peptide
  REGION 1..19: note = XENP024134 vhCDR2
EIRLYSNNYATHYAESVKG

SEQ ID NO: 26941 - protein, 11 aa, synthetic construct
  REGION 1..11: note = Description of Artificial Sequence: Synthetic peptide
  REGION 1..11: note = XENP024134 vhCDR3
YYGNYGGYFDV

SEQ ID NO: 26942 - protein, 454 aa, synthetic construct
  REGION 1..454: note = Description of Artificial Sequence: Synthetic polypeptide
  REGION 1..454: note = XENP024134 1G6_H1.279_L1.194_Fab-[anti-ICOS]_H0L0 _Fab-IgG1 Heavy Chain 2
QVQLVQSGAEVKKPGASVKVSCKASGYTFTGYYMHWVRQAPGQGLEWMGWINPHSGGTNYAQKFQGRVTMTRDTSISTAYMELSRLRSDDTAVYYCARTYYYDSSGYYHDAFDIWGQGTMVTVSSASTKGPSVFPLAPSSKSTSGGTAALGCLVKDYFPEPVTVSWNSGALTSGVHTFPAVLQSSGLYSLSSVVTVPSSSLGTKTYTCNVNHKPSNTKVDKKVERKSCDKTHTCPRCPAPPVAGPSVFLFPPKPKDTLMISRTPEVTCVVVDVKHEDPEVKFKWYVDGVEVHNAKTKPREEQYNSTYRVVSVLTVLHQDWLNGKEYKCKVSNKALPAPIEKTISKAKGQPREPQVYTLPPSREQMTKNQVKLTCLVKGFYPSDIAVEWESNGQPENNYKTTPPVLDSDGSFFLYSKLTVDKSRWQQGNVFSCSVMHEALHNHYTQKSLSLSPGK

SEQ ID NO: 26943 - protein, 125 aa, synthetic construct; identical to SEQ ID NO: 26293
  REGION 1..125: note = Description of Artificial Sequence: Synthetic polypeptide
  REGION 1..125: note = VH of XENP024134

SEQ ID NO: 26944 - protein, 5 aa, synthetic construct
  REGION 1..5: note = Description of Artificial Sequence: Synthetic peptide
  REGION 1..5: note = XENP024134 vhCDR1
GYYMH

SEQ ID NO: 26945 - protein, 17 aa, synthetic construct
  REGION 1..17: note = Description of Artificial Sequence: Synthetic peptide
  REGION 1..17: note = XENP024134 vhCDR2
WINPHSGGTNYAQKFQG

SEQ ID NO: 26946 - protein, 16 aa, synthetic construct
  REGION 1..16: note = Description of Artificial Sequence: Synthetic peptide
  REGION 1..16: note = XENP024134 vhCDR3
TYYYDSSGYYHDAFDI

SEQ ID NO: 26947 - protein, 214 aa, synthetic construct; identical to SEQ ID NO: 21486
  REGION 1..214: note = Description of Artificial Sequence: Synthetic polypeptide
  REGION 1..214: note = XENP024134 1G6_H1.279_L1.194_Fab-[anti-ICOS]_H0L0 _Fab-IgG1 Light Chain 1

SEQ ID NO: 26948 - protein, 107 aa, synthetic construct; identical to SEQ ID NO: 2871
  REGION 1..107: note = Description of Artificial Sequence: Synthetic polypeptide
  REGION 1..107: note = VL of XENP024134

SEQ ID NO: 26949 - protein, 11 aa, synthetic construct
  REGION 1..11: note = Description of Artificial Sequence: Synthetic peptide
  REGION 1..11: note = XENP024134 vlCDR1
RASQSVGNDVA

SEQ ID NO: 26950 - protein, 7 aa, synthetic construct
  REGION 1..7: note = Description of Artificial Sequence: Synthetic peptide
  REGION 1..7: note = XENP024134 vlCDR2
YASHRYT

SEQ ID NO: 26951 - protein, 9 aa, synthetic construct
  REGION 1..9: note = Description of Artificial Sequence: Synthetic peptide
  REGION 1..9: note = XENP024134 vlCDR3
QQDFSSPRT

SEQ ID NO: 26952 - protein, 214 aa, synthetic construct; identical to SEQ ID NO: 26297
  REGION 1..214: note = Description of Artificial Sequence: Synthetic polypeptide
  REGION 1..214: note = XENP024134 1G6_H1.279_L1.194_Fab-[anti-ICOS]_H0L0 _Fab-IgG1 Light Chain 2

SEQ ID NO: 26953 - protein, 107 aa, synthetic construct; identical to SEQ ID NO: 26298
  REGION 1..107: note = Description of Artificial Sequence: Synthetic polypeptide
  REGION 1..107: note = VL of XENP024134

SEQ ID NO: 26954 - protein, 11 aa, synthetic construct
  REGION 1..11: note = Description of Artificial Sequence: Synthetic peptide
  REGION 1..11: note = XENP024134 vlCDR1
RASQGISRLLA

SEQ ID NO: 26955 - protein, 7 aa, synthetic construct
  REGION 1..7: note = Description of Artificial Sequence: Synthetic peptide
  REGION 1..7: note = XENP024134 vlCDR2
VASSLQS

SEQ ID NO: 26956 - protein, 9 aa, synthetic construct
  REGION 1..9: note = Description of Artificial Sequence: Synthetic peptide
  REGION 1..9: note = XENP024134 vlCDR3
QQANSFPWT

SEQ ID NO: 26957 - protein, 589 aa, synthetic construct
  REGION 1..589: note = Description of Artificial Sequence: Synthetic polypeptide
  REGION 1..589: note = XENP024122 1G6_H1.279_L1.194_[anti-ICOS]_H0L0_IgG1 Heavy Chain
EVQLVESGGGLVKPGGSLRLSCVASGFTFSNYWMNWVRQAPGKGLEWVAEIRLYSNNYATHYAESVKGRFTISRDDSKSTLYLQMNNLKTEDTGVYYCTRYYGNYGGYFDVWGRGTLVTVSSASTKGPSVFPLAPQVQLVQSGAEVKKPGASVKVSCKASGYTFTGYYMHWVRQAPGQGLEWMGWINPHSGGTNYAQKFQGRVTMTRDTSISTAYMELSRLRSDDTAVYYCARTYYYDSSGYYHDAFDIWGQGTMVTVSSASTKGPSVFPLAPSSKSTSGGTAALGCLVKDYFPEPVTVSWNSGALTSGVHTFPAVLQSSGLYSLSSVVTVPSSSLGTQTYICNVNHKPSNTKVDKKVEPKSCDKTHTCPPCPAPPVAGPSVFLFPPKPKDTLMISRTPEVTCVVVDVKHEDPEVKFNWYVDGVEVHNAKTKPREEQYNSTYRVVSVLTVLHQDWLNGKEYKCKVSNKALPAPIEKTISKAKGQPREPQVYTLPPSREEMTKNQVSLTCLVKGFYPSDIAVEWESNGQPENNYKTTPPVLDSDGSFFLYSKLTVDKSRWQQGNVFSCSVMHEALHNHYTQKSLSLSPGK

SEQ ID NO: 26958 - protein, 122 aa, synthetic construct; identical to SEQ ID NO: 2872
  REGION 1..122: note = Description of Artificial Sequence: Synthetic polypeptide
  REGION 1..122: note = VH of XENP024122

SEQ ID NO: 26959 - protein, 125 aa, synthetic construct; identical to SEQ ID NO: 26293
  REGION 1..125: note = Description of Artificial Sequence: Synthetic polypeptide
  REGION 1..125: note = VL of XENP024122

SEQ ID NO: 26960 - protein, 329 aa, synthetic construct
  REGION 1..329: note = Description of Artificial Sequence: Synthetic polypeptide
  REGION 1..329: note = Fc chain of XENP024122
ASTKGPSVFPLAPSSKSTSGGTAALGCLVKDYFPEPVTVSWNSGALTSGVHTFPAVLQSSGLYSLSSVVTVPSSSLGTQTYICNVNHKPSNTKVDKKVEPKSCDKTHTCPPCPAPPVAGPSVFLFPPKPKDTLMISRTPEVTCVVVDVKHEDPEVKFNWYVDGVEVHNAKTKPREEQYNSTYRVVSVLTVLHQDWLNGKEYKCKVSNKALPAPIEKTISKAKGQPREPQVYTLPPSREEMTKNQVSLTCLVKGFYPSDIAVEWESNGQPENNYKTTPPVLDSDGSFFLYSKLTVDKSRWQQGNVFSCSVMHEALHNHYTQKSLSLSPGK

SEQ ID NO: 26961 - protein, 5 aa, synthetic construct
  REGION 1..5: note = Description of Artificial Sequence: Synthetic peptide
  REGION 1..5: note = XENP024122 vhCDR1
NYWMN

SEQ ID NO: 26962 - protein, 19 aa, synthetic construct
  REGION 1..19: note = Description of Artificial Sequence: Synthetic peptide
  REGION 1..19: note = XENP024122 vhCDR2
EIRLYSNNYATHYAESVKG

SEQ ID NO: 26963 - protein, 11 aa, synthetic construct
  REGION 1..11: note = Description of Artificial Sequence: Synthetic peptide
  REGION 1..11: note = XENP024122 vhCDR3
YYGNYGGYFDV

SEQ ID NO: 26964 - protein, 5 aa, synthetic construct
  REGION 1..5: note = Description of Artificial Sequence: Synthetic peptide
  REGION 1..5: note = XENP024122 vlCDR1
GYYMH

SEQ ID NO: 26965 - protein, 17 aa, synthetic construct
  REGION 1..17: note = Description of Artificial Sequence: Synthetic peptide
  REGION 1..17: note = XENP024122 vlCDR2
WINPHSGGTNYAQKFQG

SEQ ID NO: 26966 - protein, 16 aa, synthetic construct
  REGION 1..16: note = Description of Artificial Sequence: Synthetic peptide
  REGION 1..16: note = XENP024122 vlCDR3
TYYYDSSGYYHDAFDI

SEQ ID NO: 26967 - protein, 334 aa, synthetic construct
  REGION 1..334: note = Description of Artificial Sequence: Synthetic polypeptide
  REGION 1..334: note = XENP024122 1G6_H1.279_L1.194_[anti-ICOS]_H0L0_IgG1 Light Chain
EIVLTQSPATLSASPGERVTLTCRASQSVGNDVAWYQQKPGQAPRLLINYASHRYTGVPDRFTGSGYGTEFTLTISSVQSEDFGVYYCQQDFSSPRTFGGGTKVEIKRTVAAPSVFIFPPDIQMTQSPSSVSASVGDRVTITCRASQGISRLLAWYQQKPGKAPKLLIYVASSLQSGVPSRFSGSGSGTDFTLTISSLQPEDFATYYCQQANSFPWTFGQGTKVEIKRTVAAPSVFIFPPSDEQLKSGTASVVCLLNNFYPREAKVQWKVDNALQSGNSQESVTEQDSKDSTYSLSSTLTLSKADYEKHKVYACEVTHQGLSSPVTKSFNRGEC

SEQ ID NO: 26968 - protein, 107 aa, synthetic construct; identical to SEQ ID NO: 2871
  REGION 1..107: note = Description of Artificial Sequence: Synthetic polypeptide
  REGION 1..107: note = VH of XENP024122

SEQ ID NO: 26969 - protein, 107 aa, synthetic construct; identical to SEQ ID NO: 26298
  REGION 1..107: note = Description of Artificial Sequence: Synthetic polypeptide
  REGION 1..107: note = VL of XENP024122

SEQ ID NO: 26970 - protein, 107 aa, synthetic construct [sequence omitted]

SEQ ID NO: 26971 - protein, 11 aa, synthetic construct
  REGION 1..11: note = Description of Artificial Sequence: Synthetic peptide
  REGION 1..11: note = XENP024122 vhCDR1
RASQSVGNDVA

SEQ ID NO: 26972 - protein, 7 aa, synthetic construct
  REGION 1..7: note = Description of Artificial Sequence: Synthetic peptide
  REGION 1..7: note = XENP024122 vhCDR2
YASHRYT

SEQ ID NO: 26973 - protein, 9 aa, synthetic construct
  REGION 1..9: note = Description of Artificial Sequence: Synthetic peptide
  REGION 1..9: note = XENP024122 vhCDR3
QQDFSSPRT

SEQ ID NO: 26974 - protein, 11 aa, synthetic construct
  REGION 1..11: note = Description of Artificial Sequence: Synthetic peptide
  REGION 1..11: note = XENP024122 vlCDR1
RASQGISRLLA

SEQ ID NO: 26975 - protein, 7 aa, synthetic construct
  REGION 1..7: note = Description of Artificial Sequence: Synthetic peptide
  REGION 1..7: note = XENP024122 vlCDR2
VASSLQS

SEQ ID NO: 26976 - protein, 9 aa, synthetic construct
  REGION 1..9: note = Description of Artificial Sequence: Synthetic peptide
  REGION 1..9: note = XENP024122 vlCDR3
QQANSFPWT

SEQ ID NO: 26977 - protein, 502 aa, synthetic construct
  REGION 1..502: note = Description of Artificial Sequence: Synthetic polypeptide
  REGION 1..502: note = XENP024132 1G6_L1.194_1G6_H1.279_DART-[anti-ICOS]_H0L0 _Fab-Fc_IgG1 Heavy Chain
EIVLTQSPATLSASPGERVTLTCRASQSVGNDVAWYQQKPGQAPRLLINYASHRYTGVPDRFTGSGYGTEFTLTISSVQSEDFGVYYCQQDFSSPRTFGGGTKVEIKGGGSGGGGEVQLVESGGGLVKPGGSLRLSCVASGFTFSNYWMNWVRQAPGKGLEWVAEIRLYSNNYATHYAESVKGRFTISRDDSKSTLYLQMNNLKTEDTGVYYCTRYYGNYGGYFDVWGRGTLVTVSSGGCGGGEVAACEKEVAALEKEVAALEKEVAALEKEPKSSDKTHTCPPCPAPPVAGPSVFLFPPKPKDTLMISRTPEVTCVVVDVKHEDPEVKFNWYVDGVEVHNAKTKPREEEYNSTYRVVSVLTVLHQDWLNGKEYKCKVSNKALPAPIEKTISKAKGQPREPQVYTLPPSREEMTKNQVSLTCDVSGFYPSDIAVEWESDGQPENNYKTTPPVLDSDGSFFLYSKLTVDKSRWEQGDVFSCSVMHEALHNHYTQKSLSLSPGK

SEQ ID NO: 26978 - protein, 107 aa, synthetic construct; identical to SEQ ID NO: 2871
  REGION 1..107: note = Description of Artificial Sequence: Synthetic polypeptide
  REGION 1..107: note = VH of XENP024132

SEQ ID NO: 26979 - protein, 122 aa, synthetic construct; identical to SEQ ID NO: 2872
  REGION 1..122: note = Description of Artificial Sequence: Synthetic polypeptide
  REGION 1..122: note = VL of XENP024132

SEQ ID NO: 26980 - protein, 265 aa, synthetic construct
  REGION 1..265: note = Description of Artificial Sequence: Synthetic polypeptide
  REGION 1..265: note = Fc chain of XENP024132
GGCGGGEVAACEKEVAALEKEVAALEKEVAALEKEPKSSDKTHTCPPCPAPPVAGPSVFLFPPKPKDTLMISRTPEVTCVVVDVKHEDPEVKFNWYVDGVEVHNAKTKPREEEYNSTYRVVSVLTVLHQDWLNGKEYKCKVSNKALPAPIEKTISKAKGQPREPQVYTLPPSREEMTKNQVSLTCDVSGFYPSDIAVEWESDGQPENNYKTTPPVLDSDGSFFLYSKLTVDKSRWEQGDVFSCSVMHEALHNHYTQKSLSLSPGK

SEQ ID NO: 26981 - protein, 11 aa, synthetic construct
  REGION 1..11: note = Description of Artificial Sequence: Synthetic peptide
  REGION 1..11: note = XENP024132 vhCDR1
RASQSVGNDVA

SEQ ID NO: 26982 - protein, 7 aa, synthetic construct
  REGION 1..7: note = Description of Artificial Sequence: Synthetic peptide
  REGION 1..7: note = XENP024132 vhCDR2
YASHRYT

SEQ ID NO: 26983 - protein, 9 aa, synthetic construct
  REGION 1..9: note = Description of Artificial Sequence: Synthetic peptide
  REGION 1..9: note = XENP024132 vhCDR3
QQDFSSPRT

SEQ ID NO: 26984 - protein, 5 aa, synthetic construct
  REGION 1..5: note = Description of Artificial Sequence: Synthetic peptide
  REGION 1..5: note = XENP024132 vlCDR1
NYWMN

SEQ ID NO: 26985 - protein, 19 aa, synthetic construct
  REGION 1..19: note = Description of Artificial Sequence: Synthetic peptide
  REGION 1..19: note = XENP024132 vlCDR2
EIRLYSNNYATHYAESVKG

SEQ ID NO: 26986 - protein, 11 aa, synthetic construct
  REGION 1..11: note = Description of Artificial Sequence: Synthetic peptide
  REGION 1..11: note = XENP024132 vlCDR3
YYGNYGGYFDV

SEQ ID NO: 26987 - protein, 454 aa, synthetic construct; identical to SEQ ID NO: 26942
  REGION 1..454: note = Description of Artificial Sequence: Synthetic polypeptide
  REGION 1..454: note = XENP024132 1G6_L1.194_1G6_H1.279_DART-[anti-ICOS]_H0L0 _Fab-Fc_IgG1 Heavy Chain

SEQ ID NO: 26988 - protein, 125 aa, synthetic construct; identical to SEQ ID NO: 26293
  REGION 1..125: note = Description of Artificial Sequence: Synthetic polypeptide
  REGION 1..125: note = VH of XENP024132

SEQ ID NO: 26989 - protein, 5 aa, synthetic construct
  REGION 1..5: note = Description of Artificial Sequence: Synthetic peptide
  REGION 1..5: note = XENP024132 vhCDR1
GYYMH

SEQ ID NO: 26990 - protein, 17 aa, synthetic construct
  REGION 1..17: note = Description of Artificial Sequence: Synthetic peptide
  REGION 1..17: note = XENP024132 vhCDR2
WINPHSGGTNYAQKFQG

SEQ ID NO: 26991 - protein, 16 aa, synthetic construct
  REGION 1..16: note = Description of Artificial Sequence: Synthetic peptide
  REGION 1..16: note = XENP024132 vhCDR3
TYYYDSSGYYHDAFDI

SEQ ID NO: 26992 - protein, 281 aa, synthetic construct
  REGION 1..281: note = Description of Artificial Sequence: Synthetic polypeptide
  REGION 1..281: note = XENP024132 1G6_L1.194_1G6_H1.279_DART-[anti-ICOS]_H0L0 _Fab-Fc_IgG1 Light Chain 1
EIVLTQSPATLSASPGERVTLTCRASQSVGNDVAWYQQKPGQAPRLLINYASHRYTGVPDRFTGSGYGTEFTLTISSVQSEDFGVYYCQQDFSSPRTFGGGTKVEIKGGGSGGGGEVQLVESGGGLVKPGGSLRLSCVASGFLRLSCVASGFTFSNYWMNWVRQAPGKGLEWVAEIRLYSNNYATHYAESVKGRFTISRDDSKSTLYLQMNNLKTEDTGVYYCTRYYGNYGGYFDVWGRGTLVTVSSGGCGGGKVAACKEKVAALKEKVAALKEKVAALKE

SEQ ID NO: 26993 - protein, 107 aa, synthetic construct; identical to SEQ ID NO: 2871
  REGION 1..107: note = Description of Artificial Sequence: Synthetic polypeptide
  REGION 1..107: note = VH of XENP024132

SEQ ID NO: 26994 - protein, 132 aa, synthetic construct
  REGION 1..132: note = Description of Artificial Sequence: Synthetic polypeptide
  REGION 1..132: note = VL of XENP024132
EVQLVESGGGLVKPGGSLRLSCVASGFLRLSCVASGFTFSNYWMNWVRQAPGKGLEWVAEIRLYSNNYATHYAESVKGRFTISRDDSKSTLYLQMNNLKTEDTGVYYCTRYYGNYGGYFDVWGRGTLVTVSS

SEQ ID NO: 26995 - protein, 34 aa, synthetic construct
  REGION 1..34: note = Description of Artificial Sequence: Synthetic polypeptide
  REGION 1..34: note = Fc chain of XENP024132
GGCGGGKVAACKEKVAALKEKVAALKEKVAALKE

SEQ ID NO: 26996 - protein, 11 aa, synthetic construct
  REGION 1..11: note = Description of Artificial Sequence: Synthetic peptide
  REGION 1..11: note = XENP024132 vhCDR1
RASQSVGNDVA

SEQ ID NO: 26997 - protein, 7 aa, synthetic construct
  REGION 1..7: note = Description of Artificial Sequence: Synthetic peptide
  REGION 1..7: note = XENP024132 vhCDR2
YASHRYT

SEQ ID NO: 26998 - protein, 9 aa, synthetic construct
  REGION 1..9: note = Description of Artificial Sequence: Synthetic peptide
  REGION 1..9: note = XENP024132 vhCDR3
QQDFSSPRT

SEQ ID NO: 26999 - protein, 15 aa, synthetic construct
  REGION 1..15: note = Description of Artificial Sequence: Synthetic peptide
  REGION 1..15: note = XENP024132 vlCDR1
SCVASGFTFSNYWMN

SEQ ID NO: 27000 - protein, 19 aa, synthetic construct
  REGION 1..19: note = Description of Artificial Sequence: Synthetic peptide
  REGION 1..19: note = XENP024132 vlCDR2
EIRLYSNNYATHYAESVKG

SEQ ID NO: 27001 - protein, 11 aa, synthetic construct
  REGION 1..11: note = Description of Artificial Sequence: Synthetic peptide
  REGION 1..11: note = XENP024132 vlCDR3
YYGNYGGYFDV

SEQ ID NO: 27002 - protein, 214 aa, synthetic construct; identical to SEQ ID NO: 26297
  REGION 1..214: note = Description of Artificial Sequence: Synthetic polypeptide
  REGION 1..214: note = XENP024132 1G6_L1.194_1G6_H1.279_DART-[anti-ICOS]_H0L0 _Fab-Fc_IgG1 Light Chain 2

SEQ ID NO: 27003 - protein, 107 aa, synthetic construct; identical to SEQ ID NO: 26298
  REGION 1..107: note = Description of Artificial Sequence: Synthetic polypeptide
  REGION 1..107: note = VL of XENP024132

SEQ ID NO: 27004 - protein, 11 aa, synthetic construct
  REGION 1..11: note = Description of Artificial Sequence: Synthetic peptide
  REGION 1..11: note = XENP024132 vlCDR1
RASQGISRLLA

SEQ ID NO: 27005 - protein, 7 aa, synthetic construct
  REGION 1..7: note = Description of Artificial Sequence: Synthetic peptide
  REGION 1..7: note = XENP024132 vlCDR2
VASSLQS

SEQ ID NO: 27006 - protein, 9 aa, synthetic construct
  REGION 1..9: note = Description of Artificial Sequence: Synthetic peptide
  REGION 1..9: note = XENP024132 vlCDR3
QQANSFPWT

SEQ ID NO: 27007 - protein, 503 aa, synthetic construct
  REGION 1..503: note = Description of Artificial Sequence: Synthetic polypeptide
  REGION 1..503: note = XENP024133 mAb7(1.2)[PD-1]_L1_mAb7(1.2)[PD-1]_H1 _DART-[anti-ICOS]_H0L0_Fab-Fc_IgG1 Heavy Chain 1
EIVLTQSPATLSLSPGERATLSCRASESVDNYGMSFMNWFQQKPGQPPKLLIHAASNQGSGVPSRFSGSGSGTDFTLTISSLEPEDFAVYFCQQSKEVPYTFGGGTKVEIKGGGSGGGGQVQLVQSGAEVKKPGASVKVSCKASGYSFTSYWMNWVRQAPGQGLEWIGVIHPSDSETWLDQKFKDRVTITVDKSTSTAYMELSSLRSEDTAVYYCAREHYGTSPFAYWGQGTLVTVSSGGCGGGEVAACEKEVAALEKEVAALEKEVAALEKEPKSSDKTHTCPPCPAPPVAGPSVFLFPPKPKDTLMISRTPEVTCVVVDVKHEDPEVKFNWYVDGVEVHNAKTKPREEEYNSTYRVVSVLTVLHQDWLNGKEYKCKVSNKALPAPIEKTISKAKGQPREPQVYTLPPSREEMTKNQVSLTCDVSGFYPSDIAVEWESDGQPENNYKTTPPVLDSDGSFFLYSKLTVDKSRWEQGDVFSCSVMHEALHNHYTQKSLSLSPGK

SEQ ID NO: 27008 - protein, 111 aa, synthetic construct
  REGION 1..111: note = Description of Artificial Sequence: Synthetic polypeptide
  REGION 1..111: note = VH of XENP024133
EIVLTQSPATLSLSPGERATLSCRASESVDNYGMSFMNWFQQKPGQPPKLLIHAASNQGSGVPSRFSGSGSGTDFTLTISSLEPEDFAVYFCQQSKEVPYTFGGGTKVEIK

SEQ ID NO: 27009 - protein, 119 aa, synthetic construct
  REGION 1..119: note = Description of Artificial Sequence: Synthetic polypeptide
  REGION 1..119: note = VL of XENP024133
QVQLVQSGAEVKKPGASVKVSCKASGYSFTSYWMNWVRQAPGQGLEWIGVIHPSDSETWLDQKFKDRVTITVDKSTSTAYMELSSLRSEDTAVYYCAREHYGTSPFAYWGQGTLVTVSS

SEQ ID NO: 27010 - protein, 265 aa, synthetic construct; identical to SEQ ID NO: 26980
  REGION 1..265: note = Description of Artificial Sequence: Synthetic polypeptide
  REGION 1..265: note = Fc chain of XENP024133

SEQ ID NO: 27011 - protein, 15 aa, synthetic construct
  REGION 1..15: note = Description of Artificial Sequence: Synthetic peptide
  REGION 1..15: note = XENP024133 vhCDR1
RASESVDNYGMSFMN

SEQ ID NO: 27012 - protein, 7 aa, synthetic construct
  REGION 1..7: note = Description of Artificial Sequence: Synthetic peptide
  REGION 1..7: note = XENP024133 vhCDR2
AASNQGS

SEQ ID NO: 27013 - protein, 9 aa, synthetic construct
  REGION 1..9: note = Description of Artificial Sequence: Synthetic peptide
  REGION 1..9: note = XENP024133 vhCDR3
QQSKEVPYT

SEQ ID NO: 27014 - protein, 5 aa, synthetic construct
  REGION 1..5: note = Description of Artificial Sequence: Synthetic peptide
  REGION 1..5: note = XENP024133 vlCDR1
SYWMN

SEQ ID NO: 27015 - protein, 17 aa, synthetic construct
  REGION 1..17: note = Description of Artificial Sequence: Synthetic peptide
  REGION 1..17: note = XENP024133 vlCDR2
VIHPSDSETWLDQKFKD

SEQ ID NO: 27016 - protein, 10 aa, synthetic construct
  REGION 1..10: note = Description of Artificial Sequence: Synthetic peptide
  REGION 1..10: note = XENP024133 vlCDR3
EHYGTSPFAY

SEQ ID NO: 27017 - protein, 454 aa, synthetic construct; identical to SEQ ID NO: 26942
  REGION 1..454: note = Description of Artificial Sequence: Synthetic polypeptide
  REGION 1..454: note = XENP024133 mAb7(1.2)[PD-1]_L1_mAb7(1.2)[PD-1]_H1 _DART-[anti-ICOS]_H0L0_Fab-Fc_IgG1 Heavy Chain 2

SEQ ID NO: 27018 - protein, 125 aa, synthetic construct; identical to SEQ ID NO: 26293
  REGION 1..125: note = Description of Artificial Sequence: Synthetic polypeptide
  REGION 1..125: note = VH of XENP024133

SEQ ID NO: 27019 - protein, 5 aa, synthetic construct
  REGION 1..5: note = Description of Artificial Sequence: Synthetic peptide
  REGION 1..5: note = XENP024133 vhCDR1
GYYMH

SEQ ID NO: 27020 - protein, 17 aa, synthetic construct
  REGION 1..17: note = Description of Artificial Sequence: Synthetic peptide
  REGION 1..17: note = XENP024133 vhCDR2
WINPHSGGTNYAQKFQG

SEQ ID NO: 27021 - protein, 16 aa, synthetic construct
  REGION 1..16: note = Description of Artificial Sequence: Synthetic peptide
  REGION 1..16: note = XENP024133 vhCDR3
TYYYDSSGYYHDAFDI

SEQ ID NO: 27022 - protein, 282 aa, synthetic construct
  REGION 1..282: note = Description of Artificial Sequence: Synthetic polypeptide
  REGION 1..282: note = XENP024133 mAb7(1.2)[PD-1]_L1_mAb7(1.2)[PD-1]_H1 _DART-[anti-ICOS]_H0L0_Fab-Fc_IgG1 Light Chain 1
EIVLTQSPATLSLSPGERATLSCRASESVDNYGMSFMNWFQQKPGQPPKLLIHAASNQGSGVPSRFSGSGSGTDFTLTISSLEPEDFAVYFCQQSKEVPYTFGGGTKVEIKGGGSGGGGQVQLVQSGAEVKKPGASVKVSCKAGASVKVSCKASGYSFTSYWMNWVRQAPGQGLEWIGVIHPSDSETWLDQKFKDRVTITVDKSTSTAYMELSSLRSEDTAVYYCAREHYGTSPFAYWGQGTLVTVSSGGCGGGKVAACKEKVAALKEKVAALKEKVAALKE

SEQ ID NO: 27023 - protein, 111 aa, synthetic construct; identical to SEQ ID NO: 27008
  REGION 1..111: note = Description of Artificial Sequence: Synthetic polypeptide
  REGION 1..111: note = VH of XENP024133

SEQ ID NO: 27024 - protein, 129 aa, synthetic construct
  REGION 1..129: note = Description of Artificial Sequence: Synthetic polypeptide
  REGION 1..129: note = VL of XENP024133
QVQLVQSGAEVKKPGASVKVSCKAGASVKVSCKASGYSFTSYWMNWVRQAPGQGLEWIGVIHPSDSETWLDQKFKDRVTITVDKSTSTAYMELSSLRSEDTAVYYCAREHYGTSPFAYWGQGTLVTVSS

SEQ ID NO: 27025 - protein, 34 aa, synthetic construct; identical to SEQ ID NO: 26995
  REGION 1..34: note = Description of Artificial Sequence: Synthetic polypeptide
  REGION 1..34: note = Fc chain of XENP024133

SEQ ID NO: 27026 - protein, 15 aa, synthetic construct
  REGION 1..15: note = Description of Artificial Sequence: Synthetic peptide
  REGION 1..15: note = XENP024133 vhCDR1
RASESVDNYGMSFMN

SEQ ID NO: 27027 - protein, 7 aa, synthetic construct
  REGION 1..7: note = Description of Artificial Sequence: Synthetic peptide
  REGION 1..7: note = XENP024133 vhCDR2
AASNQGS

SEQ ID NO: 27028 - protein, 9 aa, synthetic construct
  REGION 1..9: note = Description of Artificial Sequence: Synthetic peptide
  REGION 1..9: note = XENP024133 vhCDR3
QQSKEVPYT

SEQ ID NO: 27029 - protein, 5 aa, synthetic construct
  REGION 1..5: note = Description of Artificial Sequence: Synthetic peptide
  REGION 1..5: note = XENP024133 vlCDR1
SYWMN

SEQ ID NO: 27030 - protein, 17 aa, synthetic construct
  REGION 1..17: note = Description of Artificial Sequence: Synthetic peptide
  REGION 1..17: note = XENP024133 vlCDR2
VIHPSDSETWLDQKFKD

SEQ ID NO: 27031 - protein, 10 aa, synthetic construct
  REGION 1..10: note = Description of Artificial Sequence: Synthetic peptide
  REGION 1..10: note = XENP024133 vlCDR3
EHYGTSPFAY

SEQ ID NO: 27032 - protein, 214 aa, synthetic construct; identical to SEQ ID NO: 26297
  REGION 1..214: note = Description of Artificial Sequence: Synthetic polypeptide
  REGION 1..214: note = XENP024133 mAb7(1.2)[PD-1]_L1_mAb7(1.2)[PD-1]_H1 _DART-[anti-ICOS]_H0L0_Fab-Fc_IgG1 Light Chain 2

SEQ ID NO: 27033 - protein, 107 aa, synthetic construct; identical to SEQ ID NO: 26298
  REGION 1..107: note = Description of Artificial Sequence: Synthetic polypeptide
  REGION 1..107: note = VL of XENP024133

SEQ ID NO: 27034 - protein, 11 aa, synthetic construct
  REGION 1..11: note = Description of Artificial Sequence: Synthetic peptide
  REGION 1..11: note = XENP024133 vlCDR1
RASQGISRLLA

SEQ ID NO: 27035 - protein, 7 aa, synthetic construct
  REGION 1..7: note = Description of Artificial Sequence: Synthetic peptide
  REGION 1..7: note = XENP024133 vlCDR2
VASSLQS

SEQ ID NO: 27036 - protein, 9 aa, synthetic construct
  REGION 1..9: note = Description of Artificial Sequence: Synthetic peptide
  REGION 1..9: note = XENP024133 vlCDR3
QQANSFPWT

SEQ ID NO: 27037 - protein, 454 aa, synthetic construct; identical to SEQ ID NO: 26442
  REGION 1..454: note = Description of Artificial Sequence: Synthetic polypeptide
  REGION 1..454: note = XENP021749 [anti-ICOS]_H0L0_Fab-[anti-CTLA-4]_H3.23 _L0.129_scFv Fab-Fc Heavy Chain

SEQ ID NO: 27038 - protein, 125 aa, synthetic construct; identical to SEQ ID NO: 26293
  REGION 1..125: note = Description of Artificial Sequence: Synthetic polypeptide
  REGION 1..125: note = VH of XENP021749

SEQ ID NO: 27039 - protein, 5 aa, synthetic construct
  REGION 1..5: note = Description of Artificial Sequence: Synthetic peptide
  REGION 1..5: note = XENP021749 vhCDR1
GYYMH

SEQ ID NO: 27040 - protein, 17 aa, synthetic construct
  REGION 1..17: note = Description of Artificial Sequence: Synthetic peptide
  REGION 1..17: note = XENP021749 vhCDR2
WINPHSGGTNYAQKFQG

SEQ ID NO: 27041 - protein, 16 aa, synthetic construct
  REGION 1..16: note = Description of Artificial Sequence: Synthetic peptide
  REGION 1..16: note = XENP021749 vhCDR3
TYYYDSSGYYHDAFDI

SEQ ID NO: 27042 - protein, 477 aa, synthetic construct; identical to SEQ ID NO: 2394
  REGION 1..477: note = Description of Artificial Sequence: Synthetic polypeptide
  REGION 1..477: note = XENP021749 [anti-ICOS]_H0L0_Fab-[anti-CTLA-4]_H3.23 _L0.129_scFv scFv-Fc Heavy Chain

SEQ ID NO: 27043 - protein, 118 aa, synthetic construct; identical to SEQ ID NO: 2395
  REGION 1..118: note = Description of Artificial Sequence: Synthetic polypeptide
  REGION 1..118: note = VH of XENP021749

SEQ ID NO: 27044 - protein, 108 aa, synthetic construct; identical to SEQ ID NO: 2396
  REGION 1..108: note = Description of Artificial Sequence: Synthetic polypeptide
  REGION 1..108: note = VL of XENP021749

SEQ ID NO: 27045 - protein, 231 aa, synthetic construct; identical to SEQ ID NO: 2397
  REGION 1..231: note = Description of Artificial Sequence: Synthetic polypeptide
  REGION 1..231: note = Fc chain of XENP021749

SEQ ID NO: 27046 - protein, 5 aa, synthetic construct
  REGION 1..5: note = Description of Artificial Sequence: Synthetic peptide
  REGION 1..5: note = XENP021749 vhCDR1
SYTMH

SEQ ID NO: 27047 - protein, 17 aa, synthetic construct
  REGION 1..17: note = Description of Artificial Sequence: Synthetic peptide
  REGION 1..17: note = XENP021749 vhCDR2
FISYDGNYKYYADSVKG

SEQ ID NO: 27048 - protein, 9 aa, synthetic construct
  REGION 1..9: note = Description of Artificial Sequence: Synthetic peptide
  REGION 1..9: note = XENP021749 vhCDR3
GGHLGPFDL

SEQ ID NO: 27049 - protein, 12 aa, synthetic construct
  REGION 1..12: note = Description of Artificial Sequence: Synthetic peptide
  REGION 1..12: note = XENP021749 vlCDR1
RASQSVGSSYLA

SEQ ID NO: 27050 - protein, 7 aa, synthetic construct
  REGION 1..7: note = Description of Artificial Sequence: Synthetic peptide
  REGION 1..7: note = XENP021749 vlCDR2
GASSRAT

SEQ ID NO: 27051 - protein, 9 aa, synthetic construct
  REGION 1..9: note = Description of Artificial Sequence: Synthetic peptide
  REGION 1..9: note = XENP021749 vlCDR3
QQYGSSPWT

SEQ ID NO: 27052 - protein, 214 aa, synthetic construct; identical to SEQ ID NO: 26297
  REGION 1..214: note = Description of Artificial Sequence: Synthetic polypeptide
  REGION 1..214: note = XENP021749 [anti-ICOS]_H0L0_Fab-[anti-CTLA-4]_H3.23 _L0.129_scFv Light Chain

SEQ ID NO: 27053 - protein, 107 aa, synthetic construct; identical to SEQ ID NO: 26298
  REGION 1..107: note = Description of Artificial Sequence: Synthetic polypeptide
  REGION 1..107: note = VL of XENP021749

SEQ ID NO: 27054 - protein, 11 aa, synthetic construct
  REGION 1..11: note = Description of Artificial Sequence: Synthetic peptide
  REGION 1..11: note = XENP021749 vlCDR1
RASQGISRLLA

SEQ ID NO: 27055 - protein, 7 aa, synthetic construct
  REGION 1..7: note = Description of Artificial Sequence: Synthetic peptide
  REGION 1..7: note = XENP021749 vlCDR2
VASSLQS

SEQ ID NO: 27056 - protein, 9 aa, synthetic construct
  REGION 1..9: note = Description of Artificial Sequence: Synthetic peptide
  REGION 1..9: note = XENP021749 vlCDR3
QQANSFPWT

SEQ ID NO: 27057 - protein, 450 aa, synthetic construct; identical to SEQ ID NO: 2785
  REGION 1..450: note = Description of Artificial Sequence: Synthetic polypeptide
  REGION 1..450: note = XENP024359 7G8_H3.30_L1.34_Fab-[anti-ICOS]_H0L0_Fab Heavy Chain 1

SEQ ID NO: 27058 - protein, 121 aa, synthetic construct; identical to SEQ ID NO: 2516
  REGION 1..121: note = Description of Artificial Sequence: Synthetic polypeptide
  REGION 1..121: note = VH of XENP024359

SEQ ID NO: 27059 - protein, 5 aa, synthetic construct
  REGION 1..5: note = Description of Artificial Sequence: Synthetic peptide
  REGION 1..5: note = XENP024359 vhCDR1
DAWMS

SEQ ID NO: 27060 - protein, 19 aa, synthetic construct
  REGION 1..19: note = Description of Artificial Sequence: Synthetic peptide
  REGION 1..19: note = XENP024359 vhCDR2
EISTKANNHATYYAESVKG

SEQ ID NO: 27061 - protein, 10 aa, synthetic construct
  REGION 1..10: note = Description of Artificial Sequence: Synthetic peptide
  REGION 1..10: note = XENP024359 vhCDR3
LATWDWYFDV

SEQ ID NO: 27062 - protein, 454 aa, synthetic construct; identical to SEQ ID NO: 26942
  REGION 1..454: note = Description of Artificial Sequence: Synthetic polypeptide
  REGION 1..454: note = XENP024359 7G8_H3.30_L1.34_Fab-[anti-ICOS]_H0L0_Fab Heavy Chain 2

SEQ ID NO: 27063 - protein, 125 aa, synthetic construct; identical to SEQ ID NO: 26293
  REGION 1..125: note = Description of Artificial Sequence: Synthetic polypeptide
  REGION 1..125: note = VH of XENP024359

SEQ ID NO: 27064 - protein, 5 aa, synthetic construct
  REGION 1..5: note = Description of Artificial Sequence: Synthetic peptide
  REGION 1..5: note = XENP024359 vhCDR1
GYYMH

SEQ ID NO: 27065 - protein, 17 aa, synthetic construct
  REGION 1..17: note = Description of Artificial Sequence: Synthetic peptide
  REGION 1..17: note = XENP024359 vhCDR2
WINPHSGGTNYAQKFQG

SEQ ID NO: 27066 - protein, 16 aa, synthetic construct
  REGION 1..16: note = Description of Artificial Sequence: Synthetic peptide
  REGION 1..16: note = XENP024359 vhCDR3
TYYYDSSGYYHDAFDI

SEQ ID NO: 27067 - protein, 218 aa, synthetic construct; identical to SEQ ID NO: 2420
  REGION 1..218: note = Description of Artificial Sequence: Synthetic polypeptide
  REGION 1..218: note = XENP024359 7G8_H3.30_L1.34_Fab-[anti-ICOS]_H0L0_Fab Light Chain 1

SEQ ID NO: 27068 - protein, 111 aa, synthetic construct; identical to SEQ ID NO: 2421
  REGION 1..111: note = Description of Artificial Sequence: Synthetic polypeptide
  REGION 1..111: note = VL of XENP024359

SEQ ID NO: 27069 - protein, 15 aa, synthetic construct
  REGION 1..15: note = Description of Artificial Sequence: Synthetic peptide
  REGION 1..15: note = XENP024359 vlCDR1
RASQSVDYDGDSYMN

SEQ ID NO: 27070 - protein, 7 aa, synthetic construct
  REGION 1..7: note = Description of Artificial Sequence: Synthetic peptide
  REGION 1..7: note = XENP024359 vlCDR2
AASELES

SEQ ID NO: 27071 - protein, 9 aa, synthetic construct
  REGION 1..9: note = Description of Artificial Sequence: Synthetic peptide
  REGION 1..9: note = XENP024359 vlCDR3
QQSNEDPFT

SEQ ID NO: 27072 - protein, 214 aa, synthetic construct; identical to SEQ ID NO: 26297
  REGION 1..214: note = Description of Artificial Sequence: Synthetic polypeptide
  REGION 1..214: note = XENP024359 7G8_H3.30_L1.34_Fab-[anti-ICOS]_H0L0_Fab Light Chain 2

SEQ ID NO: 27073 - protein, 107 aa, synthetic construct; identical to SEQ ID NO: 26298
  REGION 1..107: note = Description of Artificial Sequence: Synthetic polypeptide
  REGION 1..107: note = VL of XENP024359

SEQ ID NO: 27074 - protein, 11 aa, synthetic construct
  REGION 1..11: note = Description of Artificial Sequence: Synthetic peptide
  REGION 1..11: note = XENP024359 vlCDR1
RASQGISRLLA

SEQ ID NO: 27075 - protein, 7 aa, synthetic construct
  REGION 1..7: note = Description of Artificial Sequence: Synthetic peptide
  REGION 1..7: note = XENP024359 vlCDR2
VASSLQS

SEQ ID NO: 27076 - protein, 9 aa, synthetic construct
  REGION 1..9: note = Description of Artificial Sequence: Synthetic peptide
  REGION 1..9: note = XENP024359 vlCDR3
QQANSFPWT

SEQ ID NO: 27077 - protein, 447 aa, synthetic construct; identical to SEQ ID NO: 2865
  REGION 1..447: note = Description of Artificial Sequence: Synthetic polypeptide
  REGION 1..447: note = XENP024360 2A11_H1.144_L2.142_Fab-[anti-ICOS]_H0L0_Fab Heavy Chain 1

SEQ ID NO: 27078 - protein, 118 aa, synthetic construct; identical to SEQ ID NO: 2646
  REGION 1..118: note = Description of Artificial Sequence: Synthetic polypeptide
  REGION 1..118: note = VH of XENP024360

SEQ ID NO: 27079 - protein, 5 aa, synthetic construct
  REGION 1..5: note = Description of Artificial Sequence: Synthetic peptide
  REGION 1..5: note = XENP024360 vhCDR1
DYFMH

SEQ ID NO: 27080 - protein, 17 aa, synthetic construct
  REGION 1..17: note = Description of Artificial Sequence: Synthetic peptide
  REGION 1..17: note = XENP024360 vhCDR2
WIDPELGDTEYAPKFQG

SEQ ID NO: 27081 - protein, 9 aa, synthetic construct
  REGION 1..9: note = Description of Artificial Sequence: Synthetic peptide
  REGION 1..9: note = XENP024360 vhCDR3
RGVYQALDY

SEQ ID NO: 27082 - protein, 454 aa, synthetic construct; identical to SEQ ID NO: 26942
  REGION 1..454: note = Description of Artificial Sequence: Synthetic polypeptide
  REGION 1..454: note = XENP024360 2A11_H1.144_L2.142_Fab-[anti-ICOS]_H0L0_Fab Heavy Chain 2

SEQ ID NO: 27083 - protein, 125 aa, synthetic construct; identical to SEQ ID NO: 26293
  REGION 1..125: note = Description of Artificial Sequence: Synthetic polypeptide
  REGION 1..125: note = VH of XENP024360

SEQ ID NO: 27084 - protein, 5 aa, synthetic construct
  REGION 1..5: note = Description of Artificial Sequence: Synthetic peptide
  REGION 1..5: note = XENP024360 vhCDR1
GYYMH

SEQ ID NO: 27085 - protein, 17 aa, synthetic construct
  REGION 1..17: note = Description of Artificial Sequence: Synthetic peptide
  REGION 1..17: note = XENP024360 vhCDR2
WINPHSGGTNYAQKFQG

SEQ ID NO: 27086 - protein, 16 aa, synthetic construct
  REGION 1..16: note = Description of Artificial Sequence: Synthetic peptide
  REGION 1..16: note = XENP024360 vhCDR3
TYYYDSSGYYHDAFDI

SEQ ID NO: 27087 - protein, 214 aa, synthetic construct; identical to SEQ ID NO: 2660
  REGION 1..214: note = Description of Artificial Sequence: Synthetic polypeptide
  REGION 1..214: note = XENP024360 2A11_H1.144_L2.142_Fab-[anti-ICOS]_H0L0_Fab Light Chain 1

SEQ ID NO: 27088 - protein, 107 aa, synthetic construct; identical to SEQ ID NO: 2661
  REGION 1..107: note = Description of Artificial Sequence: Synthetic polypeptide
  REGION 1..107: note = VL of XENP024360

SEQ ID NO: 27089 - protein, 11 aa, synthetic construct
  REGION 1..11: note = Description of Artificial Sequence: Synthetic peptide
  REGION 1..11: note = XENP024360 vlCDR1
QASQDIGNYLN

SEQ ID NO: 27090 - protein, 7 aa, synthetic construct
  REGION 1..7: note = Description of Artificial Sequence: Synthetic peptide
  REGION 1..7: note = XENP024360 vlCDR2
FTSYLHS

SEQ ID NO: 27091 - protein, 9 aa, synthetic construct
  REGION 1..9: note = Description of Artificial Sequence: Synthetic peptide
  REGION 1..9: note = XENP024360 vlCDR3
QQGNTLPYT

SEQ ID NO: 27092 - protein, 214 aa, synthetic construct; identical to SEQ ID NO: 26297
  REGION 1..214: note = Description of Artificial Sequence: Synthetic polypeptide
  REGION 1..214: note = XENP024360 2A11_H1.144_L2.142_Fab-[anti-ICOS]_H0L0_Fab Light Chain 2

SEQ ID NO: 27093 - protein, 107 aa, synthetic construct; identical to SEQ ID NO: 26298
  REGION 1..107: note = Description of Artificial Sequence: Synthetic polypeptide
  REGION 1..107: note = VL of XENP024360

SEQ ID NO: 27094 - protein, 11 aa, synthetic construct
  REGION 1..11: note = Description of Artificial Sequence: Synthetic peptide
  REGION 1..11: note = XENP024360 vlCDR1
RASQGISRLLA

SEQ ID NO: 27095 - protein, 7 aa, synthetic construct
  REGION 1..7: note = Description of Artificial Sequence: Synthetic peptide
  REGION 1..7: note = XENP024360 vlCDR2
VASSLQS

SEQ ID NO: 27096 - protein, 9 aa, synthetic construct
  REGION 1..9: note = Description of Artificial Sequence: Synthetic peptide
  REGION 1..9: note = XENP024360 vlCDR3
QQANSFPWT

SEQ ID NO: 27097 - protein, 446 aa, synthetic construct
  REGION 1..446: note = Description of Artificial Sequence: Synthetic polypeptide
  REGION 1..446: note = XENP024361 3H3_H1_L2.1_Fab-[anti-ICOS]_H0L0_Fab Heavy Chain 1
QVTLKESGPVLVKPTETLTLTCTVSGFSLNGYGVNWVRQPPGKGLEWLAMIWGDGSTDYNSALKSRLTISKDNSKSQVVLTMTNMDPVDTATYYCARSYYTSDEDYWGQGTLVTVSSASTKGPSVFPLAPSSKSTSGGTAALGCLVKDYFPEPVTVSWNSGALTSGVHTFPAVLQSSGLYSLSSVVTVPSSSLGTQTYICNVNHKPSDTKVDKKVEPKSCDKTHTCPPCPAPPVAGPSVFLFPPKPKDTLMISRTPEVTCVVVDVKHEDPEVKFNWYVDGVEVHNAKTKPREEEYNSTYRVVSVLTVLHQDWLNGKEYKCKVSNKALPAPIEKTISKAKGQPREPQVYTLPPSREEMTKNQVSLTCDVSGFYPSDIAVEWESDGQPENNYKTTPPVLDSDGSFFLYSKLTVDKSRWEQGDVFSCSVMHEALHNHYTQKSLSLSPGK

SEQ ID NO: 27098 - protein, 117 aa, synthetic construct; identical to SEQ ID NO: 3366
  REGION 1..117: note = Description of Artificial Sequence: Synthetic polypeptide
  REGION 1..117: note = VH of XENP024361

SEQ ID NO: 27099 - protein, 5 aa, synthetic construct
  REGION 1..5: note = Description of Artificial Sequence: Synthetic peptide
  REGION 1..5: note = XENP024361 vhCDR1
GYGVN

SEQ ID NO: 27100 - protein, 16 aa, synthetic construct
  REGION 1..16: note = Description of Artificial Sequence: Synthetic peptide
  REGION 1..16: note = XENP024361 vhCDR2
MIWGDGSTDYNSALKS

SEQ ID NO: 27101 - protein, 9 aa, synthetic construct
  REGION 1..9: note = Description of Artificial Sequence: Synthetic peptide
  REGION 1..9: note = XENP024361 vhCDR3
SYYTSDEDY

SEQ ID NO: 27102 - protein, 454 aa, synthetic construct; identical to SEQ ID NO: 26942
  REGION 1..454: note = Description of Artificial Sequence: Synthetic polypeptide
  REGION 1..454: note = XENP024361 3H3_H1_L2.1_Fab-[anti-ICOS]_H0L0_Fab Heavy Chain 2

SEQ ID NO: 27103 - protein, 125 aa, synthetic construct; identical to SEQ ID NO: 26293
  REGION 1..125: note = Description of Artificial Sequence: Synthetic polypeptide
  REGION 1..125: note = VH of XENP024361

SEQ ID NO: 27104 - protein, 5 aa, synthetic construct
  REGION 1..5: note = Description of Artificial Sequence: Synthetic peptide
  REGION 1..5: note = XENP024361 vhCDR1
GYYMH

SEQ ID NO: 27105 - protein, 17 aa, synthetic construct
  REGION 1..17: note = Description of Artificial Sequence: Synthetic peptide
  REGION 1..17: note = XENP024361 vhCDR2
WINPHSGGTNYAQKFQG

SEQ ID NO: 27106 - protein, 16 aa, synthetic construct
  REGION 1..16: note = Description of Artificial Sequence: Synthetic peptide
  REGION 1..16: note = XENP024361 vhCDR3
TYYYDSSGYYHDAFDI

SEQ ID NO: 27107 - protein, 219 aa, synthetic construct; identical to SEQ ID NO: 3510
  REGION 1..219: note = Description of Artificial Sequence: Synthetic polypeptide
  REGION 1..219: note = XENP024361 3H3_H1_L2.1_Fab-[anti-ICOS]_H0L0_Fab Light Chain 1

SEQ ID NO: 27108 - protein, 112 aa, synthetic construct; identical to SEQ ID NO: 3511
  REGION 1..112: note = Description of Artificial Sequence: Synthetic polypeptide
  REGION 1..112: note = VL of XENP024361

SEQ ID NO: 27109 - protein, 17 aa, synthetic construct
  REGION 1..17: note = Description of Artificial Sequence: Synthetic peptide
  REGION 1..17: note = XENP024361 vlCDR1
KSSQSLLNSRTRKNYLA

SEQ ID NO: 27110 - protein, 7 aa, synthetic construct
  REGION 1..7: note = Description of Artificial Sequence: Synthetic peptide
  REGION 1..7: note = XENP024361 vlCDR2
WASTRES

SEQ ID NO: 27111 - protein, 8 aa, synthetic construct
  REGION 1..8: note = Description of Artificial Sequence: Synthetic peptide
  REGION 1..8: note = XENP024361 vlCDR3
KQSYSLRT

SEQ ID NO: 27112 - protein, 214 aa, synthetic construct; identical to SEQ ID NO: 26297
  REGION 1..214: note = Description of Artificial Sequence: Synthetic polypeptide
  REGION 1..214: note = XENP024361 3H3_H1_L2.1_Fab-[anti-ICOS]_H0L0_Fab Light Chain 2

SEQ ID NO: 27113 - protein, 107 aa, synthetic construct; identical to SEQ ID NO: 26298
  REGION 1..107: note = Description of Artificial Sequence: Synthetic polypeptide
  REGION 1..107: note = VL of XENP024361

SEQ ID NO: 27114 - protein, 11 aa, synthetic construct
  REGION 1..11: note = Description of Artificial Sequence: Synthetic peptide
  REGION 1..11: note = XENP024361 vlCDR1
RASQGISRLLA

SEQ ID NO: 27115 - protein, 7 aa, synthetic construct
  REGION 1..7: note = Description of Artificial Sequence: Synthetic peptide
  REGION 1..7: note = XENP024361 vlCDR2
VASSLQS

SEQ ID NO: 27116 - protein, 9 aa, synthetic construct
  REGION 1..9: note = Description of Artificial Sequence: Synthetic peptide
  REGION 1..9: note = XENP024361 vlCDR3
QQANSFPWT

SEQ ID NO: 27117 - protein, 447 aa, synthetic construct
  REGION 1..447: note = Description of Artificial Sequence: Synthetic polypeptide
  REGION 1..447: note = XENP021748 YW243.55.S70[PD-L1]_H0L0_Fab-[anti-ICOS]_H0L0 _scFv Fab-Fc Heavy Chain
EVQLVESGGGLVQPGGSLRLSCAASGFTFSDSWIHWVRQAPGKGLEWVAWISPYGGSTYYADSVKGRFTISADTSKNTAYLQMNSLRAEDTAVYYCARRHWPGGFDYWGQGTLVTVSSASTKGPSVFPLAPSSKSTSGGTAALGCLVKDYFPEPVTVSWNSGALTSGVHTFPAVLQSSGLYSLSSVVTVPSSSLGTQTYICNVNHKPSDTKVDKKVEPKSCDKTHTCPPCPAPPVAGPSVFLFPPKPKDTLMISRTPEVTCVVVDVKHEDPEVKFNWYVDGVEVHNAKTKPREEEYNSTYRVVSVLTVLHQDWLNGKEYKCKVSNKALPAPIEKTISKAKGQPREPQVYTLPPSREEMTKNQVSLTCDVSGFYPSDIAVEWESDGQPENNYKTTPPVLDSDGSFFLYSKLTVDKSRWEQGDVFSCSVMHEALHNHYTQKSLSLSPGK

SEQ ID NO: 27118 - protein, 118 aa, synthetic construct [sequence omitted]

SEQ ID NO: 27119 - protein, 5 aa, synthetic construct
  REGION 1..5: note = Description of Artificial Sequence: Synthetic peptide
  REGION 1..5: note = XENP021748 vhCDR1
DSWIH

SEQ ID NO: 27120 - protein, 17 aa, synthetic construct
  REGION 1..17: note = Description of Artificial Sequence: Synthetic peptide
  REGION 1..17: note = XENP021748 vhCDR2
WISPYGGSTYYADSVKG

SEQ ID NO: 27121 - protein, 9 aa, synthetic construct
  REGION 1..9: note = Description of Artificial Sequence: Synthetic peptide
  REGION 1..9: note = XENP021748 vhCDR3
RHWPGGFDY

SEQ ID NO: 27122 - protein, 483 aa, synthetic construct; identical to SEQ ID NO: 26827
  REGION 1..483: note = Description of Artificial Sequence: Synthetic polypeptide
  REGION 1..483: note = XENP021748 YW243.55.S70[PD-L1]_H0L0_Fab-[anti-ICOS]_H0L0 _scFv scFv-Fc Heavy Chain

SEQ ID NO: 27123 - protein, 125 aa, synthetic construct; identical to SEQ ID NO: 26293
  REGION 1..125: note = Description of Artificial Sequence: Synthetic polypeptide
  REGION 1..125: note = VH of XENP021748

SEQ ID NO: 27124 - protein, 107 aa, synthetic construct; identical to SEQ ID NO: 26298
  REGION 1..107: note = Description of Artificial Sequence: Synthetic polypeptide
  REGION 1..107: note = VL of XENP021748

SEQ ID NO: 27125 - protein, 231 aa, synthetic construct; identical to SEQ ID NO: 2397
  REGION 1..231: note = Description of Artificial Sequence: Synthetic polypeptide
  REGION 1..231: note = Fc chain of XENP021748

SEQ ID NO: 27126 - protein, 5 aa, synthetic construct
  REGION 1..5: note = Description of Artificial Sequence: Synthetic peptide
  REGION 1..5: note = XENP021748 vhCDR1
GYYMH

SEQ ID NO: 27127 - protein, 17 aa, synthetic construct
  REGION 1..17: note = Description of Artificial Sequence: Synthetic peptide
  REGION 1..17: note = XENP021748 vhCDR2
WINPHSGGTNYAQKFQG

SEQ ID NO: 27128 - protein, 16 aa, synthetic construct
  REGION 1..16: note = Description of Artificial Sequence: Synthetic peptide
  REGION 1..16: note = XENP021748 vhCDR3
TYYYDSSGYYHDAFDI

SEQ ID NO: 27129 - protein, 11 aa, synthetic construct
  REGION 1..11: note = Description of Artificial Sequence: Synthetic peptide
  REGION 1..11: note = XENP021748 vlCDR1
RASQGISRLLA

SEQ ID NO: 27130 - protein, 7 aa, synthetic construct
  REGION 1..7: note = Description of Artificial Sequence: Synthetic peptide
  REGION 1..7: note = XENP021748 vlCDR2
VASSLQS

SEQ ID NO: 27131 - protein, 9 aa, synthetic construct
  REGION 1..9: note = Description of Artificial Sequence: Synthetic peptide
  REGION 1..9: note = XENP021748 vlCDR3
QQANSFPWT

SEQ ID NO: 27132 - protein, 214 aa, synthetic construct
  REGION 1..214: note = Description of Artificial Sequence: Synthetic polypeptide
  REGION 1..214: note = XENP021748 YW243.55.S70[PD-L1]_H0L0_Fab-[anti-ICOS]_H0L0 _scFv Light Chain
DIQMTQSPSSLSASVGDRVTITCRASQDVSTAVAWYQQKPGKAPKLLIYSASFLYSGVPSRFSGSGSGTDFTLTISSLQPEDFATYYCQQYLYHPATFGQGTKVEIKRTVAAPSVFIFPPSDEQLKSGTASVVCLLNNFYPREAKVQWKVDNALQSGNSQESVTEQDSKDSTYSLSSTLTLSKADYEKHKVYACEVTHQGLSSPVTKSFNRGEC

SEQ ID NO: 27133 - protein, 107 aa, synthetic construct [sequence omitted]

SEQ ID NO: 27134 - protein, 11 aa, synthetic construct
  REGION 1..11: note = Description of Artificial Sequence: Synthetic peptide
  REGION 1..11: note = XENP021748 vlCDR1
RASQDVSTAVA

SEQ ID NO: 27135 - protein, 7 aa, synthetic construct
  REGION 1..7: note = Description of Artificial Sequence: Synthetic peptide
  REGION 1..7: note = XENP021748 vlCDR2
SASFLYS

SEQ ID NO: 27136 - protein, 9 aa, synthetic construct
  REGION 1..9: note = Description of Artificial Sequence: Synthetic peptide
  REGION 1..9: note = XENP021748 vlCDR3
QQYLYHPAT

SEQ ID NO: 27137 - protein, 450 aa, synthetic construct
  REGION 1..450: note = Description of Artificial Sequence: Synthetic polypeptide
  REGION 1..450: note = XENP024129 durvalumab[PD-L1]_H1L1_Fab-[anti-ICOS]_H0L0 _scFv Fab-Fc Heavy Chain
EVQLVESGGGLVQPGGSLRLSCAASGFTFSRYWMSWVRQAPGKGLEWVANIKQDGSEKYYVDSVKGRFTISRDNAKNSLYLQMNSLRAEDTAVYYCAREGGWFGELAFDYWGQGTLVTVSSASTKGPSVFPLAPSSKSTSGGTAALGCLVKDYFPEPVTVSWNSGALTSGVHTFPAVLQSSGLYSLSSVVTVPSSSLGTQTYICNVNHKPSDTKVDKKVEPKSCDKTHTCPPCPAPPVAGPSVFLFPPKPKDTLMISRTPEVTCVVVDVKHEDPEVKFNWYVDGVEVHNAKTKPREEEYNSTYRVVSVLTVLHQDWLNGKEYKCKVSNKALPAPIEKTISKAKGQPREPQVYTLPPSREEMTKNQVSLTCDVSGFYPSDIAVEWESDGQPENNYKTTPPVLDSDGSFFLYSKLTVDKSRWEQGDVFSCSVMHEALHNHYTQKSLSLSPGK

SEQ ID NO: 27138 - protein, 121 aa, synthetic construct; identical to SEQ ID NO: 3961
  REGION 1..121: note = Description of Artificial Sequence: Synthetic polypeptide
  REGION 1..121: note = VH of XENP024129

SEQ ID NO: 27139 - protein, 5 aa, synthetic construct
  REGION 1..5: note = Description of Artificial Sequence: Synthetic peptide
  REGION 1..5: note = XENP024129 vhCDR1
RYWMS

SEQ ID NO: 27140 - protein, 17 aa, synthetic construct
  REGION 1..17: note = Description of Artificial Sequence: Synthetic peptide
  REGION 1..17: note = XENP024129 vhCDR2
NIKQDGSEKYYVDSVKG

SEQ ID NO: 27141 - protein, 12 aa, synthetic construct
  REGION 1..12: note = Description of Artificial Sequence: Synthetic peptide
  REGION 1..12: note = XENP024129 vhCDR3
EGGWFGELAFDY

SEQ ID NO: 27142 - protein, 483 aa, synthetic construct; identical to SEQ ID NO: 26827
  REGION 1..483: note = Description of Artificial Sequence: Synthetic polypeptide
  REGION 1..483: note = XENP024129 durvalumab[PD-L1]_H1L1_Fab-[anti-ICOS]_H0L0 _scFv scFv-Fc Heavy Chain

SEQ ID NO: 27143 - protein, 125 aa, synthetic construct; identical to SEQ ID NO: 26293
  REGION 1..125: note = Description of Artificial Sequence: Synthetic polypeptide
  REGION 1..125: note = VH of XENP024129

SEQ ID NO: 27144 - protein, 107 aa, synthetic construct; identical to SEQ ID NO: 26298
  REGION 1..107: note = Description of Artificial Sequence: Synthetic polypeptide
  REGION 1..107: note = VL of XENP024129

SEQ ID NO: 27145 - protein, 231 aa, synthetic construct; identical to SEQ ID NO: 2397
  REGION 1..231: note = Description of Artificial Sequence: Synthetic polypeptide
  REGION 1..231: note = Fc chain of XENP024129

SEQ ID NO: 27146 - protein, 5 aa, synthetic construct
  REGION 1..5: note = Description of Artificial Sequence: Synthetic peptide
  REGION 1..5: note = XENP024129 vhCDR1
GYYMH

SEQ ID NO: 27147 - protein, 17 aa, synthetic construct
  REGION 1..17: note = Description of Artificial Sequence: Synthetic peptide
  REGION 1..17: note = XENP024129 vhCDR2
WINPHSGGTNYAQKFQG

SEQ ID NO: 27148 - protein, 16 aa, synthetic construct
  REGION 1..16: note = Description of Artificial Sequence: Synthetic peptide
  REGION 1..16: note = XENP024129 vhCDR3
TYYYDSSGYYHDAFDI

SEQ ID NO: 27149 - protein, 11 aa, synthetic construct
  REGION 1..11: note = Description of Artificial Sequence: Synthetic peptide
  REGION 1..11: note = XENP024129 vlCDR1
RASQGISRLLA

SEQ ID NO: 27150 - protein, 7 aa, synthetic construct
  REGION 1..7: note = Description of Artificial Sequence: Synthetic peptide
  REGION 1..7: note = XENP024129 vlCDR2
VASSLQS

SEQ ID NO: 27151 - protein, 9 aa, synthetic construct
  REGION 1..9: note = Description of Artificial Sequence: Synthetic peptide
  REGION 1..9: note = XENP024129 vlCDR3
QQANSFPWT

SEQ ID NO: 27152 - protein, 215 aa, synthetic construct
  REGION 1..215: note = Description of Artificial Sequence: Synthetic polypeptide
  REGION 1..215: note = XENP024129 durvalumab[PD-L1]_H1L1_Fab-[anti-ICOS]_H0L0 _scFv Light Chain
EIVLTQSPGTLSLSPGERATLSCRASQRVSSSYLAWYQQKPGQAPRLLIYDASSRATGIPDRFSGSGSGTDFTLTISRLEPEDFAVYYCQQYGSLPWTFGQGTKVEIKRTVAAPSVFIFPPSDEQLKSGTASVVCLLNNFYPREAKVQWKVDNALQSGNSQESVTEQDSKDSTYSLSSTLTLSKADYEKHKVYACEVTHQGLSSPVTKSFNRGEC

SEQ ID NO: 27153 - protein, 108 aa, synthetic construct; identical to SEQ ID NO: 3965
  REGION 1..108: note = Description of Artificial Sequence: Synthetic polypeptide
  REGION 1..108: note = VL of XENP024129

SEQ ID NO: 27154 - protein, 12 aa, synthetic construct
  REGION 1..12: note = Description of Artificial Sequence: Synthetic peptide
  REGION 1..12: note = XENP024129 vlCDR1
RASQRVSSSYLA

SEQ ID NO: 27155 - protein, 7 aa, synthetic construct
  REGION 1..7: note = Description of Artificial Sequence: Synthetic peptide
  REGION 1..7: note = XENP024129 vlCDR2
DASSRAT

SEQ ID NO: 27156 - protein, 9 aa, synthetic construct
  REGION 1..9: note = Description of Artificial Sequence: Synthetic peptide
  REGION 1..9: note = XENP024129 vlCDR3
QQYGSLPWT

SEQ ID NO: 27157 - protein, 449 aa, synthetic construct
  REGION 1..449: note = Description of Artificial Sequence: Synthetic polypeptide
  REGION 1..449: note = XENP024131 avelumab[PD-L1]_H1L1_Fab-[anti-ICOS]_H0L0 _scFv Fab-Fc Heavy Chain
EVQLLESGGGLVQPGGSLRLSCAASGFTFSSYIMMWVRQAPGKGLEWVSSIYPSGGITFYADTVKGRFTISRDNSKNTLYLQMNSLRAEDTAVYYCARIKLGTVTTVDYWGQGTLVTVSSASTKGPSVFPLAPSSKSTSGGTAALGCLVKDYFPEPVTVSWNSGALTSGVHTFPAVLQSSGLYSLSSVVTVPSSSLGTQTYICNVNHKPSDTKVDKKVEPKSCDKTHTCPPCPAPPVAGPSVFLFPPKPKDTLMISRTPEVTCVVVDVKHEDPEVKFNWYVDGVEVHNAKTKPREEEYNSTYRVVSVLTVLHQDWLNGKEYKCKVSNKALPAPIEKTISKAKGQPREPQVYTLPPSREEMTKNQVSLTCDVSGFYPSDIAVEWESDGQPENNYKTTPPVLDSDGSFFLYSKLTVDKSRWEQGDVFSCSVMHEALHNHYTQKSLSLSPGK

SEQ ID NO: 27158 - protein, 120 aa, synthetic construct; identical to SEQ ID NO: 3977
  REGION 1..120: note = Description of Artificial Sequence: Synthetic polypeptide
  REGION 1..120: note = VH of XENP024131

SEQ ID NO: 27159 - protein, 5 aa, synthetic construct
  REGION 1..5: note = Description of Artificial Sequence: Synthetic peptide
  REGION 1..5: note = XENP024131 vhCDR1
SYIMM

SEQ ID NO: 27160 - protein, 17 aa, synthetic construct
  REGION 1..17: note = Description of Artificial Sequence: Synthetic peptide
  REGION 1..17: note = XENP024131 vhCDR2
SIYPSGGITFYADTVKG

SEQ ID NO: 27161 - protein, 11 aa, synthetic construct
  REGION 1..11: note = Description of Artificial Sequence: Synthetic peptide
  REGION 1..11: note = XENP024131 vhCDR3
IKLGTVTTVDY

SEQ ID NO: 27162 - protein, 483 aa, synthetic construct; identical to SEQ ID NO: 26827
  REGION 1..483: note = Description of Artificial Sequence: Synthetic polypeptide
  REGION 1..483: note = XENP024131 avelumab[PD-L1]_H1L1_Fab-[anti-ICOS]_H0L0 _scFv scFv-Fc Heavy Chain

SEQ ID NO: 27163 - protein, 125 aa, synthetic construct; identical to SEQ ID NO: 26293
  REGION 1..125: note = Description of Artificial Sequence: Synthetic polypeptide
  REGION 1..125: note = VH of XENP024131

SEQ ID NO: 27164 - protein, 107 aa, synthetic construct; identical to SEQ ID NO: 26298
  REGION 1..107: note = Description of Artificial Sequence: Synthetic polypeptide
  REGION 1..107: note = VL of XENP024131

SEQ ID NO: 27165 - protein, 231 aa, synthetic construct; identical to SEQ ID NO: 2397
  REGION 1..231: note = Description of Artificial Sequence: Synthetic polypeptide
  REGION 1..231: note = Fc chain of XENP024131

SEQ ID NO: 27166 - protein, 5 aa, synthetic construct
  REGION 1..5: note = Description of Artificial Sequence: Synthetic peptide
  REGION 1..5: note = XENP024131 vhCDR1
GYYMH

SEQ ID NO: 27167 - protein, 17 aa, synthetic construct
  REGION 1..17: note = Description of Artificial Sequence: Synthetic peptide
  REGION 1..17: note = XENP024131 vhCDR2
WINPHSGGTNYAQKFQG

SEQ ID NO: 27168 - protein, 16 aa, synthetic construct
  REGION 1..16: note = Description of Artificial Sequence: Synthetic peptide
  REGION 1..16: note = XENP024131 vhCDR3
TYYYDSSGYYHDAFDI

SEQ ID NO: 27169 - protein, 11 aa, synthetic construct
  REGION 1..11: note = Description of Artificial Sequence: Synthetic peptide
  REGION 1..11: note = XENP024131 vlCDR1
RASQGISRLLA

SEQ ID NO: 27170 - protein, 7 aa, synthetic construct
  REGION 1..7: note = Description of Artificial Sequence: Synthetic peptide
  REGION 1..7: note = XENP024131 vlCDR2
VASSLQS

SEQ ID NO: 27171 - protein, 9 aa, synthetic construct
  REGION 1..9: note = Description of Artificial Sequence: Synthetic peptide
  REGION 1..9: note = XENP024131 vlCDR3
QQANSFPWT

SEQ ID NO: 27172 - protein, 216 aa, synthetic construct
  REGION 1..216: note = Description of Artificial Sequence: Synthetic polypeptide
  REGION 1..216: note = XENP024131 avelumab[PD-L1]_H1L1_Fab-[anti-ICOS]_H0L0 _scFv Light Chain
QSALTQPASVSGSPGQSITISCTGTSSDVGGYNYVSWYQQHPGKAPKLMIYDVSNRPSGVSNRFSGSKSGNTASLTISGLQAEDEADYYCSSYTSSSTRVFGTGTKVTVLGQPKAAPSVTLFPPSSEELQANKATLVCLISDFYPGAVTVAWKADSSPVKAGVETTTPSKQSNNKYAASSYLSLTPEQWKSHRSYSCQVTHEGSTVEKTVAPTECS

SEQ ID NO: 27173 - protein, 110 aa, synthetic construct; identical to SEQ ID NO: 3981
  REGION 1..110: note = Description of Artificial Sequence: Synthetic polypeptide
  REGION 1..110: note = VL of XENP024131

SEQ ID NO: 27174 - protein, 14 aa, synthetic construct
  REGION 1..14: note = Description of Artificial Sequence: Synthetic peptide
  REGION 1..14: note = XENP024131 vlCDR1
TGTSSDVGGYNYVS

SEQ ID NO: 27175 - protein, 7 aa, synthetic construct
  REGION 1..7: note = Description of Artificial Sequence: Synthetic peptide
  REGION 1..7: note = XENP024131 vlCDR2
DVSNRPS

SEQ ID NO: 27176 - protein, 10 aa, synthetic construct
  REGION 1..10: note = Description of Artificial Sequence: Synthetic peptide
  REGION 1..10: note = XENP024131 vlCDR3
SSYTSSSTRV

SEQ ID NO: 27177 - protein, 721 aa, synthetic construct
  REGION 1..721: note = Description of Artificial Sequence: Synthetic polypeptide
  REGION 1..721: note = XENP024124 durvalumab[PD-L1]_H1L1_Fab_(G4S)2_[anti-ICOS]_H0L0 _scFv20_Fc_IgG1 Heavy Chain
EVQLVESGGGLVQPGGSLRLSCAASGFTFSRYWMSWVRQAPGKGLEWVANIKQDGSEKYYVDSVKGRFTISRDNAKNSLYLQMNSLRAEDTAVYYCAREGGWFGELAFDYWGQGTLVTVSSASTKGPSVFPLAPSSKSTSGGTAALGCLVKDYFPEPVTVSWNSGALTSGVHTFPAVLQSSGLYSLSSVVTVPSSSLGTQTYICNVNHKPSNTKVDKKVEPKSCGGGGSGGGGSQVQLVQSGAEVKKPGASVKVSCKASGYTFTGYYMHWVRQAPGQGLEWMGWINPHSGGTNYAQKFQGRVTMTRDTSISTAYMELSRLRSDDTAVYYCARTYYYDSSGYYHDAFDIWGQGTMVTVSSGGGGSGGGGSGGGGSGGGGSDIQMTQSPSSVSASVGDRVTITCRASQGISRLLAWYQQKPGKAPKLLIYVASSLQSGVPSRFSGSGSGTDFTLTISSLQPEDFATYYCQQANSFPWTFGQGTKVEIKGGGGSGGGGSKTHTCPPCPAPPVAGPSVFLFPPKPKDTLMISRTPEVTCVVVDVKHEDPEVKFNWYVDGVEVHNAKTKPREEQYNSTYRVVSVLTVLHQDWLNGKEYKCKVSNKALPAPIEKTISKAKGQPREPQVYTLPPSREEMTKNQVSLTCLVKGFYPSDIAVEWESNGQPENNYKTTPPVLDSDGSFFLYSKLTVDKSRWQQGNVFSCSVMHEALHNHYTQKSLSLSPGK

SEQ ID NO: 27178 - protein, 121 aa, synthetic construct; identical to SEQ ID NO: 3961
  REGION 1..121: note = Description of Artificial Sequence: Synthetic polypeptide
  REGION 1..121: note = VH of XENP024124

SEQ ID NO: 27179 - protein, 113 aa, synthetic construct; identical to SEQ ID NO: 26907
  REGION 1..113: note = Description of Artificial Sequence: Synthetic polypeptide
  REGION 1..113: note = Fc chain of XENP024124

SEQ ID NO: 27180 - protein, 125 aa, synthetic construct; identical to SEQ ID NO: 26293
  REGION 1..125: note = Description of Artificial Sequence: Synthetic polypeptide
  REGION 1..125: note = VL of XENP024124

SEQ ID NO: 27181 - protein, 225 aa, synthetic construct; identical to SEQ ID NO: 26909
  REGION 1..225: note = Description of Artificial Sequence: Synthetic polypeptide
  REGION 1..225: note = Fc chain of XENP024124

SEQ ID NO: 27182 - protein, 5 aa, synthetic construct
  REGION 1..5: note = Description of Artificial Sequence: Synthetic peptide
  REGION 1..5: note = XENP024124 vhCDR1
RYWMS

SEQ ID NO: 27183 - protein, 17 aa, synthetic construct
  REGION 1..17: note = Description of Artificial Sequence: Synthetic peptide
  REGION 1..17: note = XENP024124 vhCDR2
NIKQDGSEKYYVDSVKG

SEQ ID NO: 27184 - protein, 12 aa, synthetic construct
  REGION 1..12: note = Description of Artificial Sequence: Synthetic peptide
  REGION 1..12: note = XENP024124 vhCDR3
EGGWFGELAFDY

SEQ ID NO: 27185 - protein, 5 aa, synthetic construct
  REGION 1..5: note = Description of Artificial Sequence: Synthetic peptide
  REGION 1..5: note = XENP024124 vlCDR1
GYYMH

SEQ ID NO: 27186 - protein, 17 aa, synthetic construct
  REGION 1..17: note = Description of Artificial Sequence: Synthetic peptide
  REGION 1..17: note = XENP024124 vlCDR2
WINPHSGGTNYAQKFQG

SEQ ID NO: 27187 - protein, 16 aa, synthetic construct
  REGION 1..16: note = Description of Artificial Sequence: Synthetic peptide
  REGION 1..16: note = XENP024124 vlCDR3
TYYYDSSGYYHDAFDI

SEQ ID NO: 27188 - protein, 215 aa, synthetic construct; identical to SEQ ID NO: 27152
  REGION 1..215: note = Description of Artificial Sequence: Synthetic polypeptide
  REGION 1..215: note = XENP024124 durvalumab[PD-L1]_H1L1_Fab_(G4S)2_[anti-ICOS]_H0L0 _scFv20_Fc_IgG1 Light Chain

SEQ ID NO: 27189 - protein, 108 aa, synthetic construct; identical to SEQ ID NO: 3965
  REGION 1..108: note = Description of Artificial Sequence: Synthetic polypeptide
  REGION 1..108: note = VL of XENP024124

SEQ ID NO: 27190 - protein, 12 aa, synthetic construct
  REGION 1..12: note = Description of Artificial Sequence: Synthetic peptide
  REGION 1..12: note = XENP024124 vlCDR1
RASQRVSSSYLA

SEQ ID NO: 27191 - protein, 7 aa, synthetic construct
  REGION 1..7: note = Description of Artificial Sequence: Synthetic peptide
  REGION 1..7: note = XENP024124 vlCDR2
DASSRAT

SEQ ID NO: 27192 - protein, 9 aa, synthetic construct
  REGION 1..9: note = Description of Artificial Sequence: Synthetic peptide
  REGION 1..9: note = XENP024124 vlCDR3
QQYGSLPWT

SEQ ID NO: 27193 - protein, 454 aa, synthetic construct; identical to SEQ ID NO: 26442
  REGION 1..454: note = Description of Artificial Sequence: Synthetic polypeptide
  REGION 1..454: note = XENP020266 [ICOS]_H0L0 one-arm mAb Fab-Fc Heavy Chain

SEQ ID NO: 27194 - protein, 125 aa, synthetic construct; identical to SEQ ID NO: 26293
  REGION 1..125: note = Description of Artificial Sequence: Synthetic polypeptide
  REGION 1..125: note = VH of XENP020266

SEQ ID NO: 27195 - protein, 5 aa, synthetic construct
  REGION 1..5: note = Description of Artificial Sequence: Synthetic peptide
  REGION 1..5: note = XENP020266 vhCDR1
GYYMH

SEQ ID NO: 27196 - protein, 17 aa, synthetic construct
  REGION 1..17: note = Description of Artificial Sequence: Synthetic peptide
  REGION 1..17: note = XENP020266 vhCDR2
WINPHSGGTNYAQKFQG

SEQ ID NO: 27197 - protein, 16 aa, synthetic construct
  REGION 1..16: note = Description of Artificial Sequence: Synthetic peptide
  REGION 1..16: note = XENP020266 vhCDR3
TYYYDSSGYYHDAFDI

SEQ ID NO: 27198 - protein, 231 aa, synthetic construct
  REGION 1..231: note = Description of Artificial Sequence: Synthetic polypeptide
  REGION 1..231: note = XENP020266 [ICOS]_H0L0 one-arm mAb Fc-only Heavy Chain
ERKSSDKTHTCPRCPAPPVAGPSVFLFPPKPKDTLMISRTPEVTCVVVDVKHEDPEVKFKWYVDGVEVHNAKTKPREEQYNSTYRVVSVLTVLHQDWLNGKEYKCKVSNKALPAPIEKTISKAKGQPREPQVYTLPPSREQMTKNQVKLTCLVKGFYPSDIAVEWESNGQPENNYKTTPPVLDSDGSFFLYSKLTVDKSRWQQGNVFSCSVMHEALHNHYTQKSLSLSPGK

SEQ ID NO: 27199 - protein, 214 aa, synthetic construct; identical to SEQ ID NO: 26297
  REGION 1..214: note = Description of Artificial Sequence: Synthetic polypeptide
  REGION 1..214: note = XENP020266 [ICOS]_H0L0 one-arm mAb Light Chain

SEQ ID NO: 27200 - protein, 107 aa, synthetic construct; identical to SEQ ID NO: 26298
  REGION 1..107: note = Description of Artificial Sequence: Synthetic polypeptide
  REGION 1..107: note = VL of XENP020266

SEQ ID NO: 27201 - protein, 11 aa, synthetic construct
  REGION 1..11: note = Description of Artificial Sequence: Synthetic peptide
  REGION 1..11: note = XENP020266 vlCDR1
RASQGISRLLA

SEQ ID NO: 27202 - protein, 7 aa, synthetic construct
  REGION 1..7: note = Description of Artificial Sequence: Synthetic peptide
  REGION 1..7: note = XENP020266 vlCDR2
VASSLQS

SEQ ID NO: 27203 - protein, 9 aa, synthetic construct
  REGION 1..9: note = Description of Artificial Sequence: Synthetic peptide
  REGION 1..9: note = XENP020266 vlCDR3
QQANSFPWT

SEQ ID NO: 27204 - protein, 452 aa, synthetic construct; identical to SEQ ID NO: 26682
  REGION 1..452: note = Description of Artificial Sequence: Synthetic polypeptide
  REGION 1..452: note = XENP021861 GSK_314.8[ICOS]_H0L0 one-arm mAb Fab-Fc Heavy Chain

SEQ ID NO: 27205 - protein, 123 aa, synthetic construct; identical to SEQ ID NO: 26303
  REGION 1..123: note = Description of Artificial Sequence: Synthetic polypeptide
  REGION 1..123: note = VH of XENP021861

SEQ ID NO: 27206 - protein, 5 aa, synthetic construct
  REGION 1..5: note = Description of Artificial Sequence: Synthetic peptide
  REGION 1..5: note = XENP021861 vhCDR1
TYWMH

SEQ ID NO: 27207 - protein, 17 aa, synthetic construct
  REGION 1..17: note = Description of Artificial Sequence: Synthetic peptide
  REGION 1..17: note = XENP021861 vhCDR2
EIDPSDSYVNYNQNFKG

SEQ ID NO: 27208 - protein, 14 aa, synthetic construct
  REGION 1..14: note = Description of Artificial Sequence: Synthetic peptide
  REGION 1..14: note = XENP021861 vhCDR3
SPDYYGTSLAWFDY

SEQ ID NO: 27209 - protein, 231 aa, synthetic construct; identical to SEQ ID NO: 27198
  REGION 1..231: note = Description of Artificial Sequence: Synthetic polypeptide
  REGION 1..231: note = XENP021861 GSK_314.8[ICOS]_H0L0 one-arm mAb Fc-only Heavy Chain

SEQ ID NO: 27210 - protein, 219 aa, synthetic construct; identical to SEQ ID NO: 26307
  REGION 1..219: note = Description of Artificial Sequence: Synthetic polypeptide
  REGION 1..219: note = XENP021861 GSK_314.8[ICOS]_H0L0 one-arm mAb Light Chain

SEQ ID NO: 27211 - protein, 112 aa, synthetic construct; identical to SEQ ID NO: 26308
  REGION 1..112: note = Description of Artificial Sequence: Synthetic polypeptide
  REGION 1..112: note = VL of XENP021861

SEQ ID NO: 27212 - protein, 16 aa, synthetic construct
  REGION 1..16: note = Description of Artificial Sequence: Synthetic peptide
  REGION 1..16: note = XENP021861 vlCDR1
RSSKSPLHSNGNIYLY

SEQ ID NO: 27213 - protein, 7 aa, synthetic construct
  REGION 1..7: note = Description of Artificial Sequence: Synthetic peptide
  REGION 1..7: note = XENP021861 vlCDR2
RMSNLAS

SEQ ID NO: 27214 - protein, 9 aa, synthetic construct
  REGION 1..9: note = Description of Artificial Sequence: Synthetic peptide
  REGION 1..9: note = XENP021861 vlCDR3
MQHLEYPYT

SEQ ID NO: 27215 - protein, 454 aa, synthetic construct; identical to SEQ ID NO: 26722
  REGION 1..454: note = Description of Artificial Sequence: Synthetic polypeptide
  REGION 1..454: note = XENP021863 jMab-138[ICOS]_H0L0 one-arm mAb Fab-Fc Heavy Chain

SEQ ID NO: 27216 - protein, 125 aa, synthetic construct; identical to SEQ ID NO: 26323
  REGION 1..125: note = Description of Artificial Sequence: Synthetic polypeptide
  REGION 1..125: note = VH of XENP021863

SEQ ID NO: 27217 - protein, 5 aa, synthetic construct
  REGION 1..5: note = Description of Artificial Sequence: Synthetic peptide
  REGION 1..5: note = XENP021863 vhCDR1
SYDMH

SEQ ID NO: 27218 - protein, 16 aa, synthetic construct
  REGION 1..16: note = Description of Artificial Sequence: Synthetic peptide
  REGION 1..16: note = XENP021863 vhCDR2
AIGTAGDTYYPGSVKG

SEQ ID NO: 27219 - protein, 17 aa, synthetic construct
  REGION 1..17: note = Description of Artificial Sequence: Synthetic peptide
  REGION 1..17: note = XENP021863 vhCDR3
DNRKVTHEHYYYYGMDV

SEQ ID NO: 27220 - protein, 231 aa, synthetic construct; identical to SEQ ID NO: 27198
  REGION 1..231: note = Description of Artificial Sequence: Synthetic polypeptide
  REGION 1..231: note = XENP021863 jMab-138[ICOS]_H0L0 one-arm mAb Fc-only Heavy Chain

SEQ ID NO: 27221 - protein, 216 aa, synthetic construct; identical to SEQ ID NO: 26327
  REGION 1..216: note = Description of Artificial Sequence: Synthetic polypeptide
  REGION 1..216: note = XENP021863 jMab-138[ICOS]_H0L0 one-arm mAb Light Chain

SEQ ID NO: 27222 - protein, 109 aa, synthetic construct; identical to SEQ ID NO: 26328
  REGION 1..109: note = Description of Artificial Sequence: Synthetic polypeptide
  REGION 1..109: note = VL of XENP021863

SEQ ID NO: 27223 - protein, 12 aa, synthetic construct
  REGION 1..12: note = Description of Artificial Sequence: Synthetic peptide
  REGION 1..12: note = XENP021863 vlCDR1
RASQNIRSSYLA

SEQ ID NO: 27224 - protein, 7 aa, synthetic construct
  REGION 1..7: note = Description of Artificial Sequence: Synthetic peptide
  REGION 1..7: note = XENP021863 vlCDR2
GASSRAT

SEQ ID NO: 27225 - protein, 10 aa, synthetic construct
  REGION 1..10: note = Description of Artificial Sequence: Synthetic peptide
  REGION 1..10: note = XENP021863 vlCDR3
QQFGSSPMCS

SEQ ID NO: 27226 - protein, 450 aa, synthetic construct; identical to SEQ ID NO: 26762
  REGION 1..450: note = Description of Artificial Sequence: Synthetic polypeptide
  REGION 1..450: note = XENP022349 WO2016059602[ICOS]_GSK_H0L0 one-arm mAb Fab-Fc Heavy Chain

SEQ ID NO: 27227 - protein, 121 aa, synthetic construct; identical to SEQ ID NO: 26343
  REGION 1..121: note = Description of Artificial Sequence: Synthetic polypeptide
  REGION 1..121: note = VH of XENP022349

SEQ ID NO: 27228 - protein, 5 aa, synthetic construct
  REGION 1..5: note = Description of Artificial Sequence: Synthetic peptide
  REGION 1..5: note = XENP022349 vhCDR1
DYAMH

SEQ ID NO: 27229 - protein, 17 aa, synthetic construct
  REGION 1..17: note = Description of Artificial Sequence: Synthetic peptide
  REGION 1..17: note = XENP022349 vhCDR2
LISIYSDHTNYNQKFQG

SEQ ID NO: 27230 - protein, 12 aa, synthetic construct
  REGION 1..12: note = Description of Artificial Sequence: Synthetic peptide
  REGION 1..12: note = XENP022349 vhCDR3
NNYGNYGWYFDV

SEQ ID NO: 27231 - protein, 231 aa, synthetic construct; identical to SEQ ID NO: 27198
  REGION 1..231: note = Description of Artificial Sequence: Synthetic polypeptide
  REGION 1..231: note = XENP022349 WO2016059602[ICOS]_GSK_H0L0 one-arm mAb Fc-only Heavy Chain

SEQ ID NO: 27232 - protein, 213 aa, synthetic construct; identical to SEQ ID NO: 26347
  REGION 1..213: note = Description of Artificial Sequence: Synthetic polypeptide
  REGION 1..213: note = XENP022349 WO2016059602[ICOS]_GSK_H0L0 one-arm mAb Light Chain

SEQ ID NO: 27233 - protein, 106 aa, synthetic construct; identical to SEQ ID NO: 26348
  REGION 1..106: note = Description of Artificial Sequence: Synthetic polypeptide
  REGION 1..106: note = VL of XENP022349

SEQ ID NO: 27234 - protein, 10 aa, synthetic construct
  REGION 1..10: note = Description of Artificial Sequence: Synthetic peptide
  REGION 1..10: note = XENP022349 vlCDR1
SASSSVSYMH

SEQ ID NO: 27235 - protein, 7 aa, synthetic construct
  REGION 1..7: note = Description of Artificial Sequence: Synthetic peptide
  REGION 1..7: note = XENP022349 vlCDR2
DTSKLAS

SEQ ID NO: 27236 - protein, 9 aa, synthetic construct
  REGION 1..9: note = Description of Artificial Sequence: Synthetic peptide
  REGION 1..9: note = XENP022349 vlCDR3
FQGSGYPYT

SEQ ID NO: 27237 - protein, 454 aa, synthetic construct; identical to SEQ ID NO: 26442
  REGION 1..454: note = Description of Artificial Sequence: Synthetic polypeptide
  REGION 1..454: note = XENP022439 [ICOS]_H0_L0.5 one-arm mAb Fab-Fc Heavy Chain

SEQ ID NO: 27238 - protein, 125 aa, synthetic construct; identical to SEQ ID NO: 26293
  REGION 1..125: note = Description of Artificial Sequence: Synthetic polypeptide
  REGION 1..125: note = VH of XENP022439

SEQ ID NO: 27239 - protein, 5 aa, synthetic construct
  REGION 1..5: note = Description of Artificial Sequence: Synthetic peptide
  REGION 1..5: note = XENP022439 vhCDR1
GYYMH

SEQ ID NO: 27240 - protein, 17 aa, synthetic construct
  REGION 1..17: note = Description of Artificial Sequence: Synthetic peptide
  REGION 1..17: note = XENP022439 vhCDR2
WINPHSGGTNYAQKFQG

SEQ ID NO: 27241 - protein, 16 aa, synthetic construct
  REGION 1..16: note = Description of Artificial Sequence: Synthetic peptide
  REGION 1..16: note = XENP022439 vhCDR3
TYYYDSSGYYHDAFDI

SEQ ID NO: 27242 - protein, 231 aa, synthetic construct; identical to SEQ ID NO: 27198
  REGION 1..231: note = Description of Artificial Sequence: Synthetic polypeptide
  REGION 1..231: note = XENP022439 [ICOS]_H0_L0.5 one-arm mAb Fc-only Heavy Chain

SEQ ID NO: 27243 - protein, 214 aa, synthetic construct
  REGION 1..214: note = Description of Artificial Sequence: Synthetic polypeptide
  REGION 1..214: note = XENP022439 [ICOS]_H0_L0.5 one-arm mAb Light Chain
DIQMTQSPSSVSASVGDRVTITCRASQGISSLLAWYQQKPGKAPKLLIYVASSLQSGVPSRFSGSGSGTDFTLTISSLQPEDFATYYCQQANSFPWTFGQGTKVEIKRTVAAPSVFIFPPSDEQLKSGTASVVCLLNNFYPREAKVQWKVDNALQSGNSQESVTEQDSKDSTYSLSSTLTLSKADYEKHKVYACEVTHQGLSSPVTKSFNRGEC

SEQ ID NO: 27244 - protein, 107 aa, synthetic construct
  REGION 1..107: note = Description of Artificial Sequence: Synthetic polypeptide
  REGION 1..107: note = VL of XENP022439
DIQMTQSPSSVSASVGDRVTITCRASQGISSLLAWYQQKPGKAPKLLIYVASSLQSGVPSRFSGSGSGTDFTLTISSLQPEDFATYYCQQANSFPWTFGQGTKVEIK

SEQ ID NO: 27245 - protein, 11 aa, synthetic construct
  REGION 1..11: note = Description of Artificial Sequence: Synthetic peptide
  REGION 1..11: note = XENP022439 vlCDR1
RASQGISSLLA

SEQ ID NO: 27246 - protein, 7 aa, synthetic construct
  REGION 1..7: note = Description of Artificial Sequence: Synthetic peptide
  REGION 1..7: note = XENP022439 vlCDR2
VASSLQS

SEQ ID NO: 27247 - protein, 9 aa, synthetic construct
  REGION 1..9: note = Description of Artificial Sequence: Synthetic peptide
  REGION 1..9: note = XENP022439 vlCDR3
QQANSFPWT

SEQ ID NO: 27248 - protein, 454 aa, synthetic construct; identical to SEQ ID NO: 26442
  REGION 1..454: note = Description of Artificial Sequence: Synthetic polypeptide
  REGION 1..454: note = XENP022440 [ICOS]_H0_L0.7 one-arm mAb Fab-Fc Heavy Chain

SEQ ID NO: 27249 - protein, 125 aa, synthetic construct; identical to SEQ ID NO: 26293
  REGION 1..125: note = Description of Artificial Sequence: Synthetic polypeptide
  REGION 1..125: note = VH of XENP022440

SEQ ID NO: 27250 - protein, 5 aa, synthetic construct
  REGION 1..5: note = Description of Artificial Sequence: Synthetic peptide
  REGION 1..5: note = XENP022440 vhCDR1
GYYMH

SEQ ID NO: 27251 - protein, 17 aa, synthetic construct
  REGION 1..17: note = Description of Artificial Sequence: Synthetic peptide
  REGION 1..17: note = XENP022440 vhCDR2
WINPHSGGTNYAQKFQG

SEQ ID NO: 27252 - protein, 16 aa, synthetic construct
  REGION 1..16: note = Description of Artificial Sequence: Synthetic peptide
  REGION 1..16: note = XENP022440 vhCDR3
TYYYDSSGYYHDAFDI

SEQ ID NO: 27253 - protein, 231 aa, synthetic construct; identical to SEQ ID NO: 27198
  REGION 1..231: note = Description of Artificial Sequence: Synthetic polypeptide
  REGION 1..231: note = XENP022440 [ICOS]_H0_L0.7 one-arm mAb Fc-only Heavy Chain

SEQ ID NO: 27254 - protein, 214 aa, synthetic construct; identical to SEQ ID NO: 26477
  REGION 1..214: note = Description of Artificial Sequence: Synthetic polypeptide
  REGION 1..214: note = XENP022440 [ICOS]_H0_L0.7 one-arm mAb Light Chain

SEQ ID NO: 27255 - protein, 107 aa, synthetic construct; identical to SEQ ID NO: 26478
  REGION 1..107: note = Description of Artificial Sequence: Synthetic polypeptide
  REGION 1..107: note = VL of XENP022440

SEQ ID NO: 27256 - protein, 11 aa, synthetic construct
  REGION 1..11: note = Description of Artificial Sequence: Synthetic peptide
  REGION 1..11: note = XENP022440 vlCDR1
RASQGISSYLA

SEQ ID NO: 27257 - protein, 7 aa, synthetic construct
  REGION 1..7: note = Description of Artificial Sequence: Synthetic peptide
  REGION 1..7: note = XENP022440 vlCDR2
VASSLQS

SEQ ID NO: 27258 - protein, 9 aa, synthetic construct
  REGION 1..9: note = Description of Artificial Sequence: Synthetic peptide
  REGION 1..9: note = XENP022440 vlCDR3
QQANSFPWT

SEQ ID NO: 27259 - protein, 454 aa, synthetic construct; identical to SEQ ID NO: 26442
  REGION 1..454: note = Description of Artificial Sequence: Synthetic polypeptide
  REGION 1..454: note = XENP022441 [ICOS]_H0_L0.9 one-arm mAb Fab-Fc Heavy Chain

SEQ ID NO: 27260 - protein, 125 aa, synthetic construct; identical to SEQ ID NO: 26293
  REGION 1..125: note = Description of Artificial Sequence: Synthetic polypeptide
  REGION 1..125: note = VH of XENP022441

SEQ ID NO: 27261 - protein, 5 aa, synthetic construct
  REGION 1..5: note = Description of Artificial Sequence: Synthetic peptide
  REGION 1..5: note = XENP022441 vhCDR1
GYYMH

SEQ ID NO: 27262 - protein, 17 aa, synthetic construct
  REGION 1..17: note = Description of Artificial Sequence: Synthetic peptide
  REGION 1..17: note = XENP022441 vhCDR2
WINPHSGGTNYAQKFQG

SEQ ID NO: 27263 - protein, 16 aa, synthetic construct
  REGION 1..16: note = Description of Artificial Sequence: Synthetic peptide
  REGION 1..16: note = XENP022441 vhCDR3
TYYYDSSGYYHDAFDI

SEQ ID NO: 27264 - protein, 231 aa, synthetic construct; identical to SEQ ID NO: 27198
  REGION 1..231: note = Description of Artificial Sequence: Synthetic polypeptide
  REGION 1..231: note = XENP022441 [ICOS]_H0_L0.9 one-arm mAb Fc-only Heavy Chain

SEQ ID NO: 27265 - protein, 214 aa, synthetic construct
  REGION 1..214: note = Description of Artificial Sequence: Synthetic polypeptide
  REGION 1..214: note = XENP022441 [ICOS]_H0_L0.9 one-arm mAb Light Chain
DIQMTQSPSSVSASVGDRVTITCRASQGISRYLAWYQQKPGKAPKLLIYVASSLQSGVPSRFSGSGSGTDFTLTISSLQPEDFATYYCQQANSFPWTFGQGTKVEIKRTVAAPSVFIFPPSDEQLKSGTASVVCLLNNFYPREAKVQWKVDNALQSGNSQESVTEQDSKDSTYSLSSTLTLSKADYEKHKVYACEVTHQGLSSPVTKSFNRGEC

SEQ ID NO: 27266 - protein, 107 aa, synthetic construct
  REGION 1..107: note = Description of Artificial Sequence: Synthetic polypeptide
  REGION 1..107: note = VL of XENP022441
DIQMTQSPSSVSASVGDRVTITCRASQGISRYLAWYQQKPGKAPKLLIYVASSLQSGVPSRFSGSGSGTDFTLTISSLQPEDFATYYCQQANSFPWTFGQGTKVEIK

SEQ ID NO: 27267 - protein, 11 aa, synthetic construct
  REGION 1..11: note = Description of Artificial Sequence: Synthetic peptide
  REGION 1..11: note = XENP022441 vlCDR1
RASQGISRYLA

SEQ ID NO: 27268 - protein, 7 aa, synthetic construct
  REGION 1..7: note = Description of Artificial Sequence: Synthetic peptide
  REGION 1..7: note = XENP022441 vlCDR2
VASSLQS

SEQ ID NO: 27269 - protein, 9 aa, synthetic construct
  REGION 1..9: note = Description of Artificial Sequence: Synthetic peptide
  REGION 1..9: note = XENP022441 vlCDR3
QQANSFPWT

SEQ ID NO: 27270 - protein, 454 aa, synthetic construct; identical to SEQ ID NO: 26442
  REGION 1..454: note = Description of Artificial Sequence: Synthetic polypeptide
  REGION 1..454: note = XENP022442 [ICOS]_H0_L0.10 one-arm mAb Fab-Fc Heavy Chain

SEQ ID NO: 27271 - protein, 125 aa, synthetic construct; identical to SEQ ID NO: 26293
  REGION 1..125: note = Description of Artificial Sequence: Synthetic polypeptide
  REGION 1..125: note = VH of XENP022442

SEQ ID NO: 27272 - protein, 5 aa, synthetic construct
  REGION 1..5: note = Description of Artificial Sequence: Synthetic peptide
  REGION 1..5: note = XENP022442 vhCDR1
GYYMH

SEQ ID NO: 27273 - protein, 17 aa, synthetic construct
  REGION 1..17: note = Description of Artificial Sequence: Synthetic peptide
  REGION 1..17: note = XENP022442 vhCDR2
WINPHSGGTNYAQKFQG

SEQ ID NO: 27274 - protein, 16 aa, synthetic construct
  REGION 1..16: note = Description of Artificial Sequence: Synthetic peptide
  REGION 1..16: note = XENP022442 vhCDR3
TYYYDSSGYYHDAFDI

SEQ ID NO: 27275 - protein, 231 aa, synthetic construct; identical to SEQ ID NO: 27198
  REGION 1..231: note = Description of Artificial Sequence: Synthetic polypeptide
  REGION 1..231: note = XENP022442 [ICOS]_H0_L0.10 one-arm mAb Fc-only Heavy Chain

SEQ ID NO: 27276 - protein, 214 aa, synthetic construct
  REGION 1..214: note = Description of Artificial Sequence: Synthetic polypeptide
  REGION 1..214: note = XENP022442 [ICOS]_H0_L0.10 one-arm mAb Light Chain
DIQMTQSPSSVSASVGDRVTITCRASQGISRLLAWYQQKPGKAPKLLIYAASSLQSGVPSRFSGSGSGTDFTLTISSLQPEDFATYYCQQANSFPWTFGQGTKVEIKRTVAAPSVFIFPPSDEQLKSGTASVVCLLNNFYPREAKVQWKVDNALQSGNSQESVTEQDSKDSTYSLSSTLTLSKADYEKHKVYACEVTHQGLSSPVTKSFNRGEC

SEQ ID NO: 27277 - protein, 107 aa, synthetic construct
  REGION 1..107: note = Description of Artificial Sequence: Synthetic polypeptide
  REGION 1..107: note = VL of XENP022442
DIQMTQSPSSVSASVGDRVTITCRASQGISRLLAWYQQKPGKAPKLLIYAASSLQSGVPSRFSGSGSGTDFTLTISSLQPEDFATYYCQQANSFPWTFGQGTKVEIK

SEQ ID NO: 27278 - protein, 11 aa, synthetic construct
  REGION 1..11: note = Description of Artificial Sequence: Synthetic peptide
  REGION 1..11: note = XENP022442 vlCDR1
RASQGISRLLA

SEQ ID NO: 27279 - protein, 7 aa, synthetic construct
  REGION 1..7: note = Description of Artificial Sequence: Synthetic peptide
  REGION 1..7: note = XENP022442 vlCDR2
AASSLQS

SEQ ID NO: 27280 - protein, 9 aa, synthetic construct
  REGION 1..9: note = Description of Artificial Sequence: Synthetic peptide
  REGION 1..9: note = XENP022442 vlCDR3
QQANSFPWT

SEQ ID NO: 27281 - protein, 454 aa, synthetic construct; identical to SEQ ID NO: 26442
  REGION 1..454: note = Description of Artificial Sequence: Synthetic polypeptide
  REGION 1..454: note = XENP022443 [ICOS]_H0_L0.14 one-arm mAb Fab-Fc Heavy Chain

SEQ ID NO: 27282 - protein, 125 aa, synthetic construct; identical to SEQ ID NO: 26293
  REGION 1..125: note = Description of Artificial Sequence: Synthetic polypeptide
  REGION 1..125: note = VH of XENP022443

SEQ ID NO: 27283 - protein, 5 aa, synthetic construct
  REGION 1..5: note = Description of Artificial Sequence: Synthetic peptide
  REGION 1..5: note = XENP022443 vhCDR1
GYYMH

SEQ ID NO: 27284 - protein, 17 aa, synthetic construct
  REGION 1..17: note = Description of Artificial Sequence: Synthetic peptide
  REGION 1..17: note = XENP022443 vhCDR2
WINPHSGGTNYAQKFQG

SEQ ID NO: 27285 - protein, 16 aa, synthetic construct
  REGION 1..16: note = Description of Artificial Sequence: Synthetic peptide
  REGION 1..16: note = XENP022443 vhCDR3
TYYYDSSGYYHDAFDI

SEQ ID NO: 27286 - protein, 231 aa, synthetic construct; identical to SEQ ID NO: 27198
  REGION 1..231: note = Description of Artificial Sequence: Synthetic polypeptide
  REGION 1..231: note = XENP022443 [ICOS]_H0_L0.14 one-arm mAb Fc-only Heavy Chain

SEQ ID NO: 27287 - protein, 214 aa, synthetic construct
  REGION 1..214: note = Description of Artificial Sequence: Synthetic polypeptide
  REGION 1..214: note = XENP022443 [ICOS]_H0_L0.14 one-arm mAb Light Chain
DIQMTQSPSSVSASVGDRVTITCRASQGISRLLAWYQQKPGKAPKLLIYVASSLQSGVPSRFSGSGSGTDFTLTISSLQPEDFATYYCQQSNSFPWTFGQGTKVEIKRTVAAPSVFIFPPSDEQLKSGTASVVCLLNNFYPREAKVQWKVDNALQSGNSQESVTEQDSKDSTYSLSSTLTLSKADYEKHKVYACEVTHQGLSSPVTKSFNRGEC

SEQ ID NO: 27288 - protein, 107 aa, synthetic construct
  REGION 1..107: note = Description of Artificial Sequence: Synthetic polypeptide
  REGION 1..107: note = VL of XENP022443
DIQMTQSPSSVSASVGDRVTITCRASQGISRLLAWYQQKPGKAPKLLIYVASSLQSGVPSRFSGSGSGTDFTLTISSLQPEDFATYYCQQSNSFPWTFGQGTKVEIK

SEQ ID NO: 27289 - protein, 11 aa, synthetic construct
  REGION 1..11: note = Description of Artificial Sequence: Synthetic peptide
  REGION 1..11: note = XENP022443 vlCDR1
RASQGISRLLA

SEQ ID NO: 27290 - protein, 7 aa, synthetic construct
  REGION 1..7: note = Description of Artificial Sequence: Synthetic peptide
  REGION 1..7: note = XENP022443 vlCDR2
VASSLQS

SEQ ID NO: 27291 - protein, 9 aa, synthetic construct
  REGION 1..9: note = Description of Artificial Sequence: Synthetic peptide
  REGION 1..9: note = XENP022443 vlCDR3
QQSNSFPWT

SEQ ID NO: 27292 - protein, 454 aa, synthetic construct; identical to SEQ ID NO: 26442
  REGION 1..454: note = Description of Artificial Sequence: Synthetic polypeptide
  REGION 1..454: note = XENP022444 [ICOS]_H0_L0.15 one-arm mAb Fab-Fc Heavy Chain

SEQ ID NO: 27293 - protein, 125 aa, synthetic construct; identical to SEQ ID NO: 26293
  REGION 1..125: note = Description of Artificial Sequence: Synthetic polypeptide
  REGION 1..125: note = VH of XENP022444

SEQ ID NO: 27294 - protein, 5 aa, synthetic construct
  REGION 1..5: note = Description of Artificial Sequence: Synthetic peptide
  REGION 1..5: note = XENP022444 vhCDR1
GYYMH

SEQ ID NO: 27295 - protein, 17 aa, synthetic construct
  REGION 1..17: note = Description of Artificial Sequence: Synthetic peptide
  REGION 1..17: note = XENP022444 vhCDR2
WINPHSGGTNYAQKFQG

SEQ ID NO: 27296 - protein, 16 aa, synthetic construct
  REGION 1..16: note = Description of Artificial Sequence: Synthetic peptide
  REGION 1..16: note = XENP022444 vhCDR3
TYYYDSSGYYHDAFDI

SEQ ID NO: 27297 - protein, 231 aa, synthetic construct; identical to SEQ ID NO: 27198
  REGION 1..231: note = Description of Artificial Sequence: Synthetic polypeptide
  REGION 1..231: note = XENP022444 [ICOS]_H0_L0.15 one-arm mAb Fc-only Heavy Chain

SEQ ID NO: 27298 - protein, 214 aa, synthetic construct
  REGION 1..214: note = Description of Artificial Sequence: Synthetic polypeptide
  REGION 1..214: note = XENP022444 [ICOS]_H0_L0.15 one-arm mAb Light Chain
DIQMTQSPSSVSASVGDRVTITCRASQGISRLLAWYQQKPGKAPKLLIYVASSLQSGVPSRFSGSGSGTDFTLTISSLQPEDFATYYCQQAESFPWTFGQGTKVEIKRTVAAPSVFIFPPSDEQLKSGTASVVCLLNNFYPREAKVQWKVDNALQSGNSQESVTEQDSKDSTYSLSSTLTLSKADYEKHKVYACEVTHQGLSSPVTKSFNRGEC

SEQ ID NO: 27299 - protein, 107 aa, synthetic construct
  REGION 1..107: note = Description of Artificial Sequence: Synthetic polypeptide
  REGION 1..107: note = VL of XENP022444
DIQMTQSPSSVSASVGDRVTITCRASQGISRLLAWYQQKPGKAPKLLIYVASSLQSGVPSRFSGSGSGTDFTLTISSLQPEDFATYYCQQAESFPWTFGQGTKVEIK

SEQ ID NO: 27300 - protein, 11 aa, synthetic construct
  REGION 1..11: note = Description of Artificial Sequence: Synthetic peptide
  REGION 1..11: note = XENP022444 vlCDR1
RASQGISRLLA

SEQ ID NO: 27301 - protein, 7 aa, synthetic construct
  REGION 1..7: note = Description of Artificial Sequence: Synthetic peptide
  REGION 1..7: note = XENP022444 vlCDR2
VASSLQS

SEQ ID NO: 27302 - protein, 9 aa, synthetic construct
  REGION 1..9: note = Description of Artificial Sequence: Synthetic peptide
  REGION 1..9: note = XENP022444 vlCDR3
QQAESFPWT

SEQ ID NO: 27303 - protein, 454 aa, synthetic construct; identical to SEQ ID NO: 26442
  REGION 1..454: note = Description of Artificial Sequence: Synthetic polypeptide
  REGION 1..454: note = XENP022445 [ICOS]_H0_L0.20 one-arm mAb Fab-Fc Heavy Chain

SEQ ID NO: 27304 - protein, 125 aa, synthetic construct; identical to SEQ ID NO: 26293
  REGION 1..125: note = Description of Artificial Sequence: Synthetic polypeptide
  REGION 1..125: note = VH of XENP022445

SEQ ID NO: 27305 - protein, 5 aa, synthetic construct
  REGION 1..5: note = Description of Artificial Sequence: Synthetic peptide
  REGION 1..5: note = XENP022445 vhCDR1
GYYMH

SEQ ID NO: 27306 - protein, 17 aa, synthetic construct
  REGION 1..17: note = Description of Artificial Sequence: Synthetic peptide
  REGION 1..17: note = XENP022445 vhCDR2
WINPHSGGTNYAQKFQG

SEQ ID NO: 27307 - protein, 16 aa, synthetic construct
  REGION 1..16: note = Description of Artificial Sequence: Synthetic peptide
  REGION 1..16: note = XENP022445 vhCDR3
TYYYDSSGYYHDAFDI

SEQ ID NO: 27308 - protein, 231 aa, synthetic construct; identical to SEQ ID NO: 27198
  REGION 1..231: note = Description of Artificial Sequence: Synthetic polypeptide
  REGION 1..231: note = XENP022445 [ICOS]_H0_L0.20 one-arm mAb Fc-only Heavy Chain

SEQ ID NO: 27309 - protein, 214 aa, synthetic construct
  REGION 1..214: note = Description of Artificial Sequence: Synthetic polypeptide
  REGION 1..214: note = XENP022445 [ICOS]_H0_L0.20 one-arm mAb Light Chain
DIQMTQSPSSVSASVGDRVTITCRASQGISRLLAWYQQKPGKAPKLLIYVASSLQSGVPSRFSGSGSGTDFTLTISSLQPEDFATYYCQQANSYPWTFGQGTKVEIKRTVAAPSVFIFPPSDEQLKSGTASVVCLLNNFYPREAKVQWKVDNALQSGNSQESVTEQDSKDSTYSLSSTLTLSKADYEKHKVYACEVTHQGLSSPVTKSFNRGEC

SEQ ID NO: 27310 - protein, 107 aa, synthetic construct
  REGION 1..107: note = Description of Artificial Sequence: Synthetic polypeptide
  REGION 1..107: note = VL of XENP022445
DIQMTQSPSSVSASVGDRVTITCRASQGISRLLAWYQQKPGKAPKLLIYVASSLQSGVPSRFSGSGSGTDFTLTISSLQPEDFATYYCQQANSYPWTFGQGTKVEIK

SEQ ID NO: 27311 - protein, 11 aa, synthetic construct
  REGION 1..11: note = Description of Artificial Sequence: Synthetic peptide
  REGION 1..11: note = XENP022445 vlCDR1
RASQGISRLLA

SEQ ID NO: 27312 - protein, 7 aa, synthetic construct
  REGION 1..7: note = Description of Artificial Sequence: Synthetic peptide
  REGION 1..7: note = XENP022445 vlCDR2
VASSLQS

SEQ ID NO: 27313 - protein, 9 aa, synthetic construct
  REGION 1..9: note = Description of Artificial Sequence: Synthetic peptide
  REGION 1..9: note = XENP022445 vlCDR3
QQANSYPWT

SEQ ID NO: 27314 - protein, 454 aa, synthetic construct; identical to SEQ ID NO: 26442
  REGION 1..454: note = Description of Artificial Sequence: Synthetic polypeptide
  REGION 1..454: note = XENP022766 [ICOS]_H0_L0.38 one-arm mAb Fab-Fc Heavy Chain

SEQ ID NO: 27315 - protein, 125 aa, synthetic construct; identical to SEQ ID NO: 26293
  REGION 1..125: note = Description of Artificial Sequence: Synthetic polypeptide
  REGION 1..125: note = VH of XENP022766

SEQ ID NO: 27316 - protein, 5 aa, synthetic construct
  REGION 1..5: note = Description of Artificial Sequence: Synthetic peptide
  REGION 1..5: note = XENP022766 vhCDR1
GYYMH

SEQ ID NO: 27317 - protein, 17 aa, synthetic construct
  REGION 1..17: note = Description of Artificial Sequence: Synthetic peptide
  REGION 1..17: note = XENP022766 vhCDR2
WINPHSGGTNYAQKFQG

SEQ ID NO: 27318 - protein, 16 aa, synthetic construct
  REGION 1..16: note = Description of Artificial Sequence: Synthetic peptide
  REGION 1..16: note = XENP022766 vhCDR3
TYYYDSSGYYHDAFDI

SEQ ID NO: 27319 - protein, 231 aa, synthetic construct; identical to SEQ ID NO: 27198
  REGION 1..231: note = Description of Artificial Sequence: Synthetic polypeptide
  REGION 1..231: note = XENP022766 [ICOS]_H0_L0.38 one-arm mAb Fc-only Heavy Chain

SEQ ID NO: 27320 - protein, 214 aa, synthetic construct; identical to SEQ ID NO: 26557
  REGION 1..214: note = Description of Artificial Sequence: Synthetic polypeptide
  REGION 1..214: note = XENP022766 [ICOS]_H0_L0.38 one-arm mAb Light Chain

SEQ ID NO: 27321 - protein, 107 aa, synthetic construct; identical to SEQ ID NO: 26558
  REGION 1..107: note = Description of Artificial Sequence: Synthetic polypeptide
  REGION 1..107: note = VL of XENP022766

SEQ ID NO: 27322 - protein, 11 aa, synthetic construct
  REGION 1..11: note = Description of Artificial Sequence: Synthetic peptide
  REGION 1..11: note = XENP022766 vlCDR1
QASQDISSLLA

SEQ ID NO: 27323 - protein, 7 aa, synthetic construct
  REGION 1..7: note = Description of Artificial Sequence: Synthetic peptide
  REGION 1..7: note = XENP022766 vlCDR2
AASSLQS

SEQ ID NO: 27324 - protein, 9 aa, synthetic construct
  REGION 1..9: note = Description of Artificial Sequence: Synthetic peptide
  REGION 1..9: note = XENP022766 vlCDR3
QQAESFPWT

SEQ ID NO: 27325 - protein, 454 aa, synthetic construct; identical to SEQ ID NO: 26562
  REGION 1..454: note = Description of Artificial Sequence: Synthetic polypeptide
  REGION 1..454: note = XENP023096 [ICOS]_H0.66_L0 one-arm mAb Fab-Fc Heavy Chain

SEQ ID NO: 27326 - protein, 125 aa, synthetic construct; identical to SEQ ID NO: 26563
  REGION 1..125: note = Description of Artificial Sequence: Synthetic polypeptide
  REGION 1..125: note = VH of XENP023096

SEQ ID NO: 27327 - protein, 5 aa, synthetic construct
  REGION 1..5: note = Description of Artificial Sequence: Synthetic peptide
  REGION 1..5: note = XENP023096 vhCDR1
GYYMH

SEQ ID NO: 27328 - protein, 17 aa, synthetic construct
  REGION 1..17: note = Description of Artificial Sequence: Synthetic peptide
  REGION 1..17: note = XENP023096 vhCDR2
WINPHSGETIYAQKFQG

SEQ ID NO: 27329 - protein, 16 aa, synthetic construct
  REGION 1..16: note = Description of Artificial Sequence: Synthetic peptide
  REGION 1..16: note = XENP023096 vhCDR3
TYYYDTSGYYHDAFDV

SEQ ID NO: 27330 - protein, 231 aa, synthetic construct; identical to SEQ ID NO: 27198
  REGION 1..231: note = Description of Artificial Sequence: Synthetic polypeptide
  REGION 1..231: note = XENP023096 [ICOS]_H0.66_L0 one-arm mAb Fc-only Heavy Chain

SEQ ID NO: 27331 - protein, 214 aa, synthetic construct; identical to SEQ ID NO: 26297
  REGION 1..214: note = Description of Artificial Sequence: Synthetic polypeptide
  REGION 1..214: note = XENP023096 [ICOS]_H0.66_L0 one-arm mAb Light Chain

SEQ ID NO: 27332 - protein, 107 aa, synthetic construct; identical to SEQ ID NO: 26298
  REGION 1..107: note = Description of Artificial Sequence: Synthetic polypeptide
  REGION 1..107: note = VL of XENP023096

SEQ ID NO: 27333 - protein, 11 aa, synthetic construct
  REGION 1..11: note = Description of Artificial Sequence: Synthetic peptide
  REGION 1..11: note = XENP023096 vlCDR1
RASQGISRLLA

SEQ ID NO: 27334 - protein, 7 aa, synthetic construct
  REGION 1..7: note = Description of Artificial Sequence: Synthetic peptide
  REGION 1..7: note = XENP023096 vlCDR2
VASSLQS

SEQ ID NO: 27335 - protein, 9 aa, synthetic construct
  REGION 1..9: note = Description of Artificial Sequence: Synthetic peptide
  REGION 1..9: note = XENP023096 vlCDR3
QQANSFPWT

SEQ ID NO: 27336 - protein, 447 aa, synthetic construct; identical to SEQ ID NO: 26382
  REGION 1..447: note = Description of Artificial Sequence: Synthetic polypeptide
  REGION 1..447: note = XENP023377 11D4[OX40]_H0L0 _Fab-1G6_L1.194_H1.279_scFv Fab-Fc Heavy Chain

SEQ ID NO: 27337 - protein, 118 aa, synthetic construct; identical to SEQ ID NO: 26273
  REGION 1..118: note = Description of Artificial Sequence: Synthetic polypeptide
  REGION 1..118: note = VH of XENP023377

SEQ ID NO: 27338 - protein, 5 aa, synthetic construct
  REGION 1..5: note = Description of Artificial Sequence: Synthetic peptide
  REGION 1..5: note = XENP023377 vhCDR1
SYSMN

SEQ ID NO: 27339 - protein, 11 aa, synthetic construct
  REGION 1..11: note = Description of Artificial Sequence: Synthetic peptide
  REGION 1..11: note = XENP023377 vhCDR2
YISSSSSTIDY

SEQ ID NO: 27340 - protein, 9 aa, synthetic construct
  REGION 1..9: note = Description of Artificial Sequence: Synthetic peptide
  REGION 1..9: note = XENP023377 vhCDR3
ESGWYLFDY

SEQ ID NO: 27341 - protein, 480 aa, synthetic construct; identical to SEQ ID NO: 2870
  REGION 1..480: note = Description of Artificial Sequence: Synthetic polypeptide
  REGION 1..480: note = XENP023377 11D4[OX40]_H0L0 _Fab-1G6_L1.194_H1.279_scFv scFv-Fc Heavy Chain

SEQ ID NO: 27342 - protein, 107 aa, synthetic construct; identical to SEQ ID NO: 2871
  REGION 1..107: note = Description of Artificial Sequence: Synthetic polypeptide
  REGION 1..107: note = VH of XENP023377

SEQ ID NO: 27343 - protein, 122 aa, synthetic construct; identical to SEQ ID NO: 2872
  REGION 1..122: note = Description of Artificial Sequence: Synthetic polypeptide
  REGION 1..122: note = VL of XENP023377

SEQ ID NO: 27344 - protein, 231 aa, synthetic construct; identical to SEQ ID NO: 2397
  REGION 1..231: note = Description of Artificial Sequence: Synthetic polypeptide
  REGION 1..231: note = Fc chain of XENP023377

SEQ ID NO: 27345 - protein, 11 aa, synthetic construct
  REGION 1..11: note = Description of Artificial Sequence: Synthetic peptide
  REGION 1..11: note = XENP023377 vhCDR1
RASQSVGNDVA

SEQ ID NO: 27346 - protein, 7 aa, synthetic construct
  REGION 1..7: note = Description of Artificial Sequence: Synthetic peptide
  REGION 1..7: note = XENP023377 vhCDR2
YASHRYT

SEQ ID NO: 27347 - protein, 9 aa, synthetic construct
  REGION 1..9: note = Description of Artificial Sequence: Synthetic peptide
  REGION 1..9: note = XENP023377 vhCDR3
QQDFSSPRT

SEQ ID NO: 27348 - protein, 5 aa, synthetic construct
  REGION 1..5: note = Description of Artificial Sequence: Synthetic peptide
  REGION 1..5: note = XENP023377 vlCDR1
NYWMN

SEQ ID NO: 27349 - protein, 19 aa, synthetic construct
  REGION 1..19: note = Description of Artificial Sequence: Synthetic peptide
  REGION 1..19: note = XENP023377 vlCDR2
EIRLYSNNYATHYAESVKG

SEQ ID NO: 27350 - protein, 11 aa, synthetic construct
  REGION 1..11: note = Description of Artificial Sequence: Synthetic peptide
  REGION 1..11: note = XENP023377 vlCDR3
YYGNYGGYFDV

SEQ ID NO: 27351 - protein, 214 aa, synthetic construct; identical to SEQ ID NO: 26277
  REGION 1..214: note = Description of Artificial Sequence: Synthetic polypeptide
  REGION 1..214: note = XENP023377 11D4[OX40]_H0L0 _Fab-1G6_L1.194_H1.279_scFv Light Chain

SEQ ID NO: 27352 - protein, 107 aa, synthetic construct; identical to SEQ ID NO: 26278
  REGION 1..107: note = Description of Artificial Sequence: Synthetic polypeptide
  REGION 1..107: note = VL of XENP023377

SEQ ID NO: 27353 - protein, 11 aa, synthetic construct
  REGION 1..11: note = Description of Artificial Sequence: Synthetic peptide
  REGION 1..11: note = XENP023377 vlCDR1
RASQGISSWLA

SEQ ID NO: 27354 - protein, 7 aa, synthetic construct
  REGION 1..7: note = Description of Artificial Sequence: Synthetic peptide
  REGION 1..7: note = XENP023377 vlCDR2
AASSLQS

SEQ ID NO: 27355 - protein, 9 aa, synthetic construct
  REGION 1..9: note = Description of Artificial Sequence: Synthetic peptide
  REGION 1..9: note = XENP023377 vlCDR3
QQYNSYPPT

SEQ ID NO: 27356 - protein, 451 aa, synthetic construct; identical to SEQ ID NO: 26402
  REGION 1..451: note = Description of Artificial Sequence: Synthetic polypeptide
  REGION 1..451: note = XENP023378 1D8[GITR]_H0L0 _Fab-1G6_L1.194_H1.279_scFv Fab-Fc Heavy Chain

SEQ ID NO: 27357 - protein, 122 aa, synthetic construct; identical to SEQ ID NO: 26283
  REGION 1..122: note = Description of Artificial Sequence: Synthetic polypeptide
  REGION 1..122: note = VH of XENP023378

SEQ ID NO: 27358 - protein, 7 aa, synthetic construct
  REGION 1..7: note = Description of Artificial Sequence: Synthetic peptide
  REGION 1..7: note = XENP023378 vhCDR1
TSGMGVG

SEQ ID NO: 27359 - protein, 9 aa, synthetic construct
  REGION 1..9: note = Description of Artificial Sequence: Synthetic peptide
  REGION 1..9: note = XENP023378 vhCDR2
HIWWDDDKY

SEQ ID NO: 27360 - protein, 12 aa, synthetic construct
  REGION 1..12: note = Description of Artificial Sequence: Synthetic peptide
  REGION 1..12: note = XENP023378 vhCDR3
SYYYGSSGAMDY

SEQ ID NO: 27361 - protein, 480 aa, synthetic construct; identical to SEQ ID NO: 2870
  REGION 1..480: note = Description of Artificial Sequence: Synthetic polypeptide
  REGION 1..480: note = XENP023378 1D8[GITR]_H0L0 _Fab-1G6_L1.194_H1.279_scFv scFv-Fc Heavy Chain

SEQ ID NO: 27362 - protein, 107 aa, synthetic construct; identical to SEQ ID NO: 2871
  REGION 1..107: note = Description of Artificial Sequence: Synthetic polypeptide
  REGION 1..107: note = VH of XENP023378

SEQ ID NO: 27363 - protein, 122 aa, synthetic construct; identical to SEQ ID NO: 2872
  REGION 1..122: note = Description of Artificial Sequence: Synthetic polypeptide
  REGION 1..122: note = VL of XENP023378

SEQ ID NO: 27364 - protein, 231 aa, synthetic construct; identical to SEQ ID NO: 2397
  REGION 1..231: note = Description of Artificial Sequence: Synthetic polypeptide
  REGION 1..231: note = Fc chain of XENP023378

SEQ ID NO: 27365 - protein, 11 aa, synthetic construct
  REGION 1..11: note = Description of Artificial Sequence: Synthetic peptide
  REGION 1..11: note = XENP023378 vhCDR1
RASQSVGNDVA

SEQ ID NO: 27366 - protein, 7 aa, synthetic construct
  REGION 1..7: note = Description of Artificial Sequence: Synthetic peptide
  REGION 1..7: note = XENP023378 vhCDR2
YASHRYT

SEQ ID NO: 27367 - protein, 9 aa, synthetic construct
  REGION 1..9: note = Description of Artificial Sequence: Synthetic peptide
  REGION 1..9: note = XENP023378 vhCDR3
QQDFSSPRT

SEQ ID NO: 27368 - protein, 5 aa, synthetic construct
  REGION 1..5: note = Description of Artificial Sequence: Synthetic peptide
  REGION 1..5: note = XENP023378 vlCDR1
NYWMN

SEQ ID NO: 27369 - protein, 19 aa, synthetic construct
  REGION 1..19: note = Description of Artificial Sequence: Synthetic peptide
  REGION 1..19: note = XENP023378 vlCDR2
EIRLYSNNYATHYAESVKG

SEQ ID NO: 27370 - protein, 11 aa, synthetic construct
  REGION 1..11: note = Description of Artificial Sequence: Synthetic peptide
  REGION 1..11: note = XENP023378 vlCDR3
YYGNYGGYFDV

SEQ ID NO: 27371 - protein, 219 aa, synthetic construct; identical to SEQ ID NO: 26287
  REGION 1..219: note = Description of Artificial Sequence: Synthetic polypeptide
  REGION 1..219: note = XENP023378 1D8[GITR]_H0L0 _Fab-1G6_L1.194_H1.279_scFv Light Chain

SEQ ID NO: 27372 - protein, 112 aa, synthetic construct; identical to SEQ ID NO: 26288
  REGION 1..112: note = Description of Artificial Sequence: Synthetic polypeptide
  REGION 1..112: note = VL of XENP023378

SEQ ID NO: 27373 - protein, 16 aa, synthetic construct
  REGION 1..16: note = Description of Artificial Sequence: Synthetic peptide
  REGION 1..16: note = XENP023378 vlCDR1
RSSQSLVHSDGNTYLH

SEQ ID NO: 27374 - protein, 6 aa, synthetic construct
  REGION 1..6: note = Description of Artificial Sequence: Synthetic peptide
  REGION 1..6: note = XENP023378 vlCDR2
KVSKRF

SEQ ID NO: 27375 - protein, 9 aa, synthetic construct
  REGION 1..9: note = Description of Artificial Sequence: Synthetic peptide
  REGION 1..9: note = XENP023378 vlCDR3
SQSTHVPPT

SEQ ID NO: 27376 - protein, 450 aa, synthetic construct; identical to SEQ ID NO: 26422
  REGION 1..450: note = Description of Artificial Sequence: Synthetic polypeptide
  REGION 1..450: note = XENP023379 20H4.9[4-1BB]_H0L0 _Fab-1G6_L1.194_H1.279_scFv Fab-Fc Heavy Chain

SEQ ID NO: 27377 - protein, 121 aa, synthetic construct [sequence omitted]

SEQ ID NO: 27378 - protein, 5 aa, synthetic construct
  REGION 1..5: note = Description of Artificial Sequence: Synthetic peptide
  REGION 1..5: note = XENP023379 vhCDR1
GYYWS

SEQ ID NO: 27379 - protein, 11 aa, synthetic construct
  REGION 1..11: note = Description of Artificial Sequence: Synthetic peptide
  REGION 1..11: note = XENP023379 vhCDR2
EINHGGYVTYN

SEQ ID NO: 27380 - protein, 13 aa, synthetic construct
  REGION 1..13: note = Description of Artificial Sequence: Synthetic peptide
  REGION 1..13: note = XENP023379 vhCDR3
DYGPGNYDWYFDL

SEQ ID NO: 27381 - protein, 480 aa, synthetic construct; identical to SEQ ID NO: 2870
  REGION 1..480: note = Description of Artificial Sequence: Synthetic polypeptide
  REGION 1..480: note = XENP023379 20H4.9[4-1BB]_H0L0 _Fab-1G6_L1.194_H1.279_scFv scFv-Fc Heavy Chain

SEQ ID NO: 27382 - protein, 107 aa, synthetic construct; identical to SEQ ID NO: 2871
  REGION 1..107: note = Description of Artificial Sequence: Synthetic polypeptide
  REGION 1..107: note = VH of XENP023379

SEQ ID NO: 27383 - protein, 122 aa, synthetic construct; identical to SEQ ID NO: 2872
  REGION 1..122: note = Description of Artificial Sequence: Synthetic polypeptide
  REGION 1..122: note = VL of XENP023379

SEQ ID NO: 27384 - protein, 231 aa, synthetic construct; identical to SEQ ID NO: 2397
  REGION 1..231: note = Description of Artificial Sequence: Synthetic polypeptide
  REGION 1..231: note = Fc chain of XENP023379

SEQ ID NO: 27385 - protein, 11 aa, synthetic construct
  REGION 1..11: note = Description of Artificial Sequence: Synthetic peptide
  REGION 1..11: note = XENP023379 vhCDR1
RASQSVGNDVA

SEQ ID NO: 27386 - protein, 7 aa, synthetic construct
  REGION 1..7: note = Description of Artificial Sequence: Synthetic peptide
  REGION 1..7: note = XENP023379 vhCDR2
YASHRYT

SEQ ID NO: 27387 - protein, 9 aa, synthetic construct
  REGION 1..9: note = Description of Artificial Sequence: Synthetic peptide
  REGION 1..9: note = XENP023379 vhCDR3
QQDFSSPRT

SEQ ID NO: 27388 - protein, 5 aa, synthetic construct
  REGION 1..5: note = Description of Artificial Sequence: Synthetic peptide
  REGION 1..5: note = XENP023379 vlCDR1
NYWMN

SEQ ID NO: 27389 - protein, 19 aa, synthetic construct
  REGION 1..19: note = Description of Artificial Sequence: Synthetic peptide
  REGION 1..19: note = XENP023379 vlCDR2
EIRLYSNNYATHYAESVKG

SEQ ID NO: 27390 - protein, 11 aa, synthetic construct
  REGION 1..11: note = Description of Artificial Sequence: Synthetic peptide
  REGION 1..11: note = XENP023379 vlCDR3
YYGNYGGYFDV

SEQ ID NO: 27391 - protein, 216 aa, synthetic construct; identical to SEQ ID NO: 26267
  REGION 1..216: note = Description of Artificial Sequence: Synthetic polypeptide
  REGION 1..216: note = XENP023379 20H4.9[4-1BB]_H0L0 _Fab-1G6_L1.194_H1.279_scFv Light Chain

SEQ ID NO: 27392 - protein, 109 aa, synthetic construct [sequence omitted]

SEQ ID NO: 27393 - protein, 11 aa, synthetic construct
  REGION 1..11: note = Description of Artificial Sequence: Synthetic peptide
  REGION 1..11: note = XENP023379 vlCDR1
RASQSVSSYLA

SEQ ID NO: 27394 - protein, 7 aa, synthetic construct
  REGION 1..7: note = Description of Artificial Sequence: Synthetic peptide
  REGION 1..7: note = XENP023379 vlCDR2
DASNRAT

SEQ ID NO: 27395 - protein, 11 aa, synthetic construct
  REGION 1..11: note = Description of Artificial Sequence: Synthetic peptide
  REGION 1..11: note = XENP023379 vlCDR3
QQRSNWPPALT

SEQ ID NO: 27396 - protein, 447 aa, synthetic construct
  REGION 1..447: note = Description of Artificial Sequence: Synthetic polypeptide
  REGION 1..447: note = XENP019192 ipilimumab[CTLA-4]_H0L0 _Fab-[anti-ICOS]-H0L0_scFv Fab-Fc Heavy Chain
QVQLVESGGGVVQPGRSLRLSCAASGFTFSSYTMHWVRQAPGKGLEWVTFISYDGNNKYYADSVKGRFTISRDNSKNTLYLQMNSLRAEDTAIYYCARTGWLGPFDYWGQGTLVTVSSASTKGPSVFPLAPSSKSTSGGTAALGCLVKDYFPEPVTVSWNSGALTSGVHTFPAVLQSSGLYSLSSVVTVPSSSLGTQTYICNVNHKPSDTKVDKKVEPKSCDKTHTCPPCPAPPVAGPSVFLFPPKPKDTLMISRTPEVTCVVVDVKHEDPEVKFNWYVDGVEVHNAKTKPREEEYNSTYRVVSVLTVLHQDWLNGKEYKCKVSNKALPAPIEKTISKAKGQPREPQVYTLPPSREEMTKNQVSLTCDVSGFYPSDIAVEWESDGQPENNYKTTPPVLDSDGSFFLYSKLTVDKSRWEQGDVFSCSVMHEALHNHYTQKSLSLSPGK

SEQ ID NO: 27397 - protein, 118 aa, synthetic construct; identical to SEQ ID NO: 3737
  REGION 1..118: note = Description of Artificial Sequence: Synthetic polypeptide
  REGION 1..118: note = VH of XENP019192

SEQ ID NO: 27398 - protein, 5 aa, synthetic construct
  REGION 1..5: note = Description of Artificial Sequence: Synthetic peptide
  REGION 1..5: note = XENP019192 vhCDR1
SYTMH

SEQ ID NO: 27399 - protein, 17 aa, synthetic construct
  REGION 1..17: note = Description of Artificial Sequence: Synthetic peptide
  REGION 1..17: note = XENP019192 vhCDR2
FISYDGNNKYYADSVKG

SEQ ID NO: 27400 - protein, 9 aa, synthetic construct
  REGION 1..9: note = Description of Artificial Sequence: Synthetic peptide
  REGION 1..9: note = XENP019192 vhCDR3
TGWLGPFDY

SEQ ID NO: 27401 - protein, 483 aa, synthetic construct; identical to SEQ ID NO: 26827
  REGION 1..483: note = Description of Artificial Sequence: Synthetic polypeptide
  REGION 1..483: note = XENP019192 ipilimumab[CTLA-4]_H0L0 _Fab-[anti-ICOS]-H0L0_scFv scFv-Fc Heavy Chain

SEQ ID NO: 27402 - protein, 125 aa, synthetic construct; identical to SEQ ID NO: 26293
  REGION 1..125: note = Description of Artificial Sequence: Synthetic polypeptide
  REGION 1..125: note = VH of XENP019192

SEQ ID NO: 27403 - protein, 107 aa, synthetic construct; identical to SEQ ID NO: 26298
  REGION 1..107: note = Description of Artificial Sequence: Synthetic polypeptide
  REGION 1..107: note = VL of XENP019192

SEQ ID NO: 27404 - protein, 231 aa, synthetic construct; identical to SEQ ID NO: 2397
  REGION 1..231: note = Description of Artificial Sequence: Synthetic polypeptide
  REGION 1..231: note = Fc chain of XENP019192

SEQ ID NO: 27405 - protein, 5 aa, synthetic construct
  REGION 1..5: note = Description of Artificial Sequence: Synthetic peptide
  REGION 1..5: note = XENP019192 vhCDR1
GYYMH

SEQ ID NO: 27406 - protein, 17 aa, synthetic construct
  REGION 1..17: note = Description of Artificial Sequence: Synthetic peptide
  REGION 1..17: note = XENP019192 vhCDR2
WINPHSGGTNYAQKFQG

SEQ ID NO: 27407 - protein, 16 aa, synthetic construct
  REGION 1..16: note = Description of Artificial Sequence: Synthetic peptide
  REGION 1..16: note = XENP019192 vhCDR3
TYYYDSSGYYHDAFDI

SEQ ID NO: 27408 - protein, 11 aa, synthetic construct
  REGION 1..11: note = Description of Artificial Sequence: Synthetic peptide
  REGION 1..11: note = XENP019192 vlCDR1
RASQGISRLLA

SEQ ID NO: 27409 - protein, 7 aa, synthetic construct
  REGION 1..7: note = Description of Artificial Sequence: Synthetic peptide
  REGION 1..7: note = XENP019192 vlCDR2
VASSLQS

SEQ ID NO: 27410 - protein, 9 aa, synthetic construct
  REGION 1..9: note = Description of Artificial Sequence: Synthetic peptide
  REGION 1..9: note = XENP019192 vlCDR3
QQANSFPWT

SEQ ID NO: 27411 - protein, 215 aa, synthetic construct; identical to SEQ ID NO: 7600
  REGION 1..215: note = Description of Artificial Sequence: Synthetic polypeptide
  REGION 1..215: note = XENP019192 ipilimumab[CTLA-4]_H0L0 _Fab-[anti-ICOS]-H0L0_scFv Light Chain

SEQ ID NO: 27412 - protein, 108 aa, synthetic construct; identical to SEQ ID NO: 3741
  REGION 1..108: note = Description of Artificial Sequence: Synthetic polypeptide
  REGION 1..108: note = VL of XENP019192

SEQ ID NO: 27413 - protein, 12 aa, synthetic construct
  REGION 1..12: note = Description of Artificial Sequence: Synthetic peptide
  REGION 1..12: note = XENP019192 vlCDR1
RASQSVGSSYLA

SEQ ID NO: 27414 - protein, 7 aa, synthetic construct
  REGION 1..7: note = Description of Artificial Sequence: Synthetic peptide
  REGION 1..7: note = XENP019192 vlCDR2
GAFSRAT

SEQ ID NO: 27415 - protein, 9 aa, synthetic construct
  REGION 1..9: note = Description of Artificial Sequence: Synthetic peptide
  REGION 1..9: note = XENP019192 vlCDR3
QQYGSSPWT

SEQ ID NO: 27416 - protein, 450 aa, synthetic construct; identical to SEQ ID NO: 26262
  REGION 1..450: note = Description of Artificial Sequence: Synthetic polypeptide
  REGION 1..450: note = XENP014410 20H4.9[4-1BB]_H0L0_IgG1_PVA_/S267K Heavy Chain

SEQ ID NO: 27417 - protein, 121 aa, synthetic construct [sequence omitted]

SEQ ID NO: 27418 - protein, 5 aa, synthetic construct
  REGION 1..5: note = Description of Artificial Sequence: Synthetic peptide
  REGION 1..5: note = XENP014410 vhCDR1
GYYWS

SEQ ID NO: 27419 - protein, 16 aa, synthetic construct
  REGION 1..16: note = Description of Artificial Sequence: Synthetic peptide
  REGION 1..16: note = XENP014410 vhCDR2
EINHGGYVTYNPSLES

SEQ ID NO: 27420 - protein, 13 aa, synthetic construct
  REGION 1..13: note = Description of Artificial Sequence: Synthetic peptide
  REGION 1..13: note = XENP014410 vhCDR3
DYGPGNYDWYFDL

SEQ ID NO: 27421 - protein, 216 aa, synthetic construct; identical to SEQ ID NO: 26267
  REGION 1..216: note = Description of Artificial Sequence: Synthetic polypeptide
  REGION 1..216: note = XENP014410 20H4.9[4-1BB]_H0L0_IgG1_PVA_/S267K Light Chain

SEQ ID NO: 27422 - protein, 109 aa, synthetic construct [sequence omitted]

SEQ ID NO: 27423 - protein, 11 aa, synthetic construct
  REGION 1..11: note = Description of Artificial Sequence: Synthetic peptide
  REGION 1..11: note = XENP014410 vlCDR1
RASQSVSSYLA

SEQ ID NO: 27424 - protein, 7 aa, synthetic construct
  REGION 1..7: note = Description of Artificial Sequence: Synthetic peptide
  REGION 1..7: note = XENP014410 vlCDR2
DASNRAT

SEQ ID NO: 27425 - protein, 11 aa, synthetic construct
  REGION 1..11: note = Description of Artificial Sequence: Synthetic peptide
  REGION 1..11: note = XENP014410 vlCDR3
QQRSNWPPALT

SEQ ID NO: 27426 - protein, 447 aa, synthetic construct; identical to SEQ ID NO: 26272
  REGION 1..447: note = Description of Artificial Sequence: Synthetic polypeptide
  REGION 1..447: note = XENP016437 11D4[OX40]_H0L0_IgG1_PVA_/S267K Heavy Chain

SEQ ID NO: 27427 - protein, 118 aa, synthetic construct; identical to SEQ ID NO: 26273
  REGION 1..118: note = Description of Artificial Sequence: Synthetic polypeptide
  REGION 1..118: note = VH of XENP016437

SEQ ID NO: 27428 - protein, 5 aa, synthetic construct
  REGION 1..5: note = Description of Artificial Sequence: Synthetic peptide
  REGION 1..5: note = XENP016437 vhCDR1
SYSMN

SEQ ID NO: 27429 - protein, 17 aa, synthetic construct
  REGION 1..17: note = Description of Artificial Sequence: Synthetic peptide
  REGION 1..17: note = XENP016437 vhCDR2
YISSSSSTIDYADSVKG

SEQ ID NO: 27430 - protein, 9 aa, synthetic construct
  REGION 1..9: note = Description of Artificial Sequence: Synthetic peptide
  REGION 1..9: note = XENP016437 vhCDR3
ESGWYLFDY

SEQ ID NO: 27431 - protein, 214 aa, synthetic construct; identical to SEQ ID NO: 26277
  REGION 1..214: note = Description of Artificial Sequence: Synthetic polypeptide
  REGION 1..214: note = XENP016437 11D4[OX40]_H0L0_IgG1_PVA_/S267K Light Chain

SEQ ID NO: 27432 - protein, 107 aa, synthetic construct; identical to SEQ ID NO: 26278
  REGION 1..107: note = Description of Artificial Sequence: Synthetic polypeptide
  REGION 1..107: note = VL of XENP016437

SEQ ID NO: 27433 - protein, 11 aa, synthetic construct
  REGION 1..11: note = Description of Artificial Sequence: Synthetic peptide
  REGION 1..11: note = XENP016437 vlCDR1
RASQGISSWLA

SEQ ID NO: 27434 - protein, 7 aa, synthetic construct
  REGION 1..7: note = Description of Artificial Sequence: Synthetic peptide
  REGION 1..7: note = XENP016437 vlCDR2
AASSLQS

SEQ ID NO: 27435 - protein, 9 aa, synthetic construct
  REGION 1..9: note = Description of Artificial Sequence: Synthetic peptide
  REGION 1..9: note = XENP016437 vlCDR3
QQYNSYPPT

SEQ ID NO: 27436 - protein, 451 aa, synthetic construct; identical to SEQ ID NO: 26282
  REGION 1..451: note = Description of Artificial Sequence: Synthetic polypeptide
  REGION 1..451: note = XENP016438 1D8[GITR]_H0L0_IgG1_PVA_/S267K Heavy Chain

SEQ ID NO: 27437 - protein, 122 aa, synthetic construct; identical to SEQ ID NO: 26283
  REGION 1..122: note = Description of Artificial Sequence: Synthetic polypeptide
  REGION 1..122: note = VH of XENP016438

SEQ ID NO: 27438 - protein, 7 aa, synthetic construct
  REGION 1..7: note = Description of Artificial Sequence: Synthetic peptide
  REGION 1..7: note = XENP016438 vhCDR1
TSGMGVG

SEQ ID NO: 27439 - protein, 16 aa, synthetic construct
  REGION 1..16: note = Description of Artificial Sequence: Synthetic peptide
  REGION 1..16: note = XENP016438 vhCDR2
HIWWDDDKYYSPSLKS

SEQ ID NO: 27440 - protein, 12 aa, synthetic construct
  REGION 1..12: note = Description of Artificial Sequence: Synthetic peptide
  REGION 1..12: note = XENP016438 vhCDR3
SYYYGSSGAMDY

SEQ ID NO: 27441 - protein, 219 aa, synthetic construct; identical to SEQ ID NO: 26287
  REGION 1..219: note = Description of Artificial Sequence: Synthetic polypeptide
  REGION 1..219: note = XENP016438 1D8[GITR]_H0L0_IgG1_PVA_/S267K Light Chain

SEQ ID NO: 27442 - protein, 112 aa, synthetic construct; identical to SEQ ID NO: 26288
  REGION 1..112: note = Description of Artificial Sequence: Synthetic polypeptide
  REGION 1..112: note = VL of XENP016438

SEQ ID NO: 27443 - protein, 16 aa, synthetic construct
  REGION 1..16: note = Description of Artificial Sequence: Synthetic peptide
  REGION 1..16: note = XENP016438 vlCDR1
RSSQSLVHSDGNTYLH

SEQ ID NO: 27444 - protein, 7 aa, synthetic construct
  REGION 1..7: note = Description of Artificial Sequence: Synthetic peptide
  REGION 1..7: note = XENP016438 vlCDR2
KVSKRFS

SEQ ID NO: 27445 - protein, 9 aa, synthetic construct
  REGION 1..9: note = Description of Artificial Sequence: Synthetic peptide
  REGION 1..9: note = XENP016438 vlCDR3
SQSTHVPPT

SEQ ID NO: 27446 - protein, 452 aa, synthetic construct; identical to SEQ ID NO: 26302
  REGION 1..452: note = Description of Artificial Sequence: Synthetic polypeptide
  REGION 1..452: note = XENP021820 GSK_314.8[ICOS]_H0L0_IgG1_PVA_/S267K Heavy Chain

SEQ ID NO: 27447 - protein, 123 aa, synthetic construct; identical to SEQ ID NO: 26303
  REGION 1..123: note = Description of Artificial Sequence: Synthetic polypeptide
  REGION 1..123: note = VH of XENP021820

SEQ ID NO: 27448 - protein, 5 aa, synthetic construct
  REGION 1..5: note = Description of Artificial Sequence: Synthetic peptide
  REGION 1..5: note = XENP021820 vhCDR1
TYWMH

SEQ ID NO: 27449 - protein, 17 aa, synthetic construct
  REGION 1..17: note = Description of Artificial Sequence: Synthetic peptide
  REGION 1..17: note = XENP021820 vhCDR2
EIDPSDSYVNYNQNFKG

SEQ ID NO: 27450 - protein, 14 aa, synthetic construct
  REGION 1..14: note = Description of Artificial Sequence: Synthetic peptide
  REGION 1..14: note = XENP021820 vhCDR3
SPDYYGTSLAWFDY

SEQ ID NO: 27451 - protein, 219 aa, synthetic construct; identical to SEQ ID NO: 26307
  REGION 1..219: note = Description of Artificial Sequence: Synthetic polypeptide
  REGION 1..219: note = XENP021820 GSK_314.8[ICOS]_H0L0_IgG1_PVA_/S267K Light Chain

SEQ ID NO: 27452 - protein, 112 aa, synthetic construct; identical to SEQ ID NO: 26308
  REGION 1..112: note = Description of Artificial Sequence: Synthetic polypeptide
  REGION 1..112: note = VL of XENP021820

SEQ ID NO: 27453 - protein, 16 aa, synthetic construct
  REGION 1..16: note = Description of Artificial Sequence: Synthetic peptide
  REGION 1..16: note = XENP021820 vlCDR1
RSSKSPLHSNGNIYLY

SEQ ID NO: 27454 - protein, 7 aa, synthetic construct
  REGION 1..7: note = Description of Artificial Sequence: Synthetic peptide
  REGION 1..7: note = XENP021820 vlCDR2
RMSNLAS

SEQ ID NO: 27455 - protein, 9 aa, synthetic construct
  REGION 1..9: note = Description of Artificial Sequence: Synthetic peptide
  REGION 1..9: note = XENP021820 vlCDR3
MQHLEYPYT

SEQ ID NO: 27456 - protein, 453 aa, synthetic construct; identical to SEQ ID NO: 26312
  REGION 1..453: note = Description of Artificial Sequence: Synthetic polypeptide
  REGION 1..453: note = XENP021821 GSK_88.2[ICOS]_H0L0_IgG1_PVA_/S267K Heavy Chain

SEQ ID NO: 27457 - protein, 124 aa, synthetic construct; identical to SEQ ID NO: 26313
  REGION 1..124: note = Description of Artificial Sequence: Synthetic polypeptide
  REGION 1..124: note = VH of XENP021821

SEQ ID NO: 27458 - protein, 5 aa, synthetic construct
  REGION 1..5: note = Description of Artificial Sequence: Synthetic peptide
  REGION 1..5: note = XENP021821 vhCDR1
SYWIN

SEQ ID NO: 27459 - protein, 17 aa, synthetic construct
  REGION 1..17: note = Description of Artificial Sequence: Synthetic peptide
  REGION 1..17: note = XENP021821 vhCDR2
NIYPSDSYTNYNQMFKD

SEQ ID NO: 27460 - protein, 15 aa, synthetic construct
  REGION 1..15: note = Description of Artificial Sequence: Synthetic peptide
  REGION 1..15: note = XENP021821 vhCDR3
WNLSYYFDNNYYLDY

SEQ ID NO: 27461 - protein, 219 aa, synthetic construct; identical to SEQ ID NO: 26317
  REGION 1..219: note = Description of Artificial Sequence: Synthetic polypeptide
  REGION 1..219: note = XENP021821 GSK_88.2[ICOS]_H0L0_IgG1_PVA_/S267K Light Chain

SEQ ID NO: 27462 - protein, 112 aa, synthetic construct; identical to SEQ ID NO: 26318
  REGION 1..112: note = Description of Artificial Sequence: Synthetic polypeptide
  REGION 1..112: note = VL of XENP021821

SEQ ID NO: 27463 - protein, 16 aa, synthetic construct
  REGION 1..16: note = Description of Artificial Sequence: Synthetic peptide
  REGION 1..16: note = XENP021821 vlCDR1
RSSKSLLHSNGNTYLY

SEQ ID NO: 27464 - protein, 7 aa, synthetic construct
  REGION 1..7: note = Description of Artificial Sequence: Synthetic peptide
  REGION 1..7: note = XENP021821 vlCDR2
RMSNLAS

SEQ ID NO: 27465 - protein, 9 aa, synthetic construct
  REGION 1..9: note = Description of Artificial Sequence: Synthetic peptide
  REGION 1..9: note = XENP021821 vlCDR3
MQHLEYPWT

SEQ ID NO: 27466 - protein, 454 aa, synthetic construct; identical to SEQ ID NO: 26322
  REGION 1..454: note = Description of Artificial Sequence: Synthetic polypeptide
  REGION 1..454: note = XENP021822 jMab-138[ICOS]_H0L0_IgG1_PVA_/S267K Heavy Chain

SEQ ID NO: 27467 - protein, 125 aa, synthetic construct; identical to SEQ ID NO: 26323
  REGION 1..125: note = Description of Artificial Sequence: Synthetic polypeptide
  REGION 1..125: note = VH of XENP021822

SEQ ID NO: 27468 - protein, 5 aa, synthetic construct
  REGION 1..5: note = Description of Artificial Sequence: Synthetic peptide
  REGION 1..5: note = XENP021822 vhCDR1
SYDMH

SEQ ID NO: 27469 - protein, 16 aa, synthetic construct
  REGION 1..16: note = Description of Artificial Sequence: Synthetic peptide
  REGION 1..16: note = XENP021822 vhCDR2
AIGTAGDTYYPGSVKG

SEQ ID NO: 27470 - protein, 17 aa, synthetic construct
  REGION 1..17: note = Description of Artificial Sequence: Synthetic peptide
  REGION 1..17: note = XENP021822 vhCDR3
DNRKVTHEHYYYYGMDV

SEQ ID NO: 27471 - protein, 216 aa, synthetic construct; identical to SEQ ID NO: 26327
  REGION 1..216: note = Description of Artificial Sequence: Synthetic polypeptide
  REGION 1..216: note = XENP021822 jMab-138[ICOS]_H0L0_IgG1_PVA_/S267K Light Chain

SEQ ID NO: 27472 - protein, 109 aa, synthetic construct; identical to SEQ ID NO: 26328
  REGION 1..109: note = Description of Artificial Sequence: Synthetic polypeptide
  REGION 1..109: note = VL of XENP021822

SEQ ID NO: 27473 - protein, 12 aa, synthetic construct
  REGION 1..12: note = Description of Artificial Sequence: Synthetic peptide
  REGION 1..12: note = XENP021822 vlCDR1
RASQNIRSSYLA

SEQ ID NO: 27474 - protein, 7 aa, synthetic construct
  REGION 1..7: note = Description of Artificial Sequence: Synthetic peptide
  REGION 1..7: note = XENP021822 vlCDR2
GASSRAT

SEQ ID NO: 27475 - protein, 10 aa, synthetic construct
  REGION 1..10: note = Description of Artificial Sequence: Synthetic peptide
  REGION 1..10: note = XENP021822 vlCDR3
QQFGSSPMCS

SEQ ID NO: 27476 - protein, 454 aa, synthetic construct; identical to SEQ ID NO: 26332
  REGION 1..454: note = Description of Artificial Sequence: Synthetic polypeptide
  REGION 1..454: note = XENP021823 jMab-139[ICOS]_H0L0_IgG1_PVA_/S267K Heavy Chain

SEQ ID NO: 27477 - protein, 125 aa, synthetic construct; identical to SEQ ID NO: 26333
  REGION 1..125: note = Description of Artificial Sequence: Synthetic polypeptide
  REGION 1..125: note = VH of XENP021823

SEQ ID NO: 27478 - protein, 5 aa, synthetic construct
  REGION 1..5: note = Description of Artificial Sequence: Synthetic peptide
  REGION 1..5: note = XENP021823 vhCDR1
SYDMH

SEQ ID NO: 27479 - protein, 16 aa, synthetic construct
  REGION 1..16: note = Description of Artificial Sequence: Synthetic peptide
  REGION 1..16: note = XENP021823 vhCDR2
AIGTAGDTYYPGSVKG

SEQ ID NO: 27480 - protein, 17 aa, synthetic construct
  REGION 1..17: note = Description of Artificial Sequence: Synthetic peptide
  REGION 1..17: note = XENP021823 vhCDR3
DKRTVTHEHYYYYGMDV

SEQ ID NO: 27481 - protein, 216 aa, synthetic construct; identical to SEQ ID NO: 26337
  REGION 1..216: note = Description of Artificial Sequence: Synthetic polypeptide
  REGION 1..216: note = XENP021823 jMab-139[ICOS]_H0L0_IgG1_PVA_/S267K Light Chain

SEQ ID NO: 27482 - protein, 109 aa, synthetic construct; identical to SEQ ID NO: 26338
  REGION 1..109: note = Description of Artificial Sequence: Synthetic polypeptide
  REGION 1..109: note = VL of XENP021823

SEQ ID NO: 27483 - protein, 12 aa, synthetic construct
  REGION 1..12: note = Description of Artificial Sequence: Synthetic peptide
  REGION 1..12: note = XENP021823 vlCDR1
RASQSISSSSLA

SEQ ID NO: 27484 - protein, 7 aa, synthetic construct
  REGION 1..7: note = Description of Artificial Sequence: Synthetic peptide
  REGION 1..7: note = XENP021823 vlCDR2
GASSRAT

SEQ ID NO: 27485 - protein, 10 aa, synthetic construct
  REGION 1..10: note = Description of Artificial Sequence: Synthetic peptide
  REGION 1..10: note = XENP021823 vlCDR3
QQFGSSPMCS

SEQ ID NO: 27486 - protein, 450 aa, synthetic construct; identical to SEQ ID NO: 26342
  REGION 1..450: note = Description of Artificial Sequence: Synthetic polypeptide
  REGION 1..450: note = XENP022346 WO2016059602_GSK[ICOS]_H0L0 _IgG1_PVA_/S267K Heavy Chain

SEQ ID NO: 27487 - protein, 121 aa, synthetic construct; identical to SEQ ID NO: 26343
  REGION 1..121: note = Description of Artificial Sequence: Synthetic polypeptide
  REGION 1..121: note = VH of XENP022346

SEQ ID NO: 27488 - protein, 5 aa, synthetic construct
  REGION 1..5: note = Description of Artificial Sequence: Synthetic peptide
  REGION 1..5: note = XENP022346 vhCDR1
DYAMH

SEQ ID NO: 27489 - protein, 17 aa, synthetic construct
  REGION 1..17: note = Description of Artificial Sequence: Synthetic peptide
  REGION 1..17: note = XENP022346 vhCDR2
LISIYSDHTNYNQKFQG

SEQ ID NO: 27490 - protein, 12 aa, synthetic construct
  REGION 1..12: note = Description of Artificial Sequence: Synthetic peptide
  REGION 1..12: note = XENP022346 vhCDR3
NNYGNYGWYFDV

SEQ ID NO: 27491 - protein, 213 aa, synthetic construct; identical to SEQ ID NO: 26347
  REGION 1..213: note = Description of Artificial Sequence: Synthetic polypeptide
  REGION 1..213: note = XENP022346 WO2016059602_GSK[ICOS]_H0L0 _IgG1_PVA_/S267K Light Chain

SEQ ID NO: 27492 - protein, 106 aa, synthetic construct; identical to SEQ ID NO: 26348
  REGION 1..106: note = Description of Artificial Sequence: Synthetic polypeptide
  REGION 1..106: note = VL of XENP022346

SEQ ID NO: 27493 - protein, 10 aa, synthetic construct
  REGION 1..10: note = Description of Artificial Sequence: Synthetic peptide
  REGION 1..10: note = XENP022346 vlCDR1
SASSSVSYMH

SEQ ID NO: 27494 - protein, 7 aa, synthetic construct
  REGION 1..7: note = Description of Artificial Sequence: Synthetic peptide
  REGION 1..7: note = XENP022346 vlCDR2
DTSKLAS

SEQ ID NO: 27495 - protein, 9 aa, synthetic construct
  REGION 1..9: note = Description of Artificial Sequence: Synthetic peptide
  REGION 1..9: note = XENP022346 vlCDR3
FQGSGYPYT

SEQ ID NO: 27496 - protein, 446 aa, synthetic construct; identical to SEQ ID NO: 26352
  REGION 1..446: note = Description of Artificial Sequence: Synthetic polypeptide
  REGION 1..446: note = XENP023057 Jounce_37A10S713[ICOS]_H0L0 _IgG1_PVA_/S267K Heavy Chain

SEQ ID NO: 27497 - protein, 117 aa, synthetic construct; identical to SEQ ID NO: 26353
  REGION 1..117: note = Description of Artificial Sequence: Synthetic polypeptide
  REGION 1..117: note = VH of XENP023057

SEQ ID NO: 27498 - protein, 5 aa, synthetic construct
  REGION 1..5: note = Description of Artificial Sequence: Synthetic peptide
  REGION 1..5: note = XENP023057 vhCDR1
DYWMD

SEQ ID NO: 27499 - protein, 17 aa, synthetic construct
  REGION 1..17: note = Description of Artificial Sequence: Synthetic peptide
  REGION 1..17: note = XENP023057 vhCDR2
NIDEDGSITEYSPFVKG

SEQ ID NO: 27500 - protein, 8 aa, synthetic construct
  REGION 1..8: note = Description of Artificial Sequence: Synthetic peptide
  REGION 1..8: note = XENP023057 vhCDR3
WGRFGFDS

SEQ ID NO: 27501 - protein, 218 aa, synthetic construct; identical to SEQ ID NO: 26357
  REGION 1..218: note = Description of Artificial Sequence: Synthetic polypeptide
  REGION 1..218: note = XENP023057 Jounce_37A10S713[ICOS]_H0L0 _IgG1_PVA_/S267K Light Chain

SEQ ID NO: 27502 - protein, 111 aa, synthetic construct; identical to SEQ ID NO: 26358
  REGION 1..111: note = Description of Artificial Sequence: Synthetic polypeptide
  REGION 1..111: note = VL of XENP023057

SEQ ID NO: 27503 - protein, 15 aa, synthetic construct
  REGION 1..15: note = Description of Artificial Sequence: Synthetic peptide
  REGION 1..15: note = XENP023057 vlCDR1
KSSQSLLSGSFNYLT

SEQ ID NO: 27504 - protein, 7 aa, synthetic construct
  REGION 1..7: note = Description of Artificial Sequence: Synthetic peptide
  REGION 1..7: note = XENP023057 vlCDR2
YASTRHT

SEQ ID NO: 27505 - protein, 9 aa, synthetic construct
  REGION 1..9: note = Description of Artificial Sequence: Synthetic peptide
  REGION 1..9: note = XENP023057 vlCDR3
HHHYNAPPT

SEQ ID NO: 27506 - protein, 447 aa, synthetic construct
  REGION 1..447: note = Description of Artificial Sequence: Synthetic polypeptide
  REGION 1..447: note = XENP016434 YW243.55.S70[PD-L1]_H0L0 _IgG1_PVA_/S267K Heavy Chain
EVQLVESGGGLVQPGGSLRLSCAASGFTFSDSWIHWVRQAPGKGLEWVAWISPYGGSTYYADSVKGRFTISADTSKNTAYLQMNSLRAEDTAVYYCARRHWPGGFDYWGQGTLVTVSSASTKGPSVFPLAPSSKSTSGGTAALGCLVKDYFPEPVTVSWNSGALTSGVHTFPAVLQSSGLYSLSSVVTVPSSSLGTQTYICNVNHKPSNTKVDKKVEPKSCDKTHTCPPCPAPPVAGPSVFLFPPKPKDTLMISRTPEVTCVVVDVKHEDPEVKFNWYVDGVEVHNAKTKPREEQYNSTYRVVSVLTVLHQDWLNGKEYKCKVSNKALPAPIEKTISKAKGQPREPQVYTLPPSREEMTKNQVSLTCLVKGFYPSDIAVEWESNGQPENNYKTTPPVLDSDGSFFLYSKLTVDKSRWQQGNVFSCSVMHEALHNHYTQKSLSLSPGK

SEQ ID NO: 27507 - protein, 118 aa, synthetic construct [sequence omitted]

SEQ ID NO: 27508 - protein, 5 aa, synthetic construct
  REGION 1..5: note = Description of Artificial Sequence: Synthetic peptide
  REGION 1..5: note = XENP016434 vhCDR1
DSWIH

SEQ ID NO: 27509 - protein, 17 aa, synthetic construct
  REGION 1..17: note = Description of Artificial Sequence: Synthetic peptide
  REGION 1..17: note = XENP016434 vhCDR2
WISPYGGSTYYADSVKG

SEQ ID NO: 27510 - protein, 9 aa, synthetic construct
  REGION 1..9: note = Description of Artificial Sequence: Synthetic peptide
  REGION 1..9: note = XENP016434 vhCDR3
RHWPGGFDY

SEQ ID NO: 27511 - protein, 214 aa, synthetic construct; identical to SEQ ID NO: 27132
  REGION 1..214: note = Description of Artificial Sequence: Synthetic polypeptide
  REGION 1..214: note = XENP016434 YW243.55.S70[PD-L1]_H0L0 _IgG1_PVA_/S267K Light Chain

SEQ ID NO: 27512 - protein, 107 aa, synthetic construct [sequence omitted]

SEQ ID NO: 27513 - protein, 11 aa, synthetic construct
  REGION 1..11: note = Description of Artificial Sequence: Synthetic peptide
  REGION 1..11: note = XENP016434 vlCDR1
RASQDVSTAVA

SEQ ID NO: 27514 - protein, 7 aa, synthetic construct
  REGION 1..7: note = Description of Artificial Sequence: Synthetic peptide
  REGION 1..7: note = XENP016434 vlCDR2
SASFLYS

SEQ ID NO: 27515 - protein, 9 aa, synthetic construct
  REGION 1..9: note = Description of Artificial Sequence: Synthetic peptide
  REGION 1..9: note = XENP016434 vlCDR3
QQYLYHPAT

SEQ ID NO: 27516 - protein, 449 aa, synthetic construct
  REGION 1..449: note = Description of Artificial Sequence: Synthetic polypeptide
  REGION 1..449: note = XENP024118 avelumab[PD-L1]_H1L1_IgG1_PVA_/S267K Heavy Chain
EVQLLESGGGLVQPGGSLRLSCAASGFTFSSYIMMWVRQAPGKGLEWVSSIYPSGGITFYADTVKGRFTISRDNSKNTLYLQMNSLRAEDTAVYYCARIKLGTVTTVDYWGQGTLVTVSSASTKGPSVFPLAPSSKSTSGGTAALGCLVKDYFPEPVTVSWNSGALTSGVHTFPAVLQSSGLYSLSSVVTVPSSSLGTQTYICNVNHKPSNTKVDKKVEPKSCDKTHTCPPCPAPPVAGPSVFLFPPKPKDTLMISRTPEVTCVVVDVKHEDPEVKFNWYVDGVEVHNAKTKPREEQYNSTYRVVSVLTVLHQDWLNGKEYKCKVSNKALPAPIEKTISKAKGQPREPQVYTLPPSREEMTKNQVSLTCLVKGFYPSDIAVEWESNGQPENNYKTTPPVLDSDGSFFLYSKLTVDKSRWQQGNVFSCSVMHEALHNHYTQKSLSLSPGK

SEQ ID NO: 27517 - protein, 120 aa, synthetic construct; identical to SEQ ID NO: 3977
  REGION 1..120: note = Description of Artificial Sequence: Synthetic polypeptide
  REGION 1..120: note = VH of XENP024118

SEQ ID NO: 27518 - protein, 5 aa, synthetic construct
  REGION 1..5: note = Description of Artificial Sequence: Synthetic peptide
  REGION 1..5: note = XENP024118 vhCDR1
SYIMM

SEQ ID NO: 27519 - protein, 17 aa, synthetic construct
  REGION 1..17: note = Description of Artificial Sequence: Synthetic peptide
  REGION 1..17: note = XENP024118 vhCDR2
SIYPSGGITFYADTVKG

SEQ ID NO: 27520 - protein, 11 aa, synthetic construct
  REGION 1..11: note = Description of Artificial Sequence: Synthetic peptide
  REGION 1..11: note = XENP024118 vhCDR3
IKLGTVTTVDY

SEQ ID NO: 27521 - protein, 216 aa, synthetic construct; identical to SEQ ID NO: 27172
  REGION 1..216: note = Description of Artificial Sequence: Synthetic polypeptide
  REGION 1..216: note = XENP024118 avelumab[PD-L1]_H1L1_IgG1_PVA_/S267K Light Chain

SEQ ID NO: 27522 - protein, 110 aa, synthetic construct; identical to SEQ ID NO: 3981
  REGION 1..110: note = Description of Artificial Sequence: Synthetic polypeptide
  REGION 1..110: note = VL of XENP024118

SEQ ID NO: 27523 - protein, 14 aa, synthetic construct
  REGION 1..14: note = Description of Artificial Sequence: Synthetic peptide
  REGION 1..14: note = XENP024118 vlCDR1
TGTSSDVGGYNYVS

SEQ ID NO: 27524 - protein, 7 aa, synthetic construct
  REGION 1..7: note = Description of Artificial Sequence: Synthetic peptide
  REGION 1..7: note = XENP024118 vlCDR2
DVSNRPS

SEQ ID NO: 27525 - protein, 10 aa, synthetic construct
  REGION 1..10: note = Description of Artificial Sequence: Synthetic peptide
  REGION 1..10: note = XENP024118 vlCDR3
SSYTSSSTRV

SEQ ID NO: 27526 - protein, 450 aa, synthetic construct
  REGION 1..450: note = Description of Artificial Sequence: Synthetic polypeptide
  REGION 1..450: note = XENP024119 durvalumab[PD-L1]_H1L1_IgG1_PVA_/S267K Heavy Chain
EVQLVESGGGLVQPGGSLRLSCAASGFTFSRYWMSWVRQAPGKGLEWVANIKQDGSEKYYVDSVKGRFTISRDNAKNSLYLQMNSLRAEDTAVYYCAREGGWFGELAFDYWGQGTLVTVSSASTKGPSVFPLAPSSKSTSGGTAALGCLVKDYFPEPVTVSWNSGALTSGVHTFPAVLQSSGLYSLSSVVTVPSSSLGTQTYICNVNHKPSNTKVDKKVEPKSCDKTHTCPPCPAPPVAGPSVFLFPPKPKDTLMISRTPEVTCVVVDVKHEDPEVKFNWYVDGVEVHNAKTKPREEQYNSTYRVVSVLTVLHQDWLNGKEYKCKVSNKALPAPIEKTISKAKGQPREPQVYTLPPSREEMTKNQVSLTCLVKGFYPSDIAVEWESNGQPENNYKTTPPVLDSDGSFFLYSKLTVDKSRWQQGNVFSCSVMHEALHNHYTQKSLSLSPGK

SEQ ID NO: 27527 - protein, 121 aa, synthetic construct; identical to SEQ ID NO: 3961
  REGION 1..121: note = Description of Artificial Sequence: Synthetic polypeptide
  REGION 1..121: note = VH of XENP024119

SEQ ID NO: 27528 - protein, 5 aa, synthetic construct
  REGION 1..5: note = Description of Artificial Sequence: Synthetic peptide
  REGION 1..5: note = XENP024119 vhCDR1
RYWMS

SEQ ID NO: 27529 - protein, 17 aa, synthetic construct
  REGION 1..17: note = Description of Artificial Sequence: Synthetic peptide
  REGION 1..17: note = XENP024119 vhCDR2
NIKQDGSEKYYVDSVKG

SEQ ID NO: 27530 - protein, 12 aa, synthetic construct
  REGION 1..12: note = Description of Artificial Sequence: Synthetic peptide
  REGION 1..12: note = XENP024119 vhCDR3
EGGWFGELAFDY

SEQ ID NO: 27531 - protein, 215 aa, synthetic construct; identical to SEQ ID NO: 27152
  REGION 1..215: note = Description of Artificial Sequence: Synthetic polypeptide
  REGION 1..215: note = XENP024119 durvalumab[PD-L1]_H1L1_IgG1_PVA_/S267K Light Chain

SEQ ID NO: 27532 - protein, 108 aa, synthetic construct; identical to SEQ ID NO: 3965
  REGION 1..108: note = Description of Artificial Sequence: Synthetic polypeptide
  REGION 1..108: note = VL of XENP024119

SEQ ID NO: 27533 - protein, 12 aa, synthetic construct
  REGION 1..12: note = Description of Artificial Sequence: Synthetic peptide
  REGION 1..12: note = XENP024119 vlCDR1
RASQRVSSSYLA

SEQ ID NO: 27534 - protein, 7 aa, synthetic construct
  REGION 1..7: note = Description of Artificial Sequence: Synthetic peptide
  REGION 1..7: note = XENP024119 vlCDR2
DASSRAT

SEQ ID NO: 27535 - protein, 9 aa, synthetic construct
  REGION 1..9: note = Description of Artificial Sequence: Synthetic peptide
  REGION 1..9: note = XENP024119 vlCDR3
QQYGSLPWT

SEQ ID NO: 27536 - protein, 456 aa, synthetic construct
  REGION 1..456: note = Description of Artificial Sequence: Synthetic polypeptide
  REGION 1..456: note = XENP024120 LOPD180[PD-1]_H1L1_IgG1_PVA_/S267K Heavy Chain
QVQLQESGPGLVKPSQTLSLTCTVSGGSISSGAYYWSWIRQHPGKGLEWIGYIYYNGNTYYNPSLRSRVTISVDTSKNQFSLKLSSVTAADTAVYYCVRASDYVWGGYHYFDAFDLWGRGTLVTVSSASTKGPSVFPLAPSSKSTSGGTAALGCLVKDYFPEPVTVSWNSGALTSGVHTFPAVLQSSGLYSLSSVVTVPSSSLGTQTYICNVNHKPSNTKVDKKVEPKSCDKTHTCPPCPAPPVAGPSVFLFPPKPKDTLMISRTPEVTCVVVDVKHEDPEVKFNWYVDGVEVHNAKTKPREEQYNSTYRVVSVLTVLHQDWLNGKEYKCKVSNKALPAPIEKTISKAKGQPREPQVYTLPPSREEMTKNQVSLTCLVKGFYPSDIAVEWESNGQPENNYKTTPPVLDSDGSFFLYSKLTVDKSRWQQGNVFSCSVMHEALHNHYTQKSLSLSPGK

SEQ ID NO: 27537 - protein, 127 aa, synthetic construct; identical to SEQ ID NO: 26823
  REGION 1..127: note = Description of Artificial Sequence: Synthetic polypeptide
  REGION 1..127: note = VH of XENP024120

SEQ ID NO: 27538 - protein, 7 aa, synthetic construct
  REGION 1..7: note = Description of Artificial Sequence: Synthetic peptide
  REGION 1..7: note = XENP024120 vhCDR1
SGAYYWS

SEQ ID NO: 27539 - protein, 16 aa, synthetic construct
  REGION 1..16: note = Description of Artificial Sequence: Synthetic peptide
  REGION 1..16: note = XENP024120 vhCDR2
YIYYNGNTYYNPSLRS

SEQ ID NO: 27540 - protein, 17 aa, synthetic construct
  REGION 1..17: note = Description of Artificial Sequence: Synthetic peptide
  REGION 1..17: note = XENP024120 vhCDR3
ASDYVWGGYHYFDAFDL

SEQ ID NO: 27541 - protein, 216 aa, synthetic construct; identical to SEQ ID NO: 26837
  REGION 1..216: note = Description of Artificial Sequence: Synthetic polypeptide
  REGION 1..216: note = XENP024120 LOPD180[PD-1]_H1L1_IgG1_PVA_/S267K Light Chain

SEQ ID NO: 27542 - protein, 110 aa, synthetic construct; identical to SEQ ID NO: 26838
  REGION 1..110: note = Description of Artificial Sequence: Synthetic polypeptide
  REGION 1..110: note = VL of XENP024120

SEQ ID NO: 27543 - protein, 13 aa, synthetic construct
  REGION 1..13: note = Description of Artificial Sequence: Synthetic peptide
  REGION 1..13: note = XENP024120 vlCDR1
SGSNSNIGSNSVN

SEQ ID NO: 27544 - protein, 7 aa, synthetic construct
  REGION 1..7: note = Description of Artificial Sequence: Synthetic peptide
  REGION 1..7: note = XENP024120 vlCDR2
GNNQRPS

SEQ ID NO: 27545 - protein, 11 aa, synthetic construct
  REGION 1..11: note = Description of Artificial Sequence: Synthetic peptide
  REGION 1..11: note = XENP024120 vlCDR3
AAWDDSLNGPV

SEQ ID NO: 27546 - protein, 448 aa, synthetic construct
  REGION 1..448: note = Description of Artificial Sequence: Synthetic polypeptide
  REGION 1..448: note = XENP024121 mAb7(1.2)[PD-1]_H1L1_IgG1_PVA_/S267K Heavy Chain
QVQLVQSGAEVKKPGASVKVSCKASGYSFTSYWMNWVRQAPGQGLEWIGVIHPSDSETWLDQKFKDRVTITVDKSTSTAYMELSSLRSEDTAVYYCAREHYGTSPFAYWGQGTLVTVSSASTKGPSVFPLAPSSKSTSGGTAALGCLVKDYFPEPVTVSWNSGALTSGVHTFPAVLQSSGLYSLSSVVTVPSSSLGTQTYICNVNHKPSNTKVDKKVEPKSCDKTHTCPPCPAPPVAGPSVFLFPPKPKDTLMISRTPEVTCVVVDVKHEDPEVKFNWYVDGVEVHNAKTKPREEQYNSTYRVVSVLTVLHQDWLNGKEYKCKVSNKALPAPIEKTISKAKGQPREPQVYTLPPSREEMTKNQVSLTCLVKGFYPSDIAVEWESNGQPENNYKTTPPVLDSDGSFFLYSKLTVDKSRWQQGNVFSCSVMHEALHNHYTQKSLSLSPGK

SEQ ID NO: 27547 - protein, 119 aa, synthetic construct; identical to SEQ ID NO: 27009
  REGION 1..119: note = Description of Artificial Sequence: Synthetic polypeptide
  REGION 1..119: note = VH of XENP024121

SEQ ID NO: 27548 - protein, 5 aa, synthetic construct
  REGION 1..5: note = Description of Artificial Sequence: Synthetic peptide
  REGION 1..5: note = XENP024121 vhCDR1
SYWMN

SEQ ID NO: 27549 - protein, 17 aa, synthetic construct
  REGION 1..17: note = Description of Artificial Sequence: Synthetic peptide
  REGION 1..17: note = XENP024121 vhCDR2
VIHPSDSETWLDQKFKD

SEQ ID NO: 27550 - protein, 10 aa, synthetic construct
  REGION 1..10: note = Description of Artificial Sequence: Synthetic peptide
  REGION 1..10: note = XENP024121 vhCDR3
EHYGTSPFAY

SEQ ID NO: 27551 - protein, 218 aa, synthetic construct
  REGION 1..218: note = Description of Artificial Sequence: Synthetic polypeptide
  REGION 1..218: note = XENP024121 mAb7(1.2)[PD-1]_H1L1_IgG1_PVA_/S267K Light Chain
EIVLTQSPATLSLSPGERATLSCRASESVDNYGMSFMNWFQQKPGQPPKLLIHAASNQGSGVPSRFSGSGSGTDFTLTISSLEPEDFAVYFCQQSKEVPYTFGGGTKVEIKRTVAAPSVFIFPPSDEQLKSGTASVVCLLNNFYPREAKVQWKVDNALQSGNSQESVTEQDSKDSTYSLSSTLTLSKADYEKHKVYACEVTHQGLSSPVTKSFNRGEC

SEQ ID NO: 27552 - protein, 111 aa, synthetic construct; identical to SEQ ID NO: 27008
  REGION 1..111: note = Description of Artificial Sequence: Synthetic polypeptide
  REGION 1..111: note = VL of XENP024121

SEQ ID NO: 27553 - protein, 15 aa, synthetic construct
  REGION 1..15: note = Description of Artificial Sequence: Synthetic peptide
  REGION 1..15: note = XENP024121 vlCDR1
RASESVDNYGMSFMN

SEQ ID NO: 27554 - protein, 7 aa, synthetic construct
  REGION 1..7: note = Description of Artificial Sequence: Synthetic peptide
  REGION 1..7: note = XENP024121 vlCDR2
AASNQGS

SEQ ID NO: 27555 - protein, 9 aa, synthetic construct
  REGION 1..9: note = Description of Artificial Sequence: Synthetic peptide
  REGION 1..9: note = XENP024121 vlCDR3
QQSKEVPYT

SEQ ID NO: 27556 - protein, 452 aa, synthetic construct; identical to SEQ ID NO: 26682
  REGION 1..452: note = Description of Artificial Sequence: Synthetic polypeptide
  REGION 1..452: note = XENP021832 GSK_314.8[ICOS]_H0L0 _Fab-YW243.55.S70[PD-L1]_H0L0_scFv Fab-Fc Heavy Chain

SEQ ID NO: 27557 - protein, 123 aa, synthetic construct; identical to SEQ ID NO: 26303
  REGION 1..123: note = Description of Artificial Sequence: Synthetic polypeptide
  REGION 1..123: note = VH of XENP021832

SEQ ID NO: 27558 - protein, 5 aa, synthetic construct
  REGION 1..5: note = Description of Artificial Sequence: Synthetic peptide
  REGION 1..5: note = XENP021832 vhCDR1
TYWMH

SEQ ID NO: 27559 - protein, 17 aa, synthetic construct
  REGION 1..17: note = Description of Artificial Sequence: Synthetic peptide
  REGION 1..17: note = XENP021832 vhCDR2
EIDPSDSYVNYNQNFKG

SEQ ID NO: 27560 - protein, 14 aa, synthetic construct
  REGION 1..14: note = Description of Artificial Sequence: Synthetic peptide
  REGION 1..14: note = XENP021832 vhCDR3
SPDYYGTSLAWFDY

SEQ ID NO: 27561 - protein, 471 aa, synthetic construct
  REGION 1..471: note = Description of Artificial Sequence: Synthetic polypeptide
  REGION 1..471: note = XENP021832 GSK_314.8[ICOS]_H0L0 _Fab-YW243.55.S70[PD-L1]_H0L0_scFv scFv-Fc Heavy Chain
EVQLVESGGGLVQPGGSLRLSCAASGFTFSDSWIHWVRQAPGKGLEWVAWISPYGGSTYYADSVKGRFTISADTSKNTAYLQMNSLRAEDTAVYYCARRHWPGGFDYWGQGTLVTVSSGGGGSGGGGSGGGGSDIQMTQSPSSLSASVGDRVTITCRASQDVSTAVAWYQQKPGKAPKLLIYSASFLYSGVPSRFSGSGSGTDFTLTISSLQPEDFATYYCQQYLYHPATFGQGTKVEIKEPKSSDKTHTCPPCPAPPVAGPSVFLFPPKPKDTLMISRTPEVTCVVVDVKHEDPEVKFNWYVDGVEVHNAKTKPREEQYNSTYRVVSVLTVLHQDWLNGKEYKCKVSNKALPAPIEKTISKAKGQPREPQVYTLPPSREQMTKNQVKLTCLVKGFYPSDIAVEWESNGQPENNYKTTPPVLDSDGSFFLYSKLTVDKSRWQQGNVFSCSVMHEALHNHYTQKSLSLSPGK

SEQ ID NO: 27562 - protein, 118 aa, synthetic construct [sequence omitted]

SEQ ID NO: 27563 - protein, 107 aa, synthetic construct [sequence omitted]

SEQ ID NO: 27564 - protein, 231 aa, synthetic construct; identical to SEQ ID NO: 2397
  REGION 1..231: note = Description of Artificial Sequence: Synthetic polypeptide
  REGION 1..231: note = Fc chain of XENP021832

SEQ ID NO: 27565 - protein, 5 aa, synthetic construct
  REGION 1..5: note = Description of Artificial Sequence: Synthetic peptide
  REGION 1..5: note = XENP021832 vhCDR1
DSWIH

SEQ ID NO: 27566 - protein, 17 aa, synthetic construct
  REGION 1..17: note = Description of Artificial Sequence: Synthetic peptide
  REGION 1..17: note = XENP021832 vhCDR2
WISPYGGSTYYADSVKG

SEQ ID NO: 27567 - protein, 9 aa, synthetic construct
  REGION 1..9: note = Description of Artificial Sequence: Synthetic peptide
  REGION 1..9: note = XENP021832 vhCDR3
RHWPGGFDY

SEQ ID NO: 27568 - protein, 11 aa, synthetic construct
  REGION 1..11: note = Description of Artificial Sequence: Synthetic peptide
  REGION 1..11: note = XENP021832 vlCDR1
RASQDVSTAVA

SEQ ID NO: 27569 - protein, 7 aa, synthetic construct
  REGION 1..7: note = Description of Artificial Sequence: Synthetic peptide
  REGION 1..7: note = XENP021832 vlCDR2
SASFLYS

SEQ ID NO: 27570 - protein, 9 aa, synthetic construct
  REGION 1..9: note = Description of Artificial Sequence: Synthetic peptide
  REGION 1..9: note = XENP021832 vlCDR3
QQYLYHPAT

SEQ ID NO: 27571 - protein, 219 aa, synthetic construct; identical to SEQ ID NO: 26307
  REGION 1..219: note = Description of Artificial Sequence: Synthetic polypeptide
  REGION 1..219: note = XENP021832 GSK_314.8[ICOS]_H0L0 _Fab-YW243.55.S70[PD-L1]_H0L0_scFv Light Chain

SEQ ID NO: 27572 - protein, 112 aa, synthetic construct; identical to SEQ ID NO: 26308
  REGION 1..112: note = Description of Artificial Sequence: Synthetic polypeptide
  REGION 1..112: note = VL of XENP021832

SEQ ID NO: 27573 - protein, 16 aa, synthetic construct
  REGION 1..16: note = Description of Artificial Sequence: Synthetic peptide
  REGION 1..16: note = XENP021832 vlCDR1
RSSKSPLHSNGNIYLY

SEQ ID NO: 27574 - protein, 7 aa, synthetic construct
  REGION 1..7: note = Description of Artificial Sequence: Synthetic peptide
  REGION 1..7: note = XENP021832 vlCDR2
RMSNLAS

SEQ ID NO: 27575 - protein, 9 aa, synthetic construct
  REGION 1..9: note = Description of Artificial Sequence: Synthetic peptide
  REGION 1..9: note = XENP021832 vlCDR3
MQHLEYPYT

SEQ ID NO: 27576 - protein, 453 aa, synthetic construct; identical to SEQ ID NO: 26702
  REGION 1..453: note = Description of Artificial Sequence: Synthetic polypeptide
  REGION 1..453: note = XENP021833 GSK_88.2[ICOS]_H0L0 _Fab-YW243.55.S70[PD-L1]_H0L0_scFv Fab-Fc Heavy Chain

SEQ ID NO: 27577 - protein, 124 aa, synthetic construct; identical to SEQ ID NO: 26313
  REGION 1..124: note = Description of Artificial Sequence: Synthetic polypeptide
  REGION 1..124: note = VH of XENP021833

SEQ ID NO: 27578 - protein, 5 aa, synthetic construct
  REGION 1..5: note = Description of Artificial Sequence: Synthetic peptide
  REGION 1..5: note = XENP021833 vhCDR1
SYWIN

SEQ ID NO: 27579 - protein, 17 aa, synthetic construct
  REGION 1..17: note = Description of Artificial Sequence: Synthetic peptide
  REGION 1..17: note = XENP021833 vhCDR2
NIYPSDSYTNYNQMFKD

SEQ ID NO: 27580 - protein, 15 aa, synthetic construct
  REGION 1..15: note = Description of Artificial Sequence: Synthetic peptide
  REGION 1..15: note = XENP021833 vhCDR3
WNLSYYFDNNYYLDY

SEQ ID NO: 27581 - protein, 471 aa, synthetic construct; identical to SEQ ID NO: 27561
  REGION 1..471: note = Description of Artificial Sequence: Synthetic polypeptide
  REGION 1..471: note = XENP021833 GSK_88.2[ICOS]_H0L0 _Fab-YW243.55.S70[PD-L1]_H0L0_scFv scFv-Fc Heavy Chain

SEQ ID NO: 27582 - protein, 118 aa, synthetic construct [sequence omitted]

SEQ ID NO: 27583 - protein, 107 aa, synthetic construct [sequence omitted]

SEQ ID NO: 27584 - protein, 231 aa, synthetic construct; identical to SEQ ID NO: 2397
  REGION 1..231: note = Description of Artificial Sequence: Synthetic polypeptide
  REGION 1..231: note = Fc chain of XENP021833

SEQ ID NO: 27585 - protein, 5 aa, synthetic construct
  REGION 1..5: note = Description of Artificial Sequence: Synthetic peptide
  REGION 1..5: note = XENP021833 vhCDR1
DSWIH

SEQ ID NO: 27586 - protein, 17 aa, synthetic construct
  REGION 1..17: note = Description of Artificial Sequence: Synthetic peptide
  REGION 1..17: note = XENP021833 vhCDR2
WISPYGGSTYYADSVKG

SEQ ID NO: 27587 - protein, 9 aa, synthetic construct
  REGION 1..9: note = Description of Artificial Sequence: Synthetic peptide
  REGION 1..9: note = XENP021833 vhCDR3
RHWPGGFDY

SEQ ID NO: 27588 - protein, 11 aa, synthetic construct
  REGION 1..11: note = Description of Artificial Sequence: Synthetic peptide
  REGION 1..11: note = XENP021833 vlCDR1
RASQDVSTAVA

SEQ ID NO: 27589 - protein, 7 aa, synthetic construct
  REGION 1..7: note = Description of Artificial Sequence: Synthetic peptide
  REGION 1..7: note = XENP021833 vlCDR2
SASFLYS

SEQ ID NO: 27590 - protein, 9 aa, synthetic construct
  REGION 1..9: note = Description of Artificial Sequence: Synthetic peptide
  REGION 1..9: note = XENP021833 vlCDR3
QQYLYHPAT

SEQ ID NO: 27591 - protein, 219 aa, synthetic construct; identical to SEQ ID NO: 26317
  REGION 1..219: note = Description of Artificial Sequence: Synthetic polypeptide
  REGION 1..219: note = XENP021833 GSK_88.2[ICOS]_H0L0 _Fab-YW243.55.S70[PD-L1]_H0L0_scFv Light Chain

SEQ ID NO: 27592 - protein, 112 aa, synthetic construct; identical to SEQ ID NO: 26318
  REGION 1..112: note = Description of Artificial Sequence: Synthetic polypeptide
  REGION 1..112: note = VL of XENP021833

SEQ ID NO: 27593 - protein, 16 aa, synthetic construct
  REGION 1..16: note = Description of Artificial Sequence: Synthetic peptide
  REGION 1..16: note = XENP021833 vlCDR1
RSSKSLLHSNGNTYLY

SEQ ID NO: 27594 - protein, 7 aa, synthetic construct
  REGION 1..7: note = Description of Artificial Sequence: Synthetic peptide
  REGION 1..7: note = XENP021833 vlCDR2
RMSNLAS

SEQ ID NO: 27595 - protein, 9 aa, synthetic construct
  REGION 1..9: note = Description of Artificial Sequence: Synthetic peptide
  REGION 1..9: note = XENP021833 vlCDR3
MQHLEYPWT

SEQ ID NO: 27596 - protein, 454 aa, synthetic construct; identical to SEQ ID NO: 26722
  REGION 1..454: note = Description of Artificial Sequence: Synthetic polypeptide
  REGION 1..454: note = XENP021834 jMab-138[ICOS]_H0L0 _Fab-YW243.55.S70[PD-L1]_H0L0_scFv Fab-Fc Heavy Chain

SEQ ID NO: 27597 - protein, 125 aa, synthetic construct; identical to SEQ ID NO: 26323
  REGION 1..125: note = Description of Artificial Sequence: Synthetic polypeptide
  REGION 1..125: note = VH of XENP021834

SEQ ID NO: 27598 - protein, 5 aa, synthetic construct
  REGION 1..5: note = Description of Artificial Sequence: Synthetic peptide
  REGION 1..5: note = XENP021834 vhCDR1
SYDMH

SEQ ID NO: 27599 - protein, 16 aa, synthetic construct
  REGION 1..16: note = Description of Artificial Sequence: Synthetic peptide
  REGION 1..16: note = XENP021834 vhCDR2
AIGTAGDTYYPGSVKG

SEQ ID NO: 27600 - protein, 17 aa, synthetic construct
  REGION 1..17: note = Description of Artificial Sequence: Synthetic peptide
  REGION 1..17: note = XENP021834 vhCDR3
DNRKVTHEHYYYYGMDV

SEQ ID NO: 27601 - protein, 471 aa, synthetic construct; identical to SEQ ID NO: 27561
  REGION 1..471: note = Description of Artificial Sequence: Synthetic polypeptide
  REGION 1..471: note = XENP021834 jMab-138[ICOS]_H0L0 _Fab-YW243.55.S70[PD-L1]_H0L0_scFv scFv-Fc Heavy Chain

SEQ ID NO: 27602 - protein, 118 aa, synthetic construct [sequence omitted]

SEQ ID NO: 27603 - protein, 107 aa, synthetic construct [sequence omitted]

SEQ ID NO: 27604 - protein, 231 aa, synthetic construct; identical to SEQ ID NO: 2397
  REGION 1..231: note = Description of Artificial Sequence: Synthetic polypeptide
  REGION 1..231: note = Fc chain of XENP021834

SEQ ID NO: 27605 - protein, 5 aa, synthetic construct
  REGION 1..5: note = Description of Artificial Sequence: Synthetic peptide
  REGION 1..5: note = XENP021834 vhCDR1
DSWIH

SEQ ID NO: 27606 - protein, 17 aa, synthetic construct
  REGION 1..17: note = Description of Artificial Sequence: Synthetic peptide
  REGION 1..17: note = XENP021834 vhCDR2
WISPYGGSTYYADSVKG

SEQ ID NO: 27607 - protein, 9 aa, synthetic construct
  REGION 1..9: note = Description of Artificial Sequence: Synthetic peptide
  REGION 1..9: note = XENP021834 vhCDR3
RHWPGGFDY

SEQ ID NO: 27608 - protein, 11 aa, synthetic construct
  REGION 1..11: note = Description of Artificial Sequence: Synthetic peptide
  REGION 1..11: note = XENP021834 vlCDR1
RASQDVSTAVA

SEQ ID NO: 27609 - protein, 7 aa, synthetic construct
  REGION 1..7: note = Description of Artificial Sequence: Synthetic peptide
  REGION 1..7: note = XENP021834 vlCDR2
SASFLYS

SEQ ID NO: 27610 - protein, 9 aa, synthetic construct
  REGION 1..9: note = Description of Artificial Sequence: Synthetic peptide
  REGION 1..9: note = XENP021834 vlCDR3
QQYLYHPAT

SEQ ID NO: 27611 - protein, 216 aa, synthetic construct; identical to SEQ ID NO: 26327
  REGION 1..216: note = Description of Artificial Sequence: Synthetic polypeptide
  REGION 1..216: note = XENP021834 jMab-138[ICOS]_H0L0 _Fab-YW243.55.S70[PD-L1]_H0L0_scFv Light Chain

SEQ ID NO: 27612 - protein, 109 aa, synthetic construct; identical to SEQ ID NO: 26328
  REGION 1..109: note = Description of Artificial Sequence: Synthetic polypeptide
  REGION 1..109: note = VL of XENP021834

SEQ ID NO: 27613 - protein, 12 aa, synthetic construct
  REGION 1..12: note = Description of Artificial Sequence: Synthetic peptide
  REGION 1..12: note = XENP021834 vlCDR1
RASQNIRSSYLA

SEQ ID NO: 27614 - protein, 7 aa, synthetic construct
  REGION 1..7: note = Description of Artificial Sequence: Synthetic peptide
  REGION 1..7: note = XENP021834 vlCDR2
GASSRAT

SEQ ID NO: 27615 - protein, 10 aa, synthetic construct
  REGION 1..10: note = Description of Artificial Sequence: Synthetic peptide
  REGION 1..10: note = XENP021834 vlCDR3
QQFGSSPMCS

SEQ ID NO: 27616 - protein, 454 aa, synthetic construct; identical to SEQ ID NO: 26742
  REGION 1..454: note = Description of Artificial Sequence: Synthetic polypeptide
  REGION 1..454: note = XENP021835 jMab-139[ICOS]_H0L0 _Fab-YW243.55.S70[PD-L1]_H0L0_scFv Fab-Fc Heavy Chain

SEQ ID NO: 27617 - protein, 125 aa, synthetic construct; identical to SEQ ID NO: 26333
  REGION 1..125: note = Description of Artificial Sequence: Synthetic polypeptide
  REGION 1..125: note = VH of XENP021835

SEQ ID NO: 27618 - protein, 5 aa, synthetic construct
  REGION 1..5: note = Description of Artificial Sequence: Synthetic peptide
  REGION 1..5: note = XENP021835 vhCDR1
SYDMH

SEQ ID NO: 27619 - protein, 16 aa, synthetic construct
  REGION 1..16: note = Description of Artificial Sequence: Synthetic peptide
  REGION 1..16: note = XENP021835 vhCDR2
AIGTAGDTYYPGSVKG

SEQ ID NO: 27620 - protein, 17 aa, synthetic construct
  REGION 1..17: note = Description of Artificial Sequence: Synthetic peptide
  REGION 1..17: note = XENP021835 vhCDR3
DKRTVTHEHYYYYGMDV

SEQ ID NO: 27621 - protein, 471 aa, synthetic construct; identical to SEQ ID NO: 27561
  REGION 1..471: note = Description of Artificial Sequence: Synthetic polypeptide
  REGION 1..471: note = XENP021835 jMab-139[ICOS]_H0L0 _Fab-YW243.55.S70[PD-L1]_H0L0_scFv scFv-Fc Heavy Chain

SEQ ID NO: 27622 - protein, 118 aa, synthetic construct [sequence omitted]

SEQ ID NO: 27623 - protein, 107 aa, synthetic construct [sequence omitted]

SEQ ID NO: 27624 - protein, 231 aa, synthetic construct; identical to SEQ ID NO: 2397
  REGION 1..231: note = Description of Artificial Sequence: Synthetic polypeptide
  REGION 1..231: note = Fc chain of XENP021835

SEQ ID NO: 27625 - protein, 5 aa, synthetic construct
  REGION 1..5: note = Description of Artificial Sequence: Synthetic peptide
  REGION 1..5: note = XENP021835 vhCDR1
DSWIH

SEQ ID NO: 27626 - protein, 17 aa, synthetic construct
  REGION 1..17: note = Description of Artificial Sequence: Synthetic peptide
  REGION 1..17: note = XENP021835 vhCDR2
WISPYGGSTYYADSVKG

SEQ ID NO: 27627 - protein, 9 aa, synthetic construct
  REGION 1..9: note = Description of Artificial Sequence: Synthetic peptide
  REGION 1..9: note = XENP021835 vhCDR3
RHWPGGFDY

SEQ ID NO: 27628 - protein, 11 aa, synthetic construct
  REGION 1..11: note = Description of Artificial Sequence: Synthetic peptide
  REGION 1..11: note = XENP021835 vlCDR1
RASQDVSTAVA

SEQ ID NO: 27629 - protein, 7 aa, synthetic construct
  REGION 1..7: note = Description of Artificial Sequence: Synthetic peptide
  REGION 1..7: note = XENP021835 vlCDR2
SASFLYS

SEQ ID NO: 27630 - protein, 9 aa, synthetic construct
  REGION 1..9: note = Description of Artificial Sequence: Synthetic peptide
  REGION 1..9: note = XENP021835 vlCDR3
QQYLYHPAT

SEQ ID NO: 27631 - protein, 216 aa, synthetic construct; identical to SEQ ID NO: 26337
  REGION 1..216: note = Description of Artificial Sequence: Synthetic polypeptide
  REGION 1..216: note = XENP021835 jMab-139[ICOS]_H0L0 _Fab-YW243.55.S70[PD-L1]_H0L0_scFv Light Chain

SEQ ID NO: 27632 - protein, 109 aa, synthetic construct; identical to SEQ ID NO: 26338
  REGION 1..109: note = Description of Artificial Sequence: Synthetic polypeptide
  REGION 1..109: note = VL of XENP021835

SEQ ID NO: 27633 - protein, 12 aa, synthetic construct
  REGION 1..12: note = Description of Artificial Sequence: Synthetic peptide
  REGION 1..12: note = XENP021835 vlCDR1
RASQSISSSSLA

SEQ ID NO: 27634 - protein, 7 aa, synthetic construct
  REGION 1..7: note = Description of Artificial Sequence: Synthetic peptide
  REGION 1..7: note = XENP021835 vlCDR2
GASSRAT

SEQ ID NO: 27635 - protein, 10 aa, synthetic construct
  REGION 1..10: note = Description of Artificial Sequence: Synthetic peptide
  REGION 1..10: note = XENP021835 vlCDR3
QQFGSSPMCS

SEQ ID NO: 27636 - protein, 454 aa, synthetic construct; identical to SEQ ID NO: 26442
  REGION 1..454: note = Description of Artificial Sequence: Synthetic polypeptide
  REGION 1..454: note = XENP021836 jMab-136[ICOS]_H0L0 _Fab-YW243.55.S70[PD-L1]_H0L0_scFv Fab-Fc Heavy Chain

SEQ ID NO: 27637 - protein, 125 aa, synthetic construct; identical to SEQ ID NO: 26293
  REGION 1..125: note = Description of Artificial Sequence: Synthetic polypeptide
  REGION 1..125: note = VH of XENP021836

SEQ ID NO: 27638 - protein, 5 aa, synthetic construct
  REGION 1..5: note = Description of Artificial Sequence: Synthetic peptide
  REGION 1..5: note = XENP021836 vhCDR1
GYYMH

SEQ ID NO: 27639 - protein, 17 aa, synthetic construct
  REGION 1..17: note = Description of Artificial Sequence: Synthetic peptide
  REGION 1..17: note = XENP021836 vhCDR2
WINPHSGGTNYAQKFQG

SEQ ID NO: 27640 - protein, 16 aa, synthetic construct
  REGION 1..16: note = Description of Artificial Sequence: Synthetic peptide
  REGION 1..16: note = XENP021836 vhCDR3
TYYYDSSGYYHDAFDI

SEQ ID NO: 27641 - protein, 471 aa, synthetic construct; identical to SEQ ID NO: 27561
  REGION 1..471: note = Description of Artificial Sequence: Synthetic polypeptide
  REGION 1..471: note = XENP021836 jMab-136[ICOS]_H0L0 _Fab-YW243.55.S70[PD-L1]_H0L0_scFv scFv-Fc Heavy Chain

SEQ ID NO: 27642 - protein, 118 aa, synthetic construct [sequence omitted]

SEQ ID NO: 27643 - protein, 107 aa, synthetic construct [sequence omitted]

SEQ ID NO: 27644 - protein, 231 aa, synthetic construct; identical to SEQ ID NO: 2397
  REGION 1..231: note = Description of Artificial Sequence: Synthetic polypeptide
  REGION 1..231: note = Fc chain of XENP021836

SEQ ID NO: 27645 - protein, 5 aa, synthetic construct
  REGION 1..5: note = Description of Artificial Sequence: Synthetic peptide
  REGION 1..5: note = XENP021836 vhCDR1
DSWIH

SEQ ID NO: 27646 - protein, 17 aa, synthetic construct
  REGION 1..17: note = Description of Artificial Sequence: Synthetic peptide
  REGION 1..17: note = XENP021836 vhCDR2
WISPYGGSTYYADSVKG

SEQ ID NO: 27647 - protein, 9 aa, synthetic construct
  REGION 1..9: note = Description of Artificial Sequence: Synthetic peptide
  REGION 1..9: note = XENP021836 vhCDR3
RHWPGGFDY

SEQ ID NO: 27648 - protein, 11 aa, synthetic construct
  REGION 1..11: note = Description of Artificial Sequence: Synthetic peptide
  REGION 1..11: note = XENP021836 vlCDR1
RASQDVSTAVA

SEQ ID NO: 27649 - protein, 7 aa, synthetic construct
  REGION 1..7: note = Description of Artificial Sequence: Synthetic peptide
  REGION 1..7: note = XENP021836 vlCDR2
SASFLYS

SEQ ID NO: 27650 - protein, 9 aa, synthetic construct
  REGION 1..9: note = Description of Artificial Sequence: Synthetic peptide
  REGION 1..9: note = XENP021836 vlCDR3
QQYLYHPAT

SEQ ID NO: 27651 - protein, 214 aa, synthetic construct; identical to SEQ ID NO: 26297
  REGION 1..214: note = Description of Artificial Sequence: Synthetic polypeptide
  REGION 1..214: note = XENP021836 jMab-136[ICOS]_H0L0 _Fab-YW243.55.S70[PD-L1]_H0L0_scFv Light Chain

SEQ ID NO: 27652 - protein, 107 aa, synthetic construct; identical to SEQ ID NO: 26298
  REGION 1..107: note = Description of Artificial Sequence: Synthetic polypeptide
  REGION 1..107: note = VL of XENP021836

SEQ ID NO: 27653 - protein, 11 aa, synthetic construct
  REGION 1..11: note = Description of Artificial Sequence: Synthetic peptide
  REGION 1..11: note = XENP021836 vlCDR1
RASQGISRLLA

SEQ ID NO: 27654 - protein, 7 aa, synthetic construct
  REGION 1..7: note = Description of Artificial Sequence: Synthetic peptide
  REGION 1..7: note = XENP021836 vlCDR2
VASSLQS

SEQ ID NO: 27655 - protein, 9 aa, synthetic construct
  REGION 1..9: note = Description of Artificial Sequence: Synthetic peptide
  REGION 1..9: note = XENP021836 vlCDR3
QQANSFPWT

SEQ ID NO: 27656 - protein, 442 aa, synthetic construct; identical to SEQ ID NO: 26802
  REGION 1..442: note = Description of Artificial Sequence: Synthetic polypeptide
  REGION 1..442: note = XENP018920 nivolumab[PD-1]_H0L0 _Fab-[anti-ICOS]_H0L0_scFv Fab-Fc Heavy Chain

SEQ ID NO: 27657 - protein, 113 aa, synthetic construct [sequence omitted]

SEQ ID NO: 27658 - protein, 5 aa, synthetic construct
  REGION 1..5: note = Description of Artificial Sequence: Synthetic peptide
  REGION 1..5: note = XENP018920 vhCDR1
NSGMH

SEQ ID NO: 27659 - protein, 17 aa, synthetic construct
  REGION 1..17: note = Description of Artificial Sequence: Synthetic peptide
  REGION 1..17: note = XENP018920 vhCDR2
VIWYDGSKRYYADSVKG

SEQ ID NO: 27660 - protein, 4 aa, synthetic construct
  REGION 1..4: note = Description of Artificial Sequence: Synthetic peptide
  REGION 1..4: note = XENP018920 vhCDR3
NDDY

SEQ ID NO: 27661 - protein, 471 aa, synthetic construct; identical to SEQ ID NO: 26807
  REGION 1..471: note = Description of Artificial Sequence: Synthetic polypeptide
  REGION 1..471: note = XENP018920 nivolumab[PD-1]_H0L0 _Fab-[anti-ICOS]_H0L0_scFv scFv-Fc Heavy Chain

SEQ ID NO: 27662 - protein, 113 aa, synthetic construct; identical to SEQ ID NO: 10886
  REGION 1..113: note = Description of Artificial Sequence: Synthetic polypeptide
  REGION 1..113: note = VH of XENP018920

SEQ ID NO: 27663 - protein, 107 aa, synthetic construct [sequence omitted]

SEQ ID NO: 27664 - protein, 231 aa, synthetic construct; identical to SEQ ID NO: 2397
  REGION 1..231: note = Description of Artificial Sequence: Synthetic polypeptide
  REGION 1..231: note = Fc chain of XENP018920

SEQ ID NO: 27665 - protein, 5 aa, synthetic construct
  REGION 1..5: note = Description of Artificial Sequence: Synthetic peptide
  REGION 1..5: note = XENP018920 vhCDR1
NSGMH

SEQ ID NO: 27666 - protein, 17 aa, synthetic construct
  REGION 1..17: note = Description of Artificial Sequence: Synthetic peptide
  REGION 1..17: note = XENP018920 vhCDR2
VIWYDGSKRYYADSVKG

SEQ ID NO: 27667 - protein, 4 aa, synthetic construct
  REGION 1..4: note = Description of Artificial Sequence: Synthetic peptide
  REGION 1..4: note = XENP018920 vhCDR3
NDDY

SEQ ID NO: 27668 - protein, 11 aa, synthetic construct
  REGION 1..11: note = Description of Artificial Sequence: Synthetic peptide
  REGION 1..11: note = XENP018920 vlCDR1
RASQSVSSYLA

SEQ ID NO: 27669 - protein, 7 aa, synthetic construct
  REGION 1..7: note = Description of Artificial Sequence: Synthetic peptide
  REGION 1..7: note = XENP018920 vlCDR2
DASNRAT

SEQ ID NO: 27670 - protein, 9 aa, synthetic construct
  REGION 1..9: note = Description of Artificial Sequence: Synthetic peptide
  REGION 1..9: note = XENP018920 vlCDR3
QQSSNWPRT

SEQ ID NO: 27671 - protein, 214 aa, synthetic construct; identical to SEQ ID NO: 16146
  REGION 1..214: note = Description of Artificial Sequence: Synthetic polypeptide
  REGION 1..214: note = XENP018920 nivolumab[PD-1]_H0L0 _Fab-[anti-ICOS]_H0L0_scFv Light Chain

SEQ ID NO: 27672 - protein, 107 aa, synthetic construct [sequence omitted]

SEQ ID NO: 27673 - protein, 11 aa, synthetic construct
  REGION 1..11: note = Description of Artificial Sequence: Synthetic peptide
  REGION 1..11: note = XENP018920 vlCDR1
RASQSVSSYLA

SEQ ID NO: 27674 - protein, 7 aa, synthetic construct
  REGION 1..7: note = Description of Artificial Sequence: Synthetic peptide
  REGION 1..7: note = XENP018920 vlCDR2
DASNRAT

SEQ ID NO: 27675 - protein, 9 aa, synthetic construct
  REGION 1..9: note = Description of Artificial Sequence: Synthetic peptide
  REGION 1..9: note = XENP018920 vlCDR3
QQSSNWPRT

SEQ ID NO: 27676 - protein, 456 aa, synthetic construct; identical to SEQ ID NO: 26822
  REGION 1..456: note = Description of Artificial Sequence: Synthetic polypeptide
  REGION 1..456: note = XENP024130 LOPD180[PD-1]_H1L1_Fab-[anti-ICOS]_H0L0 _scFv Fab-Fc Heavy Chain

SEQ ID NO: 27677 - protein, 127 aa, synthetic construct; identical to SEQ ID NO: 26823
  REGION 1..127: note = Description of Artificial Sequence: Synthetic polypeptide
  REGION 1..127: note = VH of XENP024130

SEQ ID NO: 27678 - protein, 7 aa, synthetic construct
  REGION 1..7: note = Description of Artificial Sequence: Synthetic peptide
  REGION 1..7: note = XENP024130 vhCDR1
SGAYYWS

SEQ ID NO: 27679 - protein, 16 aa, synthetic construct
  REGION 1..16: note = Description of Artificial Sequence: Synthetic peptide
  REGION 1..16: note = XENP024130 vhCDR2
YIYYNGNTYYNPSLRS

SEQ ID NO: 27680 - protein, 17 aa, synthetic construct
  REGION 1..17: note = Description of Artificial Sequence: Synthetic peptide
  REGION 1..17: note = XENP024130 vhCDR3
ASDYVWGGYHYFDAFDL

SEQ ID NO: 27681 - protein, 483 aa, synthetic construct; identical to SEQ ID NO: 26827
  REGION 1..483: note = Description of Artificial Sequence: Synthetic polypeptide
  REGION 1..483: note = XENP024130 LOPD180[PD-1]_H1L1_Fab-[anti-ICOS]_H0L0 _scFv scFv-Fc Heavy Chain

SEQ ID NO: 27682 - protein, 125 aa, synthetic construct; identical to SEQ ID NO: 26293
  REGION 1..125: note = Description of Artificial Sequence: Synthetic polypeptide
  REGION 1..125: note = VH of XENP024130

SEQ ID NO: 27683 - protein, 107 aa, synthetic construct; identical to SEQ ID NO: 26298
  REGION 1..107: note = Description of Artificial Sequence: Synthetic polypeptide
  REGION 1..107: note = VL of XENP024130

SEQ ID NO: 27684 - protein, 231 aa, synthetic construct; identical to SEQ ID NO: 2397
  REGION 1..231: note = Description of Artificial Sequence: Synthetic polypeptide
  REGION 1..231: note = Fc chain of XENP024130

SEQ ID NO: 27685 - protein, 5 aa, synthetic construct
  REGION 1..5: note = Description of Artificial Sequence: Synthetic peptide
  REGION 1..5: note = XENP024130 vhCDR1
GYYMH

SEQ ID NO: 27686 - protein, 17 aa, synthetic construct
  REGION 1..17: note = Description of Artificial Sequence: Synthetic peptide
  REGION 1..17: note = XENP024130 vhCDR2
WINPHSGGTNYAQKFQG

SEQ ID NO: 27687 - protein, 16 aa, synthetic construct
  REGION 1..16: note = Description of Artificial Sequence: Synthetic peptide
  REGION 1..16: note = XENP024130 vhCDR3
TYYYDSSGYYHDAFDI

SEQ ID NO: 27688 - protein, 11 aa, synthetic construct
  REGION 1..11: note = Description of Artificial Sequence: Synthetic peptide
  REGION 1..11: note = XENP024130 vlCDR1
RASQGISRLLA

SEQ ID NO: 27689 - protein, 7 aa, synthetic construct
  REGION 1..7: note = Description of Artificial Sequence: Synthetic peptide
  REGION 1..7: note = XENP024130 vlCDR2
VASSLQS

SEQ ID NO: 27690 - protein, 9 aa, synthetic construct
  REGION 1..9: note = Description of Artificial Sequence: Synthetic peptide
  REGION 1..9: note = XENP024130 vlCDR3
QQANSFPWT

SEQ ID NO: 27691 - protein, 216 aa, synthetic construct; identical to SEQ ID NO: 26837
  REGION 1..216: note = Description of Artificial Sequence: Synthetic polypeptide
  REGION 1..216: note = XENP024130 LOPD180[PD-1]_H1L1_Fab-[anti-ICOS]_H0L0 _scFv Light Chain

SEQ ID NO: 27692 - protein, 110 aa, synthetic construct; identical to SEQ ID NO: 26838
  REGION 1..110: note = Description of Artificial Sequence: Synthetic polypeptide
  REGION 1..110: note = VL of XENP024130

SEQ ID NO: 27693 - protein, 13 aa, synthetic construct
  REGION 1..13: note = Description of Artificial Sequence: Synthetic peptide
  REGION 1..13: note = XENP024130 vlCDR1
SGSNSNIGSNSVN

SEQ ID NO: 27694 - protein, 7 aa, synthetic construct
  REGION 1..7: note = Description of Artificial Sequence: Synthetic peptide
  REGION 1..7: note = XENP024130 vlCDR2
GNNQRPS

SEQ ID NO: 27695 - protein, 11 aa, synthetic construct
  REGION 1..11: note = Description of Artificial Sequence: Synthetic peptide
  REGION 1..11: note = XENP024130 vlCDR3
AAWDDSLNGPV

SEQ ID NO: 27696 - protein, 452 aa, synthetic construct; identical to SEQ ID NO: 26682
  REGION 1..452: note = Description of Artificial Sequence: Synthetic polypeptide
  REGION 1..452: note = XENP021828 GSK_314.8[ICOS]_H0L0 _Fab-1G6_L1.194_H1.279_scFv Fab-Fc Heavy Chain

SEQ ID NO: 27697 - protein, 123 aa, synthetic construct; identical to SEQ ID NO: 26303
  REGION 1..123: note = Description of Artificial Sequence: Synthetic polypeptide
  REGION 1..123: note = VH of XENP021828

SEQ ID NO: 27698 - protein, 5 aa, synthetic construct
  REGION 1..5: note = Description of Artificial Sequence: Synthetic peptide
  REGION 1..5: note = XENP021828 vhCDR1
TYWMH

SEQ ID NO: 27699 - protein, 17 aa, synthetic construct
  REGION 1..17: note = Description of Artificial Sequence: Synthetic peptide
  REGION 1..17: note = XENP021828 vhCDR2
EIDPSDSYVNYNQNFKG

SEQ ID NO: 27700 - protein, 14 aa, synthetic construct
  REGION 1..14: note = Description of Artificial Sequence: Synthetic peptide
  REGION 1..14: note = XENP021828 vhCDR3
SPDYYGTSLAWFDY

SEQ ID NO: 27701 - protein, 480 aa, synthetic construct; identical to SEQ ID NO: 2870
  REGION 1..480: note = Description of Artificial Sequence: Synthetic polypeptide
  REGION 1..480: note = XENP021828 GSK_314.8[ICOS]_H0L0 _Fab-1G6_L1.194_H1.279_scFv scFv-Fc Heavy Chain

SEQ ID NO: 27702 - protein, 107 aa, synthetic construct; identical to SEQ ID NO: 2871
  REGION 1..107: note = Description of Artificial Sequence: Synthetic polypeptide
  REGION 1..107: note = VH of XENP021828

SEQ ID NO: 27703 - protein, 122 aa, synthetic construct; identical to SEQ ID NO: 2872
  REGION 1..122: note = Description of Artificial Sequence: Synthetic polypeptide
  REGION 1..122: note = VL of XENP021828

SEQ ID NO: 27704 - protein, 231 aa, synthetic construct; identical to SEQ ID NO: 2397
  REGION 1..231: note = Description of Artificial Sequence: Synthetic polypeptide
  REGION 1..231: note = Fc chain of XENP021828

SEQ ID NO: 27705 - protein, 11 aa, synthetic construct
  REGION 1..11: note = Description of Artificial Sequence: Synthetic peptide
  REGION 1..11: note = XENP021828 vhCDR1
RASQSVGNDVA

SEQ ID NO: 27706 - protein, 7 aa, synthetic construct
  REGION 1..7: note = Description of Artificial Sequence: Synthetic peptide
  REGION 1..7: note = XENP021828 vhCDR2
YASHRYT

SEQ ID NO: 27707 - protein, 9 aa, synthetic construct
  REGION 1..9: note = Description of Artificial Sequence: Synthetic peptide
  REGION 1..9: note = XENP021828 vhCDR3
QQDFSSPRT

SEQ ID NO: 27708 - protein, 5 aa, synthetic construct
  REGION 1..5: note = Description of Artificial Sequence: Synthetic peptide
  REGION 1..5: note = XENP021828 vlCDR1
NYWMN

SEQ ID NO: 27709 - protein, 19 aa, synthetic construct
  REGION 1..19: note = Description of Artificial Sequence: Synthetic peptide
  REGION 1..19: note = XENP021828 vlCDR2
EIRLYSNNYATHYAESVKG

SEQ ID NO: 27710 - protein, 11 aa, synthetic construct
  REGION 1..11: note = Description of Artificial Sequence: Synthetic peptide
  REGION 1..11: note = XENP021828 vlCDR3
YYGNYGGYFDV

SEQ ID NO: 27711 - protein, 219 aa, synthetic construct; identical to SEQ ID NO: 26307
  REGION 1..219: note = Description of Artificial Sequence: Synthetic polypeptide
  REGION 1..219: note = XENP021828 GSK_314.8[ICOS]_H0L0 _Fab-1G6_L1.194_H1.279_scFv Light Chain

SEQ ID NO: 27712 - protein, 112 aa, synthetic construct; identical to SEQ ID NO: 26308
  REGION 1..112: note = Description of Artificial Sequence: Synthetic polypeptide
  REGION 1..112: note = VL of XENP021828

SEQ ID NO: 27713 - protein, 16 aa, synthetic construct
  REGION 1..16: note = Description of Artificial Sequence: Synthetic peptide
  REGION 1..16: note = XENP021828 vlCDR1
RSSKSPLHSNGNIYLY

SEQ ID NO: 27714 - protein, 7 aa, synthetic construct
  REGION 1..7: note = Description of Artificial Sequence: Synthetic peptide
  REGION 1..7: note = XENP021828 vlCDR2
RMSNLAS

SEQ ID NO: 27715 - protein, 9 aa, synthetic construct
  REGION 1..9: note = Description of Artificial Sequence: Synthetic peptide
  REGION 1..9: note = XENP021828 vlCDR3
MQHLEYPYT

SEQ ID NO: 27716 - protein, 453 aa, synthetic construct; identical to SEQ ID NO: 26702
  REGION 1..453: note = Description of Artificial Sequence: Synthetic polypeptide
  REGION 1..453: note = XENP021829 GSK_88.2[ICOS]_H0L0 _Fab-1G6_L1.194_H1.279_scFv Fab-Fc Heavy Chain

SEQ ID NO: 27717 - protein, 124 aa, synthetic construct; identical to SEQ ID NO: 26313
  REGION 1..124: note = Description of Artificial Sequence: Synthetic polypeptide
  REGION 1..124: note = VH of XENP021829

SEQ ID NO: 27718 - protein, 5 aa, synthetic construct
  REGION 1..5: note = Description of Artificial Sequence: Synthetic peptide
  REGION 1..5: note = XENP021829 vhCDR1
SYWIN

SEQ ID NO: 27719 - protein, 17 aa, synthetic construct
  REGION 1..17: note = Description of Artificial Sequence: Synthetic peptide
  REGION 1..17: note = XENP021829 vhCDR2
NIYPSDSYTNYNQMFKD

SEQ ID NO: 27720 - protein, 15 aa, synthetic construct
  REGION 1..15: note = Description of Artificial Sequence: Synthetic peptide
  REGION 1..15: note = XENP021829 vhCDR3
WNLSYYFDNNYYLDY

SEQ ID NO: 27721 - protein, 480 aa, synthetic construct; identical to SEQ ID NO: 2870
  REGION 1..480: note = Description of Artificial Sequence: Synthetic polypeptide
  REGION 1..480: note = XENP021829 GSK_88.2[ICOS]_H0L0 _Fab-1G6_L1.194_H1.279_scFv scFv-Fc Heavy Chain

SEQ ID NO: 27722 - protein, 107 aa, synthetic construct; identical to SEQ ID NO: 2871
  REGION 1..107: note = Description of Artificial Sequence: Synthetic polypeptide
  REGION 1..107: note = VH of XENP021829

SEQ ID NO: 27723 - protein, 122 aa, synthetic construct; identical to SEQ ID NO: 2872
  REGION 1..122: note = Description of Artificial Sequence: Synthetic polypeptide
  REGION 1..122: note = VL of XENP021829

SEQ ID NO: 27724 - protein, 231 aa, synthetic construct; identical to SEQ ID NO: 2397
  REGION 1..231: note = Description of Artificial Sequence: Synthetic polypeptide
  REGION 1..231: note = Fc chain of XENP021829

SEQ ID NO: 27725 - protein, 11 aa, synthetic construct
  REGION 1..11: note = Description of Artificial Sequence: Synthetic peptide
  REGION 1..11: note = XENP021829 vhCDR1
RASQSVGNDVA

SEQ ID NO: 27726 - protein, 7 aa, synthetic construct
  REGION 1..7: note = Description of Artificial Sequence: Synthetic peptide
  REGION 1..7: note = XENP021829 vhCDR2
YASHRYT

SEQ ID NO: 27727 - protein, 9 aa, synthetic construct
  REGION 1..9: note = Description of Artificial Sequence: Synthetic peptide
  REGION 1..9: note = XENP021829 vhCDR3
QQDFSSPRT

SEQ ID NO: 27728 - protein, 5 aa, synthetic construct
  REGION 1..5: note = Description of Artificial Sequence: Synthetic peptide
  REGION 1..5: note = XENP021829 vlCDR1
NYWMN

SEQ ID NO: 27729 - protein, 19 aa, synthetic construct
  REGION 1..19: note = Description of Artificial Sequence: Synthetic peptide
  REGION 1..19: note = XENP021829 vlCDR2
EIRLYSNNYATHYAESVKG

SEQ ID NO: 27730 - protein, 11 aa, synthetic construct
  REGION 1..11: note = Description of Artificial Sequence: Synthetic peptide
  REGION 1..11: note = XENP021829 vlCDR3
YYGNYGGYFDV

SEQ ID NO: 27731 - protein, 219 aa, synthetic construct; identical to SEQ ID NO: 26317
  REGION 1..219: note = Description of Artificial Sequence: Synthetic polypeptide
  REGION 1..219: note = XENP021829 GSK_88.2[ICOS]_H0L0 _Fab-1G6_L1.194_H1.279_scFv Light Chain

SEQ ID NO: 27732 - protein, 112 aa, synthetic construct; identical to SEQ ID NO: 26318
  REGION 1..112: note = Description of Artificial Sequence: Synthetic polypeptide
  REGION 1..112: note = VL of XENP021829
